United States Patent Application Publication US 2024/0018598 A1 - sequence listing, part 2

SEQ ID NO: 21994 - DNA, 39 bp, synthetic construct
  misc_feature 1..39: note = Probe
  source 1..39: mol_type = other DNA
gggtggcgccgtggcttagttggttaaagcgcctgtcta

SEQ ID NO: 21995 - DNA, 40 bp, synthetic construct
  misc_feature 1..40: note = Probe
  source 1..40: mol_type = other DNA
gggtggcgccgtggcttagttggttaaagcgcctgtctag

SEQ ID NO: 21996 - DNA, 41 bp, synthetic construct
  misc_feature 1..41: note = Probe
  source 1..41: mol_type = other DNA
gggtggcgccgtggcttagttggttaaagcgcctgtctagt

SEQ ID NO: 21997 - DNA, 42 bp, synthetic construct
  misc_feature 1..42: note = Probe
  source 1..42: mol_type = other DNA
gggtggcgccgtggcttagttggttaaagcgcctgtctagta

SEQ ID NO: 21998 - DNA, 41 bp, synthetic construct
  misc_feature 1..41: note = Probe
  source 1..41: mol_type = other DNA
gggtggctctgtggcgcaatggatagcgcattggacttcta

SEQ ID NO: 21999 - DNA, 28 bp, synthetic construct
  misc_feature 1..28: note = Probe
  source 1..28: mol_type = other DNA
gggtggttcagtggtagaattctcgcct

SEQ ID NO: 22000 - DNA, 30 bp, synthetic construct; identical to SEQ ID NO: 6659
  misc_feature 1..30: note = Probe
  source 1..30: mol_type = other DNA

SEQ ID NO: 22001 - DNA, 31 bp, synthetic construct; identical to SEQ ID NO: 1376
  misc_feature 1..31: note = Probe
  source 1..31: mol_type = other DNA

SEQ ID NO: 22002 - DNA, 23 bp, synthetic construct
  misc_feature 1..23: note = Probe
  source 1..23: mol_type = other DNA
gggttaggcctctttttaccagc

SEQ ID NO: 22003 - DNA, 24 bp, synthetic construct
  misc_feature 1..24: note = Probe
  source 1..24: mol_type = other DNA
gggttaggcctctttttaccagct

SEQ ID NO: 22004 - DNA, 26 bp, synthetic construct
  misc_feature 1..26: note = Probe
  source 1..26: mol_type = other DNA
gggttcaatccccggcacctccacca

SEQ ID NO: 22005 - DNA, 24 bp, synthetic construct
  misc_feature 1..24: note = Probe
  source 1..24: mol_type = other DNA
gggttcaattccccgacggggagg

SEQ ID NO: 22006 - DNA, 26 bp, synthetic construct
  misc_feature 1..26: note = Probe
  source 1..26: mol_type = other DNA
gggttcaattccccgacggggaggtg

SEQ ID NO: 22007 - DNA, 26 bp, synthetic construct
  misc_feature 1..26: note = Probe
  source 1..26: mol_type = other DNA
gggttcaattcccggtcagggaacca

SEQ ID NO: 22008 - DNA, 26 bp, synthetic construct
  misc_feature 1..26: note = Probe
  source 1..26: mol_type = other DNA
gggttcgactcccggtatgggaacaa

SEQ ID NO: 22009 - DNA, 26 bp, synthetic construct
  misc_feature 1..26: note = Probe
  source 1..26: mol_type = other DNA
gggttcgactcccggtgtgggaacgc

SEQ ID NO: 22010 - DNA, 26 bp, synthetic construct
  misc_feature 1..26: note = Probe
  source 1..26: mol_type = other DNA
gggttcgatccccggcatctccattg

SEQ ID NO: 22011 - DNA, 22 bp, synthetic construct
  misc_feature 1..22: note = Probe
  source 1..22: mol_type = other DNA
gggttcgattccccgacgggga

SEQ ID NO: 22012 - DNA, 23 bp, synthetic construct
  misc_feature 1..23: note = Probe
  source 1..23: mol_type = other DNA
gggttcgattccccgacggggag

SEQ ID NO: 22013 - DNA, 24 bp, synthetic construct
  misc_feature 1..24: note = Probe
  source 1..24: mol_type = other DNA
gggttcgattccccgacggggaga

SEQ ID NO: 22014 - DNA, 25 bp, synthetic construct
  misc_feature 1..25: note = Probe
  source 1..25: mol_type = other DNA
gggttcgattccccgacggggagaa

SEQ ID NO: 22015 - DNA, 25 bp, synthetic construct
  misc_feature 1..25: note = Probe
  source 1..25: mol_type = other DNA
gggttcgattccccgacggggagac

SEQ ID NO: 22016 - DNA, 24 bp, synthetic construct
  misc_feature 1..24: note = Probe
  source 1..24: mol_type = other DNA
gggttcgattccccgacggggagg

SEQ ID NO: 22017 - DNA, 25 bp, synthetic construct
  misc_feature 1..25: note = Probe
  source 1..25: mol_type = other DNA
gggttcgattccccgacggggaggc

SEQ ID NO: 22018 - DNA, 26 bp, synthetic construct
  misc_feature 1..26: note = Probe
  source 1..26: mol_type = other DNA
gggttcgattccccgacggggaggca

SEQ ID NO: 22019 - DNA, 23 bp, synthetic construct
  misc_feature 1..23: note = Probe
  source 1..23: mol_type = other DNA
gggttcgattcccggccaacgca

SEQ ID NO: 22020 - DNA, 26 bp, synthetic construct
  misc_feature 1..26: note = Probe
  source 1..26: mol_type = other DNA
gggttcgattcccggccaacgcaagt

SEQ ID NO: 22021 - DNA, 26 bp, synthetic construct
  misc_feature 1..26: note = Probe
  source 1..26: mol_type = other DNA
gggttcgattcccggccaacgcagtg

SEQ ID NO: 22022 - DNA, 26 bp, synthetic construct
  misc_feature 1..26: note = Probe
  source 1..26: mol_type = other DNA
gggttcgattcccggccaatgcacga

SEQ ID NO: 22023 - DNA, 26 bp, synthetic construct
  misc_feature 1..26: note = Probe
  source 1..26: mol_type = other DNA
gggttcgattcccggccaatgcagca

SEQ ID NO: 22024 - DNA, 23 bp, synthetic construct
  misc_feature 1..23: note = Probe
  source 1..23: mol_type = other DNA
gggttcgattcccgggcggcgca

SEQ ID NO: 22025 - DNA, 26 bp, synthetic construct
  misc_feature 1..26: note = Probe
  source 1..26: mol_type = other DNA
gggttcgattcccggtcagggaattg

SEQ ID NO: 22026 - DNA, 26 bp, synthetic construct
  misc_feature 1..26: note = Probe
  source 1..26: mol_type = other DNA
gggttcgattcccggtcatggaacca

SEQ ID NO: 22027 - DNA, 21 bp, synthetic construct
  misc_feature 1..21: note = Probe
  source 1..21: mol_type = other DNA
gggttcgattctcatagtcct

SEQ ID NO: 22028 - DNA, 24 bp, synthetic construct
  misc_feature 1..24: note = Probe
  source 1..24: mol_type = other DNA
gggttcgattctcatagtcctaga

SEQ ID NO: 22029 - DNA, 25 bp, synthetic construct
  misc_feature 1..25: note = Probe
  source 1..25: mol_type = other DNA
gggttcgattctcatagtcctagaa

SEQ ID NO: 22030 - DNA, 26 bp, synthetic construct
  misc_feature 1..26: note = Probe
  source 1..26: mol_type = other DNA
gggttcgattctcatagtcctagaaa

SEQ ID NO: 22031 - DNA, 18 bp, synthetic construct
  misc_feature 1..18: note = Probe
  source 1..18: mol_type = other DNA
gggtttccccgcacaggt

SEQ ID NO: 22032 - DNA, 19 bp, synthetic construct
  misc_feature 1..19: note = Probe
  source 1..19: mol_type = other DNA
gggtttccccgcgcaggtt

SEQ ID NO: 22033 - DNA, 30 bp, synthetic construct
  misc_feature 1..30: note = Probe
  source 1..30: mol_type = other DNA
gggtttccgtagtgtagtggttatcacgtt

SEQ ID NO: 22034 - DNA, 16 bp, synthetic construct
  misc_feature 1..16: note = Probe
  source 1..16: mol_type = other DNA
gggtttctttaagttt

SEQ ID NO: 22035 - DNA, 17 bp, synthetic construct
  misc_feature 1..17: note = Probe
  source 1..17: mol_type = other DNA
gggtttctttaagtttt

SEQ ID NO: 22036 - DNA, 24 bp, synthetic construct
  misc_feature 1..24: note = Probe
  source 1..24: mol_type = other DNA
ggtaaaatggctgagtgaagcatt

SEQ ID NO: 22037 - DNA, 25 bp, synthetic construct
  misc_feature 1..25: note = Probe
  source 1..25: mol_type = other DNA
ggtaaaatggctgagtgaagcattg

SEQ ID NO: 22038 - DNA, 26 bp, synthetic construct
  misc_feature 1..26: note = Probe
  source 1..26: mol_type = other DNA
ggtaaaatggctgagtgaagcattgg

SEQ ID NO: 22039 - DNA, 27 bp, synthetic construct
  misc_feature 1..27: note = Probe
  source 1..27: mol_type = other DNA
ggtaaaatggctgagtgaagcattgga

SEQ ID NO: 22040 - DNA, 28 bp, synthetic construct
  misc_feature 1..28: note = Probe
  source 1..28: mol_type = other DNA
ggtaaaatggctgagtgaagcattggac

SEQ ID NO: 22041 - DNA, 29 bp, synthetic construct
  misc_feature 1..29: note = Probe
  source 1..29: mol_type = other DNA
ggtaaaatggctgagtgaagcattggact

SEQ ID NO: 22042 - DNA, 30 bp, synthetic construct; identical to SEQ ID NO: 6688
  misc_feature 1..30: note = Probe
  source 1..30: mol_type = other DNA

SEQ ID NO: 22043 - DNA, 31 bp, synthetic construct; identical to SEQ ID NO: 6689
  misc_feature 1..31: note = Probe
  source 1..31: mol_type = other DNA

SEQ ID NO: 22044 - DNA, 32 bp, synthetic construct; identical to SEQ ID NO: 6690
  misc_feature 1..32: note = Probe
  source 1..32: mol_type = other DNA

SEQ ID NO: 22045 - DNA, 33 bp, synthetic construct; identical to SEQ ID NO: 6691
  misc_feature 1..33: note = Probe
  source 1..33: mol_type = other DNA

SEQ ID NO: 22046 - DNA, 34 bp, synthetic construct; identical to SEQ ID NO: 6692
  misc_feature 1..34: note = Probe
  source 1..34: mol_type = other DNA

SEQ ID NO: 22047 - DNA, 35 bp, synthetic construct; identical to SEQ ID NO: 6693
  misc_feature 1..35: note = Probe
  source 1..35: mol_type = other DNA

SEQ ID NO: 22048 - DNA, 36 bp, synthetic construct; identical to SEQ ID NO: 6694
  misc_feature 1..36: note = Probe
  source 1..36: mol_type = other DNA

SEQ ID NO: 22049 - DNA, 37 bp, synthetic construct; identical to SEQ ID NO: 6695
  misc_feature 1..37: note = Probe
  source 1..37: mol_type = other DNA

SEQ ID NO: 22050 - DNA, 38 bp, synthetic construct; identical to SEQ ID NO: 6696
  misc_feature 1..38: note = Probe
  source 1..38: mol_type = other DNA

SEQ ID NO: 22051 - DNA, 39 bp, synthetic construct
  misc_feature 1..39: note = Probe
  source 1..39: mol_type = other DNA
ggtaaaatggctgagtgaagcattggactgtaaatctaa

SEQ ID NO: 22052 - DNA, 40 bp, synthetic construct
  misc_feature 1..40: note = Probe
  source 1..40: mol_type = other DNA
ggtaaaatggctgagtgaagcattggactgtaaatctaaa

SEQ ID NO: 22053 - DNA, 38 bp, synthetic construct
  misc_feature 1..38: note = Probe
  source 1..38: mol_type = other DNA
ggtaagcatagctgccttccaagcagttgacccgggtt

SEQ ID NO: 22054 - DNA, 29 bp, synthetic construct
  misc_feature 1..29: note = Probe
  source 1..29: mol_type = other DNA
ggtaatcgcataaaacttaaaactttaca

SEQ ID NO: 22055 - DNA, 32 bp, synthetic construct
  misc_feature 1..32: note = Probe
  source 1..32: mol_type = other DNA
ggtaatcgcataaaacttaaaactttacagtc

SEQ ID NO: 22056 - DNA, 33 bp, synthetic construct; identical to SEQ ID NO: 1381
  misc_feature 1..33: note = Probe
  source 1..33: mol_type = other DNA

SEQ ID NO: 22057 - DNA, 50 bp, synthetic construct; identical to SEQ ID NO: 6698
  misc_feature 1..50: note = Probe
  source 1..50: mol_type = other DNA

SEQ ID NO: 22058 - DNA, 15 bp, synthetic construct
  misc_feature 1..15: note = Probe
  source 1..15: mol_type = other DNA
ggtacccaaatctgc

SEQ ID NO: 22059 - DNA, 16 bp, synthetic construct
  misc_feature 1..16: note = Probe
  source 1..16: mol_type = other DNA
ggtagaattctcgcct

SEQ ID NO: 22060 - DNA, 17 bp, synthetic construct
  misc_feature 1..17: note = Probe
  source 1..17: mol_type = other DNA
ggtagaattctcgcctg

SEQ ID NO: 22061 - DNA, 18 bp, synthetic construct
  misc_feature 1..18: note = Probe
  source 1..18: mol_type = other DNA
ggtagaattctcgcctgc

SEQ ID NO: 22062 - DNA, 19 bp, synthetic construct
  misc_feature 1..19: note = Probe
  source 1..19: mol_type = other DNA
ggtagaattctcgcctgcc

SEQ ID NO: 22063 - DNA, 20 bp, synthetic construct
  misc_feature 1..20: note = Probe
  source 1..20: mol_type = other DNA
ggtagaattctcgcctgcca

SEQ ID NO: 22064 - DNA, 22 bp, synthetic construct
  misc_feature 1..22: note = Probe
  source 1..22: mol_type = other DNA
ggtagaattctcgcctgccacg

SEQ ID NO: 22065 - DNA, 33 bp, synthetic construct
  misc_feature 1..33: note = Probe
  source 1..33: mol_type = other DNA
ggtagaattctcgcctgccacgcgggaggcccg

SEQ ID NO: 22066 - DNA, 37 bp, synthetic construct
  misc_feature 1..37: note = Probe
  source 1..37: mol_type = other DNA
ggtagaattctcgcctgccacgcgggaggcccgggtt

SEQ ID NO: 22067 - DNA, 16 bp, synthetic construct
  misc_feature 1..16: note = Probe
  source 1..16: mol_type = other DNA
ggtagagcatgagact

SEQ ID NO: 22068 - DNA, 32 bp, synthetic construct; identical to SEQ ID NO: 6704
  misc_feature 1..32: note = Probe
  source 1..32: mol_type = other DNA

SEQ ID NO: 22069 - DNA, 16 bp, synthetic construct
  misc_feature 1..16: note = Probe
  source 1..16: mol_type = other DNA
ggtagagcatgggact

SEQ ID NO: 22070 - DNA, 25 bp, synthetic construct
  misc_feature 1..25: note = Probe
  source 1..25: mol_type = other DNA
ggtagagcatgggactcttaatccc

SEQ ID NO: 22071 - DNA, 29 bp, synthetic construct
  misc_feature 1..29: note = Probe
  source 1..29: mol_type = other DNA
ggtagagcatgggactcttaatcccaggg

SEQ ID NO: 22072 - DNA, 32 bp, synthetic construct; identical to SEQ ID NO: 6706
  misc_feature 1..32: note = Probe
  source 1..32: mol_type = other DNA

SEQ ID NO: 22073 - DNA, 34 bp, synthetic construct
  misc_feature 1..34: note = Probe
  source 1..34: mol_type = other DNA
ggtagagcatgggactcttaatcccagggtcgtg

SEQ ID NO: 22074 - DNA, 37 bp, synthetic construct
  misc_feature 1..37: note = Probe
  source 1..37: mol_type = other DNA
ggtagagcatgggactcttaatctcagggtcgtgggt

SEQ ID NO: 22075 - DNA, 26 bp, synthetic construct
  misc_feature 1..26: note = Probe
  source 1..26: mol_type = other DNA
ggtagcgtggccgagcggtctaaggc

SEQ ID NO: 22076 - DNA, 27 bp, synthetic construct
  misc_feature 1..27: note = Probe
  source 1..27: mol_type = other DNA
ggtagcgtggccgagcggtctaaggcg

SEQ ID NO: 22077 - DNA, 34 bp, synthetic construct
  misc_feature 1..34: note = Probe
  source 1..34: mol_type = other DNA
ggtagcgtggccgagcggtctaaggcgctggatt

SEQ ID NO: 22078 - DNA, 35 bp, synthetic construct
  misc_feature 1..35: note = Probe
  source 1..35: mol_type = other DNA
ggtagcgtggccgagcggtctaaggcgctggatta

SEQ ID NO: 22079 - DNA, 36 bp, synthetic construct
  misc_feature 1..36: note = Probe
  source 1..36: mol_type = other DNA
ggtagcgtggccgagcggtctaaggcgctggattaa

SEQ ID NO: 22080 - DNA, 35 bp, synthetic construct; identical to SEQ ID NO: 6708
  misc_feature 1..35: note = Probe
  source 1..35: mol_type = other DNA

SEQ ID NO: 22081 - DNA, 36 bp, synthetic construct; identical to SEQ ID NO: 6709
  misc_feature 1..36: note = Probe
  source 1..36: mol_type = other DNA

SEQ ID NO: 22082 - DNA, 19 bp, synthetic construct
  misc_feature 1..19: note = Probe
  source 1..19: mol_type = other DNA
ggtagcgtggccgagtggt

SEQ ID NO: 22083 - DNA, 21 bp, synthetic construct
  misc_feature 1..21: note = Probe
  source 1..21: mol_type = other DNA
ggtagcgtggccgagtggtct

SEQ ID NO: 22084 - DNA, 25 bp, synthetic construct
  misc_feature 1..25: note = Probe
  source 1..25: mol_type = other DNA
ggtagcgtggccgagtggtctaaga

SEQ ID NO: 22085 - DNA, 26 bp, synthetic construct
  misc_feature 1..26: note = Probe
  source 1..26: mol_type = other DNA
ggtagcgtggccgagtggtctaaggc

SEQ ID NO: 22086 - DNA, 27 bp, synthetic construct
  misc_feature 1..27: note = Probe
  source 1..27: mol_type = other DNA
ggtagcgtggccgagtggtctaaggcg

SEQ ID NO: 22087 - DNA, 28 bp, synthetic construct
  misc_feature 1..28: note = Probe
  source 1..28: mol_type = other DNA
ggtagcgtggccgagtggtctaaggcgc

SEQ ID NO: 22088 - DNA, 30 bp, synthetic construct; identical to SEQ ID NO: 10918
  misc_feature 1..30: note = Probe
  source 1..30: mol_type = other DNA

SEQ ID NO: 22089 - DNA, 31 bp, synthetic construct; identical to SEQ ID NO: 6714
  misc_feature 1..31: note = Probe
  source 1..31: mol_type = other DNA

SEQ ID NO: 22090 - DNA, 34 bp, synthetic construct; identical to SEQ ID NO: 1404
  misc_feature 1..34: note = Probe
  source 1..34: mol_type = other DNA

SEQ ID NO: 22091 - DNA, 50 bp, synthetic construct
  misc_feature 1..50: note = Probe
  source 1..50: mol_type = other DNA
ggtagcgtggccgagtggtctaaggcgctggatttaggctccagtcattt

SEQ ID NO: 22092 - DNA, 16 bp, synthetic construct
  misc_feature 1..16: note = Probe
  source 1..16: mol_type = other DNA
ggtagtgtggccgagc

SEQ ID NO: 22093 - DNA, 24 bp, synthetic construct
  misc_feature 1..24: note = Probe
  source 1..24: mol_type = other DNA
ggtagtgtggccgagcggtctaag

SEQ ID NO: 22094 - DNA, 31 bp, synthetic construct; identical to SEQ ID NO: 6723
  misc_feature 1..31: note = Probe
  source 1..31: mol_type = other DNA

SEQ ID NO: 22095 - DNA, 32 bp, synthetic construct; identical to SEQ ID NO: 6724
  misc_feature 1..32: note = Probe
  source 1..32: mol_type = other DNA

SEQ ID NO: 22096 - DNA, 16 bp, synthetic construct
  misc_feature 1..16: note = Probe
  source 1..16: mol_type = other DNA
ggtatagtggtgagca

SEQ ID NO: 22097 - DNA, 22 bp, synthetic construct
  misc_feature 1..22: note = Probe
  source 1..22: mol_type = other DNA
ggtatagtggtgagcatagctg

SEQ ID NO: 22098 - DNA, 24 bp, synthetic construct
  misc_feature 1..24: note = Probe
  source 1..24: mol_type = other DNA
ggtatagtggtgagcatagctgcc

SEQ ID NO: 22099 - DNA, 27 bp, synthetic construct
  misc_feature 1..27: note = Probe
  source 1..27: mol_type = other DNA
ggtatagtggtgagcatagctgccttc

SEQ ID NO: 22100 - DNA, 22 bp, synthetic construct
  misc_feature 1..22: note = Probe
  source 1..22: mol_type = other DNA
ggtatagtggttagcatagctg

SEQ ID NO: 22101 - DNA, 27 bp, synthetic construct
  misc_feature 1..27: note = Probe
  source 1..27: mol_type = other DNA
ggtatagtggttagcatagctgccttc

SEQ ID NO: 22102 - DNA, 41 bp, synthetic construct
  misc_feature 1..41: note = Probe
  source 1..41: mol_type = other DNA
ggtatagtggttagcatagctgccttccaagcagttgaccc

SEQ ID NO: 22103 - DNA, 17 bp, synthetic construct
  misc_feature 1..17: note = Probe
  source 1..17: mol_type = other DNA
ggtatcatgcaagattc

SEQ ID NO: 22104 - DNA, 33 bp, synthetic construct
  misc_feature 1..33: note = Probe
  source 1..33: mol_type = other DNA
ggtatcatgcaagattcccattcttgcgacccg

SEQ ID NO: 22105 - DNA, 34 bp, synthetic construct
  misc_feature 1..34: note = Probe
  source 1..34: mol_type = other DNA
ggtatcatgcaagattcccattcttgcgacccgg

SEQ ID NO: 22106 - DNA, 36 bp, synthetic construct
  misc_feature 1..36: note = Probe
  source 1..36: mol_type = other DNA
ggtatcatgcaagattcccattcttgcgacccgggt

SEQ ID NO: 22107 - DNA, 32 bp, synthetic construct; identical to SEQ ID NO: 6725
  misc_feature 1..32: note = Probe
  source 1..32: mol_type = other DNA

SEQ ID NO: 22108 - DNA, 33 bp, synthetic construct; identical to SEQ ID NO: 6726
  misc_feature 1..33: note = Probe
  source 1..33: mol_type = other DNA

SEQ ID NO: 22109 - DNA, 37 bp, synthetic construct
  misc_feature 1..37: note = Probe
  source 1..37: mol_type = other DNA
ggtatgattctcgcttagggtgcgagaggtcccgggt

SEQ ID NO: 22110 - DNA, 38 bp, synthetic construct
  misc_feature 1..38: note = Probe
  source 1..38: mol_type = other DNA
ggtatgattctcgcttagggtgcgagaggtcccgggtt

SEQ ID NO: 22111 - DNA, 32 bp, synthetic construct; identical to SEQ ID NO: 6727
  misc_feature 1..32: note = Probe
  source 1..32: mol_type = other DNA

SEQ ID NO: 22112 - DNA, 37 bp, synthetic construct
  misc_feature 1..37: note = Probe
  source 1..37: mol_type = other DNA
ggtatgattctcgcttcgggtgcgagaggtcccgggt

SEQ ID NO: 22113 - DNA, 38 bp, synthetic construct
  misc_feature 1..38: note = Probe
  source 1..38: mol_type = other DNA
ggtatgattctcgcttcgggtgcgagaggtcccgggtt

SEQ ID NO: 22114 - DNA, 32 bp, synthetic construct; identical to SEQ ID NO: 6729
  misc_feature 1..32: note = Probe
  source 1..32: mol_type = other DNA

SEQ ID NO: 22115 - DNA, 34 bp, synthetic construct
  misc_feature 1..34: note = Probe
  source 1..34: mol_type = other DNA
ggtatgattctcgctttgggtgcgagaggtcccg

SEQ ID NO: 22116 - DNA, 36 bp, synthetic construct
  misc_feature 1..36: note = Probe
  source 1..36: mol_type = other DNA
ggtatgattctcgctttgggtgcgagaggtcccggg

SEQ ID NO: 22117 - DNA, 37 bp, synthetic construct
  misc_feature 1..37: note = Probe
  source 1..37: mol_type = other DNA
ggtatgattctcgctttgggtgcgagaggtcccgggt

SEQ ID NO: 22118 - DNA, 38 bp, synthetic construct
  misc_feature 1..38: note = Probe
  source 1..38: mol_type = other DNA
ggtatgattctcgctttgggtgcgagaggtcccgggtt

SEQ ID NO: 22119 - DNA, 33 bp, synthetic construct; identical to SEQ ID NO: 1408
  misc_feature 1..33: note = Probe
  source 1..33: mol_type = other DNA

SEQ ID NO: 22120 - DNA, 23 bp, synthetic construct
  misc_feature 1..23: note = Probe
  source 1..23: mol_type = other DNA
ggtcagctaaataagctatcggg

SEQ ID NO: 22121 - DNA, 25 bp, synthetic construct
  misc_feature 1..25: note = Probe
  source 1..25: mol_type = other DNA
ggtcagctaaataagctatcgggcc

SEQ ID NO: 22122 - DNA, 26 bp, synthetic construct
  misc_feature 1..26: note = Probe
  source 1..26: mol_type = other DNA
ggtcagctaaataagctatcgggccc

SEQ ID NO: 22123 - DNA, 27 bp, synthetic construct
  misc_feature 1..27: note = Probe
  source 1..27: mol_type = other DNA
ggtcagctaaataagctatcgggccca

SEQ ID NO: 22124 - DNA, 28 bp, synthetic construct
  misc_feature 1..28: note = Probe
  source 1..28: mol_type = other DNA
ggtcagctaaataagctatcgggcccat

SEQ ID NO: 22125 - DNA, 29 bp, synthetic construct
  misc_feature 1..29: note = Probe
  source 1..29: mol_type = other DNA
ggtcagctaaataagctatcgggcccata

SEQ ID NO: 22126 - DNA, 30 bp, synthetic construct; identical to SEQ ID NO: 6735
  misc_feature 1..30: note = Probe
  source 1..30: mol_type = other DNA

SEQ ID NO: 22127 - DNA, 31 bp, synthetic construct; identical to SEQ ID NO: 6736
  misc_feature 1..31: note = Probe
  source 1..31: mol_type = other DNA

SEQ ID NO: 22128 - DNA, 37 bp, synthetic construct; identical to SEQ ID NO: 6739
  misc_feature 1..37: note = Probe
  source 1..37: mol_type = other DNA

SEQ ID NO: 22129 - DNA, 38 bp, synthetic construct
  misc_feature 1..38: note = Probe
  source 1..38: mol_type = other DNA
ggtcagctaaataagctatcgggcccataccccgaaaa

SEQ ID NO: 22130 - DNA, 40 bp, synthetic construct; identical to SEQ ID NO: 6741
  misc_feature 1..40: note = Probe
  source 1..40: mol_type = other DNA

SEQ ID NO: 22131 - DNA, 41 bp, synthetic construct; identical to SEQ ID NO: 6742
  misc_feature 1..41: note = Probe
  source 1..41: mol_type = other DNA

SEQ ID NO: 22132 - DNA, 42 bp, synthetic construct; identical to SEQ ID NO: 6743
  misc_feature 1..42: note = Probe
  source 1..42: mol_type = other DNA

SEQ ID NO: 22133 - DNA, 43 bp, synthetic construct; identical to SEQ ID NO: 6744
  misc_feature 1..43: note = Probe
  source 1..43: mol_type = other DNA

SEQ ID NO: 22134 - DNA, 44 bp, synthetic construct; identical to SEQ ID NO: 6745
  misc_feature 1..44: note = Probe
  source 1..44: mol_type = other DNA

SEQ ID NO: 22135 - DNA, 45 bp, synthetic construct; identical to SEQ ID NO: 6746
  misc_feature 1..45: note = Probe
  source 1..45: mol_type = other DNA

SEQ ID NO: 22136 - DNA, 50 bp, synthetic construct; identical to SEQ ID NO: 1410
  misc_feature 1..50: note = Probe
  source 1..50: mol_type = other DNA

SEQ ID NO: 22137 - DNA, 36 bp, synthetic construct
  misc_feature 1..36: note = Probe
  source 1..36: mol_type = other DNA
ggtcatcacgttcgcctaacacgcgaaaggtccccg

SEQ ID NO: 22138 - DNA, 38 bp, synthetic construct
  misc_feature 1..38: note = Probe
  source 1..38: mol_type = other DNA
ggtcatcacgttcgcctaacacgcgaaaggtccccggt

SEQ ID NO: 22139 - DNA, 23 bp, synthetic construct
  misc_feature 1..23: note = Probe
  source 1..23: mol_type = other DNA
ggtcatgggtggttgcgttttgg

SEQ ID NO: 22140 - DNA, 27 bp, synthetic construct
  misc_feature 1..27: note = Probe
  source 1..27: mol_type = other DNA
ggtccagggttcaagtccctgttcggg

SEQ ID NO: 22141 - DNA, 32 bp, synthetic construct
  misc_feature 1..32: note = Probe
  source 1..32: mol_type = other DNA
ggtccagggttcaagtccctgttcgggcggca

SEQ ID NO: 22142 - DNA, 17 bp, synthetic construct
  misc_feature 1..17: note = Probe
  source 1..17: mol_type = other DNA
ggtcccatggtgtaatg

SEQ ID NO: 22143 - DNA, 20 bp, synthetic construct
  misc_feature 1..20: note = Probe
  source 1..20: mol_type = other DNA
ggtcccatggtgtaatggtt

SEQ ID NO: 22144 - DNA, 26 bp, synthetic construct
  misc_feature 1..26: note = Probe
  source 1..26: mol_type = other DNA
ggtcccatggtgtaatggttagcact

SEQ ID NO: 22145 - DNA, 31 bp, synthetic construct
  misc_feature 1..31: note = Probe
  source 1..31: mol_type = other DNA
ggtcccatggtgtaatggttagcactctgga

SEQ ID NO: 22146 - DNA, 33 bp, synthetic construct; identical to SEQ ID NO: 1415
  misc_feature 1..33: note = Probe
  source 1..33: mol_type = other DNA

SEQ ID NO: 22147 - DNA, 26 bp, synthetic construct
  misc_feature 1..26: note = Probe
  source 1..26: mol_type = other DNA
ggtcccgggttcaaatcccggacgag

SEQ ID NO: 22148 - DNA, 32 bp, synthetic construct
  misc_feature 1..32: note = Probe
  source 1..32: mol_type = other DNA
ggtcccgggttcaaatcccggacgagccccct

SEQ ID NO: 22149 - DNA, 32 bp, synthetic construct; identical to SEQ ID NO: 6752
  misc_feature 1..32: note = Probe
  source 1..32: mol_type = other DNA

SEQ ID NO: 22150 - DNA, 23 bp, synthetic construct
  misc_feature 1..23: note = Probe
  source 1..23: mol_type = other DNA
ggtcccgggttcgatccccagca

SEQ ID NO: 22151 - DNA, 25 bp, synthetic construct
  misc_feature 1..25: note = Probe
  source 1..25: mol_type = other DNA
ggtcccgggttcgatccccagcatc

SEQ ID NO: 22152 - DNA, 26 bp, synthetic construct
  misc_feature 1..26: note = Probe
  source 1..26: mol_type = other DNA
ggtcccgggttcgatccccagcatct

SEQ ID NO: 22153 - DNA, 32 bp, synthetic construct
  misc_feature 1..32: note = Probe
  source 1..32: mol_type = other DNA
ggtcccgggttcgatccccagcatctccagtg

SEQ ID NO: 22154 - DNA, 36 bp, synthetic construct
  misc_feature 1..36: note = Probe
  source 1..36: mol_type = other DNA
ggtcccgggttcgatccccagcatctccagtgtttt

SEQ ID NO: 22155 - DNA, 23 bp, synthetic construct
  misc_feature 1..23: note = Probe
  source 1..23: mol_type = other DNA
ggtcccgggttcgatccccggca

SEQ ID NO: 22156 - DNA, 32 bp, synthetic construct
  misc_feature 1..32: note = Probe
  source 1..32: mol_type = other DNA
ggtccctcctcgttagtatagtggtgagtatc

SEQ ID NO: 22157 - DNA, 33 bp, synthetic construct
  misc_feature 1..33: note = Probe
  source 1..33: mol_type = other DNA
ggtccctcctcgttagtatagtggtgagtatcc

SEQ ID NO: 22158 - DNA, 36 bp, synthetic construct
  misc_feature 1..36: note = Probe
  source 1..36: mol_type = other DNA
ggtccctcctcgttagtatagtggtgagtatccccg

SEQ ID NO: 22159 - DNA, 38 bp, synthetic construct
  misc_feature 1..38: note = Probe
  source 1..38: mol_type = other DNA
ggtccctcctcgttagtatagtggtgagtatccccgcc

SEQ ID NO: 22160 - DNA, 21 bp, synthetic construct
  misc_feature 1..21: note = Probe
  source 1..21: mol_type = other DNA
ggtcctagcctttctattagc

SEQ ID NO: 22161 - DNA, 27 bp, synthetic construct
  misc_feature 1..27: note = Probe
  source 1..27: mol_type = other DNA
ggtcctgggttcgagccccagtggaac

SEQ ID NO: 22162 - DNA, 31 bp, synthetic construct
  misc_feature 1..31: note = Probe
  source 1..31: mol_type = other DNA
ggtcctgggttcgagccccagtggaaccacg

SEQ ID NO: 22163 - DNA, 32 bp, synthetic construct; identical to SEQ ID NO: 6754
  misc_feature 1..32: note = Probe
  source 1..32: mol_type = other DNA

SEQ ID NO: 22164 - DNA, 32 bp, synthetic construct; identical to SEQ ID NO: 6755
  misc_feature 1..32: note = Probe
  source 1..32: mol_type = other DNA

SEQ ID NO: 22165 - DNA, 38 bp, synthetic construct
  misc_feature 1..38: note = Probe
  source 1..38: mol_type = other DNA
ggtcgcgagttcaattctcgctggggcctgtgtgtttt

SEQ ID NO: 22166 - DNA, 39 bp, synthetic construct
  misc_feature 1..39: note = Probe
  source 1..39: mol_type = other DNA
ggtcgcgagttcaattctcgctggggcctgtgtgttttt

SEQ ID NO: 22167 - DNA, 32 bp, synthetic construct; identical to SEQ ID NO: 6757
  misc_feature 1..32: note = Probe
  source 1..32: mol_type = other DNA

SEQ ID NO: 22168 - DNA, 32 bp, synthetic construct; identical to SEQ ID NO: 6758
  misc_feature 1..32: note = Probe
  source 1..32: mol_type = other DNA

SEQ ID NO: 22169 - DNA, 31 bp, synthetic construct
  misc_feature 1..31: note = Probe
  source 1..31: mol_type = other DNA
ggtcgctggttcgaatccggctcgaaggacg

SEQ ID NO: 22170 - DNA, 31 bp, synthetic construct
  misc_feature 1..31: note = Probe
  source 1..31: mol_type = other DNA
ggtcgctggttcgattccggctcgaaggact

SEQ ID NO: 22171 - DNA, 32 bp, synthetic construct
  misc_feature 1..32: note = Probe
  source 1..32: mol_type = other DNA
ggtcgtgagttcgatcctcacacggggcacaa

SEQ ID NO: 22172 - DNA, 27 bp, synthetic construct
  misc_feature 1..27: note = Probe
  source 1..27: mol_type = other DNA
ggtcgtgggttcgagccccacgttggg

SEQ ID NO: 22173 - DNA, 17 bp, synthetic construct
  misc_feature 1..17: note = Probe
  source 1..17: mol_type = other DNA
ggtcgtggttgtagtcc

SEQ ID NO: 22174 - DNA, 20 bp, synthetic construct
  misc_feature 1..20: note = Probe
  source 1..20: mol_type = other DNA
ggtcgtggttgtagtccgtg

SEQ ID NO: 22175 - DNA, 21 bp, synthetic construct
  misc_feature 1..21: note = Probe
  source 1..21: mol_type = other DNA
ggtcgtggttgtagtccgtgc

SEQ ID NO: 22176 - DNA, 24 bp, synthetic construct
  misc_feature 1..24: note = Probe
  source 1..24: mol_type = other DNA
ggtcgtggttgtagtccgtgcgag

SEQ ID NO: 22177 - DNA, 27 bp, synthetic construct
  misc_feature 1..27: note = Probe
  source 1..27: mol_type = other DNA
ggtcgtggttgtagtccgtgcgagaat

SEQ ID NO: 22178 - DNA, 29 bp, synthetic construct
  misc_feature 1..29: note = Probe
  source 1..29: mol_type = other DNA
ggtcgtggttgtagtccgtgcgagaataa

SEQ ID NO: 22179 - DNA, 31 bp, synthetic construct; identical to SEQ ID NO: 6765
  misc_feature 1..31: note = Probe
  source 1..31: mol_type = other DNA

SEQ ID NO: 22180 - DNA, 16 bp, synthetic construct
  misc_feature 1..16: note = Probe
  source 1..16: mol_type = other DNA
ggtctaaggcgccaga

SEQ ID NO: 22181 - DNA, 20 bp, synthetic construct
  misc_feature 1..20: note = Probe
  source 1..20: mol_type = other DNA
ggtctagtggttaggattcg

SEQ ID NO: 22182 - DNA, 21 bp, synthetic construct
  misc_feature 1..21: note = Probe
  source 1..21: mol_type = other DNA
ggtctagtggttaggattcgg

SEQ ID NO: 22183 - DNA, 22 bp, synthetic construct
  misc_feature 1..22: note = Probe
  source 1..22: mol_type = other DNA
ggtctagtggttaggattcggc

SEQ ID NO: 22184 - DNA, 24 bp, synthetic construct
  misc_feature 1..24: note = Probe
  source 1..24: mol_type = other DNA
ggtctagtggttaggattcggcgc

SEQ ID NO: 22185 - DNA, 27 bp, synthetic construct
  misc_feature 1..27: note = Probe
  source 1..27: mol_type = other DNA
ggtctagtggttaggattcggcgctct

SEQ ID NO: 22186 - DNA, 29 bp, synthetic construct
  misc_feature 1..29: note = Probe
  source 1..29: mol_type = other DNA
ggtctagtggttaggattcggcgctctca

SEQ ID NO: 22187 - DNA, 30 bp, synthetic construct
  misc_feature 1..30: note = Probe
  source 1..30: mol_type = other DNA
ggtctagtggttaggattcggcgctctcac

SEQ ID NO: 22188 - DNA, 41 bp, synthetic construct
  misc_feature 1..41: note = Probe
  source 1..41: mol_type = other DNA
ggtctagtggttaggattcggcgctctcaccgccgcggccc

SEQ ID NO: 22189 - DNA, 26 bp, synthetic construct
  misc_feature 1..26: note = Probe
  source 1..26: mol_type = other DNA
ggtctcgtaaaccgaagatcacgggt

SEQ ID NO: 22190 - DNA, 34 bp, synthetic construct
  misc_feature 1..34: note = Probe
  source 1..34: mol_type = other DNA
ggtgagcatagctgccttccaagcagttgacccg

SEQ ID NO: 22191 - DNA, 35 bp, synthetic construct
  misc_feature 1..35: note = Probe
  source 1..35: mol_type = other DNA
ggtgagcatagctgccttccaagcagttgacccgg

SEQ ID NO: 22192 - DNA, 37 bp, synthetic construct
  misc_feature 1..37: note = Probe
  source 1..37: mol_type = other DNA
ggtgagcatagctgccttccaagcagttgacccgggt

SEQ ID NO: 22193 - DNA, 38 bp, synthetic construct
  misc_feature 1..38: note = Probe
  source 1..38: mol_type = other DNA
ggtgagcatagctgccttccaagcagttgacccgggtt

SEQ ID NO: 22194 - DNA, 30 bp, synthetic construct
  misc_feature 1..30: note = Probe
  source 1..30: mol_type = other DNA
ggtgagcccggctagctcagtcggtagagc

SEQ ID NO: 22195 - DNA, 31 bp, synthetic construct
  misc_feature 1..31: note = Probe
  source 1..31: mol_type = other DNA
ggtgagcccggctagctcagtcggtagagca

SEQ ID NO: 22196 - DNA, 19 bp, synthetic construct
  misc_feature 1..19: note = Probe
  source 1..19: mol_type = other DNA
ggtgagtatccccgcctgt

SEQ ID NO: 22197 - DNA, 21 bp, synthetic construct
  misc_feature 1..21: note = Probe
  source 1..21: mol_type = other DNA
ggtgagtatccccgcctgtca

SEQ ID NO: 22198 - DNA, 32 bp, synthetic construct
  misc_feature 1..32: note = Probe
  source 1..32: mol_type = other DNA
ggtgagtatccccgcctgtcacgcgggagacc

SEQ ID NO: 22199 - DNA, 33 bp, synthetic construct
  misc_feature 1..33: note = Probe
  source 1..33: mol_type = other DNA
ggtgagtatccccgcctgtcacgcgggagaccg

SEQ ID NO: 22200 - DNA, 23 bp, synthetic construct
  misc_feature 1..23: note = Probe
  source 1..23: mol_type = other DNA
ggtgcaactccaaataaaagtaa

SEQ ID NO: 22201 - DNA, 30 bp, synthetic construct
  misc_feature 1..30: note = Probe
  source 1..30: mol_type = other DNA
ggtgcatgggtggttcagtggtagaattct

SEQ ID NO: 22202 - DNA, 32 bp, synthetic construct
  misc_feature 1..32: note = Probe
  source 1..32: mol_type = other DNA
ggtgcatgggtggttcagtggtagaattctcg

SEQ ID NO: 22203 - DNA, 36 bp, synthetic construct
  misc_feature 1..36: note = Probe
  source 1..36: mol_type = other DNA
ggtgcatgggtggttcagtggtagaattctcgcctg

SEQ ID NO: 22204 - DNA, 27 bp, synthetic construct
  misc_feature 1..27: note = Probe
  source 1..27: mol_type = other DNA
ggtgctaataacgccaaggtcgcgggt

SEQ ID NO: 22205 - DNA, 28 bp, synthetic construct
  misc_feature 1..28: note = Probe
  source 1..28: mol_type = other DNA
ggtgctaataacgccaaggtcgcgggtt

SEQ ID NO: 22206 - DNA, 27 bp, synthetic construct
  misc_feature 1..27: note = Probe
  source 1..27: mol_type = other DNA
ggtgctgataacaccaaggtcgcgggc

SEQ ID NO: 22207 - DNA, 50 bp, synthetic construct; identical to SEQ ID NO: 6773
  misc_feature 1..50: note = Probe
  source 1..50: mol_type = other DNA

SEQ ID NO: 22208 - DNA, 16 bp, synthetic construct
  misc_feature 1..16: note = Probe
  source 1..16: mol_type = other DNA
ggtggagttaaagact

SEQ ID NO: 22209 - DNA, 28 bp, synthetic construct
  misc_feature 1..28: note = Probe
  source 1..28: mol_type = other DNA
ggtggagttaaagactttttctctgatt

SEQ ID NO: 22210 - DNA, 29 bp, synthetic construct
  misc_feature 1..29: note = Probe
  source 1..29: mol_type = other DNA
ggtggagttaaagactttttctctgattt

SEQ ID NO: 22211 - DNA, 31 bp, synthetic construct; identical to SEQ ID NO: 6778
  misc_feature 1..31: note = Probe
  source 1..31: mol_type = other DNA

SEQ ID NO: 22212 - DNA, 27 bp, synthetic construct
  misc_feature 1..27: note = Probe
  source 1..27: mol_type = other DNA
ggtggcccgggttcgactcccggtatg

SEQ ID NO: 22213 - DNA, 28 bp, synthetic construct
  misc_feature 1..28: note = Probe
  source 1..28: mol_type = other DNA
ggtggcccgggttcgactcccggtatgg

SEQ ID NO: 22214 - DNA, 29 bp, synthetic construct
  misc_feature 1..29: note = Probe
  source 1..29: mol_type = other DNA
ggtggcccgggttcgactcccggtatggg

SEQ ID NO: 22215 - DNA, 30 bp, synthetic construct
  misc_feature 1..30: note = Probe
  source 1..30: mol_type = other DNA
ggtggcccgggttcgactcccggtatggga

SEQ ID NO: 22216 - DNA, 33 bp, synthetic construct; identical to SEQ ID NO: 6780
  misc_feature 1..33: note = Probe
  source 1..33: mol_type = other DNA

SEQ ID NO: 22217 - DNA, 34 bp, synthetic construct
  misc_feature 1..34: note = Probe
  source 1..34: mol_type = other DNA
ggtggcccgggttcgactcccggtatgggaacaa

SEQ ID NO: 22218 - DNA, 33 bp, synthetic construct; identical to SEQ ID NO: 6781
  misc_feature 1..33: note = Probe
  source 1..33: mol_type = other DNA

SEQ ID NO: 22219 - DNA, 25 bp, synthetic construct
  misc_feature 1..25: note = Probe
  source 1..25: mol_type = other DNA
ggtggtatagtggtgagcatagctg

SEQ ID NO: 22220 - DNA, 25 bp, synthetic construct
  misc_feature 1..25: note = Probe
  source 1..25: mol_type = other DNA
ggtggtatagtggttagcatagctg

SEQ ID NO: 22221 - DNA, 23 bp, synthetic construct
  misc_feature 1..23: note = Probe
  source 1..23: mol_type = other DNA
ggtggtctagtggttaggattcg

SEQ ID NO: 22222 - DNA, 24 bp, synthetic construct
  misc_feature 1..24: note = Probe
  source 1..24: mol_type = other DNA
ggtggtctagtggttaggattcgg

SEQ ID NO: 22223 - DNA, 27 bp, synthetic construct
  misc_feature 1..27: note = Probe
  source 1..27: mol_type = other DNA
ggtggtctagtggttaggattcggcgc

SEQ ID NO: 22224 - DNA, 30 bp, synthetic construct
  misc_feature 1..30: note = Probe
  source 1..30: mol_type = other DNA
ggtggtctagtggttaggattcggcgctct

SEQ ID NO: 22225 - DNA, 31 bp, synthetic construct
  misc_feature 1..31: note = Probe
  source 1..31: mol_type = other DNA
ggtggtctagtggttaggattcggcgctctc

SEQ ID NO: 22226 - DNA, 32 bp, synthetic construct
  misc_feature 1..32: note = Probe
  source 1..32: mol_type = other DNA
ggtggtctagtggttaggattcggcgctctca

SEQ ID NO: 22227 - DNA, 16 bp, synthetic construct
  misc_feature 1..16: note = Probe
  source 1..16: mol_type = other DNA
ggtggttcagtggtag

SEQ ID NO: 22228 - DNA, 17 bp, synthetic construct
  misc_feature 1..17: note = Probe
  source 1..17: mol_type = other DNA
ggtggttcagtggtaga

SEQ ID NO: 22229 - DNA, 18 bp, synthetic construct
  misc_feature 1..18: note = Probe
  source 1..18: mol_type = other DNA
ggtggttcagtggtagaa

SEQ ID NO: 22230 - DNA, 19 bp, synthetic construct
  misc_feature 1..19: note = Probe
  source 1..19: mol_type = other DNA
ggtggttcagtggtagaat

SEQ ID NO: 22231 - DNA, 24 bp, synthetic construct
  misc_feature 1..24: note = Probe
  source 1..24: mol_type = other DNA
ggtggttcagtggtagaattctcg

SEQ ID NO: 22232 - DNA, 25 bp, synthetic construct
  misc_feature 1..25: note = Probe
  source 1..25: mol_type = other DNA
ggtggttcagtggtagaattctcgc

SEQ ID NO: 22233 - DNA, 26 bp, synthetic construct
  misc_feature 1..26: note = Probe
  source 1..26: mol_type = other DNA
ggtggttcagtggtagaattctcgcc

SEQ ID NO: 22234 - DNA, 27 bp, synthetic construct
  misc_feature 1..27: note = Probe
  source 1..27: mol_type = other DNA
ggtggttcagtggtagaattctcgcct

SEQ ID NO: 22235 - DNA, 29 bp, synthetic construct
  misc_feature 1..29: note = Probe
  source 1..29: mol_type = other DNA
ggtggttcagtggtagaattctcgcctcc

SEQ ID NO: 22236 - DNA, 28 bp, synthetic construct
  misc_feature 1..28: note = Probe
  source 1..28: mol_type = other DNA
ggtggttcagtggtagaattctcgcctg

SEQ ID NO: 22237 - DNA, 29 bp, synthetic construct
  misc_feature 1..29: note = Probe
  source 1..29: mol_type = other DNA
ggtggttcagtggtagaattctcgcctgc

SEQ ID NO: 22238 - DNA, 30 bp, synthetic construct; identical to SEQ ID NO: 6787
  misc_feature 1..30: note = Probe
  source 1..30: mol_type = other DNA

SEQ ID NO: 22239 - DNA, 30 bp, synthetic construct
  misc_feature 1..30: note = Probe
  source 1..30: mol_type = other DNA
ggtggttctaacttgctggggtggcggttt

SEQ ID NO: 22240 - DNA, 31 bp, synthetic construct
  misc_feature 1..31: note = Probe
  source 1..31: mol_type = other DNA
ggtgtagctcagtggtagagcgcgtgcttag

SEQ ID NO: 22241 - DNA, 31 bp, synthetic construct
  misc_feature 1..31: note = Probe
  source 1..31: mol_type = other DNA
ggtgtagctcagtggtagagcgcgtgcttcg

SEQ ID NO: 22242 - DNA, 19 bp, synthetic construct
  misc_feature 1..19: note = Probe
  source 1..19: mol_type = other DNA
ggtgtagtggtatcatgca

SEQ ID NO: 22243 - DNA, 21 bp, synthetic construct
  misc_feature 1..21: note = Probe
  source 1..21: mol_type = other DNA
ggtgtagtggtatcatgcaag

SEQ ID NO: 22244 - DNA, 24 bp, synthetic construct
  misc_feature 1..24: note = Probe
  source 1..24: mol_type = other DNA
ggtgtagtggtatcatgcaagatt

SEQ ID NO: 22245 - DNA, 42 bp, synthetic construct
  misc_feature 1..42: note = Probe
  source 1..42: mol_type = other DNA
ggtgtagtggtatcatgcaagattcccattcttgcgacccgg

SEQ ID NO: 22246 - DNA, 27 bp, synthetic construct
  misc_feature 1..27: note = Probe
  source 1..27: mol_type = other DNA
ggtgtcaggatggccgagtggtctaag

SEQ ID NO: 22247 - DNA, 17 bp, synthetic construct
  misc_feature 1..17: note = Probe
  source 1..17: mol_type = other DNA
ggttagcactctggact

SEQ ID NO: 22248 - DNA, 19 bp, synthetic construct
  misc_feature 1..19: note = Probe
  source 1..19: mol_type = other DNA
ggttagcactctggactct

SEQ ID NO: 22249 - DNA, 33 bp, synthetic construct
  misc_feature 1..33: note = Probe
  source 1..33: mol_type = other DNA
ggttagcactctggactctgaatccagcgatcc

SEQ ID NO: 22250 - DNA, 34 bp, synthetic construct
  misc_feature 1..34: note = Probe
  source 1..34: mol_type = other DNA
ggttagcactctggactctgaatccagcgatccg

SEQ ID NO: 22251 - DNA, 38 bp, synthetic construct
  misc_feature 1..38: note = Probe
  source 1..38: mol_type = other DNA
ggttagcactctggactctgaatccagcgatccgagtt

SEQ ID NO: 22252 - DNA, 33 bp, synthetic construct
  misc_feature 1..33: note = Probe
  source 1..33: mol_type = other DNA
ggttagcactctggactttgaatccagcgatcc

SEQ ID NO: 22253 - DNA, 37 bp, synthetic construct
  misc_feature 1..37: note = Probe
  source 1..37: mol_type = other DNA
ggttagcactctggactttgaatccagcgatccgagt

SEQ ID NO: 22254 - DNA, 38 bp, synthetic construct
  misc_feature 1..38: note = Probe
  source 1..38: mol_type = other DNA
ggttagcactctggactttgaatccagcgatccgagtt

SEQ ID NO: 22255 - DNA, 39 bp, synthetic construct
  misc_feature 1..39: note = Probe
  source 1..39: mol_type = other DNA
ggttagcactctggactttgaatccagcgatccgagttc

SEQ ID NO: 22256 - DNA, 37 bp, synthetic construct
  misc_feature 1..37: note = Probe
  source 1..37: mol_type = other DNA
ggttagcatagctgccttccaagcagttgacccgggt

SEQ ID NO: 22257 - DNA, 21 bp, synthetic construct
  misc_feature 1..21: note = Probe
  source 1..21: mol_type = other DNA
ggttaggattcggcgctctca

SEQ ID NO: 22258 - DNA, 33 bp, synthetic construct
  misc_feature 1..33: note = Probe
  source 1..33: mol_type = other DNA
ggttaggattcggcgctctcaccgccgcggccc

SEQ ID NO: 22259 - DNA, 37 bp, synthetic construct
  misc_feature 1..37: note = Probe
  source 1..37: mol_type = other DNA
ggttaggattcggcgctctcaccgccgcggcccgggt

SEQ ID NO: 22260 - DNA, 22 bp, synthetic construct
  misc_feature 1..22: note = Probe
  source 1..22: mol_type = other DNA
ggttaggcctctttttaccagc

SEQ ID NO: 22261 - DNA, 23 bp, synthetic construct
  misc_feature 1..23: note = Probe
  source 1..23: mol_type = other DNA
ggttaggcctctttttaccagct

SEQ ID NO: 22262 - DNA, 18 bp, synthetic construct
  misc_feature 1..18: note = Probe
  source 1..18: mol_type = other DNA
ggttatacccttcccgta

SEQ ID NO: 22263 - DNA, 19 bp, synthetic construct
  misc_feature 1..19: note = Probe
  source 1..19: mol_type = other DNA
ggttatacccttcccgtac

SEQ ID NO: 22264 - DNA, 20 bp, synthetic construct
  misc_feature 1..20: note = Probe
  source 1..20: mol_type = other DNA
ggttatacccttcccgtact

SEQ ID NO: 22265 - DNA, 21 bp, synthetic construct
  misc_feature 1..21: note = Probe
  source 1..21: mol_type = other DNA
ggttatacccttcccgtacta

SEQ ID NO: 22266 - DNA, 24 bp, synthetic construct
  misc_feature 1..24: note = Probe
  source 1..24: mol_type = other DNA
ggttatacccttcccgtactaatt

SEQ ID NO: 22267 - DNA, 36 bp, synthetic construct
  misc_feature 1..36: note = Probe
  source 1..36: mol_type = other DNA
ggttatcacattcgcctcacacgcgaaaggtccccg

SEQ ID NO: 22268 - DNA, 38 bp, synthetic construct
  misc_feature 1..38: note = Probe
  source 1..38: mol_type = other DNA
ggttatcacattcgcctcacacgcgaaaggtccccggt

SEQ ID NO: 22269 - DNA, 38 bp, synthetic construct
  misc_feature 1..38: note = Probe
  source 1..38: mol_type = other DNA
ggttatcacgtctgctttacacgcagaaggtcctgggt

SEQ ID NO: 22270 - DNA, 36 bp, synthetic construct
  misc_feature 1..36: note = Probe
  source 1..36: mol_type = other DNA
ggttatcacgttcgcctaacacgcgaaaggtccccg

SEQ ID NO: 22271 - DNA, 37 bp, synthetic construct
  misc_feature 1..37: note = Probe
  source 1..37: mol_type = other DNA
ggttatcacgttcgcctaacacgcgaaaggtccccgg

SEQ ID NO: 22272 - DNA, 38 bp, synthetic construct
  misc_feature 1..38: note = Probe
  source 1..38: mol_type = other DNA
ggttatcacgttcgcctaacacgcgaaaggtccccggt

SEQ ID NO: 22273 - DNA, 33 bp, synthetic construct
  misc_feature 1..33: note = Probe
  source 1..33: mol_type = other DNA
ggttatcacgttcgcctcacacgcgaaaggtcc

SEQ ID NO: 22274 - DNA, 34 bp, synthetic construct
  misc_feature 1..34: note = Probe
  source 1..34: mol_type = other DNA
ggttatcacgttcgcctcacacgcgaaaggtccc

SEQ ID NO: 22275 - DNA, 36 bp, synthetic construct
  misc_feature 1..36: note = Probe
  source 1..36: mol_type = other DNA
ggttatcacgttcgcctcacacgcgaaaggtccccg

SEQ ID NO: 22276 - DNA, 38 bp, synthetic construct
  misc_feature 1..38: note = Probe
  source 1..38: mol_type = other DNA
ggttatcacgttcgcctcacacgcgaaaggtccccggt

SEQ ID NO: 22277 - DNA, 39 bp, synthetic construct
  misc_feature 1..39: note = Probe
  source 1..39: mol_type = other DNA
ggttatcacgttcgcctcacacgcgaaaggtccccggtt

SEQ ID NO: 22278 - DNA, 24 bp, synthetic construct
  misc_feature 1..24: note = Probe
  source 1..24: mol_type = other DNA
ggttcaaatcccggacgagccccc

SEQ ID NO: 22279 - DNA, 25 bp, synthetic construct
  misc_feature 1..25: note = Probe
  source 1..25: mol_type = other DNA
ggttcaaatcccggacgagccccct

SEQ ID NO: 22280 - DNA, 25 bp, synthetic construct
  misc_feature 1..25: note = Probe
  source 1..25: mol_type = other DNA
ggttcaaatccgggtgccccctcaa

SEQ ID NO: 22281 - DNA, 25 bp, synthetic construct
  misc_feature 1..25: note = Probe
  source 1..25: mol_type = other DNA
ggttcaagtccctgttcgggcggca

SEQ ID NO: 22282 - DNA, 23 bp, synthetic construct
  misc_feature 1..23: note = Probe
  source 1..23: mol_type = other DNA
ggttcaattccccgacggggagg

SEQ ID NO: 22283 - DNA, 24 bp, synthetic construct
  misc_feature 1..24: note = Probe
  source 1..24: mol_type = other DNA
ggttcaattccccgacggggaggt

SEQ ID NO: 22284 - DNA, 25 bp, synthetic construct
  misc_feature 1..25: note = Probe
  source 1..25: mol_type = other DNA
ggttcaattccccgacggggaggtg

SEQ ID NO: 22285 - DNA, 25 bp, synthetic construct
  misc_feature 1..25: note = Probe
  source 1..25: mol_type = other DNA
ggttcaattcccggtcagggaacca

SEQ ID NO: 22286 - DNA, 25 bp, synthetic construct
  misc_feature 1..25: note = Probe
  source 1..25: mol_type = other DNA
ggttcaattcctcttcttaacaaca

SEQ ID NO: 22287 - DNA, 16 bp, synthetic construct
  misc_feature 1..16: note = Probe
  source 1..16: mol_type = other DNA
ggttcagtggtagaat

SEQ ID NO: 22288 - DNA, 19 bp, synthetic construct
  misc_feature 1..19: note = Probe
  source 1..19: mol_type = other DNA
ggttcagtggtagaattct

SEQ ID NO: 22289 - DNA, 22 bp, synthetic construct
  misc_feature 1..22: note = Probe
  source 1..22: mol_type = other DNA
ggttcagtggtagaattctcgc

SEQ ID NO: 22290 - DNA, 23 bp, synthetic construct
  misc_feature 1..23: note = Probe
  source 1..23: mol_type = other DNA
ggttcagtggtagaattctcgcc

SEQ ID NO: 22291 - DNA, 24 bp, synthetic construct
  misc_feature 1..24: note = Probe
  source 1..24: mol_type = other DNA
ggttcagtggtagaattctcgcct

SEQ ID NO: 22292 - DNA, 26 bp, synthetic construct
  misc_feature 1..26: note = Probe
  source 1..26: mol_type = other DNA
ggttcagtggtagaattctcgcctcc

SEQ ID NO: 22293 - DNA, 25 bp, synthetic construct
  misc_feature 1..25: note = Probe
  source 1..25: mol_type = other DNA
ggttcagtggtagaattctcgcctg

SEQ ID NO: 22294 - DNA, 26 bp, synthetic construct
  misc_feature 1..26: note = Probe
  source 1..26: mol_type = other DNA
ggttcagtggtagaattctcgcctgc

SEQ ID NO: 22295 - DNA, 27 bp, synthetic construct
  misc_feature 1..27: note = Probe
  source 1..27: mol_type = other DNA
ggttcagtggtagaattctcgcctgcc

SEQ ID NO: 22296 - DNA, 32 bp, synthetic construct
  misc_feature 1..32: note = Probe
  source 1..32: mol_type = other DNA
ggttcagtggtagaattctcgcctgccacgcg

SEQ ID NO: 22297 - DNA, 18 bp, synthetic construct
  misc_feature 1..18: note = Probe
  source 1..18: mol_type = other DNA
ggttccatagtgtagcgg

SEQ ID NO: 22298 - DNA, 23 bp, synthetic construct
  misc_feature 1..23: note = Probe
  source 1..23: mol_type = other DNA
ggttccatagtgtagcggttatc

SEQ ID NO: 22299 - DNA, 24 bp, synthetic construct
  misc_feature 1..24: note = Probe
  source 1..24: mol_type = other DNA
ggttccatagtgtagcggttatca

SEQ ID NO: 22300 - DNA, 35 bp, synthetic construct
  misc_feature 1..35: note = Probe
  source 1..35: mol_type = other DNA
ggttccatagtgtagcggttatcacgtctgcttta

SEQ ID NO: 22301 - DNA, 36 bp, synthetic construct; identical to SEQ ID NO: 1436
  misc_feature 1..36: note = Probe
  source 1..36: mol_type = other DNA

SEQ ID NO: 22302 - DNA, 39 bp, synthetic construct
  misc_feature 1..39: note = Probe
  source 1..39: mol_type = other DNA
ggttccatagtgtagcggttatcacgtctgctttacacg

SEQ ID NO: 22303 - DNA, 40 bp, synthetic construct
  misc_feature 1..40: note = Probe
  source 1..40: mol_type = other DNA
ggttccatagtgtagcggttatcacgtctgctttacacgc

SEQ ID NO: 22304 - DNA, 41 bp, synthetic construct
  misc_feature 1..41: note = Probe
  source 1..41: mol_type = other DNA
ggttccatagtgtagcggttatcacgtctgctttacacgca

SEQ ID NO: 22305 - DNA, 17 bp, synthetic construct
  misc_feature 1..17: note = Probe
  source 1..17: mol_type = other DNA
ggttccatagtgtagtg

SEQ ID NO: 22306 - DNA, 19 bp, synthetic construct
  misc_feature 1..19: note = Probe
  source 1..19: mol_type = other DNA
ggttccatagtgtagtggt

SEQ ID NO: 22307 - DNA, 22 bp, synthetic construct
  misc_feature 1..22: note = Probe
  source 1..22: mol_type = other DNA
ggttccatagtgtagtggttat

SEQ ID NO: 22308 - DNA, 24 bp, synthetic construct
  misc_feature 1..24: note = Probe
  source 1..24: mol_type = other DNA
ggttccatagtgtagtggttatca

SEQ ID NO: 22309 - DNA, 25 bp, synthetic construct
  misc_feature 1..25: note = Probe
  source 1..25: mol_type = other DNA
ggttccatagtgtagtggttatcac

SEQ ID NO: 22310 - DNA, 26 bp, synthetic construct
  misc_feature 1..26: note = Probe
  source 1..26: mol_type = other DNA
ggttccatagtgtagtggttatcaca

SEQ ID NO: 22311 - DNA, 27 bp, synthetic construct
  misc_feature 1..27: note = Probe
  source 1..27: mol_type = other DNA
ggttccatagtgtagtggttatcacat

SEQ ID NO: 22312 - DNA, 27 bp, synthetic construct
  misc_feature 1..27: note = Probe
  source 1..27: mol_type = other DNA
ggttccatagtgtagtggttatcacgt

SEQ ID NO: 22313 - DNA, 38 bp, synthetic construct
  misc_feature 1..38: note = Probe
  source 1..38: mol_type = other DNA
ggttccatagtgtagtggttatcacgtctgctttacac

SEQ ID NO: 22314 - DNA, 41 bp, synthetic construct
  misc_feature 1..41: note = Probe
  source 1..41: mol_type = other DNA
ggttccatagtgtagtggttatcacgtctgctttacacgca

SEQ ID NO: 22315 - DNA, 49 bp, synthetic construct
  misc_feature 1..49: note = Probe
  source 1..49: mol_type = other DNA
ggttccatagtgtagtggttatcacgtctgctttacacgcagaaggtcc

SEQ ID NO: 22316 - DNA, 29 bp, synthetic construct
  misc_feature 1..29: note = Probe
  source 1..29: mol_type = other DNA
ggttccatggtgtaatggtgagcactctg

SEQ ID NO: 22317 - DNA, 26 bp, synthetic construct
  misc_feature 1..26: note = Probe
  source 1..26: mol_type = other DNA
ggttccatggtgtaatggttagcact

SEQ ID NO: 22318 - DNA, 27 bp, synthetic construct
  misc_feature 1..27: note = Probe
  source 1..27: mol_type = other DNA
ggttccatggtgtaatggttagcactc

SEQ ID NO: 22319 - DNA, 28 bp, synthetic construct
  misc_feature 1..28: note = Probe
  source 1..28: mol_type = other DNA
ggttccatggtgtaatggttagcactct

SEQ ID NO: 22320 - DNA, 29 bp, synthetic construct
  misc_feature 1..29: note = Probe
  source 1..29: mol_type = other DNA
ggttccatggtgtaatggttagcactctg

SEQ ID NO: 22321 - DNA, 31 bp, synthetic construct
  misc_feature 1..31: note = Probe
  source 1..31: mol_type = other DNA
ggttccatggtgtaatggttagcactctgga

SEQ ID NO: 22322 - DNA, 37 bp, synthetic construct; identical to SEQ ID NO: 1461
  misc_feature 1..37: note = Probe
  source 1..37: mol_type = other DNA

SEQ ID NO: 22323 - DNA, 26 bp, synthetic construct
  misc_feature 1..26: note = Probe
  source 1..26: mol_type = other DNA
ggttcctcgcagcttcgctgcgtgag

SEQ ID NO: 22324 - DNA, 25 bp, synthetic construct
  misc_feature 1..25: note = Probe
  source 1..25: mol_type = other DNA
ggttcgaaaccgggcggaaacacct

SEQ ID NO: 22325 - DNA, 25 bp, synthetic construct
  misc_feature 1..25: note = Probe
  source 1..25: mol_type = other DNA
ggttcgaatcccaccgctgccacac

SEQ ID NO: 22326 - DNA, 25 bp, synthetic construct
  misc_feature 1..25: note = Probe
  source 1..25: mol_type = other DNA
ggttcgaatcccaccgctgccaggt

SEQ ID NO: 22327 - DNA, 25 bp, synthetic construct
  misc_feature 1..25: note = Probe
  source 1..25: mol_type = other DNA
ggttcgaatcccacttctgacacaa

SEQ ID NO: 22328 - DNA, 25 bp, synthetic construct
  misc_feature 1..25: note = Probe
  source 1..25: mol_type = other DNA
ggttcgaatcccagcggtgcctccg

SEQ ID NO: 22329 - DNA, 25 bp, synthetic construct
  misc_feature 1..25: note = Probe
  source 1..25: mol_type = other DNA
ggttcgactcccggtatgggaacaa

SEQ ID NO: 22330 - DNA, 23 bp, synthetic construct
  misc_feature 1..23: note = Probe
  source 1..23: mol_type = other DNA
ggttcgactcccggtgtgggaac

SEQ ID NO: 22331 - DNA, 25 bp, synthetic construct
  misc_feature 1..25: note = Probe
  source 1..25: mol_type = other DNA
ggttcgactcccggtgtgggaacgc

SEQ ID NO: 22332 - DNA, 25 bp, synthetic construct
  misc_feature 1..25: note = Probe
  source 1..25: mol_type = other DNA
ggttcgagccccacgttgggcggca

SEQ ID NO: 22333 - DNA, 25 bp, synthetic construct
  misc_feature 1..25: note = Probe
  source 1..25: mol_type = other DNA
ggttcgagtcccttcgtggtcgttg

SEQ ID NO: 22334 - DNA, 25 bp, synthetic construct
  misc_feature 1..25: note = Probe
  source 1..25: mol_type = other DNA
ggttcgatccccagcatctccagtg

SEQ ID NO: 22335 - DNA, 25 bp, synthetic construct
  misc_feature 1..25: note = Probe
  source 1..25: mol_type = other DNA
ggttcgatccccagtacctccaggc

SEQ ID NO: 22336 - DNA, 16 bp, synthetic construct
  misc_feature 1..16: note = Probe
  source 1..16: mol_type = other DNA
ggttcgatccccggca

SEQ ID NO: 22337 - DNA, 25 bp, synthetic construct
  misc_feature 1..25: note = Probe
  source 1..25: mol_type = other DNA
ggttcgatccccggcatctccattg

SEQ ID NO: 22338 - DNA, 25 bp, synthetic construct
  misc_feature 1..25: note = Probe
  source 1..25: mol_type = other DNA
ggttcgatcccgggcggaaacaggt

SEQ ID NO: 22339 - DNA, 25 bp, synthetic construct
  misc_feature 1..25: note = Probe
  source 1..25: mol_type = other DNA
ggttcgattccccaacggggaggct

SEQ ID NO: 22340 - DNA, 20 bp, synthetic construct
  misc_feature 1..20: note = Probe
  source 1..20: mol_type = other DNA
ggttcgattccccgacgggg

SEQ ID NO: 22341 - DNA, 23 bp, synthetic construct
  misc_feature 1..23: note = Probe
  source 1..23: mol_type = other DNA
ggttcgattccccgacggggaga

SEQ ID NO: 22342 - DNA, 24 bp, synthetic construct
  misc_feature 1..24: note = Probe
  source 1..24: mol_type = other DNA
ggttcgattccccgacggggagaa

SEQ ID NO: 22343 - DNA, 25 bp, synthetic construct
  misc_feature 1..25: note = Probe
  source 1..25: mol_type = other DNA
ggttcgattccccgacggggagaaa

SEQ ID NO: 22344 - DNA, 24 bp, synthetic construct
  misc_feature 1..24: note = Probe
  source 1..24: mol_type = other DNA
ggttcgattccccgacggggagac

SEQ ID NO: 22345 - DNA, 25 bp, synthetic construct
  misc_feature 1..25: note = Probe
  source 1..25: mol_type = other DNA
ggttcgattccccgacggggagacg

SEQ ID NO: 22346 - DNA, 25 bp, synthetic construct
  misc_feature 1..25: note = Probe
  source 1..25: mol_type = other DNA
ggttcgattccccgacggggagagt

SEQ ID NO: 22347 - DNA, 23 bp, synthetic construct
  misc_feature 1..23: note = Probe
  source 1..23: mol_type = other DNA
ggttcgattccccgacggggagg

SEQ ID NO: 22348 - DNA, 24 bp, synthetic construct
  misc_feature 1..24: note = Probe
  source 1..24: mol_type = other DNA
ggttcgattccccgacggggagga

SEQ ID NO: 22349 - DNA, 24 bp, synthetic construct
  misc_feature 1..24: note = Probe
  source 1..24: mol_type = other DNA
ggttcgattccccgacggggaggc

SEQ ID NO: 22350 - DNA, 25 bp, synthetic construct
  misc_feature 1..25: note = Probe
  source 1..25: mol_type = other DNA
ggttcgattccccgacggggaggca

SEQ ID NO: 22351 - DNA, 26 bp, synthetic construct
  misc_feature 1..26: note = Probe
  source 1..26: mol_type = other DNA
ggttcgattccccgacggggaggcac

SEQ ID NO: 22352 - DNA, 25 bp, synthetic construct
  misc_feature 1..25: note = Probe
  source 1..25: mol_type = other DNA
ggttcgattccccgacggggaggcc

SEQ ID NO: 22353 - DNA, 16 bp, synthetic construct
  misc_feature 1..16: note = Probe
  source 1..16: mol_type = other DNA
ggttcgattcccggcc

SEQ ID NO: 22354 - DNA, 25 bp, synthetic construct
  misc_feature 1..25: note = Probe
  source 1..25: mol_type = other DNA
ggttcgattcccggccaatgcacga

SEQ ID NO: 22355 - DNA, 25 bp, synthetic construct
  misc_feature 1..25: note = Probe
  source 1..25: mol_type = other DNA
ggttcgattcccggccaatgcagca

SEQ ID NO: 22356 - DNA, 25 bp, synthetic construct
  misc_feature 1..25: note = Probe
  source 1..25: mol_type = other DNA
ggttcgattcccggtcatggaacca

SEQ ID NO: 22357 - DNA, 25 bp, synthetic construct
  misc_feature 1..25: note = Probe
  source 1..25: mol_type = other DNA
ggttcgattcctggtcagggaacca

SEQ ID NO: 22358 - DNA, 24 bp, synthetic construct
  misc_feature 1..24: note = Probe
  source 1..24: mol_type = other DNA
ggttcgattccttccttttttgtc

SEQ ID NO: 22359 - DNA, 20 bp, synthetic construct
  misc_feature 1..20: note = Probe
  source 1..20: mol_type = other DNA
ggttcgattctcatagtcct

SEQ ID NO: 22360 - DNA, 23 bp, synthetic construct
  misc_feature 1..23: note = Probe
  source 1..23: mol_type = other DNA
ggttcgattctcatagtcctaga

SEQ ID NO: 22361 - DNA, 24 bp, synthetic construct
  misc_feature 1..24: note = Probe
  source 1..24: mol_type = other DNA
ggttcgattctcatagtcctagaa

SEQ ID NO: 22362 - DNA, 25 bp, synthetic construct
  misc_feature 1..25: note = Probe
  source 1..25: mol_type = other DNA
ggttcgattctcatagtcctagaaa

SEQ ID NO: 22363 - DNA, 20 bp, synthetic construct
  misc_feature 1..20: note = Probe
  source 1..20: mol_type = other DNA
ggttgtagtccgtgcgagaa

SEQ ID NO: 22364 - DNA, 21 bp, synthetic construct
  misc_feature 1..21: note = Probe
  source 1..21: mol_type = other DNA
ggttgtagtccgtgcgagaat

SEQ ID NO: 22365 - DNA, 22 bp, synthetic construct
  misc_feature 1..22: note = Probe
  source 1..22: mol_type = other DNA
ggttgtagtccgtgcgagaata

SEQ ID NO: 22366 - DNA, 23 bp, synthetic construct
  misc_feature 1..23: note = Probe
  source 1..23: mol_type = other DNA
ggttgtagtccgtgcgagaataa

SEQ ID NO: 22367 - DNA, 25 bp, synthetic construct
  misc_feature 1..25: note = Probe
  source 1..25: mol_type = other DNA
ggttgtagtccgtgcgagaataatg

SEQ ID NO: 22368 - DNA, 19 bp, synthetic construct
  misc_feature 1..19: note = Probe
  source 1..19: mol_type = other DNA
ggtttaagtcccattggtc

SEQ ID NO: 22369 - DNA, 24 bp, synthetic construct
  misc_feature 1..24: note = Probe
  source 1..24: mol_type = other DNA
ggtttaagtcccattggtctagta

SEQ ID NO: 22370 - DNA, 29 bp, synthetic construct
  misc_feature 1..29: note = Probe
  source 1..29: mol_type = other DNA
ggtttccgtagtgtagtggttatcacgtt

SEQ ID NO: 22371 - DNA, 34 bp, synthetic construct
  misc_feature 1..34: note = Probe
  source 1..34: mol_type = other DNA
ggtttccgtagtgtagtggttatcacgttcgcct

SEQ ID NO: 22372 - DNA, 36 bp, synthetic construct
  misc_feature 1..36: note = Probe
  source 1..36: mol_type = other DNA
ggtttccgtagtgtagtggttatcacgttcgcctca

SEQ ID NO: 22373 - DNA, 26 bp, synthetic construct
  misc_feature 1..26: note = Probe
  source 1..26: mol_type = other DNA
ggtttggtcctagcctttctattagc

SEQ ID NO: 22374 - DNA, 32 bp, synthetic construct
  misc_feature 1..32: note = Probe
  source 1..32: mol_type = other DNA
ggtttttcatatcattggtcgtggttgtagtc

SEQ ID NO: 22375 - DNA, 33 bp, synthetic construct; identical to SEQ ID NO: 6869
  misc_feature 1..33: note = Probe
  source 1..33: mol_type = other DNA

SEQ ID NO: 22376 - DNA, 36 bp, synthetic construct; identical to SEQ ID NO: 6870
  misc_feature 1..36: note = Probe
  source 1..36: mol_type = other DNA

SEQ ID NO: 22377 - DNA, 38 bp, synthetic construct; identical to SEQ ID NO: 6871
  misc_feature 1..38: note = Probe
  source 1..38: mol_type = other DNA

SEQ ID NO: 22378 - DNA, 20 bp, synthetic construct
  misc_feature 1..20: note = Probe
  source 1..20: mol_type = other DNA
gtaaacaggagatcctgggt

SEQ ID NO: 22379 - DNA, 33 bp, synthetic construct
  misc_feature 1..33: note = Probe
  source 1..33: mol_type = other DNA
gtaaacaggagatcctgggttcgaatcccagcg

SEQ ID NO: 22380 - DNA, 36 bp, synthetic construct
  misc_feature 1..36: note = Probe
  source 1..36: mol_type = other DNA
gtaaacaggagatcctgggttcgaatcccagcgggg

SEQ ID NO: 22381 - DNA, 37 bp, synthetic construct
  misc_feature 1..37: note = Probe
  source 1..37: mol_type = other DNA
gtaaacaggagatcctgggttcgaatcccagcggggc

SEQ ID NO: 22382 - DNA, 40 bp, synthetic construct
  misc_feature 1..40: note = Probe
  source 1..40: mol_type = other DNA
gtaaacaggagatcctgggttcgaatcccagcggggcctg

SEQ ID NO: 22383 - DNA, 40 bp, synthetic construct
  misc_feature 1..40: note = Probe
  source 1..40: mol_type = other DNA
gtaaacaggagatcctgggttcgaatcccagcggggcctt

SEQ ID NO: 22384 - DNA, 42 bp, synthetic construct
  misc_feature 1..42: note = Probe
  source 1..42: mol_type = other DNA
gtaaacaggagatcctgggttcgaatcccagcggggccttac

SEQ ID NO: 22385 - DNA, 37 bp, synthetic construct
  misc_feature 1..37: note = Probe
  source 1..37: mol_type = other DNA
gtaaacaggagatcctgggttcgaatcccagcggtgc

SEQ ID NO: 22386 - DNA, 38 bp, synthetic construct
  misc_feature 1..38: note = Probe
  source 1..38: mol_type = other DNA
gtaaacaggagatcctgggttcgaatcccagcggtgcc

SEQ ID NO: 22387 - DNA, 40 bp, synthetic construct
  misc_feature 1..40: note = Probe
  source 1..40: mol_type = other DNA
gtaaacaggagatcctgggttcgaatcccagcggtgcctc

SEQ ID NO: 22388 - DNA, 42 bp, synthetic construct; identical to SEQ ID NO: 6874
  misc_feature 1..42: note = Probe
  source 1..42: mol_type = other DNA

SEQ ID NO: 22389 - DNA, 16 bp, synthetic construct
  misc_feature 1..16: note = Probe
  source 1..16: mol_type = other DNA
gtaaaccaggggtcgc

SEQ ID NO: 22390 - DNA, 17 bp, synthetic construct
  misc_feature 1..17: note = Probe
  source 1..17: mol_type = other DNA
gtaaaccaggggtcgcg

SEQ ID NO: 22391 - DNA, 42 bp, synthetic construct
  misc_feature 1..42: note = Probe
  source 1..42: mol_type = other DNA
gtaaaccaggggtcgcgagttcaaatctcgctggggcctcgg

SEQ ID NO: 22392 - DNA, 42 bp, synthetic construct; identical to SEQ ID NO: 6876
  misc_feature 1..42: note = Probe
  source 1..42: mol_type = other DNA

SEQ ID NO: 22393 - DNA, 42 bp, synthetic construct
  misc_feature 1..42: note = Probe
  source 1..42: mol_type = other DNA
gtaaaccaggggtcgcgagttcgatcctcgctggggcctcct

SEQ ID NO: 22394 - DNA, 20 bp, synthetic construct
  misc_feature 1..20: note = Probe
  source 1..20: mol_type = other DNA
gtaaaccgaagatcacgggt

SEQ ID NO: 22395 - DNA, 42 bp, synthetic construct
  misc_feature 1..42: note = Probe
  source 1..42: mol_type = other DNA
gtaaaccgaagatcacgggttcgaaccccgtccgtgcctgat

SEQ ID NO: 22396 - DNA, 42 bp, synthetic construct
  misc_feature 1..42: note = Probe
  source 1..42: mol_type = other DNA
gtaaaccgaagatcgcgggttcgaaccccgtccgtgcctgag

SEQ ID NO: 22397 - DNA, 32 bp, synthetic construct; identical to SEQ ID NO: 6877
  misc_feature 1..32: note = Probe
  source 1..32: mol_type = other DNA

SEQ ID NO: 22398 - DNA, 36 bp, synthetic construct; identical to SEQ ID NO: 6879
  misc_feature 1..36: note = Probe
  source 1..36: mol_type = other DNA

SEQ ID NO: 22399 - DNA, 37 bp, synthetic construct; identical to SEQ ID NO: 6880
  misc_feature 1..37: note = Probe
  source 1..37: mol_type = other DNA

SEQ ID NO: 22400 - DNA, 38 bp, synthetic construct; identical to SEQ ID NO: 6881
  misc_feature 1..38: note = Probe
  source 1..38: mol_type = other DNA

SEQ ID NO: 22401 - DNA, 36 bp, synthetic construct
  misc_feature 1..36: note = Probe
  source 1..36: mol_type = other DNA
gtaaataataggagcttaaacccccttatttctagg

SEQ ID NO: 22402 - DNA, 37 bp, synthetic construct; identical to SEQ ID NO: 6883
  misc_feature 1..37: note = Probe
  source 1..37: mol_type = other DNA

SEQ ID NO: 22403 - DNA, 42 bp, synthetic construct; identical to SEQ ID NO: 6884
  misc_feature 1..42: note = Probe
  source 1..42: mol_type = other DNA

SEQ ID NO: 22404 - DNA, 40 bp, synthetic construct; identical to SEQ ID NO: 6888
  misc_feature 1..40: note = Probe
  source 1..40: mol_type = other DNA

SEQ ID NO: 22405 - DNA, 22 bp, synthetic construct
  misc_feature 1..22: note = Probe
  source 1..22: mol_type = other DNA
gtaagcaccttgcctgcgggct

SEQ ID NO: 22406 - DNA, 23 bp, synthetic construct
  misc_feature 1..23: note = Probe
  source 1..23: mol_type = other DNA
gtaagcaccttgcctgcgggctt

SEQ ID NO: 22407 - DNA, 32 bp, synthetic construct
  misc_feature 1..32: note = Probe
  source 1..32: mol_type = other DNA
gtaagcatagctgccttccaagcagttgaccc

SEQ ID NO: 22408 - DNA, 30 bp, synthetic construct; identical to SEQ ID NO: 6891
  misc_feature 1..30: note = Probe
  source 1..30: mol_type = other DNA

SEQ ID NO: 22409 - DNA, 31 bp, synthetic construct; identical to SEQ ID NO: 6892
  misc_feature 1..31: note = Probe
  source 1..31: mol_type = other DNA

SEQ ID NO: 22410 - DNA, 32 bp, synthetic construct; identical to SEQ ID NO: 6893
  misc_feature 1..32: note = Probe
  source 1..32: mol_type = other DNA

SEQ ID NO: 22411 - DNA, 33 bp, synthetic construct; identical to SEQ ID NO: 6894
  misc_feature 1..33: note = Probe
  source 1..33: mol_type = other DNA

SEQ ID NO: 22412 - DNA, 34 bp, synthetic construct; identical to SEQ ID NO: 6895
  misc_feature 1..34: note = Probe
  source 1..34: mol_type = other DNA

SEQ ID NO: 22413 - DNA, 35 bp, synthetic construct; identical to SEQ ID NO: 6896
  misc_feature 1..35: note = Probe
  source 1..35: mol_type = other DNA

SEQ ID NO: 22414 - DNA, 36 bp, synthetic construct; identical to SEQ ID NO: 6897
  misc_feature 1..36: note = Probe
  source 1..36: mol_type = other DNA

SEQ ID NO: 22415 - DNA, 37 bp, synthetic construct; identical to SEQ ID NO: 6898
  misc_feature 1..37: note = Probe
  source 1..37: mol_type = other DNA

SEQ ID NO: 22416 - DNA, 39 bp, synthetic construct; identical to SEQ ID NO: 6899
  misc_feature 1..39: note = Probe
  source 1..39: mol_type = other DNA

SEQ ID NO: 22417 - DNA, 41 bp, synthetic construct; identical to SEQ ID NO: 6901
  misc_feature 1..41: note = Probe
  source 1..41: mol_type = other DNA

SEQ ID NO: 22418 - DNA, 43 bp, synthetic construct; identical to SEQ ID NO: 6903
  misc_feature 1..43: note = Probe
  source 1..43: mol_type = other DNA

SEQ ID NO: 22419 - DNA, 44 bp, synthetic construct; identical to SEQ ID NO: 6904
  misc_feature 1..44: note = Probe
  source 1..44: mol_type = other DNA

SEQ ID NO: 22420 - DNA, 45 bp, synthetic construct; identical to SEQ ID NO: 6905
  misc_feature 1..45: note = Probe
  source 1..45: mol_type = other DNA

SEQ ID NO: 22421 - DNA, 46 bp, synthetic construct; identical to SEQ ID NO: 6906
  misc_feature 1..46: note = Probe
  source 1..46: mol_type = other DNA

SEQ ID NO: 22422 - DNA, 50 bp, synthetic construct; identical to SEQ ID NO: 6907
  misc_feature 1..50: note = Probe
  source 1..50: mol_type = other DNA

SEQ ID NO: 22423 - DNA, 23 bp, synthetic construct
  misc_feature 1..23: note = Probe
  source 1..23: mol_type = other DNA
gtaatcgcataaaacttaaaact

SEQ ID NO: 22424 - DNA, 32 bp, synthetic construct
  misc_feature 1..32: note = Probe
  source 1..32: mol_type = other DNA
gtaatcgcataaaacttaaaactttacagtca

SEQ ID NO: 22425 - DNA, 16 bp, synthetic construct
  misc_feature 1..16: note = Probe
  source 1..16: mol_type = other DNA
gtaccgttaacttcca

SEQ ID NO: 22426 - DNA, 27 bp, synthetic construct
  misc_feature 1..27: note = Probe
  source 1..27: mol_type = other DNA
gtaccgttaacttccaattaactagtt

SEQ ID NO: 22427 - DNA, 31 bp, synthetic construct; identical to SEQ ID NO: 6912
  misc_feature 1..31: note = Probe
  source 1..31: mol_type = other DNA

SEQ ID NO: 22428 - DNA, 32 bp, synthetic construct
  misc_feature 1..32: note = Probe
  source 1..32: mol_type = other DNA
gtaccgttaacttccaattaactagttttgac

SEQ ID NO: 22429 - DNA, 36 bp, synthetic construct
  misc_feature 1..36: note = Probe
  source 1..36: mol_type = other DNA
gtaccgttaacttccaattaactagttttgacaaca

SEQ ID NO: 22430 - DNA, 50 bp, synthetic construct; identical to SEQ ID NO: 1465
  misc_feature 1..50: note = Probe
  source 1..50: mol_type = other DNA

SEQ ID NO: 22431 - DNA, 23 bp, synthetic construct
  misc_feature 1..23: note = Probe
  source 1..23: mol_type = other DNA
gtaccttgatgtcgcctcaattt

SEQ ID NO: 22432 - DNA, 25 bp, synthetic construct
  misc_feature 1..25: note = Probe
  source 1..25: mol_type = other DNA
gtaccttgatgtcgcctcaatttct

SEQ ID NO: 22433 - DNA, 30 bp, synthetic construct
  misc_feature 1..30: note = Probe
  source 1..30: mol_type = other DNA
gtaccttgatgtcgcctcaatttctcaacg

SEQ ID NO: 22434 - DNA, 38 bp, synthetic construct
  misc_feature 1..38: note = Probe
  source 1..38: mol_type = other DNA
gtacgaggccccgggttcgacccccggctcctccagtt

SEQ ID NO: 22435 - DNA, 38 bp, synthetic construct; identical to SEQ ID NO: 6914
  misc_feature 1..38: note = Probe
  source 1..38: mol_type = other DNA

SEQ ID NO: 22436 - DNA, 34 bp, synthetic construct
  misc_feature 1..34: note = Probe
  source 1..34: mol_type = other DNA
gtacgcgaggcattggtggttcagtggtagaatt

SEQ ID NO: 22437 - DNA, 36 bp, synthetic construct
  misc_feature 1..36: note = Probe
  source 1..36: mol_type = other DNA
gtacgcgaggcattggtggttcagtggtagaattct

SEQ ID NO: 22438 - DNA, 38 bp, synthetic construct
  misc_feature 1..38: note = Probe
  source 1..38: mol_type = other DNA
gtacgcgaggcattggtggttcagtggtagaattctcg

SEQ ID NO: 22439 - DNA, 36 bp, synthetic construct
  misc_feature 1..36: note = Probe
  source 1..36: mol_type = other DNA
gtagaattctcgcctcccacgcgggagacccgggtt

SEQ ID NO: 22440 - DNA, 31 bp, synthetic construct
  misc_feature 1..31: note = Probe
  source 1..31: mol_type = other DNA
gtagaattctcgcctgccacgcgggaggccc

SEQ ID NO: 22441 - DNA, 35 bp, synthetic construct
  misc_feature 1..35: note = Probe
  source 1..35: mol_type = other DNA
gtagaattctcgcctgccacgcgggaggcccgggt

SEQ ID NO: 22442 - DNA, 50 bp, synthetic construct
  misc_feature 1..50: note = Probe
  source 1..50: mol_type = other DNA
gtagaattctcgcctgccacgcgggaggcccgggttcgattcccggccca

SEQ ID NO: 22443 - DNA, 36 bp, synthetic construct
  misc_feature 1..36: note = Probe
  source 1..36: mol_type = other DNA
gtagagcatgagactcttaatctcagggtcgtgggt

SEQ ID NO: 22444 - DNA, 16 bp, synthetic construct
  misc_feature 1..16: note = Probe
  source 1..16: mol_type = other DNA
gtagagcatgggactc

SEQ ID NO: 22445 - DNA, 33 bp, synthetic construct; identical to SEQ ID NO: 6915
  misc_feature 1..33: note = Probe
  source 1..33: mol_type = other DNA

SEQ ID NO: 22446 - DNA, 36 bp, synthetic construct
  misc_feature 1..36: note = Probe
  source 1..36: mol_type = other DNA
gtagagcatgggactcttaatcccagggtcgtgggt

SEQ ID NO: 22447 - DNA, 29 bp, synthetic construct
  misc_feature 1..29: note = Probe
  source 1..29: mol_type = other DNA
gtagaggttccatagtgtagtggttatca

SEQ ID NO: 22448 - DNA, 31 bp, synthetic construct
  misc_feature 1..31: note = Probe
  source 1..31: mol_type = other DNA
gtagaggttccatagtgtagtggttatcacg

SEQ ID NO: 22449 - DNA, 32 bp, synthetic construct
  misc_feature 1..32: note = Probe
  source 1..32: mol_type = other DNA
gtagaggttccatagtgtagtggttatcacgt

SEQ ID NO: 22450 - DNA, 33 bp, synthetic construct
  misc_feature 1..33: note = Probe
  source 1..33: mol_type = other DNA
gtagaggttccatagtgtagtggttatcacgtc

SEQ ID NO: 22451 - DNA, 35 bp, synthetic construct
  misc_feature 1..35: note = Probe
  source 1..35: mol_type = other DNA
gtagaggttccatagtgtagtggttatcacgtctg

SEQ ID NO: 22452 - DNA, 36 bp, synthetic construct
  misc_feature 1..36: note = Probe
  source 1..36: mol_type = other DNA
gtagaggttccatagtgtagtggttatcacgtctgc

SEQ ID NO: 22453 - DNA, 37 bp, synthetic construct
  misc_feature 1..37: note = Probe
  source 1..37: mol_type = other DNA
gtagaggttccatagtgtagtggttatcacgtctgct

SEQ ID NO: 22454 - DNA, 39 bp, synthetic construct
  misc_feature 1..39: note = Probe
  source 1..39: mol_type = other DNA
gtagaggttccatagtgtagtggttatcacgtctgcttt

SEQ ID NO: 22455 - DNA, 27 bp, synthetic construct
  misc_feature 1..27: note = Probe
  source 1..27: mol_type = other DNA
gtagctcagtggtagagcgcatgctta

SEQ ID NO: 22456 - DNA, 27 bp, synthetic construct
  misc_feature 1..27: note = Probe
  source 1..27: mol_type = other DNA
gtagctcagtggtagagcgcatgcttc

SEQ ID NO: 22457 - DNA, 16 bp, synthetic construct
  misc_feature 1..16: note = Probe
  source 1..16: mol_type = other DNA
gtagtccgtgcgagaa

SEQ ID NO: 22458 - DNA, 18 bp, synthetic construct
  misc_feature 1..18: note = Probe
  source 1..18: mol_type = other DNA
gtagtccgtgcgagaata

SEQ ID NO: 22459 - DNA, 19 bp, synthetic construct
  misc_feature 1..19: note = Probe
  source 1..19: mol_type = other DNA
gtagtccgtgcgagaataa

SEQ ID NO: 22460 - DNA, 21 bp, synthetic construct
  misc_feature 1..21: note = Probe
  source 1..21: mol_type = other DNA
gtagtccgtgcgagaataatg

SEQ ID NO: 22461 - DNA, 17 bp, synthetic construct
  misc_feature 1..17: note = Probe
  source 1..17: mol_type = other DNA
gtagtcgtggccgagtg

SEQ ID NO: 22462 - DNA, 20 bp, synthetic construct
  misc_feature 1..20: note = Probe
  source 1..20: mol_type = other DNA
gtagtcgtggccgagtggtt

SEQ ID NO: 22463 - DNA, 38 bp, synthetic construct
  misc_feature 1..38: note = Probe
  source 1..38: mol_type = other DNA
gtagtcgtggccgagtggttaaggtgatggactagaaa

SEQ ID NO: 22464 - DNA, 42 bp, synthetic construct
  misc_feature 1..42: note = Probe
  source 1..42: mol_type = other DNA
gtagtggttatcacgttcgcctcacacgcgaaaggtccccgg

SEQ ID NO: 22465 - DNA, 43 bp, synthetic construct
  misc_feature 1..43: note = Probe
  source 1..43: mol_type = other DNA
gtagtggttatcacgttcgcctcacacgcgaaaggtccccggt

SEQ ID NO: 22466 - DNA, 26 bp, synthetic construct
  misc_feature 1..26: note = Probe
  source 1..26: mol_type = other DNA
gtagtgtagcggttatcacattcgcc

SEQ ID NO: 22467 - DNA, 22 bp, synthetic construct
  misc_feature 1..22: note = Probe
  source 1..22: mol_type = other DNA
gtagtgtagtggtcatcacgtt

SEQ ID NO: 22468 - DNA, 25 bp, synthetic construct
  misc_feature 1..25: note = Probe
  source 1..25: mol_type = other DNA
gtagtgtagtggtcatcacgttcgc

SEQ ID NO: 22469 - DNA, 26 bp, synthetic construct
  misc_feature 1..26: note = Probe
  source 1..26: mol_type = other DNA
gtagtgtagtggtcatcacgttcgcc

SEQ ID NO: 22470 - DNA, 22 bp, synthetic construct
  misc_feature 1..22: note = Probe
  source 1..22: mol_type = other DNA
gtagtgtagtggttatcacgtt

SEQ ID NO: 22471 - DNA, 25 bp, synthetic construct
  misc_feature 1..25: note = Probe
  source 1..25: mol_type = other DNA
gtagtgtagtggttatcacgttcgc

SEQ ID NO: 22472 - DNA, 26 bp, synthetic construct
  misc_feature 1..26: note = Probe
  source 1..26: mol_type = other DNA
gtagtgtagtggttatcacgttcgcc

SEQ ID NO: 22473 - DNA, 27 bp, synthetic construct
  misc_feature 1..27: note = Probe
  source 1..27: mol_type = other DNA
gtagtgtagtggttatcacgttcgcct

SEQ ID NO: 22474 - DNA, 28 bp, synthetic construct
  misc_feature 1..28: note = Probe
  source 1..28: mol_type = other DNA
gtagtgtagtggttatcacgttcgcctc

SEQ ID NO: 22475 - DNA, 29 bp, synthetic construct
  misc_feature 1..29: note = Probe
  source 1..29: mol_type = other DNA
gtagtgtagtggttatcacgttcgcctca

SEQ ID NO: 22476 - DNA, 26 bp, synthetic construct
  misc_feature 1..26: note = Probe
  source 1..26: mol_type = other DNA
gtatagagcagagtggcgcagcggaa

SEQ ID NO: 22477 - DNA, 31 bp, synthetic construct; identical to SEQ ID NO: 6923
  misc_feature 1..31: note = Probe
  source 1..31: mol_type = other DNA

SEQ ID NO: 22478 - DNA, 26 bp, synthetic construct
  misc_feature 1..26: note = Probe
  source 1..26: mol_type = other DNA
gtatagtggtgagcatagctgccttc

SEQ ID NO: 22479 - DNA, 21 bp, synthetic construct
  misc_feature 1..21: note = Probe
  source 1..21: mol_type = other DNA
gtatagtggtgagtatccccg

SEQ ID NO: 22480 - DNA, 22 bp, synthetic construct
  misc_feature 1..22: note = Probe
  source 1..22: mol_type = other DNA
gtatagtggtgagtatccccgc

SEQ ID NO: 22481 - DNA, 23 bp, synthetic construct
  misc_feature 1..23: note = Probe
  source 1..23: mol_type = other DNA
gtatagtggtgagtatccccgcc

SEQ ID NO: 22482 - DNA, 24 bp, synthetic construct
  misc_feature 1..24: note = Probe
  source 1..24: mol_type = other DNA
gtatagtggtgagtatccccgcct

SEQ ID NO: 22483 - DNA, 26 bp, synthetic construct
  misc_feature 1..26: note = Probe
  source 1..26: mol_type = other DNA
gtatagtggtgagtatccccgcctgt

SEQ ID NO: 22484 - DNA, 27 bp, synthetic construct
  misc_feature 1..27: note = Probe
  source 1..27: mol_type = other DNA
gtatagtggtgagtatccccgcctgtc

SEQ ID NO: 22485 - DNA, 31 bp, synthetic construct
  misc_feature 1..31: note = Probe
  source 1..31: mol_type = other DNA
gtatcatgcaagattcccattcttgcgaccc

SEQ ID NO: 22486 - DNA, 33 bp, synthetic construct
  misc_feature 1..33: note = Probe
  source 1..33: mol_type = other DNA
gtatcatgcaagattcccattcttgcgacccgg

SEQ ID NO: 22487 - DNA, 36 bp, synthetic construct
  misc_feature 1..36: note = Probe
  source 1..36: mol_type = other DNA
gtatcatgcaagattcccattcttgcgacccgggtt

SEQ ID NO: 22488 - DNA, 28 bp, synthetic construct
  misc_feature 1..28: note = Probe
  source 1..28: mol_type = other DNA
gtatccccgcctgtcacgcgggagaccg

SEQ ID NO: 22489 - DNA, 29 bp, synthetic construct
  misc_feature 1..29: note = Probe
  source 1..29: mol_type = other DNA
gtatccccgcctgtcacgcgggagaccgg

SEQ ID NO: 22490 - DNA, 33 bp, synthetic construct
  misc_feature 1..33: note = Probe
  source 1..33: mol_type = other DNA
gtatccccgcctgtcacgcgggagaccggggtt

SEQ ID NO: 22491 - DNA, 34 bp, synthetic construct
  misc_feature 1..34: note = Probe
  source 1..34: mol_type = other DNA
gtatccccgcctgtcacgcgggagaccggggttc

SEQ ID NO: 22492 - DNA, 38 bp, synthetic construct
  misc_feature 1..38: note = Probe
  source 1..38: mol_type = other DNA
gtatgaggccccgggttcaatccccggcatctccagac

SEQ ID NO: 22493 - DNA, 29 bp, synthetic construct
  misc_feature 1..29: note = Probe
  source 1..29: mol_type = other DNA
gtatgaggccccgggttcgatccccggca

SEQ ID NO: 22494 - DNA, 32 bp, synthetic construct
  misc_feature 1..32: note = Probe
  source 1..32: mol_type = other DNA
gtatgaggccccgggttcgatccccggcatct

SEQ ID NO: 22495 - DNA, 33 bp, synthetic construct
  misc_feature 1..33: note = Probe
  source 1..33: mol_type = other DNA
gtatgaggccccgggttcgatccccggcatctc

SEQ ID NO: 22496 - DNA, 36 bp, synthetic construct
  misc_feature 1..36: note = Probe
  source 1..36: mol_type = other DNA
gtatgaggccccgggttcgatccccggcatctccaa

SEQ ID NO: 22497 - DNA, 36 bp, synthetic construct
  misc_feature 1..36: note = Probe
  source 1..36: mol_type = other DNA
gtatgaggccccgggttcgatccccggcatctccag

SEQ ID NO: 22498 - DNA, 38 bp, synthetic construct
  misc_feature 1..38: note = Probe
  source 1..38: mol_type = other DNA
gtatgaggccccgggttcgatccccggcatctccagtg

SEQ ID NO: 22499 - DNA, 36 bp, synthetic construct
  misc_feature 1..36: note = Probe
  source 1..36: mol_type = other DNA
gtatgaggccccgggttcgatccccggcatctccat

SEQ ID NO: 22500 - DNA, 37 bp, synthetic construct
  misc_feature 1..37: note = Probe
  source 1..37: mol_type = other DNA
gtatgaggccccgggttcgatccccggcatctccatt

SEQ ID NO: 22501 - DNA, 38 bp, synthetic construct
  misc_feature 1..38: note = Probe
  source 1..38: mol_type = other DNA
gtatgaggccccgggttcgatccccggcatctccattg

SEQ ID NO: 22502 - DNA, 38 bp, synthetic construct
  misc_feature 1..38: note = Probe
  source 1..38: mol_type = other DNA
gtatgaggcctcgggttcgatccccgacacctccaagc

SEQ ID NO: 22503 - DNA, 16 bp, synthetic construct
  misc_feature 1..16: note = Probe
  source 1..16: mol_type = other DNA
gtatgaggtcccgggt

SEQ ID NO: 22504 - DNA, 38 bp, synthetic construct
  misc_feature 1..38: note = Probe
  source 1..38: mol_type = other DNA
gtatgaggtcccgggttcgatccccggcacctccaaac

SEQ ID NO: 22505 - DNA, 32 bp, synthetic construct
  misc_feature 1..32: note = Probe
  source 1..32: mol_type = other DNA
gtatgaggtcccgggttcgatccccggcatct

SEQ ID NO: 22506 - DNA, 33 bp, synthetic construct
  misc_feature 1..33: note = Probe
  source 1..33: mol_type = other DNA
gtatgaggtcccgggttcgatccccggcatctc

SEQ ID NO: 22507 - DNA, 35 bp, synthetic construct
  misc_feature 1..35: note = Probe
  source 1..35: mol_type = other DNA
gtatgaggtcccgggttcgatccccggcatctcca

SEQ ID NO: 22508 - DNA, 36 bp, synthetic construct
  misc_feature 1..36: note = Probe
  source 1..36: mol_type = other DNA
gtatgaggtcccgggttcgatccccggcatctccaa

SEQ ID NO: 22509 - DNA, 37 bp, synthetic construct
  misc_feature 1..37: note = Probe
  source 1..37: mol_type = other DNA
gtatgaggtcccgggttcgatccccggcatctccaag

SEQ ID NO: 22510 - DNA, 38 bp, synthetic construct; identical to SEQ ID NO: 6928
  misc_feature 1..38: note = Probe
  source 1..38: mol_type = other DNA

SEQ ID NO: 22511 - DNA, 37 bp, synthetic construct
  misc_feature 1..37: note = Probe
  source 1..37: mol_type = other DNA
gtatgaggtcccgggttcgatccccggcatctccaat

SEQ ID NO: 22512 - DNA, 38 bp, synthetic construct
  misc_feature 1..38: note = Probe
  source 1..38: mol_type = other DNA
gtatgaggtcccgggttcgatccccggcatctccaata

SEQ ID NO: 22513 - DNA, 31 bp, synthetic construct
  misc_feature 1..31: note = Probe
  source 1..31: mol_type = other DNA
gtatgattctcgcttagggtgcgagaggtcc

SEQ ID NO: 22514 - DNA, 32 bp, synthetic construct; identical to SEQ ID NO: 6929
  misc_feature 1..32: note = Probe
  source 1..32: mol_type = other DNA

SEQ ID NO: 22515 - DNA, 33 bp, synthetic construct; identical to SEQ ID NO: 6930
  misc_feature 1..33: note = Probe
  source 1..33: mol_type = other DNA

SEQ ID NO: 22516 - DNA, 34 bp, synthetic construct
  misc_feature 1..34: note = Probe
  source 1..34: mol_type = other DNA
gtatgattctcgcttagggtgcgagaggtcccgg

SEQ ID NO: 22517 - DNA, 35 bp, synthetic construct
  misc_feature 1..35: note = Probe
  source 1..35: mol_type = other DNA
gtatgattctcgcttagggtgcgagaggtcccggg

SEQ ID NO: 22518 - DNA, 36 bp, synthetic construct
  misc_feature 1..36: note = Probe
  source 1..36: mol_type = other DNA
gtatgattctcgcttagggtgcgagaggtcccgggt

SEQ ID NO: 22519 - DNA, 37 bp, synthetic construct
  misc_feature 1..37: note = Probe
  source 1..37: mol_type = other DNA
gtatgattctcgcttagggtgcgagaggtcccgggtt

SEQ ID NO: 22520 - DNA, 31 bp, synthetic construct
  misc_feature 1..31: note = Probe
  source 1..31: mol_type = other DNA
gtatgattctcgcttcgggtgcgagaggtcc

SEQ ID NO: 22521 - DNA, 32 bp, synthetic construct; identical to SEQ ID NO: 6931
  misc_feature 1..32: note = Probe
  source 1..32: mol_type = other DNA

SEQ ID NO: 22522 - DNA, 33 bp, synthetic construct; identical to SEQ ID NO: 6932
  misc_feature 1..33: note = Probe
  source 1..33: mol_type = other DNA

SEQ ID NO: 22523 - DNA, 34 bp, synthetic construct
  misc_feature 1..34: note = Probe
  source 1..34: mol_type = other DNA
gtatgattctcgcttcgggtgcgagaggtcccgg

SEQ ID NO: 22524 - DNA, 37 bp, synthetic construct; identical to SEQ ID NO: 6933
  misc_feature 1..37: note = Probe
  source 1..37: mol_type = other DNA

SEQ ID NO: 22525 - DNA, 31 bp, synthetic construct
  misc_feature 1..31: note = Probe
  source 1..31: mol_type = other DNA
gtatgattctcgctttgggtgcgagaggtcc

SEQ ID NO: 22526 - DNA, 33 bp, synthetic construct; identical to SEQ ID NO: 6934
  misc_feature 1..33: note = Probe
  source 1..33: mol_type = other DNA

SEQ ID NO: 22527 - DNA, 34 bp, synthetic construct; identical to SEQ ID NO: 6935
  misc_feature 1..34: note = Probe
  source 1..34: mol_type = other DNA

SEQ ID NO: 22528 - DNA, 35 bp, synthetic construct
  misc_feature 1..35: note = Probe
  source 1..35: mol_type = other DNA
gtatgattctcggtttgggtccgagaggtcccggg

SEQ ID NO: 22529 - DNA, 36 bp, synthetic construct
  misc_feature 1..36: note = Probe
  source 1..36: mol_type = other DNA
gtatgattctcggtttgggtccgagaggtcccgggt

SEQ ID NO: 22530 - DNA, 33 bp, synthetic construct; identical to SEQ ID NO: 6938
  misc_feature 1..33: note = Probe
  source 1..33: mol_type = other DNA

SEQ ID NO: 22531 - DNA, 36 bp, synthetic construct
  misc_feature 1..36: note = Probe
  source 1..36: mol_type = other DNA
gtcaaagttaaattataggctaaatcctatatatct

SEQ ID NO: 22532 - DNA, 38 bp, synthetic construct
  misc_feature 1..38: note = Probe
  source 1..38: mol_type = other DNA
gtcaaagttaaattataggctaaatcctatatatctta

SEQ ID NO: 22533 - DNA, 40 bp, synthetic construct
  misc_feature 1..40: note = Probe
  source 1..40: mol_type = other DNA
gtcaaagttaaattataggctaaatcctatatatcttaat

SEQ ID NO: 22534 - DNA, 41 bp, synthetic construct
  misc_feature 1..41: note = Probe
  source 1..41: mol_type = other DNA
gtcaaagttaaattataggctaaatcctatatatcttaatg

SEQ ID NO: 22535 - DNA, 43 bp, synthetic construct
  misc_feature 1..43: note = Probe
  source 1..43: mol_type = other DNA
gtcaaagttaaattataggctaaatcctatatatcttaatggc

SEQ ID NO: 22536 - DNA, 22 bp, synthetic construct
  misc_feature 1..22: note = Probe
  source 1..22: mol_type = other DNA
gtcacctggcaggtgcctcttt

SEQ ID NO: 22537 - DNA, 23 bp, synthetic construct
  misc_feature 1..23: note = Probe
  source 1..23: mol_type = other DNA
gtcacctggcaggtgcctctttt

SEQ ID NO: 22538 - DNA, 18 bp, synthetic construct
  misc_feature 1..18: note = Probe
  source 1..18: mol_type = other DNA
gtcacgcgggagaccggg

SEQ ID NO: 22539 - DNA, 19 bp, synthetic construct
  misc_feature 1..19: note = Probe
  source 1..19: mol_type = other DNA
gtcacgcgggagaccgggg

SEQ ID NO: 22540 - DNA, 22 bp, synthetic construct
  misc_feature 1..22: note = Probe
  source 1..22: mol_type = other DNA
gtcacgcgggagaccggggttc

SEQ ID NO: 22541 - DNA, 23 bp, synthetic construct
  misc_feature 1..23: note = Probe
  source 1..23: mol_type = other DNA
gtcacgcgggagaccggggttca

SEQ ID NO: 22542 - DNA, 24 bp, synthetic construct
  misc_feature 1..24: note = Probe
  source 1..24: mol_type = other DNA
gtcacgcgggagaccggggttcaa

SEQ ID NO: 22543 - DNA, 33 bp, synthetic construct
  misc_feature 1..33: note = Probe
  source 1..33: mol_type = other DNA
gtcacgcgggagaccggggttcaattccccgac

SEQ ID NO: 22544 - DNA, 34 bp, synthetic construct
  misc_feature 1..34: note = Probe
  source 1..34: mol_type = other DNA
gtcacgcgggagaccggggttcaattccccgacg

SEQ ID NO: 22545 - DNA, 42 bp, synthetic construct; identical to SEQ ID NO: 6945
  misc_feature 1..42: note = Probe
  source 1..42: mol_type = other DNA

SEQ ID NO: 22546 - DNA, 23 bp, synthetic construct
  misc_feature 1..23: note = Probe
  source 1..23: mol_type = other DNA
gtcacgcgggagaccggggttcg

SEQ ID NO: 22547 - DNA, 25 bp, synthetic construct
  misc_feature 1..25: note = Probe
  source 1..25: mol_type = other DNA
gtcacgcgggagaccggggttcgat

SEQ ID NO: 22548 - DNA, 26 bp, synthetic construct
  misc_feature 1..26: note = Probe
  source 1..26: mol_type = other DNA
gtcacgcgggagaccggggttcgatt

SEQ ID NO: 22549 - DNA, 38 bp, synthetic construct
  misc_feature 1..38: note = Probe
  source 1..38: mol_type = other DNA
gtcacgcgggagaccggggttcgattccccgacgggga

SEQ ID NO: 22550 - DNA, 39 bp, synthetic construct; identical to SEQ ID NO: 1474
  misc_feature 1..39: note = Probe
  source 1..39: mol_type = other DNA

SEQ ID NO: 22551 - DNA, 40 bp, synthetic construct; identical to SEQ ID NO: 6946
  misc_feature 1..40: note = Probe
  source 1..40: mol_type = other DNA

SEQ ID NO: 22552 - DNA, 42 bp, synthetic construct
  misc_feature 1..42: note = Probe
  source 1..42: mol_type = other DNA
gtcacgcgggagaccggggttcgattccccgacggggagacg

SEQ ID NO: 22553 - DNA, 42 bp, synthetic construct
  misc_feature 1..42: note = Probe
  source 1..42: mol_type = other DNA
gtcacgcgggagaccggggttcgattccccgacggggagagt

SEQ ID NO: 22554 - DNA, 40 bp, synthetic construct; identical to SEQ ID NO: 6948
  misc_feature 1..40: note = Probe
  source 1..40: mol_type = other DNA

SEQ ID NO: 22555 - DNA, 42 bp, synthetic construct; identical to SEQ ID NO: 6950
  misc_feature 1..42: note = Probe
  source 1..42: mol_type = other DNA

SEQ ID NO: 22556 - DNA, 50 bp, synthetic construct; identical to SEQ ID NO: 6952
  misc_feature 1..50: note = Probe
  source 1..50: mol_type = other DNA

SEQ ID NO: 22557 - DNA, 42 bp, synthetic construct
  misc_feature 1..42: note = Probe
  source 1..42: mol_type = other DNA
gtcacgcgggagaccggggttcgattccccgacggggaggcc

SEQ ID NO: 22558 - DNA, 22 bp, synthetic construct
  misc_feature 1..22: note = Probe
  source 1..22: mol_type = other DNA
gtcagaggttcaattcctcttc

SEQ ID NO: 22559 - DNA, 23 bp, synthetic construct
  misc_feature 1..23: note = Probe
  source 1..23: mol_type = other DNA
gtcagaggttcaattcctcttct

SEQ ID NO: 22560 - DNA, 24 bp, synthetic construct
  misc_feature 1..24: note = Probe
  source 1..24: mol_type = other DNA
gtcagaggttcaattcctcttctt

SEQ ID NO: 22561 - DNA, 25 bp, synthetic construct
  misc_feature 1..25: note = Probe
  source 1..25: mol_type = other DNA
gtcagaggttcaattcctcttctta

SEQ ID NO: 22562 - DNA, 26 bp, synthetic construct
  misc_feature 1..26: note = Probe
  source 1..26: mol_type = other DNA
gtcagaggttcaattcctcttcttaa

SEQ ID NO: 22563 - DNA, 28 bp, synthetic construct
  misc_feature 1..28: note = Probe
  source 1..28: mol_type = other DNA
gtcagaggttcaattcctcttcttaaca

SEQ ID NO: 22564 - DNA, 30 bp, synthetic construct
  misc_feature 1..30: note = Probe
  source 1..30: mol_type = other DNA
gtcagaggttcaattcctcttcttaacaac

SEQ ID NO: 22565 - DNA, 31 bp, synthetic construct; identical to SEQ ID NO: 6959
  misc_feature 1..31: note = Probe
  source 1..31: mol_type = other DNA

SEQ ID NO: 22566 - DNA, 24 bp, synthetic construct
  misc_feature 1..24: note = Probe
  source 1..24: mol_type = other DNA
gtcagctaaataagctatcgggcc

SEQ ID NO: 22567 - DNA, 25 bp, synthetic construct
  misc_feature 1..25: note = Probe
  source 1..25: mol_type = other DNA
gtcagctaaataagctatcgggccc

SEQ ID NO: 22568 - DNA, 26 bp, synthetic construct
  misc_feature 1..26: note = Probe
  source 1..26: mol_type = other DNA
gtcagctaaataagctatcgggccca

SEQ ID NO: 22569 - DNA, 27 bp, synthetic construct
  misc_feature 1..27: note = Probe
  source 1..27: mol_type = other DNA
gtcagctaaataagctatcgggcccat

SEQ ID NO: 22570 - DNA, 28 bp, synthetic construct
  misc_feature 1..28: note = Probe
  source 1..28: mol_type = other DNA
gtcagctaaataagctatcgggcccata

SEQ ID NO: 22571 - DNA, 29 bp, synthetic construct
  misc_feature 1..29: note = Probe
  source 1..29: mol_type = other DNA
gtcagctaaataagctatcgggcccatac

SEQ ID NO: 22572 - DNA, 30 bp, synthetic construct
  misc_feature 1..30: note = Probe
  source 1..30: mol_type = other DNA
gtcagctaaataagctatcgggcccatacc

SEQ ID NO: 22573 - DNA, 36 bp, synthetic construct; identical to SEQ ID NO: 6967
  misc_feature 1..36: note = Probe
  source 1..36: mol_type = other DNA

SEQ ID NO: 22574 - DNA, 37 bp, synthetic construct; identical to SEQ ID NO: 6968
  misc_feature 1..37: note = Probe
  source 1..37: mol_type = other DNA

SEQ ID NO: 22575 - DNA, 38 bp, synthetic construct; identical to SEQ ID NO: 6969
  misc_feature 1..38: note = Probe
  source 1..38: mol_type = other DNA

SEQ ID NO: 22576 - DNA, 39 bp, synthetic construct; identical to SEQ ID NO: 6970
  misc_feature 1..39: note = Probe
  source 1..39: mol_type = other DNA

SEQ ID NO: 22577 - DNA, 40 bp, synthetic construct; identical to SEQ ID NO: 6971
  misc_feature 1..40: note = Probe
  source 1..40: mol_type = other DNA

SEQ ID NO: 22578 - DNA, 41 bp, synthetic construct; identical to SEQ ID NO: 6972
  misc_feature 1..41: note = Probe
  source 1..41: mol_type = other DNA

SEQ ID NO: 22579 - DNA, 29 bp, synthetic construct
  misc_feature 1..29: note = Probe
  source 1..29: mol_type = other DNA
gtcagctgtttttcctaaccggagagtaa

SEQ ID NO: 22580 - DNA, 16 bp, synthetic construct
  misc_feature 1..16: note = Probe
  source 1..16: mol_type = other DNA
gtcaggatggccgagc

SEQ ID NO: 22581 - DNA, 17 bp, synthetic construct
  misc_feature 1..17: note = Probe
  source 1..17: mol_type = other DNA
gtcaggatggccgagcg

SEQ ID NO: 22582 - DNA, 19 bp, synthetic construct
  misc_feature 1..19: note = Probe
  source 1..19: mol_type = other DNA
gtcaggatggccgagcggt

SEQ ID NO: 22583 - DNA, 20 bp, synthetic construct
  misc_feature 1..20: note = Probe
  source 1..20: mol_type = other DNA
gtcaggatggccgagcggtc

SEQ ID NO: 22584 - DNA, 21 bp, synthetic construct
  misc_feature 1..21: note = Probe
  source 1..21: mol_type = other DNA
gtcaggatggccgagcggtct

SEQ ID NO: 22585 - DNA, 22 bp, synthetic construct
  misc_feature 1..22: note = Probe
  source 1..22: mol_type = other DNA
gtcaggatggccgagcggtcta

SEQ ID NO: 22586 - DNA, 23 bp, synthetic construct
  misc_feature 1..23: note = Probe
  source 1..23: mol_type = other DNA
gtcaggatggccgagcggtctaa

SEQ ID NO: 22587 - DNA, 24 bp, synthetic construct
  misc_feature 1..24: note = Probe
  source 1..24: mol_type = other DNA
gtcaggatggccgagcggtctaag

SEQ ID NO: 22588 - DNA, 25 bp, synthetic construct
  misc_feature 1..25: note = Probe
  source 1..25: mol_type = other DNA
gtcaggatggccgagcggtctaagg

SEQ ID NO: 22589 - DNA, 26 bp, synthetic construct
  misc_feature 1..26: note = Probe
  source 1..26: mol_type = other DNA
gtcaggatggccgagcggtctaaggc

SEQ ID NO: 22590 - DNA, 27 bp, synthetic construct
  misc_feature 1..27: note = Probe
  source 1..27: mol_type = other DNA
gtcaggatggccgagcggtctaaggcg

SEQ ID NO: 22591 - DNA, 34 bp, synthetic construct; identical to SEQ ID NO: 1479
  misc_feature 1..34: note = Probe
  source 1..34: mol_type = other DNA

SEQ ID NO: 22592 - DNA, 36 bp, synthetic construct
  misc_feature 1..36: note = Probe
  source 1..36: mol_type = other DNA
gtcaggatggccgagcggtctaaggcgctgcgttca

SEQ ID NO: 22593 - DNA, 16 bp, synthetic construct
  misc_feature 1..16: note = Probe
  source 1..16: mol_type = other DNA
gtcaggatggccgagt

SEQ ID NO: 22594 - DNA, 17 bp, synthetic construct
  misc_feature 1..17: note = Probe
  source 1..17: mol_type = other DNA
gtcaggatggccgagtg

SEQ ID NO: 22595 - DNA, 19 bp, synthetic construct
  misc_feature 1..19: note = Probe
  source 1..19: mol_type = other DNA
gtcaggatggccgagtggt

SEQ ID NO: 22596 - DNA, 20 bp, synthetic construct
  misc_feature 1..20: note = Probe
  source 1..20: mol_type = other DNA
gtcaggatggccgagtggtc

SEQ ID NO: 22597 - DNA, 21 bp, synthetic construct
  misc_feature 1..21: note = Probe
  source 1..21: mol_type = other DNA
gtcaggatggccgagtggtct

SEQ ID NO: 22598 - DNA, 22 bp, synthetic construct
  misc_feature 1..22: note = Probe
  source 1..22: mol_type = other DNA
gtcaggatggccgagtggtcta

SEQ ID NO: 22599 - DNA, 26 bp, synthetic construct
  misc_feature 1..26: note = Probe
  source 1..26: mol_type = other DNA
gtcaggatggccgagtggtctaaggc

SEQ ID NO: 22600 - DNA, 27 bp, synthetic construct
  misc_feature 1..27: note = Probe
  source 1..27: mol_type = other DNA
gtcaggatggccgagtggtctaaggcg

SEQ ID NO: 22601 - DNA, 29 bp, synthetic construct
  misc_feature 1..29: note = Probe
  source 1..29: mol_type = other DNA
gtcaggatggccgagtggtctaaggcgcc

SEQ ID NO: 22602 - DNA, 34 bp, synthetic construct
  misc_feature 1..34: note = Probe
  source 1..34: mol_type = other DNA
gtcaggatggccgagtggtctaaggcgccagact

SEQ ID NO: 22603 - DNA, 35 bp, synthetic construct
  misc_feature 1..35: note = Probe
  source 1..35: mol_type = other DNA
gtcaggatggccgagtggtctaaggcgccagactc

SEQ ID NO: 22604 - DNA, 36 bp, synthetic construct
  misc_feature 1..36: note = Probe
  source 1..36: mol_type = other DNA
gtcaggatggccgagtggtctaaggcgccagactca

SEQ ID NO: 22605 - DNA, 30 bp, synthetic construct
  misc_feature 1..30: note = Probe
  source 1..30: mol_type = other DNA
gtcagtgcttcttttcccgagacaacattt

SEQ ID NO: 22606 - DNA, 36 bp, synthetic construct
  misc_feature 1..36: note = Probe
  source 1..36: mol_type = other DNA
gtcatcacgttcgcctaacacgcgaaaggtccccgg

SEQ ID NO: 22607 - DNA, 40 bp, synthetic construct
  misc_feature 1..40: note = Probe
  source 1..40: mol_type = other DNA
gtcatctcccacatggtctagcggttaggattcctggttt

SEQ ID NO: 22608 - DNA, 21 bp, synthetic construct
  misc_feature 1..21: note = Probe
  source 1..21: mol_type = other DNA
gtcatgggtggttgcgttttg

SEQ ID NO: 22609 - DNA, 22 bp, synthetic construct
  misc_feature 1..22: note = Probe
  source 1..22: mol_type = other DNA
gtcatgggtggttgcgttttgg

SEQ ID NO: 22610 - DNA, 31 bp, synthetic construct
  misc_feature 1..31: note = Probe
  source 1..31: mol_type = other DNA
gtccagggttcaagtccctgttcgggcggca

SEQ ID NO: 22611 - DNA, 39 bp, synthetic construct
  misc_feature 1..39: note = Probe
  source 1..39: mol_type = other DNA
gtccagggttcaagtccctgttcgggcgtttgtagtttt

SEQ ID NO: 22612 - DNA, 16 bp, synthetic construct
  misc_feature 1..16: note = Probe
  source 1..16: mol_type = other DNA
gtcccaccagagtcgc

SEQ ID NO: 22613 - DNA, 17 bp, synthetic construct
  misc_feature 1..17: note = Probe
  source 1..17: mol_type = other DNA
gtcccaccagagtcgct

SEQ ID NO: 22614 - DNA, 23 bp, synthetic construct
  misc_feature 1..23: note = Probe
  source 1..23: mol_type = other DNA
gtcccatctggggtggcctgtga

SEQ ID NO: 22615 - DNA, 31 bp, synthetic construct
  misc_feature 1..31: note = Probe
  source 1..31: mol_type = other DNA
gtccccggttcaaatccgggtgccccctcac

SEQ ID NO: 22616 - DNA, 31 bp, synthetic construct
  misc_feature 1..31: note = Probe
  source 1..31: mol_type = other DNA
gtccccggttcaaatccgggtgccccctctg

SEQ ID NO: 22617 - DNA, 31 bp, synthetic construct
  misc_feature 1..31: note = Probe
  source 1..31: mol_type = other DNA
gtcccgggttcaaatcccggacgagccccct

SEQ ID NO: 22618 - DNA, 30 bp, synthetic construct
  misc_feature 1..30: note = Probe
  source 1..30: mol_type = other DNA
gtcccgggttcaatccccggcacctccacc

SEQ ID NO: 22619 - DNA, 31 bp, synthetic construct; identical to SEQ ID NO: 7002
  misc_feature 1..31: note = Probe
  source 1..31: mol_type = other DNA

SEQ ID NO: 22620 - DNA, 31 bp, synthetic construct
  misc_feature 1..31: note = Probe
  source 1..31: mol_type = other DNA
gtcccgggttcgatccccagcatctccagtg

SEQ ID NO: 22621 - DNA, 33 bp, synthetic construct
  misc_feature 1..33: note = Probe
  source 1..33: mol_type = other DNA
gtcccgggttcgatccccagcatctccagtgtt

SEQ ID NO: 22622 - DNA, 34 bp, synthetic construct
  misc_feature 1..34: note = Probe
  source 1..34: mol_type = other DNA
gtcccgggttcgatccccagcatctccagtgttt

SEQ ID NO: 22623 - DNA, 35 bp, synthetic construct
  misc_feature 1..35: note = Probe
  source 1..35: mol_type = other DNA
gtcccgggttcgatccccagcatctccagtgtttt

SEQ ID NO: 22624 - DNA, 36 bp, synthetic construct
  misc_feature 1..36: note = Probe
  source 1..36: mol_type = other DNA
gtcccgggttcgatccccagcatctccagtgttttt

SEQ ID NO: 22625 - DNA, 29 bp, synthetic construct
  misc_feature 1..29: note = Probe
  source 1..29: mol_type = other DNA
gtccctcctcgttagtatagtggtgagta

SEQ ID NO: 22626 - DNA, 30 bp, synthetic construct
  misc_feature 1..30: note = Probe
  source 1..30: mol_type = other DNA
gtccctcctcgttagtatagtggtgagtat

SEQ ID NO: 22627 - DNA, 31 bp, synthetic construct
  misc_feature 1..31: note = Probe
  source 1..31: mol_type = other DNA
gtccctcctcgttagtatagtggtgagtatc

SEQ ID NO: 22628 - DNA, 32 bp, synthetic construct
  misc_feature 1..32: note = Probe
  source 1..32: mol_type = other DNA
gtccctcctcgttagtatagtggtgagtatcc

SEQ ID NO: 22629 - DNA, 33 bp, synthetic construct
  misc_feature 1..33: note = Probe
  source 1..33: mol_type = other DNA
gtccctcctcgttagtatagtggtgagtatccc

SEQ ID NO: 22630 - DNA, 35 bp, synthetic construct
  misc_feature 1..35: note = Probe
  source 1..35: mol_type = other DNA
gtccctcctcgttagtatagtggtgagtatccccg

SEQ ID NO: 22631 - DNA, 36 bp, synthetic construct
  misc_feature 1..36: note = Probe
  source 1..36: mol_type = other DNA
gtccctcctcgttagtatagtggtgagtatccccgc

SEQ ID NO: 22632 - DNA, 37 bp, synthetic construct
  misc_feature 1..37: note = Probe
  source 1..37: mol_type = other DNA
gtccctcctcgttagtatagtggtgagtatccccgcc

SEQ ID NO: 22633 - DNA, 38 bp, synthetic construct
  misc_feature 1..38: note = Probe
  source 1..38: mol_type = other DNA
gtccctcctcgttagtatagtggtgagtatccccgcct

SEQ ID NO: 22634 - DNA, 39 bp, synthetic construct
  misc_feature 1..39: note = Probe
  source 1..39: mol_type = other DNA
gtccctcctcgttagtatagtggtgagtatccccgcctg

SEQ ID NO: 22635 - DNA, 40 bp, synthetic construct
  misc_feature 1..40: note = Probe
  source 1..40: mol_type = other DNA
gtccctcctcgttagtatagtggtgagtatccccgcctgt

SEQ ID NO: 22636 - DNA, 41 bp, synthetic construct
  misc_feature 1..41: note = Probe
  source 1..41: mol_type = other DNA
gtccctcctcgttagtatagtggtgagtatccccgcctgtc

SEQ ID NO: 22637 - DNA, 31 bp, synthetic construct
  misc_feature 1..31: note = Probe
  source 1..31: mol_type = other DNA
gtccctggttcaaatccgggtgccccctcaa

SEQ ID NO: 22638 - DNA, 18 bp, synthetic construct
  misc_feature 1..18: note = Probe
  source 1..18: mol_type = other DNA
gtccctgtccaggcgcta

SEQ ID NO: 22639 - DNA, 16 bp, synthetic construct
  misc_feature 1..16: note = Probe
  source 1..16: mol_type = other DNA
gtccctgttcgggcgt

SEQ ID NO: 22640 - DNA, 28 bp, synthetic construct
  misc_feature 1..28: note = Probe
  source 1..28: mol_type = other DNA
gtccgcgtgggttcgaaccccactcctg

SEQ ID NO: 22641 - DNA, 20 bp, synthetic construct
  misc_feature 1..20: note = Probe
  source 1..20: mol_type = other DNA
gtcctagcctttctattagc

SEQ ID NO: 22642 - DNA, 28 bp, synthetic construct
  misc_feature 1..28: note = Probe
  source 1..28: mol_type = other DNA
gtcctggctcgttggtctaggggtatga

SEQ ID NO: 22643 - DNA, 30 bp, synthetic construct
  misc_feature 1..30: note = Probe
  source 1..30: mol_type = other DNA
gtcctggctcgttggtctaggggtatgatt

SEQ ID NO: 22644 - DNA, 32 bp, synthetic construct
  misc_feature 1..32: note = Probe
  source 1..32: mol_type = other DNA
gtcctggctcgttggtctaggggtatgattct

SEQ ID NO: 22645 - DNA, 34 bp, synthetic construct
  misc_feature 1..34: note = Probe
  source 1..34: mol_type = other DNA
gtcctggctcgttggtctaggggtatgattctcg

SEQ ID NO: 22646 - DNA, 36 bp, synthetic construct
  misc_feature 1..36: note = Probe
  source 1..36: mol_type = other DNA
gtcctggctcgttggtctaggggtatgattctcgct

SEQ ID NO: 22647 - DNA, 38 bp, synthetic construct
  misc_feature 1..38: note = Probe
  source 1..38: mol_type = other DNA
gtcctggctcgttggtctaggggtatgattctcgcttt

SEQ ID NO: 22648 - DNA, 31 bp, synthetic construct
  misc_feature 1..31: note = Probe
  source 1..31: mol_type = other DNA
gtcctgggttcgatccccagtacctccaggc

SEQ ID NO: 22649 - DNA, 27 bp, synthetic construct
  misc_feature 1..27: note = Probe
  source 1..27: mol_type = other DNA
gtccttggaaaaaggttttcatctccg

SEQ ID NO: 22650 - DNA, 22 bp, synthetic construct
  misc_feature 1..22: note = Probe
  source 1..22: mol_type = other DNA
gtccttgtagtataaactaata

SEQ ID NO: 22651 - DNA, 24 bp, synthetic construct
  misc_feature 1..24: note = Probe
  source 1..24: mol_type = other DNA
gtccttgtagtataaactaataca

SEQ ID NO: 22652 - DNA, 32 bp, synthetic construct; identical to SEQ ID NO: 7010
  misc_feature 1..32: note = Probe
  source 1..32: mol_type = other DNA

SEQ ID NO: 22653 - DNA, 33 bp, synthetic construct; identical to SEQ ID NO: 7011
  misc_feature 1..33: note = Probe
  source 1..33: mol_type = other DNA

SEQ ID NO: 22654 - DNA, 34 bp, synthetic construct; identical to SEQ ID NO: 7012
  misc_feature 1..34: note = Probe
  source 1..34: mol_type = other DNA

SEQ ID NO: 22655 - DNA, 35 bp, synthetic construct; identical to SEQ ID NO: 7013
  misc_feature 1..35: note = Probe
  source 1..35: mol_type = other DNA

SEQ ID NO: 22656 - DNA, 39 bp, synthetic construct; identical to SEQ ID NO: 7014
  misc_feature 1..39: note = Probe
  source 1..39: mol_type = other DNA

SEQ ID NO: 22657 - DNA, 31 bp, synthetic construct; identical to SEQ ID NO: 7016
  misc_feature 1..31: note = Probe
  source 1..31: mol_type = other DNA

SEQ ID NO: 22658 - DNA, 37 bp, synthetic construct
  misc_feature 1..37: note = Probe
  source 1..37: mol_type = other DNA
gtcgcgagttcaattctcgctggggcctgtgtgtttt

SEQ ID NO: 22659 - DNA, 38 bp, synthetic construct
  misc_feature 1..38: note = Probe
  source 1..38: mol_type = other DNA
gtcgcgagttcaattctcgctggggcctgtgtgttttt

SEQ ID NO: 22660 - DNA, 31 bp, synthetic construct
  misc_feature 1..31: note = Probe
  source 1..31: mol_type = other DNA
gtcgcgagttcgatcctcgctggggcctcct

SEQ ID NO: 22661 - DNA, 31 bp, synthetic construct; identical to SEQ ID NO: 7017
  misc_feature 1..31: note = Probe
  source 1..31: mol_type = other DNA

SEQ ID NO: 22662 - DNA, 31 bp, synthetic construct
  misc_feature 1..31: note = Probe
  source 1..31: mol_type = other DNA
gtcgcgggttcgatccccgtacgggccactg

SEQ ID NO: 22663 - DNA, 26 bp, synthetic construct
  misc_feature 1..26: note = Probe
  source 1..26: mol_type = other DNA
gtcggctcgttggtctaggggtatga

SEQ ID NO: 22664 - DNA, 28 bp, synthetic construct
  misc_feature 1..28: note = Probe
  source 1..28: mol_type = other DNA
gtcggctcgttggtctaggggtatgatt

SEQ ID NO: 22665 - DNA, 30 bp, synthetic construct
  misc_feature 1..30: note = Probe
  source 1..30: mol_type = other DNA
gtcggctcgttggtctaggggtatgattct

SEQ ID NO: 22666 - DNA, 32 bp, synthetic construct
  misc_feature 1..32: note = Probe
  source 1..32: mol_type = other DNA
gtcggctcgttggtctaggggtatgattctcg

SEQ ID NO: 22667 - DNA, 33 bp, synthetic construct
  misc_feature 1..33: note = Probe
  source 1..33: mol_type = other DNA
gtcggctcgttggtctaggggtatgattctcgc

SEQ ID NO: 22668 - DNA, 34 bp, synthetic construct
  misc_feature 1..34: note = Probe
  source 1..34: mol_type = other DNA
gtcggctcgttggtctaggggtatgattctcgct

SEQ ID NO: 22669 - DNA, 16 bp, synthetic construct
  misc_feature 1..16: note = Probe
  source 1..16: mol_type = other DNA
gtcggtagagcatcag

SEQ ID NO: 22670 - DNA, 19 bp, synthetic construct
  misc_feature 1..19: note = Probe
  source 1..19: mol_type = other DNA
gtcggtagagcatcagact

SEQ ID NO: 22671 - DNA, 20 bp, synthetic construct
  misc_feature 1..20: note = Probe
  source 1..20: mol_type = other DNA
gtcggtagagcatcagactt

SEQ ID NO: 22672 - DNA, 16 bp, synthetic construct
  misc_feature 1..16: note = Probe
  source 1..16: mol_type = other DNA
gtcggtagagcatgag

SEQ ID NO: 22673 - DNA, 17 bp, synthetic construct
  misc_feature 1..17: note = Probe
  source 1..17: mol_type = other DNA
gtcggtagagcatgaga

SEQ ID NO: 22674 - DNA, 18 bp, synthetic construct
  misc_feature 1..18: note = Probe
  source 1..18: mol_type = other DNA
gtcggtagagcatgagac

SEQ ID NO: 22675 - DNA, 35 bp, synthetic construct; identical to SEQ ID NO: 1492
  misc_feature 1..35: note = Probe
  source 1..35: mol_type = other DNA

SEQ ID NO: 22676 - DNA, 36 bp, synthetic construct; identical to SEQ ID NO: 7021
  misc_feature 1..36: note = Probe
  source 1..36: mol_type = other DNA

SEQ ID NO: 22677 - DNA, 16 bp, synthetic construct
  misc_feature 1..16: note = Probe
  source 1..16: mol_type = other DNA
gtcggtagagcatggg

SEQ ID NO: 22678 - DNA, 36 bp, synthetic construct
  misc_feature 1..36: note = Probe
  source 1..36: mol_type = other DNA
gtcggtagagcatgggactcttaatcccagggtcgt

SEQ ID NO: 22679 - DNA, 30 bp, synthetic construct
  misc_feature 1..30: note = Probe
  source 1..30: mol_type = other DNA
gtcgtcctcgttagtatagtggtgagtatc

SEQ ID NO: 22680 - DNA, 20 bp, synthetic construct
  misc_feature 1..20: note = Probe
  source 1..20: mol_type = other DNA
gtcgtggcgtcccggtagct

SEQ ID NO: 22681 - DNA, 16 bp, synthetic construct
  misc_feature 1..16: note = Probe
  source 1..16: mol_type = other DNA
gtcgtggttgtagtcc

SEQ ID NO: 22682 - DNA, 19 bp, synthetic construct
  misc_feature 1..19: note = Probe
  source 1..19: mol_type = other DNA
gtcgtggttgtagtccgtg

SEQ ID NO: 22683 - DNA, 23 bp, synthetic construct
  misc_feature 1..23: note = Probe
  source 1..23: mol_type = other DNA
gtcgtggttgtagtccgtgcgag

SEQ ID NO: 22684 - DNA, 25 bp, synthetic construct
  misc_feature 1..25: note = Probe
  source 1..25: mol_type = other DNA
gtcgtggttgtagtccgtgcgagaa

SEQ ID NO: 22685 - DNA, 26 bp, synthetic construct
  misc_feature 1..26: note = Probe
  source 1..26: mol_type = other DNA
gtcgtggttgtagtccgtgcgagaat

SEQ ID NO: 22686 - DNA, 28 bp, synthetic construct
  misc_feature 1..28: note = Probe
  source 1..28: mol_type = other DNA
gtcgtggttgtagtccgtgcgagaataa

SEQ ID NO: 22687 - DNA, 30 bp, synthetic construct; identical to SEQ ID NO: 7024
  misc_feature 1..30: note = Probe
  source 1..30: mol_type = other DNA

SEQ ID NO: 22688 - DNA, 31 bp, synthetic construct
  misc_feature 1..31: note = Probe
  source 1..31: mol_type = other DNA
gtcgtggttgtagtccgtgcgagaataatga

SEQ ID NO: 22689 - DNA, 22 bp, synthetic construct
  misc_feature 1..22: note = Probe
  source 1..22: mol_type = other DNA
gtctaacaacatggctttctca

SEQ ID NO: 22690 - DNA, 24 bp, synthetic construct
  misc_feature 1..24: note = Probe
  source 1..24: mol_type = other DNA
gtctaacaacatggctttctcaac

SEQ ID NO: 22691 - DNA, 25 bp, synthetic construct
  misc_feature 1..25: note = Probe
  source 1..25: mol_type = other DNA
gtctaacaacatggctttctcaact

SEQ ID NO: 22692 - DNA, 26 bp, synthetic construct
  misc_feature 1..26: note = Probe
  source 1..26: mol_type = other DNA
gtctagcggttaggattcctggtttt

SEQ ID NO: 22693 - DNA, 16 bp, synthetic construct
  misc_feature 1..16: note = Probe
  source 1..16: mol_type = other DNA
gtctaggggtatgatt

SEQ ID NO: 22694 - DNA, 21 bp, synthetic construct
  misc_feature 1..21: note = Probe
  source 1..21: mol_type = other DNA
gtctaggggtatgattctcgc

SEQ ID NO: 22695 - DNA, 27 bp, synthetic construct
  misc_feature 1..27: note = Probe
  source 1..27: mol_type = other DNA
gtctagtggttaggattcggcgctctc

SEQ ID NO: 22696 - DNA, 44 bp, synthetic construct
  misc_feature 1..44: note = Probe
  source 1..44: mol_type = other DNA
gtctagtggttaggattcggcgctctcaccgccgcggcccgggt

SEQ ID NO: 22697 - DNA, 25 bp, synthetic construct
  misc_feature 1..25: note = Probe
  source 1..25: mol_type = other DNA
gtctcataatctgaaggtcctgagt

SEQ ID NO: 22698 - DNA, 21 bp, synthetic construct
  misc_feature 1..21: note = Probe
  source 1..21: mol_type = other DNA
gtctgcaccaggatggccgag

SEQ ID NO: 22699 - DNA, 40 bp, synthetic construct; identical to SEQ ID NO: 7040
  misc_feature 1..40: note = Probe
  source 1..40: mol_type = other DNA

SEQ ID NO: 22700 - DNA, 42 bp, synthetic construct; identical to SEQ ID NO: 7041
  misc_feature 1..42: note = Probe
  source 1..42: mol_type = other DNA

SEQ ID NO: 22701 - DNA, 42 bp, synthetic construct
  misc_feature 1..42: note = Probe
  source 1..42: mol_type = other DNA
gtgaatccttcgatagctcagttggtagagcggaggactgta

SEQ ID NO: 22702 - DNA, 25 bp, synthetic construct
  misc_feature 1..25: note = Probe
  source 1..25: mol_type = other DNA
gtgaatctgacaacagaggcttacg

SEQ ID NO: 22703 - DNA, 28 bp, synthetic construct
  misc_feature 1..28: note = Probe
  source 1..28: mol_type = other DNA
gtgaatctgacaacagaggcttacgacc

SEQ ID NO: 22704 - DNA, 29 bp, synthetic construct
  misc_feature 1..29: note = Probe
  source 1..29: mol_type = other DNA
gtgaatctgacaacagaggcttacgaccc

SEQ ID NO: 22705 - DNA, 30 bp, synthetic construct; identical to SEQ ID NO: 7044
  misc_feature 1..30: note = Probe
  source 1..30: mol_type = other DNA

SEQ ID NO: 22706 - DNA, 32 bp, synthetic construct; identical to SEQ ID NO: 7045
  misc_feature 1..32: note = Probe
  source 1..32: mol_type = other DNA

SEQ ID NO: 22707 - DNA, 33 bp, synthetic construct; identical to SEQ ID NO: 1501
  misc_feature 1..33: note = Probe
  source 1..33: mol_type = other DNA

SEQ ID NO: 22708 - DNA, 36 bp, synthetic construct
  misc_feature 1..36: note = Probe
  source 1..36: mol_type = other DNA
gtgaatctgacaacagaggcttacgaccccttattt

SEQ ID NO: 22709 - DNA, 39 bp, synthetic construct; identical to SEQ ID NO: 1502
  misc_feature 1..39: note = Probe
  source 1..39: mol_type = other DNA

SEQ ID NO: 22710 - DNA, 40 bp, synthetic construct; identical to SEQ ID NO: 7046
  misc_feature 1..40: note = Probe
  source 1..40: mol_type = other DNA

SEQ ID NO: 22711 - DNA, 41 bp, synthetic construct; identical to SEQ ID NO: 7047
  misc_feature 1..41: note = Probe
  source 1..41: mol_type = other DNA

SEQ ID NO: 22712 - DNA, 42 bp, synthetic construct; identical to SEQ ID NO: 7048
  misc_feature 1..42: note = Probe
  source 1..42: mol_type = other DNA

SEQ ID NO: 22713 - DNA, 36 bp, synthetic construct
  misc_feature 1..36: note = Probe
  source 1..36: mol_type = other DNA
gtgacctcgtggcgcaatggtagcgcgtctgactcc

SEQ ID NO: 22714 - DNA, 49 bp, synthetic construct
  misc_feature 1..49: note = Probe
  source 1..49: mol_type = other DNA
gtgacctcgtggcgcaatggtagcgcgtctgactccagatcagaaggtt

SEQ ID NO: 22715 - DNA, 50 bp, synthetic construct
  misc_feature 1..50: note = Probe
  source 1..50: mol_type = other DNA
gtgacctcgtggcgcaatggtagcgcgtctgactccagatcagaaggttg

SEQ ID NO: 22716 - DNA, 31 bp, synthetic construct
  misc_feature 1..31: note = Probe
  source 1..31: mol_type = other DNA
gtgagcatagctgccttccaagcagttgacc

SEQ ID NO: 22717 - DNA, 36 bp, synthetic construct
  misc_feature 1..36: note = Probe
  source 1..36: mol_type = other DNA
gtgagcatagctgccttccaagcagttgacccgggt

SEQ ID NO: 22718 - DNA, 37 bp, synthetic construct
  misc_feature 1..37: note = Probe
  source 1..37: mol_type = other DNA
gtgagcatagctgccttccaagcagttgacccgggtt

SEQ ID NO: 22719 - DNA, 38 bp, synthetic construct
  misc_feature 1..38: note = Probe
  source 1..38: mol_type = other DNA
gtgagcatagctgccttccaagcagttgacccgggttc

SEQ ID NO: 22720 - DNA, 28 bp, synthetic construct
  misc_feature 1..28: note = Probe
  source 1..28: mol_type = other DNA
gtgagcccggatagctcagtcggtagag

SEQ ID NO: 22721 - DNA, 30 bp, synthetic construct
  misc_feature 1..30: note = Probe
  source 1..30: mol_type = other DNA
gtgagcccggatagctcagtcggtagagca

SEQ ID NO: 22722 - DNA, 33 bp, synthetic construct
  misc_feature 1..33: note = Probe
  source 1..33: mol_type = other DNA
gtgagcccggatagctcagtcggtagagcatca

SEQ ID NO: 22723 - DNA, 35 bp, synthetic construct
  misc_feature 1..35: note = Probe
  source 1..35: mol_type = other DNA
gtgagcccggatagctcagtcggtagagcatcaga

SEQ ID NO: 22724 - DNA, 36 bp, synthetic construct
  misc_feature 1..36: note = Probe
  source 1..36: mol_type = other DNA
gtgagcccggatagctcagtcggtagagcatcagac

SEQ ID NO: 22725 - DNA, 37 bp, synthetic construct
  misc_feature 1..37: note = Probe
  source 1..37: mol_type = other DNA
gtgagcccggatagctcagtcggtagagcatcagact

SEQ ID NO: 22726 - DNA, 38 bp, synthetic construct
  misc_feature 1..38: note = Probe
  source 1..38: mol_type = other DNA
gtgagcccggatagctcagtcggtagagcatcagactt

SEQ ID NO: 22727 - DNA, 39 bp, synthetic construct
  misc_feature 1..39: note = Probe
  source 1..39: mol_type = other DNA
gtgagcccggatagctcagtcggtagagcatcagacttt

SEQ ID NO: 22728 - DNA, 40 bp, synthetic construct
  misc_feature 1..40: note = Probe
  source 1..40: mol_type = other DNA
gtgagcccggatagctcagtcggtagagcatcagactttt

SEQ ID NO: 22729 - DNA, 41 bp, synthetic construct
  misc_feature 1..41: note = Probe
  source 1..41: mol_type = other DNA
gtgagcccggatagctcagtcggtagagcatcagactttta

SEQ ID NO: 22730 - DNA, 42 bp, synthetic construct
  misc_feature 1..42: note = Probe
  source 1..42: mol_type = other DNA
gtgagcccggatagctcagtcggtagagcatcagacttttaa

SEQ ID NO: 22731 - DNA, 43 bp, synthetic construct
  misc_feature 1..43: note = Probe
  source 1..43: mol_type = other DNA
gtgagcccggatagctcagtcggtagagcatcagacttttaat

SEQ ID NO: 22732 - DNA, 29 bp, synthetic construct
  misc_feature 1..29: note = Probe
  source 1..29: mol_type = other DNA
gtgagcccggctagctcagtcggtagagc

SEQ ID NO: 22733 - DNA, 30 bp, synthetic construct
  misc_feature 1..30: note = Probe
  source 1..30: mol_type = other DNA
gtgagcccggctagctcagtcggtagagca

SEQ ID NO: 22734 - DNA, 34 bp, synthetic construct
  misc_feature 1..34: note = Probe
  source 1..34: mol_type = other DNA
gtgaggccctatagctcaggggttagagcactgg

SEQ ID NO: 22735 - DNA, 36 bp, synthetic construct
  misc_feature 1..36: note = Probe
  source 1..36: mol_type = other DNA
gtgaggccctatagctcaggggttagagcactggtc

SEQ ID NO: 22736 - DNA, 37 bp, synthetic construct
  misc_feature 1..37: note = Probe
  source 1..37: mol_type = other DNA
gtgaggccctatagctcaggggttagagcactggtct

SEQ ID NO: 22737 - DNA, 18 bp, synthetic construct
  misc_feature 1..18: note = Probe
  source 1..18: mol_type = other DNA
gtgagtatccccgcctgt

SEQ ID NO: 22738 - DNA, 22 bp, synthetic construct
  misc_feature 1..22: note = Probe
  source 1..22: mol_type = other DNA
gtgagtatccccgcctgtcacg

SEQ ID NO: 22739 - DNA, 23 bp, synthetic construct
  misc_feature 1..23: note = Probe
  source 1..23: mol_type = other DNA
gtgagtatccccgcctgtcacgc

SEQ ID NO: 22740 - DNA, 32 bp, synthetic construct
  misc_feature 1..32: note = Probe
  source 1..32: mol_type = other DNA
gtgagtatccccgcctgtcacgcgggagaccg

SEQ ID NO: 22741 - DNA, 36 bp, synthetic construct
  misc_feature 1..36: note = Probe
  source 1..36: mol_type = other DNA
gtgagtatccccgcctgtcacgcgggagaccggggt

SEQ ID NO: 22742 - DNA, 20 bp, synthetic construct
  misc_feature 1..20: note = Probe
  source 1..20: mol_type = other DNA
gtgatcgtatagtggttagt

SEQ ID NO: 22743 - DNA, 24 bp, synthetic construct
  misc_feature 1..24: note = Probe
  source 1..24: mol_type = other DNA
gtgatcgtatagtggttagtactc

SEQ ID NO: 22744 - DNA, 25 bp, synthetic construct
  misc_feature 1..25: note = Probe
  source 1..25: mol_type = other DNA
gtgatcgtatagtggttagtactct

SEQ ID NO: 22745 - DNA, 26 bp, synthetic construct
  misc_feature 1..26: note = Probe
  source 1..26: mol_type = other DNA
gtgatcgtatagtggttagtactctg

SEQ ID NO: 22746 - DNA, 27 bp, synthetic construct
  misc_feature 1..27: note = Probe
  source 1..27: mol_type = other DNA
gtgatcgtatagtggttagtactctgc

SEQ ID NO: 22747 - DNA, 28 bp, synthetic construct
  misc_feature 1..28: note = Probe
  source 1..28: mol_type = other DNA
gtgatcgtatagtggttagtactctgcg

SEQ ID NO: 22748 - DNA, 34 bp, synthetic construct
  misc_feature 1..34: note = Probe
  source 1..34: mol_type = other DNA
gtgatcgtatagtggttagtactctgcgttgtgg

SEQ ID NO: 22749 - DNA, 35 bp, synthetic construct
  misc_feature 1..35: note = Probe
  source 1..35: mol_type = other DNA
gtgatcgtatagtggttagtactctgcgttgtggc

SEQ ID NO: 22750 - DNA, 36 bp, synthetic construct
  misc_feature 1..36: note = Probe
  source 1..36: mol_type = other DNA
gtgatcgtatagtggttagtactctgcgttgtggcc

SEQ ID NO: 22751 - DNA, 39 bp, synthetic construct
  misc_feature 1..39: note = Probe
  source 1..39: mol_type = other DNA
gtgatcgtatagtggttagtactctgcgttgtggccgca

SEQ ID NO: 22752 - DNA, 17 bp, synthetic construct
  misc_feature 1..17: note = Probe
  source 1..17: mol_type = other DNA
gtgcaactccaaataaa

SEQ ID NO: 22753 - DNA, 21 bp, synthetic construct
  misc_feature 1..21: note = Probe
  source 1..21: mol_type = other DNA
gtgcaactccaaataaaagta

SEQ ID NO: 22754 - DNA, 22 bp, synthetic construct
  misc_feature 1..22: note = Probe
  source 1..22: mol_type = other DNA
gtgcaactccaaataaaagtaa

SEQ ID NO: 22755 - DNA, 17 bp, synthetic construct
  misc_feature 1..17: note = Probe
  source 1..17: mol_type = other DNA
gtgcacttggacgaacc

SEQ ID NO: 22756 - DNA, 25 bp, synthetic construct
  misc_feature 1..25: note = Probe
  source 1..25: mol_type = other DNA
gtgcaggtagcgtggccgagcggtc

SEQ ID NO: 22757 - DNA, 39 bp, synthetic construct
  misc_feature 1..39: note = Probe
  source 1..39: mol_type = other DNA
gtgcaggtagcgtggccgagcggtctaaggcgctggatt

SEQ ID NO: 22758 - DNA, 40 bp, synthetic construct
  misc_feature 1..40: note = Probe
  source 1..40: mol_type = other DNA
gtgcaggtagcgtggccgagcggtctaaggcgctggattt

SEQ ID NO: 22759 - DNA, 41 bp, synthetic construct
  misc_feature 1..41: note = Probe
  source 1..41: mol_type = other DNA
gtgcaggtagcgtggccgagcggtctaaggcgctggattta

SEQ ID NO: 22760 - DNA, 31 bp, synthetic construct
  misc_feature 1..31: note = Probe
  source 1..31: mol_type = other DNA
gtgcctcaaccgagcgtccaagctctttcca

SEQ ID NO: 22761 - DNA, 33 bp, synthetic construct
  misc_feature 1..33: note = Probe
  source 1..33: mol_type = other DNA
gtgcctcaaccgagcgtccaagctctttccatt

SEQ ID NO: 22762 - DNA, 31 bp, synthetic construct
  misc_feature 1..31: note = Probe
  source 1..31: mol_type = other DNA
gtgcctgatatccaaccttcagctatagggt

SEQ ID NO: 22763 - DNA, 31 bp, synthetic construct
  misc_feature 1..31: note = Probe
  source 1..31: mol_type = other DNA
gtgcggttcctcgttagtatagtggtgagta

SEQ ID NO: 22764 - DNA, 32 bp, synthetic construct
  misc_feature 1..32: note = Probe
  source 1..32: mol_type = other DNA
gtgcggttcctcgttagtatagtggtgagtat

SEQ ID NO: 22765 - DNA, 33 bp, synthetic construct
  misc_feature 1..33: note = Probe
  source 1..33: mol_type = other DNA
gtgcggttcctcgttagtatagtggtgagtatc

SEQ ID NO: 22766 - DNA, 34 bp, synthetic construct
  misc_feature 1..34: note = Probe
  source 1..34: mol_type = other DNA
gtgcggttcctcgttagtatagtggtgagtatcc

SEQ ID NO: 22767 - DNA, 35 bp, synthetic construct
  misc_feature 1..35: note = Probe
  source 1..35: mol_type = other DNA
gtgcggttcctcgttagtatagtggtgagtatccc

SEQ ID NO: 22768 - DNA, 36 bp, synthetic construct
  misc_feature 1..36: note = Probe
  source 1..36: mol_type = other DNA
gtgcggttcctcgttagtatagtggtgagtatcccc

SEQ ID NO: 22769 - DNA, 37 bp, synthetic construct
  misc_feature 1..37: note = Probe
  source 1..37: mol_type = other DNA
gtgcggttcctcgttagtatagtggtgagtatccccg

SEQ ID NO: 22770 - DNA, 38 bp, synthetic construct
  misc_feature 1..38: note = Probe
  source 1..38: mol_type = other DNA
gtgcggttcctcgttagtatagtggtgagtatccccgc

SEQ ID NO: 22771 - DNA, 39 bp, synthetic construct
  misc_feature 1..39: note = Probe
  source 1..39: mol_type = other DNA
gtgcggttcctcgttagtatagtggtgagtatccccgcc

SEQ ID NO: 22772 - DNA, 40 bp, synthetic construct
  misc_feature 1..40: note = Probe
  source 1..40: mol_type = other DNA
gtgcggttcctcgttagtatagtggtgagtatccccgcct

SEQ ID NO: 22773 - DNA, 41 bp, synthetic construct
  misc_feature 1..41: note = Probe
  source 1..41: mol_type = other DNA
gtgcggttcctcgttagtatagtggtgagtatccccgcctg

SEQ ID NO: 22774 - DNA, 42 bp, synthetic construct
  misc_feature 1..42: note = Probe
  source 1..42: mol_type = other DNA
gtgcggttcctcgttagtatagtggtgagtatccccgcctgt

SEQ ID NO: 22775 - DNA, 43 bp, synthetic construct
  misc_feature 1..43: note = Probe
  source 1..43: mol_type = other DNA
gtgcggttcctcgttagtatagtggtgagtatccccgcctgtc

SEQ ID NO: 22776 - DNA, 26 bp, synthetic construct
  misc_feature 1..26: note = Probe
  source 1..26: mol_type = other DNA
gtgctaataacgccaaggtcgcgggt

SEQ ID NO: 22777 - DNA, 27 bp, synthetic construct
  misc_feature 1..27: note = Probe
  source 1..27: mol_type = other DNA
gtgctaataacgccaaggtcgcgggtt

SEQ ID NO: 22778 - DNA, 22 bp, synthetic construct
  misc_feature 1..22: note = Probe
  source 1..22: mol_type = other DNA
gtgctccggagttacctcgttt

SEQ ID NO: 22779 - DNA, 23 bp, synthetic construct
  misc_feature 1..23: note = Probe
  source 1..23: mol_type = other DNA
gtgctccggagttacctcgtttt

SEQ ID NO: 22780 - DNA, 26 bp, synthetic construct
  misc_feature 1..26: note = Probe
  source 1..26: mol_type = other DNA
gtgctgataacaccaaggtcgcgggc

SEQ ID NO: 22781 - DNA, 30 bp, synthetic construct
  misc_feature 1..30: note = Probe
  source 1..30: mol_type = other DNA
gtgctgggcccataacccagaggtcgatgg

SEQ ID NO: 22782 - DNA, 33 bp, synthetic construct
  misc_feature 1..33: note = Probe
  source 1..33: mol_type = other DNA
gtgctgggcccataacccagaggtcgatggatc

SEQ ID NO: 22783 - DNA, 39 bp, synthetic construct
  misc_feature 1..39: note = Probe
  source 1..39: mol_type = other DNA
gtgcttccttcgatagctcagctggtagagcggaggact

SEQ ID NO: 22784 - DNA, 50 bp, synthetic construct
  misc_feature 1..50: note = Probe
  source 1..50: mol_type = other DNA
gtgcttccttcgatagctcagctggtagagcggaggactgtagtacttaa

SEQ ID NO: 22785 - DNA, 27 bp, synthetic construct
  misc_feature 1..27: note = Probe
  source 1..27: mol_type = other DNA
gtggagttaaagactttttctctgatt

SEQ ID NO: 22786 - DNA, 28 bp, synthetic construct
  misc_feature 1..28: note = Probe
  source 1..28: mol_type = other DNA
gtggagttaaagactttttctctgattt

SEQ ID NO: 22787 - DNA, 29 bp, synthetic construct
  misc_feature 1..29: note = Probe
  source 1..29: mol_type = other DNA
gtggagttaaagactttttctctgatttg

SEQ ID NO: 22788 - DNA, 30 bp, synthetic construct
  misc_feature 1..30: note = Probe
  source 1..30: mol_type = other DNA
gtggcccgggttcgactcccggtatgggaa

SEQ ID NO: 22789 - DNA, 31 bp, synthetic construct
  misc_feature 1..31: note = Probe
  source 1..31: mol_type = other DNA
gtggcccgggttcgactcccggtatgggaac

SEQ ID NO: 22790 - DNA, 33 bp, synthetic construct; identical to SEQ ID NO: 7064
  misc_feature 1..33: note = Probe
  source 1..33: mol_type = other DNA

SEQ ID NO: 22791 - DNA, 31 bp, synthetic construct
  misc_feature 1..31: note = Probe
  source 1..31: mol_type = other DNA
gtggcgcaatcggttagcgcgcggtacttat

SEQ ID NO: 22792 - DNA, 16 bp, synthetic construct
  misc_feature 1..16: note = Probe
  source 1..16: mol_type = other DNA
gtggcgtcccggtagc

SEQ ID NO: 22793 - DNA, 17 bp, synthetic construct
  misc_feature 1..17: note = Probe
  source 1..17: mol_type = other DNA
gtggcgtcccggtagct

SEQ ID NO: 22794 - DNA, 18 bp, synthetic construct
  misc_feature 1..18: note = Probe
  source 1..18: mol_type = other DNA
gtggcgtcccggtagctc

SEQ ID NO: 22795 - DNA, 19 bp, synthetic construct
  misc_feature 1..19: note = Probe
  source 1..19: mol_type = other DNA
gtggcgtcccggtagctcg

SEQ ID NO: 22796 - DNA, 17 bp, synthetic construct
  misc_feature 1..17: note = Probe
  source 1..17: mol_type = other DNA
gtggctaggattcggcg

SEQ ID NO: 22797 - DNA, 21 bp, synthetic construct
  misc_feature 1..21: note = Probe
  source 1..21: mol_type = other DNA
gtggctaggattcggcgcttt

SEQ ID NO: 22798 - DNA, 39 bp, synthetic construct
  misc_feature 1..39: note = Probe
  source 1..39: mol_type = other DNA
gtggctaggattcggcgctttcaccgccgcggcccgggt

SEQ ID NO: 22799 - DNA, 28 bp, synthetic construct
  misc_feature 1..28: note = Probe
  source 1..28: mol_type = other DNA
gtgggaacaatggcacggcaaggggctc

SEQ ID NO: 22800 - DNA, 30 bp, synthetic construct
  misc_feature 1..30: note = Probe
  source 1..30: mol_type = other DNA
gtggggttcctcgcagcttcgctgcgtgag

SEQ ID NO: 22801 - DNA, 23 bp, synthetic construct
  misc_feature 1..23: note = Probe
  source 1..23: mol_type = other DNA
gtggggttttgcagtccttagct

SEQ ID NO: 22802 - DNA, 16 bp, synthetic construct
  misc_feature 1..16: note = Probe
  source 1..16: mol_type = other DNA
gtgggtggcttttttt

SEQ ID NO: 22803 - DNA, 36 bp, synthetic construct
  misc_feature 1..36: note = Probe
  source 1..36: mol_type = other DNA
gtggtaagcatagctgccttccaagcagttgacccg

SEQ ID NO: 22804 - DNA, 39 bp, synthetic construct
  misc_feature 1..39: note = Probe
  source 1..39: mol_type = other DNA
gtggtaagcatagctgccttccaagcagttgacccgggt

SEQ ID NO: 22805 - DNA, 16 bp, synthetic construct
  misc_feature 1..16: note = Probe
  source 1..16: mol_type = other DNA
gtggtagaattctcgc

SEQ ID NO: 22806 - DNA, 17 bp, synthetic construct
  misc_feature 1..17: note = Probe
  source 1..17: mol_type = other DNA
gtggtagaattctcgcc

SEQ ID NO: 22807 - DNA, 18 bp, synthetic construct
  misc_feature 1..18: note = Probe
  source 1..18: mol_type = other DNA
gtggtagaattctcgcct

SEQ ID NO: 22808 - DNA, 19 bp, synthetic construct
  misc_feature 1..19: note = Probe
  source 1..19: mol_type = other DNA
gtggtagaattctcgcctg

SEQ ID NO: 22809 - DNA, 20 bp, synthetic construct
  misc_feature 1..20: note = Probe
  source 1..20: mol_type = other DNA
gtggtagaattctcgcctgc

SEQ ID NO: 22810 - DNA, 21 bp, synthetic construct
  misc_feature 1..21: note = Probe
  source 1..21: mol_type = other DNA
gtggtagaattctcgcctgcc

SEQ ID NO: 22811 - DNA, 38 bp, synthetic construct
  misc_feature 1..38: note = Probe
  source 1..38: mol_type = other DNA
gtggtagaattctcgcctgccacgcgggaggcccgggt

SEQ ID NO: 22812 - DNA, 24 bp, synthetic construct
  misc_feature 1..24: note = Probe
  source 1..24: mol_type = other DNA
gtggtatagtggtgagcatagctg

SEQ ID NO: 22813 - DNA, 28 bp, synthetic construct
  misc_feature 1..28: note = Probe
  source 1..28: mol_type = other DNA
gtggtatagtggtgagcatagctgcctt

SEQ ID NO: 22814 - DNA, 29 bp, synthetic construct
  misc_feature 1..29: note = Probe
  source 1..29: mol_type = other DNA
gtggtatagtggtgagcatagctgccttc

SEQ ID NO: 22815 - DNA, 23 bp, synthetic construct
  misc_feature 1..23: note = Probe
  source 1..23: mol_type = other DNA
gtggtatagtggttagcatagct

SEQ ID NO: 22816 - DNA, 16 bp, synthetic construct
  misc_feature 1..16: note = Probe
  source 1..16: mol_type = other DNA
gtggtatcatgcaaga

SEQ ID NO: 22817 - DNA, 19 bp, synthetic construct
  misc_feature 1..19: note = Probe
  source 1..19: mol_type = other DNA
gtggtatcatgcaagattc

SEQ ID NO: 22818 - DNA, 20 bp, synthetic construct
  misc_feature 1..20: note = Probe
  source 1..20: mol_type = other DNA
gtggtatcatgcaagattcc

SEQ ID NO: 22819 - DNA, 37 bp, synthetic construct
  misc_feature 1..37: note = Probe
  source 1..37: mol_type = other DNA
gtggtatcatgcaagattcccattcttgcgacccggg

SEQ ID NO: 22820 - DNA, 38 bp, synthetic construct
  misc_feature 1..38: note = Probe
  source 1..38: mol_type = other DNA
gtggtatcatgcaagattcccattcttgcgacccgggt

SEQ ID NO: 22821 - DNA, 39 bp, synthetic construct
  misc_feature 1..39: note = Probe
  source 1..39: mol_type = other DNA
gtggtatcatgcaagattcccattcttgcgacccgggtt

SEQ ID NO: 22822 - DNA, 40 bp, synthetic construct
  misc_feature 1..40: note = Probe
  source 1..40: mol_type = other DNA
gtggtcatcacgttcgcctaacacgcgaaaggtccccggt

SEQ ID NO: 22823 - DNA, 24 bp, synthetic construct
  misc_feature 1..24: note = Probe
  source 1..24: mol_type = other DNA
gtggtcgttgccatgttaacgttt

SEQ ID NO: 22824 - DNA, 25 bp, synthetic construct
  misc_feature 1..25: note = Probe
  source 1..25: mol_type = other DNA
gtggtcgttgccatgttaacgtttt

SEQ ID NO: 22825 - DNA, 19 bp, synthetic construct
  misc_feature 1..19: note = Probe
  source 1..19: mol_type = other DNA
gtggtctagtggttaggat

SEQ ID NO: 22826 - DNA, 20 bp, synthetic construct
  misc_feature 1..20: note = Probe
  source 1..20: mol_type = other DNA
gtggtctagtggttaggatt

SEQ ID NO: 22827 - DNA, 22 bp, synthetic construct
  misc_feature 1..22: note = Probe
  source 1..22: mol_type = other DNA
gtggtctagtggttaggattcg

SEQ ID NO: 22828 - DNA, 23 bp, synthetic construct
  misc_feature 1..23: note = Probe
  source 1..23: mol_type = other DNA
gtggtctagtggttaggattcgg

SEQ ID NO: 22829 - DNA, 30 bp, synthetic construct; identical to SEQ ID NO: 7076
  misc_feature 1..30: note = Probe
  source 1..30: mol_type = other DNA

SEQ ID NO: 22830 - DNA, 31 bp, synthetic construct; identical to SEQ ID NO: 7077
  misc_feature 1..31: note = Probe
  source 1..31: mol_type = other DNA

SEQ ID NO: 22831 - DNA, 36 bp, synthetic construct
  misc_feature 1..36: note = Probe
  source 1..36: mol_type = other DNA
gtggtgacccagtggcctaatggataaggcatcagc

SEQ ID NO: 22832 - DNA, 21 bp, synthetic construct
  misc_feature 1..21: note = Probe
  source 1..21: mol_type = other DNA
gtggtgagcatagctgccttc

SEQ ID NO: 22833 - DNA, 38 bp, synthetic construct
  misc_feature 1..38: note = Probe
  source 1..38: mol_type = other DNA
gtggtgagcatagctgccttccaagcagttgacccggg

SEQ ID NO: 22834 - DNA, 39 bp, synthetic construct
  misc_feature 1..39: note = Probe
  source 1..39: mol_type = other DNA
gtggtgagcatagctgccttccaagcagttgacccgggt

SEQ ID NO: 22835 - DNA, 40 bp, synthetic construct
  misc_feature 1..40: note = Probe
  source 1..40: mol_type = other DNA
gtggtgagcatagctgccttccaagcagttgacccgggtt

SEQ ID NO: 22836 - DNA, 16 bp, synthetic construct
  misc_feature 1..16: note = Probe
  source 1..16: mol_type = other DNA
gtggtgagtatccccg

SEQ ID NO: 22837 - DNA, 17 bp, synthetic construct
  misc_feature 1..17: note = Probe
  source 1..17: mol_type = other DNA
gtggtgagtatccccgc

SEQ ID NO: 22838 - DNA, 18 bp, synthetic construct
  misc_feature 1..18: note = Probe
  source 1..18: mol_type = other DNA
gtggtgagtatccccgcc

SEQ ID NO: 22839 - DNA, 21 bp, synthetic construct
  misc_feature 1..21: note = Probe
  source 1..21: mol_type = other DNA
gtggtgagtatccccgcctgt

SEQ ID NO: 22840 - DNA, 23 bp, synthetic construct
  misc_feature 1..23: note = Probe
  source 1..23: mol_type = other DNA
gtggtgagtatccccgcctgtca

SEQ ID NO: 22841 - DNA, 24 bp, synthetic construct
  misc_feature 1..24: note = Probe
  source 1..24: mol_type = other DNA
gtggtgagtatccccgcctgtcac

SEQ ID NO: 22842 - DNA, 25 bp, synthetic construct
  misc_feature 1..25: note = Probe
  source 1..25: mol_type = other DNA
gtggtgagtatccccgcctgtcacg

SEQ ID NO: 22843 - DNA, 35 bp, synthetic construct
  misc_feature 1..35: note = Probe
  source 1..35: mol_type = other DNA
gtggtgagtatccccgcctgtcacgcgggagaccg

SEQ ID NO: 22844 - DNA, 35 bp, synthetic construct
  misc_feature 1..35: note = Probe
  source 1..35: mol_type = other DNA
gtggttagcatagctgccttccaagcagttgaccc

SEQ ID NO: 22845 - DNA, 36 bp, synthetic construct
  misc_feature 1..36: note = Probe
  source 1..36: mol_type = other DNA
gtggttagcatagctgccttccaagcagttgacccg

SEQ ID NO: 22846 - DNA, 38 bp, synthetic construct
  misc_feature 1..38: note = Probe
  source 1..38: mol_type = other DNA
gtggttagcatagctgccttccaagcagttgacccggg

SEQ ID NO: 22847 - DNA, 40 bp, synthetic construct
  misc_feature 1..40: note = Probe
  source 1..40: mol_type = other DNA
gtggttagcatagctgccttccaagcagttgacccgggtt

SEQ ID NO: 22848 - DNA, 41 bp, synthetic construct
  misc_feature 1..41: note = Probe
  source 1..41: mol_type = other DNA
gtggttagcatagctgccttccaagcagttgacccgggttc

SEQ ID NO: 22849 - DNA, 16 bp, synthetic construct
  misc_feature 1..16: note = Probe
  source 1..16: mol_type = other DNA
gtggttaggattcggc

SEQ ID NO: 22850 - DNA, 22 bp, synthetic construct
  misc_feature 1..22: note = Probe
  source 1..22: mol_type = other DNA
gtggttaggattcggcgctctc

SEQ ID NO: 22851 - DNA, 23 bp, synthetic construct
  misc_feature 1..23: note = Probe
  source 1..23: mol_type = other DNA
gtggttaggattcggcgctctca

SEQ ID NO: 22852 - DNA, 24 bp, synthetic construct
  misc_feature 1..24: note = Probe
  source 1..24: mol_type = other DNA
gtggttaggattcggcgctctcac

SEQ ID NO: 22853 - DNA, 28 bp, synthetic construct
  misc_feature 1..28: note = Probe
  source 1..28: mol_type = other DNA
gtggttaggattcggcgctctcaccgcc

SEQ ID NO: 22854 - DNA, 30 bp, synthetic construct
  misc_feature 1..30: note = Probe
  source 1..30: mol_type = other DNA
gtggttaggattcggcgctctcaccgccgc

SEQ ID NO: 22855 - DNA, 31 bp, synthetic construct; identical to SEQ ID NO: 7083
  misc_feature 1..31: note = Probe
  source 1..31: mol_type = other DNA

SEQ ID NO: 22856 - DNA, 36 bp, synthetic construct
  misc_feature 1..36: note = Probe
  source 1..36: mol_type = other DNA
gtggttaggattcggcgctctcaccgccgcggcccg

SEQ ID NO: 22857 - DNA, 16 bp, synthetic construct
  misc_feature 1..16: note = Probe
  source 1..16: mol_type = other DNA
gtggttagtactctgc

SEQ ID NO: 22858 - DNA, 17 bp, synthetic construct
  misc_feature 1..17: note = Probe
  source 1..17: mol_type = other DNA
gtggttagtactctgcg

SEQ ID NO: 22859 - DNA, 22 bp, synthetic construct
  misc_feature 1..22: note = Probe
  source 1..22: mol_type = other DNA
gtggttagtactctgcgttgtg

SEQ ID NO: 22860 - DNA, 21 bp, synthetic construct
  misc_feature 1..21: note = Probe
  source 1..21: mol_type = other DNA
gtggttagtatccccgcctgt

SEQ ID NO: 22861 - DNA, 24 bp, synthetic construct
  misc_feature 1..24: note = Probe
  source 1..24: mol_type = other DNA
gtggttagtatccccgcctgtcac

SEQ ID NO: 22862 - DNA, 17 bp, synthetic construct
  misc_feature 1..17: note = Probe
  source 1..17: mol_type = other DNA
gtggttatcacgtctgc

SEQ ID NO: 22863 - DNA, 40 bp, synthetic construct
  misc_feature 1..40: note = Probe
  source 1..40: mol_type = other DNA
gtggttatcacgtctgctttacacgcagaaggtcctgggt

SEQ ID NO: 22864 - DNA, 18 bp, synthetic construct
  misc_feature 1..18: note = Probe
  source 1..18: mol_type = other DNA
gtggttatcacgttcgcc

SEQ ID NO: 22865 - DNA, 40 bp, synthetic construct
  misc_feature 1..40: note = Probe
  source 1..40: mol_type = other DNA
gtggttatcacgttcgcctaacacgcgaaaggtccccggt

SEQ ID NO: 22866 - DNA, 21 bp, synthetic construct
  misc_feature 1..21: note = Probe
  source 1..21: mol_type = other DNA
gtggttatcacgttcgcctca

SEQ ID NO: 22867 - DNA, 23 bp, synthetic construct
  misc_feature 1..23: note = Probe
  source 1..23: mol_type = other DNA
gtggttatcacgttcgcctcaca

SEQ ID NO: 22868 - DNA, 23 bp, synthetic construct
  misc_feature 1..23: note = Probe
  source 1..23: mol_type = other DNA
gtggttcagtggtagaattctcg

SEQ ID NO: 22869 - DNA, 25 bp, synthetic construct
  misc_feature 1..25: note = Probe
  source 1..25: mol_type = other DNA
gtggttcagtggtagaattctcgcc

SEQ ID NO: 22870 - DNA, 26 bp, synthetic construct
  misc_feature 1..26: note = Probe
  source 1..26: mol_type = other DNA
gtggttcagtggtagaattctcgcct

SEQ ID NO: 22871 - DNA, 27 bp, synthetic construct
  misc_feature 1..27: note = Probe
  source 1..27: mol_type = other DNA
gtggttcagtggtagaattctcgcctg

SEQ ID NO: 22872 - DNA, 28 bp, synthetic construct
  misc_feature 1..28: note = Probe
  source 1..28: mol_type = other DNA
gtggttcagtggtagaattctcgcctgc

SEQ ID NO: 22873 - DNA, 29 bp, synthetic construct
  misc_feature 1..29: note = Probe
  source 1..29: mol_type = other DNA
gtggttcagtggtagaattctcgcctgcc

SEQ ID NO: 22874 - DNA, 29 bp, synthetic construct
  misc_feature 1..29: note = Probe
  source 1..29: mol_type = other DNA
gtggttctaacttgctggggtggcggttt

SEQ ID NO: 22875 - DNA, 16 bp, synthetic construct
  misc_feature 1..16: note = Probe
  source 1..16: mol_type = other DNA
gtggttgtagtccgtg

SEQ ID NO: 22876 - DNA, 18 bp, synthetic construct
  misc_feature 1..18: note = Probe
  source 1..18: mol_type = other DNA
gtggttgtagtccgtgcg

SEQ ID NO: 22877 - DNA, 20 bp, synthetic construct
  misc_feature 1..20: note = Probe
  source 1..20: mol_type = other DNA
gtggttgtagtccgtgcgag

SEQ ID NO: 22878 - DNA, 21 bp, synthetic construct
  misc_feature 1..21: note = Probe
  source 1..21: mol_type = other DNA
gtggttgtagtccgtgcgaga

SEQ ID NO: 22879 - DNA, 22 bp, synthetic construct
  misc_feature 1..22: note = Probe
  source 1..22: mol_type = other DNA
gtggttgtagtccgtgcgagaa

SEQ ID NO: 22880 - DNA, 23 bp, synthetic construct
  misc_feature 1..23: note = Probe
  source 1..23: mol_type = other DNA
gtggttgtagtccgtgcgagaat

SEQ ID NO: 22881 - DNA, 24 bp, synthetic construct
  misc_feature 1..24: note = Probe
  source 1..24: mol_type = other DNA
gtggttgtagtccgtgcgagaata

SEQ ID NO: 22882 - DNA, 25 bp, synthetic construct
  misc_feature 1..25: note = Probe
  source 1..25: mol_type = other DNA
gtggttgtagtccgtgcgagaataa

SEQ ID NO: 22883 - DNA, 26 bp, synthetic construct
  misc_feature 1..26: note = Probe
  source 1..26: mol_type = other DNA
gtggttgtagtccgtgcgagaataat

SEQ ID NO: 22884 - DNA, 27 bp, synthetic construct
  misc_feature 1..27: note = Probe
  source 1..27: mol_type = other DNA
gtggttgtagtccgtgcgagaataatg

SEQ ID NO: 22885 - DNA, 18 bp, synthetic construct
  misc_feature 1..18: note = Probe
  source 1..18: mol_type = other DNA
gtgtaagcagggtcgttt

SEQ ID NO: 22886 - DNA, 19 bp, synthetic construct
  misc_feature 1..19: note = Probe
  source 1..19: mol_type = other DNA
gtgtaagcagggtcgtttt

SEQ ID NO: 22887 - DNA, 27 bp, synthetic construct
  misc_feature 1..27: note = Probe
  source 1..27: mol_type = other DNA
gtgtaagcagggtcgttttacaacttt

SEQ ID NO: 22888 - DNA, 26 bp, synthetic construct
  misc_feature 1..26: note = Probe
  source 1..26: mol_type = other DNA
gtgtagctcagtggtagagcgcgtgc

SEQ ID NO: 22889 - DNA, 21 bp, synthetic construct
  misc_feature 1..21: note = Probe
  source 1..21: mol_type = other DNA
gtgtagtggtatcatgcaaga

SEQ ID NO: 22890 - DNA, 24 bp, synthetic construct
  misc_feature 1..24: note = Probe
  source 1..24: mol_type = other DNA
gtgtagtggtatcatgcaagattc

SEQ ID NO: 22891 - DNA, 41 bp, synthetic construct
  misc_feature 1..41: note = Probe
  source 1..41: mol_type = other DNA
gtgtagtggtatcatgcaagattcccattcttgcgacccgg

SEQ ID NO: 22892 - DNA, 19 bp, synthetic construct
  misc_feature 1..19: note = Probe
  source 1..19: mol_type = other DNA
gtgtagtggttatcacgtt

SEQ ID NO: 22893 - DNA, 26 bp, synthetic construct
  misc_feature 1..26: note = Probe
  source 1..26: mol_type = other DNA
gtgtagtggttatcacgttcgcctca

SEQ ID NO: 22894 - DNA, 17 bp, synthetic construct
  misc_feature 1..17: note = Probe
  source 1..17: mol_type = other DNA
gtgtcaggatggccgag

SEQ ID NO: 22895 - DNA, 25 bp, synthetic construct
  misc_feature 1..25: note = Probe
  source 1..25: mol_type = other DNA
gtgtcagtttttctcttcagctttt

SEQ ID NO: 22896 - DNA, 26 bp, synthetic construct
  misc_feature 1..26: note = Probe
  source 1..26: mol_type = other DNA
gtgtcagtttttctcttcagcttttt

SEQ ID NO: 22897 - DNA, 16 bp, synthetic construct
  misc_feature 1..16: note = Probe
  source 1..16: mol_type = other DNA
gtgtccctagtagctc

SEQ ID NO: 22898 - DNA, 17 bp, synthetic construct
  misc_feature 1..17: note = Probe
  source 1..17: mol_type = other DNA
gtgtccctagtagctcg

SEQ ID NO: 22899 - DNA, 28 bp, synthetic construct
  misc_feature 1..28: note = Probe
  source 1..28: mol_type = other DNA
gtgtccctggtggtctagtggctaggat

SEQ ID NO: 22900 - DNA, 29 bp, synthetic construct
  misc_feature 1..29: note = Probe
  source 1..29: mol_type = other DNA
gtgtccctggtggtctagtggctaggatt

SEQ ID NO: 22901 - DNA, 38 bp, synthetic construct
  misc_feature 1..38: note = Probe
  source 1..38: mol_type = other DNA
gtgtccctggtggtctagtggctaggattcggcgcttt

SEQ ID NO: 22902 - DNA, 30 bp, synthetic construct
  misc_feature 1..30: note = Probe
  source 1..30: mol_type = other DNA
gtgtcggctcgttggtctaggggtatgatt

SEQ ID NO: 22903 - DNA, 32 bp, synthetic construct
  misc_feature 1..32: note = Probe
  source 1..32: mol_type = other DNA
gtgtcggctcgttggtctaggggtatgattct

SEQ ID NO: 22904 - DNA, 34 bp, synthetic construct
  misc_feature 1..34: note = Probe
  source 1..34: mol_type = other DNA
gtgtcggctcgttggtctaggggtatgattctcg

SEQ ID NO: 22905 - DNA, 20 bp, synthetic construct
  misc_feature 1..20: note = Probe
  source 1..20: mol_type = other DNA
gtgtgaatccttcgatagct

SEQ ID NO: 22906 - DNA, 44 bp, synthetic construct
  misc_feature 1..44: note = Probe
  source 1..44: mol_type = other DNA
gtgtgaatccttcgatagctcagttggtagagcggaggactgta

SEQ ID NO: 22907 - DNA, 16 bp, synthetic construct
  misc_feature 1..16: note = Probe
  source 1..16: mol_type = other DNA
gtgtgaggtcccgggt

SEQ ID NO: 22908 - DNA, 33 bp, synthetic construct
  misc_feature 1..33: note = Probe
  source 1..33: mol_type = other DNA
gtgtggggttccatagtgtagtggttatcacgt

SEQ ID NO: 22909 - DNA, 18 bp, synthetic construct
  misc_feature 1..18: note = Probe
  source 1..18: mol_type = other DNA
gtgtgtagctgcactttt

SEQ ID NO: 22910 - DNA, 19 bp, synthetic construct
  misc_feature 1..19: note = Probe
  source 1..19: mol_type = other DNA
gtgtgtagctgcacttttt

SEQ ID NO: 22911 - DNA, 16 bp, synthetic construct
  misc_feature 1..16: note = Probe
  source 1..16: mol_type = other DNA
gtgtgtcaggatggcc

SEQ ID NO: 22912 - DNA, 28 bp, synthetic construct
  misc_feature 1..28: note = Probe
  source 1..28: mol_type = other DNA
gtgtgtcaggatggccgagtggtctaag

SEQ ID NO: 22913 - DNA, 39 bp, synthetic construct
  misc_feature 1..39: note = Probe
  source 1..39: mol_type = other DNA
gtgtgtcaggatggccgagtggtctaaggcgccagactc

SEQ ID NO: 22914 - DNA, 32 bp, synthetic construct
  misc_feature 1..32: note = Probe
  source 1..32: mol_type = other DNA
gtgttgatggtatagtggtgagcatagctgcc

SEQ ID NO: 22915 - DNA, 35 bp, synthetic construct
  misc_feature 1..35: note = Probe
  source 1..35: mol_type = other DNA
gtgttgatggtatagtggtgagcatagctgccttc

SEQ ID NO: 22916 - DNA, 36 bp, synthetic construct
  misc_feature 1..36: note = Probe
  source 1..36: mol_type = other DNA
gtgttgatggtatagtggtgagcatagctgccttcc

SEQ ID NO: 22917 - DNA, 26 bp, synthetic construct
  misc_feature 1..26: note = Probe
  source 1..26: mol_type = other DNA
gtgtttgtgggtttaagtcccattgg

SEQ ID NO: 22918 - DNA, 27 bp, synthetic construct
  misc_feature 1..27: note = Probe
  source 1..27: mol_type = other DNA
gtgtttgtgggtttaagtcccattggt

SEQ ID NO: 22919 - DNA, 31 bp, synthetic construct
  misc_feature 1..31: note = Probe
  source 1..31: mol_type = other DNA
gtgtttgtgggtttaagtcccattggtctag

SEQ ID NO: 22920 - DNA, 32 bp, synthetic construct; identical to SEQ ID NO: 7107
  misc_feature 1..32: note = Probe
  source 1..32: mol_type = other DNA

SEQ ID NO: 22921 - DNA, 33 bp, synthetic construct; identical to SEQ ID NO: 7108
  misc_feature 1..33: note = Probe
  source 1..33: mol_type = other DNA

SEQ ID NO: 22922 - DNA, 19 bp, synthetic construct
  misc_feature 1..19: note = Probe
  source 1..19: mol_type = other DNA
gttaaagattaagagaacc

SEQ ID NO: 22923 - DNA, 20 bp, synthetic construct
  misc_feature 1..20: note = Probe
  source 1..20: mol_type = other DNA
gttaaagattaagagaacca

SEQ ID NO: 22924 - DNA, 33 bp, synthetic construct; identical to SEQ ID NO: 7115
  misc_feature 1..33: note = Probe
  source 1..33: mol_type = other DNA

SEQ ID NO: 22925 - DNA, 35 bp, synthetic construct
  misc_feature 1..35: note = Probe
  source 1..35: mol_type = other DNA
gttaaagattaagagaaccaacacctctttacagt

SEQ ID NO: 22926 - DNA, 36 bp, synthetic construct; identical to SEQ ID NO: 7116
  misc_feature 1..36: note = Probe
  source 1..36: mol_type = other DNA

SEQ ID NO: 22927 - DNA, 37 bp, synthetic construct; identical to SEQ ID NO: 7117
  misc_feature 1..37: note = Probe
  source 1..37: mol_type = other DNA

SEQ ID NO: 22928 - DNA, 38 bp, synthetic construct; identical to SEQ ID NO: 7118
  misc_feature 1..38: note = Probe
  source 1..38: mol_type = other DNA

SEQ ID NO: 22929 - DNA, 39 bp, synthetic construct; identical to SEQ ID NO: 7119
  misc_feature 1..39: note = Probe
  source 1..39: mol_type = other DNA

SEQ ID NO: 22930 - DNA, 40 bp, synthetic construct; identical to SEQ ID NO: 7120
  misc_feature 1..40: note = Probe
  source 1..40: mol_type = other DNA

SEQ ID NO: 22931 - DNA, 41 bp, synthetic construct; identical to SEQ ID NO: 7121
  misc_feature 1..41: note = Probe
  source 1..41: mol_type = other DNA

SEQ ID NO: 22932 - DNA, 42 bp, synthetic construct; identical to SEQ ID NO: 7122
  misc_feature 1..42: note = Probe
  source 1..42: mol_type = other DNA

SEQ ID NO: 22933 - DNA, 46 bp, synthetic construct; identical to SEQ ID NO: 7124
  misc_feature 1..46: note = Probe
  source 1..46: mol_type = other DNA

SEQ ID NO: 22934 - DNA, 50 bp, synthetic construct; identical to SEQ ID NO: 7125
  misc_feature 1..50: note = Probe
  source 1..50: mol_type = other DNA

SEQ ID NO: 22935 - DNA, 38 bp, synthetic construct
  misc_feature 1..38: note = Probe
  source 1..38: mol_type = other DNA
gttaaccgaaaggttggtggttcgagcccacccaggga

SEQ ID NO: 22936 - DNA, 43 bp, synthetic construct
  misc_feature 1..43: note = Probe
  source 1..43: mol_type = other DNA
gttaaccgaaaggttggtggttcgagcccacccagggacgcct

SEQ ID NO: 22937 - DNA, 33 bp, synthetic construct
  misc_feature 1..33: note = Probe
  source 1..33: mol_type = other DNA
gttaactaagtgtttgtgggtttaagtcccatt

SEQ ID NO: 22938 - DNA, 37 bp, synthetic construct
  misc_feature 1..37: note = Probe
  source 1..37: mol_type = other DNA
gttaactaagtgtttgtgggtttaagtcccattggtc

SEQ ID NO: 22939 - DNA, 38 bp, synthetic construct; identical to SEQ ID NO: 7127
  misc_feature 1..38: note = Probe
  source 1..38: mol_type = other DNA

SEQ ID NO: 22940 - DNA, 41 bp, synthetic construct; identical to SEQ ID NO: 7128
  misc_feature 1..41: note = Probe
  source 1..41: mol_type = other DNA

SEQ ID NO: 22941 - DNA, 42 bp, synthetic construct
  misc_feature 1..42: note = Probe
  source 1..42: mol_type = other DNA
gttaactaagtgtttgtgggtttaagtcccattggtctagta

SEQ ID NO: 22942 - DNA, 43 bp, synthetic construct; identical to SEQ ID NO: 7129
  misc_feature 1..43: note = Probe
  source 1..43: mol_type = other DNA

SEQ ID NO: 22943 - DNA, 21 bp, synthetic construct
  misc_feature 1..21: note = Probe
  source 1..21: mol_type = other DNA
gttaagatggcagagcccggc

SEQ ID NO: 22944 - DNA, 21 bp, synthetic construct
  misc_feature 1..21: note = Probe
  source 1..21: mol_type = other DNA
gttaagatggcagagcccggt

SEQ ID NO: 22945 - DNA, 22 bp, synthetic construct
  misc_feature 1..22: note = Probe
  source 1..22: mol_type = other DNA
gttaagatggcagagcccggta

SEQ ID NO: 22946 - DNA, 23 bp, synthetic construct
  misc_feature 1..23: note = Probe
  source 1..23: mol_type = other DNA
gttaagatggcagagcccggtaa

SEQ ID NO: 22947 - DNA, 25 bp, synthetic construct
  misc_feature 1..25: note = Probe
  source 1..25: mol_type = other DNA
gttaagatggcagagcccggtaatc

SEQ ID NO: 22948 - DNA, 26 bp, synthetic construct
  misc_feature 1..26: note = Probe
  source 1..26: mol_type = other DNA
gttaagatggcagagcccggtaatcg

SEQ ID NO: 22949 - DNA, 27 bp, synthetic construct
  misc_feature 1..27: note = Probe
  source 1..27: mol_type = other DNA
gttaagatggcagagcccggtaatcgc

SEQ ID NO: 22950 - DNA, 28 bp, synthetic construct
  misc_feature 1..28: note = Probe
  source 1..28: mol_type = other DNA
gttaagatggcagagcccggtaatcgca

SEQ ID NO: 22951 - DNA, 29 bp, synthetic construct
  misc_feature 1..29: note = Probe
  source 1..29: mol_type = other DNA
gttaagatggcagagcccggtaatcgcat

SEQ ID NO: 22952 - DNA, 31 bp, synthetic construct
  misc_feature 1..31: note = Probe
  source 1..31: mol_type = other DNA
gttaagatggcagagcccggtaatcgcataa

SEQ ID NO: 22953 - DNA, 32 bp, synthetic construct; identical to SEQ ID NO: 7138
  misc_feature 1..32: note = Probe
  source 1..32: mol_type = other DNA

SEQ ID NO: 22954 - DNA, 33 bp, synthetic construct
  misc_feature 1..33: note = Probe
  source 1..33: mol_type = other DNA
gttaagatggcagagcccggtaatcgcataaaa

SEQ ID NO: 22955 - DNA, 34 bp, synthetic construct; identical to SEQ ID NO: 1522
  misc_feature 1..34: note = Probe
  source 1..34: mol_type = other DNA

SEQ ID NO: 22956 - DNA, 35 bp, synthetic construct; identical to SEQ ID NO: 7139
  misc_feature 1..35: note = Probe
  source 1..35: mol_type = other DNA

SEQ ID NO: 22957 - DNA, 36 bp, synthetic construct
  misc_feature 1..36: note = Probe
  source 1..36: mol_type = other DNA
gttaagatggcagagcccggtaatcgcataaaactt

SEQ ID NO: 22958 - DNA, 38 bp, synthetic construct; identical to SEQ ID NO: 7140
  misc_feature 1..38: note = Probe
  source 1..38: mol_type = other DNA

SEQ ID NO: 22959 - DNA, 40 bp, synthetic construct
  misc_feature 1..40: note = Probe
  source 1..40: mol_type = other DNA
gttaagatggcagagcccggtaatcgcataaaacttaaaa

SEQ ID NO: 22960 - DNA, 42 bp, synthetic construct; identical to SEQ ID NO: 1524
  misc_feature 1..42: note = Probe
  source 1..42: mol_type = other DNA

SEQ ID NO: 22961 - DNA, 43 bp, synthetic construct; identical to SEQ ID NO: 7143
  misc_feature 1..43: note = Probe
  source 1..43: mol_type = other DNA

SEQ ID NO: 22962 - DNA, 44 bp, synthetic construct
  misc_feature 1..44: note = Probe
  source 1..44: mol_type = other DNA
gttaagatggcagagcccggtaatcgcataaaacttaaaacttt

SEQ ID NO: 22963 - DNA, 50 bp, synthetic construct; identical to SEQ ID NO: 7145
  misc_feature 1..50: note = Probe
  source 1..50: mol_type = other DNA

SEQ ID NO: 22964 - DNA, 34 bp, synthetic construct
  misc_feature 1..34: note = Probe
  source 1..34: mol_type = other DNA
gttagcatagctgccttccaagcagttgacccgg

SEQ ID NO: 22965 - DNA, 16 bp, synthetic construct
  misc_feature 1..16: note = Probe
  source 1..16: mol_type = other DNA
gttaggattcggcgct

SEQ ID NO: 22966 - DNA, 32 bp, synthetic construct
  misc_feature 1..32: note = Probe
  source 1..32: mol_type = other DNA
gttaggattcggcgctctcaccgccgcggccc

SEQ ID NO: 22967 - DNA, 25 bp, synthetic construct
  misc_feature 1..25: note = Probe
  source 1..25: mol_type = other DNA
gttagtatagtggtgagtatccccg

SEQ ID NO: 22968 - DNA, 26 bp, synthetic construct
  misc_feature 1..26: note = Probe
  source 1..26: mol_type = other DNA
gttagtatagtggtgagtatccccgc

SEQ ID NO: 22969 - DNA, 30 bp, synthetic construct
  misc_feature 1..30: note = Probe
  source 1..30: mol_type = other DNA
gttagtatagtggtgagtatccccgcctgt

SEQ ID NO: 22970 - DNA, 17 bp, synthetic construct
  misc_feature 1..17: note = Probe
  source 1..17: mol_type = other DNA
gttatacccttcccgta

SEQ ID NO: 22971 - DNA, 23 bp, synthetic construct
  misc_feature 1..23: note = Probe
  source 1..23: mol_type = other DNA
gttatacccttcccgtactaatt

SEQ ID NO: 22972 - DNA, 15 bp, synthetic construct
  misc_feature 1..15: note = Probe
  source 1..15: mol_type = other DNA
gttatgaaatggttt

SEQ ID NO: 22973 - DNA, 31 bp, synthetic construct; identical to SEQ ID NO: 7152
  misc_feature 1..31: note = Probe
  source 1..31: mol_type = other DNA

SEQ ID NO: 22974 - DNA, 24 bp, synthetic construct
  misc_feature 1..24: note = Probe
  source 1..24: mol_type = other DNA
gttcaaatcccggacgagccccct

SEQ ID NO: 22975 - DNA, 24 bp, synthetic construct
  misc_feature 1..24: note = Probe
  source 1..24: mol_type = other DNA
gttcaagtccctgttcgggcggca

SEQ ID NO: 22976 - DNA, 24 bp, synthetic construct
  misc_feature 1..24: note = Probe
  source 1..24: mol_type = other DNA
gttcaattccccgacggggaggtg

SEQ ID NO: 22977 - DNA, 24 bp, synthetic construct
  misc_feature 1..24: note = Probe
  source 1..24: mol_type = other DNA
gttcaattcccggtcagggaacca

SEQ ID NO: 22978 - DNA, 24 bp, synthetic construct
  misc_feature 1..24: note = Probe
  source 1..24: mol_type = other DNA
gttcaattcctcttcttaacaaca

SEQ ID NO: 22979 - DNA, 24 bp, synthetic construct
  misc_feature 1..24: note = Probe
  source 1..24: mol_type = other DNA
gttcagtggtagaattctcgcctg

SEQ ID NO: 22980 - DNA, 30 bp, synthetic construct
  misc_feature 1..30: note = Probe
  source 1..30: mol_type = other DNA
gttccatagtgtagtggttatcacatctgc

SEQ ID NO: 22981 - DNA, 32 bp, synthetic construct; identical to SEQ ID NO: 7165
  misc_feature 1..32: note = Probe
  source 1..32: mol_type = other DNA

SEQ ID NO: 22982 - DNA, 33 bp, synthetic construct
  misc_feature 1..33: note = Probe
  source 1..33: mol_type = other DNA
gttccatagtgtagtggttatcacgtctgcttt

SEQ ID NO: 22983 - DNA, 24 bp, synthetic construct
  misc_feature 1..24: note = Probe
  source 1..24: mol_type = other DNA
gttcgaaaccgggcggaaacacct

SEQ ID NO: 22984 - DNA, 24 bp, synthetic construct
  misc_feature 1..24: note = Probe
  source 1..24: mol_type = other DNA
gttcgaatcccagcggtgcctccg

SEQ ID NO: 22985 - DNA, 24 bp, synthetic construct
  misc_feature 1..24: note = Probe
  source 1..24: mol_type = other DNA
gttcgactcccggtatgggaacaa

SEQ ID NO: 22986 - DNA, 24 bp, synthetic construct
  misc_feature 1..24: note = Probe
  source 1..24: mol_type = other DNA
gttcgactcccggtgtgggaacgc

SEQ ID NO: 22987 - DNA, 24 bp, synthetic construct
  misc_feature 1..24: note = Probe
  source 1..24: mol_type = other DNA
gttcgagcccacccagggacgcct

SEQ ID NO: 22988 - DNA, 24 bp, synthetic construct
  misc_feature 1..24: note = Probe
  source 1..24: mol_type = other DNA
gttcgagtcccatctgggtcgcgt

SEQ ID NO: 22989 - DNA, 24 bp, synthetic construct
  misc_feature 1..24: note = Probe
  source 1..24: mol_type = other DNA
gttcgagtcccttcgtggtcgttg

SEQ ID NO: 22990 - DNA, 24 bp, synthetic construct
  misc_feature 1..24: note = Probe
  source 1..24: mol_type = other DNA
gttcgatccccagtacctccaggc

SEQ ID NO: 22991 - DNA, 24 bp, synthetic construct
  misc_feature 1..24: note = Probe
  source 1..24: mol_type = other DNA
gttcgatccccggcatctccattg

SEQ ID NO: 22992 - DNA, 22 bp, synthetic construct
  misc_feature 1..22: note = Probe
  source 1..22: mol_type = other DNA
gttcgattccccgacggggaga

SEQ ID NO: 22993 - DNA, 23 bp, synthetic construct
  misc_feature 1..23: note = Probe
  source 1..23: mol_type = other DNA
gttcgattccccgacggggagaa

SEQ ID NO: 22994 - DNA, 24 bp, synthetic construct
  misc_feature 1..24: note = Probe
  source 1..24: mol_type = other DNA
gttcgattccccgacggggagaaa

SEQ ID NO: 22995 - DNA, 23 bp, synthetic construct
  misc_feature 1..23: note = Probe
  source 1..23: mol_type = other DNA
gttcgattccccgacggggagac

SEQ ID NO: 22996 - DNA, 24 bp, synthetic construct
  misc_feature 1..24: note = Probe
  source 1..24: mol_type = other DNA
gttcgattccccgacggggagacg

SEQ ID NO: 22997 - DNA, 24 bp, synthetic construct
  misc_feature 1..24: note = Probe
  source 1..24: mol_type = other DNA
gttcgattccccgacggggagagt

SEQ ID NO: 22998 - DNA, 22 bp, synthetic construct
  misc_feature 1..22: note = Probe
  source 1..22: mol_type = other DNA
gttcgattccccgacggggagg

SEQ ID NO: 22999 - DNA, 23 bp, synthetic construct
  misc_feature 1..23: note = Probe
  source 1..23: mol_type = other DNA
gttcgattccccgacggggaggc

SEQ ID NO: 23000 - DNA, 24 bp, synthetic construct
  misc_feature 1..24: note = Probe
  source 1..24: mol_type = other DNA
gttcgattccccgacggggaggca

SEQ ID NO: 23001 - DNA, 24 bp, synthetic construct
  misc_feature 1..24: note = Probe
  source 1..24: mol_type = other DNA
gttcgattccccgacggggaggcc

SEQ ID NO: 23002 - DNA, 24 bp, synthetic construct
  misc_feature 1..24: note = Probe
  source 1..24: mol_type = other DNA
gttcgattcccggccaacgcaagt

SEQ ID NO: 23003 - DNA, 24 bp, synthetic construct
  misc_feature 1..24: note = Probe
  source 1..24: mol_type = other DNA
gttcgattcccggccaacgcagtg

SEQ ID NO: 23004 - DNA, 24 bp, synthetic construct
  misc_feature 1..24: note = Probe
  source 1..24: mol_type = other DNA
gttcgattcccggccaatgcacga

SEQ ID NO: 23005 - DNA, 24 bp, synthetic construct
  misc_feature 1..24: note = Probe
  source 1..24: mol_type = other DNA
gttcgattcccggccaatgcagca

SEQ ID NO: 23006 - DNA, 24 bp, synthetic construct
  misc_feature 1..24: note = Probe
  source 1..24: mol_type = other DNA
gttcgattcccggtcagggaacaa

SEQ ID NO: 23007 - DNA, 24 bp, synthetic construct
  misc_feature 1..24: note = Probe
  source 1..24: mol_type = other DNA
gttcgattcccggtcatggaacca

SEQ ID NO: 23008 - DNA, 24 bp, synthetic construct
  misc_feature 1..24: note = Probe
  source 1..24: mol_type = other DNA
gttcgattcctggtcagggaacca

SEQ ID NO: 23009 - DNA, 23 bp, synthetic construct
  misc_feature 1..23: note = Probe
  source 1..23: mol_type = other DNA
gttcgattctcatagtcctagaa

SEQ ID NO: 23010 - DNA, 23 bp, synthetic construct
  misc_feature 1..23: note = Probe
  source 1..23: mol_type = other DNA
gttcttgtagttgaaatacaacg

SEQ ID NO: 23011 - DNA, 27 bp, synthetic construct
  misc_feature 1..27: note = Probe
  source 1..27: mol_type = other DNA
gttcttgtagttgaaatacaacgatgg

SEQ ID NO: 23012 - DNA, 28 bp, synthetic construct
  misc_feature 1..28: note = Probe
  source 1..28: mol_type = other DNA
gttcttgtagttgaaatacaacgatggt

SEQ ID NO: 23013 - DNA, 29 bp, synthetic construct
  misc_feature 1..29: note = Probe
  source 1..29: mol_type = other DNA
gttcttgtagttgaaatacaacgatggtt

SEQ ID NO: 23014 - DNA, 30 bp, synthetic construct; identical to SEQ ID NO: 7195
  misc_feature 1..30: note = Probe
  source 1..30: mol_type = other DNA

SEQ ID NO: 23015 - DNA, 31 bp, synthetic construct; identical to SEQ ID NO: 7196
  misc_feature 1..31: note = Probe
  source 1..31: mol_type = other DNA

SEQ ID NO: 23016 - DNA, 32 bp, synthetic construct; identical to SEQ ID NO: 7197
  misc_feature 1..32: note = Probe
  source 1..32: mol_type = other DNA

SEQ ID NO: 23017 - DNA, 36 bp, synthetic construct
  misc_feature 1..36: note = Probe
  source 1..36: mol_type = other DNA
gttcttgtagttgaaatacaacgatggtttttcata

SEQ ID NO: 23018 - DNA, 50 bp, synthetic construct
  misc_feature 1..50: note = Probe
  source 1..50: mol_type = other DNA
gttgaaatacaacgatggtttttcatatcattggtcgtggttgtagtccg

SEQ ID NO: 23019 - DNA, 27 bp, synthetic construct
  misc_feature 1..27: note = Probe
  source 1..27: mol_type = other DNA
gttgatgcagagtggggttttgcagtc

SEQ ID NO: 23020 - DNA, 32 bp, synthetic construct; identical to SEQ ID NO: 7207
  misc_feature 1..32: note = Probe
  source 1..32: mol_type = other DNA

SEQ ID NO: 23021 - DNA, 33 bp, synthetic construct
  misc_feature 1..33: note = Probe
  source 1..33: mol_type = other DNA
gttgatgcagagtggggttttgcagtccttagc

SEQ ID NO: 23022 - DNA, 34 bp, synthetic construct; identical to SEQ ID NO: 7208
  misc_feature 1..34: note = Probe
  source 1..34: mol_type = other DNA

SEQ ID NO: 23023 - DNA, 50 bp, synthetic construct; identical to SEQ ID NO: 7209
  misc_feature 1..50: note = Probe
  source 1..50: mol_type = other DNA

SEQ ID NO: 23024 - DNA, 18 bp, synthetic construct
  misc_feature 1..18: note = Probe
  source 1..18: mol_type = other DNA
gttgccatgttaacgttt

SEQ ID NO: 23025 - DNA, 27 bp, synthetic construct
  misc_feature 1..27: note = Probe
  source 1..27: mol_type = other DNA
gttggtggtatagtggtaagcatagct

SEQ ID NO: 23026 - DNA, 30 bp, synthetic construct
  misc_feature 1..30: note = Probe
  source 1..30: mol_type = other DNA
gttggtggtatagtggtaagcatagctgcc

SEQ ID NO: 23027 - DNA, 33 bp, synthetic construct
  misc_feature 1..33: note = Probe
  source 1..33: mol_type = other DNA
gttggtggtatagtggtaagcatagctgccttc

SEQ ID NO: 23028 - DNA, 34 bp, synthetic construct; identical to SEQ ID NO: 7211
  misc_feature 1..34: note = Probe
  source 1..34: mol_type = other DNA

SEQ ID NO: 23029 - DNA, 25 bp, synthetic construct
  misc_feature 1..25: note = Probe
  source 1..25: mol_type = other DNA
gttggtggtatagtggtgagcatag

SEQ ID NO: 23030 - DNA, 26 bp, synthetic construct
  misc_feature 1..26: note = Probe
  source 1..26: mol_type = other DNA
gttggtggtatagtggtgagcatagc

SEQ ID NO: 23031 - DNA, 28 bp, synthetic construct
  misc_feature 1..28: note = Probe
  source 1..28: mol_type = other DNA
gttggtggtatagtggtgagcatagctg

SEQ ID NO: 23032 - DNA, 29 bp, synthetic construct
  misc_feature 1..29: note = Probe
  source 1..29: mol_type = other DNA
gttggtggtatagtggtgagcatagctgc

SEQ ID NO: 23033 - DNA, 30 bp, synthetic construct
  misc_feature 1..30: note = Probe
  source 1..30: mol_type = other DNA
gttggtggtatagtggtgagcatagctgcc

SEQ ID NO: 23034 - DNA, 31 bp, synthetic construct
  misc_feature 1..31: note = Probe
  source 1..31: mol_type = other DNA
gttggtggtatagtggtgagcatagctgcct

SEQ ID NO: 23035 - DNA, 32 bp, synthetic construct; identical to SEQ ID NO: 7212
  misc_feature 1..32: note = Probe
  source 1..32: mol_type = other DNA

SEQ ID NO: 23036 - DNA, 33 bp, synthetic construct; identical to SEQ ID NO: 7213
  misc_feature 1..33: note = Probe
  source 1..33: mol_type = other DNA

SEQ ID NO: 23037 - DNA, 34 bp, synthetic construct; identical to SEQ ID NO: 7214
  misc_feature 1..34: note = Probe
  source 1..34: mol_type = other DNA

SEQ ID NO: 23038 - DNA, 26 bp, synthetic construct
  misc_feature 1..26: note = Probe
  source 1..26: mol_type = other DNA
gttggtggtatagtggttagcatagc

SEQ ID NO: 23039 - DNA, 27 bp, synthetic construct
  misc_feature 1..27: note = Probe
  source 1..27: mol_type = other DNA
gttggtggtatagtggttagcatagct

SEQ ID NO: 23040 - DNA, 28 bp, synthetic construct
  misc_feature 1..28: note = Probe
  source 1..28: mol_type = other DNA
gttggtggtatagtggttagcatagctg

SEQ ID NO: 23041 - DNA, 29 bp, synthetic construct
  misc_feature 1..29: note = Probe
  source 1..29: mol_type = other DNA
gttggtggtatagtggttagcatagctgc

SEQ ID NO: 23042 - DNA, 30 bp, synthetic construct
  misc_feature 1..30: note = Probe
  source 1..30: mol_type = other DNA
gttggtggtatagtggttagcatagctgcc

SEQ ID NO: 23043 - DNA, 31 bp, synthetic construct; identical to SEQ ID NO: 7217
  misc_feature 1..31: note = Probe
  source 1..31: mol_type = other DNA

SEQ ID NO: 23044 - DNA, 32 bp, synthetic construct
  misc_feature 1..32: note = Probe
  source 1..32: mol_type = other DNA
gttggtggtatagtggttagcatagctgcctt

SEQ ID NO: 23045 - DNA, 33 bp, synthetic construct; identical to SEQ ID NO: 7218
  misc_feature 1..33: note = Probe
  source 1..33: mol_type = other DNA

SEQ ID NO: 23046 - DNA, 34 bp, synthetic construct; identical to SEQ ID NO: 7219
  misc_feature 1..34: note = Probe
  source 1..34: mol_type = other DNA

SEQ ID NO: 23047 - DNA, 26 bp, synthetic construct
  misc_feature 1..26: note = Probe
  source 1..26: mol_type = other DNA
gttggtggttcgagcccacccaggga

SEQ ID NO: 23048 - DNA, 31 bp, synthetic construct
  misc_feature 1..31: note = Probe
  source 1..31: mol_type = other DNA
gttggtggttcgagcccacccagggacgcct

SEQ ID NO: 23049 - DNA, 21 bp, synthetic construct
  misc_feature 1..21: note = Probe
  source 1..21: mol_type = other DNA
gttgtagtccgtgcgagaata

SEQ ID NO: 23050 - DNA, 22 bp, synthetic construct
  misc_feature 1..22: note = Probe
  source 1..22: mol_type = other DNA
gttgtagtccgtgcgagaataa

SEQ ID NO: 23051 - DNA, 23 bp, synthetic construct
  misc_feature 1..23: note = Probe
  source 1..23: mol_type = other DNA
gttgtagtccgtgcgagaataat

SEQ ID NO: 23052 - DNA, 24 bp, synthetic construct
  misc_feature 1..24: note = Probe
  source 1..24: mol_type = other DNA
gttgtagtccgtgcgagaataatg

SEQ ID NO: 23053 - DNA, 33 bp, synthetic construct; identical to SEQ ID NO: 7223
  misc_feature 1..33: note = Probe
  source 1..33: mol_type = other DNA

SEQ ID NO: 23054 - DNA, 36 bp, synthetic construct
  misc_feature 1..36: note = Probe
  source 1..36: mol_type = other DNA
gtttaaccaaaacatcagattgtgaatctgacaaca

SEQ ID NO: 23055 - DNA, 16 bp, synthetic construct
  misc_feature 1..16: note = Probe
  source 1..16: mol_type = other DNA
gtttagacgggctcac

SEQ ID NO: 23056 - DNA, 17 bp, synthetic construct
  misc_feature 1..17: note = Probe
  source 1..17: mol_type = other DNA
gtttagacgggctcaca

SEQ ID NO: 23057 - DNA, 18 bp, synthetic construct
  misc_feature 1..18: note = Probe
  source 1..18: mol_type = other DNA
gtttagacgggctcacat

SEQ ID NO: 23058 - DNA, 20 bp, synthetic construct
  misc_feature 1..20: note = Probe
  source 1..20: mol_type = other DNA
gtttagacgggctcacatca

SEQ ID NO: 23059 - DNA, 25 bp, synthetic construct
  misc_feature 1..25: note = Probe
  source 1..25: mol_type = other DNA
gtttagacgggctcacatcacccca

SEQ ID NO: 23060 - DNA, 26 bp, synthetic construct
  misc_feature 1..26: note = Probe
  source 1..26: mol_type = other DNA
gtttagacgggctcacatcaccccat

SEQ ID NO: 23061 - DNA, 27 bp, synthetic construct
  misc_feature 1..27: note = Probe
  source 1..27: mol_type = other DNA
gtttagacgggctcacatcaccccata

SEQ ID NO: 23062 - DNA, 28 bp, synthetic construct
  misc_feature 1..28: note = Probe
  source 1..28: mol_type = other DNA
gtttagacgggctcacatcaccccataa

SEQ ID NO: 23063 - DNA, 29 bp, synthetic construct
  misc_feature 1..29: note = Probe
  source 1..29: mol_type = other DNA
gtttagacgggctcacatcaccccataaa

SEQ ID NO: 23064 - DNA, 31 bp, synthetic construct; identical to SEQ ID NO: 7236
  misc_feature 1..31: note = Probe
  source 1..31: mol_type = other DNA

SEQ ID NO: 23065 - DNA, 33 bp, synthetic construct; identical to SEQ ID NO: 7238
  misc_feature 1..33: note = Probe
  source 1..33: mol_type = other DNA

SEQ ID NO: 23066 - DNA, 34 bp, synthetic construct; identical to SEQ ID NO: 7239
  misc_feature 1..34: note = Probe
  source 1..34: mol_type = other DNA

SEQ ID NO: 23067 - DNA, 17 bp, synthetic construct
  misc_feature 1..17: note = Probe
  source 1..17: mol_type = other DNA
gtttatgtagcttacct

SEQ ID NO: 23068 - DNA, 21 bp, synthetic construct
  misc_feature 1..21: note = Probe
  source 1..21: mol_type = other DNA
gtttatgtagcttacctcctc

SEQ ID NO: 23069 - DNA, 22 bp, synthetic construct
  misc_feature 1..22: note = Probe
  source 1..22: mol_type = other DNA
gtttatgtagcttacctcctca

SEQ ID NO: 23070 - DNA, 27 bp, synthetic construct
  misc_feature 1..27: note = Probe
  source 1..27: mol_type = other DNA
gtttatgtagcttacctcctcaaagca

SEQ ID NO: 23071 - DNA, 31 bp, synthetic construct; identical to SEQ ID NO: 7244
  misc_feature 1..31: note = Probe
  source 1..31: mol_type = other DNA

SEQ ID NO: 23072 - DNA, 38 bp, synthetic construct; identical to SEQ ID NO: 7246
  misc_feature 1..38: note = Probe
  source 1..38: mol_type = other DNA

SEQ ID NO: 23073 - DNA, 39 bp, synthetic construct; identical to SEQ ID NO: 7247
  misc_feature 1..39: note = Probe
  source 1..39: mol_type = other DNA

SEQ ID NO: 23074 - DNA, 40 bp, synthetic construct
  misc_feature 1..40: note = Probe
  source 1..40: mol_type = other DNA
gtttatgtagcttacctcctcaaagcaatacactgaaaat

SEQ ID NO: 23075 - DNA, 42 bp, synthetic construct
  misc_feature 1..42: note = Probe
  source 1..42: mol_type = other DNA
gtttatgtagcttacctcctcaaagcaatacactgaaaatgt

SEQ ID NO: 23076 - DNA, 43 bp, synthetic construct; identical to SEQ ID NO: 7249
  misc_feature 1..43: note = Probe
  source 1..43: mol_type = other DNA

SEQ ID NO: 23077 - DNA, 44 bp, synthetic construct; identical to SEQ ID NO: 7250
  misc_feature 1..44: note = Probe
  source 1..44: mol_type = other DNA

SEQ ID NO: 23078 - DNA, 50 bp, synthetic construct; identical to SEQ ID NO: 7251
  misc_feature 1..50: note = Probe
  source 1..50: mol_type = other DNA

SEQ ID NO: 23079 - DNA, 38 bp, synthetic construct
  misc_feature 1..38: note = Probe
  source 1..38: mol_type = other DNA
gtttccccgcacaggttcgaatcctgttcgtgacgggt

SEQ ID NO: 23080 - DNA, 28 bp, synthetic construct
  misc_feature 1..28: note = Probe
  source 1..28: mol_type = other DNA
gtttccgtagtggagtggttatcacgtt

SEQ ID NO: 23081 - DNA, 31 bp, synthetic construct
  misc_feature 1..31: note = Probe
  source 1..31: mol_type = other DNA
gtttccgtagtggagtggttatcacgttcgc

SEQ ID NO: 23082 - DNA, 32 bp, synthetic construct
  misc_feature 1..32: note = Probe
  source 1..32: mol_type = other DNA
gtttccgtagtggagtggttatcacgttcgcc

SEQ ID NO: 23083 - DNA, 33 bp, synthetic construct; identical to SEQ ID NO: 7252
  misc_feature 1..33: note = Probe
  source 1..33: mol_type = other DNA

SEQ ID NO: 23084 - DNA, 34 bp, synthetic construct
  misc_feature 1..34: note = Probe
  source 1..34: mol_type = other DNA
gtttccgtagtggagtggttatcacgttcgcctc

SEQ ID NO: 23085 - DNA, 35 bp, synthetic construct
  misc_feature 1..35: note = Probe
  source 1..35: mol_type = other DNA
gtttccgtagtggagtggttatcacgttcgcctca

SEQ ID NO: 23086 - DNA, 50 bp, synthetic construct
  misc_feature 1..50: note = Probe
  source 1..50: mol_type = other DNA
gtttccgtagtggagtggttatcacgttcgcctcacacgcgaaaggtccc

SEQ ID NO: 23087 - DNA, 17 bp, synthetic construct
  misc_feature 1..17: note = Probe
  source 1..17: mol_type = other DNA
gtttccgtagtgtagcg

SEQ ID NO: 23088 - DNA, 22 bp, synthetic construct
  misc_feature 1..22: note = Probe
  source 1..22: mol_type = other DNA
gtttccgtagtgtagcggttat

SEQ ID NO: 23089 - DNA, 23 bp, synthetic construct
  misc_feature 1..23: note = Probe
  source 1..23: mol_type = other DNA
gtttccgtagtgtagcggttatc

SEQ ID NO: 23090 - DNA, 27 bp, synthetic construct
  misc_feature 1..27: note = Probe
  source 1..27: mol_type = other DNA
gtttccgtagtgtagcggttatcacat

SEQ ID NO: 23091 - DNA, 37 bp, synthetic construct; identical to SEQ ID NO: 7254
  misc_feature 1..37: note = Probe
  source 1..37: mol_type = other DNA

SEQ ID NO: 23092 - DNA, 38 bp, synthetic construct
  misc_feature 1..38: note = Probe
  source 1..38: mol_type = other DNA
gtttccgtagtgtagcggttatcacattcgcctcacac

SEQ ID NO: 23093 - DNA, 40 bp, synthetic construct
  misc_feature 1..40: note = Probe
  source 1..40: mol_type = other DNA
gtttccgtagtgtagcggttatcacattcgcctcacacgc

SEQ ID NO: 23094 - DNA, 42 bp, synthetic construct
  misc_feature 1..42: note = Probe
  source 1..42: mol_type = other DNA
gtttccgtagtgtagcggttatcacattcgcctcacacgcga

SEQ ID NO: 23095 - DNA, 16 bp, synthetic construct
  misc_feature 1..16: note = Probe
  source 1..16: mol_type = other DNA
gtttccgtagtgtagt

SEQ ID NO: 23096 - DNA, 17 bp, synthetic construct
  misc_feature 1..17: note = Probe
  source 1..17: mol_type = other DNA
gtttccgtagtgtagtg

SEQ ID NO: 23097 - DNA, 18 bp, synthetic construct
  misc_feature 1..18: note = Probe
  source 1..18: mol_type = other DNA
gtttccgtagtgtagtgg

SEQ ID NO: 23098 - DNA, 19 bp, synthetic construct
  misc_feature 1..19: note = Probe
  source 1..19: mol_type = other DNA
gtttccgtagtgtagtggt

SEQ ID NO: 23099 - DNA, 20 bp, synthetic construct
  misc_feature 1..20: note = Probe
  source 1..20: mol_type = other DNA
gtttccgtagtgtagtggtc

SEQ ID NO: 23100 - DNA, 22 bp, synthetic construct
  misc_feature 1..22: note = Probe
  source 1..22: mol_type = other DNA
gtttccgtagtgtagtggtcat

SEQ ID NO: 23101 - DNA, 23 bp, synthetic construct
  misc_feature 1..23: note = Probe
  source 1..23: mol_type = other DNA
gtttccgtagtgtagtggtcatc

SEQ ID NO: 23102 - DNA, 24 bp, synthetic construct
  misc_feature 1..24: note = Probe
  source 1..24: mol_type = other DNA
gtttccgtagtgtagtggtcatca

SEQ ID NO: 23103 - DNA, 27 bp, synthetic construct
  misc_feature 1..27: note = Probe
  source 1..27: mol_type = other DNA
gtttccgtagtgtagtggtcatcacgt

SEQ ID NO: 23104 - DNA, 35 bp, synthetic construct; identical to SEQ ID NO: 7260
  misc_feature 1..35: note = Probe
  source 1..35: mol_type = other DNA

SEQ ID NO: 23105 - DNA, 36 bp, synthetic construct; identical to SEQ ID NO: 7261
  misc_feature 1..36: note = Probe
  source 1..36: mol_type = other DNA

SEQ ID NO: 23106 - DNA, 37 bp, synthetic construct; identical to SEQ ID NO: 7262
  misc_feature 1..37: note = Probe
  source 1..37: mol_type = other DNA

SEQ ID NO: 23107 - DNA, 38 bp, synthetic construct
  misc_feature 1..38: note = Probe
  source 1..38: mol_type = other DNA
gtttccgtagtgtagtggtcatcacgttcgcctaacac

SEQ ID NO: 23108 - DNA, 39 bp, synthetic construct
  misc_feature 1..39: note = Probe
  source 1..39: mol_type = other DNA
gtttccgtagtgtagtggtcatcacgttcgcctaacacg

SEQ ID NO: 23109 - DNA, 50 bp, synthetic construct; identical to SEQ ID NO: 7263
  misc_feature 1..50: note = Probe
  source 1..50: mol_type = other DNA

SEQ ID NO: 23110 - DNA, 20 bp, synthetic construct
  misc_feature 1..20: note = Probe
  source 1..20: mol_type = other DNA
gtttccgtagtgtagtggtt

SEQ ID NO: 23111 - DNA, 22 bp, synthetic construct
  misc_feature 1..22: note = Probe
  source 1..22: mol_type = other DNA
gtttccgtagtgtagtggttat

SEQ ID NO: 23112 - DNA, 23 bp, synthetic construct
  misc_feature 1..23: note = Probe
  source 1..23: mol_type = other DNA
gtttccgtagtgtagtggttatc

SEQ ID NO: 23113 - DNA, 24 bp, synthetic construct
  misc_feature 1..24: note = Probe
  source 1..24: mol_type = other DNA
gtttccgtagtgtagtggttatca

SEQ ID NO: 23114 - DNA, 25 bp, synthetic construct
  misc_feature 1..25: note = Probe
  source 1..25: mol_type = other DNA
gtttccgtagtgtagtggttatcac

SEQ ID NO: 23115 - DNA, 26 bp, synthetic construct
  misc_feature 1..26: note = Probe
  source 1..26: mol_type = other DNA
gtttccgtagtgtagtggttatcacg

SEQ ID NO: 23116 - DNA, 27 bp, synthetic construct
  misc_feature 1..27: note = Probe
  source 1..27: mol_type = other DNA
gtttccgtagtgtagtggttatcacgt

SEQ ID NO: 23117 - DNA, 28 bp, synthetic construct
  misc_feature 1..28: note = Probe
  source 1..28: mol_type = other DNA
gtttccgtagtgtagtggttatcacgtt

SEQ ID NO: 23118 - DNA, 29 bp, synthetic construct
  misc_feature 1..29: note = Probe
  source 1..29: mol_type = other DNA
gtttccgtagtgtagtggttatcacgttc

SEQ ID NO: 23119 - DNA, 30 bp, synthetic construct; identical to SEQ ID NO: 7273
  misc_feature 1..30: note = Probe
  source 1..30: mol_type = other DNA

SEQ ID NO: 23120 - DNA, 31 bp, synthetic construct; identical to SEQ ID NO: 7274
  misc_feature 1..31: note = Probe
  source 1..31: mol_type = other DNA

SEQ ID NO: 23121 - DNA, 32 bp, synthetic construct; identical to SEQ ID NO: 7275
  misc_feature 1..32: note = Probe
  source 1..32: mol_type = other DNA

SEQ ID NO: 23122 - DNA, 33 bp, synthetic construct; identical to SEQ ID NO: 7276
  misc_feature 1..33: note = Probe
  source 1..33: mol_type = other DNA

SEQ ID NO: 23123 - DNA, 35 bp, synthetic construct
  misc_feature 1..35: note = Probe
  source 1..35: mol_type = other DNA
gtttccgtagtgtagtggttatcacgttcgcctaa

SEQ ID NO: 23124 - DNA, 36 bp, synthetic construct
  misc_feature 1..36: note = Probe
  source 1..36: mol_type = other DNA
gtttccgtagtgtagtggttatcacgttcgcctaac

SEQ ID NO: 23125 - DNA, 40 bp, synthetic construct
  misc_feature 1..40: note = Probe
  source 1..40: mol_type = other DNA
gtttccgtagtgtagtggttatcacgttcgcctaacacgc

SEQ ID NO: 23126 - DNA, 41 bp, synthetic construct
  misc_feature 1..41: note = Probe
  source 1..41: mol_type = other DNA
gtttccgtagtgtagtggttatcacgttcgcctaacacgcg

SEQ ID NO: 23127 - DNA, 49 bp, synthetic construct
  misc_feature 1..49: note = Probe
  source 1..49: mol_type = other DNA
gtttccgtagtgtagtggttatcacgttcgcctaacacgcgaaaggtcc

SEQ ID NO: 23128 - DNA, 50 bp, synthetic construct; identical to SEQ ID NO: 7277
  misc_feature 1..50: note = Probe
  source 1..50: mol_type = other DNA

SEQ ID NO: 23129 - DNA, 34 bp, synthetic construct; identical to SEQ ID NO: 7278
  misc_feature 1..34: note = Probe
  source 1..34: mol_type = other DNA

SEQ ID NO: 23130 - DNA, 35 bp, synthetic construct; identical to SEQ ID NO: 7279
  misc_feature 1..35: note = Probe
  source 1..35: mol_type = other DNA

SEQ ID NO: 23131 - DNA, 36 bp, synthetic construct; identical to SEQ ID NO: 7280
  misc_feature 1..36: note = Probe
  source 1..36: mol_type = other DNA

SEQ ID NO: 23132 - DNA, 37 bp, synthetic construct; identical to SEQ ID NO: 7281
  misc_feature 1..37: note = Probe
  source 1..37: mol_type = other DNA

SEQ ID NO: 23133 - DNA, 38 bp, synthetic construct; identical to SEQ ID NO: 1563
  misc_feature 1..38: note = Probe
  source 1..38: mol_type = other DNA

SEQ ID NO: 23134 - DNA, 41 bp, synthetic construct
  misc_feature 1..41: note = Probe
  source 1..41: mol_type = other DNA
gtttccgtagtgtagtggttatcacgttcgcctcacacgcg

SEQ ID NO: 23135 - DNA, 42 bp, synthetic construct
  misc_feature 1..42: note = Probe
  source 1..42: mol_type = other DNA
gtttccgtagtgtagtggttatcacgttcgcctcacacgcga

SEQ ID NO: 23136 - DNA, 46 bp, synthetic construct
  misc_feature 1..46: note = Probe
  source 1..46: mol_type = other DNA
gtttccgtagtgtagtggttatcacgttcgcctcacacgcgaaagg

SEQ ID NO: 23137 - DNA, 31 bp, synthetic construct
  misc_feature 1..31: note = Probe
  source 1..31: mol_type = other DNA
gtttccgtagtgtagtggttatcacgtttgc

SEQ ID NO: 23138 - DNA, 32 bp, synthetic construct
  misc_feature 1..32: note = Probe
  source 1..32: mol_type = other DNA
gtttccgtagtgtagtggttatcacgtttgcc

SEQ ID NO: 23139 - DNA, 33 bp, synthetic construct
  misc_feature 1..33: note = Probe
  source 1..33: mol_type = other DNA
gtttccgtagtgtagtggttatcacgtttgcct

SEQ ID NO: 23140 - DNA, 34 bp, synthetic construct
  misc_feature 1..34: note = Probe
  source 1..34: mol_type = other DNA
gtttccgtagtgtagtggttatcacgtttgccta

SEQ ID NO: 23141 - DNA, 35 bp, synthetic construct
  misc_feature 1..35: note = Probe
  source 1..35: mol_type = other DNA
gtttccgtagtgtagtggttatcacgtttgcctaa

SEQ ID NO: 23142 - DNA, 28 bp, synthetic construct
  misc_feature 1..28: note = Probe
  source 1..28: mol_type = other DNA
gtttccgtagtgtagtggttattatgtt

SEQ ID NO: 23143 - DNA, 31 bp, synthetic construct
  misc_feature 1..31: note = Probe
  source 1..31: mol_type = other DNA
gtttccgtagtgtagtggttattatgttcgc

SEQ ID NO: 23144 - DNA, 32 bp, synthetic construct
  misc_feature 1..32: note = Probe
  source 1..32: mol_type = other DNA
gtttccgtagtgtagtggttattatgttcgcc

SEQ ID NO: 23145 - DNA, 33 bp, synthetic construct; identical to SEQ ID NO: 7282
  misc_feature 1..33: note = Probe
  source 1..33: mol_type = other DNA

SEQ ID NO: 23146 - DNA, 34 bp, synthetic construct
  misc_feature 1..34: note = Probe
  source 1..34: mol_type = other DNA
gtttccgtagtgtagtggttattatgttcgcctc

SEQ ID NO: 23147 - DNA, 28 bp, synthetic construct
  misc_feature 1..28: note = Probe
  source 1..28: mol_type = other DNA
gtttccgtggtgtagtggttatcacatt

SEQ ID NO: 23148 - DNA, 29 bp, synthetic construct
  misc_feature 1..29: note = Probe
  source 1..29: mol_type = other DNA
gtttccgtggtgtagtggttatcacattc

SEQ ID NO: 23149 - DNA, 30 bp, synthetic construct; identical to SEQ ID NO: 11583
  misc_feature 1..30: note = Probe
  source 1..30: mol_type = other DNA

SEQ ID NO: 23150 - DNA, 31 bp, synthetic construct
  misc_feature 1..31: note = Probe
  source 1..31: mol_type = other DNA
gtttccgtggtgtagtggttatcacattcgc

SEQ ID NO: 23151 - DNA, 32 bp, synthetic construct; identical to SEQ ID NO: 7284
  misc_feature 1..32: note = Probe
  source 1..32: mol_type = other DNA

SEQ ID NO: 23152 - DNA, 33 bp, synthetic construct; identical to SEQ ID NO: 7285
  misc_feature 1..33: note = Probe
  source 1..33: mol_type = other DNA

SEQ ID NO: 23153 - DNA, 34 bp, synthetic construct
  misc_feature 1..34: note = Probe
  source 1..34: mol_type = other DNA
gtttccgtggtgtagtggttatcacattcgcctt

SEQ ID NO: 23154 - DNA, 15 bp, synthetic construct
  misc_feature 1..15: note = Probe
  source 1..15: mol_type = other DNA
gtttgtgggtttaag

SEQ ID NO: 23155 - DNA, 16 bp, synthetic construct
  misc_feature 1..16: note = Probe
  source 1..16: mol_type = other DNA
gtttgtgggtttaagt

SEQ ID NO: 23156 - DNA, 17 bp, synthetic construct
  misc_feature 1..17: note = Probe
  source 1..17: mol_type = other DNA
gtttgtgggtttaagtc

SEQ ID NO: 23157 - DNA, 18 bp, synthetic construct
  misc_feature 1..18: note = Probe
  source 1..18: mol_type = other DNA
gtttgtgggtttaagtcc

SEQ ID NO: 23158 - DNA, 19 bp, synthetic construct
  misc_feature 1..19: note = Probe
  source 1..19: mol_type = other DNA
gtttgtgggtttaagtccc

SEQ ID NO: 23159 - DNA, 21 bp, synthetic construct
  misc_feature 1..21: note = Probe
  source 1..21: mol_type = other DNA
gtttgtgggtttaagtcccat

SEQ ID NO: 23160 - DNA, 22 bp, synthetic construct
  misc_feature 1..22: note = Probe
  source 1..22: mol_type = other DNA
gtttgtgggtttaagtcccatt

SEQ ID NO: 23161 - DNA, 23 bp, synthetic construct
  misc_feature 1..23: note = Probe
  source 1..23: mol_type = other DNA
gtttgtgggtttaagtcccattg

SEQ ID NO: 23162 - DNA, 24 bp, synthetic construct
  misc_feature 1..24: note = Probe
  source 1..24: mol_type = other DNA
gtttgtgggtttaagtcccattgg

SEQ ID NO: 23163 - DNA, 25 bp, synthetic construct
  misc_feature 1..25: note = Probe
  source 1..25: mol_type = other DNA
gtttgtgggtttaagtcccattggt

SEQ ID NO: 23164 - DNA, 26 bp, synthetic construct
  misc_feature 1..26: note = Probe
  source 1..26: mol_type = other DNA
gtttgtgggtttaagtcccattggtc

SEQ ID NO: 23165 - DNA, 29 bp, synthetic construct
  misc_feature 1..29: note = Probe
  source 1..29: mol_type = other DNA
gtttgtgggtttaagtcccattggtctag

SEQ ID NO: 23166 - DNA, 30 bp, synthetic construct; identical to SEQ ID NO: 7300
  misc_feature 1..30: note = Probe
  source 1..30: mol_type = other DNA

SEQ ID NO: 23167 - DNA, 31 bp, synthetic construct; identical to SEQ ID NO: 7301
  misc_feature 1..31: note = Probe
  source 1..31: mol_type = other DNA

SEQ ID NO: 23168 - DNA, 32 bp, synthetic construct; identical to SEQ ID NO: 7302
  misc_feature 1..32: note = Probe
  source 1..32: mol_type = other DNA

SEQ ID NO: 23169 - DNA, 33 bp, synthetic construct; identical to SEQ ID NO: 7303
  misc_feature 1..33: note = Probe
  source 1..33: mol_type = other DNA

SEQ ID NO: 23170 - DNA, 34 bp, synthetic construct; identical to SEQ ID NO: 7304
  misc_feature 1..34: note = Probe
  source 1..34: mol_type = other DNA

SEQ ID NO: 23171 - DNA, 35 bp, synthetic construct; identical to SEQ ID NO: 7305
  misc_feature 1..35: note = Probe
  source 1..35: mol_type = other DNA

SEQ ID NO: 23172 - DNA, 36 bp, synthetic construct
  misc_feature 1..36: note = Probe
  source 1..36: mol_type = other DNA
gtttgtgggtttaagtcccattggtctagtaagggc

SEQ ID NO: 23173 - DNA, 31 bp, synthetic construct
  misc_feature 1..31: note = Probe
  source 1..31: mol_type = other DNA
gtttttcatatcattggtcgtggttgtagtc

SEQ ID NO: 23174 - DNA, 46 bp, synthetic construct; identical to SEQ ID NO: 7307
  misc_feature 1..46: note = Probe
  source 1..46: mol_type = other DNA

SEQ ID NO: 23175 - DNA, 38 bp, synthetic construct; identical to SEQ ID NO: 7312
  misc_feature 1..38: note = Probe
  source 1..38: mol_type = other DNA

SEQ ID NO: 23176 - DNA, 39 bp, synthetic construct; identical to SEQ ID NO: 7313
  misc_feature 1..39: note = Probe
  source 1..39: mol_type = other DNA

SEQ ID NO: 23177 - DNA, 40 bp, synthetic construct
  misc_feature 1..40: note = Probe
  source 1..40: mol_type = other DNA
taaaactttacagtcagaggttcaattcctcttcttaaca

SEQ ID NO: 23178 - DNA, 42 bp, synthetic construct; identical to SEQ ID NO: 7314
  misc_feature 1..42: note = Probe
  source 1..42: mol_type = other DNA

SEQ ID NO: 23179 - DNA, 43 bp, synthetic construct; identical to SEQ ID NO: 7315
  misc_feature 1..43: note = Probe
  source 1..43: mol_type = other DNA

SEQ ID NO: 23180 - DNA, 25 bp, synthetic construct
  misc_feature 1..25: note = Probe
  source 1..25: mol_type = other DNA
taaacaaaacgaatgatttcgactc

SEQ ID NO: 23181 - DNA, 31 bp, synthetic construct
  misc_feature 1..31: note = Probe
  source 1..31: mol_type = other DNA
taaacaaaacgaatgatttcgactcattaaa

SEQ ID NO: 23182 - DNA, 32 bp, synthetic construct
  misc_feature 1..32: note = Probe
  source 1..32: mol_type = other DNA
taaacaaaacgaatgatttcgactcattaaat

SEQ ID NO: 23183 - DNA, 33 bp, synthetic construct
  misc_feature 1..33: note = Probe
  source 1..33: mol_type = other DNA
taaacaaaacgaatgatttcgactcattaaatt

SEQ ID NO: 23184 - DNA, 34 bp, synthetic construct
  misc_feature 1..34: note = Probe
  source 1..34: mol_type = other DNA
taaacaaaacgaatgatttcgactcattaaatta

SEQ ID NO: 23185 - DNA, 36 bp, synthetic construct
  misc_feature 1..36: note = Probe
  source 1..36: mol_type = other DNA
taaacaaaacgaatgatttcgactcattaaattatg

SEQ ID NO: 23186 - DNA, 37 bp, synthetic construct; identical to SEQ ID NO: 7317
  misc_feature 1..37: note = Probe
  source 1..37: mol_type = other DNA

SEQ ID NO: 23187 - DNA, 39 bp, synthetic construct; identical to SEQ ID NO: 7318
  misc_feature 1..39: note = Probe
  source 1..39: mol_type = other DNA

SEQ ID NO: 23188 - DNA, 50 bp, synthetic construct; identical to SEQ ID NO: 7321
  misc_feature 1..50: note = Probe
  source 1..50: mol_type = other DNA

SEQ ID NO: 23189 - DNA, 41 bp, synthetic construct; identical to SEQ ID NO: 7322
  misc_feature 1..41: note = Probe
  source 1..41: mol_type = other DNA

SEQ ID NO: 23190 - DNA, 41 bp, synthetic construct; identical to SEQ ID NO: 7323
  misc_feature 1..41: note = Probe
  source 1..41: mol_type = other DNA

SEQ ID NO: 23191 - DNA, 20 bp, synthetic construct
  misc_feature 1..20: note = Probe
  source 1..20: mol_type = other DNA
taaacccccttatttctagg

SEQ ID NO: 23192 - DNA, 21 bp, synthetic construct
  misc_feature 1..21: note = Probe
  source 1..21: mol_type = other DNA
taaacccccttatttctagga

SEQ ID NO: 23193 - DNA, 36 bp, synthetic construct; identical to SEQ ID NO: 7329
  misc_feature 1..36: note = Probe
  source 1..36: mol_type = other DNA

SEQ ID NO: 23194 - DNA, 28 bp, synthetic construct
  misc_feature 1..28: note = Probe
  source 1..28: mol_type = other DNA
taaacctagccccaaacccactccacct

SEQ ID NO: 23195 - DNA, 29 bp, synthetic construct
  misc_feature 1..29: note = Probe
  source 1..29: mol_type = other DNA
taaacttcgccttaattttaataatcaac

SEQ ID NO: 23196 - DNA, 29 bp, synthetic construct
  misc_feature 1..29: note = Probe
  source 1..29: mol_type = other DNA
taaagacaggggttaggcctctttttacc

SEQ ID NO: 23197 - DNA, 32 bp, synthetic construct
  misc_feature 1..32: note = Probe
  source 1..32: mol_type = other DNA
taaagacaggggttaggcctctttttaccagc

SEQ ID NO: 23198 - DNA, 33 bp, synthetic construct
  misc_feature 1..33: note = Probe
  source 1..33: mol_type = other DNA
taaagacaggggttaggcctctttttaccagct

SEQ ID NO: 23199 - DNA, 33 bp, synthetic construct
  misc_feature 1..33: note = Probe
  source 1..33: mol_type = other DNA
taaagattaagagaaccaacacctctttacagt

SEQ ID NO: 23200 - DNA, 34 bp, synthetic construct
  misc_feature 1..34: note = Probe
  source 1..34: mol_type = other DNA
taaagattaagagaaccaacacctctttacagtg

SEQ ID NO: 23201 - DNA, 35 bp, synthetic construct
  misc_feature 1..35: note = Probe
  source 1..35: mol_type = other DNA
taaagattaagagaaccaacacctctttacagtga

SEQ ID NO: 23202 - DNA, 36 bp, synthetic construct
  misc_feature 1..36: note = Probe
  source 1..36: mol_type = other DNA
taaagattaagagaaccaacacctctttacagtgaa

SEQ ID NO: 23203 - DNA, 37 bp, synthetic construct; identical to SEQ ID NO: 7331
  misc_feature 1..37: note = Probe
  source 1..37: mol_type = other DNA

SEQ ID NO: 23204 - DNA, 38 bp, synthetic construct; identical to SEQ ID NO: 7332
  misc_feature 1..38: note = Probe
  source 1..38: mol_type = other DNA

SEQ ID NO: 23205 - DNA, 36 bp, synthetic construct
  misc_feature 1..36: note = Probe
  source 1..36: mol_type = other DNA
taaaggtccctggttcgatcccgggtttcggcactt

SEQ ID NO: 23206 - DNA, 35 bp, synthetic construct
  misc_feature 1..35: note = Probe
  source 1..35: mol_type = other DNA
taaagtaaggtcagctaaataagctatcgggccca

SEQ ID NO: 23207 - DNA, 38 bp, synthetic construct
  misc_feature 1..38: note = Probe
  source 1..38: mol_type = other DNA
taaagtaaggtcagctaaataagctatcgggcccatac

SEQ ID NO: 23208 - DNA, 31 bp, synthetic construct; identical to SEQ ID NO: 7336
  misc_feature 1..31: note = Probe
  source 1..31: mol_type = other DNA

SEQ ID NO: 23209 - DNA, 42 bp, synthetic construct
  misc_feature 1..42: note = Probe
  source 1..42: mol_type = other DNA
taaatacagaccaagagccttcaaagccctcagtaagttgca

SEQ ID NO: 23210 - DNA, 39 bp, synthetic construct; identical to SEQ ID NO: 7343
  misc_feature 1..39: note = Probe
  source 1..39: mol_type = other DNA

SEQ ID NO: 23211 - DNA, 21 bp, synthetic construct
  misc_feature 1..21: note = Probe
  source 1..21: mol_type = other DNA
taacaacatggctttctcaac

SEQ ID NO: 23212 - DNA, 22 bp, synthetic construct
  misc_feature 1..22: note = Probe
  source 1..22: mol_type = other DNA
taacaacatggctttctcaact

SEQ ID NO: 23213 - DNA, 16 bp, synthetic construct
  misc_feature 1..16: note = Probe
  source 1..16: mol_type = other DNA
taacacaaagcaccca

SEQ ID NO: 23214 - DNA, 17 bp, synthetic construct
  misc_feature 1..17: note = Probe
  source 1..17: mol_type = other DNA
taacacaaagcacccaa

SEQ ID NO: 23215 - DNA, 18 bp, synthetic construct
  misc_feature 1..18: note = Probe
  source 1..18: mol_type = other DNA
taacacaaagcacccaac

SEQ ID NO: 23216 - DNA, 19 bp, synthetic construct
  misc_feature 1..19: note = Probe
  source 1..19: mol_type = other DNA
taacacaaagcacccaact

SEQ ID NO: 23217 - DNA, 20 bp, synthetic construct
  misc_feature 1..20: note = Probe
  source 1..20: mol_type = other DNA
taacacaaagcacccaactt

SEQ ID NO: 23218 - DNA, 21 bp, synthetic construct
  misc_feature 1..21: note = Probe
  source 1..21: mol_type = other DNA
taacacaaagcacccaactta

SEQ ID NO: 23219 - DNA, 23 bp, synthetic construct
  misc_feature 1..23: note = Probe
  source 1..23: mol_type = other DNA
taacacaaagcacccaacttaca

SEQ ID NO: 23220 - DNA, 25 bp, synthetic construct
  misc_feature 1..25: note = Probe
  source 1..25: mol_type = other DNA
taacacaaagcacccaacttacact

SEQ ID NO: 23221 - DNA, 26 bp, synthetic construct
  misc_feature 1..26: note = Probe
  source 1..26: mol_type = other DNA
taacacaaagcacccaacttacactt

SEQ ID NO: 23222 - DNA, 27 bp, synthetic construct
  misc_feature 1..27: note = Probe
  source 1..27: mol_type = other DNA
taacacaaagcacccaacttacactta

SEQ ID NO: 23223 - DNA, 30 bp, synthetic construct; identical to SEQ ID NO: 7355
  misc_feature 1..30: note = Probe
  source 1..30: mol_type = other DNA

SEQ ID NO: 23224 - DNA, 31 bp, synthetic construct
  misc_feature 1..31: note = Probe
  source 1..31: mol_type = other DNA
taacacaaagcacccaacttacacttaggag

SEQ ID NO: 23225 - DNA, 32 bp, synthetic construct; identical to SEQ ID NO: 7356
  misc_feature 1..32: note = Probe
  source 1..32: mol_type = other DNA

SEQ ID NO: 23226 - DNA, 33 bp, synthetic construct
  misc_feature 1..33: note = Probe
  source 1..33: mol_type = other DNA
taacacaaagcacccaacttacacttaggagat

SEQ ID NO: 23227 - DNA, 37 bp, synthetic construct; identical to SEQ ID NO: 7357
  misc_feature 1..37: note = Probe
  source 1..37: mol_type = other DNA

SEQ ID NO: 23228 - DNA, 42 bp, synthetic construct
  misc_feature 1..42: note = Probe
  source 1..42: mol_type = other DNA
taacacaaagcacccaacttacacttaggagatttcaactta

SEQ ID NO: 23229 - DNA, 50 bp, synthetic construct; identical to SEQ ID NO: 1568
  misc_feature 1..50: note = Probe
  source 1..50: mol_type = other DNA

SEQ ID NO: 23230 - DNA, 18 bp, synthetic construct
  misc_feature 1..18: note = Probe
  source 1..18: mol_type = other DNA
taacacgcgaaaggtccc

SEQ ID NO: 23231 - DNA, 19 bp, synthetic construct
  misc_feature 1..19: note = Probe
  source 1..19: mol_type = other DNA
taacacgcgaaaggtcccc

SEQ ID NO: 23232 - DNA, 21 bp, synthetic construct
  misc_feature 1..21: note = Probe
  source 1..21: mol_type = other DNA
taacacgcgaaaggtccccgg

SEQ ID NO: 23233 - DNA, 22 bp, synthetic construct
  misc_feature 1..22: note = Probe
  source 1..22: mol_type = other DNA
taacacgcgaaaggtccccggt

SEQ ID NO: 23234 - DNA, 23 bp, synthetic construct
  misc_feature 1..23: note = Probe
  source 1..23: mol_type = other DNA
taacacgcgaaaggtccccggtt

SEQ ID NO: 23235 - DNA, 23 bp, synthetic construct
  misc_feature 1..23: note = Probe
  source 1..23: mol_type = other DNA
taacagctaaggactgcaaaacc

SEQ ID NO: 23236 - DNA, 24 bp, synthetic construct
  misc_feature 1..24: note = Probe
  source 1..24: mol_type = other DNA
taacagctaaggactgcaaaaccc

SEQ ID NO: 23237 - DNA, 25 bp, synthetic construct
  misc_feature 1..25: note = Probe
  source 1..25: mol_type = other DNA
taacagctaaggactgcaaaacccc

SEQ ID NO: 23238 - DNA, 26 bp, synthetic construct
  misc_feature 1..26: note = Probe
  source 1..26: mol_type = other DNA
taacagctaaggactgcaaaacccca

SEQ ID NO: 23239 - DNA, 27 bp, synthetic construct
  misc_feature 1..27: note = Probe
  source 1..27: mol_type = other DNA
taacagctaaggactgcaaaaccccac

SEQ ID NO: 23240 - DNA, 28 bp, synthetic construct
  misc_feature 1..28: note = Probe
  source 1..28: mol_type = other DNA
taacagctaaggactgcaaaaccccact

SEQ ID NO: 23241 - DNA, 29 bp, synthetic construct
  misc_feature 1..29: note = Probe
  source 1..29: mol_type = other DNA
taacagctaaggactgcaaaaccccactc

SEQ ID NO: 23242 - DNA, 30 bp, synthetic construct; identical to SEQ ID NO: 11605
  misc_feature 1..30: note = Probe
  source 1..30: mol_type = other DNA

SEQ ID NO: 23243 - DNA, 18 bp, synthetic construct
  misc_feature 1..18: note = Probe
  source 1..18: mol_type = other DNA
taacagctatccattggt

SEQ ID NO: 23244 - DNA, 27 bp, synthetic construct
  misc_feature 1..27: note = Probe
  source 1..27: mol_type = other DNA
taaccaaaacatcagattgtgaatctg

SEQ ID NO: 23245 - DNA, 30 bp, synthetic construct; identical to SEQ ID NO: 7365
  misc_feature 1..30: note = Probe
  source 1..30: mol_type = other DNA

SEQ ID NO: 23246 - DNA, 31 bp, synthetic construct; identical to SEQ ID NO: 7366
  misc_feature 1..31: note = Probe
  source 1..31: mol_type = other DNA

SEQ ID NO: 23247 - DNA, 32 bp, synthetic construct; identical to SEQ ID NO: 7367
  misc_feature 1..32: note = Probe
  source 1..32: mol_type = other DNA

SEQ ID NO: 23248 - DNA, 33 bp, synthetic construct; identical to SEQ ID NO: 7368
  misc_feature 1..33: note = Probe
  source 1..33: mol_type = other DNA

SEQ ID NO: 23249 - DNA, 34 bp, synthetic construct
  misc_feature 1..34: note = Probe
  source 1..34: mol_type = other DNA
taaccaaaacatcagattgtgaatctgacaacag

SEQ ID NO: 23250 - DNA, 35 bp, synthetic construct
  misc_feature 1..35: note = Probe
  source 1..35: mol_type = other DNA
taaccaaaacatcagattgtgaatctgacaacaga

SEQ ID NO: 23251 - DNA, 36 bp, synthetic construct
  misc_feature 1..36: note = Probe
  source 1..36: mol_type = other DNA
taaccaaaacatcagattgtgaatctgacaacagag

SEQ ID NO: 23252 - DNA, 38 bp, synthetic construct; identical to SEQ ID NO: 7370
  misc_feature 1..38: note = Probe
  source 1..38: mol_type = other DNA

SEQ ID NO: 23253 - DNA, 39 bp, synthetic construct; identical to SEQ ID NO: 7371
  misc_feature 1..39: note = Probe
  source 1..39: mol_type = other DNA

SEQ ID NO: 23254 - DNA, 41 bp, synthetic construct
  misc_feature 1..41: note = Probe
  source 1..41: mol_type = other DNA
taaccaaaacatcagattgtgaatctgacaacagaggctta

SEQ ID NO: 23255 - DNA, 50 bp, synthetic construct; identical to SEQ ID NO: 1569
  misc_feature 1..50: note = Probe
  source 1..50: mol_type = other DNA

SEQ ID NO: 23256 - DNA, 41 bp, synthetic construct; identical to SEQ ID NO: 7376
  misc_feature 1..41: note = Probe
  source 1..41: mol_type = other DNA

SEQ ID NO: 23257 - DNA, 41 bp, synthetic construct; identical to SEQ ID NO: 7378
  misc_feature 1..41: note = Probe
  source 1..41: mol_type = other DNA

SEQ ID NO: 23258 - DNA, 30 bp, synthetic construct
  misc_feature 1..30: note = Probe
  source 1..30: mol_type = other DNA
taaccttttaagttaaagattaagagaacc

SEQ ID NO: 23259 - DNA, 50 bp, synthetic construct; identical to SEQ ID NO: 7379
  misc_feature 1..50: note = Probe
  source 1..50: mol_type = other DNA

SEQ ID NO: 23260 - DNA, 41 bp, synthetic construct
  misc_feature 1..41: note = Probe
  source 1..41: mol_type = other DNA
taacgccaaggtcgcgggttcgatccccgtacgggccactg

SEQ ID NO: 23261 - DNA, 36 bp, synthetic construct
  misc_feature 1..36: note = Probe
  source 1..36: mol_type = other DNA
taactaagtgtttgtgggtttaagtcccattggtct

SEQ ID NO: 23262 - DNA, 41 bp, synthetic construct; identical to SEQ ID NO: 7382
  misc_feature 1..41: note = Probe
  source 1..41: mol_type = other DNA

SEQ ID NO: 23263 - DNA, 30 bp, synthetic construct
  misc_feature 1..30: note = Probe
  source 1..30: mol_type = other DNA
taactagttttgacaacattcaaaaaagag

SEQ ID NO: 23264 - DNA, 32 bp, synthetic construct
  misc_feature 1..32: note = Probe
  source 1..32: mol_type = other DNA
taactagttttgacaacattcaaaaaagagta

SEQ ID NO: 23265 - DNA, 33 bp, synthetic construct
  misc_feature 1..33: note = Probe
  source 1..33: mol_type = other DNA
taactagttttgacaacattcaaaaaagagtaa

SEQ ID NO: 23266 - DNA, 24 bp, synthetic construct
  misc_feature 1..24: note = Probe
  source 1..24: mol_type = other DNA
taactcatgcccccatgtctaaca

SEQ ID NO: 23267 - DNA, 32 bp, synthetic construct; identical to SEQ ID NO: 7387
  misc_feature 1..32: note = Probe
  source 1..32: mol_type = other DNA

SEQ ID NO: 23268 - DNA, 33 bp, synthetic construct; identical to SEQ ID NO: 7388
  misc_feature 1..33: note = Probe
  source 1..33: mol_type = other DNA

SEQ ID NO: 23269 - DNA, 34 bp, synthetic construct; identical to SEQ ID NO: 7389
  misc_feature 1..34: note = Probe
  source 1..34: mol_type = other DNA

SEQ ID NO: 23270 - DNA, 35 bp, synthetic construct; identical to SEQ ID NO: 7390
  misc_feature 1..35: note = Probe
  source 1..35: mol_type = other DNA

SEQ ID NO: 23271 - DNA, 36 bp, synthetic construct; identical to SEQ ID NO: 7391
  misc_feature 1..36: note = Probe
  source 1..36: mol_type = other DNA

SEQ ID NO: 23272 - DNA, 37 bp, synthetic construct; identical to SEQ ID NO: 7392
  misc_feature 1..37: note = Probe
  source 1..37: mol_type = other DNA

SEQ ID NO: 23273 - DNA, 38 bp, synthetic construct; identical to SEQ ID NO: 7393
  misc_feature 1..38: note = Probe
  source 1..38: mol_type = other DNA

SEQ ID NO: 23274 - DNA, 39 bp, synthetic construct; identical to SEQ ID NO: 7394
  misc_feature 1..39: note = Probe
  source 1..39: mol_type = other DNA

SEQ ID NO: 23275 - DNA, 40 bp, synthetic construct; identical to SEQ ID NO: 7395
  misc_feature 1..40: note = Probe
  source 1..40: mol_type = other DNA

SEQ ID NO: 23276 - DNA, 41 bp, synthetic construct; identical to SEQ ID NO: 7396
  misc_feature 1..41: note = Probe
  source 1..41: mol_type = other DNA

SEQ ID NO: 23277 - DNA, 42 bp, synthetic construct
  misc_feature 1..42: note = Probe
  source 1..42: mol_type = other DNA
taactcatgcccccatgtctaacaacatggctttctcaactt

SEQ ID NO: 23278 - DNA, 46 bp, synthetic construct; identical to SEQ ID NO: 7399
  misc_feature 1..46: note = Probe
  source 1..46: mol_type = other DNA

SEQ ID NO: 23279 - DNA, 19 bp, synthetic construct
  misc_feature 1..19: note = Probe
  source 1..19: mol_type = other DNA
taacttgaccgctctgagc

SEQ ID NO: 23280 - DNA, 20 bp, synthetic construct
  misc_feature 1..20: note = Probe
  source 1..20: mol_type = other DNA
taacttgaccgctctgagct

SEQ ID NO: 23281 - DNA, 15 bp, synthetic construct
  misc_feature 1..15: note = Probe
  source 1..15: mol_type = other DNA
taagaaactgcgcga

SEQ ID NO: 23282 - DNA, 30 bp, synthetic construct; identical to SEQ ID NO: 7405
  misc_feature 1..30: note = Probe
  source 1..30: mol_type = other DNA

SEQ ID NO: 23283 - DNA, 31 bp, synthetic construct; identical to SEQ ID NO: 7406
  misc_feature 1..31: note = Probe
  source 1..31: mol_type = other DNA

SEQ ID NO: 23284 - DNA, 41 bp, synthetic construct
  misc_feature 1..41: note = Probe
  source 1..41: mol_type = other DNA
taagccagggattgtgggttcgagtcccacccggggtaaag

SEQ ID NO: 23285 - DNA, 41 bp, synthetic construct; identical to SEQ ID NO: 7409
  misc_feature 1..41: note = Probe
  source 1..41: mol_type = other DNA

SEQ ID NO: 23286 - DNA, 40 bp, synthetic construct; identical to SEQ ID NO: 7410
  misc_feature 1..40: note = Probe
  source 1..40: mol_type = other DNA

SEQ ID NO: 23287 - DNA, 41 bp, synthetic construct; identical to SEQ ID NO: 7411
  misc_feature 1..41: note = Probe
  source 1..41: mol_type = other DNA

SEQ ID NO: 23288 - DNA, 16 bp, synthetic construct
  misc_feature 1..16: note = Probe
  source 1..16: mol_type = other DNA
taagctatcgggccca

SEQ ID NO: 23289 - DNA, 17 bp, synthetic construct
  misc_feature 1..17: note = Probe
  source 1..17: mol_type = other DNA
taagctatcgggcccat

SEQ ID NO: 23290 - DNA, 18 bp, synthetic construct
  misc_feature 1..18: note = Probe
  source 1..18: mol_type = other DNA
taagctatcgggcccata

SEQ ID NO: 23291 - DNA, 19 bp, synthetic construct
  misc_feature 1..19: note = Probe
  source 1..19: mol_type = other DNA
taagctatcgggcccatac

SEQ ID NO: 23292 - DNA, 20 bp, synthetic construct
  misc_feature 1..20: note = Probe
  source 1..20: mol_type = other DNA
taagctatcgggcccatacc

SEQ ID NO: 23293 - DNA, 22 bp, synthetic construct
  misc_feature 1..22: note = Probe
  source 1..22: mol_type = other DNA
taagctatcgggcccatacccc

SEQ ID NO: 23294 - DNA, 23 bp, synthetic construct
  misc_feature 1..23: note = Probe
  source 1..23: mol_type = other DNA
taagctatcgggcccataccccg

SEQ ID NO: 23295 - DNA, 24 bp, synthetic construct
  misc_feature 1..24: note = Probe
  source 1..24: mol_type = other DNA
taagctatcgggcccataccccga

SEQ ID NO: 23296 - DNA, 25 bp, synthetic construct
  misc_feature 1..25: note = Probe
  source 1..25: mol_type = other DNA
taagctatcgggcccataccccgaa

SEQ ID NO: 23297 - DNA, 26 bp, synthetic construct
  misc_feature 1..26: note = Probe
  source 1..26: mol_type = other DNA
taagctatcgggcccataccccgaaa

SEQ ID NO: 23298 - DNA, 27 bp, synthetic construct
  misc_feature 1..27: note = Probe
  source 1..27: mol_type = other DNA
taagctatcgggcccataccccgaaaa

SEQ ID NO: 23299 - DNA, 28 bp, synthetic construct
  misc_feature 1..28: note = Probe
  source 1..28: mol_type = other DNA
taagctatcgggcccataccccgaaaat

SEQ ID NO: 23300 - DNA, 29 bp, synthetic construct
  misc_feature 1..29: note = Probe
  source 1..29: mol_type = other DNA
taagctatcgggcccataccccgaaaatg

SEQ ID NO: 23301 - DNA, 30 bp, synthetic construct; identical to SEQ ID NO: 7423
  misc_feature 1..30: note = Probe
  source 1..30: mol_type = other DNA

SEQ ID NO: 23302 - DNA, 31 bp, synthetic construct; identical to SEQ ID NO: 7424
  misc_feature 1..31: note = Probe
  source 1..31: mol_type = other DNA

SEQ ID NO: 23303 - DNA, 32 bp, synthetic construct; identical to SEQ ID NO: 7425
  misc_feature 1..32: note = Probe
  source 1..32: mol_type = other DNA

SEQ ID NO: 23304 - DNA, 33 bp, synthetic construct; identical to SEQ ID NO: 7426
  misc_feature 1..33: note = Probe
  source 1..33: mol_type = other DNA

SEQ ID NO: 23305 - DNA, 34 bp, synthetic construct; identical to SEQ ID NO: 7427
  misc_feature 1..34: note = Probe
  source 1..34: mol_type = other DNA

SEQ ID NO: 23306 - DNA, 35 bp, synthetic construct; identical to SEQ ID NO: 7428
  misc_feature 1..35: note = Probe
  source 1..35: mol_type = other DNA

SEQ ID NO: 23307 - DNA, 36 bp, synthetic construct; identical to SEQ ID NO: 7429
  misc_feature 1..36: note = Probe
  source 1..36: mol_type = other DNA

SEQ ID NO: 23308 - DNA, 39 bp, synthetic construct
  misc_feature 1..39: note = Probe
  source 1..39: mol_type = other DNA
taagctatcgggcccataccccgaaaatgttggttatac

SEQ ID NO: 23309 - DNA, 40 bp, synthetic construct; identical to SEQ ID NO: 7430
  misc_feature 1..40: note = Probe
  source 1..40: mol_type = other DNA

SEQ ID NO: 23310 - DNA, 50 bp, synthetic construct; identical to SEQ ID NO: 1573
  misc_feature 1..50: note = Probe
  source 1..50: mol_type = other DNA

SEQ ID NO: 23311 - DNA, 26 bp, synthetic construct
  misc_feature 1..26: note = Probe
  source 1..26: mol_type = other DNA
taaggtcagctaaataagctatcggg

SEQ ID NO: 23312 - DNA, 27 bp, synthetic construct
  misc_feature 1..27: note = Probe
  source 1..27: mol_type = other DNA
taaggtcagctaaataagctatcgggc

SEQ ID NO: 23313 - DNA, 28 bp, synthetic construct
  misc_feature 1..28: note = Probe
  source 1..28: mol_type = other DNA
taaggtcagctaaataagctatcgggcc

SEQ ID NO: 23314 - DNA, 29 bp, synthetic construct
  misc_feature 1..29: note = Probe
  source 1..29: mol_type = other DNA
taaggtcagctaaataagctatcgggccc

SEQ ID NO: 23315 - DNA, 30 bp, synthetic construct; identical to SEQ ID NO: 7439
  misc_feature 1..30: note = Probe
  source 1..30: mol_type = other DNA

SEQ ID NO: 23316 - DNA, 31 bp, synthetic construct; identical to SEQ ID NO: 7440
  misc_feature 1..31: note = Probe
  source 1..31: mol_type = other DNA

SEQ ID NO: 23317 - DNA, 32 bp, synthetic construct; identical to SEQ ID NO: 7441
  misc_feature 1..32: note = Probe
  source 1..32: mol_type = other DNA

SEQ ID NO: 23318 - DNA, 33 bp, synthetic construct; identical to SEQ ID NO: 7442
  misc_feature 1..33: note = Probe
  source 1..33: mol_type = other DNA

SEQ ID NO: 23319 - DNA, 34 bp, synthetic construct; identical to SEQ ID NO: 7443
  misc_feature 1..34: note = Probe
  source 1..34: mol_type = other DNA

SEQ ID NO: 23320 - DNA, 36 bp, synthetic construct
  misc_feature 1..36: note = Probe
  source 1..36: mol_type = other DNA
taaggtcagctaaataagctatcgggcccatacccc

SEQ ID NO: 23321 - DNA, 44 bp, synthetic construct; identical to SEQ ID NO: 7450
  misc_feature 1..44: note = Probe
  source 1..44: mol_type = other DNA

SEQ ID NO: 23322 - DNA, 50 bp, synthetic construct; identical to SEQ ID NO: 7454
  misc_feature 1..50: note = Probe
  source 1..50: mol_type = other DNA

SEQ ID NO: 23323 - DNA, 29 bp, synthetic construct
  misc_feature 1..29: note = Probe
  source 1..29: mol_type = other DNA
taagtgtttgtgggtttaagtcccattgg

SEQ ID NO: 23324 - DNA, 30 bp, synthetic construct
  misc_feature 1..30: note = Probe
  source 1..30: mol_type = other DNA
taagtgtttgtgggtttaagtcccattggt

SEQ ID NO: 23325 - DNA, 31 bp, synthetic construct; identical to SEQ ID NO: 7456
  misc_feature 1..31: note = Probe
  source 1..31: mol_type = other DNA

SEQ ID NO: 23326 - DNA, 33 bp, synthetic construct; identical to SEQ ID NO: 7458
  misc_feature 1..33: note = Probe
  source 1..33: mol_type = other DNA

SEQ ID NO: 23327 - DNA, 35 bp, synthetic construct
  misc_feature 1..35: note = Probe
  source 1..35: mol_type = other DNA
taagtgtttgtgggtttaagtcccattggtctagt

SEQ ID NO: 23328 - DNA, 36 bp, synthetic construct
  misc_feature 1..36: note = Probe
  source 1..36: mol_type = other DNA
taagtgtttgtgggtttaagtcccattggtctagta

SEQ ID NO: 23329 - DNA, 43 bp, synthetic construct; identical to SEQ ID NO: 7460
  misc_feature 1..43: note = Probe
  source 1..43: mol_type = other DNA

SEQ ID NO: 23330 - DNA, 22 bp, synthetic construct
  misc_feature 1..22: note = Probe
  source 1..22: mol_type = other DNA
taataacgccaaggtcgcgggt

SEQ ID NO: 23331 - DNA, 23 bp, synthetic construct
  misc_feature 1..23: note = Probe
  source 1..23: mol_type = other DNA
taataacgccaaggtcgcgggtt

SEQ ID NO: 23332 - DNA, 19 bp, synthetic construct
  misc_feature 1..19: note = Probe
  source 1..19: mol_type = other DNA
taatcatatttaccaaatg

SEQ ID NO: 23333 - DNA, 41 bp, synthetic construct; identical to SEQ ID NO: 7465
  misc_feature 1..41: note = Probe
  source 1..41: mol_type = other DNA

SEQ ID NO: 23334 - DNA, 30 bp, synthetic construct
  misc_feature 1..30: note = Probe
  source 1..30: mol_type = other DNA
taatggtggagttaaagactttttctctga

SEQ ID NO: 23335 - DNA, 33 bp, synthetic construct; identical to SEQ ID NO: 7466
  misc_feature 1..33: note = Probe
  source 1..33: mol_type = other DNA

SEQ ID NO: 23336 - DNA, 15 bp, synthetic construct
  misc_feature 1..15: note = Probe
  source 1..15: mol_type = other DNA
taattgaaaacaaaa

SEQ ID NO: 23337 - DNA, 29 bp, synthetic construct
  misc_feature 1..29: note = Probe
  source 1..29: mol_type = other DNA
taattgaaaacaaaatactcaaatgggcc

SEQ ID NO: 23338 - DNA, 30 bp, synthetic construct; identical to SEQ ID NO: 7468
  misc_feature 1..30: note = Probe
  source 1..30: mol_type = other DNA

SEQ ID NO: 23339 - DNA, 31 bp, synthetic construct; identical to SEQ ID NO: 7469
  misc_feature 1..31: note = Probe
  source 1..31: mol_type = other DNA

SEQ ID NO: 23340 - DNA, 32 bp, synthetic construct; identical to SEQ ID NO: 7470
  misc_feature 1..32: note = Probe
  source 1..32: mol_type = other DNA

SEQ ID NO: 23341 - DNA, 33 bp, synthetic construct; identical to SEQ ID NO: 7471
  misc_feature 1..33: note = Probe
  source 1..33: mol_type = other DNA

SEQ ID NO: 23342 - DNA, 21 bp, synthetic construct
  misc_feature 1..21: note = Probe
  source 1..21: mol_type = other DNA
tacaatctccagcattccccc

SEQ ID NO: 23343 - DNA, 22 bp, synthetic construct
  misc_feature 1..22: note = Probe
  source 1..22: mol_type = other DNA
tacaatctccagcattccccct

SEQ ID NO: 23344 - DNA, 23 bp, synthetic construct
  misc_feature 1..23: note = Probe
  source 1..23: mol_type = other DNA
tacaatctccagcattccccctc

SEQ ID NO: 23345 - DNA, 24 bp, synthetic construct
  misc_feature 1..24: note = Probe
  source 1..24: mol_type = other DNA
tacaatctccagcattccccctca

SEQ ID NO: 23346 - DNA, 25 bp, synthetic construct
  misc_feature 1..25: note = Probe
  source 1..25: mol_type = other DNA
tacaatctccagcattccccctcaa

SEQ ID NO: 23347 - DNA, 26 bp, synthetic construct
  misc_feature 1..26: note = Probe
  source 1..26: mol_type = other DNA
tacaatctccagcattccccctcaaa

SEQ ID NO: 23348 - DNA, 28 bp, synthetic construct
  misc_feature 1..28: note = Probe
  source 1..28: mol_type = other DNA
tacaatctccagcattccccctcaaacc

SEQ ID NO: 23349 - DNA, 29 bp, synthetic construct
  misc_feature 1..29: note = Probe
  source 1..29: mol_type = other DNA
tacaatctccagcattccccctcaaacct

SEQ ID NO: 23350 - DNA, 30 bp, synthetic construct; identical to SEQ ID NO: 7478
  misc_feature 1..30: note = Probe
  source 1..30: mol_type = other DNA

SEQ ID NO: 23351 - DNA, 31 bp, synthetic construct; identical to SEQ ID NO: 7479
  misc_feature 1..31: note = Probe
  source 1..31: mol_type = other DNA

SEQ ID NO: 23352 - DNA, 32 bp, synthetic construct; identical to SEQ ID NO: 7480
  misc_feature 1..32: note = Probe
  source 1..32: mol_type = other DNA

SEQ ID NO: 23353 - DNA, 37 bp, synthetic construct
  misc_feature 1..37: note = Probe
  source 1..37: mol_type = other DNA
tacacgcagaaggtcctgggttcgagccccagtggaa

SEQ ID NO: 23354 - DNA, 43 bp, synthetic construct; identical to SEQ ID NO: 7483
  misc_feature 1..43: note = Probe
  source 1..43: mol_type = other DNA

SEQ ID NO: 23355 - DNA, 23 bp, synthetic construct
  misc_feature 1..23: note = Probe
  source 1..23: mol_type = other DNA
tacacttaggagatttcaactta

SEQ ID NO: 23356 - DNA, 26 bp, synthetic construct
  misc_feature 1..26: note = Probe
  source 1..26: mol_type = other DNA
tacacttaggagatttcaacttaact

SEQ ID NO: 23357 - DNA, 27 bp, synthetic construct
  misc_feature 1..27: note = Probe
  source 1..27: mol_type = other DNA
tacacttaggagatttcaacttaactt

SEQ ID NO: 23358 - DNA, 28 bp, synthetic construct
  misc_feature 1..28: note = Probe
  source 1..28: mol_type = other DNA
tacacttaggagatttcaacttaacttg

SEQ ID NO: 23359 - DNA, 30 bp, synthetic construct; identical to SEQ ID NO: 7487
  misc_feature 1..30: note = Probe
  source 1..30: mol_type = other DNA

SEQ ID NO: 23360 - DNA, 31 bp, synthetic construct
  misc_feature 1..31: note = Probe
  source 1..31: mol_type = other DNA
tacacttaggagatttcaacttaacttgacc

SEQ ID NO: 23361 - DNA, 32 bp, synthetic construct; identical to SEQ ID NO: 7488
  misc_feature 1..32: note = Probe
  source 1..32: mol_type = other DNA

SEQ ID NO: 23362 - DNA, 33 bp, synthetic construct; identical to SEQ ID NO: 7489
  misc_feature 1..33: note = Probe
  source 1..33: mol_type = other DNA

SEQ ID NO: 23363 - DNA, 34 bp, synthetic construct; identical to SEQ ID NO: 7490
  misc_feature 1..34: note = Probe
  source 1..34: mol_type = other DNA

SEQ ID NO: 23364 - DNA, 36 bp, synthetic construct; identical to SEQ ID NO: 7492
  misc_feature 1..36: note = Probe
  source 1..36: mol_type = other DNA

SEQ ID NO: 23365 - DNA, 38 bp, synthetic construct; identical to SEQ ID NO: 7494
  misc_feature 1..38: note = Probe
  source 1..38: mol_type = other DNA

SEQ ID NO: 23366 - DNA, 39 bp, synthetic construct; identical to SEQ ID NO: 7495
  misc_feature 1..39: note = Probe
  source 1..39: mol_type = other DNA

SEQ ID NO: 23367 - DNA, 40 bp, synthetic construct; identical to SEQ ID NO: 7496
  misc_feature 1..40: note = Probe
  source 1..40: mol_type = other DNA

SEQ ID NO: 23368 - DNA, 41 bp, synthetic construct; identical to SEQ ID NO: 7497
  misc_feature 1..41: note = Probe
  source 1..41: mol_type = other DNA

SEQ ID NO: 23369 - DNA, 42 bp, synthetic construct; identical to SEQ ID NO: 7498
  misc_feature 1..42: note = Probe
  source 1..42: mol_type = other DNA

SEQ ID NO: 23370 - DNA, 26 bp, synthetic construct
  misc_feature 1..26: note = Probe
  source 1..26: mol_type = other DNA
tacagtcagaggttcaattcctcttc

SEQ ID NO: 23371 - DNA, 27 bp, synthetic construct
  misc_feature 1..27: note = Probe
  source 1..27: mol_type = other DNA
tacagtcagaggttcaattcctcttct

SEQ ID NO: 23372 - DNA, 28 bp, synthetic construct
  misc_feature 1..28: note = Probe
  source 1..28: mol_type = other DNA
tacagtcagaggttcaattcctcttctt

SEQ ID NO: 23373 - DNA, 29 bp, synthetic construct
  misc_feature 1..29: note = Probe
  source 1..29: mol_type = other DNA
tacagtcagaggttcaattcctcttctta

SEQ ID NO: 23374 - DNA, 32 bp, synthetic construct; identical to SEQ ID NO: 7506
  misc_feature 1..32: note = Probe
  source 1..32: mol_type = other DNA

SEQ ID NO: 23375 - DNA, 31 bp, synthetic construct
  misc_feature 1..31: note = Probe
  source 1..31: mol_type = other DNA
tacagtggctcgttggtctaggggtatgatt

SEQ ID NO: 23376 - DNA, 16 bp, synthetic construct
  misc_feature 1..16: note = Probe
  source 1..16: mol_type = other DNA
tacccacacccaccca

SEQ ID NO: 23377 - DNA, 22 bp, synthetic construct
  misc_feature 1..22: note = Probe
  source 1..22: mol_type = other DNA
tacccacacccacccaagaaca

SEQ ID NO: 23378 - DNA, 27 bp, synthetic construct
  misc_feature 1..27: note = Probe
  source 1..27: mol_type = other DNA
tacccacacccacccaagaacagggtt

SEQ ID NO: 23379 - DNA, 28 bp, synthetic construct
  misc_feature 1..28: note = Probe
  source 1..28: mol_type = other DNA
tacccacacccacccaagaacagggttt

SEQ ID NO: 23380 - DNA, 29 bp, synthetic construct
  misc_feature 1..29: note = Probe
  source 1..29: mol_type = other DNA
tacccacacccacccaagaacagggtttg

SEQ ID NO: 23381 - DNA, 30 bp, synthetic construct; identical to SEQ ID NO: 7510
  misc_feature 1..30: note = Probe
  source 1..30: mol_type = other DNA

SEQ ID NO: 23382 - DNA, 31 bp, synthetic construct; identical to SEQ ID NO: 7511
  misc_feature 1..31: note = Probe
  source 1..31: mol_type = other DNA

SEQ ID NO: 23383 - DNA, 32 bp, synthetic construct; identical to SEQ ID NO: 7512
  misc_feature 1..32: note = Probe
  source 1..32: mol_type = other DNA

SEQ ID NO: 23384 - DNA, 33 bp, synthetic construct
  misc_feature 1..33: note = Probe
  source 1..33: mol_type = other DNA
tacccacacccacccaagaacagggtttgttaa

SEQ ID NO: 23385 - DNA, 27 bp, synthetic construct
  misc_feature 1..27: note = Probe
  source 1..27: mol_type = other DNA
tacccatggccaacctcctactcctca

SEQ ID NO: 23386 - DNA, 29 bp, synthetic construct
  misc_feature 1..29: note = Probe
  source 1..29: mol_type = other DNA
taccccgaaaatgttggttatacccttcc

SEQ ID NO: 23387 - DNA, 30 bp, synthetic construct; identical to SEQ ID NO: 7515
  misc_feature 1..30: note = Probe
  source 1..30: mol_type = other DNA

SEQ ID NO: 23388 - DNA, 31 bp, synthetic construct; identical to SEQ ID NO: 7516
  misc_feature 1..31: note = Probe
  source 1..31: mol_type = other DNA

SEQ ID NO: 23389 - DNA, 32 bp, synthetic construct; identical to SEQ ID NO: 7517
  misc_feature 1..32: note = Probe
  source 1..32: mol_type = other DNA

SEQ ID NO: 23390 - DNA, 33 bp, synthetic construct; identical to SEQ ID NO: 7518
  misc_feature 1..33: note = Probe
  source 1..33: mol_type = other DNA

SEQ ID NO: 23391 - DNA, 38 bp, synthetic construct; identical to SEQ ID NO: 7519
  misc_feature 1..38: note = Probe
  source 1..38: mol_type = other DNA

SEQ ID NO: 23392 - DNA, 39 bp, synthetic construct; identical to SEQ ID NO: 7520
  misc_feature 1..39: note = Probe
  source 1..39: mol_type = other DNA

SEQ ID NO: 23393 - DNA, 32 bp, synthetic construct; identical to SEQ ID NO: 7522
  misc_feature 1..32: note = Probe
  source 1..32: mol_type = other DNA

SEQ ID NO: 23394 - DNA, 33 bp, synthetic construct
  misc_feature 1..33: note = Probe
  source 1..33: mol_type = other DNA
taccgttaacttccaattaactagttttgacaa

SEQ ID NO: 23395 - DNA, 50 bp, synthetic construct; identical to SEQ ID NO: 7523
  misc_feature 1..50: note = Probe
  source 1..50: mol_type = other DNA

SEQ ID NO: 23396 - DNA, 16 bp, synthetic construct
  misc_feature 1..16: note = Probe
  source 1..16: mol_type = other DNA
tacctcctcaaagcaa

SEQ ID NO: 23397 - DNA, 19 bp, synthetic construct
  misc_feature 1..19: note = Probe
  source 1..19: mol_type = other DNA
tacctcctcaaagcaatac

SEQ ID NO: 23398 - DNA, 24 bp, synthetic construct
  misc_feature 1..24: note = Probe
  source 1..24: mol_type = other DNA
tacctcctcaaagcaatacactga

SEQ ID NO: 23399 - DNA, 25 bp, synthetic construct
  misc_feature 1..25: note = Probe
  source 1..25: mol_type = other DNA
tacctcctcaaagcaatacactgaa

SEQ ID NO: 23400 - DNA, 50 bp, synthetic construct; identical to SEQ ID NO: 1579
  misc_feature 1..50: note = Probe
  source 1..50: mol_type = other DNA

SEQ ID NO: 23401 - DNA, 33 bp, synthetic construct
  misc_feature 1..33: note = Probe
  source 1..33: mol_type = other DNA
tactcagtggtctagtggttaggattcagcgct

SEQ ID NO: 23402 - DNA, 23 bp, synthetic construct
  misc_feature 1..23: note = Probe
  source 1..23: mol_type = other DNA
tactctgcgttgtggccgcagca

SEQ ID NO: 23403 - DNA, 26 bp, synthetic construct
  misc_feature 1..26: note = Probe
  source 1..26: mol_type = other DNA
tactggaaagtgcacttggacgaacc

SEQ ID NO: 23404 - DNA, 50 bp, synthetic construct; identical to SEQ ID NO: 7535
  misc_feature 1..50: note = Probe
  source 1..50: mol_type = other DNA

SEQ ID NO: 23405 - DNA, 50 bp, synthetic construct; identical to SEQ ID NO: 1580
  misc_feature 1..50: note = Probe
  source 1..50: mol_type = other DNA

SEQ ID NO: 23406 - DNA, 19 bp, synthetic construct
  misc_feature 1..19: note = Probe
  source 1..19: mol_type = other DNA
tagaattctcgcctgccac

SEQ ID NO: 23407 - DNA, 30 bp, synthetic construct
  misc_feature 1..30: note = Probe
  source 1..30: mol_type = other DNA
tagaattctcgcctgccacgcgggaggccc

SEQ ID NO: 23408 - DNA, 17 bp, synthetic construct
  misc_feature 1..17: note = Probe
  source 1..17: mol_type = other DNA
tagacgggctcacatca

SEQ ID NO: 23409 - DNA, 22 bp, synthetic construct
  misc_feature 1..22: note = Probe
  source 1..22: mol_type = other DNA
tagacgggctcacatcacccca

SEQ ID NO: 23410 - DNA, 23 bp, synthetic construct
  misc_feature 1..23: note = Probe
  source 1..23: mol_type = other DNA
tagacgggctcacatcaccccat

SEQ ID NO: 23411 - DNA, 24 bp, synthetic construct
  misc_feature 1..24: note = Probe
  source 1..24: mol_type = other DNA
tagacgggctcacatcaccccata

SEQ ID NO: 23412 - DNA, 25 bp, synthetic construct
  misc_feature 1..25: note = Probe
  source 1..25: mol_type = other DNA
tagacgggctcacatcaccccataa

SEQ ID NO: 23413 - DNA, 26 bp, synthetic construct
  misc_feature 1..26: note = Probe
  source 1..26: mol_type = other DNA
tagacgggctcacatcaccccataaa

SEQ ID NO: 23414 - DNA, 28 bp, synthetic construct
  misc_feature 1..28: note = Probe
  source 1..28: mol_type = other DNA
tagacgggctcacatcaccccataaaca

SEQ ID NO: 23415 - DNA, 29 bp, synthetic construct
  misc_feature 1..29: note = Probe
  source 1..29: mol_type = other DNA
tagacgggctcacatcaccccataaacaa

SEQ ID NO: 23416 - DNA, 30 bp, synthetic construct; identical to SEQ ID NO: 7542
  misc_feature 1..30: note = Probe
  source 1..30: mol_type = other DNA

SEQ ID NO: 23417 - DNA, 31 bp, synthetic construct; identical to SEQ ID NO: 7543
  misc_feature 1..31: note = Probe
  source 1..31: mol_type = other DNA

SEQ ID NO: 23418 - DNA, 32 bp, synthetic construct; identical to SEQ ID NO: 7544
  misc_feature 1..32: note = Probe
  source 1..32: mol_type = other DNA

SEQ ID NO: 23419 - DNA, 30 bp, synthetic construct
  misc_feature 1..30: note = Probe
  source 1..30: mol_type = other DNA
tagagcatgagactcttaatctcagggtcg

SEQ ID NO: 23420 - DNA, 35 bp, synthetic construct
  misc_feature 1..35: note = Probe
  source 1..35: mol_type = other DNA
tagagcatgagactcttaatctcagggtcgtgggt

SEQ ID NO: 23421 - DNA, 27 bp, synthetic construct
  misc_feature 1..27: note = Probe
  source 1..27: mol_type = other DNA
tagagcatgggactcttaatcccaggg

SEQ ID NO: 23422 - DNA, 28 bp, synthetic construct
  misc_feature 1..28: note = Probe
  source 1..28: mol_type = other DNA
tagagcatgggactcttaatcccagggt

SEQ ID NO: 23423 - DNA, 29 bp, synthetic construct
  misc_feature 1..29: note = Probe
  source 1..29: mol_type = other DNA
tagagcatgggactcttaatcccagggtc

SEQ ID NO: 23424 - DNA, 30 bp, synthetic construct
  misc_feature 1..30: note = Probe
  source 1..30: mol_type = other DNA
tagagcatgggactcttaatcccagggtcg

SEQ ID NO: 23425 - DNA, 32 bp, synthetic construct; identical to SEQ ID NO: 7545
  misc_feature 1..32: note = Probe
  source 1..32: mol_type = other DNA

SEQ ID NO: 23426 - DNA, 35 bp, synthetic construct
  misc_feature 1..35: note = Probe
  source 1..35: mol_type = other DNA
tagagcatgggactcttaatcccagggtcgtgggt

SEQ ID NO: 23427 - DNA, 36 bp, synthetic construct
  misc_feature 1..36: note = Probe
  source 1..36: mol_type = other DNA
tagagtaaataataggagcttaaacccccttatttc

SEQ ID NO: 23428 - DNA, 38 bp, synthetic construct
  misc_feature 1..38: note = Probe
  source 1..38: mol_type = other DNA
tagagtaaataataggagcttaaacccccttatttcta

SEQ ID NO: 23429 - DNA, 39 bp, synthetic construct; identical to SEQ ID NO: 7550
  misc_feature 1..39: note = Probe
  source 1..39: mol_type = other DNA

SEQ ID NO: 23430 - DNA, 40 bp, synthetic construct; identical to SEQ ID NO: 7551
  misc_feature 1..40: note = Probe
  source 1..40: mol_type = other DNA

SEQ ID NO: 23431 - DNA, 41 bp, synthetic construct; identical to SEQ ID NO: 7552
  misc_feature 1..41: note = Probe
  source 1..41: mol_type = other DNA

SEQ ID NO: 23432 - DNA, 42 bp, synthetic construct
  misc_feature 1..42: note = Probe
  source 1..42: mol_type = other DNA
tagagtaaataataggagcttaaacccccttatttctaggac

SEQ ID NO: 23433 - DNA, 25 bp, synthetic construct
  misc_feature 1..25: note = Probe
  source 1..25: mol_type = other DNA
tagattgaagccagttgattagggt

SEQ ID NO: 23434 - DNA, 31 bp, synthetic construct
  misc_feature 1..31: note = Probe
  source 1..31: mol_type = other DNA
tagattgaagccagttgattagggtgcttag

SEQ ID NO: 23435 - DNA, 32 bp, synthetic construct
  misc_feature 1..32: note = Probe
  source 1..32: mol_type = other DNA
tagattgaagccagttgattagggtgcttagc

SEQ ID NO: 23436 - DNA, 33 bp, synthetic construct
  misc_feature 1..33: note = Probe
  source 1..33: mol_type = other DNA
tagattgaagccagttgattagggtgcttagct

SEQ ID NO: 23437 - DNA, 36 bp, synthetic construct; identical to SEQ ID NO: 7555
  misc_feature 1..36: note = Probe
  source 1..36: mol_type = other DNA

SEQ ID NO: 23438 - DNA, 37 bp, synthetic construct; identical to SEQ ID NO: 7556
  misc_feature 1..37: note = Probe
  source 1..37: mol_type = other DNA

SEQ ID NO: 23439 - DNA, 38 bp, synthetic construct
  misc_feature 1..38: note = Probe
  source 1..38: mol_type = other DNA
tagattgaagccagttgattagggtgcttagctgttaa

SEQ ID NO: 23440 - DNA, 39 bp, synthetic construct
  misc_feature 1..39: note = Probe
  source 1..39: mol_type = other DNA
tagattgaagccagttgattagggtgcttagctgttaac

SEQ ID NO: 23441 - DNA, 40 bp, synthetic construct; identical to SEQ ID NO: 7557
  misc_feature 1..40: note = Probe
  source 1..40: mol_type = other DNA

SEQ ID NO: 23442 - DNA, 41 bp, synthetic construct
  misc_feature 1..41: note = Probe
  source 1..41: mol_type = other DNA
tagattgaagccagttgattagggtgcttagctgttaacta

SEQ ID NO: 23443 - DNA, 49 bp, synthetic construct
  misc_feature 1..49: note = Probe
  source 1..49: mol_type = other DNA
tagattgaagccagttgattagggtgcttagctgttaactaagtgtttg

SEQ ID NO: 23444 - DNA, 33 bp, synthetic construct
  misc_feature 1..33: note = Probe
  source 1..33: mol_type = other DNA
tagcactctggactctgaatccagcgatccgag

SEQ ID NO: 23445 - DNA, 30 bp, synthetic construct
  misc_feature 1..30: note = Probe
  source 1..30: mol_type = other DNA
tagcactctggactttgaatccagcgatcc

SEQ ID NO: 23446 - DNA, 30 bp, synthetic construct
  misc_feature 1..30: note = Probe
  source 1..30: mol_type = other DNA
tagcatagctgccttccaagcagttgaccc

SEQ ID NO: 23447 - DNA, 31 bp, synthetic construct
  misc_feature 1..31: note = Probe
  source 1..31: mol_type = other DNA
tagcatagctgccttccaagcagttgacccg

SEQ ID NO: 23448 - DNA, 32 bp, synthetic construct
  misc_feature 1..32: note = Probe
  source 1..32: mol_type = other DNA
tagcatagctgccttccaagcagttgacccgg

SEQ ID NO: 23449 - DNA, 25 bp, synthetic construct
  misc_feature 1..25: note = Probe
  source 1..25: mol_type = other DNA
tagcattaaccttttaagttaaaga

SEQ ID NO: 23450 - DNA, 28 bp, synthetic construct
  misc_feature 1..28: note = Probe
  source 1..28: mol_type = other DNA
tagcattaaccttttaagttaaagatta

SEQ ID NO: 23451 - DNA, 33 bp, synthetic construct
  misc_feature 1..33: note = Probe
  source 1..33: mol_type = other DNA
tagcattaaccttttaagttaaagattaagaga

SEQ ID NO: 23452 - DNA, 42 bp, synthetic construct
  misc_feature 1..42: note = Probe
  source 1..42: mol_type = other DNA
tagcattaaccttttaagttaaagattaagagaaccaacacc

SEQ ID NO: 23453 - DNA, 49 bp, synthetic construct; identical to SEQ ID NO: 1585
  misc_feature 1..49: note = Probe
  source 1..49: mol_type = other DNA

SEQ ID NO: 23454 - DNA, 50 bp, synthetic construct; identical to SEQ ID NO: 1586
  misc_feature 1..50: note = Probe
  source 1..50: mol_type = other DNA

SEQ ID NO: 23455 - DNA, 22 bp, synthetic construct
  misc_feature 1..22: note = Probe
  source 1..22: mol_type = other DNA
tagccccaaacccactccacct

SEQ ID NO: 23456 - DNA, 16 bp, synthetic construct
  misc_feature 1..16: note = Probe
  source 1..16: mol_type = other DNA
tagcctttctattagc

SEQ ID NO: 23457 - DNA, 37 bp, synthetic construct
  misc_feature 1..37: note = Probe
  source 1..37: mol_type = other DNA
tagcggttaggattcctggttttcacccaggcggccc

SEQ ID NO: 23458 - DNA, 38 bp, synthetic construct
  misc_feature 1..38: note = Probe
  source 1..38: mol_type = other DNA
tagcggttaggattcctggttttcacccaggcggcccg

SEQ ID NO: 23459 - DNA, 22 bp, synthetic construct
  misc_feature 1..22: note = Probe
  source 1..22: mol_type = other DNA
tagcgtggccgagcggtctaag

SEQ ID NO: 23460 - DNA, 22 bp, synthetic construct
  misc_feature 1..22: note = Probe
  source 1..22: mol_type = other DNA
tagcgtggccgagtggtctaag

SEQ ID NO: 23461 - DNA, 25 bp, synthetic construct
  misc_feature 1..25: note = Probe
  source 1..25: mol_type = other DNA
tagctcagtcggtagagcatcagac

SEQ ID NO: 23462 - DNA, 26 bp, synthetic construct
  misc_feature 1..26: note = Probe
  source 1..26: mol_type = other DNA
tagctcagtcggtagagcatcagact

SEQ ID NO: 23463 - DNA, 24 bp, synthetic construct
  misc_feature 1..24: note = Probe
  source 1..24: mol_type = other DNA
tagctcagtcggtagagcatgaga

SEQ ID NO: 23464 - DNA, 25 bp, synthetic construct
  misc_feature 1..25: note = Probe
  source 1..25: mol_type = other DNA
tagctcagtcggtagagcatgagac

SEQ ID NO: 23465 - DNA, 26 bp, synthetic construct
  misc_feature 1..26: note = Probe
  source 1..26: mol_type = other DNA
tagctcagtcggtagagcatgagacc

SEQ ID NO: 23466 - DNA, 26 bp, synthetic construct
  misc_feature 1..26: note = Probe
  source 1..26: mol_type = other DNA
tagctcagtcggtagagcatgagact

SEQ ID NO: 23467 - DNA, 27 bp, synthetic construct
  misc_feature 1..27: note = Probe
  source 1..27: mol_type = other DNA
tagctcagtcggtagagcatgagactc

SEQ ID NO: 23468 - DNA, 28 bp, synthetic construct
  misc_feature 1..28: note = Probe
  source 1..28: mol_type = other DNA
tagctcagtcggtagagcatgagactct

SEQ ID NO: 23469 - DNA, 29 bp, synthetic construct
  misc_feature 1..29: note = Probe
  source 1..29: mol_type = other DNA
tagctcagtcggtagagcatgagactctt

SEQ ID NO: 23470 - DNA, 22 bp, synthetic construct
  misc_feature 1..22: note = Probe
  source 1..22: mol_type = other DNA
tagctcagtcggtagagcatgg

SEQ ID NO: 23471 - DNA, 30 bp, synthetic construct
  misc_feature 1..30: note = Probe
  source 1..30: mol_type = other DNA
tagctcagtcggtagagcatgggactctta

SEQ ID NO: 23472 - DNA, 42 bp, synthetic construct
  misc_feature 1..42: note = Probe
  source 1..42: mol_type = other DNA
tagctgttaactaagtgtttgtgggtttaagtcccattggtc

SEQ ID NO: 23473 - DNA, 20 bp, synthetic construct
  misc_feature 1..20: note = Probe
  source 1..20: mol_type = other DNA
taggagatttcaacttaact

SEQ ID NO: 23474 - DNA, 24 bp, synthetic construct
  misc_feature 1..24: note = Probe
  source 1..24: mol_type = other DNA
taggagatttcaacttaacttgac

SEQ ID NO: 23475 - DNA, 25 bp, synthetic construct
  misc_feature 1..25: note = Probe
  source 1..25: mol_type = other DNA
taggagatttcaacttaacttgacc

SEQ ID NO: 23476 - DNA, 26 bp, synthetic construct
  misc_feature 1..26: note = Probe
  source 1..26: mol_type = other DNA
taggagatttcaacttaacttgaccg

SEQ ID NO: 23477 - DNA, 27 bp, synthetic construct
  misc_feature 1..27: note = Probe
  source 1..27: mol_type = other DNA
taggagatttcaacttaacttgaccgc

SEQ ID NO: 23478 - DNA, 28 bp, synthetic construct
  misc_feature 1..28: note = Probe
  source 1..28: mol_type = other DNA
taggagatttcaacttaacttgaccgct

SEQ ID NO: 23479 - DNA, 29 bp, synthetic construct
  misc_feature 1..29: note = Probe
  source 1..29: mol_type = other DNA
taggagatttcaacttaacttgaccgctc

SEQ ID NO: 23480 - DNA, 30 bp, synthetic construct; identical to SEQ ID NO: 11700
  misc_feature 1..30: note = Probe
  source 1..30: mol_type = other DNA

SEQ ID NO: 23481 - DNA, 33 bp, synthetic construct; identical to SEQ ID NO: 7577
  misc_feature 1..33: note = Probe
  source 1..33: mol_type = other DNA

SEQ ID NO: 23482 - DNA, 34 bp, synthetic construct; identical to SEQ ID NO: 7578
  misc_feature 1..34: note = Probe
  source 1..34: mol_type = other DNA

SEQ ID NO: 23483 - DNA, 35 bp, synthetic construct; identical to SEQ ID NO: 7579
  misc_feature 1..35: note = Probe
  source 1..35: mol_type = other DNA

SEQ ID NO: 23484 - DNA, 16 bp, synthetic construct
  misc_feature 1..16: note = Probe
  source 1..16: mol_type = other DNA
taggagcttaaacccc

SEQ ID NO: 23485 - DNA, 28 bp, synthetic construct
  misc_feature 1..28: note = Probe
  source 1..28: mol_type = other DNA
taggagcttaaacccccttatttctagg

SEQ ID NO: 23486 - DNA, 17 bp, synthetic construct
  misc_feature 1..17: note = Probe
  source 1..17: mol_type = other DNA
taggatggggtgtgata

SEQ ID NO: 23487 - DNA, 22 bp, synthetic construct
  misc_feature 1..22: note = Probe
  source 1..22: mol_type = other DNA
taggatggggtgtgataggtgg

SEQ ID NO: 23488 - DNA, 24 bp, synthetic construct
  misc_feature 1..24: note = Probe
  source 1..24: mol_type = other DNA
taggatggggtgtgataggtggca

SEQ ID NO: 23489 - DNA, 26 bp, synthetic construct
  misc_feature 1..26: note = Probe
  source 1..26: mol_type = other DNA
taggatggggtgtgataggtggcacg

SEQ ID NO: 23490 - DNA, 27 bp, synthetic construct
  misc_feature 1..27: note = Probe
  source 1..27: mol_type = other DNA
taggatggggtgtgataggtggcacgg

SEQ ID NO: 23491 - DNA, 28 bp, synthetic construct
  misc_feature 1..28: note = Probe
  source 1..28: mol_type = other DNA
taggatggggtgtgataggtggcacgga

SEQ ID NO: 23492 - DNA, 33 bp, synthetic construct; identical to SEQ ID NO: 1594
  misc_feature 1..33: note = Probe
  source 1..33: mol_type = other DNA

SEQ ID NO: 23493 - DNA, 37 bp, synthetic construct; identical to SEQ ID NO: 7588
  misc_feature 1..37: note = Probe
  source 1..37: mol_type = other DNA

SEQ ID NO: 23494 - DNA, 38 bp, synthetic construct
  misc_feature 1..38: note = Probe
  source 1..38: mol_type = other DNA
taggatggggtgtgataggtggcacggagaattttgga

SEQ ID NO: 23495 - DNA, 49 bp, synthetic construct
  misc_feature 1..49: note = Probe
  source 1..49: mol_type = other DNA
taggatggggtgtgataggtggcacggagaattttggattctcagggat

SEQ ID NO: 23496 - DNA, 50 bp, synthetic construct
  misc_feature 1..50: note = Probe
  source 1..50: mol_type = other DNA
taggatggggtgtgataggtggcacggagaattttggattctcagggatg

SEQ ID NO: 23497 - DNA, 30 bp, synthetic construct
  misc_feature 1..30: note = Probe
  source 1..30: mol_type = other DNA
taggattcggcgctctcaccgccgcggccc

SEQ ID NO: 23498 - DNA, 26 bp, synthetic construct
  misc_feature 1..26: note = Probe
  source 1..26: mol_type = other DNA
taggctaaatcctatatatcttaatg

SEQ ID NO: 23499 - DNA, 19 bp, synthetic construct
  misc_feature 1..19: note = Probe
  source 1..19: mol_type = other DNA
tagggctttggctgtgggg

SEQ ID NO: 23500 - DNA, 17 bp, synthetic construct
  misc_feature 1..17: note = Probe
  source 1..17: mol_type = other DNA
taggggtatgattctcg

SEQ ID NO: 23501 - DNA, 18 bp, synthetic construct
  misc_feature 1..18: note = Probe
  source 1..18: mol_type = other DNA
taggggtatgattctcgc

SEQ ID NO: 23502 - DNA, 19 bp, synthetic construct
  misc_feature 1..19: note = Probe
  source 1..19: mol_type = other DNA
taggggtatgattctcgct

SEQ ID NO: 23503 - DNA, 37 bp, synthetic construct
  misc_feature 1..37: note = Probe
  source 1..37: mol_type = other DNA
taggggtatgattctcgctttgggtgcgagaggtccc

SEQ ID NO: 23504 - DNA, 18 bp, synthetic construct
  misc_feature 1..18: note = Probe
  source 1..18: mol_type = other DNA
tagggtgcgagaggtccc

SEQ ID NO: 23505 - DNA, 22 bp, synthetic construct
  misc_feature 1..22: note = Probe
  source 1..22: mol_type = other DNA
tagggtgcgagaggtcccgggt

SEQ ID NO: 23506 - DNA, 23 bp, synthetic construct
  misc_feature 1..23: note = Probe
  source 1..23: mol_type = other DNA
tagggtgcgagaggtcccgggtt

SEQ ID NO: 23507 - DNA, 50 bp, synthetic construct; identical to SEQ ID NO: 1596
  misc_feature 1..50: note = Probe
  source 1..50: mol_type = other DNA

SEQ ID NO: 23508 - DNA, 27 bp, synthetic construct
  misc_feature 1..27: note = Probe
  source 1..27: mol_type = other DNA
taggtcgctggttcgattccggctcga

SEQ ID NO: 23509 - DNA, 21 bp, synthetic construct
  misc_feature 1..21: note = Probe
  source 1..21: mol_type = other DNA
tagtaaacaggagatcctggg

SEQ ID NO: 23510 - DNA, 22 bp, synthetic construct
  misc_feature 1..22: note = Probe
  source 1..22: mol_type = other DNA
tagtaaacaggagatcctgggt

SEQ ID NO: 23511 - DNA, 38 bp, synthetic construct
  misc_feature 1..38: note = Probe
  source 1..38: mol_type = other DNA
tagtaaacaggagatcctgggttcgaatcccagcggtg

SEQ ID NO: 23512 - DNA, 35 bp, synthetic construct; identical to SEQ ID NO: 1597
  misc_feature 1..35: note = Probe
  source 1..35: mol_type = other DNA

SEQ ID NO: 23513 - DNA, 36 bp, synthetic construct
  misc_feature 1..36: note = Probe
  source 1..36: mol_type = other DNA
tagtaccgttaacttccaattaactagttttgacaa

SEQ ID NO: 23514 - DNA, 50 bp, synthetic construct; identical to SEQ ID NO: 7598
  misc_feature 1..50: note = Probe
  source 1..50: mol_type = other DNA

SEQ ID NO: 23515 - DNA, 23 bp, synthetic construct
  misc_feature 1..23: note = Probe
  source 1..23: mol_type = other DNA
tagtatagtggtgagtatccccg

SEQ ID NO: 23516 - DNA, 30 bp, synthetic construct
  misc_feature 1..30: note = Probe
  source 1..30: mol_type = other DNA
tagtatagtggtgagtatccccgcctgtca

SEQ ID NO: 23517 - DNA, 17 bp, synthetic construct
  misc_feature 1..17: note = Probe
  source 1..17: mol_type = other DNA
tagtccgtgcgagaata

SEQ ID NO: 23518 - DNA, 18 bp, synthetic construct
  misc_feature 1..18: note = Probe
  source 1..18: mol_type = other DNA
tagtccgtgcgagaataa

SEQ ID NO: 23519 - DNA, 20 bp, synthetic construct
  misc_feature 1..20: note = Probe
  source 1..20: mol_type = other DNA
tagtccgtgcgagaataatg

SEQ ID NO: 23520 - DNA, 25 bp, synthetic construct
  misc_feature 1..25: note = Probe
  source 1..25: mol_type = other DNA
tagtggctaggattcggcgctttca

SEQ ID NO: 23521 - DNA, 37 bp, synthetic construct
  misc_feature 1..37: note = Probe
  source 1..37: mol_type = other DNA
tagtggtaagcatagctgccttccaagcagttgaccc

SEQ ID NO: 23522 - DNA, 42 bp, synthetic construct
  misc_feature 1..42: note = Probe
  source 1..42: mol_type = other DNA
tagtggtaagcatagctgccttccaagcagttgacccgggtt

SEQ ID NO: 23523 - DNA, 21 bp, synthetic construct
  misc_feature 1..21: note = Probe
  source 1..21: mol_type = other DNA
tagtggtatcatgcaagattc

SEQ ID NO: 23524 - DNA, 22 bp, synthetic construct
  misc_feature 1..22: note = Probe
  source 1..22: mol_type = other DNA
tagtggtatcatgcaagattcc

SEQ ID NO: 23525 - DNA, 18 bp, synthetic construct
  misc_feature 1..18: note = Probe
  source 1..18: mol_type = other DNA
tagtggtatgattctcgc

SEQ ID NO: 23526 - DNA, 23 bp, synthetic construct
  misc_feature 1..23: note = Probe
  source 1..23: mol_type = other DNA
tagtggtgagcatagctgccttc

SEQ ID NO: 23527 - DNA, 37 bp, synthetic construct
  misc_feature 1..37: note = Probe
  source 1..37: mol_type = other DNA
tagtggtgagcatagctgccttccaagcagttgaccc

SEQ ID NO: 23528 - DNA, 42 bp, synthetic construct
  misc_feature 1..42: note = Probe
  source 1..42: mol_type = other DNA
tagtggtgagcatagctgccttccaagcagttgacccgggtt

SEQ ID NO: 23529 - DNA, 16 bp, synthetic construct
  misc_feature 1..16: note = Probe
  source 1..16: mol_type = other DNA
tagtggtgagtatccc

SEQ ID NO: 23530 - DNA, 17 bp, synthetic construct
  misc_feature 1..17: note = Probe
  source 1..17: mol_type = other DNA
tagtggtgagtatcccc

SEQ ID NO: 23531 - DNA, 18 bp, synthetic construct
  misc_feature 1..18: note = Probe
  source 1..18: mol_type = other DNA
tagtggtgagtatccccg

SEQ ID NO: 23532 - DNA, 19 bp, synthetic construct
  misc_feature 1..19: note = Probe
  source 1..19: mol_type = other DNA
tagtggtgagtatccccgc

SEQ ID NO: 23533 - DNA, 33 bp, synthetic construct
  misc_feature 1..33: note = Probe
  source 1..33: mol_type = other DNA
tagtggtgagtatccccgcctgtcacgcgggag

SEQ ID NO: 23534 - DNA, 37 bp, synthetic construct
  misc_feature 1..37: note = Probe
  source 1..37: mol_type = other DNA
tagtggtgagtatccccgcctgtcacgcgggagaccg

SEQ ID NO: 23535 - DNA, 39 bp, synthetic construct
  misc_feature 1..39: note = Probe
  source 1..39: mol_type = other DNA
tagtggtgagtatccccgcctgtcacgcgggagaccggg

SEQ ID NO: 23536 - DNA, 41 bp, synthetic construct
  misc_feature 1..41: note = Probe
  source 1..41: mol_type = other DNA
tagtggtgagtatccccgcctgtcacgcgggagaccggggt

SEQ ID NO: 23537 - DNA, 50 bp, synthetic construct
  misc_feature 1..50: note = Probe
  source 1..50: mol_type = other DNA
tagtggtgagtatccccgcctgtcacgcgggagaccggggttcgattccc

SEQ ID NO: 23538 - DNA, 37 bp, synthetic construct
  misc_feature 1..37: note = Probe
  source 1..37: mol_type = other DNA
tagtggttagcatagctgccttccaagcagttgaccc

SEQ ID NO: 23539 - DNA, 38 bp, synthetic construct
  misc_feature 1..38: note = Probe
  source 1..38: mol_type = other DNA
tagtggttagcatagctgccttccaagcagttgacccg

SEQ ID NO: 23540 - DNA, 41 bp, synthetic construct
  misc_feature 1..41: note = Probe
  source 1..41: mol_type = other DNA
tagtggttagcatagctgccttccaagcagttgacccgggt

SEQ ID NO: 23541 - DNA, 16 bp, synthetic construct
  misc_feature 1..16: note = Probe
  source 1..16: mol_type = other DNA
tagtggttaggattcg

SEQ ID NO: 23542 - DNA, 17 bp, synthetic construct
  misc_feature 1..17: note = Probe
  source 1..17: mol_type = other DNA
tagtggttaggattcgg

SEQ ID NO: 23543 - DNA, 18 bp, synthetic construct
  misc_feature 1..18: note = Probe
  source 1..18: mol_type = other DNA
tagtggttaggattcggc

SEQ ID NO: 23544 - DNA, 24 bp, synthetic construct
  misc_feature 1..24: note = Probe
  source 1..24: mol_type = other DNA
tagtggttaggattcggcgctctc

SEQ ID NO: 23545 - DNA, 26 bp, synthetic construct
  misc_feature 1..26: note = Probe
  source 1..26: mol_type = other DNA
tagtggttaggattcggcgctctcac

SEQ ID NO: 23546 - DNA, 27 bp, synthetic construct
  misc_feature 1..27: note = Probe
  source 1..27: mol_type = other DNA
tagtggttaggattcggcgctctcacc

SEQ ID NO: 23547 - DNA, 30 bp, synthetic construct
  misc_feature 1..30: note = Probe
  source 1..30: mol_type = other DNA
tagtggttaggattcggcgctctcaccgcc

SEQ ID NO: 23548 - DNA, 32 bp, synthetic construct
  misc_feature 1..32: note = Probe
  source 1..32: mol_type = other DNA
tagtggttaggattcggcgctctcaccgccgc

SEQ ID NO: 23549 - DNA, 33 bp, synthetic construct
  misc_feature 1..33: note = Probe
  source 1..33: mol_type = other DNA
tagtggttaggattcggcgctctcaccgccgcg

SEQ ID NO: 23550 - DNA, 36 bp, synthetic construct
  misc_feature 1..36: note = Probe
  source 1..36: mol_type = other DNA
tagtggttaggattcggcgctctcaccgccgcggcc

SEQ ID NO: 23551 - DNA, 17 bp, synthetic construct
  misc_feature 1..17: note = Probe
  source 1..17: mol_type = other DNA
tagtggttagtactctg

SEQ ID NO: 23552 - DNA, 18 bp, synthetic construct
  misc_feature 1..18: note = Probe
  source 1..18: mol_type = other DNA
tagtggttagtactctgc

SEQ ID NO: 23553 - DNA, 20 bp, synthetic construct
  misc_feature 1..20: note = Probe
  source 1..20: mol_type = other DNA
tagtggttagtactctgcgt

SEQ ID NO: 23554 - DNA, 21 bp, synthetic construct
  misc_feature 1..21: note = Probe
  source 1..21: mol_type = other DNA
tagtggttagtactctgcgtt

SEQ ID NO: 23555 - DNA, 23 bp, synthetic construct
  misc_feature 1..23: note = Probe
  source 1..23: mol_type = other DNA
tagtggttagtactctgcgttgt

SEQ ID NO: 23556 - DNA, 33 bp, synthetic construct
  misc_feature 1..33: note = Probe
  source 1..33: mol_type = other DNA
tagtggttagtactctgcgttgtggccgcagca

SEQ ID NO: 23557 - DNA, 20 bp, synthetic construct
  misc_feature 1..20: note = Probe
  source 1..20: mol_type = other DNA
tagtggttagtatccccgcc

SEQ ID NO: 23558 - DNA, 23 bp, synthetic construct
  misc_feature 1..23: note = Probe
  source 1..23: mol_type = other DNA
tagtggttagtatccccgcctgt

SEQ ID NO: 23559 - DNA, 25 bp, synthetic construct
  misc_feature 1..25: note = Probe
  source 1..25: mol_type = other DNA
tagtggttagtatccccgcctgtca

SEQ ID NO: 23560 - DNA, 27 bp, synthetic construct
  misc_feature 1..27: note = Probe
  source 1..27: mol_type = other DNA
tagtggttagtatccccgcctgtcacg

SEQ ID NO: 23561 - DNA, 28 bp, synthetic construct
  misc_feature 1..28: note = Probe
  source 1..28: mol_type = other DNA
tagtggttagtatccccgcctgtcacgc

SEQ ID NO: 23562 - DNA, 38 bp, synthetic construct
  misc_feature 1..38: note = Probe
  source 1..38: mol_type = other DNA
tagtggttagtatccccgcctgtcacgcgggagaccgg

SEQ ID NO: 23563 - DNA, 42 bp, synthetic construct
  misc_feature 1..42: note = Probe
  source 1..42: mol_type = other DNA
tagtggttatcacgttcgcctaacacgcgaaaggtccccggt

SEQ ID NO: 23564 - DNA, 41 bp, synthetic construct
  misc_feature 1..41: note = Probe
  source 1..41: mol_type = other DNA
tagtggttatcacgttcgcctcacacgcgaaaggtccccgg

SEQ ID NO: 23565 - DNA, 42 bp, synthetic construct
  misc_feature 1..42: note = Probe
  source 1..42: mol_type = other DNA
tagtggttatcacgttcgcctcacacgcgaaaggtccccggt

SEQ ID NO: 23566 - DNA, 25 bp, synthetic construct
  misc_feature 1..25: note = Probe
  source 1..25: mol_type = other DNA
tagtgtagcggttatcacattcgcc

SEQ ID NO: 23567 - DNA, 21 bp, synthetic construct
  misc_feature 1..21: note = Probe
  source 1..21: mol_type = other DNA
tagtgtagtggtcatcacgtt

SEQ ID NO: 23568 - DNA, 24 bp, synthetic construct
  misc_feature 1..24: note = Probe
  source 1..24: mol_type = other DNA
tagtgtagtggtcatcacgttcgc

SEQ ID NO: 23569 - DNA, 16 bp, synthetic construct
  misc_feature 1..16: note = Probe
  source 1..16: mol_type = other DNA
tagtgtagtggttatc

SEQ ID NO: 23570 - DNA, 21 bp, synthetic construct
  misc_feature 1..21: note = Probe
  source 1..21: mol_type = other DNA
tagtgtagtggttatcacgtt

SEQ ID NO: 23571 - DNA, 24 bp, synthetic construct
  misc_feature 1..24: note = Probe
  source 1..24: mol_type = other DNA
tagtgtagtggttatcacgttcgc

SEQ ID NO: 23572 - DNA, 25 bp, synthetic construct
  misc_feature 1..25: note = Probe
  source 1..25: mol_type = other DNA
tagtgtagtggttatcacgttcgcc

SEQ ID NO: 23573 - DNA, 15 bp, synthetic construct
  misc_feature 1..15: note = Probe
  source 1..15: mol_type = other DNA
tatacccacacccac

SEQ ID NO: 23574 - DNA, 16 bp, synthetic construct
  misc_feature 1..16: note = Probe
  source 1..16: mol_type = other DNA
tatacccacacccacc

SEQ ID NO: 23575 - DNA, 17 bp, synthetic construct
  misc_feature 1..17: note = Probe
  source 1..17: mol_type = other DNA
tatacccacacccaccc

SEQ ID NO: 23576 - DNA, 18 bp, synthetic construct
  misc_feature 1..18: note = Probe
  source 1..18: mol_type = other DNA
tatacccacacccaccca

SEQ ID NO: 23577 - DNA, 19 bp, synthetic construct
  misc_feature 1..19: note = Probe
  source 1..19: mol_type = other DNA
tatacccacacccacccaa

SEQ ID NO: 23578 - DNA, 20 bp, synthetic construct
  misc_feature 1..20: note = Probe
  source 1..20: mol_type = other DNA
tatacccacacccacccaag

SEQ ID NO: 23579 - DNA, 21 bp, synthetic construct
  misc_feature 1..21: note = Probe
  source 1..21: mol_type = other DNA
tatacccacacccacccaaga

SEQ ID NO: 23580 - DNA, 22 bp, synthetic construct
  misc_feature 1..22: note = Probe
  source 1..22: mol_type = other DNA
tatacccacacccacccaagaa

SEQ ID NO: 23581 - DNA, 23 bp, synthetic construct
  misc_feature 1..23: note = Probe
  source 1..23: mol_type = other DNA
tatacccacacccacccaagaac

SEQ ID NO: 23582 - DNA, 24 bp, synthetic construct
  misc_feature 1..24: note = Probe
  source 1..24: mol_type = other DNA
tatacccacacccacccaagaaca

SEQ ID NO: 23583 - DNA, 25 bp, synthetic construct
  misc_feature 1..25: note = Probe
  source 1..25: mol_type = other DNA
tatacccacacccacccaagaacag

SEQ ID NO: 23584 - DNA, 26 bp, synthetic construct
  misc_feature 1..26: note = Probe
  source 1..26: mol_type = other DNA
tatacccacacccacccaagaacagg

SEQ ID NO: 23585 - DNA, 27 bp, synthetic construct
  misc_feature 1..27: note = Probe
  source 1..27: mol_type = other DNA
tatacccacacccacccaagaacaggg

SEQ ID NO: 23586 - DNA, 28 bp, synthetic construct
  misc_feature 1..28: note = Probe
  source 1..28: mol_type = other DNA
tatacccacacccacccaagaacagggt

SEQ ID NO: 23587 - DNA, 29 bp, synthetic construct
  misc_feature 1..29: note = Probe
  source 1..29: mol_type = other DNA
tatacccacacccacccaagaacagggtt

SEQ ID NO: 23588 - DNA, 30 bp, synthetic construct; identical to SEQ ID NO: 7623
  misc_feature 1..30: note = Probe
  source 1..30: mol_type = other DNA

SEQ ID NO: 23589 - DNA, 31 bp, synthetic construct; identical to SEQ ID NO: 7624
  misc_feature 1..31: note = Probe
  source 1..31: mol_type = other DNA

SEQ ID NO: 23590 - DNA, 32 bp, synthetic construct; identical to SEQ ID NO: 7625
  misc_feature 1..32: note = Probe
  source 1..32: mol_type = other DNA

SEQ ID NO: 23591 - DNA, 33 bp, synthetic construct; identical to SEQ ID NO: 7626
  misc_feature 1..33: note = Probe
  source 1..33: mol_type = other DNA

SEQ ID NO: 23592 - DNA, 34 bp, synthetic construct; identical to SEQ ID NO: 7627
  misc_feature 1..34: note = Probe
  source 1..34: mol_type = other DNA

SEQ ID NO: 23593 - DNA, 35 bp, synthetic construct; identical to SEQ ID NO: 7628
  misc_feature 1..35: note = Probe
  source 1..35: mol_type = other DNA

SEQ ID NO: 23594 - DNA, 36 bp, synthetic construct; identical to SEQ ID NO: 7629
  misc_feature 1..36: note = Probe
  source 1..36: mol_type = other DNA

SEQ ID NO: 23595 - DNA, 37 bp, synthetic construct; identical to SEQ ID NO: 7630
  misc_feature 1..37: note = Probe
  source 1..37: mol_type = other DNA

SEQ ID NO: 23596 - DNA, 38 bp, synthetic construct
  misc_feature 1..38: note = Probe
  source 1..38: mol_type = other DNA
tatacccacacccacccaagaacagggtttgttaagat

SEQ ID NO: 23597 - DNA, 39 bp, synthetic construct; identical to SEQ ID NO: 7631
  misc_feature 1..39: note = Probe
  source 1..39: mol_type = other DNA

SEQ ID NO: 23598 - DNA, 40 bp, synthetic construct; identical to SEQ ID NO: 7632
  misc_feature 1..40: note = Probe
  source 1..40: mol_type = other DNA

SEQ ID NO: 23599 - DNA, 21 bp, synthetic construct
  misc_feature 1..21: note = Probe
  source 1..21: mol_type = other DNA
tatagtggtgagtatccccgc

SEQ ID NO: 23600 - DNA, 25 bp, synthetic construct
  misc_feature 1..25: note = Probe
  source 1..25: mol_type = other DNA
tatagtggttagtactctgcgttgt

SEQ ID NO: 23601 - DNA, 24 bp, synthetic construct
  misc_feature 1..24: note = Probe
  source 1..24: mol_type = other DNA
tatcattggtcgtggttgtagtcc

SEQ ID NO: 23602 - DNA, 27 bp, synthetic construct
  misc_feature 1..27: note = Probe
  source 1..27: mol_type = other DNA
tatcattggtcgtggttgtagtccgtg

SEQ ID NO: 23603 - DNA, 29 bp, synthetic construct
  misc_feature 1..29: note = Probe
  source 1..29: mol_type = other DNA
tatcattggtcgtggttgtagtccgtgcg

SEQ ID NO: 23604 - DNA, 31 bp, synthetic construct
  misc_feature 1..31: note = Probe
  source 1..31: mol_type = other DNA
tatcattggtcgtggttgtagtccgtgcgag

SEQ ID NO: 23605 - DNA, 32 bp, synthetic construct
  misc_feature 1..32: note = Probe
  source 1..32: mol_type = other DNA
tatcattggtcgtggttgtagtccgtgcgaga

SEQ ID NO: 23606 - DNA, 33 bp, synthetic construct
  misc_feature 1..33: note = Probe
  source 1..33: mol_type = other DNA
tatcattggtcgtggttgtagtccgtgcgagaa

SEQ ID NO: 23607 - DNA, 38 bp, synthetic construct; identical to SEQ ID NO: 7637
  misc_feature 1..38: note = Probe
  source 1..38: mol_type = other DNA

SEQ ID NO: 23608 - DNA, 37 bp, synthetic construct
  misc_feature 1..37: note = Probe
  source 1..37: mol_type = other DNA
tatgaggccccgggttcaatccccggcatctccagac

SEQ ID NO: 23609 - DNA, 31 bp, synthetic construct
  misc_feature 1..31: note = Probe
  source 1..31: mol_type = other DNA
tatgaggccccgggttcgatccccggcatct

SEQ ID NO: 23610 - DNA, 37 bp, synthetic construct
  misc_feature 1..37: note = Probe
  source 1..37: mol_type = other DNA
tatgaggccccgggttcgatccccggcatctccattg

SEQ ID NO: 23611 - DNA, 24 bp, synthetic construct
  misc_feature 1..24: note = Probe
  source 1..24: mol_type = other DNA
tatgataatcatatttaccaaatg

SEQ ID NO: 23612 - DNA, 35 bp, synthetic construct
  misc_feature 1..35: note = Probe
  source 1..35: mol_type = other DNA
tatgattctcgcttagggtgcgagaggtcccgggt

SEQ ID NO: 23613 - DNA, 34 bp, synthetic construct
  misc_feature 1..34: note = Probe
  source 1..34: mol_type = other DNA
tatgattctcgcttcgggtgcgagaggtcccggg

SEQ ID NO: 23614 - DNA, 35 bp, synthetic construct
  misc_feature 1..35: note = Probe
  source 1..35: mol_type = other DNA
tatgattctcgcttcgggtgcgagaggtcccgggt

SEQ ID NO: 23615 - DNA, 36 bp, synthetic construct
  misc_feature 1..36: note = Probe
  source 1..36: mol_type = other DNA
tatgattctcgcttcgggtgcgagaggtcccgggtt

SEQ ID NO: 23616 - DNA, 34 bp, synthetic construct
  misc_feature 1..34: note = Probe
  source 1..34: mol_type = other DNA
tatgattctcgctttgggtgcgagaggtcccggg

SEQ ID NO: 23617 - DNA, 35 bp, synthetic construct
  misc_feature 1..35: note = Probe
  source 1..35: mol_type = other DNA
tatgattctcgctttgggtgcgagaggtcccgggt

SEQ ID NO: 23618 - DNA, 36 bp, synthetic construct
  misc_feature 1..36: note = Probe
  source 1..36: mol_type = other DNA
tatgattctcgctttgggtgcgagaggtcccgggtt

SEQ ID NO: 23619 - DNA, 30 bp, synthetic construct
  misc_feature 1..30: note = Probe
  source 1..30: mol_type = other DNA
tcaaagcaatacactgaaaatgtttagacg

SEQ ID NO: 23620 - DNA, 36 bp, synthetic construct
  misc_feature 1..36: note = Probe
  source 1..36: mol_type = other DNA
tcaaagcaatacactgaaaatgtttagacgggctca

SEQ ID NO: 23621 - DNA, 38 bp, synthetic construct
  misc_feature 1..38: note = Probe
  source 1..38: mol_type = other DNA
tcaaagcaatacactgaaaatgtttagacgggctcaca

SEQ ID NO: 23622 - DNA, 32 bp, synthetic construct; identical to SEQ ID NO: 7643
  misc_feature 1..32: note = Probe
  source 1..32: mol_type = other DNA

SEQ ID NO: 23623 - DNA, 33 bp, synthetic construct
  misc_feature 1..33: note = Probe
  source 1..33: mol_type = other DNA
tcaaagttaaattataggctaaatcctatatat

SEQ ID NO: 23624 - DNA, 34 bp, synthetic construct
  misc_feature 1..34: note = Probe
  source 1..34: mol_type = other DNA
tcaaagttaaattataggctaaatcctatatatc

SEQ ID NO: 23625 - DNA, 35 bp, synthetic construct
  misc_feature 1..35: note = Probe
  source 1..35: mol_type = other DNA
tcaaagttaaattataggctaaatcctatatatct

SEQ ID NO: 23626 - DNA, 36 bp, synthetic construct
  misc_feature 1..36: note = Probe
  source 1..36: mol_type = other DNA
tcaaagttaaattataggctaaatcctatatatctt

SEQ ID NO: 23627 - DNA, 37 bp, synthetic construct
  misc_feature 1..37: note = Probe
  source 1..37: mol_type = other DNA
tcaaagttaaattataggctaaatcctatatatctta

SEQ ID NO: 23628 - DNA, 38 bp, synthetic construct
  misc_feature 1..38: note = Probe
  source 1..38: mol_type = other DNA
tcaaagttaaattataggctaaatcctatatatcttaa

SEQ ID NO: 23629 - DNA, 39 bp, synthetic construct
  misc_feature 1..39: note = Probe
  source 1..39: mol_type = other DNA
tcaaagttaaattataggctaaatcctatatatcttaat

SEQ ID NO: 23630 - DNA, 40 bp, synthetic construct
  misc_feature 1..40: note = Probe
  source 1..40: mol_type = other DNA
tcaaagttaaattataggctaaatcctatatatcttaatg

SEQ ID NO: 23631 - DNA, 42 bp, synthetic construct
  misc_feature 1..42: note = Probe
  source 1..42: mol_type = other DNA
tcaaagttaaattataggctaaatcctatatatcttaatggc

SEQ ID NO: 23632 - DNA, 22 bp, synthetic construct
  misc_feature 1..22: note = Probe
  source 1..22: mol_type = other DNA
tcaaatcccggacgagccccct

SEQ ID NO: 23633 - DNA, 22 bp, synthetic construct
  misc_feature 1..22: note = Probe
  source 1..22: mol_type = other DNA
tcaaatccgggtgccccctcaa

SEQ ID NO: 23634 - DNA, 16 bp, synthetic construct
  misc_feature 1..16: note = Probe
  source 1..16: mol_type = other DNA
tcaacttaacttgacc

SEQ ID NO: 23635 - DNA, 17 bp, synthetic construct
  misc_feature 1..17: note = Probe
  source 1..17: mol_type = other DNA
tcaacttaacttgaccg

SEQ ID NO: 23636 - DNA, 21 bp, synthetic construct
  misc_feature 1..21: note = Probe
  source 1..21: mol_type = other DNA
tcaacttaacttgaccgctct

SEQ ID NO: 23637 - DNA, 23 bp, synthetic construct
  misc_feature 1..23: note = Probe
  source 1..23: mol_type = other DNA
tcaacttaacttgaccgctctga

SEQ ID NO: 23638 - DNA, 24 bp, synthetic construct
  misc_feature 1..24: note = Probe
  source 1..24: mol_type = other DNA
tcaacttaacttgaccgctctgag

SEQ ID NO: 23639 - DNA, 25 bp, synthetic construct
  misc_feature 1..25: note = Probe
  source 1..25: mol_type = other DNA
tcaacttaacttgaccgctctgagc

SEQ ID NO: 23640 - DNA, 26 bp, synthetic construct
  misc_feature 1..26: note = Probe
  source 1..26: mol_type = other DNA
tcaacttaacttgaccgctctgagct

SEQ ID NO: 23641 - DNA, 38 bp, synthetic construct
  misc_feature 1..38: note = Probe
  source 1..38: mol_type = other DNA
tcaagaggtccctggttcaaatccgggtgccccctcaa

SEQ ID NO: 23642 - DNA, 22 bp, synthetic construct
  misc_feature 1..22: note = Probe
  source 1..22: mol_type = other DNA
tcaagtccctgttcgggcggca

SEQ ID NO: 23643 - DNA, 22 bp, synthetic construct
  misc_feature 1..22: note = Probe
  source 1..22: mol_type = other DNA
tcaatccccagcacctccacaa

SEQ ID NO: 23644 - DNA, 16 bp, synthetic construct
  misc_feature 1..16: note = Probe
  source 1..16: mol_type = other DNA
tcaatccccggcacct

SEQ ID NO: 23645 - DNA, 22 bp, synthetic construct
  misc_feature 1..22: note = Probe
  source 1..22: mol_type = other DNA
tcaattccccgacggggaggtg

SEQ ID NO: 23646 - DNA, 22 bp, synthetic construct
  misc_feature 1..22: note = Probe
  source 1..22: mol_type = other DNA
tcaattcccggtcagggaacca

SEQ ID NO: 23647 - DNA, 22 bp, synthetic construct
  misc_feature 1..22: note = Probe
  source 1..22: mol_type = other DNA
tcacaagaactgctaactcatg

SEQ ID NO: 23648 - DNA, 18 bp, synthetic construct
  misc_feature 1..18: note = Probe
  source 1..18: mol_type = other DNA
tcacacgcgaaaggtccc

SEQ ID NO: 23649 - DNA, 19 bp, synthetic construct
  misc_feature 1..19: note = Probe
  source 1..19: mol_type = other DNA
tcacacgcgaaaggtcccc

SEQ ID NO: 23650 - DNA, 21 bp, synthetic construct
  misc_feature 1..21: note = Probe
  source 1..21: mol_type = other DNA
tcacacgcgaaaggtccccgg

SEQ ID NO: 23651 - DNA, 23 bp, synthetic construct
  misc_feature 1..23: note = Probe
  source 1..23: mol_type = other DNA
tcacacgcgaaaggtccccggtt

SEQ ID NO: 23652 - DNA, 24 bp, synthetic construct
  misc_feature 1..24: note = Probe
  source 1..24: mol_type = other DNA
tcacacgcgaaaggtccccggttc

SEQ ID NO: 23653 - DNA, 25 bp, synthetic construct
  misc_feature 1..25: note = Probe
  source 1..25: mol_type = other DNA
tcacacgcgaaaggtccccggttcg

SEQ ID NO: 23654 - DNA, 24 bp, synthetic construct
  misc_feature 1..24: note = Probe
  source 1..24: mol_type = other DNA
tcacacgcgaaaggtccccggttt

SEQ ID NO: 23655 - DNA, 21 bp, synthetic construct
  misc_feature 1..21: note = Probe
  source 1..21: mol_type = other DNA
tcacacggggcacaataattt

SEQ ID NO: 23656 - DNA, 22 bp, synthetic construct
  misc_feature 1..22: note = Probe
  source 1..22: mol_type = other DNA
tcacacggggcacaataatttt

SEQ ID NO: 23657 - DNA, 23 bp, synthetic construct
  misc_feature 1..23: note = Probe
  source 1..23: mol_type = other DNA
tcacacggggcagtctaacgttt

SEQ ID NO: 23658 - DNA, 16 bp, synthetic construct
  misc_feature 1..16: note = Probe
  source 1..16: mol_type = other DNA
tcacatcaccccataa

SEQ ID NO: 23659 - DNA, 17 bp, synthetic construct
  misc_feature 1..17: note = Probe
  source 1..17: mol_type = other DNA
tcacatcaccccataaa

SEQ ID NO: 23660 - DNA, 18 bp, synthetic construct
  misc_feature 1..18: note = Probe
  source 1..18: mol_type = other DNA
tcacatcaccccataaac

SEQ ID NO: 23661 - DNA, 19 bp, synthetic construct
  misc_feature 1..19: note = Probe
  source 1..19: mol_type = other DNA
tcacatcaccccataaaca

SEQ ID NO: 23662 - DNA, 21 bp, synthetic construct
  misc_feature 1..21: note = Probe
  source 1..21: mol_type = other DNA
tcacatcaccccataaacaaa

SEQ ID NO: 23663 - DNA, 22 bp, synthetic construct
  misc_feature 1..22: note = Probe
  source 1..22: mol_type = other DNA
tcacatcaccccataaacaaat

SEQ ID NO: 23664 - DNA, 41 bp, synthetic construct; identical to SEQ ID NO: 7674
  misc_feature 1..41: note = Probe
  source 1..41: mol_type = other DNA

SEQ ID NO: 23665 - DNA, 41 bp, synthetic construct; identical to SEQ ID NO: 7677
  misc_feature 1..41: note = Probe
  source 1..41: mol_type = other DNA

SEQ ID NO: 23666 - DNA, 38 bp, synthetic construct
  misc_feature 1..38: note = Probe
  source 1..38: mol_type = other DNA
tcaccgccgcggcccgggttcgattcccggtcagggaa

SEQ ID NO: 23667 - DNA, 39 bp, synthetic construct; identical to SEQ ID NO: 7679
  misc_feature 1..39: note = Probe
  source 1..39: mol_type = other DNA

SEQ ID NO: 23668 - DNA, 39 bp, synthetic construct; identical to SEQ ID NO: 7680
  misc_feature 1..39: note = Probe
  source 1..39: mol_type = other DNA

SEQ ID NO: 23669 - DNA, 39 bp, synthetic construct; identical to SEQ ID NO: 7681
  misc_feature 1..39: note = Probe
  source 1..39: mol_type = other DNA

SEQ ID NO: 23670 - DNA, 41 bp, synthetic construct; identical to SEQ ID NO: 7682
  misc_feature 1..41: note = Probe
  source 1..41: mol_type = other DNA

SEQ ID NO: 23671 - DNA, 17 bp, synthetic construct
  misc_feature 1..17: note = Probe
  source 1..17: mol_type = other DNA
tcacgcgggagaccggg

SEQ ID NO: 23672 - DNA, 39 bp, synthetic construct; identical to SEQ ID NO: 7689
  misc_feature 1..39: note = Probe
  source 1..39: mol_type = other DNA

SEQ ID NO: 23673 - DNA, 41 bp, synthetic construct; identical to SEQ ID NO: 7691
  misc_feature 1..41: note = Probe
  source 1..41: mol_type = other DNA

SEQ ID NO: 23674 - DNA, 33 bp, synthetic construct; identical to SEQ ID NO: 1619
  misc_feature 1..33: note = Probe
  source 1..33: mol_type = other DNA

SEQ ID NO: 23675 - DNA, 37 bp, synthetic construct; identical to SEQ ID NO: 7698
  misc_feature 1..37: note = Probe
  source 1..37: mol_type = other DNA

SEQ ID NO: 23676 - DNA, 38 bp, synthetic construct; identical to SEQ ID NO: 1623
  misc_feature 1..38: note = Probe
  source 1..38: mol_type = other DNA

SEQ ID NO: 23677 - DNA, 39 bp, synthetic construct; identical to SEQ ID NO: 7699
  misc_feature 1..39: note = Probe
  source 1..39: mol_type = other DNA

SEQ ID NO: 23678 - DNA, 40 bp, synthetic construct; identical to SEQ ID NO: 7700
  misc_feature 1..40: note = Probe
  source 1..40: mol_type = other DNA

SEQ ID NO: 23679 - DNA, 41 bp, synthetic construct; identical to SEQ ID NO: 7701
  misc_feature 1..41: note = Probe
  source 1..41: mol_type = other DNA

SEQ ID NO: 23680 - DNA, 49 bp, synthetic construct; identical to SEQ ID NO: 7704
  misc_feature 1..49: note = Probe
  source 1..49: mol_type = other DNA

SEQ ID NO: 23681 - DNA, 50 bp, synthetic construct; identical to SEQ ID NO: 7705
  misc_feature 1..50: note = Probe
  source 1..50: mol_type = other DNA

SEQ ID NO: 23682 - DNA, 40 bp, synthetic construct; identical to SEQ ID NO: 7706
  misc_feature 1..40: note = Probe
  source 1..40: mol_type = other DNA

SEQ ID NO: 23683 - DNA, 41 bp, synthetic construct; identical to SEQ ID NO: 7707
  misc_feature 1..41: note = Probe
  source 1..41: mol_type = other DNA

SEQ ID NO: 23684 - DNA, 41 bp, synthetic construct; identical to SEQ ID NO: 7709
  misc_feature 1..41: note = Probe
  source 1..41: mol_type = other DNA

SEQ ID NO: 23685 - DNA, 39 bp, synthetic construct; identical to SEQ ID NO: 7711
  misc_feature 1..39: note = Probe
  source 1..39: mol_type = other DNA

SEQ ID NO: 23686 - DNA, 40 bp, synthetic construct; identical to SEQ ID NO: 7715
  misc_feature 1..40: note = Probe
  source 1..40: mol_type = other DNA

SEQ ID NO: 23687 - DNA, 41 bp, synthetic construct; identical to SEQ ID NO: 7716
  misc_feature 1..41: note = Probe
  source 1..41: mol_type = other DNA

SEQ ID NO: 23688 - DNA, 42 bp, synthetic construct; identical to SEQ ID NO: 7717
  misc_feature 1..42: note = Probe
  source 1..42: mol_type = other DNA

SEQ ID NO: 23689 - DNA, 49 bp, synthetic construct; identical to SEQ ID NO: 7719
  misc_feature 1..49: note = Probe
  source 1..49: mol_type = other DNA

SEQ ID NO: 23690 - DNA, 50 bp, synthetic construct; identical to SEQ ID NO: 7720
  misc_feature 1..50: note = Probe
  source 1..50: mol_type = other DNA

SEQ ID NO: 23691 - DNA, 42 bp, synthetic construct; identical to SEQ ID NO: 7721
  misc_feature 1..42: note = Probe
  source 1..42: mol_type = other DNA

SEQ ID NO: 23692 - DNA, 41 bp, synthetic construct; identical to SEQ ID NO: 7723
  misc_feature 1..41: note = Probe
  source 1..41: mol_type = other DNA

SEQ ID NO: 23693 - DNA, 31 bp, synthetic construct
  misc_feature 1..31: note = Probe
  source 1..31: mol_type = other DNA
tcacgttcgcctaacacgcgaaaggtccccg

SEQ ID NO: 23694 - DNA, 31 bp, synthetic construct
  misc_feature 1..31: note = Probe
  source 1..31: mol_type = other DNA
tcacgttcgcctcacacgcgaaaggtccccg

SEQ ID NO: 23695 - DNA, 32 bp, synthetic construct
  misc_feature 1..32: note = Probe
  source 1..32: mol_type = other DNA
tcacgttcgcctcacacgcgaaaggtccccgg

SEQ ID NO: 23696 - DNA, 33 bp, synthetic construct
  misc_feature 1..33: note = Probe
  source 1..33: mol_type = other DNA
tcacgttcgcctcacacgcgaaaggtccccggt

SEQ ID NO: 23697 - DNA, 33 bp, synthetic construct; identical to SEQ ID NO: 7728
  misc_feature 1..33: note = Probe
  source 1..33: mol_type = other DNA

SEQ ID NO: 23698 - DNA, 38 bp, synthetic construct; identical to SEQ ID NO: 7729
  misc_feature 1..38: note = Probe
  source 1..38: mol_type = other DNA

SEQ ID NO: 23699 - DNA, 33 bp, synthetic construct
  misc_feature 1..33: note = Probe
  source 1..33: mol_type = other DNA
tcagaagattgagggttcgagtcccttcgtggt

SEQ ID NO: 23700 - DNA, 33 bp, synthetic construct
  misc_feature 1..33: note = Probe
  source 1..33: mol_type = other DNA
tcagaagattgcaggttcgagtcctgccgcggt

SEQ ID NO: 23701 - DNA, 38 bp, synthetic construct
  misc_feature 1..38: note = Probe
  source 1..38: mol_type = other DNA
tcagaaggctgcgtgttcgaatcacgtcggggtcaaac

SEQ ID NO: 23702 - DNA, 17 bp, synthetic construct
  misc_feature 1..17: note = Probe
  source 1..17: mol_type = other DNA
tcagaaggtctcacttt

SEQ ID NO: 23703 - DNA, 31 bp, synthetic construct
  misc_feature 1..31: note = Probe
  source 1..31: mol_type = other DNA
tcagaaggttgcgtgttcaaatcacgtcggg

SEQ ID NO: 23704 - DNA, 38 bp, synthetic construct
  misc_feature 1..38: note = Probe
  source 1..38: mol_type = other DNA
tcagaaggttgcgtgttcaaatcacgtcggggtcaaac

SEQ ID NO: 23705 - DNA, 38 bp, synthetic construct
  misc_feature 1..38: note = Probe
  source 1..38: mol_type = other DNA
tcagaaggttgcgtgttcaaatcacgtcggggtcaaca

SEQ ID NO: 23706 - DNA, 31 bp, synthetic construct
  misc_feature 1..31: note = Probe
  source 1..31: mol_type = other DNA
tcagaaggttgcgtgttcaagtcacgtcggg

SEQ ID NO: 23707 - DNA, 32 bp, synthetic construct
  misc_feature 1..32: note = Probe
  source 1..32: mol_type = other DNA
tcagaaggttgcgtgttcaagtcacgtcgggg

SEQ ID NO: 23708 - DNA, 22 bp, synthetic construct
  misc_feature 1..22: note = Probe
  source 1..22: mol_type = other DNA
tcagagggggcagctgccattt

SEQ ID NO: 23709 - DNA, 24 bp, synthetic construct
  misc_feature 1..24: note = Probe
  source 1..24: mol_type = other DNA
tcagctaaataagctatcgggccc

SEQ ID NO: 23710 - DNA, 25 bp, synthetic construct
  misc_feature 1..25: note = Probe
  source 1..25: mol_type = other DNA
tcagctaaataagctatcgggccca

SEQ ID NO: 23711 - DNA, 26 bp, synthetic construct
  misc_feature 1..26: note = Probe
  source 1..26: mol_type = other DNA
tcagctaaataagctatcgggcccat

SEQ ID NO: 23712 - DNA, 27 bp, synthetic construct
  misc_feature 1..27: note = Probe
  source 1..27: mol_type = other DNA
tcagctaaataagctatcgggcccata

SEQ ID NO: 23713 - DNA, 28 bp, synthetic construct
  misc_feature 1..28: note = Probe
  source 1..28: mol_type = other DNA
tcagctaaataagctatcgggcccatac

SEQ ID NO: 23714 - DNA, 36 bp, synthetic construct; identical to SEQ ID NO: 7736
  misc_feature 1..36: note = Probe
  source 1..36: mol_type = other DNA

SEQ ID NO: 23715 - DNA, 37 bp, synthetic construct; identical to SEQ ID NO: 7737
  misc_feature 1..37: note = Probe
  source 1..37: mol_type = other DNA

SEQ ID NO: 23716 - DNA, 38 bp, synthetic construct
  misc_feature 1..38: note = Probe
  source 1..38: mol_type = other DNA
tcagctaaataagctatcgggcccataccccgaaaatg

SEQ ID NO: 23717 - DNA, 23 bp, synthetic construct
  misc_feature 1..23: note = Probe
  source 1..23: mol_type = other DNA
tcaggatggccgagcggtctaag

SEQ ID NO: 23718 - DNA, 24 bp, synthetic construct
  misc_feature 1..24: note = Probe
  source 1..24: mol_type = other DNA
tcaggatggccgagtggtctaagg

SEQ ID NO: 23719 - DNA, 27 bp, synthetic construct
  misc_feature 1..27: note = Probe
  source 1..27: mol_type = other DNA
tcagggatgggttcgattctcatagtc

SEQ ID NO: 23720 - DNA, 28 bp, synthetic construct
  misc_feature 1..28: note = Probe
  source 1..28: mol_type = other DNA
tcagggatgggttcgattctcatagtcc

SEQ ID NO: 23721 - DNA, 31 bp, synthetic construct
  misc_feature 1..31: note = Probe
  source 1..31: mol_type = other DNA
tcagggatgggttcgattctcatagtcctag

SEQ ID NO: 23722 - DNA, 32 bp, synthetic construct
  misc_feature 1..32: note = Probe
  source 1..32: mol_type = other DNA
tcagggatgggttcgattctcatagtcctaga

SEQ ID NO: 23723 - DNA, 34 bp, synthetic construct
  misc_feature 1..34: note = Probe
  source 1..34: mol_type = other DNA
tcagggatgggttcgattctcatagtcctagaaa

SEQ ID NO: 23724 - DNA, 31 bp, synthetic construct; identical to SEQ ID NO: 7745
  misc_feature 1..31: note = Probe
  source 1..31: mol_type = other DNA

SEQ ID NO: 23725 - DNA, 22 bp, synthetic construct
  misc_feature 1..22: note = Probe
  source 1..22: mol_type = other DNA
tcagtggtagaattctcgcctg

SEQ ID NO: 23726 - DNA, 32 bp, synthetic construct
  misc_feature 1..32: note = Probe
  source 1..32: mol_type = other DNA
tcagttgatgcagagtggggttttgcagtcct

SEQ ID NO: 23727 - DNA, 34 bp, synthetic construct
  misc_feature 1..34: note = Probe
  source 1..34: mol_type = other DNA
tcagttgatgcagagtggggttttgcagtcctta

SEQ ID NO: 23728 - DNA, 36 bp, synthetic construct
  misc_feature 1..36: note = Probe
  source 1..36: mol_type = other DNA
tcagttgatgcagagtggggttttgcagtccttagc

SEQ ID NO: 23729 - DNA, 37 bp, synthetic construct; identical to SEQ ID NO: 7747
  misc_feature 1..37: note = Probe
  source 1..37: mol_type = other DNA

SEQ ID NO: 23730 - DNA, 40 bp, synthetic construct; identical to SEQ ID NO: 7750
  misc_feature 1..40: note = Probe
  source 1..40: mol_type = other DNA

SEQ ID NO: 23731 - DNA, 41 bp, synthetic construct; identical to SEQ ID NO: 7751
  misc_feature 1..41: note = Probe
  source 1..41: mol_type = other DNA

SEQ ID NO: 23732 - DNA, 15 bp, synthetic construct
  misc_feature 1..15: note = Probe
  source 1..15: mol_type = other DNA
tcatattgaattgca

SEQ ID NO: 23733 - DNA, 30 bp, synthetic construct
  misc_feature 1..30: note = Probe
  source 1..30: mol_type = other DNA
tcatgcaagattcccattcttgcgacccgg

SEQ ID NO: 23734 - DNA, 33 bp, synthetic construct
  misc_feature 1..33: note = Probe
  source 1..33: mol_type = other DNA
tcatgcaagattcccattcttgcgacccgggtt

SEQ ID NO: 23735 - DNA, 34 bp, synthetic construct
  misc_feature 1..34: note = Probe
  source 1..34: mol_type = other DNA
tcatgcaagattcccattcttgcgacccgggttc

SEQ ID NO: 23736 - DNA, 17 bp, synthetic construct
  misc_feature 1..17: note = Probe
  source 1..17: mol_type = other DNA
tcatgcccccatgtcta

SEQ ID NO: 23737 - DNA, 20 bp, synthetic construct
  misc_feature 1..20: note = Probe
  source 1..20: mol_type = other DNA
tcatgcccccatgtctaaca

SEQ ID NO: 23738 - DNA, 27 bp, synthetic construct
  misc_feature 1..27: note = Probe
  source 1..27: mol_type = other DNA
tcatgcccccatgtctaacaacatggc

SEQ ID NO: 23739 - DNA, 28 bp, synthetic construct
  misc_feature 1..28: note = Probe
  source 1..28: mol_type = other DNA
tcatgcccccatgtctaacaacatggct

SEQ ID NO: 23740 - DNA, 29 bp, synthetic construct
  misc_feature 1..29: note = Probe
  source 1..29: mol_type = other DNA
tcatgcccccatgtctaacaacatggctt

SEQ ID NO: 23741 - DNA, 30 bp, synthetic construct; identical to SEQ ID NO: 7761
  misc_feature 1..30: note = Probe
  source 1..30: mol_type = other DNA

SEQ ID NO: 23742 - DNA, 31 bp, synthetic construct; identical to SEQ ID NO: 7762
  misc_feature 1..31: note = Probe
  source 1..31: mol_type = other DNA

SEQ ID NO: 23743 - DNA, 32 bp, synthetic construct; identical to SEQ ID NO: 7763
  misc_feature 1..32: note = Probe
  source 1..32: mol_type = other DNA

SEQ ID NO: 23744 - DNA, 33 bp, synthetic construct; identical to SEQ ID NO: 7764
  misc_feature 1..33: note = Probe
  source 1..33: mol_type = other DNA

SEQ ID NO: 23745 - DNA, 34 bp, synthetic construct; identical to SEQ ID NO: 7765
  misc_feature 1..34: note = Probe
  source 1..34: mol_type = other DNA

SEQ ID NO: 23746 - DNA, 35 bp, synthetic construct; identical to SEQ ID NO: 7766
  misc_feature 1..35: note = Probe
  source 1..35: mol_type = other DNA

SEQ ID NO: 23747 - DNA, 36 bp, synthetic construct; identical to SEQ ID NO: 7767
  misc_feature 1..36: note = Probe
  source 1..36: mol_type = other DNA

SEQ ID NO: 23748 - DNA, 37 bp, synthetic construct; identical to SEQ ID NO: 7768
  misc_feature 1..37: note = Probe
  source 1..37: mol_type = other DNA

SEQ ID NO: 23749 - DNA, 38 bp, synthetic construct
  misc_feature 1..38: note = Probe
  source 1..38: mol_type = other DNA
tcatgcccccatgtctaacaacatggctttctcaactt

SEQ ID NO: 23750 - DNA, 39 bp, synthetic construct
  misc_feature 1..39: note = Probe
  source 1..39: mol_type = other DNA
tcatgcccccatgtctaacaacatggctttctcaacttt

SEQ ID NO: 23751 - DNA, 33 bp, synthetic construct; identical to SEQ ID NO: 7769
  misc_feature 1..33: note = Probe
  source 1..33: mol_type = other DNA

SEQ ID NO: 23752 - DNA, 30 bp, synthetic construct
  misc_feature 1..30: note = Probe
  source 1..30: mol_type = other DNA
tcattggtcgtggttgtagtccgtgcgaga

SEQ ID NO: 23753 - DNA, 31 bp, synthetic construct
  misc_feature 1..31: note = Probe
  source 1..31: mol_type = other DNA
tcattggtcgtggttgtagtccgtgcgagaa

SEQ ID NO: 23754 - DNA, 19 bp, synthetic construct
  misc_feature 1..19: note = Probe
  source 1..19: mol_type = other DNA
tccaagcagttgacccggg

SEQ ID NO: 23755 - DNA, 20 bp, synthetic construct
  misc_feature 1..20: note = Probe
  source 1..20: mol_type = other DNA
tccaagcagttgacccgggt

SEQ ID NO: 23756 - DNA, 21 bp, synthetic construct
  misc_feature 1..21: note = Probe
  source 1..21: mol_type = other DNA
tccaagcagttgacccgggtt

SEQ ID NO: 23757 - DNA, 23 bp, synthetic construct
  misc_feature 1..23: note = Probe
  source 1..23: mol_type = other DNA
tccaagcagttgacccgggttcg

SEQ ID NO: 23758 - DNA, 42 bp, synthetic construct
  misc_feature 1..42: note = Probe
  source 1..42: mol_type = other DNA
tccaagcagttgacccgggttcgattcccggccaacgcaagt

SEQ ID NO: 23759 - DNA, 42 bp, synthetic construct
  misc_feature 1..42: note = Probe
  source 1..42: mol_type = other DNA
tccaagcagttgacccgggttcgattcccggccaacgcagtg

SEQ ID NO: 23760 - DNA, 34 bp, synthetic construct
  misc_feature 1..34: note = Probe
  source 1..34: mol_type = other DNA
tccaatggaggcgtgggttcgaatcccacttctg

SEQ ID NO: 23761 - DNA, 22 bp, synthetic construct
  misc_feature 1..22: note = Probe
  source 1..22: mol_type = other DNA
tccaatgggggttccccgcgca

SEQ ID NO: 23762 - DNA, 23 bp, synthetic construct
  misc_feature 1..23: note = Probe
  source 1..23: mol_type = other DNA
tccaatgggggttccccgcgcag

SEQ ID NO: 23763 - DNA, 24 bp, synthetic construct
  misc_feature 1..24: note = Probe
  source 1..24: mol_type = other DNA
tccaatgggggttccccgcgcagg

SEQ ID NO: 23764 - DNA, 25 bp, synthetic construct
  misc_feature 1..25: note = Probe
  source 1..25: mol_type = other DNA
tccaatgggggttccccgcgcaggt

SEQ ID NO: 23765 - DNA, 26 bp, synthetic construct
  misc_feature 1..26: note = Probe
  source 1..26: mol_type = other DNA
tccaatgggggttccccgcgcaggtt

SEQ ID NO: 23766 - DNA, 27 bp, synthetic construct
  misc_feature 1..27: note = Probe
  source 1..27: mol_type = other DNA
tccaatgggggttccccgcgcaggttc

SEQ ID NO: 23767 - DNA, 22 bp, synthetic construct
  misc_feature 1..22: note = Probe
  source 1..22: mol_type = other DNA
tccaatggggtctccccgcgca

SEQ ID NO: 23768 - DNA, 23 bp, synthetic construct
  misc_feature 1..23: note = Probe
  source 1..23: mol_type = other DNA
tccaatggggtctccccgcgcag

SEQ ID NO: 23769 - DNA, 24 bp, synthetic construct
  misc_feature 1..24: note = Probe
  source 1..24: mol_type = other DNA
tccaatggggtctccccgcgcagg

SEQ ID NO: 23770 - DNA, 26 bp, synthetic construct
  misc_feature 1..26: note = Probe
  source 1..26: mol_type = other DNA
tccaatggggtctccccgcgcaggtt

SEQ ID NO: 23771 - DNA, 27 bp, synthetic construct
  misc_feature 1..27: note = Probe
  source 1..27: mol_type = other DNA
tccaatggggtctccccgcgcaggttc

SEQ ID NO: 23772 - DNA, 28 bp, synthetic construct
  misc_feature 1..28: note = Probe
  source 1..28: mol_type = other DNA
tccaatggggtctccccgcgcaggttcg

SEQ ID NO: 23773 - DNA, 20 bp, synthetic construct
  misc_feature 1..20: note = Probe
  source 1..20: mol_type = other DNA
tccaatggggtttccccgca

SEQ ID NO: 23774 - DNA, 21 bp, synthetic construct
  misc_feature 1..21: note = Probe
  source 1..21: mol_type = other DNA
tccaatggggtttccccgcac

SEQ ID NO: 23775 - DNA, 26 bp, synthetic construct
  misc_feature 1..26: note = Probe
  source 1..26: mol_type = other DNA
tccaatggggtttccccgcacaggtt

SEQ ID NO: 23776 - DNA, 27 bp, synthetic construct
  misc_feature 1..27: note = Probe
  source 1..27: mol_type = other DNA
tccaatggggtttccccgcacaggttc

SEQ ID NO: 23777 - DNA, 28 bp, synthetic construct
  misc_feature 1..28: note = Probe
  source 1..28: mol_type = other DNA
tccaatggggtttccccgcacaggttcg

SEQ ID NO: 23778 - DNA, 38 bp, synthetic construct
  misc_feature 1..38: note = Probe
  source 1..38: mol_type = other DNA
tccaattaactagttttgacaacattcaaaaaagagta

SEQ ID NO: 23779 - DNA, 40 bp, synthetic construct; identical to SEQ ID NO: 7776
  misc_feature 1..40: note = Probe
  source 1..40: mol_type = other DNA

SEQ ID NO: 23780 - DNA, 41 bp, synthetic construct; identical to SEQ ID NO: 7777
  misc_feature 1..41: note = Probe
  source 1..41: mol_type = other DNA

SEQ ID NO: 23781 - DNA, 16 bp, synthetic construct
  misc_feature 1..16: note = Probe
  source 1..16: mol_type = other DNA
tccagcgatccgagtt

SEQ ID NO: 23782 - DNA, 17 bp, synthetic construct
  misc_feature 1..17: note = Probe
  source 1..17: mol_type = other DNA
tccagcgatccgagttc

SEQ ID NO: 23783 - DNA, 18 bp, synthetic construct
  misc_feature 1..18: note = Probe
  source 1..18: mol_type = other DNA
tccagcgatccgagttca

SEQ ID NO: 23784 - DNA, 31 bp, synthetic construct
  misc_feature 1..31: note = Probe
  source 1..31: mol_type = other DNA
tccagcgatccgagttcaaatctcggtggaa

SEQ ID NO: 23785 - DNA, 32 bp, synthetic construct; identical to SEQ ID NO: 7779
  misc_feature 1..32: note = Probe
  source 1..32: mol_type = other DNA

SEQ ID NO: 23786 - DNA, 35 bp, synthetic construct
  misc_feature 1..35: note = Probe
  source 1..35: mol_type = other DNA
tccagcgatccgagttcaaatctcggtggaacctg

SEQ ID NO: 23787 - DNA, 36 bp, synthetic construct
  misc_feature 1..36: note = Probe
  source 1..36: mol_type = other DNA
tccagcgatccgagttcaaatctcggtggaacctgc

SEQ ID NO: 23788 - DNA, 37 bp, synthetic construct; identical to SEQ ID NO: 7781
  misc_feature 1..37: note = Probe
  source 1..37: mol_type = other DNA

SEQ ID NO: 23789 - DNA, 35 bp, synthetic construct
  misc_feature 1..35: note = Probe
  source 1..35: mol_type = other DNA
tccagcgatccgagttcaaatctcggtggaacctt

SEQ ID NO: 23790 - DNA, 31 bp, synthetic construct
  misc_feature 1..31: note = Probe
  source 1..31: mol_type = other DNA
tccagcgatccgagttcaaatctcggtggga

SEQ ID NO: 23791 - DNA, 32 bp, synthetic construct
  misc_feature 1..32: note = Probe
  source 1..32: mol_type = other DNA
tccagcgatccgagttcaaatctcggtgggac

SEQ ID NO: 23792 - DNA, 33 bp, synthetic construct
  misc_feature 1..33: note = Probe
  source 1..33: mol_type = other DNA
tccagcgatccgagttcaaatctcggtgggacc

SEQ ID NO: 23793 - DNA, 37 bp, synthetic construct; identical to SEQ ID NO: 7783
  misc_feature 1..37: note = Probe
  source 1..37: mol_type = other DNA

SEQ ID NO: 23794 - DNA, 34 bp, synthetic construct
  misc_feature 1..34: note = Probe
  source 1..34: mol_type = other DNA
tccagcgatccgagttcgagtctcggtggaacct

SEQ ID NO: 23795 - DNA, 37 bp, synthetic construct; identical to SEQ ID NO: 7784
  misc_feature 1..37: note = Probe
  source 1..37: mol_type = other DNA

SEQ ID NO: 23796 - DNA, 16 bp, synthetic construct
  misc_feature 1..16: note = Probe
  source 1..16: mol_type = other DNA
tccaggtgccccctcc

SEQ ID NO: 23797 - DNA, 21 bp, synthetic construct
  misc_feature 1..21: note = Probe
  source 1..21: mol_type = other DNA
tccagtctcttcgggggcgtg

SEQ ID NO: 23798 - DNA, 46 bp, synthetic construct
  misc_feature 1..46: note = Probe
  source 1..46: mol_type = other DNA
tccagtctcttcgggggcgtgggttcgaatcccaccgctgccaggt

SEQ ID NO: 23799 - DNA, 28 bp, synthetic construct
  misc_feature 1..28: note = Probe
  source 1..28: mol_type = other DNA
tccatagtgtagtggttatcacatctgc

SEQ ID NO: 23800 - DNA, 25 bp, synthetic construct
  misc_feature 1..25: note = Probe
  source 1..25: mol_type = other DNA
tccatagtgtagtggttatcacgtc

SEQ ID NO: 23801 - DNA, 32 bp, synthetic construct
  misc_feature 1..32: note = Probe
  source 1..32: mol_type = other DNA
tccatagtgtagtggttatcacgtctgcttta

SEQ ID NO: 23802 - DNA, 33 bp, synthetic construct; identical to SEQ ID NO: 1630
  misc_feature 1..33: note = Probe
  source 1..33: mol_type = other DNA

SEQ ID NO: 23803 - DNA, 22 bp, synthetic construct
  misc_feature 1..22: note = Probe
  source 1..22: mol_type = other DNA
tccattggggtctccccgcgca

SEQ ID NO: 23804 - DNA, 23 bp, synthetic construct
  misc_feature 1..23: note = Probe
  source 1..23: mol_type = other DNA
tccattggggtctccccgcgcag

SEQ ID NO: 23805 - DNA, 24 bp, synthetic construct
  misc_feature 1..24: note = Probe
  source 1..24: mol_type = other DNA
tccattggggtctccccgcgcagg

SEQ ID NO: 23806 - DNA, 26 bp, synthetic construct
  misc_feature 1..26: note = Probe
  source 1..26: mol_type = other DNA
tccattggggtctccccgcgcaggtt

SEQ ID NO: 23807 - DNA, 27 bp, synthetic construct
  misc_feature 1..27: note = Probe
  source 1..27: mol_type = other DNA
tccattggggtctccccgcgcaggttc

SEQ ID NO: 23808 - DNA, 27 bp, synthetic construct
  misc_feature 1..27: note = Probe
  source 1..27: mol_type = other DNA
tccattggggtttccccgcgcaggttc

SEQ ID NO: 23809 - DNA, 31 bp, synthetic construct
  misc_feature 1..31: note = Probe
  source 1..31: mol_type = other DNA
tccattggggtttccccgcgcaggttcgaat

SEQ ID NO: 23810 - DNA, 38 bp, synthetic construct
  misc_feature 1..38: note = Probe
  source 1..38: mol_type = other DNA
tccattggggtttccccgcgcaggttcgaatcctgccg

SEQ ID NO: 23811 - DNA, 39 bp, synthetic construct
  misc_feature 1..39: note = Probe
  source 1..39: mol_type = other DNA
tccattggggtttccccgcgcaggttcgaatcctgccga

SEQ ID NO: 23812 - DNA, 42 bp, synthetic construct
  misc_feature 1..42: note = Probe
  source 1..42: mol_type = other DNA
tccattggggtttccccgcgcaggttcgaatcctgccgacta

SEQ ID NO: 23813 - DNA, 44 bp, synthetic construct
  misc_feature 1..44: note = Probe
  source 1..44: mol_type = other DNA
tccattggtcttaggccccaaaaattttggtgcaactccaaata

SEQ ID NO: 23814 - DNA, 42 bp, synthetic construct
  misc_feature 1..42: note = Probe
  source 1..42: mol_type = other DNA
tccattgtgctttgcacgcgtgggttcgaatcccatcctcgt

SEQ ID NO: 23815 - DNA, 16 bp, synthetic construct
  misc_feature 1..16: note = Probe
  source 1..16: mol_type = other DNA
tcccacatggtctagc

SEQ ID NO: 23816 - DNA, 17 bp, synthetic construct
  misc_feature 1..17: note = Probe
  source 1..17: mol_type = other DNA
tcccacatggtctagcg

SEQ ID NO: 23817 - DNA, 18 bp, synthetic construct
  misc_feature 1..18: note = Probe
  source 1..18: mol_type = other DNA
tcccacatggtctagcgg

SEQ ID NO: 23818 - DNA, 20 bp, synthetic construct
  misc_feature 1..20: note = Probe
  source 1..20: mol_type = other DNA
tcccacatggtctagcggtt

SEQ ID NO: 23819 - DNA, 22 bp, synthetic construct
  misc_feature 1..22: note = Probe
  source 1..22: mol_type = other DNA
tcccacatggtctagcggttag

SEQ ID NO: 23820 - DNA, 24 bp, synthetic construct
  misc_feature 1..24: note = Probe
  source 1..24: mol_type = other DNA
tcccacatggtctagcggttagga

SEQ ID NO: 23821 - DNA, 25 bp, synthetic construct
  misc_feature 1..25: note = Probe
  source 1..25: mol_type = other DNA
tcccacatggtctagcggttaggat

SEQ ID NO: 23822 - DNA, 38 bp, synthetic construct; identical to SEQ ID NO: 7794
  misc_feature 1..38: note = Probe
  source 1..38: mol_type = other DNA

SEQ ID NO: 23823 - DNA, 42 bp, synthetic construct
  misc_feature 1..42: note = Probe
  source 1..42: mol_type = other DNA
tcccacatggtctagcggttaggattcctggttttcacccag

SEQ ID NO: 23824 - DNA, 44 bp, synthetic construct
  misc_feature 1..44: note = Probe
  source 1..44: mol_type = other DNA
tcccacatggtctagcggttaggattcctggttttcacccaggc

SEQ ID NO: 23825 - DNA, 49 bp, synthetic construct; identical to SEQ ID NO: 7797
  misc_feature 1..49: note = Probe
  source 1..49: mol_type = other DNA

SEQ ID NO: 23826 - DNA, 16 bp, synthetic construct
  misc_feature 1..16: note = Probe
  source 1..16: mol_type = other DNA
tcccaccgctgccaca

SEQ ID NO: 23827 - DNA, 17 bp, synthetic construct
  misc_feature 1..17: note = Probe
  source 1..17: mol_type = other DNA
tcccaccgctgccacac

SEQ ID NO: 23828 - DNA, 23 bp, synthetic construct
  misc_feature 1..23: note = Probe
  source 1..23: mol_type = other DNA
tcccacttctgacacatactttt

SEQ ID NO: 23829 - DNA, 33 bp, synthetic construct
  misc_feature 1..33: note = Probe
  source 1..33: mol_type = other DNA
tcccagggtcgtgggttcgagccccacgttggg

SEQ ID NO: 23830 - DNA, 16 bp, synthetic construct
  misc_feature 1..16: note = Probe
  source 1..16: mol_type = other DNA
tcccatatggtctagc

SEQ ID NO: 23831 - DNA, 23 bp, synthetic construct
  misc_feature 1..23: note = Probe
  source 1..23: mol_type = other DNA
tcccatatggtctagcggttagg

SEQ ID NO: 23832 - DNA, 24 bp, synthetic construct
  misc_feature 1..24: note = Probe
  source 1..24: mol_type = other DNA
tcccatatggtctagcggttagga

SEQ ID NO: 23833 - DNA, 26 bp, synthetic construct
  misc_feature 1..26: note = Probe
  source 1..26: mol_type = other DNA
tcccatatggtctagcggttaggatt

SEQ ID NO: 23834 - DNA, 49 bp, synthetic construct
  misc_feature 1..49: note = Probe
  source 1..49: mol_type = other DNA
tcccatatggtctagcggttaggattcctggttttcacccaggtggccc

SEQ ID NO: 23835 - DNA, 16 bp, synthetic construct
  misc_feature 1..16: note = Probe
  source 1..16: mol_type = other DNA
tccccagcacctccac

SEQ ID NO: 23836 - DNA, 16 bp, synthetic construct
  misc_feature 1..16: note = Probe
  source 1..16: mol_type = other DNA
tccccagtacctccag

SEQ ID NO: 23837 - DNA, 15 bp, synthetic construct
  misc_feature 1..15: note = Probe
  source 1..15: mol_type = other DNA
tcccccctacaattt

SEQ ID NO: 23838 - DNA, 30 bp, synthetic construct
  misc_feature 1..30: note = Probe
  source 1..30: mol_type = other DNA
tccccgcacaggttcgaatcctgttcgtga

SEQ ID NO: 23839 - DNA, 16 bp, synthetic construct
  misc_feature 1..16: note = Probe
  source 1..16: mol_type = other DNA
tccccggcacctccaa

SEQ ID NO: 23840 - DNA, 17 bp, synthetic construct
  misc_feature 1..17: note = Probe
  source 1..17: mol_type = other DNA
tccccggcacctccaaa

SEQ ID NO: 23841 - DNA, 18 bp, synthetic construct
  misc_feature 1..18: note = Probe
  source 1..18: mol_type = other DNA
tccccggcacctccaaac

SEQ ID NO: 23842 - DNA, 19 bp, synthetic construct
  misc_feature 1..19: note = Probe
  source 1..19: mol_type = other DNA
tccccggcacctccaccag

SEQ ID NO: 23843 - DNA, 20 bp, synthetic construct
  misc_feature 1..20: note = Probe
  source 1..20: mol_type = other DNA
tccccggcacctccaccagt

SEQ ID NO: 23844 - DNA, 21 bp, synthetic construct
  misc_feature 1..21: note = Probe
  source 1..21: mol_type = other DNA
tccccggcacctccaccagtt

SEQ ID NO: 23845 - DNA, 22 bp, synthetic construct
  misc_feature 1..22: note = Probe
  source 1..22: mol_type = other DNA
tccccggcacctccaccagttt

SEQ ID NO: 23846 - DNA, 16 bp, synthetic construct
  misc_feature 1..16: note = Probe
  source 1..16: mol_type = other DNA
tccccggcacctccag

SEQ ID NO: 23847 - DNA, 16 bp, synthetic construct
  misc_feature 1..16: note = Probe
  source 1..16: mol_type = other DNA
tccccggcacctccat

SEQ ID NO: 23848 - DNA, 17 bp, synthetic construct
  misc_feature 1..17: note = Probe
  source 1..17: mol_type = other DNA
tccccggcacctccatt

SEQ ID NO: 23849 - DNA, 16 bp, synthetic construct
  misc_feature 1..16: note = Probe
  source 1..16: mol_type = other DNA
tccccggcatctccaa

SEQ ID NO: 23850 - DNA, 17 bp, synthetic construct
  misc_feature 1..17: note = Probe
  source 1..17: mol_type = other DNA
tccccggcatctccaaa

SEQ ID NO: 23851 - DNA, 31 bp, synthetic construct
  misc_feature 1..31: note = Probe
  source 1..31: mol_type = other DNA
tccccggcatctccaaatcagccgacgtttg

SEQ ID NO: 23852 - DNA, 16 bp, synthetic construct
  misc_feature 1..16: note = Probe
  source 1..16: mol_type = other DNA
tccccggcatctccag

SEQ ID NO: 23853 - DNA, 18 bp, synthetic construct
  misc_feature 1..18: note = Probe
  source 1..18: mol_type = other DNA
tccccggcatctccagac

SEQ ID NO: 23854 - DNA, 18 bp, synthetic construct
  misc_feature 1..18: note = Probe
  source 1..18: mol_type = other DNA
tccccggcatctccagtg

SEQ ID NO: 23855 - DNA, 16 bp, synthetic construct
  misc_feature 1..16: note = Probe
  source 1..16: mol_type = other DNA
tccccggcatctccat

SEQ ID NO: 23856 - DNA, 17 bp, synthetic construct
  misc_feature 1..17: note = Probe
  source 1..17: mol_type = other DNA
tccccggcatctccatt

SEQ ID NO: 23857 - DNA, 18 bp, synthetic construct
  misc_feature 1..18: note = Probe
  source 1..18: mol_type = other DNA
tccccggcatctccattg

SEQ ID NO: 23858 - DNA, 28 bp, synthetic construct
  misc_feature 1..28: note = Probe
  source 1..28: mol_type = other DNA
tccccttggtctagtggttaggattcaa

SEQ ID NO: 23859 - DNA, 15 bp, synthetic construct
  misc_feature 1..15: note = Probe
  source 1..15: mol_type = other DNA
tcccgccttttttcc

SEQ ID NO: 23860 - DNA, 16 bp, synthetic construct
  misc_feature 1..16: note = Probe
  source 1..16: mol_type = other DNA
tcccgccttttttccc

SEQ ID NO: 23861 - DNA, 17 bp, synthetic construct
  misc_feature 1..17: note = Probe
  source 1..17: mol_type = other DNA
tcccgccttttttcccg

SEQ ID NO: 23862 - DNA, 18 bp, synthetic construct
  misc_feature 1..18: note = Probe
  source 1..18: mol_type = other DNA
tcccgccttttttcccgg

SEQ ID NO: 23863 - DNA, 19 bp, synthetic construct
  misc_feature 1..19: note = Probe
  source 1..19: mol_type = other DNA
tcccgccttttttcccggc

SEQ ID NO: 23864 - DNA, 20 bp, synthetic construct
  misc_feature 1..20: note = Probe
  source 1..20: mol_type = other DNA
tcccgccttttttcccggcg

SEQ ID NO: 23865 - DNA, 21 bp, synthetic construct
  misc_feature 1..21: note = Probe
  source 1..21: mol_type = other DNA
tcccgccttttttcccggcgg

SEQ ID NO: 23866 - DNA, 22 bp, synthetic construct
  misc_feature 1..22: note = Probe
  source 1..22: mol_type = other DNA
tcccgccttttttcccggcggc

SEQ ID NO: 23867 - DNA, 23 bp, synthetic construct
  misc_feature 1..23: note = Probe
  source 1..23: mol_type = other DNA
tcccgccttttttcccggcggcg

SEQ ID NO: 23868 - DNA, 24 bp, synthetic construct
  misc_feature 1..24: note = Probe
  source 1..24: mol_type = other DNA
tcccgccttttttcccggcggcgg

SEQ ID NO: 23869 - DNA, 25 bp, synthetic construct
  misc_feature 1..25: note = Probe
  source 1..25: mol_type = other DNA
tcccgccttttttcccggcggcggg

SEQ ID NO: 23870 - DNA, 26 bp, synthetic construct
  misc_feature 1..26: note = Probe
  source 1..26: mol_type = other DNA
tcccgccttttttcccggcggcggga

SEQ ID NO: 23871 - DNA, 27 bp, synthetic construct
  misc_feature 1..27: note = Probe
  source 1..27: mol_type = other DNA
tcccgccttttttcccggcggcgggag

SEQ ID NO: 23872 - DNA, 28 bp, synthetic construct
  misc_feature 1..28: note = Probe
  source 1..28: mol_type = other DNA
tcccgccttttttcccggcggcgggaga

SEQ ID NO: 23873 - DNA, 29 bp, synthetic construct
  misc_feature 1..29: note = Probe
  source 1..29: mol_type = other DNA
tcccgccttttttcccggcggcgggagaa

SEQ ID NO: 23874 - DNA, 30 bp, synthetic construct; identical to SEQ ID NO: 7829
  misc_feature 1..30: note = Probe
  source 1..30: mol_type = other DNA

SEQ ID NO: 23875 - DNA, 31 bp, synthetic construct; identical to SEQ ID NO: 7830
  misc_feature 1..31: note = Probe
  source 1..31: mol_type = other DNA

SEQ ID NO: 23876 - DNA, 32 bp, synthetic construct; identical to SEQ ID NO: 7831
  misc_feature 1..32: note = Probe
  source 1..32: mol_type = other DNA

SEQ ID NO: 23877 - DNA, 36 bp, synthetic construct
  misc_feature 1..36: note = Probe
  source 1..36: mol_type = other DNA
tcccgccttttttcccggcggcgggagaagtagatt

SEQ ID NO: 23878 - DNA, 37 bp, synthetic construct
  misc_feature 1..37: note = Probe
  source 1..37: mol_type = other DNA
tcccgccttttttcccggcggcgggagaagtagattg

SEQ ID NO: 23879 - DNA, 16 bp, synthetic construct
  misc_feature 1..16: note = Probe
  source 1..16: mol_type = other DNA
tcccggacgagccccc

SEQ ID NO: 23880 - DNA, 17 bp, synthetic construct
  misc_feature 1..17: note = Probe
  source 1..17: mol_type = other DNA
tcccggacgagccccct

SEQ ID NO: 23881 - DNA, 16 bp, synthetic construct
  misc_feature 1..16: note = Probe
  source 1..16: mol_type = other DNA
tcccggacgagcccct

SEQ ID NO: 23882 - DNA, 17 bp, synthetic construct
  misc_feature 1..17: note = Probe
  source 1..17: mol_type = other DNA
tcccggacgagcccctt

SEQ ID NO: 23883 - DNA, 28 bp, synthetic construct
  misc_feature 1..28: note = Probe
  source 1..28: mol_type = other DNA
tcccggccaacgcatgcggtaccacttt

SEQ ID NO: 23884 - DNA, 27 bp, synthetic construct
  misc_feature 1..27: note = Probe
  source 1..27: mol_type = other DNA
tcccggccaatgcacgagtacagtttt

SEQ ID NO: 23885 - DNA, 30 bp, synthetic construct; identical to SEQ ID NO: 7835
  misc_feature 1..30: note = Probe
  source 1..30: mol_type = other DNA

SEQ ID NO: 23886 - DNA, 16 bp, synthetic construct
  misc_feature 1..16: note = Probe
  source 1..16: mol_type = other DNA
tcccgggtttcggcac

SEQ ID NO: 23887 - DNA, 17 bp, synthetic construct
  misc_feature 1..17: note = Probe
  source 1..17: mol_type = other DNA
tcccgggtttcggcact

SEQ ID NO: 23888 - DNA, 17 bp, synthetic construct
  misc_feature 1..17: note = Probe
  source 1..17: mol_type = other DNA
tcccggtcagggaacca

SEQ ID NO: 23889 - DNA, 23 bp, synthetic construct
  misc_feature 1..23: note = Probe
  source 1..23: mol_type = other DNA
tccctggtctagtggttaggatt

SEQ ID NO: 23890 - DNA, 25 bp, synthetic construct
  misc_feature 1..25: note = Probe
  source 1..25: mol_type = other DNA
tccctggtctagtggttaggattta

SEQ ID NO: 23891 - DNA, 26 bp, synthetic construct
  misc_feature 1..26: note = Probe
  source 1..26: mol_type = other DNA
tccctggtctagtggttaggatttat

SEQ ID NO: 23892 - DNA, 27 bp, synthetic construct
  misc_feature 1..27: note = Probe
  source 1..27: mol_type = other DNA
tccctggtctagtggttaggatttatt

SEQ ID NO: 23893 - DNA, 28 bp, synthetic construct
  misc_feature 1..28: note = Probe
  source 1..28: mol_type = other DNA
tccctggtctagtggttaggatttatta

SEQ ID NO: 23894 - DNA, 29 bp, synthetic construct
  misc_feature 1..29: note = Probe
  source 1..29: mol_type = other DNA
tccctggtctagtggttaggatttattat

SEQ ID NO: 23895 - DNA, 30 bp, synthetic construct
  misc_feature 1..30: note = Probe
  source 1..30: mol_type = other DNA
tccctggtctagtggttaggatttattatt

SEQ ID NO: 23896 - DNA, 31 bp, synthetic construct
  misc_feature 1..31: note = Probe
  source 1..31: mol_type = other DNA
tccctggtctagtggttaggatttattattt

SEQ ID NO: 23897 - DNA, 28 bp, synthetic construct
  misc_feature 1..28: note = Probe
  source 1..28: mol_type = other DNA
tccctggtggtctaatggttaggagtcg

SEQ ID NO: 23898 - DNA, 29 bp, synthetic construct
  misc_feature 1..29: note = Probe
  source 1..29: mol_type = other DNA
tccctggtggtctaatggttaggagtcgg

SEQ ID NO: 23899 - DNA, 16 bp, synthetic construct
  misc_feature 1..16: note = Probe
  source 1..16: mol_type = other DNA
tccctggtggtctagt

SEQ ID NO: 23900 - DNA, 17 bp, synthetic construct
  misc_feature 1..17: note = Probe
  source 1..17: mol_type = other DNA
tccctggtggtctagtg

SEQ ID NO: 23901 - DNA, 18 bp, synthetic construct
  misc_feature 1..18: note = Probe
  source 1..18: mol_type = other DNA
tccctggtggtctagtgg

SEQ ID NO: 23902 - DNA, 20 bp, synthetic construct
  misc_feature 1..20: note = Probe
  source 1..20: mol_type = other DNA
tccctggtggtctagtggct

SEQ ID NO: 23903 - DNA, 21 bp, synthetic construct
  misc_feature 1..21: note = Probe
  source 1..21: mol_type = other DNA
tccctggtggtctagtggcta

SEQ ID NO: 23904 - DNA, 22 bp, synthetic construct
  misc_feature 1..22: note = Probe
  source 1..22: mol_type = other DNA
tccctggtggtctagtggctag

SEQ ID NO: 23905 - DNA, 23 bp, synthetic construct
  misc_feature 1..23: note = Probe
  source 1..23: mol_type = other DNA
tccctggtggtctagtggctagg

SEQ ID NO: 23906 - DNA, 24 bp, synthetic construct
  misc_feature 1..24: note = Probe
  source 1..24: mol_type = other DNA
tccctggtggtctagtggctagga

SEQ ID NO: 23907 - DNA, 25 bp, synthetic construct
  misc_feature 1..25: note = Probe
  source 1..25: mol_type = other DNA
tccctggtggtctagtggctaggat

SEQ ID NO: 23908 - DNA, 26 bp, synthetic construct
  misc_feature 1..26: note = Probe
  source 1..26: mol_type = other DNA
tccctggtggtctagtggctaggatt

SEQ ID NO: 23909 - DNA, 27 bp, synthetic construct
  misc_feature 1..27: note = Probe
  source 1..27: mol_type = other DNA
tccctggtggtctagtggctaggattc

SEQ ID NO: 23910 - DNA, 28 bp, synthetic construct
  misc_feature 1..28: note = Probe
  source 1..28: mol_type = other DNA
tccctggtggtctagtggctaggattcg

SEQ ID NO: 23911 - DNA, 29 bp, synthetic construct
  misc_feature 1..29: note = Probe
  source 1..29: mol_type = other DNA
tccctggtggtctagtggctaggattcgg

SEQ ID NO: 23912 - DNA, 30 bp, synthetic construct; identical to SEQ ID NO: 7856
  misc_feature 1..30: note = Probe
  source 1..30: mol_type = other DNA

SEQ ID NO: 23913 - DNA, 38 bp, synthetic construct
  misc_feature 1..38: note = Probe
  source 1..38: mol_type = other DNA
tccctggtggtctagtggctaggattcggcgctttcac

SEQ ID NO: 23914 - DNA, 41 bp, synthetic construct
  misc_feature 1..41: note = Probe
  source 1..41: mol_type = other DNA
tccctggtggtctagtggctaggattcggcgctttcaccgc

SEQ ID NO: 23915 - DNA, 50 bp, synthetic construct; identical to SEQ ID NO: 1678
  misc_feature 1..50: note = Probe
  source 1..50: mol_type = other DNA

SEQ ID NO: 23916 - DNA, 19 bp, synthetic construct
  misc_feature 1..19: note = Probe
  source 1..19: mol_type = other DNA
tccctggtggtctagtggt

SEQ ID NO: 23917 - DNA, 20 bp, synthetic construct
  misc_feature 1..20: note = Probe
  source 1..20: mol_type = other DNA
tccctggtggtctagtggtt

SEQ ID NO: 23918 - DNA, 21 bp, synthetic construct
  misc_feature 1..21: note = Probe
  source 1..21: mol_type = other DNA
tccctggtggtctagtggtta

SEQ ID NO: 23919 - DNA, 22 bp, synthetic construct
  misc_feature 1..22: note = Probe
  source 1..22: mol_type = other DNA
tccctggtggtctagtggttag

SEQ ID NO: 23920 - DNA, 23 bp, synthetic construct
  misc_feature 1..23: note = Probe
  source 1..23: mol_type = other DNA
tccctggtggtctagtggttagg

SEQ ID NO: 23921 - DNA, 24 bp, synthetic construct
  misc_feature 1..24: note = Probe
  source 1..24: mol_type = other DNA
tccctggtggtctagtggttagga

SEQ ID NO: 23922 - DNA, 25 bp, synthetic construct
  misc_feature 1..25: note = Probe
  source 1..25: mol_type = other DNA
tccctggtggtctagtggttaggat

SEQ ID NO: 23923 - DNA, 26 bp, synthetic construct
  misc_feature 1..26: note = Probe
  source 1..26: mol_type = other DNA
tccctggtggtctagtggttaggatt

SEQ ID NO: 23924 - DNA, 27 bp, synthetic construct
  misc_feature 1..27: note = Probe
  source 1..27: mol_type = other DNA
tccctggtggtctagtggttaggattc

SEQ ID NO: 23925 - DNA, 28 bp, synthetic construct
  misc_feature 1..28: note = Probe
  source 1..28: mol_type = other DNA
tccctggtggtctagtggttaggattcg

SEQ ID NO: 23926 - DNA, 29 bp, synthetic construct
  misc_feature 1..29: note = Probe
  source 1..29: mol_type = other DNA
tccctggtggtctagtggttaggattcgg

SEQ ID NO: 23927 - DNA, 30 bp, synthetic construct; identical to SEQ ID NO: 7870
  misc_feature 1..30: note = Probe
  source 1..30: mol_type = other DNA

SEQ ID NO: 23928 - DNA, 41 bp, synthetic construct; identical to SEQ ID NO: 7871
  misc_feature 1..41: note = Probe
  source 1..41: mol_type = other DNA

SEQ ID NO: 23929 - DNA, 42 bp, synthetic construct; identical to SEQ ID NO: 1689
  misc_feature 1..42: note = Probe
  source 1..42: mol_type = other DNA

SEQ ID NO: 23930 - DNA, 43 bp, synthetic construct; identical to SEQ ID NO: 7872
  misc_feature 1..43: note = Probe
  source 1..43: mol_type = other DNA

SEQ ID NO: 23931 - DNA, 44 bp, synthetic construct; identical to SEQ ID NO: 7873
  misc_feature 1..44: note = Probe
  source 1..44: mol_type = other DNA

SEQ ID NO: 23932 - DNA, 45 bp, synthetic construct; identical to SEQ ID NO: 7874
  misc_feature 1..45: note = Probe
  source 1..45: mol_type = other DNA

SEQ ID NO: 23933 - DNA, 46 bp, synthetic construct; identical to SEQ ID NO: 7875
  misc_feature 1..46: note = Probe
  source 1..46: mol_type = other DNA

SEQ ID NO: 23934 - DNA, 48 bp, synthetic construct; identical to SEQ ID NO: 7877
  misc_feature 1..48: note = Probe
  source 1..48: mol_type = other DNA

SEQ ID NO: 23935 - DNA, 31 bp, synthetic construct
  misc_feature 1..31: note = Probe
  source 1..31: mol_type = other DNA
tcccttcgtggtcgttgccatgttaacgttt

SEQ ID NO: 23936 - DNA, 39 bp, synthetic construct
  misc_feature 1..39: note = Probe
  source 1..39: mol_type = other DNA
tccgagaggtcccgggttcaaatcccggacgagcccctc

SEQ ID NO: 23937 - DNA, 35 bp, synthetic construct
  misc_feature 1..35: note = Probe
  source 1..35: mol_type = other DNA
tccggatggaggcgtgggttcgaatcccacttctg

SEQ ID NO: 23938 - DNA, 28 bp, synthetic construct
  misc_feature 1..28: note = Probe
  source 1..28: mol_type = other DNA
tccggctcgaaggagacaagtgcggttt

SEQ ID NO: 23939 - DNA, 16 bp, synthetic construct
  misc_feature 1..16: note = Probe
  source 1..16: mol_type = other DNA
tccgggtgccccctca

SEQ ID NO: 23940 - DNA, 17 bp, synthetic construct
  misc_feature 1..17: note = Probe
  source 1..17: mol_type = other DNA
tccgggtgccccctcaa

SEQ ID NO: 23941 - DNA, 17 bp, synthetic construct
  misc_feature 1..17: note = Probe
  source 1..17: mol_type = other DNA
tccgggtgccccctcac

SEQ ID NO: 23942 - DNA, 16 bp, synthetic construct
  misc_feature 1..16: note = Probe
  source 1..16: mol_type = other DNA
tccgggtgccccctcg

SEQ ID NO: 23943 - DNA, 17 bp, synthetic construct
  misc_feature 1..17: note = Probe
  source 1..17: mol_type = other DNA
tccgggtgccccctcgg

SEQ ID NO: 23944 - DNA, 16 bp, synthetic construct
  misc_feature 1..16: note = Probe
  source 1..16: mol_type = other DNA
tccgggtgccccctct

SEQ ID NO: 23945 - DNA, 17 bp, synthetic construct
  misc_feature 1..17: note = Probe
  source 1..17: mol_type = other DNA
tccgggtgccccctctg

SEQ ID NO: 23946 - DNA, 17 bp, synthetic construct
  misc_feature 1..17: note = Probe
  source 1..17: mol_type = other DNA
tccgggtgccccctctt

SEQ ID NO: 23947 - DNA, 18 bp, synthetic construct
  misc_feature 1..18: note = Probe
  source 1..18: mol_type = other DNA
tccgggtgccccctcttt

SEQ ID NO: 23948 - DNA, 19 bp, synthetic construct
  misc_feature 1..19: note = Probe
  source 1..19: mol_type = other DNA
tccgggtgccccctctttg

SEQ ID NO: 23949 - DNA, 16 bp, synthetic construct
  misc_feature 1..16: note = Probe
  source 1..16: mol_type = other DNA
tccgggtgccccctga

SEQ ID NO: 23950 - DNA, 17 bp, synthetic construct
  misc_feature 1..17: note = Probe
  source 1..17: mol_type = other DNA
tccgggtgcccccttcc

SEQ ID NO: 23951 - DNA, 30 bp, synthetic construct
  misc_feature 1..30: note = Probe
  source 1..30: mol_type = other DNA
tccgtagtggagtggttatcacgttcgcct

SEQ ID NO: 23952 - DNA, 28 bp, synthetic construct
  misc_feature 1..28: note = Probe
  source 1..28: mol_type = other DNA
tccgtagtgtagcggttatcacattcgc

SEQ ID NO: 23953 - DNA, 31 bp, synthetic construct; identical to SEQ ID NO: 7884
  misc_feature 1..31: note = Probe
  source 1..31: mol_type = other DNA

SEQ ID NO: 23954 - DNA, 32 bp, synthetic construct; identical to SEQ ID NO: 7885
  misc_feature 1..32: note = Probe
  source 1..32: mol_type = other DNA

SEQ ID NO: 23955 - DNA, 33 bp, synthetic construct; identical to SEQ ID NO: 7886
  misc_feature 1..33: note = Probe
  source 1..33: mol_type = other DNA

SEQ ID NO: 23956 - DNA, 20 bp, synthetic construct
  misc_feature 1..20: note = Probe
  source 1..20: mol_type = other DNA
tccgtagtgtagtggttatc

SEQ ID NO: 23957 - DNA, 25 bp, synthetic construct
  misc_feature 1..25: note = Probe
  source 1..25: mol_type = other DNA
tccgtagtgtagtggttatcacgtt

SEQ ID NO: 23958 - DNA, 27 bp, synthetic construct
  misc_feature 1..27: note = Probe
  source 1..27: mol_type = other DNA
tccgtagtgtagtggttatcacgttcg

SEQ ID NO: 23959 - DNA, 28 bp, synthetic construct
  misc_feature 1..28: note = Probe
  source 1..28: mol_type = other DNA
tccgtagtgtagtggttatcacgttcgc

SEQ ID NO: 23960 - DNA, 29 bp, synthetic construct
  misc_feature 1..29: note = Probe
  source 1..29: mol_type = other DNA
tccgtagtgtagtggttatcacgttcgcc

SEQ ID NO: 23961 - DNA, 30 bp, synthetic construct; identical to SEQ ID NO: 7893
  misc_feature 1..30: note = Probe
  source 1..30: mol_type = other DNA

SEQ ID NO: 23962 - DNA, 32 bp, synthetic construct
  misc_feature 1..32: note = Probe
  source 1..32: mol_type = other DNA
tccgtagtgtagtggttatcacgttcgcctaa

SEQ ID NO: 23963 - DNA, 33 bp, synthetic construct; identical to SEQ ID NO: 7894
  misc_feature 1..33: note = Probe
  source 1..33: mol_type = other DNA

SEQ ID NO: 23964 - DNA, 49 bp, synthetic construct
  misc_feature 1..49: note = Probe
  source 1..49: mol_type = other DNA
tccgtagtgtagtggttatcacgttcgcctaacacgcgaaaggtccccg

SEQ ID NO: 23965 - DNA, 50 bp, synthetic construct
  misc_feature 1..50: note = Probe
  source 1..50: mol_type = other DNA
tccgtagtgtagtggttatcacgttcgcctaacacgcgaaaggtccccgg

SEQ ID NO: 23966 - DNA, 31 bp, synthetic construct; identical to SEQ ID NO: 7895
  misc_feature 1..31: note = Probe
  source 1..31: mol_type = other DNA

SEQ ID NO: 23967 - DNA, 32 bp, synthetic construct; identical to SEQ ID NO: 7896
  misc_feature 1..32: note = Probe
  source 1..32: mol_type = other DNA

SEQ ID NO: 23968 - DNA, 33 bp, synthetic construct; identical to SEQ ID NO: 7897
  misc_feature 1..33: note = Probe
  source 1..33: mol_type = other DNA

SEQ ID NO: 23969 - DNA, 34 bp, synthetic construct; identical to SEQ ID NO: 7898
  misc_feature 1..34: note = Probe
  source 1..34: mol_type = other DNA

SEQ ID NO: 23970 - DNA, 36 bp, synthetic construct
  misc_feature 1..36: note = Probe
  source 1..36: mol_type = other DNA
tccgtagtgtagtggttatcacgttcgcctcacacg

SEQ ID NO: 23971 - DNA, 49 bp, synthetic construct
  misc_feature 1..49: note = Probe
  source 1..49: mol_type = other DNA
tccgtagtgtagtggttatcacgttcgcctcacacgcgaaaggtccccg

SEQ ID NO: 23972 - DNA, 33 bp, synthetic construct; identical to SEQ ID NO: 7900
  misc_feature 1..33: note = Probe
  source 1..33: mol_type = other DNA

SEQ ID NO: 23973 - DNA, 34 bp, synthetic construct
  misc_feature 1..34: note = Probe
  source 1..34: mol_type = other DNA
tccgtggtggtctagtggctaggattcggcgctt

SEQ ID NO: 23974 - DNA, 25 bp, synthetic construct
  misc_feature 1..25: note = Probe
  source 1..25: mol_type = other DNA
tccgtggtgtagtggttatcacatt

SEQ ID NO: 23975 - DNA, 28 bp, synthetic construct
  misc_feature 1..28: note = Probe
  source 1..28: mol_type = other DNA
tccgtggtgtagtggttatcacattcgc

SEQ ID NO: 23976 - DNA, 29 bp, synthetic construct
  misc_feature 1..29: note = Probe
  source 1..29: mol_type = other DNA
tccgtggtgtagtggttatcacattcgcc

SEQ ID NO: 23977 - DNA, 30 bp, synthetic construct
  misc_feature 1..30: note = Probe
  source 1..30: mol_type = other DNA
tccgtggtgtagtggttatcacattcgcct

SEQ ID NO: 23978 - DNA, 22 bp, synthetic construct
  misc_feature 1..22: note = Probe
  source 1..22: mol_type = other DNA
tcctaagccagggattgtgggt

SEQ ID NO: 23979 - DNA, 16 bp, synthetic construct
  misc_feature 1..16: note = Probe
  source 1..16: mol_type = other DNA
tcctcaaagcaataca

SEQ ID NO: 23980 - DNA, 19 bp, synthetic construct
  misc_feature 1..19: note = Probe
  source 1..19: mol_type = other DNA
tcctcaaagcaatacactg

SEQ ID NO: 23981 - DNA, 20 bp, synthetic construct
  misc_feature 1..20: note = Probe
  source 1..20: mol_type = other DNA
tcctcaaagcaatacactga

SEQ ID NO: 23982 - DNA, 21 bp, synthetic construct
  misc_feature 1..21: note = Probe
  source 1..21: mol_type = other DNA
tcctcaaagcaatacactgaa

SEQ ID NO: 23983 - DNA, 33 bp, synthetic construct
  misc_feature 1..33: note = Probe
  source 1..33: mol_type = other DNA
tcctcaaagcaatacactgaaaatgtttagacg

SEQ ID NO: 23984 - DNA, 24 bp, synthetic construct
  misc_feature 1..24: note = Probe
  source 1..24: mol_type = other DNA
tcctcacacggggcacaataattt

SEQ ID NO: 23985 - DNA, 33 bp, synthetic construct
  misc_feature 1..33: note = Probe
  source 1..33: mol_type = other DNA
tcctcatcagtatagtggtgagtatccccgcct

SEQ ID NO: 23986 - DNA, 35 bp, synthetic construct
  misc_feature 1..35: note = Probe
  source 1..35: mol_type = other DNA
tcctcatcagtatagtggtgagtatccccgcctgt

SEQ ID NO: 23987 - DNA, 36 bp, synthetic construct; identical to SEQ ID NO: 7913
  misc_feature 1..36: note = Probe
  source 1..36: mol_type = other DNA

SEQ ID NO: 23988 - DNA, 18 bp, synthetic construct
  misc_feature 1..18: note = Probe
  source 1..18: mol_type = other DNA
tcctcgctggggcctcct

SEQ ID NO: 23989 - DNA, 16 bp, synthetic construct
  misc_feature 1..16: note = Probe
  source 1..16: mol_type = other DNA
tcctcgttagtatagt

SEQ ID NO: 23990 - DNA, 17 bp, synthetic construct
  misc_feature 1..17: note = Probe
  source 1..17: mol_type = other DNA
tcctcgttagtatagtg

SEQ ID NO: 23991 - DNA, 19 bp, synthetic construct
  misc_feature 1..19: note = Probe
  source 1..19: mol_type = other DNA
tcctcgttagtatagtggt

SEQ ID NO: 23992 - DNA, 20 bp, synthetic construct
  misc_feature 1..20: note = Probe
  source 1..20: mol_type = other DNA
tcctcgttagtatagtggtg

SEQ ID NO: 23993 - DNA, 21 bp, synthetic construct
  misc_feature 1..21: note = Probe
  source 1..21: mol_type = other DNA
tcctcgttagtatagtggtga

SEQ ID NO: 23994 - DNA, 22 bp, synthetic construct
  misc_feature 1..22: note = Probe
  source 1..22: mol_type = other DNA
tcctcgttagtatagtggtgag

SEQ ID NO: 23995 - DNA, 23 bp, synthetic construct
  misc_feature 1..23: note = Probe
  source 1..23: mol_type = other DNA
tcctcgttagtatagtggtgagt

SEQ ID NO: 23996 - DNA, 24 bp, synthetic construct
  misc_feature 1..24: note = Probe
  source 1..24: mol_type = other DNA
tcctcgttagtatagtggtgagta

SEQ ID NO: 23997 - DNA, 25 bp, synthetic construct
  misc_feature 1..25: note = Probe
  source 1..25: mol_type = other DNA
tcctcgttagtatagtggtgagtat

SEQ ID NO: 23998 - DNA, 38 bp, synthetic construct; identical to SEQ ID NO: 1709
  misc_feature 1..38: note = Probe
  source 1..38: mol_type = other DNA

SEQ ID NO: 23999 - DNA, 32 bp, synthetic construct; identical to SEQ ID NO: 1714
  misc_feature 1..32: note = Probe
  source 1..32: mol_type = other DNA

SEQ ID NO: 24000 - DNA, 33 bp, synthetic construct; identical to SEQ ID NO: 1715
  misc_feature 1..33: note = Probe
  source 1..33: mol_type = other DNA

SEQ ID NO: 24001 - DNA, 37 bp, synthetic construct; identical to SEQ ID NO: 1719
  misc_feature 1..37: note = Probe
  source 1..37: mol_type = other DNA

SEQ ID NO: 24002 - DNA, 41 bp, synthetic construct
  misc_feature 1..41: note = Probe
  source 1..41: mol_type = other DNA
tcctcgttagtatagtggttagtatccccgcctgtcacgcg

SEQ ID NO: 24003 - DNA, 24 bp, synthetic construct
  misc_feature 1..24: note = Probe
  source 1..24: mol_type = other DNA
tcctgctcacagcgtcactagttt

SEQ ID NO: 24004 - DNA, 25 bp, synthetic construct
  misc_feature 1..25: note = Probe
  source 1..25: mol_type = other DNA
tcctgctcacagcgtcactagtttt

SEQ ID NO: 24005 - DNA, 22 bp, synthetic construct
  misc_feature 1..22: note = Probe
  source 1..22: mol_type = other DNA
tcctgtcccgtacggtttttct

SEQ ID NO: 24006 - DNA, 18 bp, synthetic construct
  misc_feature 1..18: note = Probe
  source 1..18: mol_type = other DNA
tccttaggtcgctggttc

SEQ ID NO: 24007 - DNA, 19 bp, synthetic construct
  misc_feature 1..19: note = Probe
  source 1..19: mol_type = other DNA
tccttaggtcgctggttcg

SEQ ID NO: 24008 - DNA, 30 bp, synthetic construct
  misc_feature 1..30: note = Probe
  source 1..30: mol_type = other DNA
tccttaggtcgctggttcgaatccggctcg

SEQ ID NO: 24009 - DNA, 31 bp, synthetic construct
  misc_feature 1..31: note = Probe
  source 1..31: mol_type = other DNA
tccttaggtcgctggttcgaatccggctcga

SEQ ID NO: 24010 - DNA, 32 bp, synthetic construct
  misc_feature 1..32: note = Probe
  source 1..32: mol_type = other DNA
tccttaggtcgctggttcgaatccggctcgaa

SEQ ID NO: 24011 - DNA, 33 bp, synthetic construct
  misc_feature 1..33: note = Probe
  source 1..33: mol_type = other DNA
tccttaggtcgctggttcgaatccggctcgaag

SEQ ID NO: 24012 - DNA, 30 bp, synthetic construct
  misc_feature 1..30: note = Probe
  source 1..30: mol_type = other DNA
tccttaggtcgctggttcgattccggctcg

SEQ ID NO: 24013 - DNA, 31 bp, synthetic construct
  misc_feature 1..31: note = Probe
  source 1..31: mol_type = other DNA
tccttaggtcgctggttcgattccggctcga

SEQ ID NO: 24014 - DNA, 32 bp, synthetic construct
  misc_feature 1..32: note = Probe
  source 1..32: mol_type = other DNA
tccttaggtcgctggttcgattccggctcgaa

SEQ ID NO: 24015 - DNA, 33 bp, synthetic construct
  misc_feature 1..33: note = Probe
  source 1..33: mol_type = other DNA
tccttaggtcgctggttcgattccggctcgaag

SEQ ID NO: 24016 - DNA, 15 bp, synthetic construct
  misc_feature 1..15: note = Probe
  source 1..15: mol_type = other DNA
tccttccccttgtta

SEQ ID NO: 24017 - DNA, 22 bp, synthetic construct
  misc_feature 1..22: note = Probe
  source 1..22: mol_type = other DNA
tcgaaaccatcctctgctaggt

SEQ ID NO: 24018 - DNA, 22 bp, synthetic construct
  misc_feature 1..22: note = Probe
  source 1..22: mol_type = other DNA
tcgaaaccgggcggaaacacct

SEQ ID NO: 24019 - DNA, 22 bp, synthetic construct
  misc_feature 1..22: note = Probe
  source 1..22: mol_type = other DNA
tcgaaccccgtccgtgcctgat

SEQ ID NO: 24020 - DNA, 22 bp, synthetic construct
  misc_feature 1..22: note = Probe
  source 1..22: mol_type = other DNA
tcgaacctcagagggggcagct

SEQ ID NO: 24021 - DNA, 29 bp, synthetic construct
  misc_feature 1..29: note = Probe
  source 1..29: mol_type = other DNA
tcgaagaagcagcttcaaacctgccgggg

SEQ ID NO: 24022 - DNA, 31 bp, synthetic construct; identical to SEQ ID NO: 7937
  misc_feature 1..31: note = Probe
  source 1..31: mol_type = other DNA

SEQ ID NO: 24023 - DNA, 33 bp, synthetic construct; identical to SEQ ID NO: 7939
  misc_feature 1..33: note = Probe
  source 1..33: mol_type = other DNA

SEQ ID NO: 24024 - DNA, 35 bp, synthetic construct; identical to SEQ ID NO: 7941
  misc_feature 1..35: note = Probe
  source 1..35: mol_type = other DNA

SEQ ID NO: 24025 - DNA, 22 bp, synthetic construct
  misc_feature 1..22: note = Probe
  source 1..22: mol_type = other DNA
tcgaatcccaccgctgccacac

SEQ ID NO: 24026 - DNA, 22 bp, synthetic construct
  misc_feature 1..22: note = Probe
  source 1..22: mol_type = other DNA
tcgaatcccaccgctgccaggt

SEQ ID NO: 24027 - DNA, 22 bp, synthetic construct
  misc_feature 1..22: note = Probe
  source 1..22: mol_type = other DNA
tcgaatcccacttctgacacaa

SEQ ID NO: 24028 - DNA, 22 bp, synthetic construct
  misc_feature 1..22: note = Probe
  source 1..22: mol_type = other DNA
tcgaatcccagcggtgcctccg

SEQ ID NO: 24029 - DNA, 19 bp, synthetic construct
  misc_feature 1..19: note = Probe
  source 1..19: mol_type = other DNA
tcgaatccgagtcacggca

SEQ ID NO: 24030 - DNA, 22 bp, synthetic construct
  misc_feature 1..22: note = Probe
  source 1..22: mol_type = other DNA
tcgaatcctgccgactacggca

SEQ ID NO: 24031 - DNA, 22 bp, synthetic construct
  misc_feature 1..22: note = Probe
  source 1..22: mol_type = other DNA
tcgaatcctgccgactacgtca

SEQ ID NO: 24032 - DNA, 22 bp, synthetic construct
  misc_feature 1..22: note = Probe
  source 1..22: mol_type = other DNA
tcgaatcctgctcacagcgtca

SEQ ID NO: 24033 - DNA, 33 bp, synthetic construct; identical to SEQ ID NO: 7958
  misc_feature 1..33: note = Probe
  source 1..33: mol_type = other DNA

SEQ ID NO: 24034 - DNA, 38 bp, synthetic construct
  misc_feature 1..38: note = Probe
  source 1..38: mol_type = other DNA
tcgactcattaaattatgataatcatatttaccaaatg

SEQ ID NO: 24035 - DNA, 22 bp, synthetic construct
  misc_feature 1..22: note = Probe
  source 1..22: mol_type = other DNA
tcgactcccggtatgggaacaa

SEQ ID NO: 24036 - DNA, 22 bp, synthetic construct
  misc_feature 1..22: note = Probe
  source 1..22: mol_type = other DNA
tcgactcccggtatgggaacgc

SEQ ID NO: 24037 - DNA, 20 bp, synthetic construct
  misc_feature 1..20: note = Probe
  source 1..20: mol_type = other DNA
tcgactcccggtgtgggaac

SEQ ID NO: 24038 - DNA, 21 bp, synthetic construct
  misc_feature 1..21: note = Probe
  source 1..21: mol_type = other DNA
tcgactcccggtgtgggaacg

SEQ ID NO: 24039 - DNA, 22 bp, synthetic construct
  misc_feature 1..22: note = Probe
  source 1..22: mol_type = other DNA
tcgactcccggtgtgggaacgc

SEQ ID NO: 24040 - DNA, 22 bp, synthetic construct
  misc_feature 1..22: note = Probe
  source 1..22: mol_type = other DNA
tcgactcccggtgtgggaatga

SEQ ID NO: 24041 - DNA, 22 bp, synthetic construct
  misc_feature 1..22: note = Probe
  source 1..22: mol_type = other DNA
tcgagcccacccagggacgcct

SEQ ID NO: 24042 - DNA, 22 bp, synthetic construct
  misc_feature 1..22: note = Probe
  source 1..22: mol_type = other DNA
tcgagccccagtggaaccacgg

SEQ ID NO: 24043 - DNA, 22 bp, synthetic construct
  misc_feature 1..22: note = Probe
  source 1..22: mol_type = other DNA
tcgagtcccacctggggtgtcg

SEQ ID NO: 24044 - DNA, 22 bp, synthetic construct
  misc_feature 1..22: note = Probe
  source 1..22: mol_type = other DNA
tcgagtcccatctgggtcgcgt

SEQ ID NO: 24045 - DNA, 22 bp, synthetic construct
  misc_feature 1..22: note = Probe
  source 1..22: mol_type = other DNA
tcgagtcccttcgtggtcgttg

SEQ ID NO: 24046 - DNA, 22 bp, synthetic construct
  misc_feature 1..22: note = Probe
  source 1..22: mol_type = other DNA
tcgagtcctgccgcggtcgaag

SEQ ID NO: 24047 - DNA, 22 bp, synthetic construct
  misc_feature 1..22: note = Probe
  source 1..22: mol_type = other DNA
tcgatccccagtacctccaggc

SEQ ID NO: 24048 - DNA, 16 bp, synthetic construct
  misc_feature 1..16: note = Probe
  source 1..16: mol_type = other DNA
tcgatccccggcatct

SEQ ID NO: 24049 - DNA, 22 bp, synthetic construct
  misc_feature 1..22: note = Probe
  source 1..22: mol_type = other DNA
tcgatccccggcatctccagtg

SEQ ID NO: 24050 - DNA, 22 bp, synthetic construct
  misc_feature 1..22: note = Probe
  source 1..22: mol_type = other DNA
tcgatccccggcatctccattg

SEQ ID NO: 24051 - DNA, 22 bp, synthetic construct
  misc_feature 1..22: note = Probe
  source 1..22: mol_type = other DNA
tcgatccccgtacgggccacga

SEQ ID NO: 24052 - DNA, 22 bp, synthetic construct
  misc_feature 1..22: note = Probe
  source 1..22: mol_type = other DNA
tcgatccccgtacgggccactg

SEQ ID NO: 24053 - DNA, 22 bp, synthetic construct
  misc_feature 1..22: note = Probe
  source 1..22: mol_type = other DNA
tcgatccccgtactggccacgt

SEQ ID NO: 24054 - DNA, 22 bp, synthetic construct
  misc_feature 1..22: note = Probe
  source 1..22: mol_type = other DNA
tcgatcccgggcggaaacaggt

SEQ ID NO: 24055 - DNA, 22 bp, synthetic construct
  misc_feature 1..22: note = Probe
  source 1..22: mol_type = other DNA
tcgatcctcacacggggcacaa

SEQ ID NO: 24056 - DNA, 22 bp, synthetic construct
  misc_feature 1..22: note = Probe
  source 1..22: mol_type = other DNA
tcgatcctcgctggggcctcct

SEQ ID NO: 24057 - DNA, 22 bp, synthetic construct
  misc_feature 1..22: note = Probe
  source 1..22: mol_type = other DNA
tcgatgcccgcatcctccactc

SEQ ID NO: 24058 - DNA, 16 bp, synthetic construct
  misc_feature 1..16: note = Probe
  source 1..16: mol_type = other DNA
tcgattccccgacggg

SEQ ID NO: 24059 - DNA, 20 bp, synthetic construct
  misc_feature 1..20: note = Probe
  source 1..20: mol_type = other DNA
tcgattccccgacggggaga

SEQ ID NO: 24060 - DNA, 21 bp, synthetic construct
  misc_feature 1..21: note = Probe
  source 1..21: mol_type = other DNA
tcgattccccgacggggagaa

SEQ ID NO: 24061 - DNA, 22 bp, synthetic construct
  misc_feature 1..22: note = Probe
  source 1..22: mol_type = other DNA
tcgattccccgacggggagaaa

SEQ ID NO: 24062 - DNA, 21 bp, synthetic construct
  misc_feature 1..21: note = Probe
  source 1..21: mol_type = other DNA
tcgattccccgacggggagac

SEQ ID NO: 24063 - DNA, 22 bp, synthetic construct
  misc_feature 1..22: note = Probe
  source 1..22: mol_type = other DNA
tcgattccccgacggggagacg

SEQ ID NO: 24064 - DNA, 22 bp, synthetic construct
  misc_feature 1..22: note = Probe
  source 1..22: mol_type = other DNA
tcgattccccgacggggagagt

SEQ ID NO: 24065 - DNA, 20 bp, synthetic construct
  misc_feature 1..20: note = Probe
  source 1..20: mol_type = other DNA
tcgattccccgacggggagg

SEQ ID NO: 24066 - DNA, 21 bp, synthetic construct
  misc_feature 1..21: note = Probe
  source 1..21: mol_type = other DNA
tcgattccccgacggggaggc

SEQ ID NO: 24067 - DNA, 22 bp, synthetic construct
  misc_feature 1..22: note = Probe
  source 1..22: mol_type = other DNA
tcgattccccgacggggaggca

SEQ ID NO: 24068 - DNA, 22 bp, synthetic construct
  misc_feature 1..22: note = Probe
  source 1..22: mol_type = other DNA
tcgattccccgacggggaggcc

SEQ ID NO: 24069 - DNA, 22 bp, synthetic construct
  misc_feature 1..22: note = Probe
  source 1..22: mol_type = other DNA
tcgattcccggccaacgcaagt

SEQ ID NO: 24070 - DNA, 22 bp, synthetic construct
  misc_feature 1..22: note = Probe
  source 1..22: mol_type = other DNA
tcgattcccggccaacgcagcg

SEQ ID NO: 24071 - DNA, 22 bp, synthetic construct
  misc_feature 1..22: note = Probe
  source 1..22: mol_type = other DNA
tcgattcccggccaacgcagtg

SEQ ID NO: 24072 - DNA, 22 bp, synthetic construct
  misc_feature 1..22: note = Probe
  source 1..22: mol_type = other DNA
tcgattcccggccaatgcaagt

SEQ ID NO: 24073 - DNA, 22 bp, synthetic construct
  misc_feature 1..22: note = Probe
  source 1..22: mol_type = other DNA
tcgattcccggccaatgcacga

SEQ ID NO: 24074 - DNA, 22 bp, synthetic construct
  misc_feature 1..22: note = Probe
  source 1..22: mol_type = other DNA
tcgattcccggccaatgcactt

SEQ ID NO: 24075 - DNA, 22 bp, synthetic construct
  misc_feature 1..22: note = Probe
  source 1..22: mol_type = other DNA
tcgattcccggccaatgcagca

SEQ ID NO: 24076 - DNA, 22 bp, synthetic construct
  misc_feature 1..22: note = Probe
  source 1..22: mol_type = other DNA
tcgattcccggcccatgcagca

SEQ ID NO: 24077 - DNA, 22 bp, synthetic construct
  misc_feature 1..22: note = Probe
  source 1..22: mol_type = other DNA
tcgattcccgggcggcgcactt

SEQ ID NO: 24078 - DNA, 22 bp, synthetic construct
  misc_feature 1..22: note = Probe
  source 1..22: mol_type = other DNA
tcgattcccggtcagggaacaa

SEQ ID NO: 24079 - DNA, 22 bp, synthetic construct
  misc_feature 1..22: note = Probe
  source 1..22: mol_type = other DNA
tcgattcccggtcagggaattg

SEQ ID NO: 24080 - DNA, 22 bp, synthetic construct
  misc_feature 1..22: note = Probe
  source 1..22: mol_type = other DNA
tcgattcccggtcatggaacca

SEQ ID NO: 24081 - DNA, 22 bp, synthetic construct
  misc_feature 1..22: note = Probe
  source 1..22: mol_type = other DNA
tcgattccggctcgaaggactt

SEQ ID NO: 24082 - DNA, 22 bp, synthetic construct
  misc_feature 1..22: note = Probe
  source 1..22: mol_type = other DNA
tcgattcctggtcagggaacca

SEQ ID NO: 24083 - DNA, 21 bp, synthetic construct
  misc_feature 1..21: note = Probe
  source 1..21: mol_type = other DNA
tcgattctcatagtcctagaa

SEQ ID NO: 24084 - DNA, 26 bp, synthetic construct
  misc_feature 1..26: note = Probe
  source 1..26: mol_type = other DNA
tcgcagtctcccctggaggcgtgggt

SEQ ID NO: 24085 - DNA, 27 bp, synthetic construct
  misc_feature 1..27: note = Probe
  source 1..27: mol_type = other DNA
tcgcataaaacttaaaactttacagtc

SEQ ID NO: 24086 - DNA, 28 bp, synthetic construct
  misc_feature 1..28: note = Probe
  source 1..28: mol_type = other DNA
tcgcataaaacttaaaactttacagtca

SEQ ID NO: 24087 - DNA, 30 bp, synthetic construct
  misc_feature 1..30: note = Probe
  source 1..30: mol_type = other DNA
tcgcataaaacttaaaactttacagtcaga

SEQ ID NO: 24088 - DNA, 27 bp, synthetic construct
  misc_feature 1..27: note = Probe
  source 1..27: mol_type = other DNA
tcgcctaacacgcgaaaggtccccggt

SEQ ID NO: 24089 - DNA, 27 bp, synthetic construct
  misc_feature 1..27: note = Probe
  source 1..27: mol_type = other DNA
tcgcctcacacgcgaaaggtccccggt

SEQ ID NO: 24090 - DNA, 28 bp, synthetic construct
  misc_feature 1..28: note = Probe
  source 1..28: mol_type = other DNA
tcgcctgccacgcgggaggcccgggttt

SEQ ID NO: 24091 - DNA, 23 bp, synthetic construct
  misc_feature 1..23: note = Probe
  source 1..23: mol_type = other DNA
tcgccttaattttaataatcaac

SEQ ID NO: 24092 - DNA, 27 bp, synthetic construct
  misc_feature 1..27: note = Probe
  source 1..27: mol_type = other DNA
tcggctgttaaccgaaaggttggtggt

SEQ ID NO: 24093 - DNA, 26 bp, synthetic construct
  misc_feature 1..26: note = Probe
  source 1..26: mol_type = other DNA
tcggctttccctgctaactgggcttt

SEQ ID NO: 24094 - DNA, 27 bp, synthetic construct
  misc_feature 1..27: note = Probe
  source 1..27: mol_type = other DNA
tcggctttccctgctaactgggctttt

SEQ ID NO: 24095 - DNA, 28 bp, synthetic construct
  misc_feature 1..28: note = Probe
  source 1..28: mol_type = other DNA
tcggctttccctgctaactgggcttttt

SEQ ID NO: 24096 - DNA, 29 bp, synthetic construct
  misc_feature 1..29: note = Probe
  source 1..29: mol_type = other DNA
tcggctttccctgctaactgggctttttt

SEQ ID NO: 24097 - DNA, 22 bp, synthetic construct
  misc_feature 1..22: note = Probe
  source 1..22: mol_type = other DNA
tcgggcgggagtggtggctttt

SEQ ID NO: 24098 - DNA, 20 bp, synthetic construct
  misc_feature 1..20: note = Probe
  source 1..20: mol_type = other DNA
tcgggtgcgagaggtcccgg

SEQ ID NO: 24099 - DNA, 21 bp, synthetic construct
  misc_feature 1..21: note = Probe
  source 1..21: mol_type = other DNA
tcgggtgcgagaggtcccggg

SEQ ID NO: 24100 - DNA, 16 bp, synthetic construct
  misc_feature 1..16: note = Probe
  source 1..16: mol_type = other DNA
tcggtagagcatgaga

SEQ ID NO: 24101 - DNA, 34 bp, synthetic construct
  misc_feature 1..34: note = Probe
  source 1..34: mol_type = other DNA
tcggtagagcatgagactcttaatctcagggtcg

SEQ ID NO: 24102 - DNA, 16 bp, synthetic construct
  misc_feature 1..16: note = Probe
  source 1..16: mol_type = other DNA
tcggtagagcatggga

SEQ ID NO: 24103 - DNA, 26 bp, synthetic construct
  misc_feature 1..26: note = Probe
  source 1..26: mol_type = other DNA
tcggtagagcatgggactcttaatcc

SEQ ID NO: 24104 - DNA, 27 bp, synthetic construct
  misc_feature 1..27: note = Probe
  source 1..27: mol_type = other DNA
tcggtagagcatgggactcttaatccc

SEQ ID NO: 24105 - DNA, 34 bp, synthetic construct
  misc_feature 1..34: note = Probe
  source 1..34: mol_type = other DNA
tcggtagagcatgggactcttaatcccagggtcg

SEQ ID NO: 24106 - DNA, 21 bp, synthetic construct
  misc_feature 1..21: note = Probe
  source 1..21: mol_type = other DNA
tcgtaaacaggagatcctggg

SEQ ID NO: 24107 - DNA, 22 bp, synthetic construct
  misc_feature 1..22: note = Probe
  source 1..22: mol_type = other DNA
tcgtaaacaggagatcctgggt

SEQ ID NO: 24108 - DNA, 23 bp, synthetic construct
  misc_feature 1..23: note = Probe
  source 1..23: mol_type = other DNA
tcgtatagtggttagtactctgc

SEQ ID NO: 24109 - DNA, 24 bp, synthetic construct
  misc_feature 1..24: note = Probe
  source 1..24: mol_type = other DNA
tcgtatagtggttagtactctgcg

SEQ ID NO: 24110 - DNA, 16 bp, synthetic construct
  misc_feature 1..16: note = Probe
  source 1..16: mol_type = other DNA
tcgtggctactgtttt

SEQ ID NO: 24111 - DNA, 26 bp, synthetic construct
  misc_feature 1..26: note = Probe
  source 1..26: mol_type = other DNA
tcgtggttgtagtccgtgcgagaata

SEQ ID NO: 24112 - DNA, 29 bp, synthetic construct
  misc_feature 1..29: note = Probe
  source 1..29: mol_type = other DNA
tcgtggttgtagtccgtgcgagaataatg

SEQ ID NO: 24113 - DNA, 28 bp, synthetic construct
  misc_feature 1..28: note = Probe
  source 1..28: mol_type = other DNA
tcgttagtatagtggtgagtatccccgc

SEQ ID NO: 24114 - DNA, 29 bp, synthetic construct
  misc_feature 1..29: note = Probe
  source 1..29: mol_type = other DNA
tcgttagtatagtggtgagtatccccgcc

SEQ ID NO: 24115 - DNA, 30 bp, synthetic construct
  misc_feature 1..30: note = Probe
  source 1..30: mol_type = other DNA
tcgttagtatagtggtgagtatccccgcct

SEQ ID NO: 24116 - DNA, 31 bp, synthetic construct
  misc_feature 1..31: note = Probe
  source 1..31: mol_type = other DNA
tcgttagtatagtggtgagtatccccgcctg

SEQ ID NO: 24117 - DNA, 33 bp, synthetic construct; identical to SEQ ID NO: 1725
  misc_feature 1..33: note = Probe
  source 1..33: mol_type = other DNA

SEQ ID NO: 24118 - DNA, 34 bp, synthetic construct
  misc_feature 1..34: note = Probe
  source 1..34: mol_type = other DNA
tcgttagtatagtggtgagtatccccgcctgtca

SEQ ID NO: 24119 - DNA, 27 bp, synthetic construct
  misc_feature 1..27: note = Probe
  source 1..27: mol_type = other DNA
tcgttggtctaggggtatgattctcgc

SEQ ID NO: 24120 - DNA, 28 bp, synthetic construct
  misc_feature 1..28: note = Probe
  source 1..28: mol_type = other DNA
tcgttggtctaggggtatgattctcgct

SEQ ID NO: 24121 - DNA, 34 bp, synthetic construct
  misc_feature 1..34: note = Probe
  source 1..34: mol_type = other DNA
tctaaagacaggggttaggcctctttttaccagc

SEQ ID NO: 24122 - DNA, 35 bp, synthetic construct; identical to SEQ ID NO: 7996
  misc_feature 1..35: note = Probe
  source 1..35: mol_type = other DNA

SEQ ID NO: 24123 - DNA, 21 bp, synthetic construct
  misc_feature 1..21: note = Probe
  source 1..21: mol_type = other DNA
tctaacaacatggctttctca

SEQ ID NO: 24124 - DNA, 23 bp, synthetic construct
  misc_feature 1..23: note = Probe
  source 1..23: mol_type = other DNA
tctaacaacatggctttctcaac

SEQ ID NO: 24125 - DNA, 24 bp, synthetic construct
  misc_feature 1..24: note = Probe
  source 1..24: mol_type = other DNA
tctaacaacatggctttctcaact

SEQ ID NO: 24126 - DNA, 20 bp, synthetic construct
  misc_feature 1..20: note = Probe
  source 1..20: mol_type = other DNA
tctaggggtatgattctcgc

SEQ ID NO: 24127 - DNA, 21 bp, synthetic construct
  misc_feature 1..21: note = Probe
  source 1..21: mol_type = other DNA
tctaggggtatgattctcgct

SEQ ID NO: 24128 - DNA, 20 bp, synthetic construct
  misc_feature 1..20: note = Probe
  source 1..20: mol_type = other DNA
tctaggggtatgattctcgg

SEQ ID NO: 24129 - DNA, 23 bp, synthetic construct
  misc_feature 1..23: note = Probe
  source 1..23: mol_type = other DNA
tctagtggttaggattcggcgct

SEQ ID NO: 24130 - DNA, 25 bp, synthetic construct
  misc_feature 1..25: note = Probe
  source 1..25: mol_type = other DNA
tctagtggttaggattcggcgctct

SEQ ID NO: 24131 - DNA, 39 bp, synthetic construct
  misc_feature 1..39: note = Probe
  source 1..39: mol_type = other DNA
tctagtggttaggattcggcgctctcaccgccgcggccc

SEQ ID NO: 24132 - DNA, 31 bp, synthetic construct
  misc_feature 1..31: note = Probe
  source 1..31: mol_type = other DNA
tctcagggatgggttcgattctcatagtcct

SEQ ID NO: 24133 - DNA, 33 bp, synthetic construct; identical to SEQ ID NO: 1726
  misc_feature 1..33: note = Probe
  source 1..33: mol_type = other DNA

SEQ ID NO: 24134 - DNA, 36 bp, synthetic construct; identical to SEQ ID NO: 8002
  misc_feature 1..36: note = Probe
  source 1..36: mol_type = other DNA

SEQ ID NO: 24135 - DNA, 33 bp, synthetic construct; identical to SEQ ID NO: 8003
  misc_feature 1..33: note = Probe
  source 1..33: mol_type = other DNA

SEQ ID NO: 24136 - DNA, 24 bp, synthetic construct
  misc_feature 1..24: note = Probe
  source 1..24: mol_type = other DNA
tctcataatctgaaggtcctgagt

SEQ ID NO: 24137 - DNA, 36 bp, synthetic construct
  misc_feature 1..36: note = Probe
  source 1..36: mol_type = other DNA
tctccaatggaggcgtgggttcgaatcccacttctg

SEQ ID NO: 24138 - DNA, 31 bp, synthetic construct
  misc_feature 1..31: note = Probe
  source 1..31: mol_type = other DNA
tctcccgccttttttcccggcggcgggagaa

SEQ ID NO: 24139 - DNA, 37 bp, synthetic construct
  misc_feature 1..37: note = Probe
  source 1..37: mol_type = other DNA
tctccggatggaggcgtgggttcgaatcccacttctg

SEQ ID NO: 24140 - DNA, 38 bp, synthetic construct
  misc_feature 1..38: note = Probe
  source 1..38: mol_type = other DNA
tctccggatggaggcgtgggttcgaatcccacttctga

SEQ ID NO: 24141 - DNA, 28 bp, synthetic construct
  misc_feature 1..28: note = Probe
  source 1..28: mol_type = other DNA
tctcgcctgccacgcgggaggcccgggt

SEQ ID NO: 24142 - DNA, 38 bp, synthetic construct
  misc_feature 1..38: note = Probe
  source 1..38: mol_type = other DNA
tctgaaggtcctgagttcgaacctcagagggggcagct

SEQ ID NO: 24143 - DNA, 35 bp, synthetic construct
  misc_feature 1..35: note = Probe
  source 1..35: mol_type = other DNA
tctgaaggtcgtgagttcgatcctcacacggggca

SEQ ID NO: 24144 - DNA, 38 bp, synthetic construct; identical to SEQ ID NO: 8005
  misc_feature 1..38: note = Probe
  source 1..38: mol_type = other DNA

SEQ ID NO: 24145 - DNA, 37 bp, synthetic construct; identical to SEQ ID NO: 8010
  misc_feature 1..37: note = Probe
  source 1..37: mol_type = other DNA

SEQ ID NO: 24146 - DNA, 16 bp, synthetic construct
  misc_feature 1..16: note = Probe
  source 1..16: mol_type = other DNA
tctgacacatactttt

SEQ ID NO: 24147 - DNA, 22 bp, synthetic construct
  misc_feature 1..22: note = Probe
  source 1..22: mol_type = other DNA
tctgacagagctcaattacttt

SEQ ID NO: 24148 - DNA, 36 bp, synthetic construct
  misc_feature 1..36: note = Probe
  source 1..36: mol_type = other DNA
tctgagggtccagggttcaagtccctgttcgggcgg

SEQ ID NO: 24149 - DNA, 38 bp, synthetic construct
  misc_feature 1..38: note = Probe
  source 1..38: mol_type = other DNA
tctgagggtccagggttcaagtccctgttcgggcggca

SEQ ID NO: 24150 - DNA, 36 bp, synthetic construct
  misc_feature 1..36: note = Probe
  source 1..36: mol_type = other DNA
tctgagggtccagggttcaagtccctgttcgggcgt

SEQ ID NO: 24151 - DNA, 15 bp, synthetic construct
  misc_feature 1..15: note = Probe
  source 1..15: mol_type = other DNA
tctgcccaatactat

SEQ ID NO: 24152 - DNA, 16 bp, synthetic construct
  misc_feature 1..16: note = Probe
  source 1..16: mol_type = other DNA
tctggactctgaatcc

SEQ ID NO: 24153 - DNA, 30 bp, synthetic construct
  misc_feature 1..30: note = Probe
  source 1..30: mol_type = other DNA
tctgtagtgtagtggttatcacgttcgcct

SEQ ID NO: 24154 - DNA, 31 bp, synthetic construct
  misc_feature 1..31: note = Probe
  source 1..31: mol_type = other DNA
tctgtagtgtagtggttatcacgttcgcctc

SEQ ID NO: 24155 - DNA, 16 bp, synthetic construct
  misc_feature 1..16: note = Probe
  source 1..16: mol_type = other DNA
tctgtcacgcgggaga

SEQ ID NO: 24156 - DNA, 17 bp, synthetic construct
  misc_feature 1..17: note = Probe
  source 1..17: mol_type = other DNA
tcttgcgacccgggttc

SEQ ID NO: 24157 - DNA, 21 bp, synthetic construct
  misc_feature 1..21: note = Probe
  source 1..21: mol_type = other DNA
tcttgcgacccgggttcgatt

SEQ ID NO: 24158 - DNA, 22 bp, synthetic construct
  misc_feature 1..22: note = Probe
  source 1..22: mol_type = other DNA
tcttgcgacccgggttcgattc

SEQ ID NO: 24159 - DNA, 32 bp, synthetic construct
  misc_feature 1..32: note = Probe
  source 1..32: mol_type = other DNA
tcttgcgacccgggttcgattcccgggcggcg

SEQ ID NO: 24160 - DNA, 34 bp, synthetic construct
  misc_feature 1..34: note = Probe
  source 1..34: mol_type = other DNA
tcttgcgacccgggttcgattcccgggcggcgca

SEQ ID NO: 24161 - DNA, 35 bp, synthetic construct
  misc_feature 1..35: note = Probe
  source 1..35: mol_type = other DNA
tcttgcgacccgggttcgattcccgggcggcgcac

SEQ ID NO: 24162 - DNA, 36 bp, synthetic construct
  misc_feature 1..36: note = Probe
  source 1..36: mol_type = other DNA
tcttgcgacccgggttcgattcccgggcggcgcact

SEQ ID NO: 24163 - DNA, 37 bp, synthetic construct; identical to SEQ ID NO: 8017
  misc_feature 1..37: note = Probe
  source 1..37: mol_type = other DNA

SEQ ID NO: 24164 - DNA, 30 bp, synthetic construct
  misc_feature 1..30: note = Probe
  source 1..30: mol_type = other DNA
tcttttagtataaatagtaccgttaacttc

SEQ ID NO: 24165 - DNA, 31 bp, synthetic construct; identical to SEQ ID NO: 1727
  misc_feature 1..31: note = Probe
  source 1..31: mol_type = other DNA

SEQ ID NO: 24166 - DNA, 25 bp, synthetic construct
  misc_feature 1..25: note = Probe
  source 1..25: mol_type = other DNA
tgaaaacctttttccaaggacaaat

SEQ ID NO: 24167 - DNA, 40 bp, synthetic construct
  misc_feature 1..40: note = Probe
  source 1..40: mol_type = other DNA
tgaaaatgtttagacgggctcacatcaccccataaacaaa

SEQ ID NO: 24168 - DNA, 41 bp, synthetic construct; identical to SEQ ID NO: 8021
  misc_feature 1..41: note = Probe
  source 1..41: mol_type = other DNA

SEQ ID NO: 24169 - DNA, 42 bp, synthetic construct
  misc_feature 1..42: note = Probe
  source 1..42: mol_type = other DNA
tgaaaatgtttagacgggctcacatcaccccataaacaaata

SEQ ID NO: 24170 - DNA, 43 bp, synthetic construct
  misc_feature 1..43: note = Probe
  source 1..43: mol_type = other DNA
tgaaaatgtttagacgggctcacatcaccccataaacaaatag

SEQ ID NO: 24171 - DNA, 36 bp, synthetic construct
  misc_feature 1..36: note = Probe
  source 1..36: mol_type = other DNA
tgaaggtcctgagttcgaacctcagagggggcaagg

SEQ ID NO: 24172 - DNA, 36 bp, synthetic construct
  misc_feature 1..36: note = Probe
  source 1..36: mol_type = other DNA
tgaaggtcctgagttcgaacctcagagggggcagct

SEQ ID NO: 24173 - DNA, 36 bp, synthetic construct
  misc_feature 1..36: note = Probe
  source 1..36: mol_type = other DNA
tgaaggtcctgagttcgagcctcagagagggcagct

SEQ ID NO: 24174 - DNA, 30 bp, synthetic construct
  misc_feature 1..30: note = Probe
  source 1..30: mol_type = other DNA
tgaaggtcgtgagttcgagcctcacacggg

SEQ ID NO: 24175 - DNA, 33 bp, synthetic construct; identical to SEQ ID NO: 8023
  misc_feature 1..33: note = Probe
  source 1..33: mol_type = other DNA

SEQ ID NO: 24176 - DNA, 36 bp, synthetic construct; identical to SEQ ID NO: 8025
  misc_feature 1..36: note = Probe
  source 1..36: mol_type = other DNA

SEQ ID NO: 24177 - DNA, 21 bp, synthetic construct
  misc_feature 1..21: note = Probe
  source 1..21: mol_type = other DNA
tgaatccagcgatccgagttc

SEQ ID NO: 24178 - DNA, 22 bp, synthetic construct
  misc_feature 1..22: note = Probe
  source 1..22: mol_type = other DNA
tgaatccagcgatccgagttca

SEQ ID NO: 24179 - DNA, 41 bp, synthetic construct; identical to SEQ ID NO: 8033
  misc_feature 1..41: note = Probe
  source 1..41: mol_type = other DNA

SEQ ID NO: 24180 - DNA, 27 bp, synthetic construct
  misc_feature 1..27: note = Probe
  source 1..27: mol_type = other DNA
tgaatctgacaacagaggcttacgacc

SEQ ID NO: 24181 - DNA, 28 bp, synthetic construct
  misc_feature 1..28: note = Probe
  source 1..28: mol_type = other DNA
tgaatctgacaacagaggcttacgaccc

SEQ ID NO: 24182 - DNA, 29 bp, synthetic construct
  misc_feature 1..29: note = Probe
  source 1..29: mol_type = other DNA
tgaatctgacaacagaggcttacgacccc

SEQ ID NO: 24183 - DNA, 30 bp, synthetic construct; identical to SEQ ID NO: 1734
  misc_feature 1..30: note = Probe
  source 1..30: mol_type = other DNA

SEQ ID NO: 24184 - DNA, 31 bp, synthetic construct; identical to SEQ ID NO: 1735
  misc_feature 1..31: note = Probe
  source 1..31: mol_type = other DNA

SEQ ID NO: 24185 - DNA, 33 bp, synthetic construct; identical to SEQ ID NO: 1737
  misc_feature 1..33: note = Probe
  source 1..33: mol_type = other DNA

SEQ ID NO: 24186 - DNA, 34 bp, synthetic construct; identical to SEQ ID NO: 1738
  misc_feature 1..34: note = Probe
  source 1..34: mol_type = other DNA

SEQ ID NO: 24187 - DNA, 35 bp, synthetic construct; identical to SEQ ID NO: 1739
  misc_feature 1..35: note = Probe
  source 1..35: mol_type = other DNA

SEQ ID NO: 24188 - DNA, 37 bp, synthetic construct; identical to SEQ ID NO: 1741
  misc_feature 1..37: note = Probe
  source 1..37: mol_type = other DNA

SEQ ID NO: 24189 - DNA, 39 bp, synthetic construct; identical to SEQ ID NO: 8042
  misc_feature 1..39: note = Probe
  source 1..39: mol_type = other DNA

SEQ ID NO: 24190 - DNA, 40 bp, synthetic construct; identical to SEQ ID NO: 8043
  misc_feature 1..40: note = Probe
  source 1..40: mol_type = other DNA

SEQ ID NO: 24191 - DNA, 41 bp, synthetic construct; identical to SEQ ID NO: 8044
  misc_feature 1..41: note = Probe
  source 1..41: mol_type = other DNA

SEQ ID NO: 24192 - DNA, 42 bp, synthetic construct; identical to SEQ ID NO: 8045
  misc_feature 1..42: note = Probe
  source 1..42: mol_type = other DNA

SEQ ID NO: 24193 - DNA, 46 bp, synthetic construct; identical to SEQ ID NO: 8048
  misc_feature 1..46: note = Probe
  source 1..46: mol_type = other DNA

SEQ ID NO: 24194 - DNA, 49 bp, synthetic construct; identical to SEQ ID NO: 8050
  misc_feature 1..49: note = Probe
  source 1..49: mol_type = other DNA

SEQ ID NO: 24195 - DNA, 30 bp, synthetic construct
  misc_feature 1..30: note = Probe
  source 1..30: mol_type = other DNA
tgacaacagaggcttacgaccccttattta

SEQ ID NO: 24196 - DNA, 31 bp, synthetic construct; identical to SEQ ID NO: 1744
  misc_feature 1..31: note = Probe
  source 1..31: mol_type = other DNA

SEQ ID NO: 24197 - DNA, 32 bp, synthetic construct; identical to SEQ ID NO: 1745
  misc_feature 1..32: note = Probe
  source 1..32: mol_type = other DNA

SEQ ID NO: 24198 - DNA, 33 bp, synthetic construct; identical to SEQ ID NO: 8057
  misc_feature 1..33: note = Probe
  source 1..33: mol_type = other DNA

SEQ ID NO: 24199 - DNA, 34 bp, synthetic construct; identical to SEQ ID NO: 8058
  misc_feature 1..34: note = Probe
  source 1..34: mol_type = other DNA

SEQ ID NO: 24200 - DNA, 35 bp, synthetic construct; identical to SEQ ID NO: 8059
  misc_feature 1..35: note = Probe
  source 1..35: mol_type = other DNA

SEQ ID NO: 24201 - DNA, 22 bp, synthetic construct
  misc_feature 1..22: note = Probe
  source 1..22: mol_type = other DNA
tgacaacattcaaaaaagagta

SEQ ID NO: 24202 - DNA, 23 bp, synthetic construct
  misc_feature 1..23: note = Probe
  source 1..23: mol_type = other DNA
tgacaacattcaaaaaagagtaa

SEQ ID NO: 24203 - DNA, 25 bp, synthetic construct
  misc_feature 1..25: note = Probe
  source 1..25: mol_type = other DNA
tgacacaactatcttattctccttt

SEQ ID NO: 24204 - DNA, 27 bp, synthetic construct
  misc_feature 1..27: note = Probe
  source 1..27: mol_type = other DNA
tgacccgggttcgattcccggccaacg

SEQ ID NO: 24205 - DNA, 32 bp, synthetic construct; identical to SEQ ID NO: 8061
  misc_feature 1..32: note = Probe
  source 1..32: mol_type = other DNA

SEQ ID NO: 24206 - DNA, 32 bp, synthetic construct; identical to SEQ ID NO: 8062
  misc_feature 1..32: note = Probe
  source 1..32: mol_type = other DNA

SEQ ID NO: 24207 - DNA, 20 bp, synthetic construct
  misc_feature 1..20: note = Probe
  source 1..20: mol_type = other DNA
tgagatgttacctagcgttt

SEQ ID NO: 24208 - DNA, 33 bp, synthetic construct
  misc_feature 1..33: note = Probe
  source 1..33: mol_type = other DNA
tgagcatagctgccttccaagcagttgacccgg

SEQ ID NO: 24209 - DNA, 39 bp, synthetic construct
  misc_feature 1..39: note = Probe
  source 1..39: mol_type = other DNA
tgagcccggatagctcagtcggtagagcatcagactttt

SEQ ID NO: 24210 - DNA, 26 bp, synthetic construct
  misc_feature 1..26: note = Probe
  source 1..26: mol_type = other DNA
tgaggccccgggttcgatccccggca

SEQ ID NO: 24211 - DNA, 35 bp, synthetic construct
  misc_feature 1..35: note = Probe
  source 1..35: mol_type = other DNA
tgaggccccgggttcgatccccggcatctccattg

SEQ ID NO: 24212 - DNA, 36 bp, synthetic construct
  misc_feature 1..36: note = Probe
  source 1..36: mol_type = other DNA
tgagggtccagggttcaagtccctgttcgggcggca

SEQ ID NO: 24213 - DNA, 30 bp, synthetic construct
  misc_feature 1..30: note = Probe
  source 1..30: mol_type = other DNA
tgaggtttttctgttttaacctccaaattc

SEQ ID NO: 24214 - DNA, 21 bp, synthetic construct
  misc_feature 1..21: note = Probe
  source 1..21: mol_type = other DNA
tgagtgaagcattggactgta

SEQ ID NO: 24215 - DNA, 22 bp, synthetic construct
  misc_feature 1..22: note = Probe
  source 1..22: mol_type = other DNA
tgataatcatatttaccaaatg

SEQ ID NO: 24216 - DNA, 41 bp, synthetic construct
  misc_feature 1..41: note = Probe
  source 1..41: mol_type = other DNA
tgatagagtaaataataggagcttaaacccccttatttcta

SEQ ID NO: 24217 - DNA, 43 bp, synthetic construct; identical to SEQ ID NO: 8070
  misc_feature 1..43: note = Probe
  source 1..43: mol_type = other DNA

SEQ ID NO: 24218 - DNA, 44 bp, synthetic construct; identical to SEQ ID NO: 8071
  misc_feature 1..44: note = Probe
  source 1..44: mol_type = other DNA

SEQ ID NO: 24219 - DNA, 26 bp, synthetic construct
  misc_feature 1..26: note = Probe
  source 1..26: mol_type = other DNA
tgatcgtatagtggttagtactctgc

SEQ ID NO: 24220 - DNA, 30 bp, synthetic construct
  misc_feature 1..30: note = Probe
  source 1..30: mol_type = other DNA
tgatgcagagtggggttttgcagtccttag

SEQ ID NO: 24221 - DNA, 32 bp, synthetic construct; identical to SEQ ID NO: 8074
  misc_feature 1..32: note = Probe
  source 1..32: mol_type = other DNA

SEQ ID NO: 24222 - DNA, 29 bp, synthetic construct
  misc_feature 1..29: note = Probe
  source 1..29: mol_type = other DNA
tgattctcgcttagggtgcgagaggtccc

SEQ ID NO: 24223 - DNA, 30 bp, synthetic construct
  misc_feature 1..30: note = Probe
  source 1..30: mol_type = other DNA
tgattctcgcttagggtgcgagaggtcccg

SEQ ID NO: 24224 - DNA, 29 bp, synthetic construct
  misc_feature 1..29: note = Probe
  source 1..29: mol_type = other DNA
tgattctcgcttcgggtgcgagaggtccc

SEQ ID NO: 24225 - DNA, 30 bp, synthetic construct
  misc_feature 1..30: note = Probe
  source 1..30: mol_type = other DNA
tgattctcgcttcgggtgcgagaggtcccg

SEQ ID NO: 24226 - DNA, 29 bp, synthetic construct
  misc_feature 1..29: note = Probe
  source 1..29: mol_type = other DNA
tgattctcgctttgggtgcgagaggtccc

SEQ ID NO: 24227 - DNA, 30 bp, synthetic construct
  misc_feature 1..30: note = Probe
  source 1..30: mol_type = other DNA
tgattctcgctttgggtgcgagaggtcccg

SEQ ID NO: 24228 - DNA, 36 bp, synthetic construct; identical to SEQ ID NO: 8078
  misc_feature 1..36: note = Probe
  source 1..36: mol_type = other DNA

SEQ ID NO: 24229 - DNA, 38 bp, synthetic construct
  misc_feature 1..38: note = Probe
  source 1..38: mol_type = other DNA
tgcaaattcgaagaagcagcttcaaacctgccggggct

SEQ ID NO: 24230 - DNA, 41 bp, synthetic construct; identical to SEQ ID NO: 8081
  misc_feature 1..41: note = Probe
  source 1..41: mol_type = other DNA

SEQ ID NO: 24231 - DNA, 42 bp, synthetic construct; identical to SEQ ID NO: 8082
  misc_feature 1..42: note = Probe
  source 1..42: mol_type = other DNA

SEQ ID NO: 24232 - DNA, 15 bp, synthetic construct
  misc_feature 1..15: note = Probe
  source 1..15: mol_type = other DNA
tgcaactataatctt

SEQ ID NO: 24233 - DNA, 20 bp, synthetic construct
  misc_feature 1..20: note = Probe
  source 1..20: mol_type = other DNA
tgcaactccaaataaaagta

SEQ ID NO: 24234 - DNA, 30 bp, synthetic construct
  misc_feature 1..30: note = Probe
  source 1..30: mol_type = other DNA
tgcacgaggccccgggttcaatccccggca

SEQ ID NO: 24235 - DNA, 32 bp, synthetic construct
  misc_feature 1..32: note = Probe
  source 1..32: mol_type = other DNA
tgcacgaggccccgggttcaatccccggcacc

SEQ ID NO: 24236 - DNA, 37 bp, synthetic construct
  misc_feature 1..37: note = Probe
  source 1..37: mol_type = other DNA
tgcacgaggccccgggttcaatccccggcacctccag

SEQ ID NO: 24237 - DNA, 38 bp, synthetic construct
  misc_feature 1..38: note = Probe
  source 1..38: mol_type = other DNA
tgcacgaggccccgggttcaatccccggcacctccagc

SEQ ID NO: 24238 - DNA, 39 bp, synthetic construct; identical to SEQ ID NO: 8084
  misc_feature 1..39: note = Probe
  source 1..39: mol_type = other DNA

SEQ ID NO: 24239 - DNA, 37 bp, synthetic construct
  misc_feature 1..37: note = Probe
  source 1..37: mol_type = other DNA
tgcacgaggccccgggttcaatccccggcacctccat

SEQ ID NO: 24240 - DNA, 38 bp, synthetic construct
  misc_feature 1..38: note = Probe
  source 1..38: mol_type = other DNA
tgcacgaggccccgggttcaatccccggcacctccatt

SEQ ID NO: 24241 - DNA, 39 bp, synthetic construct
  misc_feature 1..39: note = Probe
  source 1..39: mol_type = other DNA
tgcacgaggccccgggttcaatccccggcacctccattc

SEQ ID NO: 24242 - DNA, 39 bp, synthetic construct
  misc_feature 1..39: note = Probe
  source 1..39: mol_type = other DNA
tgcacgaggccctgggttcaatccccagcacctccatgt

SEQ ID NO: 24243 - DNA, 39 bp, synthetic construct
  misc_feature 1..39: note = Probe
  source 1..39: mol_type = other DNA
tgcacgaggtcctgggttcaatccccaatacctccaggt

SEQ ID NO: 24244 - DNA, 38 bp, synthetic construct
  misc_feature 1..38: note = Probe
  source 1..38: mol_type = other DNA
tgcacgaggtcctgggttcgatccccagtacctccagg

SEQ ID NO: 24245 - DNA, 39 bp, synthetic construct; identical to SEQ ID NO: 8085
  misc_feature 1..39: note = Probe
  source 1..39: mol_type = other DNA

SEQ ID NO: 24246 - DNA, 30 bp, synthetic construct
  misc_feature 1..30: note = Probe
  source 1..30: mol_type = other DNA
tgcacgcgtgggttcgaatcccatcctcgt

SEQ ID NO: 24247 - DNA, 29 bp, synthetic construct
  misc_feature 1..29: note = Probe
  source 1..29: mol_type = other DNA
tgcagagtggggttttgcagtccttagct

SEQ ID NO: 24248 - DNA, 36 bp, synthetic construct
  misc_feature 1..36: note = Probe
  source 1..36: mol_type = other DNA
tgcatgaggtcccgggttcgatccccagcatctcca

SEQ ID NO: 24249 - DNA, 38 bp, synthetic construct
  misc_feature 1..38: note = Probe
  source 1..38: mol_type = other DNA
tgcatgaggtcccgggttcgatccccagcatctccagt

SEQ ID NO: 24250 - DNA, 39 bp, synthetic construct; identical to SEQ ID NO: 8088
  misc_feature 1..39: note = Probe
  source 1..39: mol_type = other DNA

SEQ ID NO: 24251 - DNA, 36 bp, synthetic construct
  misc_feature 1..36: note = Probe
  source 1..36: mol_type = other DNA
tgcatgggtggttcagtggtagaattctcgcctgcc

SEQ ID NO: 24252 - DNA, 37 bp, synthetic construct
  misc_feature 1..37: note = Probe
  source 1..37: mol_type = other DNA
tgccacgcgggaggcccgggttcgattcccggccaat

SEQ ID NO: 24253 - DNA, 43 bp, synthetic construct
  misc_feature 1..43: note = Probe
  source 1..43: mol_type = other DNA
tgccacgcgggaggcccgggttcgattcccggccaatgcaagt

SEQ ID NO: 24254 - DNA, 43 bp, synthetic construct
  misc_feature 1..43: note = Probe
  source 1..43: mol_type = other DNA
tgccacgcgggaggcccgggttcgattcccggccaatgcacga

SEQ ID NO: 24255 - DNA, 43 bp, synthetic construct
  misc_feature 1..43: note = Probe
  source 1..43: mol_type = other DNA
tgccacgcgggaggcccgggttcgattcccggccaatgcagca

SEQ ID NO: 24256 - DNA, 43 bp, synthetic construct; identical to SEQ ID NO: 8091
  misc_feature 1..43: note = Probe
  source 1..43: mol_type = other DNA

SEQ ID NO: 24257 - DNA, 23 bp, synthetic construct
  misc_feature 1..23: note = Probe
  source 1..23: mol_type = other DNA
tgccacgcgggaggcccgggttt

SEQ ID NO: 24258 - DNA, 16 bp, synthetic construct
  misc_feature 1..16: note = Probe
  source 1..16: mol_type = other DNA
tgccatgttaacgttt

SEQ ID NO: 24259 - DNA, 17 bp, synthetic construct
  misc_feature 1..17: note = Probe
  source 1..17: mol_type = other DNA
tgccatgttaacgtttt

SEQ ID NO: 24260 - DNA, 27 bp, synthetic construct
  misc_feature 1..27: note = Probe
  source 1..27: mol_type = other DNA
tgccccaactaaatactaccgtatggc

SEQ ID NO: 24261 - DNA, 16 bp, synthetic construct
  misc_feature 1..16: note = Probe
  source 1..16: mol_type = other DNA
tgcccccatgtctaac

SEQ ID NO: 24262 - DNA, 17 bp, synthetic construct
  misc_feature 1..17: note = Probe
  source 1..17: mol_type = other DNA
tgcccccatgtctaaca

SEQ ID NO: 24263 - DNA, 20 bp, synthetic construct
  misc_feature 1..20: note = Probe
  source 1..20: mol_type = other DNA
tgcccccatgtctaacaaca

SEQ ID NO: 24264 - DNA, 22 bp, synthetic construct
  misc_feature 1..22: note = Probe
  source 1..22: mol_type = other DNA
tgcccccatgtctaacaacatg

SEQ ID NO: 24265 - DNA, 23 bp, synthetic construct
  misc_feature 1..23: note = Probe
  source 1..23: mol_type = other DNA
tgcccccatgtctaacaacatgg

SEQ ID NO: 24266 - DNA, 24 bp, synthetic construct
  misc_feature 1..24: note = Probe
  source 1..24: mol_type = other DNA
tgcccccatgtctaacaacatggc

SEQ ID NO: 24267 - DNA, 25 bp, synthetic construct
  misc_feature 1..25: note = Probe
  source 1..25: mol_type = other DNA
tgcccccatgtctaacaacatggct

SEQ ID NO: 24268 - DNA, 26 bp, synthetic construct
  misc_feature 1..26: note = Probe
  source 1..26: mol_type = other DNA
tgcccccatgtctaacaacatggctt

SEQ ID NO: 24269 - DNA, 27 bp, synthetic construct
  misc_feature 1..27: note = Probe
  source 1..27: mol_type = other DNA
tgcccccatgtctaacaacatggcttt

SEQ ID NO: 24270 - DNA, 28 bp, synthetic construct
  misc_feature 1..28: note = Probe
  source 1..28: mol_type = other DNA
tgcccccatgtctaacaacatggctttc

SEQ ID NO: 24271 - DNA, 29 bp, synthetic construct
  misc_feature 1..29: note = Probe
  source 1..29: mol_type = other DNA
tgcccccatgtctaacaacatggctttct

SEQ ID NO: 24272 - DNA, 30 bp, synthetic construct; identical to SEQ ID NO: 8103
  misc_feature 1..30: note = Probe
  source 1..30: mol_type = other DNA

SEQ ID NO: 24273 - DNA, 31 bp, synthetic construct; identical to SEQ ID NO: 8104
  misc_feature 1..31: note = Probe
  source 1..31: mol_type = other DNA

SEQ ID NO: 24274 - DNA, 32 bp, synthetic construct; identical to SEQ ID NO: 8105
  misc_feature 1..32: note = Probe
  source 1..32: mol_type = other DNA

SEQ ID NO: 24275 - DNA, 33 bp, synthetic construct; identical to SEQ ID NO: 8106
  misc_feature 1..33: note = Probe
  source 1..33: mol_type = other DNA

SEQ ID NO: 24276 - DNA, 34 bp, synthetic construct; identical to SEQ ID NO: 8107
  misc_feature 1..34: note = Probe
  source 1..34: mol_type = other DNA

SEQ ID NO: 24277 - DNA, 35 bp, synthetic construct
  misc_feature 1..35: note = Probe
  source 1..35: mol_type = other DNA
tgcccccatgtctaacaacatggctttctcaactt

SEQ ID NO: 24278 - DNA, 38 bp, synthetic construct
  misc_feature 1..38: note = Probe
  source 1..38: mol_type = other DNA
tgcccccatgtctaacaacatggctttctcaactttta

SEQ ID NO: 24279 - DNA, 17 bp, synthetic construct
  misc_feature 1..17: note = Probe
  source 1..17: mol_type = other DNA
tgcccctcatttacata

SEQ ID NO: 24280 - DNA, 28 bp, synthetic construct
  misc_feature 1..28: note = Probe
  source 1..28: mol_type = other DNA
tgcccctcatttacataaatattatact

SEQ ID NO: 24281 - DNA, 29 bp, synthetic construct
  misc_feature 1..29: note = Probe
  source 1..29: mol_type = other DNA
tgcccctcatttacataaatattatacta

SEQ ID NO: 24282 - DNA, 17 bp, synthetic construct
  misc_feature 1..17: note = Probe
  source 1..17: mol_type = other DNA
tgcccgcatcctccact

SEQ ID NO: 24283 - DNA, 18 bp, synthetic construct
  misc_feature 1..18: note = Probe
  source 1..18: mol_type = other DNA
tgcccgcatcctccactc

SEQ ID NO: 24284 - DNA, 16 bp, synthetic construct
  misc_feature 1..16: note = Probe
  source 1..16: mol_type = other DNA
tgcccgcatcctccag

SEQ ID NO: 24285 - DNA, 32 bp, synthetic construct
  misc_feature 1..32: note = Probe
  source 1..32: mol_type = other DNA
tgccgaggttgtgagttcgagcctcacctgga

SEQ ID NO: 24286 - DNA, 38 bp, synthetic construct
  misc_feature 1..38: note = Probe
  source 1..38: mol_type = other DNA
tgccgaggttgtgagttcgagcctcacctggagcattg

SEQ ID NO: 24287 - DNA, 16 bp, synthetic construct
  misc_feature 1..16: note = Probe
  source 1..16: mol_type = other DNA
tgccgtgatcgtatag

SEQ ID NO: 24288 - DNA, 20 bp, synthetic construct
  misc_feature 1..20: note = Probe
  source 1..20: mol_type = other DNA
tgccgtgatcgtatagtggt

SEQ ID NO: 24289 - DNA, 21 bp, synthetic construct
  misc_feature 1..21: note = Probe
  source 1..21: mol_type = other DNA
tgccgtgatcgtatagtggtt

SEQ ID NO: 24290 - DNA, 23 bp, synthetic construct
  misc_feature 1..23: note = Probe
  source 1..23: mol_type = other DNA
tgccgtgatcgtatagtggttag

SEQ ID NO: 24291 - DNA, 24 bp, synthetic construct
  misc_feature 1..24: note = Probe
  source 1..24: mol_type = other DNA
tgccgtgatcgtatagtggttagt

SEQ ID NO: 24292 - DNA, 27 bp, synthetic construct
  misc_feature 1..27: note = Probe
  source 1..27: mol_type = other DNA
tgccgtgatcgtatagtggttagtact

SEQ ID NO: 24293 - DNA, 29 bp, synthetic construct
  misc_feature 1..29: note = Probe
  source 1..29: mol_type = other DNA
tgccgtgatcgtatagtggttagtactct

SEQ ID NO: 24294 - DNA, 30 bp, synthetic construct; identical to SEQ ID NO: 12089
  misc_feature 1..30: note = Probe
  source 1..30: mol_type = other DNA

SEQ ID NO: 24295 - DNA, 31 bp, synthetic construct; identical to SEQ ID NO: 8115
  misc_feature 1..31: note = Probe
  source 1..31: mol_type = other DNA

SEQ ID NO: 24296 - DNA, 32 bp, synthetic construct; identical to SEQ ID NO: 8116
  misc_feature 1..32: note = Probe
  source 1..32: mol_type = other DNA

SEQ ID NO: 24297 - DNA, 33 bp, synthetic construct; identical to SEQ ID NO: 1754
  misc_feature 1..33: note = Probe
  source 1..33: mol_type = other DNA

SEQ ID NO: 24298 - DNA, 34 bp, synthetic construct; identical to SEQ ID NO: 8117
  misc_feature 1..34: note = Probe
  source 1..34: mol_type = other DNA

SEQ ID NO: 24299 - DNA, 35 bp, synthetic construct; identical to SEQ ID NO: 1755
  misc_feature 1..35: note = Probe
  source 1..35: mol_type = other DNA

SEQ ID NO: 24300 - DNA, 36 bp, synthetic construct; identical to SEQ ID NO: 1756
  misc_feature 1..36: note = Probe
  source 1..36: mol_type = other DNA

SEQ ID NO: 24301 - DNA, 37 bp, synthetic construct; identical to SEQ ID NO: 1757
  misc_feature 1..37: note = Probe
  source 1..37: mol_type = other DNA

SEQ ID NO: 24302 - DNA, 38 bp, synthetic construct; identical to SEQ ID NO: 8118
  misc_feature 1..38: note = Probe
  source 1..38: mol_type = other DNA

SEQ ID NO: 24303 - DNA, 40 bp, synthetic construct
  misc_feature 1..40: note = Probe
  source 1..40: mol_type = other DNA
tgccgtgatcgtatagtggttagtactctgcgttgtggcc

SEQ ID NO: 24304 - DNA, 41 bp, synthetic construct
  misc_feature 1..41: note = Probe
  source 1..41: mol_type = other DNA
tgccgtgatcgtatagtggttagtactctgcgttgtggccg

SEQ ID NO: 24305 - DNA, 41 bp, synthetic construct
  misc_feature 1..41: note = Probe
  source 1..41: mol_type = other DNA
tgcctgtcacgcgggagaccggggttcgattccccaacggg

SEQ ID NO: 24306 - DNA, 30 bp, synthetic construct
  misc_feature 1..30: note = Probe
  source 1..30: mol_type = other DNA
tgcgaaactactttcttgattcaggtgttt

SEQ ID NO: 24307 - DNA, 31 bp, synthetic construct
  misc_feature 1..31: note = Probe
  source 1..31: mol_type = other DNA
tgcgacccgggttcgattcccgggcggcgca

SEQ ID NO: 24308 - DNA, 34 bp, synthetic construct; identical to SEQ ID NO: 8119
  misc_feature 1..34: note = Probe
  source 1..34: mol_type = other DNA

SEQ ID NO: 24309 - DNA, 32 bp, synthetic construct
  misc_feature 1..32: note = Probe
  source 1..32: mol_type = other DNA
tgcgagaggtcccgggttcaaatcccggacga

SEQ ID NO: 24310 - DNA, 34 bp, synthetic construct
  misc_feature 1..34: note = Probe
  source 1..34: mol_type = other DNA
tgcgagaggtcccgggttcaaatcccggacgagc

SEQ ID NO: 24311 - DNA, 36 bp, synthetic construct
  misc_feature 1..36: note = Probe
  source 1..36: mol_type = other DNA
tgcgagaggtcccgggttcaaatcccggacgagccc

SEQ ID NO: 24312 - DNA, 38 bp, synthetic construct
  misc_feature 1..38: note = Probe
  source 1..38: mol_type = other DNA
tgcgagaggtcccgggttcaaatcccggacgagccccc

SEQ ID NO: 24313 - DNA, 39 bp, synthetic construct; identical to SEQ ID NO: 8121
  misc_feature 1..39: note = Probe
  source 1..39: mol_type = other DNA

SEQ ID NO: 24314 - DNA, 42 bp, synthetic construct
  misc_feature 1..42: note = Probe
  source 1..42: mol_type = other DNA
tgcgttcagttgatgcagagtggggttttgcagtccttagct

SEQ ID NO: 24315 - DNA, 17 bp, synthetic construct
  misc_feature 1..17: note = Probe
  source 1..17: mol_type = other DNA
tgctaactcatgccccc

SEQ ID NO: 24316 - DNA, 22 bp, synthetic construct
  misc_feature 1..22: note = Probe
  source 1..22: mol_type = other DNA
tgctaactcatgcccccatgtc

SEQ ID NO: 24317 - DNA, 23 bp, synthetic construct
  misc_feature 1..23: note = Probe
  source 1..23: mol_type = other DNA
tgctaactcatgcccccatgtct

SEQ ID NO: 24318 - DNA, 27 bp, synthetic construct
  misc_feature 1..27: note = Probe
  source 1..27: mol_type = other DNA
tgctaactcatgcccccatgtctaaca

SEQ ID NO: 24319 - DNA, 36 bp, synthetic construct; identical to SEQ ID NO: 8127
  misc_feature 1..36: note = Probe
  source 1..36: mol_type = other DNA

SEQ ID NO: 24320 - DNA, 37 bp, synthetic construct; identical to SEQ ID NO: 8128
  misc_feature 1..37: note = Probe
  source 1..37: mol_type = other DNA

SEQ ID NO: 24321 - DNA, 38 bp, synthetic construct; identical to SEQ ID NO: 8129
  misc_feature 1..38: note = Probe
  source 1..38: mol_type = other DNA

SEQ ID NO: 24322 - DNA, 39 bp, synthetic construct; identical to SEQ ID NO: 8130
  misc_feature 1..39: note = Probe
  source 1..39: mol_type = other DNA

SEQ ID NO: 24323 - DNA, 40 bp, synthetic construct; identical to SEQ ID NO: 8131
  misc_feature 1..40: note = Probe
  source 1..40: mol_type = other DNA

SEQ ID NO: 24324 - DNA, 41 bp, synthetic construct; identical to SEQ ID NO: 8132
  misc_feature 1..41: note = Probe
  source 1..41: mol_type = other DNA

SEQ ID NO: 24325 - DNA, 42 bp, synthetic construct
  misc_feature 1..42: note = Probe
  source 1..42: mol_type = other DNA
tgctaactcatgcccccatgtctaacaacatggctttctcaa

SEQ ID NO: 24326 - DNA, 43 bp, synthetic construct; identical to SEQ ID NO: 8133
  misc_feature 1..43: note = Probe
  source 1..43: mol_type = other DNA

SEQ ID NO: 24327 - DNA, 44 bp, synthetic construct; identical to SEQ ID NO: 8134
  misc_feature 1..44: note = Probe
  source 1..44: mol_type = other DNA

SEQ ID NO: 24328 - DNA, 25 bp, synthetic construct
  misc_feature 1..25: note = Probe
  source 1..25: mol_type = other DNA
tgctaataacgccaaggtcgcgggt

SEQ ID NO: 24329 - DNA, 21 bp, synthetic construct
  misc_feature 1..21: note = Probe
  source 1..21: mol_type = other DNA
tgctaatggtggagttaaaga

SEQ ID NO: 24330 - DNA, 36 bp, synthetic construct; identical to SEQ ID NO: 8139
  misc_feature 1..36: note = Probe
  source 1..36: mol_type = other DNA

SEQ ID NO: 24331 - DNA, 38 bp, synthetic construct; identical to SEQ ID NO: 8140
  misc_feature 1..38: note = Probe
  source 1..38: mol_type = other DNA

SEQ ID NO: 24332 - DNA, 39 bp, synthetic construct; identical to SEQ ID NO: 8141
  misc_feature 1..39: note = Probe
  source 1..39: mol_type = other DNA

SEQ ID NO: 24333 - DNA, 40 bp, synthetic construct; identical to SEQ ID NO: 8142
  misc_feature 1..40: note = Probe
  source 1..40: mol_type = other DNA

SEQ ID NO: 24334 - DNA, 41 bp, synthetic construct; identical to SEQ ID NO: 8143
  misc_feature 1..41: note = Probe
  source 1..41: mol_type = other DNA

SEQ ID NO: 24335 - DNA, 42 bp, synthetic construct; identical to SEQ ID NO: 8144
  misc_feature 1..42: note = Probe
  source 1..42: mol_type = other DNA

SEQ ID NO: 24336 - DNA, 43 bp, synthetic construct; identical to SEQ ID NO: 8145
  misc_feature 1..43: note = Probe
  source 1..43: mol_type = other DNA

SEQ ID NO: 24337 - DNA, 44 bp, synthetic construct; identical to SEQ ID NO: 8146
  misc_feature 1..44: note = Probe
  source 1..44: mol_type = other DNA

SEQ ID NO: 24338 - DNA, 16 bp, synthetic construct
  misc_feature 1..16: note = Probe
  source 1..16: mol_type = other DNA
tgctatcggagttttt

SEQ ID NO: 24339 - DNA, 23 bp, synthetic construct
  misc_feature 1..23: note = Probe
  source 1..23: mol_type = other DNA
tggaaagtgcacttggacgaacc

SEQ ID NO: 24340 - DNA, 43 bp, synthetic construct
  misc_feature 1..43: note = Probe
  source 1..43: mol_type = other DNA
tggactgtaaatctaaagacaggggttaggcctctttttacca

SEQ ID NO: 24341 - DNA, 46 bp, synthetic construct; identical to SEQ ID NO: 8148
  misc_feature 1..46: note = Probe
  source 1..46: mol_type = other DNA

SEQ ID NO: 24342 - DNA, 26 bp, synthetic construct
  misc_feature 1..26: note = Probe
  source 1..26: mol_type = other DNA
tggagttaaagactttttctctgatt

SEQ ID NO: 24343 - DNA, 27 bp, synthetic construct
  misc_feature 1..27: note = Probe
  source 1..27: mol_type = other DNA
tggagttaaagactttttctctgattt

SEQ ID NO: 24344 - DNA, 41 bp, synthetic construct
  misc_feature 1..41: note = Probe
  source 1..41: mol_type = other DNA
tggattctcagggatgggttcgattctcatagtcctagaaa

SEQ ID NO: 24345 - DNA, 20 bp, synthetic construct
  misc_feature 1..20: note = Probe
  source 1..20: mol_type = other DNA
tggcccaacccgtcatctac

SEQ ID NO: 24346 - DNA, 23 bp, synthetic construct
  misc_feature 1..23: note = Probe
  source 1..23: mol_type = other DNA
tggcccgggttcgactcccggta

SEQ ID NO: 24347 - DNA, 30 bp, synthetic construct
  misc_feature 1..30: note = Probe
  source 1..30: mol_type = other DNA
tggcccgggttcgactcccggtatgggaac

SEQ ID NO: 24348 - DNA, 32 bp, synthetic construct; identical to SEQ ID NO: 8153
  misc_feature 1..32: note = Probe
  source 1..32: mol_type = other DNA

SEQ ID NO: 24349 - DNA, 31 bp, synthetic construct
  misc_feature 1..31: note = Probe
  source 1..31: mol_type = other DNA
tggccgcccggctagctcagtcggtagagca

SEQ ID NO: 24350 - DNA, 16 bp, synthetic construct
  misc_feature 1..16: note = Probe
  source 1..16: mol_type = other DNA
tggctaggattcggcg

SEQ ID NO: 24351 - DNA, 34 bp, synthetic construct
  misc_feature 1..34: note = Probe
  source 1..34: mol_type = other DNA
tggctaggattcggcgctttcaccgccgcggccc

SEQ ID NO: 24352 - DNA, 23 bp, synthetic construct
  misc_feature 1..23: note = Probe
  source 1..23: mol_type = other DNA
tggctggctcgcgatgtctgttt

SEQ ID NO: 24353 - DNA, 24 bp, synthetic construct
  misc_feature 1..24: note = Probe
  source 1..24: mol_type = other DNA
tggctggctcgcgatgtctgtttt

SEQ ID NO: 24354 - DNA, 30 bp, synthetic construct
  misc_feature 1..30: note = Probe
  source 1..30: mol_type = other DNA
tgggcccataacccagaggtcgatggatcg

SEQ ID NO: 24355 - DNA, 29 bp, synthetic construct
  misc_feature 1..29: note = Probe
  source 1..29: mol_type = other DNA
tggggttcctcgcagcttcgctgcgtgag

SEQ ID NO: 24356 - DNA, 20 bp, synthetic construct
  misc_feature 1..20: note = Probe
  source 1..20: mol_type = other DNA
tggggtttccccgcacaggt

SEQ ID NO: 24357 - DNA, 20 bp, synthetic construct
  misc_feature 1..20: note = Probe
  source 1..20: mol_type = other DNA
tggggtttccccgcgcaggt

SEQ ID NO: 24358 - DNA, 22 bp, synthetic construct
  misc_feature 1..22: note = Probe
  source 1..22: mol_type = other DNA
tggggtttccccgcgcaggttc

SEQ ID NO: 24359 - DNA, 22 bp, synthetic construct
  misc_feature 1..22: note = Probe
  source 1..22: mol_type = other DNA
tggggttttgcagtccttagct

SEQ ID NO: 24360 - DNA, 21 bp, synthetic construct
  misc_feature 1..21: note = Probe
  source 1..21: mol_type = other DNA
tgggtgcgagaggtcccgggt

SEQ ID NO: 24361 - DNA, 22 bp, synthetic construct
  misc_feature 1..22: note = Probe
  source 1..22: mol_type = other DNA
tgggtgcgagaggtcccgggtt

SEQ ID NO: 24362 - DNA, 40 bp, synthetic construct; identical to SEQ ID NO: 8164
  misc_feature 1..40: note = Probe
  source 1..40: mol_type = other DNA

SEQ ID NO: 24363 - DNA, 24 bp, synthetic construct
  misc_feature 1..24: note = Probe
  source 1..24: mol_type = other DNA
tgggtggttcagtggtagaattct

SEQ ID NO: 24364 - DNA, 27 bp, synthetic construct
  misc_feature 1..27: note = Probe
  source 1..27: mol_type = other DNA
tgggtggttcagtggtagaattctcgc

SEQ ID NO: 24365 - DNA, 27 bp, synthetic construct
  misc_feature 1..27: note = Probe
  source 1..27: mol_type = other DNA
tgggttcgagccccacgttgggcggca

SEQ ID NO: 24366 - DNA, 25 bp, synthetic construct
  misc_feature 1..25: note = Probe
  source 1..25: mol_type = other DNA
tgggttcgattctcatagtcctaga

SEQ ID NO: 24367 - DNA, 34 bp, synthetic construct
  misc_feature 1..34: note = Probe
  source 1..34: mol_type = other DNA
tggtaagcatagctgccttccaagcagttgaccc

SEQ ID NO: 24368 - DNA, 16 bp, synthetic construct
  misc_feature 1..16: note = Probe
  source 1..16: mol_type = other DNA
tggtagaattctcgcc

SEQ ID NO: 24369 - DNA, 17 bp, synthetic construct
  misc_feature 1..17: note = Probe
  source 1..17: mol_type = other DNA
tggtagaattctcgcct

SEQ ID NO: 24370 - DNA, 18 bp, synthetic construct
  misc_feature 1..18: note = Probe
  source 1..18: mol_type = other DNA
tggtagaattctcgcctg

SEQ ID NO: 24371 - DNA, 19 bp, synthetic construct
  misc_feature 1..19: note = Probe
  source 1..19: mol_type = other DNA
tggtagaattctcgcctgc

SEQ ID NO: 24372 - DNA, 20 bp, synthetic construct
  misc_feature 1..20: note = Probe
  source 1..20: mol_type = other DNA
tggtagaattctcgcctgcc

SEQ ID NO: 24373 - DNA, 21 bp, synthetic construct
  misc_feature 1..21: note = Probe
  source 1..21: mol_type = other DNA
tggtagaattctcgcctgcca

SEQ ID NO: 24374 - DNA, 22 bp, synthetic construct
  misc_feature 1..22: note = Probe
  source 1..22: mol_type = other DNA
tggtagaattctcgcctgccac

SEQ ID NO: 24375 - DNA, 34 bp, synthetic construct
  misc_feature 1..34: note = Probe
  source 1..34: mol_type = other DNA
tggtagaattctcgcctgccacgcgggaggcccg

SEQ ID NO: 24376 - DNA, 37 bp, synthetic construct
  misc_feature 1..37: note = Probe
  source 1..37: mol_type = other DNA
tggtagaattctcgcctgccacgcgggaggcccgggt

SEQ ID NO: 24377 - DNA, 38 bp, synthetic construct
  misc_feature 1..38: note = Probe
  source 1..38: mol_type = other DNA
tggtagaattctcgcctgccacgcgggaggcccgggtt

SEQ ID NO: 24378 - DNA, 17 bp, synthetic construct
  misc_feature 1..17: note = Probe
  source 1..17: mol_type = other DNA
tggtatagtggtgagca

SEQ ID NO: 24379 - DNA, 23 bp, synthetic construct
  misc_feature 1..23: note = Probe
  source 1..23: mol_type = other DNA
tggtatagtggtgagcatagctg

SEQ ID NO: 24380 - DNA, 24 bp, synthetic construct
  misc_feature 1..24: note = Probe
  source 1..24: mol_type = other DNA
tggtatagtggtgagcatagctgc

SEQ ID NO: 24381 - DNA, 28 bp, synthetic construct
  misc_feature 1..28: note = Probe
  source 1..28: mol_type = other DNA
tggtatagtggtgagcatagctgccttc

SEQ ID NO: 24382 - DNA, 29 bp, synthetic construct
  misc_feature 1..29: note = Probe
  source 1..29: mol_type = other DNA
tggtatagtggtgagcatagctgccttcc

SEQ ID NO: 24383 - DNA, 42 bp, synthetic construct
  misc_feature 1..42: note = Probe
  source 1..42: mol_type = other DNA
tggtatagtggtgagcatagctgccttccaagcagttgaccc

SEQ ID NO: 24384 - DNA, 23 bp, synthetic construct
  misc_feature 1..23: note = Probe
  source 1..23: mol_type = other DNA
tggtatagtggttagcatagctg

SEQ ID NO: 24385 - DNA, 34 bp, synthetic construct
  misc_feature 1..34: note = Probe
  source 1..34: mol_type = other DNA
tggtatagtggttagcatagctgccttccaagca

SEQ ID NO: 24386 - DNA, 42 bp, synthetic construct; identical to SEQ ID NO: 1770
  misc_feature 1..42: note = Probe
  source 1..42: mol_type = other DNA

SEQ ID NO: 24387 - DNA, 28 bp, synthetic construct
  misc_feature 1..28: note = Probe
  source 1..28: mol_type = other DNA
tggtatatagtttaaacaaaacgaatga

SEQ ID NO: 24388 - DNA, 30 bp, synthetic construct
  misc_feature 1..30: note = Probe
  source 1..30: mol_type = other DNA
tggtatatagtttaaacaaaacgaatgatt

SEQ ID NO: 24389 - DNA, 36 bp, synthetic construct; identical to SEQ ID NO: 1771
  misc_feature 1..36: note = Probe
  source 1..36: mol_type = other DNA

SEQ ID NO: 24390 - DNA, 37 bp, synthetic construct; identical to SEQ ID NO: 1772
  misc_feature 1..37: note = Probe
  source 1..37: mol_type = other DNA

SEQ ID NO: 24391 - DNA, 39 bp, synthetic construct
  misc_feature 1..39: note = Probe
  source 1..39: mol_type = other DNA
tggtatatagtttaaacaaaacgaatgatttcgactcat

SEQ ID NO: 24392 - DNA, 50 bp, synthetic construct; identical to SEQ ID NO: 1773
  misc_feature 1..50: note = Probe
  source 1..50: mol_type = other DNA

SEQ ID NO: 24393 - DNA, 33 bp, synthetic construct
  misc_feature 1..33: note = Probe
  source 1..33: mol_type = other DNA
tggtatcatgcaagattcccattcttgcgaccc

SEQ ID NO: 24394 - DNA, 16 bp, synthetic construct
  misc_feature 1..16: note = Probe
  source 1..16: mol_type = other DNA
tggtatgattctcgct

SEQ ID NO: 24395 - DNA, 34 bp, synthetic construct
  misc_feature 1..34: note = Probe
  source 1..34: mol_type = other DNA
tggtatgattctcgctttgggtgcgagaggtccc

SEQ ID NO: 24396 - DNA, 38 bp, synthetic construct
  misc_feature 1..38: note = Probe
  source 1..38: mol_type = other DNA
tggtatgattctcgctttgggtgcgagaggtcccgggt

SEQ ID NO: 24397 - DNA, 23 bp, synthetic construct
  misc_feature 1..23: note = Probe
  source 1..23: mol_type = other DNA
tggtcgtggttgtagtccgtgcg

SEQ ID NO: 24398 - DNA, 25 bp, synthetic construct
  misc_feature 1..25: note = Probe
  source 1..25: mol_type = other DNA
tggtcgtggttgtagtccgtgcgag

SEQ ID NO: 24399 - DNA, 26 bp, synthetic construct
  misc_feature 1..26: note = Probe
  source 1..26: mol_type = other DNA
tggtcgtggttgtagtccgtgcgaga

SEQ ID NO: 24400 - DNA, 27 bp, synthetic construct
  misc_feature 1..27: note = Probe
  source 1..27: mol_type = other DNA
tggtcgtggttgtagtccgtgcgagaa

SEQ ID NO: 24401 - DNA, 30 bp, synthetic construct; identical to SEQ ID NO: 12156
  misc_feature 1..30: note = Probe
  source 1..30: mol_type = other DNA

SEQ ID NO: 24402 - DNA, 32 bp, synthetic construct; identical to SEQ ID NO: 8180
  misc_feature 1..32: note = Probe
  source 1..32: mol_type = other DNA

SEQ ID NO: 24403 - DNA, 24 bp, synthetic construct
  misc_feature 1..24: note = Probe
  source 1..24: mol_type = other DNA
tggtctagcggttaggattcctgg

SEQ ID NO: 24404 - DNA, 24 bp, synthetic construct
  misc_feature 1..24: note = Probe
  source 1..24: mol_type = other DNA
tggtctaggggtatgattctcgct

SEQ ID NO: 24405 - DNA, 24 bp, synthetic construct
  misc_feature 1..24: note = Probe
  source 1..24: mol_type = other DNA
tggtctagtggctaggattcggcg

SEQ ID NO: 24406 - DNA, 19 bp, synthetic construct
  misc_feature 1..19: note = Probe
  source 1..19: mol_type = other DNA
tggtctagtggttaggatt

SEQ ID NO: 24407 - DNA, 23 bp, synthetic construct
  misc_feature 1..23: note = Probe
  source 1..23: mol_type = other DNA
tggtctagtggttaggattcggc

SEQ ID NO: 24408 - DNA, 25 bp, synthetic construct
  misc_feature 1..25: note = Probe
  source 1..25: mol_type = other DNA
tggtctagtggttaggattcggcgc

SEQ ID NO: 24409 - DNA, 28 bp, synthetic construct
  misc_feature 1..28: note = Probe
  source 1..28: mol_type = other DNA
tggtctagtggttaggattcggcgctct

SEQ ID NO: 24410 - DNA, 29 bp, synthetic construct
  misc_feature 1..29: note = Probe
  source 1..29: mol_type = other DNA
tggtctagtggttaggattcggcgctctc

SEQ ID NO: 24411 - DNA, 31 bp, synthetic construct
  misc_feature 1..31: note = Probe
  source 1..31: mol_type = other DNA
tggtctagtggttaggattcggcgctctcac

SEQ ID NO: 24412 - DNA, 42 bp, synthetic construct
  misc_feature 1..42: note = Probe
  source 1..42: mol_type = other DNA
tggtctagtggttaggattcggcgctctcaccgccgcggccc

SEQ ID NO: 24413 - DNA, 22 bp, synthetic construct
  misc_feature 1..22: note = Probe
  source 1..22: mol_type = other DNA
tggtctccggatggaggcgtgg

SEQ ID NO: 24414 - DNA, 38 bp, synthetic construct
  misc_feature 1..38: note = Probe
  source 1..38: mol_type = other DNA
tggtgagcatagctgccttccaagcagttgacccgggt

SEQ ID NO: 24415 - DNA, 16 bp, synthetic construct
  misc_feature 1..16: note = Probe
  source 1..16: mol_type = other DNA
tggtgagtatccccgc

SEQ ID NO: 24416 - DNA, 20 bp, synthetic construct
  misc_feature 1..20: note = Probe
  source 1..20: mol_type = other DNA
tggtgagtatccccgcctgt

SEQ ID NO: 24417 - DNA, 33 bp, synthetic construct
  misc_feature 1..33: note = Probe
  source 1..33: mol_type = other DNA
tggtgagtatccccgcctgtcacgcgggagacc

SEQ ID NO: 24418 - DNA, 36 bp, synthetic construct
  misc_feature 1..36: note = Probe
  source 1..36: mol_type = other DNA
tggtgagtatccccgcctgtcacgcgggagaccggg

SEQ ID NO: 24419 - DNA, 28 bp, synthetic construct
  misc_feature 1..28: note = Probe
  source 1..28: mol_type = other DNA
tggtgctaataacgccaaggtcgcgggt

SEQ ID NO: 24420 - DNA, 30 bp, synthetic construct
  misc_feature 1..30: note = Probe
  source 1..30: mol_type = other DNA
tggtggagttaaagactttttctctgattt

SEQ ID NO: 24421 - DNA, 36 bp, synthetic construct
  misc_feature 1..36: note = Probe
  source 1..36: mol_type = other DNA
tggtggctccgtggcttagctggttaaagcgcctgt

SEQ ID NO: 24422 - DNA, 33 bp, synthetic construct
  misc_feature 1..33: note = Probe
  source 1..33: mol_type = other DNA
tggtggtctagtggctaggattcggcgctttca

SEQ ID NO: 24423 - DNA, 24 bp, synthetic construct
  misc_feature 1..24: note = Probe
  source 1..24: mol_type = other DNA
tggtggtctagtggttaggattcg

SEQ ID NO: 24424 - DNA, 25 bp, synthetic construct
  misc_feature 1..25: note = Probe
  source 1..25: mol_type = other DNA
tggtggtctagtggttaggattcgg

SEQ ID NO: 24425 - DNA, 26 bp, synthetic construct
  misc_feature 1..26: note = Probe
  source 1..26: mol_type = other DNA
tggtggtctagtggttaggattcggc

SEQ ID NO: 24426 - DNA, 28 bp, synthetic construct
  misc_feature 1..28: note = Probe
  source 1..28: mol_type = other DNA
tggtggtctagtggttaggattcggcgc

SEQ ID NO: 24427 - DNA, 23 bp, synthetic construct
  misc_feature 1..23: note = Probe
  source 1..23: mol_type = other DNA
tggtggttcagtggtagaattct

SEQ ID NO: 24428 - DNA, 27 bp, synthetic construct
  misc_feature 1..27: note = Probe
  source 1..27: mol_type = other DNA
tggtggttcagtggtagaattctcgcc

SEQ ID NO: 24429 - DNA, 28 bp, synthetic construct
  misc_feature 1..28: note = Probe
  source 1..28: mol_type = other DNA
tggtggttcagtggtagaattctcgcct

SEQ ID NO: 24430 - DNA, 29 bp, synthetic construct
  misc_feature 1..29: note = Probe
  source 1..29: mol_type = other DNA
tggtggttcagtggtagaattctcgcctg

SEQ ID NO: 24431 - DNA, 30 bp, synthetic construct; identical to SEQ ID NO: 8196
  misc_feature 1..30: note = Probe
  source 1..30: mol_type = other DNA

SEQ ID NO: 24432 - DNA, 31 bp, synthetic construct; identical to SEQ ID NO: 8197
  misc_feature 1..31: note = Probe
  source 1..31: mol_type = other DNA

SEQ ID NO: 24433 - DNA, 20 bp, synthetic construct
  misc_feature 1..20: note = Probe
  source 1..20: mol_type = other DNA
tggtgtagtggtatcatgca

SEQ ID NO: 24434 - DNA, 21 bp, synthetic construct
  misc_feature 1..21: note = Probe
  source 1..21: mol_type = other DNA
tggtgtagtggtatcatgcaa

SEQ ID NO: 24435 - DNA, 25 bp, synthetic construct
  misc_feature 1..25: note = Probe
  source 1..25: mol_type = other DNA
tggtgtagtggtatcatgcaagatt

SEQ ID NO: 24436 - DNA, 27 bp, synthetic construct
  misc_feature 1..27: note = Probe
  source 1..27: mol_type = other DNA
tggtgtagtggtatcatgcaagattcc

SEQ ID NO: 24437 - DNA, 28 bp, synthetic construct
  misc_feature 1..28: note = Probe
  source 1..28: mol_type = other DNA
tggtgtagtggtatcatgcaagattccc

SEQ ID NO: 24438 - DNA, 16 bp, synthetic construct
  misc_feature 1..16: note = Probe
  source 1..16: mol_type = other DNA
tggttagcactctgga

SEQ ID NO: 24439 - DNA, 18 bp, synthetic construct
  misc_feature 1..18: note = Probe
  source 1..18: mol_type = other DNA
tggttagcactctggact

SEQ ID NO: 24440 - DNA, 34 bp, synthetic construct
  misc_feature 1..34: note = Probe
  source 1..34: mol_type = other DNA
tggttagcactctggactctgaatccagcgatcc

SEQ ID NO: 24441 - DNA, 38 bp, synthetic construct
  misc_feature 1..38: note = Probe
  source 1..38: mol_type = other DNA
tggttagcactctggactctgaatccagcgatccgagt

SEQ ID NO: 24442 - DNA, 38 bp, synthetic construct
  misc_feature 1..38: note = Probe
  source 1..38: mol_type = other DNA
tggttagcatagctgccttccaagcagttgacccgggt

SEQ ID NO: 24443 - DNA, 21 bp, synthetic construct
  misc_feature 1..21: note = Probe
  source 1..21: mol_type = other DNA
tggttaggattcggcgctctc

SEQ ID NO: 24444 - DNA, 30 bp, synthetic construct
  misc_feature 1..30: note = Probe
  source 1..30: mol_type = other DNA
tggttaggattcggcgctctcaccgccgcg

SEQ ID NO: 24445 - DNA, 31 bp, synthetic construct
  misc_feature 1..31: note = Probe
  source 1..31: mol_type = other DNA
tggttaggattcggcgctctcaccgccgcgg

SEQ ID NO: 24446 - DNA, 33 bp, synthetic construct
  misc_feature 1..33: note = Probe
  source 1..33: mol_type = other DNA
tggttaggattcggcgctctcaccgccgcggcc

SEQ ID NO: 24447 - DNA, 35 bp, synthetic construct
  misc_feature 1..35: note = Probe
  source 1..35: mol_type = other DNA
tggttaggattcggcgctctcaccgccgcggcccg

SEQ ID NO: 24448 - DNA, 38 bp, synthetic construct
  misc_feature 1..38: note = Probe
  source 1..38: mol_type = other DNA
tggttaggattcggcgctctcaccgccgcggcccgggt

SEQ ID NO: 24449 - DNA, 16 bp, synthetic construct
  misc_feature 1..16: note = Probe
  source 1..16: mol_type = other DNA
tggttagtactctgcg

SEQ ID NO: 24450 - DNA, 19 bp, synthetic construct
  misc_feature 1..19: note = Probe
  source 1..19: mol_type = other DNA
tggttagtactctgcgttg

SEQ ID NO: 24451 - DNA, 38 bp, synthetic construct
  misc_feature 1..38: note = Probe
  source 1..38: mol_type = other DNA
tggttagtatccccgcctgtcacgcgggagaccggggt

SEQ ID NO: 24452 - DNA, 25 bp, synthetic construct
  misc_feature 1..25: note = Probe
  source 1..25: mol_type = other DNA
tggttatacccttcccgtactaatt

SEQ ID NO: 24453 - DNA, 39 bp, synthetic construct
  misc_feature 1..39: note = Probe
  source 1..39: mol_type = other DNA
tggttatcacgtctgctttacacgcagaaggtcctgggt

SEQ ID NO: 24454 - DNA, 16 bp, synthetic construct
  misc_feature 1..16: note = Probe
  source 1..16: mol_type = other DNA
tggttcagtggtagaa

SEQ ID NO: 24455 - DNA, 19 bp, synthetic construct
  misc_feature 1..19: note = Probe
  source 1..19: mol_type = other DNA
tggttcagtggtagaattc

SEQ ID NO: 24456 - DNA, 20 bp, synthetic construct
  misc_feature 1..20: note = Probe
  source 1..20: mol_type = other DNA
tggttcagtggtagaattct

SEQ ID NO: 24457 - DNA, 22 bp, synthetic construct
  misc_feature 1..22: note = Probe
  source 1..22: mol_type = other DNA
tggttcagtggtagaattctcg

SEQ ID NO: 24458 - DNA, 23 bp, synthetic construct
  misc_feature 1..23: note = Probe
  source 1..23: mol_type = other DNA
tggttcagtggtagaattctcgc

SEQ ID NO: 24459 - DNA, 24 bp, synthetic construct
  misc_feature 1..24: note = Probe
  source 1..24: mol_type = other DNA
tggttcagtggtagaattctcgcc

SEQ ID NO: 24460 - DNA, 25 bp, synthetic construct
  misc_feature 1..25: note = Probe
  source 1..25: mol_type = other DNA
tggttcagtggtagaattctcgcct

SEQ ID NO: 24461 - DNA, 26 bp, synthetic construct
  misc_feature 1..26: note = Probe
  source 1..26: mol_type = other DNA
tggttcagtggtagaattctcgcctg

SEQ ID NO: 24462 - DNA, 27 bp, synthetic construct
  misc_feature 1..27: note = Probe
  source 1..27: mol_type = other DNA
tggttcagtggtagaattctcgcctgc

SEQ ID NO: 24463 - DNA, 28 bp, synthetic construct
  misc_feature 1..28: note = Probe
  source 1..28: mol_type = other DNA
tggttcagtggtagaattctcgcctgcc

SEQ ID NO: 24464 - DNA, 32 bp, synthetic construct
  misc_feature 1..32: note = Probe
  source 1..32: mol_type = other DNA
tggttcagtggtagaattctcgcctgccacgc

SEQ ID NO: 24465 - DNA, 33 bp, synthetic construct
  misc_feature 1..33: note = Probe
  source 1..33: mol_type = other DNA
tggttcagtggtagaattctcgcctgccacgcg

SEQ ID NO: 24466 - DNA, 41 bp, synthetic construct; identical to SEQ ID NO: 8211
  misc_feature 1..41: note = Probe
  source 1..41: mol_type = other DNA

SEQ ID NO: 24467 - DNA, 50 bp, synthetic construct; identical to SEQ ID NO: 8215
  misc_feature 1..50: note = Probe
  source 1..50: mol_type = other DNA

SEQ ID NO: 24468 - DNA, 24 bp, synthetic construct
  misc_feature 1..24: note = Probe
  source 1..24: mol_type = other DNA
tggttgtagtccgtgcgagaataa

SEQ ID NO: 24469 - DNA, 26 bp, synthetic construct
  misc_feature 1..26: note = Probe
  source 1..26: mol_type = other DNA
tggttgtagtccgtgcgagaataatg

SEQ ID NO: 24470 - DNA, 21 bp, synthetic construct
  misc_feature 1..21: note = Probe
  source 1..21: mol_type = other DNA
tgtaaacaggagatcctgggt

SEQ ID NO: 24471 - DNA, 38 bp, synthetic construct; identical to SEQ ID NO: 8222
  misc_feature 1..38: note = Probe
  source 1..38: mol_type = other DNA

SEQ ID NO: 24472 - DNA, 27 bp, synthetic construct
  misc_feature 1..27: note = Probe
  source 1..27: mol_type = other DNA
tgtaaatatagtttaaccaaaacatca

SEQ ID NO: 24473 - DNA, 29 bp, synthetic construct
  misc_feature 1..29: note = Probe
  source 1..29: mol_type = other DNA
tgtaaatatagtttaaccaaaacatcaga

SEQ ID NO: 24474 - DNA, 33 bp, synthetic construct; identical to SEQ ID NO: 8227
  misc_feature 1..33: note = Probe
  source 1..33: mol_type = other DNA

SEQ ID NO: 24475 - DNA, 43 bp, synthetic construct; identical to SEQ ID NO: 8233
  misc_feature 1..43: note = Probe
  source 1..43: mol_type = other DNA

SEQ ID NO: 24476 - DNA, 44 bp, synthetic construct; identical to SEQ ID NO: 8234
  misc_feature 1..44: note = Probe
  source 1..44: mol_type = other DNA

SEQ ID NO: 24477 - DNA, 46 bp, synthetic construct; identical to SEQ ID NO: 8236
  misc_feature 1..46: note = Probe
  source 1..46: mol_type = other DNA

SEQ ID NO: 24478 - DNA, 50 bp, synthetic construct; identical to SEQ ID NO: 8238
  misc_feature 1..50: note = Probe
  source 1..50: mol_type = other DNA

SEQ ID NO: 24479 - DNA, 39 bp, synthetic construct; identical to SEQ ID NO: 8240
  misc_feature 1..39: note = Probe
  source 1..39: mol_type = other DNA

SEQ ID NO: 24480 - DNA, 18 bp, synthetic construct
  misc_feature 1..18: note = Probe
  source 1..18: mol_type = other DNA
tgtagcggttatcacatt

SEQ ID NO: 24481 - DNA, 19 bp, synthetic construct
  misc_feature 1..19: note = Probe
  source 1..19: mol_type = other DNA
tgtagtccgtgcgagaata

SEQ ID NO: 24482 - DNA, 20 bp, synthetic construct
  misc_feature 1..20: note = Probe
  source 1..20: mol_type = other DNA
tgtagtccgtgcgagaataa

SEQ ID NO: 24483 - DNA, 22 bp, synthetic construct
  misc_feature 1..22: note = Probe
  source 1..22: mol_type = other DNA
tgtagtccgtgcgagaataatg

SEQ ID NO: 24484 - DNA, 40 bp, synthetic construct
  misc_feature 1..40: note = Probe
  source 1..40: mol_type = other DNA
tgtagtggtatcatgcaagattcccattcttgcgacccgg

SEQ ID NO: 24485 - DNA, 18 bp, synthetic construct
  misc_feature 1..18: note = Probe
  source 1..18: mol_type = other DNA
tgtagtggttatcacgtt

SEQ ID NO: 24486 - DNA, 34 bp, synthetic construct
  misc_feature 1..34: note = Probe
  source 1..34: mol_type = other DNA
tgtatgaggccccgggttcgatccccggcatctc

SEQ ID NO: 24487 - DNA, 36 bp, synthetic construct
  misc_feature 1..36: note = Probe
  source 1..36: mol_type = other DNA
tgtatgaggccccgggttcgatccccggcatctcca

SEQ ID NO: 24488 - DNA, 39 bp, synthetic construct
  misc_feature 1..39: note = Probe
  source 1..39: mol_type = other DNA
tgtatgaggccccgggttcgatccccggcatctccagtg

SEQ ID NO: 24489 - DNA, 38 bp, synthetic construct
  misc_feature 1..38: note = Probe
  source 1..38: mol_type = other DNA
tgtatgaggccccgggttcgatccccggcatctccatt

SEQ ID NO: 24490 - DNA, 39 bp, synthetic construct
  misc_feature 1..39: note = Probe
  source 1..39: mol_type = other DNA
tgtatgaggccccgggttcgatccccggcatctccattg

SEQ ID NO: 24491 - DNA, 45 bp, synthetic construct
  misc_feature 1..45: note = Probe
  source 1..45: mol_type = other DNA
tgtatgaggccccgggttcgatccccggcatctccattgtagttt

SEQ ID NO: 24492 - DNA, 50 bp, synthetic construct
  misc_feature 1..50: note = Probe
  source 1..50: mol_type = other DNA
tgtatgaggccccgggttcgatccccggcatctccattgtagttttgttg

SEQ ID NO: 24493 - DNA, 39 bp, synthetic construct
  misc_feature 1..39: note = Probe
  source 1..39: mol_type = other DNA
tgtatgaggcctcgggttcgatccccgacacctccaagc

SEQ ID NO: 24494 - DNA, 39 bp, synthetic construct
  misc_feature 1..39: note = Probe
  source 1..39: mol_type = other DNA
tgtatgaggtcccgggttcgatccccggcacctccaaac

SEQ ID NO: 24495 - DNA, 36 bp, synthetic construct
  misc_feature 1..36: note = Probe
  source 1..36: mol_type = other DNA
tgtatgaggtcccgggttcgatccccggcatctcca

SEQ ID NO: 24496 - DNA, 38 bp, synthetic construct
  misc_feature 1..38: note = Probe
  source 1..38: mol_type = other DNA
tgtatgaggtcccgggttcgatccccggcatctccaag

SEQ ID NO: 24497 - DNA, 39 bp, synthetic construct; identical to SEQ ID NO: 8248
  misc_feature 1..39: note = Probe
  source 1..39: mol_type = other DNA

SEQ ID NO: 24498 - DNA, 38 bp, synthetic construct
  misc_feature 1..38: note = Probe
  source 1..38: mol_type = other DNA
tgtatgaggtcccgggttcgatccccggcatctccaat

SEQ ID NO: 24499 - DNA, 39 bp, synthetic construct
  misc_feature 1..39: note = Probe
  source 1..39: mol_type = other DNA
tgtatgaggtcccgggttcgatccccggcatctccaata

SEQ ID NO: 24500 - DNA, 31 bp, synthetic construct; identical to SEQ ID NO: 8251
  misc_feature 1..31: note = Probe
  source 1..31: mol_type = other DNA

SEQ ID NO: 24501 - DNA, 37 bp, synthetic construct; identical to SEQ ID NO: 8252
  misc_feature 1..37: note = Probe
  source 1..37: mol_type = other DNA

SEQ ID NO: 24502 - DNA, 34 bp, synthetic construct
  misc_feature 1..34: note = Probe
  source 1..34: mol_type = other DNA
tgtcaaagttaaattataggctaaatcctatata

SEQ ID NO: 24503 - DNA, 16 bp, synthetic construct
  misc_feature 1..16: note = Probe
  source 1..16: mol_type = other DNA
tgtcacgcgggagacc

SEQ ID NO: 24504 - DNA, 18 bp, synthetic construct
  misc_feature 1..18: note = Probe
  source 1..18: mol_type = other DNA
tgtcacgcgggagaccgg

SEQ ID NO: 24505 - DNA, 20 bp, synthetic construct
  misc_feature 1..20: note = Probe
  source 1..20: mol_type = other DNA
tgtcacgcgggagaccgggg

SEQ ID NO: 24506 - DNA, 23 bp, synthetic construct
  misc_feature 1..23: note = Probe
  source 1..23: mol_type = other DNA
tgtcacgcgggagaccggggttc

SEQ ID NO: 24507 - DNA, 24 bp, synthetic construct
  misc_feature 1..24: note = Probe
  source 1..24: mol_type = other DNA
tgtcacgcgggagaccggggttca

SEQ ID NO: 24508 - DNA, 25 bp, synthetic construct
  misc_feature 1..25: note = Probe
  source 1..25: mol_type = other DNA
tgtcacgcgggagaccggggttcaa

SEQ ID NO: 24509 - DNA, 38 bp, synthetic construct
  misc_feature 1..38: note = Probe
  source 1..38: mol_type = other DNA
tgtcacgcgggagaccggggttcaattccccgacgggg

SEQ ID NO: 24510 - DNA, 39 bp, synthetic construct
  misc_feature 1..39: note = Probe
  source 1..39: mol_type = other DNA
tgtcacgcgggagaccggggttcaattccccgacgggga

SEQ ID NO: 24511 - DNA, 43 bp, synthetic construct; identical to SEQ ID NO: 8254
  misc_feature 1..43: note = Probe
  source 1..43: mol_type = other DNA

SEQ ID NO: 24512 - DNA, 24 bp, synthetic construct
  misc_feature 1..24: note = Probe
  source 1..24: mol_type = other DNA
tgtcacgcgggagaccggggttcg

SEQ ID NO: 24513 - DNA, 25 bp, synthetic construct
  misc_feature 1..25: note = Probe
  source 1..25: mol_type = other DNA
tgtcacgcgggagaccggggttcga

SEQ ID NO: 24514 - DNA, 26 bp, synthetic construct
  misc_feature 1..26: note = Probe
  source 1..26: mol_type = other DNA
tgtcacgcgggagaccggggttcgat

SEQ ID NO: 24515 - DNA, 27 bp, synthetic construct
  misc_feature 1..27: note = Probe
  source 1..27: mol_type = other DNA
tgtcacgcgggagaccggggttcgatt

SEQ ID NO: 24516 - DNA, 39 bp, synthetic construct
  misc_feature 1..39: note = Probe
  source 1..39: mol_type = other DNA
tgtcacgcgggagaccggggttcgattccccgacgggga

SEQ ID NO: 24517 - DNA, 41 bp, synthetic construct
  misc_feature 1..41: note = Probe
  source 1..41: mol_type = other DNA
tgtcacgcgggagaccggggttcgattccccgacggggaga

SEQ ID NO: 24518 - DNA, 43 bp, synthetic construct
  misc_feature 1..43: note = Probe
  source 1..43: mol_type = other DNA
tgtcacgcgggagaccggggttcgattccccgacggggagaaa

SEQ ID NO: 24519 - DNA, 43 bp, synthetic construct
  misc_feature 1..43: note = Probe
  source 1..43: mol_type = other DNA
tgtcacgcgggagaccggggttcgattccccgacggggagacg

SEQ ID NO: 24520 - DNA, 43 bp, synthetic construct; identical to SEQ ID NO: 8255
  misc_feature 1..43: note = Probe
  source 1..43: mol_type = other DNA

SEQ ID NO: 24521 - DNA, 41 bp, synthetic construct
  misc_feature 1..41: note = Probe
  source 1..41: mol_type = other DNA
tgtcacgcgggagaccggggttcgattccccgacggggagg

SEQ ID NO: 24522 - DNA, 42 bp, synthetic construct
  misc_feature 1..42: note = Probe
  source 1..42: mol_type = other DNA
tgtcacgcgggagaccggggttcgattccccgacggggaggc

SEQ ID NO: 24523 - DNA, 43 bp, synthetic construct; identical to SEQ ID NO: 8257
  misc_feature 1..43: note = Probe
  source 1..43: mol_type = other DNA

SEQ ID NO: 24524 - DNA, 49 bp, synthetic construct; identical to SEQ ID NO: 8258
  misc_feature 1..49: note = Probe
  source 1..49: mol_type = other DNA

SEQ ID NO: 24525 - DNA, 50 bp, synthetic construct; identical to SEQ ID NO: 8259
  misc_feature 1..50: note = Probe
  source 1..50: mol_type = other DNA

SEQ ID NO: 24526 - DNA, 43 bp, synthetic construct
  misc_feature 1..43: note = Probe
  source 1..43: mol_type = other DNA
tgtcacgcgggagaccggggttcgattccccgacggggaggcc

SEQ ID NO: 24527 - DNA, 50 bp, synthetic construct
  misc_feature 1..50: note = Probe
  source 1..50: mol_type = other DNA
tgtcacgcgggagaccggggttcgattccccgacggggaggccaagtacg

SEQ ID NO: 24528 - DNA, 25 bp, synthetic construct
  misc_feature 1..25: note = Probe
  source 1..25: mol_type = other DNA
tgtctaacaacatggctttctcaac

SEQ ID NO: 24529 - DNA, 29 bp, synthetic construct
  misc_feature 1..29: note = Probe
  source 1..29: mol_type = other DNA
tgtgaatctgacaacagaggcttacgacc

SEQ ID NO: 24530 - DNA, 30 bp, synthetic construct
  misc_feature 1..30: note = Probe
  source 1..30: mol_type = other DNA
tgtgaatctgacaacagaggcttacgaccc

SEQ ID NO: 24531 - DNA, 40 bp, synthetic construct
  misc_feature 1..40: note = Probe
  source 1..40: mol_type = other DNA
tgtgaatctgacaacagaggcttacgaccccttatttacc

SEQ ID NO: 24532 - DNA, 41 bp, synthetic construct; identical to SEQ ID NO: 8269
  misc_feature 1..41: note = Probe
  source 1..41: mol_type = other DNA

SEQ ID NO: 24533 - DNA, 42 bp, synthetic construct; identical to SEQ ID NO: 8270
  misc_feature 1..42: note = Probe
  source 1..42: mol_type = other DNA

SEQ ID NO: 24534 - DNA, 43 bp, synthetic construct; identical to SEQ ID NO: 8271
  misc_feature 1..43: note = Probe
  source 1..43: mol_type = other DNA

SEQ ID NO: 24535 - DNA, 18 bp, synthetic construct
  misc_feature 1..18: note = Probe
  source 1..18: mol_type = other DNA
tgtgctccggagttacct

SEQ ID NO: 24536 - DNA, 20 bp, synthetic construct
  misc_feature 1..20: note = Probe
  source 1..20: mol_type = other DNA
tgtgctccggagttacctcg

SEQ ID NO: 24537 - DNA, 21 bp, synthetic construct
  misc_feature 1..21: note = Probe
  source 1..21: mol_type = other DNA
tgtgctccggagttacctcgt

SEQ ID NO: 24538 - DNA, 22 bp, synthetic construct
  misc_feature 1..22: note = Probe
  source 1..22: mol_type = other DNA
tgtgctccggagttacctcgtt

SEQ ID NO: 24539 - DNA, 23 bp, synthetic construct
  misc_feature 1..23: note = Probe
  source 1..23: mol_type = other DNA
tgtgctccggagttacctcgttt

SEQ ID NO: 24540 - DNA, 24 bp, synthetic construct
  misc_feature 1..24: note = Probe
  source 1..24: mol_type = other DNA
tgtgctccggagttacctcgtttt

SEQ ID NO: 24541 - DNA, 25 bp, synthetic construct
  misc_feature 1..25: note = Probe
  source 1..25: mol_type = other DNA
tgtgctccggagttacctcgttttg

SEQ ID NO: 24542 - DNA, 16 bp, synthetic construct
  misc_feature 1..16: note = Probe
  source 1..16: mol_type = other DNA
tgtggccgcagcaacc

SEQ ID NO: 24543 - DNA, 18 bp, synthetic construct
  misc_feature 1..18: note = Probe
  source 1..18: mol_type = other DNA
tgtgtcaggatggccgag

SEQ ID NO: 24544 - DNA, 38 bp, synthetic construct
  misc_feature 1..38: note = Probe
  source 1..38: mol_type = other DNA
tgttaactaagtgtttgtgggtttaagtcccattggtc

SEQ ID NO: 24545 - DNA, 39 bp, synthetic construct
  misc_feature 1..39: note = Probe
  source 1..39: mol_type = other DNA
tgttaactaagtgtttgtgggtttaagtcccattggtct

SEQ ID NO: 24546 - DNA, 42 bp, synthetic construct
  misc_feature 1..42: note = Probe
  source 1..42: mol_type = other DNA
tgttaactaagtgtttgtgggtttaagtcccattggtctagt

SEQ ID NO: 24547 - DNA, 43 bp, synthetic construct; identical to SEQ ID NO: 8277
  misc_feature 1..43: note = Probe
  source 1..43: mol_type = other DNA

SEQ ID NO: 24548 - DNA, 44 bp, synthetic construct; identical to SEQ ID NO: 8278
  misc_feature 1..44: note = Probe
  source 1..44: mol_type = other DNA

SEQ ID NO: 24549 - DNA, 16 bp, synthetic construct
  misc_feature 1..16: note = Probe
  source 1..16: mol_type = other DNA
tgtttagacgggctca

SEQ ID NO: 24550 - DNA, 18 bp, synthetic construct
  misc_feature 1..18: note = Probe
  source 1..18: mol_type = other DNA
tgtttagacgggctcaca

SEQ ID NO: 24551 - DNA, 19 bp, synthetic construct
  misc_feature 1..19: note = Probe
  source 1..19: mol_type = other DNA
tgtttagacgggctcacat

SEQ ID NO: 24552 - DNA, 21 bp, synthetic construct
  misc_feature 1..21: note = Probe
  source 1..21: mol_type = other DNA
tgtttagacgggctcacatca

SEQ ID NO: 24553 - DNA, 26 bp, synthetic construct
  misc_feature 1..26: note = Probe
  source 1..26: mol_type = other DNA
tgtttagacgggctcacatcacccca

SEQ ID NO: 24554 - DNA, 29 bp, synthetic construct
  misc_feature 1..29: note = Probe
  source 1..29: mol_type = other DNA
tgtttagacgggctcacatcaccccataa

SEQ ID NO: 24555 - DNA, 34 bp, synthetic construct; identical to SEQ ID NO: 8288
  misc_feature 1..34: note = Probe
  source 1..34: mol_type = other DNA

SEQ ID NO: 24556 - DNA, 35 bp, synthetic construct; identical to SEQ ID NO: 8289
  misc_feature 1..35: note = Probe
  source 1..35: mol_type = other DNA

SEQ ID NO: 24557 - DNA, 36 bp, synthetic construct; identical to SEQ ID NO: 8290
  misc_feature 1..36: note = Probe
  source 1..36: mol_type = other DNA

SEQ ID NO: 24558 - DNA, 25 bp, synthetic construct
  misc_feature 1..25: note = Probe
  source 1..25: mol_type = other DNA
tgtttgtgggtttaagtcccattgg

SEQ ID NO: 24559 - DNA, 27 bp, synthetic construct
  misc_feature 1..27: note = Probe
  source 1..27: mol_type = other DNA
tgtttgtgggtttaagtcccattggtc

SEQ ID NO: 24560 - DNA, 28 bp, synthetic construct
  misc_feature 1..28: note = Probe
  source 1..28: mol_type = other DNA
tgtttgtgggtttaagtcccattggtct

SEQ ID NO: 24561 - DNA, 29 bp, synthetic construct
  misc_feature 1..29: note = Probe
  source 1..29: mol_type = other DNA
tgtttgtgggtttaagtcccattggtcta

SEQ ID NO: 24562 - DNA, 31 bp, synthetic construct; identical to SEQ ID NO: 8293
  misc_feature 1..31: note = Probe
  source 1..31: mol_type = other DNA

SEQ ID NO: 24563 - DNA, 32 bp, synthetic construct; identical to SEQ ID NO: 8294
  misc_feature 1..32: note = Probe
  source 1..32: mol_type = other DNA

SEQ ID NO: 24564 - DNA, 36 bp, synthetic construct
  misc_feature 1..36: note = Probe
  source 1..36: mol_type = other DNA
ttaaagattaagagaaccaacacctctttacagtga

SEQ ID NO: 24565 - DNA, 39 bp, synthetic construct; identical to SEQ ID NO: 8298
  misc_feature 1..39: note = Probe
  source 1..39: mol_type = other DNA

SEQ ID NO: 24566 - DNA, 17 bp, synthetic construct
  misc_feature 1..17: note = Probe
  source 1..17: mol_type = other DNA
ttaacacaaagcaccca

SEQ ID NO: 24567 - DNA, 31 bp, synthetic construct; identical to SEQ ID NO: 8301
  misc_feature 1..31: note = Probe
  source 1..31: mol_type = other DNA

SEQ ID NO: 24568 - DNA, 32 bp, synthetic construct; identical to SEQ ID NO: 8302
  misc_feature 1..32: note = Probe
  source 1..32: mol_type = other DNA

SEQ ID NO: 24569 - DNA, 33 bp, synthetic construct; identical to SEQ ID NO: 8303
  misc_feature 1..33: note = Probe
  source 1..33: mol_type = other DNA

SEQ ID NO: 24570 - DNA, 34 bp, synthetic construct; identical to SEQ ID NO: 8304
  misc_feature 1..34: note = Probe
  source 1..34: mol_type = other DNA

SEQ ID NO: 24571 - DNA, 35 bp, synthetic construct
  misc_feature 1..35: note = Probe
  source 1..35: mol_type = other DNA
ttaaccaaaacatcagattgtgaatctgacaacag

SEQ ID NO: 24572 - DNA, 37 bp, synthetic construct; identical to SEQ ID NO: 1786
  misc_feature 1..37: note = Probe
  source 1..37: mol_type = other DNA

SEQ ID NO: 24573 - DNA, 32 bp, synthetic construct; identical to SEQ ID NO: 8314
  misc_feature 1..32: note = Probe
  source 1..32: mol_type = other DNA

SEQ ID NO: 24574 - DNA, 36 bp, synthetic construct; identical to SEQ ID NO: 1789
  misc_feature 1..36: note = Probe
  source 1..36: mol_type = other DNA

SEQ ID NO: 24575 - DNA, 37 bp, synthetic construct; identical to SEQ ID NO: 1790
  misc_feature 1..37: note = Probe
  source 1..37: mol_type = other DNA

SEQ ID NO: 24576 - DNA, 38 bp, synthetic construct; identical to SEQ ID NO: 1791
  misc_feature 1..38: note = Probe
  source 1..38: mol_type = other DNA

SEQ ID NO: 24577 - DNA, 40 bp, synthetic construct; identical to SEQ ID NO: 8317
  misc_feature 1..40: note = Probe
  source 1..40: mol_type = other DNA

SEQ ID NO: 24578 - DNA, 41 bp, synthetic construct; identical to SEQ ID NO: 8318
  misc_feature 1..41: note = Probe
  source 1..41: mol_type = other DNA

SEQ ID NO: 24579 - DNA, 42 bp, synthetic construct; identical to SEQ ID NO: 8319
  misc_feature 1..42: note = Probe
  source 1..42: mol_type = other DNA

SEQ ID NO: 24580 - DNA, 30 bp, synthetic construct
  misc_feature 1..30: note = Probe
  source 1..30: mol_type = other DNA
ttaactagttttgacaacattcaaaaaaga

SEQ ID NO: 24581 - DNA, 36 bp, synthetic construct
  misc_feature 1..36: note = Probe
  source 1..36: mol_type = other DNA
ttaactagttttgacaacattcaaaaaagagtaata

SEQ ID NO: 24582 - DNA, 20 bp, synthetic construct
  misc_feature 1..20: note = Probe
  source 1..20: mol_type = other DNA
ttaacttgaccgctctgagc

SEQ ID NO: 24583 - DNA, 21 bp, synthetic construct
  misc_feature 1..21: note = Probe
  source 1..21: mol_type = other DNA
ttaacttgaccgctctgagct

SEQ ID NO: 24584 - DNA, 30 bp, synthetic construct; identical to SEQ ID NO: 12276
  misc_feature 1..30: note = Probe
  source 1..30: mol_type = other DNA

SEQ ID NO: 24585 - DNA, 32 bp, synthetic construct; identical to SEQ ID NO: 8326
  misc_feature 1..32: note = Probe
  source 1..32: mol_type = other DNA

SEQ ID NO: 24586 - DNA, 44 bp, synthetic construct; identical to SEQ ID NO: 8328
  misc_feature 1..44: note = Probe
  source 1..44: mol_type = other DNA

SEQ ID NO: 24587 - DNA, 38 bp, synthetic construct
  misc_feature 1..38: note = Probe
  source 1..38: mol_type = other DNA
ttacacgcagaaggtcctgggttcgagccccagtggaa

SEQ ID NO: 24588 - DNA, 39 bp, synthetic construct
  misc_feature 1..39: note = Probe
  source 1..39: mol_type = other DNA
ttacacgcagaaggtcctgggttcgagccccagtggaac

SEQ ID NO: 24589 - DNA, 44 bp, synthetic construct; identical to SEQ ID NO: 8329
  misc_feature 1..44: note = Probe
  source 1..44: mol_type = other DNA

SEQ ID NO: 24590 - DNA, 27 bp, synthetic construct
  misc_feature 1..27: note = Probe
  source 1..27: mol_type = other DNA
ttacacttaggagatttcaacttaact

SEQ ID NO: 24591 - DNA, 33 bp, synthetic construct; identical to SEQ ID NO: 8333
  misc_feature 1..33: note = Probe
  source 1..33: mol_type = other DNA

SEQ ID NO: 24592 - DNA, 35 bp, synthetic construct; identical to SEQ ID NO: 8334
  misc_feature 1..35: note = Probe
  source 1..35: mol_type = other DNA

SEQ ID NO: 24593 - DNA, 37 bp, synthetic construct; identical to SEQ ID NO: 8335
  misc_feature 1..37: note = Probe
  source 1..37: mol_type = other DNA

SEQ ID NO: 24594 - DNA, 39 bp, synthetic construct; identical to SEQ ID NO: 8336
  misc_feature 1..39: note = Probe
  source 1..39: mol_type = other DNA

SEQ ID NO: 24595 - DNA, 41 bp, synthetic construct; identical to SEQ ID NO: 8338
  misc_feature 1..41: note = Probe
  source 1..41: mol_type = other DNA

SEQ ID NO: 24596 - DNA, 42 bp, synthetic construct; identical to SEQ ID NO: 8339
  misc_feature 1..42: note = Probe
  source 1..42: mol_type = other DNA

SEQ ID NO: 24597 - DNA, 43 bp, synthetic construct; identical to SEQ ID NO: 8340
  misc_feature 1..43: note = Probe
  source 1..43: mol_type = other DNA

SEQ ID NO: 24598 - DNA, 27 bp, synthetic construct
  misc_feature 1..27: note = Probe
  source 1..27: mol_type = other DNA
ttacagtcagaggttcaattcctcttc

SEQ ID NO: 24599 - DNA, 28 bp, synthetic construct
  misc_feature 1..28: note = Probe
  source 1..28: mol_type = other DNA
ttacagtcagaggttcaattcctcttct

SEQ ID NO: 24600 - DNA, 29 bp, synthetic construct
  misc_feature 1..29: note = Probe
  source 1..29: mol_type = other DNA
ttacagtcagaggttcaattcctcttctt

SEQ ID NO: 24601 - DNA, 30 bp, synthetic construct
  misc_feature 1..30: note = Probe
  source 1..30: mol_type = other DNA
ttacagtcagaggttcaattcctcttctta

SEQ ID NO: 24602 - DNA, 33 bp, synthetic construct
  misc_feature 1..33: note = Probe
  source 1..33: mol_type = other DNA
ttacagtcagaggttcaattcctcttcttaaca

SEQ ID NO: 24603 - DNA, 35 bp, synthetic construct
  misc_feature 1..35: note = Probe
  source 1..35: mol_type = other DNA
ttacagtcagaggttcaattcctcttcttaacaac

SEQ ID NO: 24604 - DNA, 36 bp, synthetic construct
  misc_feature 1..36: note = Probe
  source 1..36: mol_type = other DNA
ttacagtcagaggttcaattcctcttcttaacaaca

SEQ ID NO: 24605 - DNA, 36 bp, synthetic construct
  misc_feature 1..36: note = Probe
  source 1..36: mol_type = other DNA
ttactttgatagagtaaataataggagcttaaaccc

SEQ ID NO: 24606 - DNA, 37 bp, synthetic construct; identical to SEQ ID NO: 8347
  misc_feature 1..37: note = Probe
  source 1..37: mol_type = other DNA

SEQ ID NO: 24607 - DNA, 38 bp, synthetic construct
  misc_feature 1..38: note = Probe
  source 1..38: mol_type = other DNA
ttactttgatagagtaaataataggagcttaaaccccc

SEQ ID NO: 24608 - DNA, 39 bp, synthetic construct; identical to SEQ ID NO: 8348
  misc_feature 1..39: note = Probe
  source 1..39: mol_type = other DNA

SEQ ID NO: 24609 - DNA, 41 bp, synthetic construct
  misc_feature 1..41: note = Probe
  source 1..41: mol_type = other DNA
ttactttgatagagtaaataataggagcttaaaccccctta

SEQ ID NO: 24610 - DNA, 23 bp, synthetic construct
  misc_feature 1..23: note = Probe
  source 1..23: mol_type = other DNA
ttagacgggctcacatcacccca

SEQ ID NO: 24611 - DNA, 24 bp, synthetic construct
  misc_feature 1..24: note = Probe
  source 1..24: mol_type = other DNA
ttagacgggctcacatcaccccat

SEQ ID NO: 24612 - DNA, 25 bp, synthetic construct
  misc_feature 1..25: note = Probe
  source 1..25: mol_type = other DNA
ttagacgggctcacatcaccccata

SEQ ID NO: 24613 - DNA, 26 bp, synthetic construct
  misc_feature 1..26: note = Probe
  source 1..26: mol_type = other DNA
ttagacgggctcacatcaccccataa

SEQ ID NO: 24614 - DNA, 27 bp, synthetic construct
  misc_feature 1..27: note = Probe
  source 1..27: mol_type = other DNA
ttagacgggctcacatcaccccataaa

SEQ ID NO: 24615 - DNA, 29 bp, synthetic construct
  misc_feature 1..29: note = Probe
  source 1..29: mol_type = other DNA
ttagacgggctcacatcaccccataaaca

SEQ ID NO: 24616 - DNA, 30 bp, synthetic construct; identical to SEQ ID NO: 8357
  misc_feature 1..30: note = Probe
  source 1..30: mol_type = other DNA

SEQ ID NO: 24617 - DNA, 31 bp, synthetic construct; identical to SEQ ID NO: 8358
  misc_feature 1..31: note = Probe
  source 1..31: mol_type = other DNA

SEQ ID NO: 24618 - DNA, 32 bp, synthetic construct; identical to SEQ ID NO: 8359
  misc_feature 1..32: note = Probe
  source 1..32: mol_type = other DNA

SEQ ID NO: 24619 - DNA, 36 bp, synthetic construct
  misc_feature 1..36: note = Probe
  source 1..36: mol_type = other DNA
ttagcattaaccttttaagttaaagattaagagaac

SEQ ID NO: 24620 - DNA, 50 bp, synthetic construct; identical to SEQ ID NO: 1795
  misc_feature 1..50: note = Probe
  source 1..50: mol_type = other DNA

SEQ ID NO: 24621 - DNA, 26 bp, synthetic construct
  misc_feature 1..26: note = Probe
  source 1..26: mol_type = other DNA
ttaggagatttcaacttaacttgacc

SEQ ID NO: 24622 - DNA, 29 bp, synthetic construct
  misc_feature 1..29: note = Probe
  source 1..29: mol_type = other DNA
ttaggagatttcaacttaacttgaccgct

SEQ ID NO: 24623 - DNA, 31 bp, synthetic construct; identical to SEQ ID NO: 8368
  misc_feature 1..31: note = Probe
  source 1..31: mol_type = other DNA

SEQ ID NO: 24624 - DNA, 33 bp, synthetic construct; identical to SEQ ID NO: 8370
  misc_feature 1..33: note = Probe
  source 1..33: mol_type = other DNA

SEQ ID NO: 24625 - DNA, 35 bp, synthetic construct; identical to SEQ ID NO: 8372
  misc_feature 1..35: note = Probe
  source 1..35: mol_type = other DNA

SEQ ID NO: 24626 - DNA, 36 bp, synthetic construct; identical to SEQ ID NO: 8373
  misc_feature 1..36: note = Probe
  source 1..36: mol_type = other DNA

SEQ ID NO: 24627 - DNA, 19 bp, synthetic construct
  misc_feature 1..19: note = Probe
  source 1..19: mol_type = other DNA
ttagggtgcgagaggtccc

SEQ ID NO: 24628 - DNA, 20 bp, synthetic construct
  misc_feature 1..20: note = Probe
  source 1..20: mol_type = other DNA
ttagggtgcgagaggtcccg

SEQ ID NO: 24629 - DNA, 22 bp, synthetic construct
  misc_feature 1..22: note = Probe
  source 1..22: mol_type = other DNA
ttagggtgcgagaggtcccggg

SEQ ID NO: 24630 - DNA, 23 bp, synthetic construct
  misc_feature 1..23: note = Probe
  source 1..23: mol_type = other DNA
ttagggtgcgagaggtcccgggt

SEQ ID NO: 24631 - DNA, 24 bp, synthetic construct
  misc_feature 1..24: note = Probe
  source 1..24: mol_type = other DNA
ttagggtgcgagaggtcccgggtt

SEQ ID NO: 24632 - DNA, 38 bp, synthetic construct
  misc_feature 1..38: note = Probe
  source 1..38: mol_type = other DNA
ttagggtgcgagaggtcccgggttcaaatcccggacga

SEQ ID NO: 24633 - DNA, 50 bp, synthetic construct; identical to SEQ ID NO: 8377
  misc_feature 1..50: note = Probe
  source 1..50: mol_type = other DNA

SEQ ID NO: 24634 - DNA, 31 bp, synthetic construct
  misc_feature 1..31: note = Probe
  source 1..31: mol_type = other DNA
ttaggtcgctggttcgattccggctcgaagg

SEQ ID NO: 24635 - DNA, 33 bp, synthetic construct
  misc_feature 1..33: note = Probe
  source 1..33: mol_type = other DNA
ttcaaaggttccgggttcgagtcccggcggagt

SEQ ID NO: 24636 - DNA, 38 bp, synthetic construct
  misc_feature 1..38: note = Probe
  source 1..38: mol_type = other DNA
ttcaaaggttccgggttcgagtcccggcggagtcgtaa

SEQ ID NO: 24637 - DNA, 23 bp, synthetic construct
  misc_feature 1..23: note = Probe
  source 1..23: mol_type = other DNA
ttcaaatcccggacgagccccct

SEQ ID NO: 24638 - DNA, 17 bp, synthetic construct
  misc_feature 1..17: note = Probe
  source 1..17: mol_type = other DNA
ttcaacttaacttgacc

SEQ ID NO: 24639 - DNA, 20 bp, synthetic construct
  misc_feature 1..20: note = Probe
  source 1..20: mol_type = other DNA
ttcaacttaacttgaccgct

SEQ ID NO: 24640 - DNA, 24 bp, synthetic construct
  misc_feature 1..24: note = Probe
  source 1..24: mol_type = other DNA
ttcaacttaacttgaccgctctga

SEQ ID NO: 24641 - DNA, 25 bp, synthetic construct
  misc_feature 1..25: note = Probe
  source 1..25: mol_type = other DNA
ttcaacttaacttgaccgctctgag

SEQ ID NO: 24642 - DNA, 26 bp, synthetic construct
  misc_feature 1..26: note = Probe
  source 1..26: mol_type = other DNA
ttcaacttaacttgaccgctctgagc

SEQ ID NO: 24643 - DNA, 27 bp, synthetic construct
  misc_feature 1..27: note = Probe
  source 1..27: mol_type = other DNA
ttcaacttaacttgaccgctctgagct

SEQ ID NO: 24644 - DNA, 23 bp, synthetic construct
  misc_feature 1..23: note = Probe
  source 1..23: mol_type = other DNA
ttcaagtccctgttcgggcggca

SEQ ID NO: 24645 - DNA, 23 bp, synthetic construct
  misc_feature 1..23: note = Probe
  source 1..23: mol_type = other DNA
ttcaattccccgacggggaggtg

SEQ ID NO: 24646 - DNA, 23 bp, synthetic construct
  misc_feature 1..23: note = Probe
  source 1..23: mol_type = other DNA
ttcaattcccggtcagggaacca

SEQ ID NO: 24647 - DNA, 17 bp, synthetic construct
  misc_feature 1..17: note = Probe
  source 1..17: mol_type = other DNA
ttcaggtcgcagtctcc

SEQ ID NO: 24648 - DNA, 29 bp, synthetic construct
  misc_feature 1..29: note = Probe
  source 1..29: mol_type = other DNA
ttcagttgatgcagagtggggttttgcag

SEQ ID NO: 24649 - DNA, 33 bp, synthetic construct; identical to SEQ ID NO: 8394
  misc_feature 1..33: note = Probe
  source 1..33: mol_type = other DNA

SEQ ID NO: 24650 - DNA, 36 bp, synthetic construct; identical to SEQ ID NO: 8396
  misc_feature 1..36: note = Probe
  source 1..36: mol_type = other DNA

SEQ ID NO: 24651 - DNA, 37 bp, synthetic construct; identical to SEQ ID NO: 8397
  misc_feature 1..37: note = Probe
  source 1..37: mol_type = other DNA

SEQ ID NO: 24652 - DNA, 38 bp, synthetic construct; identical to SEQ ID NO: 8398
  misc_feature 1..38: note = Probe
  source 1..38: mol_type = other DNA

SEQ ID NO: 24653 - DNA, 39 bp, synthetic construct; identical to SEQ ID NO: 8399
  misc_feature 1..39: note = Probe
  source 1..39: mol_type = other DNA

SEQ ID NO: 24654 - DNA, 40 bp, synthetic construct; identical to SEQ ID NO: 8400
  misc_feature 1..40: note = Probe
  source 1..40: mol_type = other DNA

SEQ ID NO: 24655 - DNA, 41 bp, synthetic construct
  misc_feature 1..41: note = Probe
  source 1..41: mol_type = other DNA
ttcagttgatgcagagtggggttttgcagtccttagctgtt

SEQ ID NO: 24656 - DNA, 42 bp, synthetic construct
  misc_feature 1..42: note = Probe
  source 1..42: mol_type = other DNA
ttcagttgatgcagagtggggttttgcagtccttagctgtta

SEQ ID NO: 24657 - DNA, 41 bp, synthetic construct; identical to SEQ ID NO: 8401
  misc_feature 1..41: note = Probe
  source 1..41: mol_type = other DNA

SEQ ID NO: 24658 - DNA, 42 bp, synthetic construct; identical to SEQ ID NO: 8402
  misc_feature 1..42: note = Probe
  source 1..42: mol_type = other DNA

SEQ ID NO: 24659 - DNA, 43 bp, synthetic construct
  misc_feature 1..43: note = Probe
  source 1..43: mol_type = other DNA
ttccaagcagttgacccgggttcgattcccggccaacgcaagt

SEQ ID NO: 24660 - DNA, 43 bp, synthetic construct
  misc_feature 1..43: note = Probe
  source 1..43: mol_type = other DNA
ttccaagcagttgacccgggttcgattcccggccaacgcagtg

SEQ ID NO: 24661 - DNA, 41 bp, synthetic construct; identical to SEQ ID NO: 8406
  misc_feature 1..41: note = Probe
  source 1..41: mol_type = other DNA

SEQ ID NO: 24662 - DNA, 42 bp, synthetic construct; identical to SEQ ID NO: 8407
  misc_feature 1..42: note = Probe
  source 1..42: mol_type = other DNA

SEQ ID NO: 24663 - DNA, 29 bp, synthetic construct
  misc_feature 1..29: note = Probe
  source 1..29: mol_type = other DNA
ttccatagtgtagtggttatcacatctgc

SEQ ID NO: 24664 - DNA, 26 bp, synthetic construct
  misc_feature 1..26: note = Probe
  source 1..26: mol_type = other DNA
ttccatagtgtagtggttatcacgtc

SEQ ID NO: 24665 - DNA, 30 bp, synthetic construct
  misc_feature 1..30: note = Probe
  source 1..30: mol_type = other DNA
ttccatagtgtagtggttatcacgtctgct

SEQ ID NO: 24666 - DNA, 31 bp, synthetic construct; identical to SEQ ID NO: 8408
  misc_feature 1..31: note = Probe
  source 1..31: mol_type = other DNA

SEQ ID NO: 24667 - DNA, 32 bp, synthetic construct
  misc_feature 1..32: note = Probe
  source 1..32: mol_type = other DNA
ttccatagtgtagtggttatcacgtctgcttt

SEQ ID NO: 24668 - DNA, 33 bp, synthetic construct
  misc_feature 1..33: note = Probe
  source 1..33: mol_type = other DNA
ttccatagtgtagtggttatcacgtctgcttta

SEQ ID NO: 24669 - DNA, 34 bp, synthetic construct
  misc_feature 1..34: note = Probe
  source 1..34: mol_type = other DNA
ttccatagtgtagtggttatcacgtctgctttac

SEQ ID NO: 24670 - DNA, 17 bp, synthetic construct
  misc_feature 1..17: note = Probe
  source 1..17: mol_type = other DNA
ttcccattcttgcgacc

SEQ ID NO: 24671 - DNA, 21 bp, synthetic construct
  misc_feature 1..21: note = Probe
  source 1..21: mol_type = other DNA
ttcccattcttgcgacccggg

SEQ ID NO: 24672 - DNA, 23 bp, synthetic construct
  misc_feature 1..23: note = Probe
  source 1..23: mol_type = other DNA
ttcccattcttgcgacccgggtt

SEQ ID NO: 24673 - DNA, 24 bp, synthetic construct
  misc_feature 1..24: note = Probe
  source 1..24: mol_type = other DNA
ttcccattcttgcgacccgggttc

SEQ ID NO: 24674 - DNA, 17 bp, synthetic construct
  misc_feature 1..17: note = Probe
  source 1..17: mol_type = other DNA
ttcccggtcagggaacc

SEQ ID NO: 24675 - DNA, 18 bp, synthetic construct
  misc_feature 1..18: note = Probe
  source 1..18: mol_type = other DNA
ttcccggtcagggaacca

SEQ ID NO: 24676 - DNA, 34 bp, synthetic construct
  misc_feature 1..34: note = Probe
  source 1..34: mol_type = other DNA
ttccctggtggtctagtggttaggattcggcgct

SEQ ID NO: 24677 - DNA, 23 bp, synthetic construct
  misc_feature 1..23: note = Probe
  source 1..23: mol_type = other DNA
ttccggatcagaagattgagggt

SEQ ID NO: 24678 - DNA, 18 bp, synthetic construct
  misc_feature 1..18: note = Probe
  source 1..18: mol_type = other DNA
ttccggctcgaaggaagc

SEQ ID NO: 24679 - DNA, 18 bp, synthetic construct
  misc_feature 1..18: note = Probe
  source 1..18: mol_type = other DNA
ttccggctcgaaggactt

SEQ ID NO: 24680 - DNA, 26 bp, synthetic construct
  misc_feature 1..26: note = Probe
  source 1..26: mol_type = other DNA
ttccgtagtgtagcggttatcacatt

SEQ ID NO: 24681 - DNA, 30 bp, synthetic construct
  misc_feature 1..30: note = Probe
  source 1..30: mol_type = other DNA
ttccgtagtgtagcggttatcacattcgcc

SEQ ID NO: 24682 - DNA, 32 bp, synthetic construct; identical to SEQ ID NO: 8419
  misc_feature 1..32: note = Probe
  source 1..32: mol_type = other DNA

SEQ ID NO: 24683 - DNA, 33 bp, synthetic construct; identical to SEQ ID NO: 8420
  misc_feature 1..33: note = Probe
  source 1..33: mol_type = other DNA

SEQ ID NO: 24684 - DNA, 26 bp, synthetic construct
  misc_feature 1..26: note = Probe
  source 1..26: mol_type = other DNA
ttccgtagtgtagtggtcatcacgtt

SEQ ID NO: 24685 - DNA, 29 bp, synthetic construct
  misc_feature 1..29: note = Probe
  source 1..29: mol_type = other DNA
ttccgtagtgtagtggtcatcacgttcgc

SEQ ID NO: 24686 - DNA, 30 bp, synthetic construct
  misc_feature 1..30: note = Probe
  source 1..30: mol_type = other DNA
ttccgtagtgtagtggtcatcacgttcgcc

SEQ ID NO: 24687 - DNA, 31 bp, synthetic construct; identical to SEQ ID NO: 8421
  misc_feature 1..31: note = Probe
  source 1..31: mol_type = other DNA

SEQ ID NO: 24688 - DNA, 32 bp, synthetic construct
  misc_feature 1..32: note = Probe
  source 1..32: mol_type = other DNA
ttccgtagtgtagtggtcatcacgttcgccta

SEQ ID NO: 24689 - DNA, 33 bp, synthetic construct; identical to SEQ ID NO: 8422
  misc_feature 1..33: note = Probe
  source 1..33: mol_type = other DNA

SEQ ID NO: 24690 - DNA, 34 bp, synthetic construct
  misc_feature 1..34: note = Probe
  source 1..34: mol_type = other DNA
ttccgtagtgtagtggtcatcacgttcgcctaac

SEQ ID NO: 24691 - DNA, 26 bp, synthetic construct
  misc_feature 1..26: note = Probe
  source 1..26: mol_type = other DNA
ttccgtagtgtagtggttatcacgtt

SEQ ID NO: 24692 - DNA, 28 bp, synthetic construct
  misc_feature 1..28: note = Probe
  source 1..28: mol_type = other DNA
ttccgtagtgtagtggttatcacgttcg

SEQ ID NO: 24693 - DNA, 29 bp, synthetic construct
  misc_feature 1..29: note = Probe
  source 1..29: mol_type = other DNA
ttccgtagtgtagtggttatcacgttcgc

SEQ ID NO: 24694 - DNA, 30 bp, synthetic construct; identical to SEQ ID NO: 8425
  misc_feature 1..30: note = Probe
  source 1..30: mol_type = other DNA

SEQ ID NO: 24695 - DNA, 31 bp, synthetic construct; identical to SEQ ID NO: 8426
  misc_feature 1..31: note = Probe
  source 1..31: mol_type = other DNA

SEQ ID NO: 24696 - DNA, 32 bp, synthetic construct
  misc_feature 1..32: note = Probe
  source 1..32: mol_type = other DNA
ttccgtagtgtagtggttatcacgttcgccta

SEQ ID NO: 24697 - DNA, 50 bp, synthetic construct
  misc_feature 1..50: note = Probe
  source 1..50: mol_type = other DNA
ttccgtagtgtagtggttatcacgttcgcctaacacgcgaaaggtccccg

SEQ ID NO: 24698 - DNA, 32 bp, synthetic construct; identical to SEQ ID NO: 8427
  misc_feature 1..32: note = Probe
  source 1..32: mol_type = other DNA

SEQ ID NO: 24699 - DNA, 33 bp, synthetic construct; identical to SEQ ID NO: 8428
  misc_feature 1..33: note = Probe
  source 1..33: mol_type = other DNA

SEQ ID NO: 24700 - DNA, 34 bp, synthetic construct; identical to SEQ ID NO: 8429
  misc_feature 1..34: note = Probe
  source 1..34: mol_type = other DNA

SEQ ID NO: 24701 - DNA, 50 bp, synthetic construct
  misc_feature 1..50: note = Probe
  source 1..50: mol_type = other DNA
ttccgtagtgtagtggttatcacgttcgcctcacacgcgaaaggtccccg

SEQ ID NO: 24702 - DNA, 16 bp, synthetic construct
  misc_feature 1..16: note = Probe
  source 1..16: mol_type = other DNA
ttccgtgggtttgttt

SEQ ID NO: 24703 - DNA, 17 bp, synthetic construct
  misc_feature 1..17: note = Probe
  source 1..17: mol_type = other DNA
ttccgtgggtttgtttt

SEQ ID NO: 24704 - DNA, 18 bp, synthetic construct
  misc_feature 1..18: note = Probe
  source 1..18: mol_type = other DNA
ttccgtgggtttgttttt

SEQ ID NO: 24705 - DNA, 26 bp, synthetic construct
  misc_feature 1..26: note = Probe
  source 1..26: mol_type = other DNA
ttccgtggtgtagtggttatcacatt

SEQ ID NO: 24706 - DNA, 30 bp, synthetic construct
  misc_feature 1..30: note = Probe
  source 1..30: mol_type = other DNA
ttccgtggtgtagtggttatcacattcgcc

SEQ ID NO: 24707 - DNA, 31 bp, synthetic construct
  misc_feature 1..31: note = Probe
  source 1..31: mol_type = other DNA
ttccgtggtgtagtggttatcacattcgcct

SEQ ID NO: 24708 - DNA, 23 bp, synthetic construct
  misc_feature 1..23: note = Probe
  source 1..23: mol_type = other DNA
ttcctgtcccgtacggtttttct

SEQ ID NO: 24709 - DNA, 35 bp, synthetic construct; identical to SEQ ID NO: 8437
  misc_feature 1..35: note = Probe
  source 1..35: mol_type = other DNA

SEQ ID NO: 24710 - DNA, 36 bp, synthetic construct; identical to SEQ ID NO: 8438
  misc_feature 1..36: note = Probe
  source 1..36: mol_type = other DNA

SEQ ID NO: 24711 - DNA, 23 bp, synthetic construct
  misc_feature 1..23: note = Probe
  source 1..23: mol_type = other DNA
ttcgaatcccaccgctgccacac

SEQ ID NO: 24712 - DNA, 23 bp, synthetic construct
  misc_feature 1..23: note = Probe
  source 1..23: mol_type = other DNA
ttcgaatcccagcggtgcctccg

SEQ ID NO: 24713 - DNA, 34 bp, synthetic construct
  misc_feature 1..34: note = Probe
  source 1..34: mol_type = other DNA
ttcgactcattaaattatgataatcatatttacc

SEQ ID NO: 24714 - DNA, 38 bp, synthetic construct
  misc_feature 1..38: note = Probe
  source 1..38: mol_type = other DNA
ttcgactcattaaattatgataatcatatttaccaaat

SEQ ID NO: 24715 - DNA, 39 bp, synthetic construct; identical to SEQ ID NO: 8444
  misc_feature 1..39: note = Probe
  source 1..39: mol_type = other DNA

SEQ ID NO: 24716 - DNA, 23 bp, synthetic construct
  misc_feature 1..23: note = Probe
  source 1..23: mol_type = other DNA
ttcgactcccggtatgggaacaa

SEQ ID NO: 24717 - DNA, 22 bp, synthetic construct
  misc_feature 1..22: note = Probe
  source 1..22: mol_type = other DNA
ttcgactcccggtgtgggaacg

SEQ ID NO: 24718 - DNA, 23 bp, synthetic construct
  misc_feature 1..23: note = Probe
  source 1..23: mol_type = other DNA
ttcgactcccggtgtgggaacgc

SEQ ID NO: 24719 - DNA, 23 bp, synthetic construct
  misc_feature 1..23: note = Probe
  source 1..23: mol_type = other DNA
ttcgagcccacccagggacgcct

SEQ ID NO: 24720 - DNA, 17 bp, synthetic construct
  misc_feature 1..17: note = Probe
  source 1..17: mol_type = other DNA
ttcgatagctcagctgg

SEQ ID NO: 24721 - DNA, 17 bp, synthetic construct
  misc_feature 1..17: note = Probe
  source 1..17: mol_type = other DNA
ttcgatagctcagttgg

SEQ ID NO: 24722 - DNA, 23 bp, synthetic construct
  misc_feature 1..23: note = Probe
  source 1..23: mol_type = other DNA
ttcgatccccggcatctccattg

SEQ ID NO: 24723 - DNA, 23 bp, synthetic construct
  misc_feature 1..23: note = Probe
  source 1..23: mol_type = other DNA
ttcgatccccgtacgggccactg

SEQ ID NO: 24724 - DNA, 23 bp, synthetic construct
  misc_feature 1..23: note = Probe
  source 1..23: mol_type = other DNA
ttcgattccccgacggggaggca

SEQ ID NO: 24725 - DNA, 23 bp, synthetic construct
  misc_feature 1..23: note = Probe
  source 1..23: mol_type = other DNA
ttcgattcccggccaacgcaagt

SEQ ID NO: 24726 - DNA, 23 bp, synthetic construct
  misc_feature 1..23: note = Probe
  source 1..23: mol_type = other DNA
ttcgattcccggccaacgcagtg

SEQ ID NO: 24727 - DNA, 16 bp, synthetic construct
  misc_feature 1..16: note = Probe
  source 1..16: mol_type = other DNA
ttcgattcccggtcag

SEQ ID NO: 24728 - DNA, 17 bp, synthetic construct
  misc_feature 1..17: note = Probe
  source 1..17: mol_type = other DNA
ttcgattcccggtcagg

SEQ ID NO: 24729 - DNA, 22 bp, synthetic construct
  misc_feature 1..22: note = Probe
  source 1..22: mol_type = other DNA
ttcgattcccggtcagggaaca

SEQ ID NO: 24730 - DNA, 23 bp, synthetic construct
  misc_feature 1..23: note = Probe
  source 1..23: mol_type = other DNA
ttcgattcccggtcagggaacaa

SEQ ID NO: 24731 - DNA, 23 bp, synthetic construct
  misc_feature 1..23: note = Probe
  source 1..23: mol_type = other DNA
ttcgattcccggtcatggaacca

SEQ ID NO: 24732 - DNA, 23 bp, synthetic construct
  misc_feature 1..23: note = Probe
  source 1..23: mol_type = other DNA
ttcgattcctggtcagggaacca

SEQ ID NO: 24733 - DNA, 24 bp, synthetic construct
  misc_feature 1..24: note = Probe
  source 1..24: mol_type = other DNA
ttcgccttaattttaataatcaac

SEQ ID NO: 24734 - DNA, 29 bp, synthetic construct
  misc_feature 1..29: note = Probe
  source 1..29: mol_type = other DNA
ttcggcgctctcaccgccgcggcccgggt

SEQ ID NO: 24735 - DNA, 19 bp, synthetic construct
  misc_feature 1..19: note = Probe
  source 1..19: mol_type = other DNA
ttcgggtgcgagaggtccc

SEQ ID NO: 24736 - DNA, 20 bp, synthetic construct
  misc_feature 1..20: note = Probe
  source 1..20: mol_type = other DNA
ttcgggtgcgagaggtcccg

SEQ ID NO: 24737 - DNA, 22 bp, synthetic construct
  misc_feature 1..22: note = Probe
  source 1..22: mol_type = other DNA
ttcgggtgcgagaggtcccggg

SEQ ID NO: 24738 - DNA, 23 bp, synthetic construct
  misc_feature 1..23: note = Probe
  source 1..23: mol_type = other DNA
ttcgggtgcgagaggtcccgggt

SEQ ID NO: 24739 - DNA, 24 bp, synthetic construct
  misc_feature 1..24: note = Probe
  source 1..24: mol_type = other DNA
ttcgggtgcgagaggtcccgggtt

SEQ ID NO: 24740 - DNA, 38 bp, synthetic construct
  misc_feature 1..38: note = Probe
  source 1..38: mol_type = other DNA
ttcgggtgcgagaggtcccgggttcaaatcccggacga

SEQ ID NO: 24741 - DNA, 37 bp, synthetic construct; identical to SEQ ID NO: 8466
  misc_feature 1..37: note = Probe
  source 1..37: mol_type = other DNA

SEQ ID NO: 24742 - DNA, 31 bp, synthetic construct
  misc_feature 1..31: note = Probe
  source 1..31: mol_type = other DNA
ttctgtagtgtagtggttatcacgttcgcct

SEQ ID NO: 24743 - DNA, 33 bp, synthetic construct
  misc_feature 1..33: note = Probe
  source 1..33: mol_type = other DNA
ttctgtagtgtagtggttatcacgttcgcctca

SEQ ID NO: 24744 - DNA, 33 bp, synthetic construct
  misc_feature 1..33: note = Probe
  source 1..33: mol_type = other DNA
ttcttgcgacccgggttcgattcccgggcggcg

SEQ ID NO: 24745 - DNA, 36 bp, synthetic construct
  misc_feature 1..36: note = Probe
  source 1..36: mol_type = other DNA
ttcttgcgacccgggttcgattcccgggcggcgcac

SEQ ID NO: 24746 - DNA, 37 bp, synthetic construct; identical to SEQ ID NO: 8467
  misc_feature 1..37: note = Probe
  source 1..37: mol_type = other DNA

SEQ ID NO: 24747 - DNA, 38 bp, synthetic construct; identical to SEQ ID NO: 8468
  misc_feature 1..38: note = Probe
  source 1..38: mol_type = other DNA

SEQ ID NO: 24748 - DNA, 38 bp, synthetic construct
  misc_feature 1..38: note = Probe
  source 1..38: mol_type = other DNA
ttcttgcgacccgggttcgattcccgggcggcgcatag

SEQ ID NO: 24749 - DNA, 24 bp, synthetic construct
  misc_feature 1..24: note = Probe
  source 1..24: mol_type = other DNA
ttgacaacattcaaaaaagagtaa

SEQ ID NO: 24750 - DNA, 25 bp, synthetic construct
  misc_feature 1..25: note = Probe
  source 1..25: mol_type = other DNA
ttgacaacattcaaaaaagagtaat

SEQ ID NO: 24751 - DNA, 26 bp, synthetic construct
  misc_feature 1..26: note = Probe
  source 1..26: mol_type = other DNA
ttgacaacattcaaaaaagagtaata

SEQ ID NO: 24752 - DNA, 45 bp, synthetic construct; identical to SEQ ID NO: 8473
  misc_feature 1..45: note = Probe
  source 1..45: mol_type = other DNA

SEQ ID NO: 24753 - DNA, 33 bp, synthetic construct; identical to SEQ ID NO: 8474
  misc_feature 1..33: note = Probe
  source 1..33: mol_type = other DNA

SEQ ID NO: 24754 - DNA, 43 bp, synthetic construct; identical to SEQ ID NO: 8477
  misc_feature 1..43: note = Probe
  source 1..43: mol_type = other DNA

SEQ ID NO: 24755 - DNA, 16 bp, synthetic construct
  misc_feature 1..16: note = Probe
  source 1..16: mol_type = other DNA
ttgccatgttaacgtt

SEQ ID NO: 24756 - DNA, 17 bp, synthetic construct
  misc_feature 1..17: note = Probe
  source 1..17: mol_type = other DNA
ttgccatgttaacgttt

SEQ ID NO: 24757 - DNA, 18 bp, synthetic construct
  misc_feature 1..18: note = Probe
  source 1..18: mol_type = other DNA
ttgccatgttaacgtttt

SEQ ID NO: 24758 - DNA, 50 bp, synthetic construct; identical to SEQ ID NO: 8478
  misc_feature 1..50: note = Probe
  source 1..50: mol_type = other DNA

SEQ ID NO: 24759 - DNA, 18 bp, synthetic construct
  misc_feature 1..18: note = Probe
  source 1..18: mol_type = other DNA
ttgggtgcgagaggtccc

SEQ ID NO: 24760 - DNA, 20 bp, synthetic construct
  misc_feature 1..20: note = Probe
  source 1..20: mol_type = other DNA
ttgggtgcgagaggtcccgg

SEQ ID NO: 24761 - DNA, 21 bp, synthetic construct
  misc_feature 1..21: note = Probe
  source 1..21: mol_type = other DNA
ttgggtgcgagaggtcccggg

SEQ ID NO: 24762 - DNA, 23 bp, synthetic construct
  misc_feature 1..23: note = Probe
  source 1..23: mol_type = other DNA
ttgggtgcgagaggtcccgggtt

SEQ ID NO: 24763 - DNA, 41 bp, synthetic construct; identical to SEQ ID NO: 8481
  misc_feature 1..41: note = Probe
  source 1..41: mol_type = other DNA

SEQ ID NO: 24764 - DNA, 28 bp, synthetic construct
  misc_feature 1..28: note = Probe
  source 1..28: mol_type = other DNA
ttggtcgtggttgtagtccgtgcgagaa

SEQ ID NO: 24765 - DNA, 30 bp, synthetic construct
  misc_feature 1..30: note = Probe
  source 1..30: mol_type = other DNA
ttggtcgtggttgtagtccgtgcgagaata

SEQ ID NO: 24766 - DNA, 33 bp, synthetic construct; identical to SEQ ID NO: 8484
  misc_feature 1..33: note = Probe
  source 1..33: mol_type = other DNA

SEQ ID NO: 24767 - DNA, 29 bp, synthetic construct
  misc_feature 1..29: note = Probe
  source 1..29: mol_type = other DNA
ttggtggtatagtggtgagcatagctgcc

SEQ ID NO: 24768 - DNA, 32 bp, synthetic construct
  misc_feature 1..32: note = Probe
  source 1..32: mol_type = other DNA
ttggtggtatagtggtgagcatagctgccttc

SEQ ID NO: 24769 - DNA, 32 bp, synthetic construct
  misc_feature 1..32: note = Probe
  source 1..32: mol_type = other DNA
ttggtggtatagtggttagcatagctgccttc

SEQ ID NO: 24770 - DNA, 24 bp, synthetic construct
  misc_feature 1..24: note = Probe
  source 1..24: mol_type = other DNA
ttggtggttcagtggtagaattct

SEQ ID NO: 24771 - DNA, 26 bp, synthetic construct
  misc_feature 1..26: note = Probe
  source 1..26: mol_type = other DNA
ttggtggttcagtggtagaattctcg

SEQ ID NO: 24772 - DNA, 27 bp, synthetic construct
  misc_feature 1..27: note = Probe
  source 1..27: mol_type = other DNA
ttggtggttcagtggtagaattctcgc

SEQ ID NO: 24773 - DNA, 28 bp, synthetic construct
  misc_feature 1..28: note = Probe
  source 1..28: mol_type = other DNA
ttggtggttcagtggtagaattctcgcc

SEQ ID NO: 24774 - DNA, 29 bp, synthetic construct
  misc_feature 1..29: note = Probe
  source 1..29: mol_type = other DNA
ttggtggttcagtggtagaattctcgcct

SEQ ID NO: 24775 - DNA, 30 bp, synthetic construct
  misc_feature 1..30: note = Probe
  source 1..30: mol_type = other DNA
ttggtggttcagtggtagaattctcgcctc

SEQ ID NO: 24776 - DNA, 30 bp, synthetic construct; identical to SEQ ID NO: 8491
  misc_feature 1..30: note = Probe
  source 1..30: mol_type = other DNA

SEQ ID NO: 24777 - DNA, 31 bp, synthetic construct; identical to SEQ ID NO: 8492
  misc_feature 1..31: note = Probe
  source 1..31: mol_type = other DNA

SEQ ID NO: 24778 - DNA, 32 bp, synthetic construct; identical to SEQ ID NO: 8493
  misc_feature 1..32: note = Probe
  source 1..32: mol_type = other DNA

SEQ ID NO: 24779 - DNA, 21 bp, synthetic construct
  misc_feature 1..21: note = Probe
  source 1..21: mol_type = other DNA
ttgtaaacaggagatcctggg

SEQ ID NO: 24780 - DNA, 22 bp, synthetic construct
  misc_feature 1..22: note = Probe
  source 1..22: mol_type = other DNA
ttgtaaacaggagatcctgggt

SEQ ID NO: 24781 - DNA, 32 bp, synthetic construct
  misc_feature 1..32: note = Probe
  source 1..32: mol_type = other DNA
ttgtaaaccggagatgaaaacctttttccaag

SEQ ID NO: 24782 - DNA, 37 bp, synthetic construct; identical to SEQ ID NO: 8497
  misc_feature 1..37: note = Probe
  source 1..37: mol_type = other DNA

SEQ ID NO: 24783 - DNA, 38 bp, synthetic construct; identical to SEQ ID NO: 8498
  misc_feature 1..38: note = Probe
  source 1..38: mol_type = other DNA

SEQ ID NO: 24784 - DNA, 39 bp, synthetic construct; identical to SEQ ID NO: 8499
  misc_feature 1..39: note = Probe
  source 1..39: mol_type = other DNA

SEQ ID NO: 24785 - DNA, 40 bp, synthetic construct; identical to SEQ ID NO: 8500
  misc_feature 1..40: note = Probe
  source 1..40: mol_type = other DNA

SEQ ID NO: 24786 - DNA, 23 bp, synthetic construct
  misc_feature 1..23: note = Probe
  source 1..23: mol_type = other DNA
ttgtagtccgtgcgagaataatg

SEQ ID NO: 24787 - DNA, 44 bp, synthetic construct; identical to SEQ ID NO: 8511
  misc_feature 1..44: note = Probe
  source 1..44: mol_type = other DNA

SEQ ID NO: 24788 - DNA, 30 bp, synthetic construct; identical to SEQ ID NO: 12431
  misc_feature 1..30: note = Probe
  source 1..30: mol_type = other DNA

SEQ ID NO: 24789 - DNA, 32 bp, synthetic construct; identical to SEQ ID NO: 8513
  misc_feature 1..32: note = Probe
  source 1..32: mol_type = other DNA

SEQ ID NO: 24790 - DNA, 33 bp, synthetic construct; identical to SEQ ID NO: 8514
  misc_feature 1..33: note = Probe
  source 1..33: mol_type = other DNA

SEQ ID NO: 24791 - DNA, 34 bp, synthetic construct
  misc_feature 1..34: note = Probe
  source 1..34: mol_type = other DNA
tttaaccaaaacatcagattgtgaatctgacaac

SEQ ID NO: 24792 - DNA, 35 bp, synthetic construct; identical to SEQ ID NO: 8515
  misc_feature 1..35: note = Probe
  source 1..35: mol_type = other DNA

SEQ ID NO: 24793 - DNA, 45 bp, synthetic construct; identical to SEQ ID NO: 8516
  misc_feature 1..45: note = Probe
  source 1..45: mol_type = other DNA

SEQ ID NO: 24794 - DNA, 50 bp, synthetic construct; identical to SEQ ID NO: 8517
  misc_feature 1..50: note = Probe
  source 1..50: mol_type = other DNA

SEQ ID NO: 24795 - DNA, 18 bp, synthetic construct
  misc_feature 1..18: note = Probe
  source 1..18: mol_type = other DNA
tttacacgcagaaggtcc

SEQ ID NO: 24796 - DNA, 23 bp, synthetic construct
  misc_feature 1..23: note = Probe
  source 1..23: mol_type = other DNA
tttacacgcagaaggtcctgggt

SEQ ID NO: 24797 - DNA, 45 bp, synthetic construct
  misc_feature 1..45: note = Probe
  source 1..45: mol_type = other DNA
tttacacgcagaaggtcctgggttcgagccccagtggaaccacgg

SEQ ID NO: 24798 - DNA, 28 bp, synthetic construct
  misc_feature 1..28: note = Probe
  source 1..28: mol_type = other DNA
tttacagtcagaggttcaattcctcttc

SEQ ID NO: 24799 - DNA, 29 bp, synthetic construct
  misc_feature 1..29: note = Probe
  source 1..29: mol_type = other DNA
tttacagtcagaggttcaattcctcttct

SEQ ID NO: 24800 - DNA, 30 bp, synthetic construct
  misc_feature 1..30: note = Probe
  source 1..30: mol_type = other DNA
tttacagtcagaggttcaattcctcttctt

SEQ ID NO: 24801 - DNA, 31 bp, synthetic construct
  misc_feature 1..31: note = Probe
  source 1..31: mol_type = other DNA
tttacagtcagaggttcaattcctcttctta

SEQ ID NO: 24802 - DNA, 33 bp, synthetic construct; identical to SEQ ID NO: 8521
  misc_feature 1..33: note = Probe
  source 1..33: mol_type = other DNA

SEQ ID NO: 24803 - DNA, 34 bp, synthetic construct
  misc_feature 1..34: note = Probe
  source 1..34: mol_type = other DNA
tttacagtcagaggttcaattcctcttcttaaca

SEQ ID NO: 24804 - DNA, 15 bp, synthetic construct
  misc_feature 1..15: note = Probe
  source 1..15: mol_type = other DNA
tttactgctttctct

SEQ ID NO: 24805 - DNA, 16 bp, synthetic construct
  misc_feature 1..16: note = Probe
  source 1..16: mol_type = other DNA
tttagacgggctcaca

SEQ ID NO: 24806 - DNA, 26 bp, synthetic construct
  misc_feature 1..26: note = Probe
  source 1..26: mol_type = other DNA
tttagacgggctcacatcaccccata

SEQ ID NO: 24807 - DNA, 30 bp, synthetic construct
  misc_feature 1..30: note = Probe
  source 1..30: mol_type = other DNA
tttagacgggctcacatcaccccataaaca

SEQ ID NO: 24808 - DNA, 32 bp, synthetic construct; identical to SEQ ID NO: 8526
  misc_feature 1..32: note = Probe
  source 1..32: mol_type = other DNA

SEQ ID NO: 24809 - DNA, 33 bp, synthetic construct; identical to SEQ ID NO: 8527
  misc_feature 1..33: note = Probe
  source 1..33: mol_type = other DNA

SEQ ID NO: 24810 - DNA, 28 bp, synthetic construct
  misc_feature 1..28: note = Probe
  source 1..28: mol_type = other DNA
tttcaacttaacttgaccgctctgagct

SEQ ID NO: 24811 - DNA, 30 bp, synthetic construct
  misc_feature 1..30: note = Probe
  source 1..30: mol_type = other DNA
tttccgtagtgtagtggtcatcacgttcgc

SEQ ID NO: 24812 - DNA, 27 bp, synthetic construct
  misc_feature 1..27: note = Probe
  source 1..27: mol_type = other DNA
tttccgtagtgtagtggttatcacgtt

SEQ ID NO: 24813 - DNA, 30 bp, synthetic construct
  misc_feature 1..30: note = Probe
  source 1..30: mol_type = other DNA
tttccgtagtgtagtggttatcacgttcgc

SEQ ID NO: 24814 - DNA, 31 bp, synthetic construct
  misc_feature 1..31: note = Probe
  source 1..31: mol_type = other DNA
tttccgtagtgtagtggttatcacgttcgcc

SEQ ID NO: 24815 - DNA, 32 bp, synthetic construct
  misc_feature 1..32: note = Probe
  source 1..32: mol_type = other DNA
tttccgtagtgtagtggttatcacgttcgcct

SEQ ID NO: 24816 - DNA, 50 bp, synthetic construct
  misc_feature 1..50: note = Probe
  source 1..50: mol_type = other DNA
tttccgtagtgtagtggttatcacgttcgcctaacacgcgaaaggtcccc

SEQ ID NO: 24817 - DNA, 33 bp, synthetic construct
  misc_feature 1..33: note = Probe
  source 1..33: mol_type = other DNA
tttccgtagtgtagtggttatcacgttcgcctc

SEQ ID NO: 24818 - DNA, 34 bp, synthetic construct
  misc_feature 1..34: note = Probe
  source 1..34: mol_type = other DNA
tttccgtagtgtagtggttatcacgttcgcctca

SEQ ID NO: 24819 - DNA, 50 bp, synthetic construct
  misc_feature 1..50: note = Probe
  source 1..50: mol_type = other DNA
tttccgtagtgtagtggttatcacgttcgcctcacacgcgaaaggtcccc

SEQ ID NO: 24820 - DNA, 45 bp, synthetic construct; identical to SEQ ID NO: 8531
  misc_feature 1..45: note = Probe
  source 1..45: mol_type = other DNA

SEQ ID NO: 24821 - DNA, 46 bp, synthetic construct; identical to SEQ ID NO: 8532
  misc_feature 1..46: note = Probe
  source 1..46: mol_type = other DNA

SEQ ID NO: 24822 - DNA, 24 bp, synthetic construct
  misc_feature 1..24: note = Probe
  source 1..24: mol_type = other DNA
tttggccttttcgagatactgttt

SEQ ID NO: 24823 - DNA, 25 bp, synthetic construct
  misc_feature 1..25: note = Probe
  source 1..25: mol_type = other DNA
tttggccttttcgagatactgtttt

SEQ ID NO: 24824 - DNA, 19 bp, synthetic construct
  misc_feature 1..19: note = Probe
  source 1..19: mol_type = other DNA
tttgggtgcgagaggtccc

SEQ ID NO: 24825 - DNA, 20 bp, synthetic construct
  misc_feature 1..20: note = Probe
  source 1..20: mol_type = other DNA
tttgggtgcgagaggtcccg

SEQ ID NO: 24826 - DNA, 21 bp, synthetic construct
  misc_feature 1..21: note = Probe
  source 1..21: mol_type = other DNA
tttgggtgcgagaggtcccgg

SEQ ID NO: 24827 - DNA, 22 bp, synthetic construct
  misc_feature 1..22: note = Probe
  source 1..22: mol_type = other DNA
tttgggtgcgagaggtcccggg

SEQ ID NO: 24828 - DNA, 23 bp, synthetic construct
  misc_feature 1..23: note = Probe
  source 1..23: mol_type = other DNA
tttgggtgcgagaggtcccgggt

SEQ ID NO: 24829 - DNA, 24 bp, synthetic construct
  misc_feature 1..24: note = Probe
  source 1..24: mol_type = other DNA
tttgggtgcgagaggtcccgggtt

SEQ ID NO: 24830 - DNA, 38 bp, synthetic construct
  misc_feature 1..38: note = Probe
  source 1..38: mol_type = other DNA
tttgggtgcgagaggtcccgggttcaaatcccggacga

SEQ ID NO: 24831 - DNA, 42 bp, synthetic construct
  misc_feature 1..42: note = Probe
  source 1..42: mol_type = other DNA
tttgggtgctaatggtggagttaaagactttttctctgattt

SEQ ID NO: 24832 - DNA, 30 bp, synthetic construct
  misc_feature 1..30: note = Probe
  source 1..30: mol_type = other DNA
tttgtgggtttaagtcccattggtctagta

SEQ ID NO: 24833 - DNA, 17 bp, synthetic construct
  misc_feature 1..17: note = Probe
  source 1..17: mol_type = other DNA
aaaaagtcatggaggcc

SEQ ID NO: 24834 - DNA, 36 bp, synthetic construct; identical to SEQ ID NO: 14480
  misc_feature 1..36: note = Probe
  source 1..36: mol_type = other DNA

SEQ ID NO: 24835 - DNA, 18 bp, synthetic construct
  misc_feature 1..18: note = Probe
  source 1..18: mol_type = other DNA
aaaatgtttagacgggct

SEQ ID NO: 24836 - DNA, 19 bp, synthetic construct
  misc_feature 1..19: note = Probe
  source 1..19: mol_type = other DNA
aaaatgtttagacgggctc

SEQ ID NO: 24837 - DNA, 20 bp, synthetic construct
  misc_feature 1..20: note = Probe
  source 1..20: mol_type = other DNA
aaaatgtttagacgggctca

SEQ ID NO: 24838 - DNA, 21 bp, synthetic construct
  misc_feature 1..21: note = Probe
  source 1..21: mol_type = other DNA
aaaatgtttagacgggctcac

SEQ ID NO: 24839 - DNA, 22 bp, synthetic construct
  misc_feature 1..22: note = Probe
  source 1..22: mol_type = other DNA
aaaatgtttagacgggctcaca

SEQ ID NO: 24840 - DNA, 27 bp, synthetic construct
  misc_feature 1..27: note = Probe
  source 1..27: mol_type = other DNA
aaaatgtttagacgggctcacatcacc

SEQ ID NO: 24841 - DNA, 28 bp, synthetic construct
  misc_feature 1..28: note = Probe
  source 1..28: mol_type = other DNA
aaaatgtttagacgggctcacatcaccc

SEQ ID NO: 24842 - DNA, 34 bp, synthetic construct
  misc_feature 1..34: note = Probe
  source 1..34: mol_type = other DNA
aaacatcagattgtgaatctgacaacagaggctt

SEQ ID NO: 24843 - DNA, 35 bp, synthetic construct
  misc_feature 1..35: note = Probe
  source 1..35: mol_type = other DNA
aaacatcagattgtgaatctgacaacagaggctta

SEQ ID NO: 24844 - DNA, 36 bp, synthetic construct
  misc_feature 1..36: note = Probe
  source 1..36: mol_type = other DNA
aaacatcagattgtgaatctgacaacagaggcttac

SEQ ID NO: 24845 - DNA, 37 bp, synthetic construct; identical to SEQ ID NO: 14525
  misc_feature 1..37: note = Probe
  source 1..37: mol_type = other DNA

SEQ ID NO: 24846 - DNA, 38 bp, synthetic construct; identical to SEQ ID NO: 14526
  misc_feature 1..38: note = Probe
  source 1..38: mol_type = other DNA

SEQ ID NO: 24847 - DNA, 39 bp, synthetic construct
  misc_feature 1..39: note = Probe
  source 1..39: mol_type = other DNA
aaacatcagattgtgaatctgacaacagaggcttacgac

SEQ ID NO: 24848 - DNA, 40 bp, synthetic construct
  misc_feature 1..40: note = Probe
  source 1..40: mol_type = other DNA
aaacatcagattgtgaatctgacaacagaggcttacgacc

SEQ ID NO: 24849 - DNA, 41 bp, synthetic construct
  misc_feature 1..41: note = Probe
  source 1..41: mol_type = other DNA
aaacatcagattgtgaatctgacaacagaggcttacgaccc

SEQ ID NO: 24850 - DNA, 18 bp, synthetic construct
  misc_feature 1..18: note = Probe
  source 1..18: mol_type = other DNA
aaaccgggcggaaacacc

SEQ ID NO: 24851 - DNA, 19 bp, synthetic construct
  misc_feature 1..19: note = Probe
  source 1..19: mol_type = other DNA
aaagacaggggttaggcct

SEQ ID NO: 24852 - DNA, 20 bp, synthetic construct
  misc_feature 1..20: note = Probe
  source 1..20: mol_type = other DNA
aaagacaggggttaggcctc

SEQ ID NO: 24853 - DNA, 32 bp, synthetic construct; identical to SEQ ID NO: 1934
  misc_feature 1..32: note = Probe
  source 1..32: mol_type = other DNA

SEQ ID NO: 24854 - DNA, 33 bp, synthetic construct; identical to SEQ ID NO: 1935
  misc_feature 1..33: note = Probe
  source 1..33: mol_type = other DNA

SEQ ID NO: 24855 - DNA, 19 bp, synthetic construct
  misc_feature 1..19: note = Probe
  source 1..19: mol_type = other DNA
aaagctcacaagaactgct

SEQ ID NO: 24856 - DNA, 23 bp, synthetic construct
  misc_feature 1..23: note = Probe
  source 1..23: mol_type = other DNA
aaagctcacaagaactgctaact

SEQ ID NO: 24857 - DNA, 36 bp, synthetic construct
  misc_feature 1..36: note = Probe
  source 1..36: mol_type = other DNA
aaagctcacaagaactgctaactcatgcccccatgt

SEQ ID NO: 24858 - DNA, 25 bp, synthetic construct
  misc_feature 1..25: note = Probe
  source 1..25: mol_type = other DNA
aaaggataacagctatccattggtc

SEQ ID NO: 24859 - DNA, 21 bp, synthetic construct
  misc_feature 1..21: note = Probe
  source 1..21: mol_type = other DNA
aaataataggagcttaaaccc

SEQ ID NO: 24860 - DNA, 18 bp, synthetic construct
  misc_feature 1..18: note = Probe
  source 1..18: mol_type = other DNA
aaatacagaccaagagcc

SEQ ID NO: 24861 - DNA, 17 bp, synthetic construct
  misc_feature 1..17: note = Probe
  source 1..17: mol_type = other DNA
aaatgtttagacgggct

SEQ ID NO: 24862 - DNA, 18 bp, synthetic construct
  misc_feature 1..18: note = Probe
  source 1..18: mol_type = other DNA
aaatgtttagacgggctc

SEQ ID NO: 24863 - DNA, 19 bp, synthetic construct
  misc_feature 1..19: note = Probe
  source 1..19: mol_type = other DNA
aaatgtttagacgggctca

SEQ ID NO: 24864 - DNA, 20 bp, synthetic construct
  misc_feature 1..20: note = Probe
  source 1..20: mol_type = other DNA
aaatgtttagacgggctcac

SEQ ID NO: 24865 - DNA, 26 bp, synthetic construct
  misc_feature 1..26: note = Probe
  source 1..26: mol_type = other DNA
aaatgtttagacgggctcacatcacc

SEQ ID NO: 24866 - DNA, 36 bp, synthetic construct
  misc_feature 1..36: note = Probe
  source 1..36: mol_type = other DNA
aaattagaatcttagctttgggtgctaatggtggag

SEQ ID NO: 24867 - DNA, 18 bp, synthetic construct
  misc_feature 1..18: note = Probe
  source 1..18: mol_type = other DNA
aacagctatccattggtc

SEQ ID NO: 24868 - DNA, 19 bp, synthetic construct
  misc_feature 1..19: note = Probe
  source 1..19: mol_type = other DNA
aacagctatccattggtct

SEQ ID NO: 24869 - DNA, 33 bp, synthetic construct; identical to SEQ ID NO: 2055
  misc_feature 1..33: note = Probe
  source 1..33: mol_type = other DNA

SEQ ID NO: 24870 - DNA, 35 bp, synthetic construct
  misc_feature 1..35: note = Probe
  source 1..35: mol_type = other DNA
aacatcagattgtgaatctgacaacagaggcttac

SEQ ID NO: 24871 - DNA, 36 bp, synthetic construct
  misc_feature 1..36: note = Probe
  source 1..36: mol_type = other DNA
aacatcagattgtgaatctgacaacagaggcttacg

SEQ ID NO: 24872 - DNA, 37 bp, synthetic construct; identical to SEQ ID NO: 14758
  misc_feature 1..37: note = Probe
  source 1..37: mol_type = other DNA

SEQ ID NO: 24873 - DNA, 38 bp, synthetic construct
  misc_feature 1..38: note = Probe
  source 1..38: mol_type = other DNA
aacatcagattgtgaatctgacaacagaggcttacgac

SEQ ID NO: 24874 - DNA, 39 bp, synthetic construct
  misc_feature 1..39: note = Probe
  source 1..39: mol_type = other DNA
aacatcagattgtgaatctgacaacagaggcttacgacc

SEQ ID NO: 24875 - DNA, 40 bp, synthetic construct
  misc_feature 1..40: note = Probe
  source 1..40: mol_type = other DNA
aacatcagattgtgaatctgacaacagaggcttacgaccc

SEQ ID NO: 24876 - DNA, 16 bp, synthetic construct
  misc_feature 1..16: note = Probe
  source 1..16: mol_type = other DNA
aaccgggcggaaacac

SEQ ID NO: 24877 - DNA, 17 bp, synthetic construct
  misc_feature 1..17: note = Probe
  source 1..17: mol_type = other DNA
aaccgggcggaaacacc

SEQ ID NO: 24878 - DNA, 36 bp, synthetic construct; identical to SEQ ID NO: 56
  misc_feature 1..36: note = Probe
  source 1..36: mol_type = other DNA

SEQ ID NO: 24879 - DNA, 36 bp, synthetic construct
  misc_feature 1..36: note = Probe
  source 1..36: mol_type = other DNA
aacttagcattaaccttttaagttaaagattaagag

SEQ ID NO: 24880 - DNA, 28 bp, synthetic construct
  misc_feature 1..28: note = Probe
  source 1..28: mol_type = other DNA
aagaactgctaactcatgcccccatgtc

SEQ ID NO: 24881 - DNA, 29 bp, synthetic construct
  misc_feature 1..29: note = Probe
  source 1..29: mol_type = other DNA
aagaactgctaactcatgcccccatgtct

SEQ ID NO: 24882 - DNA, 32 bp, synthetic construct; identical to SEQ ID NO: 2224
  misc_feature 1..32: note = Probe
  source 1..32: mol_type = other DNA

SEQ ID NO: 24883 - DNA, 33 bp, synthetic construct; identical to SEQ ID NO: 2225
  misc_feature 1..33: note = Probe
  source 1..33: mol_type = other DNA

SEQ ID NO: 24884 - DNA, 36 bp, synthetic construct
  misc_feature 1..36: note = Probe
  source 1..36: mol_type = other DNA
aagaactgctaactcatgcccccatgtctaacaaca

SEQ ID NO: 24885 - DNA, 39 bp, synthetic construct
  misc_feature 1..39: note = Probe
  source 1..39: mol_type = other DNA
aagaactgctaactcatgcccccatgtctaacaacatgg

SEQ ID NO: 24886 - DNA, 18 bp, synthetic construct
  misc_feature 1..18: note = Probe
  source 1..18: mol_type = other DNA
aagacaggggttaggcct

SEQ ID NO: 24887 - DNA, 31 bp, synthetic construct
  misc_feature 1..31: note = Probe
  source 1..31: mol_type = other DNA
aagcaatacactgaaaatgtttagacgggct

SEQ ID NO: 24888 - DNA, 32 bp, synthetic construct; identical to SEQ ID NO: 15034
  misc_feature 1..32: note = Probe
  source 1..32: mol_type = other DNA

SEQ ID NO: 24889 - DNA, 36 bp, synthetic construct
  misc_feature 1..36: note = Probe
  source 1..36: mol_type = other DNA
aagcattggactgtaaatctaaagacaggggttagg

SEQ ID NO: 24890 - DNA, 18 bp, synthetic construct
  misc_feature 1..18: note = Probe
  source 1..18: mol_type = other DNA
aagctcacaagaactgct

SEQ ID NO: 24891 - DNA, 22 bp, synthetic construct
  misc_feature 1..22: note = Probe
  source 1..22: mol_type = other DNA
aagctcacaagaactgctaact

SEQ ID NO: 24892 - DNA, 36 bp, synthetic construct
  misc_feature 1..36: note = Probe
  source 1..36: mol_type = other DNA
aagctcacaagaactgctaactcatgcccccatgtc

SEQ ID NO: 24893 - DNA, 24 bp, synthetic construct
  misc_feature 1..24: note = Probe
  source 1..24: mol_type = other DNA
aaggataacagctatccattggtc

SEQ ID NO: 24894 - DNA, 25 bp, synthetic construct
  misc_feature 1..25: note = Probe
  source 1..25: mol_type = other DNA
aaggataacagctatccattggtct

SEQ ID NO: 24895 - DNA, 36 bp, synthetic construct
  misc_feature 1..36: note = Probe
  source 1..36: mol_type = other DNA
aaggtattagaaaaaccatttcataactttgtcaaa

SEQ ID NO: 24896 - DNA, 21 bp, synthetic construct
  misc_feature 1..21: note = Probe
  source 1..21: mol_type = other DNA
aagtgtttgtgggtttaagtc

SEQ ID NO: 24897 - DNA, 22 bp, synthetic construct
  misc_feature 1..22: note = Probe
  source 1..22: mol_type = other DNA
aagtgtttgtgggtttaagtcc

SEQ ID NO: 24898 - DNA, 20 bp, synthetic construct
  misc_feature 1..20: note = Probe
  source 1..20: mol_type = other DNA
aataataggagcttaaaccc

SEQ ID NO: 24899 - DNA, 28 bp, synthetic construct
  misc_feature 1..28: note = Probe
  source 1..28: mol_type = other DNA
aatacactgaaaatgtttagacgggctc

SEQ ID NO: 24900 - DNA, 17 bp, synthetic construct
  misc_feature 1..17: note = Probe
  source 1..17: mol_type = other DNA
aatacagaccaagagcc

SEQ ID NO: 24901 - DNA, 17 bp, synthetic construct
  misc_feature 1..17: note = Probe
  source 1..17: mol_type = other DNA
aataggagcttaaaccc

SEQ ID NO: 24902 - DNA, 18 bp, synthetic construct
  misc_feature 1..18: note = Probe
  source 1..18: mol_type = other DNA
aataggagcttaaacccc

SEQ ID NO: 24903 - DNA, 16 bp, synthetic construct
  misc_feature 1..16: note = Probe
  source 1..16: mol_type = other DNA
aatagtaccgttaact

SEQ ID NO: 24904 - DNA, 19 bp, synthetic construct
  misc_feature 1..19: note = Probe
  source 1..19: mol_type = other DNA
aatagtaccgttaacttcc

SEQ ID NO: 24905 - DNA, 36 bp, synthetic construct
  misc_feature 1..36: note = Probe
  source 1..36: mol_type = other DNA
aatagtaccgttaacttccaattaactagttttgac

SEQ ID NO: 24906 - DNA, 20 bp, synthetic construct
  misc_feature 1..20: note = Probe
  source 1..20: mol_type = other DNA
aatccccggcacctccacca

SEQ ID NO: 24907 - DNA, 36 bp, synthetic construct; identical to SEQ ID NO: 111
  misc_feature 1..36: note = Probe
  source 1..36: mol_type = other DNA

SEQ ID NO: 24908 - DNA, 36 bp, synthetic construct
  misc_feature 1..36: note = Probe
  source 1..36: mol_type = other DNA
aatcttagctttgggtgctaatggtggagttaaaga

SEQ ID NO: 24909 - DNA, 18 bp, synthetic construct
  misc_feature 1..18: note = Probe
  source 1..18: mol_type = other DNA
aatggtggagttaaagac

SEQ ID NO: 24910 - DNA, 26 bp, synthetic construct
  misc_feature 1..26: note = Probe
  source 1..26: mol_type = other DNA
aatggtggagttaaagactttttctc

SEQ ID NO: 24911 - DNA, 26 bp, synthetic construct
  misc_feature 1..26: note = Probe
  source 1..26: mol_type = other DNA
aatggttagcactctggactctgaat

SEQ ID NO: 24912 - DNA, 27 bp, synthetic construct
  misc_feature 1..27: note = Probe
  source 1..27: mol_type = other DNA
aatggttagcactctggactctgaatc

SEQ ID NO: 24913 - DNA, 29 bp, synthetic construct
  misc_feature 1..29: note = Probe
  source 1..29: mol_type = other DNA
aatggttagcactctggactctgaatcca

SEQ ID NO: 24914 - DNA, 36 bp, synthetic construct
  misc_feature 1..36: note = Probe
  source 1..36: mol_type = other DNA
aatggttagcactctggactctgaatccagcgatcc

SEQ ID NO: 24915 - DNA, 16 bp, synthetic construct
  misc_feature 1..16: note = Probe
  source 1..16: mol_type = other DNA
aatgtttagacgggct

SEQ ID NO: 24916 - DNA, 17 bp, synthetic construct
  misc_feature 1..17: note = Probe
  source 1..17: mol_type = other DNA
aatgtttagacgggctc

SEQ ID NO: 24917 - DNA, 18 bp, synthetic construct
  misc_feature 1..18: note = Probe
  source 1..18: mol_type = other DNA
aatgtttagacgggctca

SEQ ID NO: 24918 - DNA, 19 bp, synthetic construct
  misc_feature 1..19: note = Probe
  source 1..19: mol_type = other DNA
aatgtttagacgggctcac

SEQ ID NO: 24919 - DNA, 20 bp, synthetic construct
  misc_feature 1..20: note = Probe
  source 1..20: mol_type = other DNA
aatgtttagacgggctcaca

SEQ ID NO: 24920 - DNA, 25 bp, synthetic construct
  misc_feature 1..25: note = Probe
  source 1..25: mol_type = other DNA
aatgtttagacgggctcacatcacc

SEQ ID NO: 24921 - DNA, 26 bp, synthetic construct
  misc_feature 1..26: note = Probe
  source 1..26: mol_type = other DNA
aatgtttagacgggctcacatcaccc

SEQ ID NO: 24922 - DNA, 32 bp, synthetic construct
  misc_feature 1..32: note = Probe
  source 1..32: mol_type = other DNA
aatgtttagacgggctcacatcaccccataaa

SEQ ID NO: 24923 - DNA, 36 bp, synthetic construct
  misc_feature 1..36: note = Probe
  source 1..36: mol_type = other DNA
aattagaatcttagctttgggtgctaatggtggagt

SEQ ID NO: 24924 - DNA, 17 bp, synthetic construct
  misc_feature 1..17: note = Probe
  source 1..17: mol_type = other DNA
aattctcgcctgccacg

SEQ ID NO: 24925 - DNA, 30 bp, synthetic construct; identical to SEQ ID NO: 12515
  misc_feature 1..30: note = Probe
  source 1..30: mol_type = other DNA

SEQ ID NO: 24926 - DNA, 31 bp, synthetic construct; identical to SEQ ID NO: 2584
  misc_feature 1..31: note = Probe
  source 1..31: mol_type = other DNA

SEQ ID NO: 24927 - DNA, 35 bp, synthetic construct; identical to SEQ ID NO: 12517
  misc_feature 1..35: note = Probe
  source 1..35: mol_type = other DNA

SEQ ID NO: 24928 - DNA, 36 bp, synthetic construct; identical to SEQ ID NO: 15369
  misc_feature 1..36: note = Probe
  source 1..36: mol_type = other DNA

SEQ ID NO: 24929 - DNA, 23 bp, synthetic construct
  misc_feature 1..23: note = Probe
  source 1..23: mol_type = other DNA
acagaccaagagccttcaaagcc

SEQ ID NO: 24930 - DNA, 16 bp, synthetic construct
  misc_feature 1..16: note = Probe
  source 1..16: mol_type = other DNA
acagaggcttacgacc

SEQ ID NO: 24931 - DNA, 17 bp, synthetic construct
  misc_feature 1..17: note = Probe
  source 1..17: mol_type = other DNA
acagaggcttacgaccc

SEQ ID NO: 24932 - DNA, 17 bp, synthetic construct
  misc_feature 1..17: note = Probe
  source 1..17: mol_type = other DNA
acagctatccattggtc

SEQ ID NO: 24933 - DNA, 18 bp, synthetic construct
  misc_feature 1..18: note = Probe
  source 1..18: mol_type = other DNA
acagctatccattggtct

SEQ ID NO: 24934 - DNA, 36 bp, synthetic construct
  misc_feature 1..36: note = Probe
  source 1..36: mol_type = other DNA
acatcagattgtgaatctgacaacagaggcttacga

SEQ ID NO: 24935 - DNA, 32 bp, synthetic construct; identical to SEQ ID NO: 12542
  misc_feature 1..32: note = Probe
  source 1..32: mol_type = other DNA

SEQ ID NO: 24936 - DNA, 36 bp, synthetic construct; identical to SEQ ID NO: 150
  misc_feature 1..36: note = Probe
  source 1..36: mol_type = other DNA

SEQ ID NO: 24937 - DNA, 36 bp, synthetic construct; identical to SEQ ID NO: 12559
  misc_feature 1..36: note = Probe
  source 1..36: mol_type = other DNA

SEQ ID NO: 24938 - DNA, 16 bp, synthetic construct
  misc_feature 1..16: note = Probe
  source 1..16: mol_type = other DNA
accggagatgaaaacc

SEQ ID NO: 24939 - DNA, 16 bp, synthetic construct
  misc_feature 1..16: note = Probe
  source 1..16: mol_type = other DNA
accgggcggaaacacc

SEQ ID NO: 24940 - DNA, 30 bp, synthetic construct
  misc_feature 1..30: note = Probe
  source 1..30: mol_type = other DNA
accgttaacttccaattaactagttttgac

SEQ ID NO: 24941 - DNA, 36 bp, synthetic construct
  misc_feature 1..36: note = Probe
  source 1..36: mol_type = other DNA
acgatggtttttcatatcattggtcgtggttgtagt

SEQ ID NO: 24942 - DNA, 36 bp, synthetic construct; identical to SEQ ID NO: 2844
  misc_feature 1..36: note = Probe
  source 1..36: mol_type = other DNA

SEQ ID NO: 24943 - DNA, 36 bp, synthetic construct; identical to SEQ ID NO: 180
  misc_feature 1..36: note = Probe
  source 1..36: mol_type = other DNA

SEQ ID NO: 24944 - DNA, 36 bp, synthetic construct; identical to SEQ ID NO: 188
  misc_feature 1..36: note = Probe
  source 1..36: mol_type = other DNA

SEQ ID NO: 24945 - DNA, 36 bp, synthetic construct; identical to SEQ ID NO: 2880
  misc_feature 1..36: note = Probe
  source 1..36: mol_type = other DNA

SEQ ID NO: 24946 - DNA, 36 bp, synthetic construct; identical to SEQ ID NO: 2894
  misc_feature 1..36: note = Probe
  source 1..36: mol_type = other DNA

SEQ ID NO: 24947 - DNA, 22 bp, synthetic construct
  misc_feature 1..22: note = Probe
  source 1..22: mol_type = other DNA
actgaaaatgtttagacgggct

SEQ ID NO: 24948 - DNA, 23 bp, synthetic construct
  misc_feature 1..23: note = Probe
  source 1..23: mol_type = other DNA
actgaaaatgtttagacgggctc

SEQ ID NO: 24949 - DNA, 20 bp, synthetic construct
  misc_feature 1..20: note = Probe
  source 1..20: mol_type = other DNA
acttttaaaggataacagct

SEQ ID NO: 24950 - DNA, 31 bp, synthetic construct; identical to SEQ ID NO: 210
  misc_feature 1..31: note = Probe
  source 1..31: mol_type = other DNA

SEQ ID NO: 24951 - DNA, 32 bp, synthetic construct; identical to SEQ ID NO: 211
  misc_feature 1..32: note = Probe
  source 1..32: mol_type = other DNA

SEQ ID NO: 24952 - DNA, 36 bp, synthetic construct
  misc_feature 1..36: note = Probe
  source 1..36: mol_type = other DNA
acttttaaaggataacagctatccattggtcttagg

SEQ ID NO: 24953 - DNA, 21 bp, synthetic construct
  misc_feature 1..21: note = Probe
  source 1..21: mol_type = other DNA
agaaagctcacaagaactgct

SEQ ID NO: 24954 - DNA, 25 bp, synthetic construct
  misc_feature 1..25: note = Probe
  source 1..25: mol_type = other DNA
agaaagctcacaagaactgctaact

SEQ ID NO: 24955 - DNA, 31 bp, synthetic construct
  misc_feature 1..31: note = Probe
  source 1..31: mol_type = other DNA
agaaagctcacaagaactgctaactcatgcc

SEQ ID NO: 24956 - DNA, 36 bp, synthetic construct
  misc_feature 1..36: note = Probe
  source 1..36: mol_type = other DNA
agaaagctcacaagaactgctaactcatgcccccat

SEQ ID NO: 24957 - DNA, 23 bp, synthetic construct
  misc_feature 1..23: note = Probe
  source 1..23: mol_type = other DNA
agaaatttaggttaaatacagac

SEQ ID NO: 24958 - DNA, 27 bp, synthetic construct
  misc_feature 1..27: note = Probe
  source 1..27: mol_type = other DNA
agaactgctaactcatgcccccatgtc

SEQ ID NO: 24959 - DNA, 28 bp, synthetic construct
  misc_feature 1..28: note = Probe
  source 1..28: mol_type = other DNA
agaactgctaactcatgcccccatgtct

SEQ ID NO: 24960 - DNA, 30 bp, synthetic construct; identical to SEQ ID NO: 16094
  misc_feature 1..30: note = Probe
  source 1..30: mol_type = other DNA

SEQ ID NO: 24961 - DNA, 31 bp, synthetic construct; identical to SEQ ID NO: 16095
  misc_feature 1..31: note = Probe
  source 1..31: mol_type = other DNA

SEQ ID NO: 24962 - DNA, 32 bp, synthetic construct; identical to SEQ ID NO: 3066
  misc_feature 1..32: note = Probe
  source 1..32: mol_type = other DNA

SEQ ID NO: 24963 - DNA, 33 bp, synthetic construct; identical to SEQ ID NO: 16096
  misc_feature 1..33: note = Probe
  source 1..33: mol_type = other DNA

SEQ ID NO: 24964 - DNA, 35 bp, synthetic construct; identical to SEQ ID NO: 12635
  misc_feature 1..35: note = Probe
  source 1..35: mol_type = other DNA

SEQ ID NO: 24965 - DNA, 36 bp, synthetic construct
  misc_feature 1..36: note = Probe
  source 1..36: mol_type = other DNA
agaactgctaactcatgcccccatgtctaacaacat

SEQ ID NO: 24966 - DNA, 36 bp, synthetic construct
  misc_feature 1..36: note = Probe
  source 1..36: mol_type = other DNA
agaatcttagctttgggtgctaatggtggagttaaa

SEQ ID NO: 24967 - DNA, 19 bp, synthetic construct
  misc_feature 1..19: note = Probe
  source 1..19: mol_type = other DNA
agaattctcgcctgccacg

SEQ ID NO: 24968 - DNA, 33 bp, synthetic construct
  misc_feature 1..33: note = Probe
  source 1..33: mol_type = other DNA
agattgtgaatctgacaacagaggcttacgacc

SEQ ID NO: 24969 - DNA, 36 bp, synthetic construct; identical to SEQ ID NO: 3197
  misc_feature 1..36: note = Probe
  source 1..36: mol_type = other DNA

SEQ ID NO: 24970 - DNA, 31 bp, synthetic construct; identical to SEQ ID NO: 3222
  misc_feature 1..31: note = Probe
  source 1..31: mol_type = other DNA

SEQ ID NO: 24971 - DNA, 31 bp, synthetic construct; identical to SEQ ID NO: 275
  misc_feature 1..31: note = Probe
  source 1..31: mol_type = other DNA

SEQ ID NO: 24972 - DNA, 32 bp, synthetic construct; identical to SEQ ID NO: 276
  misc_feature 1..32: note = Probe
  source 1..32: mol_type = other DNA

SEQ ID NO: 24973 - DNA, 33 bp, synthetic construct; identical to SEQ ID NO: 277
  misc_feature 1..33: note = Probe
  source 1..33: mol_type = other DNA

SEQ ID NO: 24974 - DNA, 36 bp, synthetic construct; identical to SEQ ID NO: 12682
  misc_feature 1..36: note = Probe
  source 1..36: mol_type = other DNA

SEQ ID NO: 24975 - DNA, 36 bp, synthetic construct
  misc_feature 1..36: note = Probe
  source 1..36: mol_type = other DNA
agcattggactgtaaatctaaagacaggggttaggc

SEQ ID NO: 24976 - DNA, 17 bp, synthetic construct
  misc_feature 1..17: note = Probe
  source 1..17: mol_type = other DNA
agctcacaagaactgct

SEQ ID NO: 24977 - DNA, 21 bp, synthetic construct
  misc_feature 1..21: note = Probe
  source 1..21: mol_type = other DNA
agctcacaagaactgctaact

SEQ ID NO: 24978 - DNA, 36 bp, synthetic construct
  misc_feature 1..36: note = Probe
  source 1..36: mol_type = other DNA
agctcacaagaactgctaactcatgcccccatgtct

SEQ ID NO: 24979 - DNA, 25 bp, synthetic construct
  misc_feature 1..25: note = Probe
  source 1..25: mol_type = other DNA
agctcagtcggtagagcatgggact

SEQ ID NO: 24980 - DNA, 26 bp, synthetic construct
  misc_feature 1..26: note = Probe
  source 1..26: mol_type = other DNA
agctcagtcggtagagcatgggactc

SEQ ID NO: 24981 - DNA, 24 bp, synthetic construct
  misc_feature 1..24: note = Probe
  source 1..24: mol_type = other DNA
agctccgaggtgattttcatattg

SEQ ID NO: 24982 - DNA, 29 bp, synthetic construct
  misc_feature 1..29: note = Probe
  source 1..29: mol_type = other DNA
agctccgaggtgattttcatattgaattg

SEQ ID NO: 24983 - DNA, 30 bp, synthetic construct; identical to SEQ ID NO: 314
  misc_feature 1..30: note = Probe
  source 1..30: mol_type = other DNA

SEQ ID NO: 24984 - DNA, 36 bp, synthetic construct
  misc_feature 1..36: note = Probe
  source 1..36: mol_type = other DNA
agctttgggtgctaatggtggagttaaagacttttt

SEQ ID NO: 24985 - DNA, 23 bp, synthetic construct
  misc_feature 1..23: note = Probe
  source 1..23: mol_type = other DNA
aggataacagctatccattggtc

SEQ ID NO: 24986 - DNA, 21 bp, synthetic construct
  misc_feature 1..21: note = Probe
  source 1..21: mol_type = other DNA
aggatggccgagtggtctaag

SEQ ID NO: 24987 - DNA, 22 bp, synthetic construct
  misc_feature 1..22: note = Probe
  source 1..22: mol_type = other DNA
aggattcggcgctctcaccgcc

SEQ ID NO: 24988 - DNA, 28 bp, synthetic construct
  misc_feature 1..28: note = Probe
  source 1..28: mol_type = other DNA
aggattcggcgctctcaccgccgcggcc

SEQ ID NO: 24989 - DNA, 29 bp, synthetic construct
  misc_feature 1..29: note = Probe
  source 1..29: mol_type = other DNA
aggattcggcgctctcaccgccgcggccc

SEQ ID NO: 24990 - DNA, 18 bp, synthetic construct
  misc_feature 1..18: note = Probe
  source 1..18: mol_type = other DNA
aggggtatgattctcggt

SEQ ID NO: 24991 - DNA, 17 bp, synthetic construct
  misc_feature 1..17: note = Probe
  source 1..17: mol_type = other DNA
agtaaataataggagct

SEQ ID NO: 24992 - DNA, 24 bp, synthetic construct
  misc_feature 1..24: note = Probe
  source 1..24: mol_type = other DNA
agtaaataataggagcttaaaccc

SEQ ID NO: 24993 - DNA, 33 bp, synthetic construct
  misc_feature 1..33: note = Probe
  source 1..33: mol_type = other DNA
agtaccgttaacttccaattaactagttttgac

SEQ ID NO: 24994 - DNA, 33 bp, synthetic construct; identical to SEQ ID NO: 16873
  misc_feature 1..33: note = Probe
  source 1..33: mol_type = other DNA

SEQ ID NO: 24995 - DNA, 18 bp, synthetic construct
  misc_feature 1..18: note = Probe
  source 1..18: mol_type = other DNA
agtcggtagagcatcaga

SEQ ID NO: 24996 - DNA, 19 bp, synthetic construct
  misc_feature 1..19: note = Probe
  source 1..19: mol_type = other DNA
agtcggtagagcatcagac

SEQ ID NO: 24997 - DNA, 20 bp, synthetic construct
  misc_feature 1..20: note = Probe
  source 1..20: mol_type = other DNA
agtcggtagagcatcagact

SEQ ID NO: 24998 - DNA, 19 bp, synthetic construct
  misc_feature 1..19: note = Probe
  source 1..19: mol_type = other DNA
agtcggtagagcatgggac

SEQ ID NO: 24999 - DNA, 21 bp, synthetic construct
  misc_feature 1..21: note = Probe
  source 1..21: mol_type = other DNA
agtcggtagagcatgggactc

SEQ ID NO: 25000 - DNA, 18 bp, synthetic construct
  misc_feature 1..18: note = Probe
  source 1..18: mol_type = other DNA
agtggctaggattcggcg

SEQ ID NO: 25001 - DNA, 18 bp, synthetic construct
  misc_feature 1..18: note = Probe
  source 1..18: mol_type = other DNA
agtggttaggattcggcg

SEQ ID NO: 25002 - DNA, 29 bp, synthetic construct
  misc_feature 1..29: note = Probe
  source 1..29: mol_type = other DNA
agtggttaggattcggcgctctcaccgcc

SEQ ID NO: 25003 - DNA, 36 bp, synthetic construct; identical to SEQ ID NO: 361
  misc_feature 1..36: note = Probe
  source 1..36: mol_type = other DNA

SEQ ID NO: 25004 - DNA, 21 bp, synthetic construct
  misc_feature 1..21: note = Probe
  source 1..21: mol_type = other DNA
agttgattagggtgcttagct

SEQ ID NO: 25005 - DNA, 24 bp, synthetic construct
  misc_feature 1..24: note = Probe
  source 1..24: mol_type = other DNA
agttgattagggtgcttagctgtt

SEQ ID NO: 25006 - DNA, 28 bp, synthetic construct
  misc_feature 1..28: note = Probe
  source 1..28: mol_type = other DNA
agttgattagggtgcttagctgttaact

SEQ ID NO: 25007 - DNA, 36 bp, synthetic construct
  misc_feature 1..36: note = Probe
  source 1..36: mol_type = other DNA
agttgattagggtgcttagctgttaactaagtgttt

SEQ ID NO: 25008 - DNA, 20 bp, synthetic construct
  misc_feature 1..20: note = Probe
  source 1..20: mol_type = other DNA
ataacagctatccattggtc

SEQ ID NO: 25009 - DNA, 21 bp, synthetic construct
  misc_feature 1..21: note = Probe
  source 1..21: mol_type = other DNA
ataacagctatccattggtct

SEQ ID NO: 25010 - DNA, 19 bp, synthetic construct
  misc_feature 1..19: note = Probe
  source 1..19: mol_type = other DNA
ataataggagcttaaaccc

SEQ ID NO: 25011 - DNA, 36 bp, synthetic construct
  misc_feature 1..36: note = Probe
  source 1..36: mol_type = other DNA
ataatctgaaggtcgtgagttcgagcctcacacggg

SEQ ID NO: 25012 - DNA, 26 bp, synthetic construct
  misc_feature 1..26: note = Probe
  source 1..26: mol_type = other DNA
atacactgaaaatgtttagacgggct

SEQ ID NO: 25013 - DNA, 27 bp, synthetic construct
  misc_feature 1..27: note = Probe
  source 1..27: mol_type = other DNA
atacactgaaaatgtttagacgggctc

SEQ ID NO: 25014 - DNA, 16 bp, synthetic construct
  misc_feature 1..16: note = Probe
  source 1..16: mol_type = other DNA
atacagaccaagagcc

SEQ ID NO: 25015 - DNA, 21 bp, synthetic construct
  misc_feature 1..21: note = Probe
  source 1..21: mol_type = other DNA
atagagtaaataataggagct

SEQ ID NO: 25016 - DNA, 28 bp, synthetic construct
  misc_feature 1..28: note = Probe
  source 1..28: mol_type = other DNA
atagagtaaataataggagcttaaaccc

SEQ ID NO: 25017 - DNA, 30 bp, synthetic construct; identical to SEQ ID NO: 12797
  misc_feature 1..30: note = Probe
  source 1..30: mol_type = other DNA

SEQ ID NO: 25018 - DNA, 16 bp, synthetic construct
  misc_feature 1..16: note = Probe
  source 1..16: mol_type = other DNA
ataggagcttaaaccc

SEQ ID NO: 25019 - DNA, 17 bp, synthetic construct
  misc_feature 1..17: note = Probe
  source 1..17: mol_type = other DNA
ataggagcttaaacccc

SEQ ID NO: 25020 - DNA, 18 bp, synthetic construct
  misc_feature 1..18: note = Probe
  source 1..18: mol_type = other DNA
atagtaccgttaacttcc

SEQ ID NO: 25021 - DNA, 24 bp, synthetic construct
  misc_feature 1..24: note = Probe
  source 1..24: mol_type = other DNA
atatcattggtcgtggttgtagtc

SEQ ID NO: 25022 - DNA, 25 bp, synthetic construct
  misc_feature 1..25: note = Probe
  source 1..25: mol_type = other DNA
atatcattggtcgtggttgtagtcc

SEQ ID NO: 25023 - DNA, 26 bp, synthetic construct
  misc_feature 1..26: note = Probe
  source 1..26: mol_type = other DNA
atatcattggtcgtggttgtagtccg

SEQ ID NO: 25024 - DNA, 28 bp, synthetic construct
  misc_feature 1..28: note = Probe
  source 1..28: mol_type = other DNA
atatcattggtcgtggttgtagtccgtg

SEQ ID NO: 25025 - DNA, 30 bp, synthetic construct; identical to SEQ ID NO: 3694
  misc_feature 1..30: note = Probe
  source 1..30: mol_type = other DNA

SEQ ID NO: 25026 - DNA, 31 bp, synthetic construct
  misc_feature 1..31: note = Probe
  source 1..31: mol_type = other DNA
atatcattggtcgtggttgtagtccgtgcga

SEQ ID NO: 25027 - DNA, 32 bp, synthetic construct; identical to SEQ ID NO: 17140
  misc_feature 1..32: note = Probe
  source 1..32: mol_type = other DNA

SEQ ID NO: 25028 - DNA, 33 bp, synthetic construct; identical to SEQ ID NO: 12799
  misc_feature 1..33: note = Probe
  source 1..33: mol_type = other DNA

SEQ ID NO: 25029 - DNA, 34 bp, synthetic construct; identical to SEQ ID NO: 12800
  misc_feature 1..34: note = Probe
  source 1..34: mol_type = other DNA

SEQ ID NO: 25030 - DNA, 36 bp, synthetic construct; identical to SEQ ID NO: 372
  misc_feature 1..36: note = Probe
  source 1..36: mol_type = other DNA

SEQ ID NO: 25031 - DNA, 22 bp, synthetic construct
  misc_feature 1..22: note = Probe
  source 1..22: mol_type = other DNA
atcattggtcgtggttgtagtc

SEQ ID NO: 25032 - DNA, 23 bp, synthetic construct
  misc_feature 1..23: note = Probe
  source 1..23: mol_type = other DNA
atcattggtcgtggttgtagtcc

SEQ ID NO: 25033 - DNA, 30 bp, synthetic construct; identical to SEQ ID NO: 8552
  misc_feature 1..30: note = Probe
  source 1..30: mol_type = other DNA

SEQ ID NO: 25034 - DNA, 31 bp, synthetic construct; identical to SEQ ID NO: 17185
  misc_feature 1..31: note = Probe
  source 1..31: mol_type = other DNA

SEQ ID NO: 25035 - DNA, 32 bp, synthetic construct; identical to SEQ ID NO: 17186
  misc_feature 1..32: note = Probe
  source 1..32: mol_type = other DNA

SEQ ID NO: 25036 - DNA, 33 bp, synthetic construct; identical to SEQ ID NO: 17187
  misc_feature 1..33: note = Probe
  source 1..33: mol_type = other DNA

SEQ ID NO: 25037 - DNA, 18 bp, synthetic construct
  misc_feature 1..18: note = Probe
  source 1..18: mol_type = other DNA
atccattggtcttaggcc

SEQ ID NO: 25038 - DNA, 19 bp, synthetic construct
  misc_feature 1..19: note = Probe
  source 1..19: mol_type = other DNA
atccattggtcttaggccc

SEQ ID NO: 25039 - DNA, 20 bp, synthetic construct
  misc_feature 1..20: note = Probe
  source 1..20: mol_type = other DNA
atccattggtcttaggcccc

SEQ ID NO: 25040 - DNA, 36 bp, synthetic construct
  misc_feature 1..36: note = Probe
  source 1..36: mol_type = other DNA
atccattggtcttaggccccaaaaattttggtgcaa

SEQ ID NO: 25041 - DNA, 16 bp, synthetic construct
  misc_feature 1..16: note = Probe
  source 1..16: mol_type = other DNA
atcccaccgctgccac

SEQ ID NO: 25042 - DNA, 16 bp, synthetic construct
  misc_feature 1..16: note = Probe
  source 1..16: mol_type = other DNA
atcccatcctcgtcgc

SEQ ID NO: 25043 - DNA, 17 bp, synthetic construct
  misc_feature 1..17: note = Probe
  source 1..17: mol_type = other DNA
atccccggcacctccac

SEQ ID NO: 25044 - DNA, 18 bp, synthetic construct
  misc_feature 1..18: note = Probe
  source 1..18: mol_type = other DNA
atccccggcacctccacc

SEQ ID NO: 25045 - DNA, 19 bp, synthetic construct
  misc_feature 1..19: note = Probe
  source 1..19: mol_type = other DNA
atccccggcacctccacca

SEQ ID NO: 25046 - DNA, 16 bp, synthetic construct
  misc_feature 1..16: note = Probe
  source 1..16: mol_type = other DNA
atccggctcgaaggac

SEQ ID NO: 25047 - DNA, 16 bp, synthetic construct
  misc_feature 1..16: note = Probe
  source 1..16: mol_type = other DNA
atccgggtgccccctc

SEQ ID NO: 25048 - DNA, 36 bp, synthetic construct
  misc_feature 1..36: note = Probe
  source 1..36: mol_type = other DNA
atccttaggtcgctggttcgattccggctcgaagga

SEQ ID NO: 25049 - DNA, 36 bp, synthetic construct
  misc_feature 1..36: note = Probe
  source 1..36: mol_type = other DNA
atctgagggtccagggttcaagtccctgttcgggcg

SEQ ID NO: 25050 - DNA, 23 bp, synthetic construct
  misc_feature 1..23: note = Probe
  source 1..23: mol_type = other DNA
atgaaaacctttttccaaggaca

SEQ ID NO: 25051 - DNA, 17 bp, synthetic construct
  misc_feature 1..17: note = Probe
  source 1..17: mol_type = other DNA
atggataaggcgtctga

SEQ ID NO: 25052 - DNA, 29 bp, synthetic construct
  misc_feature 1..29: note = Probe
  source 1..29: mol_type = other DNA
atgggtggttcagtggtagaattctcgcc

SEQ ID NO: 25053 - DNA, 30 bp, synthetic construct; identical to SEQ ID NO: 403
  misc_feature 1..30: note = Probe
  source 1..30: mol_type = other DNA

SEQ ID NO: 25054 - DNA, 33 bp, synthetic construct; identical to SEQ ID NO: 406
  misc_feature 1..33: note = Probe
  source 1..33: mol_type = other DNA

SEQ ID NO: 25055 - DNA, 16 bp, synthetic construct
  misc_feature 1..16: note = Probe
  source 1..16: mol_type = other DNA
atggtagagcgctcgc

SEQ ID NO: 25056 - DNA, 36 bp, synthetic construct
  misc_feature 1..36: note = Probe
  source 1..36: mol_type = other DNA
atggtgtaatggttagcactctggactctgaatcca

SEQ ID NO: 25057 - DNA, 25 bp, synthetic construct
  misc_feature 1..25: note = Probe
  source 1..25: mol_type = other DNA
atggttagcactctggactctgaat

SEQ ID NO: 25058 - DNA, 26 bp, synthetic construct
  misc_feature 1..26: note = Probe
  source 1..26: mol_type = other DNA
atggttagcactctggactctgaatc

SEQ ID NO: 25059 - DNA, 27 bp, synthetic construct
  misc_feature 1..27: note = Probe
  source 1..27: mol_type = other DNA
atggttagcactctggactctgaatcc

SEQ ID NO: 25060 - DNA, 28 bp, synthetic construct
  misc_feature 1..28: note = Probe
  source 1..28: mol_type = other DNA
atggttagcactctggactctgaatcca

SEQ ID NO: 25061 - DNA, 36 bp, synthetic construct; identical to SEQ ID NO: 17470
  misc_feature 1..36: note = Probe
  source 1..36: mol_type = other DNA

SEQ ID NO: 25062 - DNA, 26 bp, synthetic construct
  misc_feature 1..26: note = Probe
  source 1..26: mol_type = other DNA
atggttagcactctggactttgaatc

SEQ ID NO: 25063 - DNA, 27 bp, synthetic construct
  misc_feature 1..27: note = Probe
  source 1..27: mol_type = other DNA
atggttagcactctggactttgaatcc

SEQ ID NO: 25064 - DNA, 36 bp, synthetic construct
  misc_feature 1..36: note = Probe
  source 1..36: mol_type = other DNA
atggtttttcatatcattggtcgtggttgtagtccg

SEQ ID NO: 25065 - DNA, 16 bp, synthetic construct
  misc_feature 1..16: note = Probe
  source 1..16: mol_type = other DNA
atgtttagacgggctc

SEQ ID NO: 25066 - DNA, 17 bp, synthetic construct
  misc_feature 1..17: note = Probe
  source 1..17: mol_type = other DNA
atgtttagacgggctca

SEQ ID NO: 25067 - DNA, 18 bp, synthetic construct
  misc_feature 1..18: note = Probe
  source 1..18: mol_type = other DNA
atgtttagacgggctcac

SEQ ID NO: 25068 - DNA, 19 bp, synthetic construct
  misc_feature 1..19: note = Probe
  source 1..19: mol_type = other DNA
atgtttagacgggctcaca

SEQ ID NO: 25069 - DNA, 20 bp, synthetic construct
  misc_feature 1..20: note = Probe
  source 1..20: mol_type = other DNA
atgtttagacgggctcacat

SEQ ID NO: 25070 - DNA, 21 bp, synthetic construct
  misc_feature 1..21: note = Probe
  source 1..21: mol_type = other DNA
atgtttagacgggctcacatc

SEQ ID NO: 25071 - DNA, 24 bp, synthetic construct
  misc_feature 1..24: note = Probe
  source 1..24: mol_type = other DNA
atgtttagacgggctcacatcacc

SEQ ID NO: 25072 - DNA, 25 bp, synthetic construct
  misc_feature 1..25: note = Probe
  source 1..25: mol_type = other DNA
atgtttagacgggctcacatcaccc

SEQ ID NO: 25073 - DNA, 31 bp, synthetic construct; identical to SEQ ID NO: 3863
  misc_feature 1..31: note = Probe
  source 1..31: mol_type = other DNA

SEQ ID NO: 25074 - DNA, 36 bp, synthetic construct
  misc_feature 1..36: note = Probe
  source 1..36: mol_type = other DNA
attagaatcttagctttgggtgctaatggtggagtt

SEQ ID NO: 25075 - DNA, 23 bp, synthetic construct
  misc_feature 1..23: note = Probe
  source 1..23: mol_type = other DNA
attagggtgcttagctgttaact

SEQ ID NO: 25076 - DNA, 36 bp, synthetic construct
  misc_feature 1..36: note = Probe
  source 1..36: mol_type = other DNA
attagggtgcttagctgttaactaagtgtttgtggg

SEQ ID NO: 25077 - DNA, 36 bp, synthetic construct; identical to SEQ ID NO: 17518
  misc_feature 1..36: note = Probe
  source 1..36: mol_type = other DNA

SEQ ID NO: 25078 - DNA, 36 bp, synthetic construct
  misc_feature 1..36: note = Probe
  source 1..36: mol_type = other DNA
attcaaaggttgtgggttcgaatcccaccagagtcg

SEQ ID NO: 25079 - DNA, 36 bp, synthetic construct; identical to SEQ ID NO: 17521
  misc_feature 1..36: note = Probe
  source 1..36: mol_type = other DNA

SEQ ID NO: 25080 - DNA, 26 bp, synthetic construct
  misc_feature 1..26: note = Probe
  source 1..26: mol_type = other DNA
attcggcgctctcaccgccgcggccc

SEQ ID NO: 25081 - DNA, 30 bp, synthetic construct; identical to SEQ ID NO: 17537
  misc_feature 1..30: note = Probe
  source 1..30: mol_type = other DNA

SEQ ID NO: 25082 - DNA, 31 bp, synthetic construct
  misc_feature 1..31: note = Probe
  source 1..31: mol_type = other DNA
attcggcgctctcaccgccgcggcccgggtt

SEQ ID NO: 25083 - DNA, 36 bp, synthetic construct
  misc_feature 1..36: note = Probe
  source 1..36: mol_type = other DNA
attcggcgctctcaccgccgcggcccgggttcgatt

SEQ ID NO: 25084 - DNA, 36 bp, synthetic construct; identical to SEQ ID NO: 17543
  misc_feature 1..36: note = Probe
  source 1..36: mol_type = other DNA

SEQ ID NO: 25085 - DNA, 36 bp, synthetic construct
  misc_feature 1..36: note = Probe
  source 1..36: mol_type = other DNA
attggactgtaaatctaaagacaggggttaggcctc

SEQ ID NO: 25086 - DNA, 19 bp, synthetic construct
  misc_feature 1..19: note = Probe
  source 1..19: mol_type = other DNA
attggtcgtggttgtagtc

SEQ ID NO: 25087 - DNA, 20 bp, synthetic construct
  misc_feature 1..20: note = Probe
  source 1..20: mol_type = other DNA
attggtcgtggttgtagtcc

SEQ ID NO: 25088 - DNA, 21 bp, synthetic construct
  misc_feature 1..21: note = Probe
  source 1..21: mol_type = other DNA
attggtcgtggttgtagtccg

SEQ ID NO: 25089 - DNA, 23 bp, synthetic construct
  misc_feature 1..23: note = Probe
  source 1..23: mol_type = other DNA
attggtcgtggttgtagtccgtg

SEQ ID NO: 25090 - DNA, 24 bp, synthetic construct
  misc_feature 1..24: note = Probe
  source 1..24: mol_type = other DNA
attggtcgtggttgtagtccgtgc

SEQ ID NO: 25091 - DNA, 25 bp, synthetic construct
  misc_feature 1..25: note = Probe
  source 1..25: mol_type = other DNA
attggtcgtggttgtagtccgtgcg

SEQ ID NO: 25092 - DNA, 26 bp, synthetic construct
  misc_feature 1..26: note = Probe
  source 1..26: mol_type = other DNA
attggtcgtggttgtagtccgtgcga

SEQ ID NO: 25093 - DNA, 27 bp, synthetic construct
  misc_feature 1..27: note = Probe
  source 1..27: mol_type = other DNA
attggtcgtggttgtagtccgtgcgag

SEQ ID NO: 25094 - DNA, 28 bp, synthetic construct
  misc_feature 1..28: note = Probe
  source 1..28: mol_type = other DNA
attggtcgtggttgtagtccgtgcgaga

SEQ ID NO: 25095 - DNA, 29 bp, synthetic construct
  misc_feature 1..29: note = Probe
  source 1..29: mol_type = other DNA
attggtcgtggttgtagtccgtgcgagaa

SEQ ID NO: 25096 - DNA, 30 bp, synthetic construct; identical to SEQ ID NO: 9429
  misc_feature 1..30: note = Probe
  source 1..30: mol_type = other DNA

SEQ ID NO: 25097 - DNA, 31 bp, synthetic construct; identical to SEQ ID NO: 426
  misc_feature 1..31: note = Probe
  source 1..31: mol_type = other DNA

SEQ ID NO: 25098 - DNA, 36 bp, synthetic construct; identical to SEQ ID NO: 17572
  misc_feature 1..36: note = Probe
  source 1..36: mol_type = other DNA

SEQ ID NO: 25099 - DNA, 36 bp, synthetic construct
  misc_feature 1..36: note = Probe
  source 1..36: mol_type = other DNA
attggtggttcagtggtagaattctcgcctgccatg

SEQ ID NO: 25100 - DNA, 28 bp, synthetic construct
  misc_feature 1..28: note = Probe
  source 1..28: mol_type = other DNA
attgtgaatctgacaacagaggcttacg

SEQ ID NO: 25101 - DNA, 31 bp, synthetic construct; identical to SEQ ID NO: 3923
  misc_feature 1..31: note = Probe
  source 1..31: mol_type = other DNA

SEQ ID NO: 25102 - DNA, 32 bp, synthetic construct; identical to SEQ ID NO: 3924
  misc_feature 1..32: note = Probe
  source 1..32: mol_type = other DNA

SEQ ID NO: 25103 - DNA, 33 bp, synthetic construct; identical to SEQ ID NO: 3925
  misc_feature 1..33: note = Probe
  source 1..33: mol_type = other DNA

SEQ ID NO: 25104 - DNA, 36 bp, synthetic construct
  misc_feature 1..36: note = Probe
  source 1..36: mol_type = other DNA
attgtgaatctgacaacagaggcttacgacccctta

SEQ ID NO: 25105 - DNA, 36 bp, synthetic construct; identical to SEQ ID NO: 427
  misc_feature 1..36: note = Probe
  source 1..36: mol_type = other DNA

SEQ ID NO: 25106 - DNA, 33 bp, synthetic construct; identical to SEQ ID NO: 12851
  misc_feature 1..33: note = Probe
  source 1..33: mol_type = other DNA

SEQ ID NO: 25107 - DNA, 36 bp, synthetic construct; identical to SEQ ID NO: 3985
  misc_feature 1..36: note = Probe
  source 1..36: mol_type = other DNA

SEQ ID NO: 25108 - DNA, 19 bp, synthetic construct
  misc_feature 1..19: note = Probe
  source 1..19: mol_type = other DNA
caaatcccggacgagcccc

SEQ ID NO: 25109 - DNA, 29 bp, synthetic construct
  misc_feature 1..29: note = Probe
  source 1..29: mol_type = other DNA
caagaactgctaactcatgcccccatgtc

SEQ ID NO: 25110 - DNA, 30 bp, synthetic construct; identical to SEQ ID NO: 12857
  misc_feature 1..30: note = Probe
  source 1..30: mol_type = other DNA

SEQ ID NO: 25111 - DNA, 33 bp, synthetic construct; identical to SEQ ID NO: 17716
  misc_feature 1..33: note = Probe
  source 1..33: mol_type = other DNA

SEQ ID NO: 25112 - DNA, 34 bp, synthetic construct; identical to SEQ ID NO: 12858
  misc_feature 1..34: note = Probe
  source 1..34: mol_type = other DNA

SEQ ID NO: 25113 - DNA, 36 bp, synthetic construct; identical to SEQ ID NO: 17718
  misc_feature 1..36: note = Probe
  source 1..36: mol_type = other DNA

SEQ ID NO: 25114 - DNA, 37 bp, synthetic construct; identical to SEQ ID NO: 12859
  misc_feature 1..37: note = Probe
  source 1..37: mol_type = other DNA

SEQ ID NO: 25115 - DNA, 29 bp, synthetic construct
  misc_feature 1..29: note = Probe
  source 1..29: mol_type = other DNA
caatacactgaaaatgtttagacgggctc

SEQ ID NO: 25116 - DNA, 21 bp, synthetic construct
  misc_feature 1..21: note = Probe
  source 1..21: mol_type = other DNA
caatccccggcacctccacca

SEQ ID NO: 25117 - DNA, 19 bp, synthetic construct
  misc_feature 1..19: note = Probe
  source 1..19: mol_type = other DNA
cacaagaactgctaactca

SEQ ID NO: 25118 - DNA, 23 bp, synthetic construct
  misc_feature 1..23: note = Probe
  source 1..23: mol_type = other DNA
cacaagaactgctaactcatgcc

SEQ ID NO: 25119 - DNA, 32 bp, synthetic construct; identical to SEQ ID NO: 4090
  misc_feature 1..32: note = Probe
  source 1..32: mol_type = other DNA

SEQ ID NO: 25120 - DNA, 36 bp, synthetic construct
  misc_feature 1..36: note = Probe
  source 1..36: mol_type = other DNA
cacaagaactgctaactcatgcccccatgtctaaca

SEQ ID NO: 25121 - DNA, 30 bp, synthetic construct; identical to SEQ ID NO: 469
  misc_feature 1..30: note = Probe
  source 1..30: mol_type = other DNA

SEQ ID NO: 25122 - DNA, 36 bp, synthetic construct
  misc_feature 1..36: note = Probe
  source 1..36: mol_type = other DNA
cacccaggcggcccgggttcgactcccggtgtggga

SEQ ID NO: 25123 - DNA, 36 bp, synthetic construct
  misc_feature 1..36: note = Probe
  source 1..36: mol_type = other DNA
caccgccgcggcccgggttcgattcccggtcaggga

SEQ ID NO: 25124 - DNA, 36 bp, synthetic construct; identical to SEQ ID NO: 477
  misc_feature 1..36: note = Probe
  source 1..36: mol_type = other DNA

SEQ ID NO: 25125 - DNA, 36 bp, synthetic construct; identical to SEQ ID NO: 485
  misc_feature 1..36: note = Probe
  source 1..36: mol_type = other DNA

SEQ ID NO: 25126 - DNA, 30 bp, synthetic construct; identical to SEQ ID NO: 4174
  misc_feature 1..30: note = Probe
  source 1..30: mol_type = other DNA

SEQ ID NO: 25127 - DNA, 24 bp, synthetic construct
  misc_feature 1..24: note = Probe
  source 1..24: mol_type = other DNA
cactgaaaatgtttagacgggctc

SEQ ID NO: 25128 - DNA, 20 bp, synthetic construct
  misc_feature 1..20: note = Probe
  source 1..20: mol_type = other DNA
cactgtaaagctaacttagc

SEQ ID NO: 25129 - DNA, 24 bp, synthetic construct
  misc_feature 1..24: note = Probe
  source 1..24: mol_type = other DNA
cactgtaaagctaacttagcatta

SEQ ID NO: 25130 - DNA, 26 bp, synthetic construct
  misc_feature 1..26: note = Probe
  source 1..26: mol_type = other DNA
cactgtaaagctaacttagcattaac

SEQ ID NO: 25131 - DNA, 27 bp, synthetic construct
  misc_feature 1..27: note = Probe
  source 1..27: mol_type = other DNA
cactgtaaagctaacttagcattaacc

SEQ ID NO: 25132 - DNA, 28 bp, synthetic construct
  misc_feature 1..28: note = Probe
  source 1..28: mol_type = other DNA
cactgtaaagctaacttagcattaacct

SEQ ID NO: 25133 - DNA, 36 bp, synthetic construct; identical to SEQ ID NO: 498
  misc_feature 1..36: note = Probe
  source 1..36: mol_type = other DNA

SEQ ID NO: 25134 - DNA, 50 bp, synthetic construct; identical to SEQ ID NO: 502
  misc_feature 1..50: note = Probe
  source 1..50: mol_type = other DNA

SEQ ID NO: 25135 - DNA, 24 bp, synthetic construct
  misc_feature 1..24: note = Probe
  source 1..24: mol_type = other DNA
cagagaatagtttaaattagaatc

SEQ ID NO: 25136 - DNA, 30 bp, synthetic construct; identical to SEQ ID NO: 519
  misc_feature 1..30: note = Probe
  source 1..30: mol_type = other DNA

SEQ ID NO: 25137 - DNA, 36 bp, synthetic construct; identical to SEQ ID NO: 4233
  misc_feature 1..36: note = Probe
  source 1..36: mol_type = other DNA

SEQ ID NO: 25138 - DNA, 29 bp, synthetic construct
  misc_feature 1..29: note = Probe
  source 1..29: mol_type = other DNA
cagagtggcgcagcggaagcgtgctgggc

SEQ ID NO: 25139 - DNA, 30 bp, synthetic construct; identical to SEQ ID NO: 12883
  misc_feature 1..30: note = Probe
  source 1..30: mol_type = other DNA

SEQ ID NO: 25140 - DNA, 31 bp, synthetic construct; identical to SEQ ID NO: 4247
  misc_feature 1..31: note = Probe
  source 1..31: mol_type = other DNA

SEQ ID NO: 25141 - DNA, 30 bp, synthetic construct; identical to SEQ ID NO: 17910
  misc_feature 1..30: note = Probe
  source 1..30: mol_type = other DNA

SEQ ID NO: 25142 - DNA, 31 bp, synthetic construct
  misc_feature 1..31: note = Probe
  source 1..31: mol_type = other DNA
cagattgtgaatctgacaacagaggcttacg

SEQ ID NO: 25143 - DNA, 33 bp, synthetic construct
  misc_feature 1..33: note = Probe
  source 1..33: mol_type = other DNA
cagattgtgaatctgacaacagaggcttacgac

SEQ ID NO: 25144 - DNA, 36 bp, synthetic construct; identical to SEQ ID NO: 17911
  misc_feature 1..36: note = Probe
  source 1..36: mol_type = other DNA

SEQ ID NO: 25145 - DNA, 16 bp, synthetic construct
  misc_feature 1..16: note = Probe
  source 1..16: mol_type = other DNA
cagctatccattggtc

SEQ ID NO: 25146 - DNA, 17 bp, synthetic construct
  misc_feature 1..17: note = Probe
  source 1..17: mol_type = other DNA
cagctatccattggtct

SEQ ID NO: 25147 - DNA, 29 bp, synthetic construct
  misc_feature 1..29: note = Probe
  source 1..29: mol_type = other DNA
caggcggcccgggttcgactcccggtgtg

SEQ ID NO: 25148 - DNA, 16 bp, synthetic construct
  misc_feature 1..16: note = Probe
  source 1..16: mol_type = other DNA
cagtcggtagagcatc

SEQ ID NO: 25149 - DNA, 19 bp, synthetic construct
  misc_feature 1..19: note = Probe
  source 1..19: mol_type = other DNA
cagtcggtagagcatcaga

SEQ ID NO: 25150 - DNA, 20 bp, synthetic construct
  misc_feature 1..20: note = Probe
  source 1..20: mol_type = other DNA
cagtcggtagagcatcagac

SEQ ID NO: 25151 - DNA, 20 bp, synthetic construct
  misc_feature 1..20: note = Probe
  source 1..20: mol_type = other DNA
cagtcggtagagcatgggac

SEQ ID NO: 25152 - DNA, 21 bp, synthetic construct
  misc_feature 1..21: note = Probe
  source 1..21: mol_type = other DNA
cagtcggtagagcatgggact

SEQ ID NO: 25153 - DNA, 22 bp, synthetic construct
  misc_feature 1..22: note = Probe
  source 1..22: mol_type = other DNA
cagtcggtagagcatgggactc

SEQ ID NO: 25154 - DNA, 30 bp, synthetic construct
  misc_feature 1..30: note = Probe
  source 1..30: mol_type = other DNA
cagtcggtagagcatgggactcttaatccc

SEQ ID NO: 25155 - DNA, 36 bp, synthetic construct
  misc_feature 1..36: note = Probe
  source 1..36: mol_type = other DNA
cagttgattagggtgcttagctgttaactaagtgtt

SEQ ID NO: 25156 - DNA, 36 bp, synthetic construct
  misc_feature 1..36: note = Probe
  source 1..36: mol_type = other DNA
cataccccgaaaatgttggttatacccttcccgtac

SEQ ID NO: 25157 - DNA, 36 bp, synthetic construct; identical to SEQ ID NO: 18061
  misc_feature 1..36: note = Probe
  source 1..36: mol_type = other DNA

SEQ ID NO: 25158 - DNA, 36 bp, synthetic construct
  misc_feature 1..36: note = Probe
  source 1..36: mol_type = other DNA
catcagattgtgaatctgacaacagaggcttacgac

SEQ ID NO: 25159 - DNA, 31 bp, synthetic construct; identical to SEQ ID NO: 4442
  misc_feature 1..31: note = Probe
  source 1..31: mol_type = other DNA

SEQ ID NO: 25160 - DNA, 36 bp, synthetic construct
  misc_feature 1..36: note = Probe
  source 1..36: mol_type = other DNA
cattggactgtaaatctaaagacaggggttaggcct

SEQ ID NO: 25161 - DNA, 20 bp, synthetic construct
  misc_feature 1..20: note = Probe
  source 1..20: mol_type = other DNA
cattggtcgtggttgtagtc

SEQ ID NO: 25162 - DNA, 21 bp, synthetic construct
  misc_feature 1..21: note = Probe
  source 1..21: mol_type = other DNA
cattggtcgtggttgtagtcc

SEQ ID NO: 25163 - DNA, 26 bp, synthetic construct
  misc_feature 1..26: note = Probe
  source 1..26: mol_type = other DNA
cattggtcgtggttgtagtccgtgcg

SEQ ID NO: 25164 - DNA, 28 bp, synthetic construct
  misc_feature 1..28: note = Probe
  source 1..28: mol_type = other DNA
cattggtcgtggttgtagtccgtgcgag

SEQ ID NO: 25165 - DNA, 29 bp, synthetic construct
  misc_feature 1..29: note = Probe
  source 1..29: mol_type = other DNA
cattggtcgtggttgtagtccgtgcgaga

SEQ ID NO: 25166 - DNA, 30 bp, synthetic construct; identical to SEQ ID NO: 18130
  misc_feature 1..30: note = Probe
  source 1..30: mol_type = other DNA

SEQ ID NO: 25167 - DNA, 31 bp, synthetic construct; identical to SEQ ID NO: 18131
  misc_feature 1..31: note = Probe
  source 1..31: mol_type = other DNA

SEQ ID NO: 25168 - DNA, 32 bp, synthetic construct; identical to SEQ ID NO: 548
  misc_feature 1..32: note = Probe
  source 1..32: mol_type = other DNA

SEQ ID NO: 25169 - DNA, 16 bp, synthetic construct
  misc_feature 1..16: note = Probe
  source 1..16: mol_type = other DNA
cattggtcttaggccc

SEQ ID NO: 25170 - DNA, 17 bp, synthetic construct
  misc_feature 1..17: note = Probe
  source 1..17: mol_type = other DNA
cattggtcttaggcccc

SEQ ID NO: 25171 - DNA, 30 bp, synthetic construct
  misc_feature 1..30: note = Probe
  source 1..30: mol_type = other DNA
catttgactgcagatcaagaggtccccggt

SEQ ID NO: 25172 - DNA, 19 bp, synthetic construct
  misc_feature 1..19: note = Probe
  source 1..19: mol_type = other DNA
ccaattaactagttttgac

SEQ ID NO: 25173 - DNA, 28 bp, synthetic construct
  misc_feature 1..28: note = Probe
  source 1..28: mol_type = other DNA
ccacatggtctagcggttaggattcctg

SEQ ID NO: 25174 - DNA, 31 bp, synthetic construct; identical to SEQ ID NO: 563
  misc_feature 1..31: note = Probe
  source 1..31: mol_type = other DNA

SEQ ID NO: 25175 - DNA, 30 bp, synthetic construct; identical to SEQ ID NO: 9659
  misc_feature 1..30: note = Probe
  source 1..30: mol_type = other DNA

SEQ ID NO: 25176 - DNA, 28 bp, synthetic construct
  misc_feature 1..28: note = Probe
  source 1..28: mol_type = other DNA
ccatatggtctagcggttaggattcctg

SEQ ID NO: 25177 - DNA, 16 bp, synthetic construct
  misc_feature 1..16: note = Probe
  source 1..16: mol_type = other DNA
ccattggtcttaggcc

SEQ ID NO: 25178 - DNA, 17 bp, synthetic construct
  misc_feature 1..17: note = Probe
  source 1..17: mol_type = other DNA
ccattggtcttaggccc

SEQ ID NO: 25179 - DNA, 18 bp, synthetic construct
  misc_feature 1..18: note = Probe
  source 1..18: mol_type = other DNA
ccattggtcttaggcccc

SEQ ID NO: 25180 - DNA, 32 bp, synthetic construct; identical to SEQ ID NO: 580
  misc_feature 1..32: note = Probe
  source 1..32: mol_type = other DNA

SEQ ID NO: 25181 - DNA, 36 bp, synthetic construct; identical to SEQ ID NO: 586
  misc_feature 1..36: note = Probe
  source 1..36: mol_type = other DNA

SEQ ID NO: 25182 - DNA, 17 bp, synthetic construct
  misc_feature 1..17: note = Probe
  source 1..17: mol_type = other DNA
ccccggcacctccacca

SEQ ID NO: 25183 - DNA, 32 bp, synthetic construct; identical to SEQ ID NO: 622
  misc_feature 1..32: note = Probe
  source 1..32: mol_type = other DNA

SEQ ID NO: 25184 - DNA, 33 bp, synthetic construct; identical to SEQ ID NO: 623
  misc_feature 1..33: note = Probe
  source 1..33: mol_type = other DNA

SEQ ID NO: 25185 - DNA, 28 bp, synthetic construct
  misc_feature 1..28: note = Probe
  source 1..28: mol_type = other DNA
cccggctagctcagtcggtagagcatgg

SEQ ID NO: 25186 - DNA, 27 bp, synthetic construct
  misc_feature 1..27: note = Probe
  source 1..27: mol_type = other DNA
cccggtaatcgcataaaacttaaaact

SEQ ID NO: 25187 - DNA, 32 bp, synthetic construct; identical to SEQ ID NO: 639
  misc_feature 1..32: note = Probe
  source 1..32: mol_type = other DNA

SEQ ID NO: 25188 - DNA, 33 bp, synthetic construct; identical to SEQ ID NO: 640
  misc_feature 1..33: note = Probe
  source 1..33: mol_type = other DNA

SEQ ID NO: 25189 - DNA, 32 bp, synthetic construct; identical to SEQ ID NO: 13005
  misc_feature 1..32: note = Probe
  source 1..32: mol_type = other DNA

SEQ ID NO: 25190 - DNA, 32 bp, synthetic construct; identical to SEQ ID NO: 659
  misc_feature 1..32: note = Probe
  source 1..32: mol_type = other DNA

SEQ ID NO: 25191 - DNA, 36 bp, synthetic construct; identical to SEQ ID NO: 13027
  misc_feature 1..36: note = Probe
  source 1..36: mol_type = other DNA

SEQ ID NO: 25192 - DNA, 16 bp, synthetic construct
  misc_feature 1..16: note = Probe
  source 1..16: mol_type = other DNA
ccggagatgaaaacct

SEQ ID NO: 25193 - DNA, 28 bp, synthetic construct
  misc_feature 1..28: note = Probe
  source 1..28: mol_type = other DNA
ccggagatgaaaacctttttccaaggac

SEQ ID NO: 25194 - DNA, 22 bp, synthetic construct
  misc_feature 1..22: note = Probe
  source 1..22: mol_type = other DNA
ccggatagctcagtcggtagag

SEQ ID NO: 25195 - DNA, 23 bp, synthetic construct
  misc_feature 1..23: note = Probe
  source 1..23: mol_type = other DNA
ccggatagctcagtcggtagagc

SEQ ID NO: 25196 - DNA, 26 bp, synthetic construct
  misc_feature 1..26: note = Probe
  source 1..26: mol_type = other DNA
ccggatagctcagtcggtagagcatc

SEQ ID NO: 25197 - DNA, 30 bp, synthetic construct; identical to SEQ ID NO: 668
  misc_feature 1..30: note = Probe
  source 1..30: mol_type = other DNA

SEQ ID NO: 25198 - DNA, 31 bp, synthetic construct; identical to SEQ ID NO: 669
  misc_feature 1..31: note = Probe
  source 1..31: mol_type = other DNA

SEQ ID NO: 25199 - DNA, 21 bp, synthetic construct
  misc_feature 1..21: note = Probe
  source 1..21: mol_type = other DNA
ccggatcagaagattgagggt

SEQ ID NO: 25200 - DNA, 23 bp, synthetic construct
  misc_feature 1..23: note = Probe
  source 1..23: mol_type = other DNA
ccggctagctcagtcggtagagc

SEQ ID NO: 25201 - DNA, 24 bp, synthetic construct
  misc_feature 1..24: note = Probe
  source 1..24: mol_type = other DNA
ccggctagctcagtcggtagagca

SEQ ID NO: 25202 - DNA, 26 bp, synthetic construct
  misc_feature 1..26: note = Probe
  source 1..26: mol_type = other DNA
ccggctagctcagtcggtagagcatg

SEQ ID NO: 25203 - DNA, 28 bp, synthetic construct
  misc_feature 1..28: note = Probe
  source 1..28: mol_type = other DNA
ccggctagctcagtcggtagagcatgag

SEQ ID NO: 25204 - DNA, 30 bp, synthetic construct; identical to SEQ ID NO: 675
  misc_feature 1..30: note = Probe
  source 1..30: mol_type = other DNA

SEQ ID NO: 25205 - DNA, 31 bp, synthetic construct; identical to SEQ ID NO: 676
  misc_feature 1..31: note = Probe
  source 1..31: mol_type = other DNA

SEQ ID NO: 25206 - DNA, 32 bp, synthetic construct; identical to SEQ ID NO: 677
  misc_feature 1..32: note = Probe
  source 1..32: mol_type = other DNA

SEQ ID NO: 25207 - DNA, 33 bp, synthetic construct; identical to SEQ ID NO: 4825
  misc_feature 1..33: note = Probe
  source 1..33: mol_type = other DNA

SEQ ID NO: 25208 - DNA, 36 bp, synthetic construct
  misc_feature 1..36: note = Probe
  source 1..36: mol_type = other DNA
ccggctagctcagtcggtagagcatgagactcttaa

SEQ ID NO: 25209 - DNA, 27 bp, synthetic construct
  misc_feature 1..27: note = Probe
  source 1..27: mol_type = other DNA
ccggctagctcagtcggtagagcatgg

SEQ ID NO: 25210 - DNA, 28 bp, synthetic construct
  misc_feature 1..28: note = Probe
  source 1..28: mol_type = other DNA
ccggctagctcagtcggtagagcatggg

SEQ ID NO: 25211 - DNA, 29 bp, synthetic construct
  misc_feature 1..29: note = Probe
  source 1..29: mol_type = other DNA
ccggctagctcagtcggtagagcatggga

SEQ ID NO: 25212 - DNA, 30 bp, synthetic construct; identical to SEQ ID NO: 680
  misc_feature 1..30: note = Probe
  source 1..30: mol_type = other DNA

SEQ ID NO: 25213 - DNA, 31 bp, synthetic construct; identical to SEQ ID NO: 681
  misc_feature 1..31: note = Probe
  source 1..31: mol_type = other DNA

SEQ ID NO: 25214 - DNA, 32 bp, synthetic construct; identical to SEQ ID NO: 682
  misc_feature 1..32: note = Probe
  source 1..32: mol_type = other DNA

SEQ ID NO: 25215 - DNA, 33 bp, synthetic construct; identical to SEQ ID NO: 683
  misc_feature 1..33: note = Probe
  source 1..33: mol_type = other DNA

SEQ ID NO: 25216 - DNA, 36 bp, synthetic construct
  misc_feature 1..36: note = Probe
  source 1..36: mol_type = other DNA
ccggctagctcagtcggtagagcatgggactcttaa

SEQ ID NO: 25217 - DNA, 28 bp, synthetic construct
  misc_feature 1..28: note = Probe
  source 1..28: mol_type = other DNA
ccgtagtgtagtggtcatcacgttcgcc

SEQ ID NO: 25218 - DNA, 29 bp, synthetic construct
  misc_feature 1..29: note = Probe
  source 1..29: mol_type = other DNA
ccgtagtgtagtggtcatcacgttcgcct

SEQ ID NO: 25219 - DNA, 29 bp, synthetic construct
  misc_feature 1..29: note = Probe
  source 1..29: mol_type = other DNA
ccgtgatcgtatagtggttagtactctgc

SEQ ID NO: 25220 - DNA, 30 bp, synthetic construct; identical to SEQ ID NO: 8580
  misc_feature 1..30: note = Probe
  source 1..30: mol_type = other DNA

SEQ ID NO: 25221 - DNA, 32 bp, synthetic construct; identical to SEQ ID NO: 18758
  misc_feature 1..32: note = Probe
  source 1..32: mol_type = other DNA

SEQ ID NO: 25222 - DNA, 33 bp, synthetic construct; identical to SEQ ID NO: 688
  misc_feature 1..33: note = Probe
  source 1..33: mol_type = other DNA

SEQ ID NO: 25223 - DNA, 29 bp, synthetic construct
  misc_feature 1..29: note = Probe
  source 1..29: mol_type = other DNA
ccgttaacttccaattaactagttttgac

SEQ ID NO: 25224 - DNA, 31 bp, synthetic construct; identical to SEQ ID NO: 700
  misc_feature 1..31: note = Probe
  source 1..31: mol_type = other DNA

SEQ ID NO: 25225 - DNA, 32 bp, synthetic construct; identical to SEQ ID NO: 701
  misc_feature 1..32: note = Probe
  source 1..32: mol_type = other DNA

SEQ ID NO: 25226 - DNA, 33 bp, synthetic construct; identical to SEQ ID NO: 702
  misc_feature 1..33: note = Probe
  source 1..33: mol_type = other DNA

SEQ ID NO: 25227 - DNA, 23 bp, synthetic construct
  misc_feature 1..23: note = Probe
  source 1..23: mol_type = other DNA
cctgtcacgcgggagaccggggt

SEQ ID NO: 25228 - DNA, 19 bp, synthetic construct
  misc_feature 1..19: note = Probe
  source 1..19: mol_type = other DNA
ccttccaagcagttgaccc

SEQ ID NO: 25229 - DNA, 22 bp, synthetic construct
  misc_feature 1..22: note = Probe
  source 1..22: mol_type = other DNA
ccttccaagcagttgacccggg

SEQ ID NO: 25230 - DNA, 23 bp, synthetic construct
  misc_feature 1..23: note = Probe
  source 1..23: mol_type = other DNA
ccttccaagcagttgacccgggt

SEQ ID NO: 25231 - DNA, 24 bp, synthetic construct
  misc_feature 1..24: note = Probe
  source 1..24: mol_type = other DNA
ccttccaagcagttgacccgggtt

SEQ ID NO: 25232 - DNA, 36 bp, synthetic construct
  misc_feature 1..36: note = Probe
  source 1..36: mol_type = other DNA
cgatggtttttcatatcattggtcgtggttgtagtc

SEQ ID NO: 25233 - DNA, 31 bp, synthetic construct; identical to SEQ ID NO: 19061
  misc_feature 1..31: note = Probe
  source 1..31: mol_type = other DNA

SEQ ID NO: 25234 - DNA, 36 bp, synthetic construct
  misc_feature 1..36: note = Probe
  source 1..36: mol_type = other DNA
cgcctgtcacgcgggagaccggggttcgattccccg

SEQ ID NO: 25235 - DNA, 36 bp, synthetic construct; identical to SEQ ID NO: 19177
  misc_feature 1..36: note = Probe
  source 1..36: mol_type = other DNA

SEQ ID NO: 25236 - DNA, 36 bp, synthetic construct
  misc_feature 1..36: note = Probe
  source 1..36: mol_type = other DNA
cgctctcaccgccgcggcccgggttcgattcccggt

SEQ ID NO: 25237 - DNA, 16 bp, synthetic construct
  misc_feature 1..16: note = Probe
  source 1..16: mol_type = other DNA
cggaagcgtgctgggc

SEQ ID NO: 25238 - DNA, 18 bp, synthetic construct
  misc_feature 1..18: note = Probe
  source 1..18: mol_type = other DNA
cggaagcgtgctgggccc

SEQ ID NO: 25239 - DNA, 27 bp, synthetic construct
  misc_feature 1..27: note = Probe
  source 1..27: mol_type = other DNA
cggagatgaaaacctttttccaaggac

SEQ ID NO: 25240 - DNA, 28 bp, synthetic construct
  misc_feature 1..28: note = Probe
  source 1..28: mol_type = other DNA
cggagatgaaaacctttttccaaggaca

SEQ ID NO: 25241 - DNA, 22 bp, synthetic construct
  misc_feature 1..22: note = Probe
  source 1..22: mol_type = other DNA
cggatagctcagtcggtagagc

SEQ ID NO: 25242 - DNA, 23 bp, synthetic construct
  misc_feature 1..23: note = Probe
  source 1..23: mol_type = other DNA
cggatagctcagtcggtagagca

SEQ ID NO: 25243 - DNA, 25 bp, synthetic construct
  misc_feature 1..25: note = Probe
  source 1..25: mol_type = other DNA
cggatagctcagtcggtagagcatc

SEQ ID NO: 25244 - DNA, 29 bp, synthetic construct
  misc_feature 1..29: note = Probe
  source 1..29: mol_type = other DNA
cggatagctcagtcggtagagcatcagac

SEQ ID NO: 25245 - DNA, 30 bp, synthetic construct; identical to SEQ ID NO: 762
  misc_feature 1..30: note = Probe
  source 1..30: mol_type = other DNA

SEQ ID NO: 25246 - DNA, 31 bp, synthetic construct; identical to SEQ ID NO: 763
  misc_feature 1..31: note = Probe
  source 1..31: mol_type = other DNA

SEQ ID NO: 25247 - DNA, 32 bp, synthetic construct; identical to SEQ ID NO: 764
  misc_feature 1..32: note = Probe
  source 1..32: mol_type = other DNA

SEQ ID NO: 25248 - DNA, 33 bp, synthetic construct; identical to SEQ ID NO: 765
  misc_feature 1..33: note = Probe
  source 1..33: mol_type = other DNA

SEQ ID NO: 25249 - DNA, 20 bp, synthetic construct
  misc_feature 1..20: note = Probe
  source 1..20: mol_type = other DNA
cggatcagaagattgagggt

SEQ ID NO: 25250 - DNA, 21 bp, synthetic construct
  misc_feature 1..21: note = Probe
  source 1..21: mol_type = other DNA
cggctagctcagtcggtagag

SEQ ID NO: 25251 - DNA, 25 bp, synthetic construct
  misc_feature 1..25: note = Probe
  source 1..25: mol_type = other DNA
cggctagctcagtcggtagagcatg

SEQ ID NO: 25252 - DNA, 29 bp, synthetic construct
  misc_feature 1..29: note = Probe
  source 1..29: mol_type = other DNA
cggctagctcagtcggtagagcatgagac

SEQ ID NO: 25253 - DNA, 30 bp, synthetic construct; identical to SEQ ID NO: 771
  misc_feature 1..30: note = Probe
  source 1..30: mol_type = other DNA

SEQ ID NO: 25254 - DNA, 31 bp, synthetic construct; identical to SEQ ID NO: 772
  misc_feature 1..31: note = Probe
  source 1..31: mol_type = other DNA

SEQ ID NO: 25255 - DNA, 32 bp, synthetic construct; identical to SEQ ID NO: 773
  misc_feature 1..32: note = Probe
  source 1..32: mol_type = other DNA

SEQ ID NO: 25256 - DNA, 36 bp, synthetic construct
  misc_feature 1..36: note = Probe
  source 1..36: mol_type = other DNA
cggctagctcagtcggtagagcatgagactcttaat

SEQ ID NO: 25257 - DNA, 27 bp, synthetic construct
  misc_feature 1..27: note = Probe
  source 1..27: mol_type = other DNA
cggctagctcagtcggtagagcatggg

SEQ ID NO: 25258 - DNA, 28 bp, synthetic construct
  misc_feature 1..28: note = Probe
  source 1..28: mol_type = other DNA
cggctagctcagtcggtagagcatggga

SEQ ID NO: 25259 - DNA, 29 bp, synthetic construct
  misc_feature 1..29: note = Probe
  source 1..29: mol_type = other DNA
cggctagctcagtcggtagagcatgggac

SEQ ID NO: 25260 - DNA, 30 bp, synthetic construct; identical to SEQ ID NO: 778
  misc_feature 1..30: note = Probe
  source 1..30: mol_type = other DNA

SEQ ID NO: 25261 - DNA, 31 bp, synthetic construct; identical to SEQ ID NO: 779
  misc_feature 1..31: note = Probe
  source 1..31: mol_type = other DNA

SEQ ID NO: 25262 - DNA, 32 bp, synthetic construct; identical to SEQ ID NO: 780
  misc_feature 1..32: note = Probe
  source 1..32: mol_type = other DNA

SEQ ID NO: 25263 - DNA, 33 bp, synthetic construct; identical to SEQ ID NO: 781
  misc_feature 1..33: note = Probe
  source 1..33: mol_type = other DNA

SEQ ID NO: 25264 - DNA, 36 bp, synthetic construct
  misc_feature 1..36: note = Probe
  source 1..36: mol_type = other DNA
cggctagctcagtcggtagagcatgggactcttaat

SEQ ID NO: 25265 - DNA, 25 bp, synthetic construct
  misc_feature 1..25: note = Probe
  source 1..25: mol_type = other DNA
cggctgttaaccgaaaggttggtgg

SEQ ID NO: 25266 - DNA, 26 bp, synthetic construct
  misc_feature 1..26: note = Probe
  source 1..26: mol_type = other DNA
cggctgttaaccgaaaggttggtggt

SEQ ID NO: 25267 - DNA, 36 bp, synthetic construct
  misc_feature 1..36: note = Probe
  source 1..36: mol_type = other DNA
cggctgttaaccgaaaggttggtggttcgagcccac

SEQ ID NO: 25268 - DNA, 32 bp, synthetic construct; identical to SEQ ID NO: 788
  misc_feature 1..32: note = Probe
  source 1..32: mol_type = other DNA

SEQ ID NO: 25269 - DNA, 20 bp, synthetic construct
  misc_feature 1..20: note = Probe
  source 1..20: mol_type = other DNA
cggtaatcgcataaaactta

SEQ ID NO: 25270 - DNA, 25 bp, synthetic construct
  misc_feature 1..25: note = Probe
  source 1..25: mol_type = other DNA
cggtaatcgcataaaacttaaaact

SEQ ID NO: 25271 - DNA, 26 bp, synthetic construct
  misc_feature 1..26: note = Probe
  source 1..26: mol_type = other DNA
cggtaatcgcataaaacttaaaactt

SEQ ID NO: 25272 - DNA, 27 bp, synthetic construct
  misc_feature 1..27: note = Probe
  source 1..27: mol_type = other DNA
cggtaatcgcataaaacttaaaacttt

SEQ ID NO: 25273 - DNA, 30 bp, synthetic construct; identical to SEQ ID NO: 19323
  misc_feature 1..30: note = Probe
  source 1..30: mol_type = other DNA

SEQ ID NO: 25274 - DNA, 36 bp, synthetic construct; identical to SEQ ID NO: 19325
  misc_feature 1..36: note = Probe
  source 1..36: mol_type = other DNA

SEQ ID NO: 25275 - DNA, 16 bp, synthetic construct
  misc_feature 1..16: note = Probe
  source 1..16: mol_type = other DNA
cggtagagcatcagac

SEQ ID NO: 25276 - DNA, 18 bp, synthetic construct
  misc_feature 1..18: note = Probe
  source 1..18: mol_type = other DNA
cggtagagcatgggactc

SEQ ID NO: 25277 - DNA, 23 bp, synthetic construct
  misc_feature 1..23: note = Probe
  source 1..23: mol_type = other DNA
cgtatagtggttagtactctgcg

SEQ ID NO: 25278 - DNA, 28 bp, synthetic construct
  misc_feature 1..28: note = Probe
  source 1..28: mol_type = other DNA
cgtgatcgtatagtggttagtactctgc

SEQ ID NO: 25279 - DNA, 29 bp, synthetic construct
  misc_feature 1..29: note = Probe
  source 1..29: mol_type = other DNA
cgtgatcgtatagtggttagtactctgcg

SEQ ID NO: 25280 - DNA, 31 bp, synthetic construct; identical to SEQ ID NO: 19365
  misc_feature 1..31: note = Probe
  source 1..31: mol_type = other DNA

SEQ ID NO: 25281 - DNA, 23 bp, synthetic construct
  misc_feature 1..23: note = Probe
  source 1..23: mol_type = other DNA
cgtggttgtagtccgtgcgagaa

SEQ ID NO: 25282 - DNA, 24 bp, synthetic construct
  misc_feature 1..24: note = Probe
  source 1..24: mol_type = other DNA
cgtggttgtagtccgtgcgagaat

SEQ ID NO: 25283 - DNA, 25 bp, synthetic construct
  misc_feature 1..25: note = Probe
  source 1..25: mol_type = other DNA
cgtggttgtagtccgtgcgagaata

SEQ ID NO: 25284 - DNA, 20 bp, synthetic construct
  misc_feature 1..20: note = Probe
  source 1..20: mol_type = other DNA
ctaagccagggattgtgggt

SEQ ID NO: 25285 - DNA, 18 bp, synthetic construct
  misc_feature 1..18: note = Probe
  source 1..18: mol_type = other DNA
ctaatggataaggcattg

SEQ ID NO: 25286 - DNA, 27 bp, synthetic construct
  misc_feature 1..27: note = Probe
  source 1..27: mol_type = other DNA
ctagctcagtcggtagagcatgggact

SEQ ID NO: 25287 - DNA, 36 bp, synthetic construct
  misc_feature 1..36: note = Probe
  source 1..36: mol_type = other DNA
ctagtggttaggattcggcgctctcaccgccgcggc

SEQ ID NO: 25288 - DNA, 21 bp, synthetic construct
  misc_feature 1..21: note = Probe
  source 1..21: mol_type = other DNA
ctatccattggtcttaggccc

SEQ ID NO: 25289 - DNA, 22 bp, synthetic construct
  misc_feature 1..22: note = Probe
  source 1..22: mol_type = other DNA
ctatccattggtcttaggcccc

SEQ ID NO: 25290 - DNA, 36 bp, synthetic construct
  misc_feature 1..36: note = Probe
  source 1..36: mol_type = other DNA
ctatcgggcccataccccgaaaatgttggttatacc

SEQ ID NO: 25291 - DNA, 19 bp, synthetic construct
  misc_feature 1..19: note = Probe
  source 1..19: mol_type = other DNA
ctcacaagaactgctaact

SEQ ID NO: 25292 - DNA, 36 bp, synthetic construct
  misc_feature 1..36: note = Probe
  source 1..36: mol_type = other DNA
ctcacaagaactgctaactcatgcccccatgtctaa

SEQ ID NO: 25293 - DNA, 36 bp, synthetic construct
  misc_feature 1..36: note = Probe
  source 1..36: mol_type = other DNA
ctcaccgccgcggcccgggttcgattcccggtcagg

SEQ ID NO: 25294 - DNA, 22 bp, synthetic construct
  misc_feature 1..22: note = Probe
  source 1..22: mol_type = other DNA
ctcagtcggtagagcatcagac

SEQ ID NO: 25295 - DNA, 23 bp, synthetic construct
  misc_feature 1..23: note = Probe
  source 1..23: mol_type = other DNA
ctcagtcggtagagcatgggact

SEQ ID NO: 25296 - DNA, 24 bp, synthetic construct
  misc_feature 1..24: note = Probe
  source 1..24: mol_type = other DNA
ctcagtcggtagagcatgggactc

SEQ ID NO: 25297 - DNA, 22 bp, synthetic construct
  misc_feature 1..22: note = Probe
  source 1..22: mol_type = other DNA
ctccgaggtgattttcatattg

SEQ ID NO: 25298 - DNA, 27 bp, synthetic construct
  misc_feature 1..27: note = Probe
  source 1..27: mol_type = other DNA
ctccgaggtgattttcatattgaattg

SEQ ID NO: 25299 - DNA, 28 bp, synthetic construct
  misc_feature 1..28: note = Probe
  source 1..28: mol_type = other DNA
ctccgaggtgattttcatattgaattgc

SEQ ID NO: 25300 - DNA, 29 bp, synthetic construct
  misc_feature 1..29: note = Probe
  source 1..29: mol_type = other DNA
ctccgaggtgattttcatattgaattgca

SEQ ID NO: 25301 - DNA, 18 bp, synthetic construct
  misc_feature 1..18: note = Probe
  source 1..18: mol_type = other DNA
ctctcaccgccgcggccc

SEQ ID NO: 25302 - DNA, 28 bp, synthetic construct
  misc_feature 1..28: note = Probe
  source 1..28: mol_type = other DNA
ctctggactctgaatccagcgatccgag

SEQ ID NO: 25303 - DNA, 29 bp, synthetic construct
  misc_feature 1..29: note = Probe
  source 1..29: mol_type = other DNA
ctctggactctgaatccagcgatccgagt

SEQ ID NO: 25304 - DNA, 30 bp, synthetic construct
  misc_feature 1..30: note = Probe
  source 1..30: mol_type = other DNA
ctctggactctgaatccagcgatccgagtt

SEQ ID NO: 25305 - DNA, 21 bp, synthetic construct
  misc_feature 1..21: note = Probe
  source 1..21: mol_type = other DNA
ctgaaaatgtttagacgggct

SEQ ID NO: 25306 - DNA, 22 bp, synthetic construct
  misc_feature 1..22: note = Probe
  source 1..22: mol_type = other DNA
ctgaaaatgtttagacgggctc

SEQ ID NO: 25307 - DNA, 19 bp, synthetic construct
  misc_feature 1..19: note = Probe
  source 1..19: mol_type = other DNA
ctgaatccagcgatccgag

SEQ ID NO: 25308 - DNA, 20 bp, synthetic construct
  misc_feature 1..20: note = Probe
  source 1..20: mol_type = other DNA
ctgaatccagcgatccgagt

SEQ ID NO: 25309 - DNA, 21 bp, synthetic construct
  misc_feature 1..21: note = Probe
  source 1..21: mol_type = other DNA
ctgaatccagcgatccgagtt

SEQ ID NO: 25310 - DNA, 22 bp, synthetic construct
  misc_feature 1..22: note = Probe
  source 1..22: mol_type = other DNA
ctgaatccagcgatccgagttc

SEQ ID NO: 25311 - DNA, 23 bp, synthetic construct
  misc_feature 1..23: note = Probe
  source 1..23: mol_type = other DNA
ctgaatccagcgatccgagttca

SEQ ID NO: 25312 - DNA, 27 bp, synthetic construct
  misc_feature 1..27: note = Probe
  source 1..27: mol_type = other DNA
ctggactctgaatccagcgatccgagt

SEQ ID NO: 25313 - DNA, 28 bp, synthetic construct
  misc_feature 1..28: note = Probe
  source 1..28: mol_type = other DNA
ctggactctgaatccagcgatccgagtt

SEQ ID NO: 25314 - DNA, 30 bp, synthetic construct; identical to SEQ ID NO: 839
  misc_feature 1..30: note = Probe
  source 1..30: mol_type = other DNA

SEQ ID NO: 25315 - DNA, 21 bp, synthetic construct
  misc_feature 1..21: note = Probe
  source 1..21: mol_type = other DNA
ctgtcacgcgggagaccgggg

SEQ ID NO: 25316 - DNA, 22 bp, synthetic construct
  misc_feature 1..22: note = Probe
  source 1..22: mol_type = other DNA
ctgtcacgcgggagaccggggt

SEQ ID NO: 25317 - DNA, 23 bp, synthetic construct
  misc_feature 1..23: note = Probe
  source 1..23: mol_type = other DNA
ctgtcacgcgggagaccggggtt

SEQ ID NO: 25318 - DNA, 36 bp, synthetic construct; identical to SEQ ID NO: 5376
  misc_feature 1..36: note = Probe
  source 1..36: mol_type = other DNA

SEQ ID NO: 25319 - DNA, 18 bp, synthetic construct
  misc_feature 1..18: note = Probe
  source 1..18: mol_type = other DNA
cttccaagcagttgaccc

SEQ ID NO: 25320 - DNA, 19 bp, synthetic construct
  misc_feature 1..19: note = Probe
  source 1..19: mol_type = other DNA
cttccaagcagttgacccg

SEQ ID NO: 25321 - DNA, 21 bp, synthetic construct
  misc_feature 1..21: note = Probe
  source 1..21: mol_type = other DNA
cttccaagcagttgacccggg

SEQ ID NO: 25322 - DNA, 22 bp, synthetic construct
  misc_feature 1..22: note = Probe
  source 1..22: mol_type = other DNA
cttccaagcagttgacccgggt

SEQ ID NO: 25323 - DNA, 23 bp, synthetic construct
  misc_feature 1..23: note = Probe
  source 1..23: mol_type = other DNA
cttccaagcagttgacccgggtt

SEQ ID NO: 25324 - DNA, 22 bp, synthetic construct
  misc_feature 1..22: note = Probe
  source 1..22: mol_type = other DNA
cttccaattaactagttttgac

SEQ ID NO: 25325 - DNA, 22 bp, synthetic construct
  misc_feature 1..22: note = Probe
  source 1..22: mol_type = other DNA
ctttcaccgccgcggcccgggt

SEQ ID NO: 25326 - DNA, 21 bp, synthetic construct
  misc_feature 1..21: note = Probe
  source 1..21: mol_type = other DNA
ctttgaatccagcaatccgag

SEQ ID NO: 25327 - DNA, 22 bp, synthetic construct
  misc_feature 1..22: note = Probe
  source 1..22: mol_type = other DNA
ctttgaatccagcaatccgagt

SEQ ID NO: 25328 - DNA, 23 bp, synthetic construct
  misc_feature 1..23: note = Probe
  source 1..23: mol_type = other DNA
ctttgaatccagcaatccgagtt

SEQ ID NO: 25329 - DNA, 21 bp, synthetic construct
  misc_feature 1..21: note = Probe
  source 1..21: mol_type = other DNA
ctttgaatccagcgatccgag

SEQ ID NO: 25330 - DNA, 22 bp, synthetic construct
  misc_feature 1..22: note = Probe
  source 1..22: mol_type = other DNA
ctttgaatccagcgatccgagt

SEQ ID NO: 25331 - DNA, 23 bp, synthetic construct
  misc_feature 1..23: note = Probe
  source 1..23: mol_type = other DNA
ctttgaatccagcgatccgagtt

SEQ ID NO: 25332 - DNA, 26 bp, synthetic construct
  misc_feature 1..26: note = Probe
  source 1..26: mol_type = other DNA
ctttgatagagtaaataataggagct

SEQ ID NO: 25333 - DNA, 36 bp, synthetic construct
  misc_feature 1..36: note = Probe
  source 1..36: mol_type = other DNA
ctttgggtgctaatggtggagttaaagactttttct

SEQ ID NO: 25334 - DNA, 18 bp, synthetic construct
  misc_feature 1..18: note = Probe
  source 1..18: mol_type = other DNA
gaaaaagtcatggaggcc

SEQ ID NO: 25335 - DNA, 19 bp, synthetic construct
  misc_feature 1..19: note = Probe
  source 1..19: mol_type = other DNA
gaaaaagtcatggaggcca

SEQ ID NO: 25336 - DNA, 21 bp, synthetic construct
  misc_feature 1..21: note = Probe
  source 1..21: mol_type = other DNA
gaaaaagtcatggaggccatg

SEQ ID NO: 25337 - DNA, 25 bp, synthetic construct
  misc_feature 1..25: note = Probe
  source 1..25: mol_type = other DNA
gaaaaagtcatggaggccatggggt

SEQ ID NO: 25338 - DNA, 26 bp, synthetic construct
  misc_feature 1..26: note = Probe
  source 1..26: mol_type = other DNA
gaaaaagtcatggaggccatggggtt

SEQ ID NO: 25339 - DNA, 27 bp, synthetic construct
  misc_feature 1..27: note = Probe
  source 1..27: mol_type = other DNA
gaaaaagtcatggaggccatggggttg

SEQ ID NO: 25340 - DNA, 28 bp, synthetic construct
  misc_feature 1..28: note = Probe
  source 1..28: mol_type = other DNA
gaaaaagtcatggaggccatggggttgg

SEQ ID NO: 25341 - DNA, 36 bp, synthetic construct
  misc_feature 1..36: note = Probe
  source 1..36: mol_type = other DNA
gaaaaagtcatggaggccatggggttggcttgaaac

SEQ ID NO: 25342 - DNA, 18 bp, synthetic construct
  misc_feature 1..18: note = Probe
  source 1..18: mol_type = other DNA
gaaaatgtttagacgggc

SEQ ID NO: 25343 - DNA, 19 bp, synthetic construct
  misc_feature 1..19: note = Probe
  source 1..19: mol_type = other DNA
gaaaatgtttagacgggct

SEQ ID NO: 25344 - DNA, 20 bp, synthetic construct
  misc_feature 1..20: note = Probe
  source 1..20: mol_type = other DNA
gaaaatgtttagacgggctc

SEQ ID NO: 25345 - DNA, 21 bp, synthetic construct
  misc_feature 1..21: note = Probe
  source 1..21: mol_type = other DNA
gaaaatgtttagacgggctca

SEQ ID NO: 25346 - DNA, 22 bp, synthetic construct
  misc_feature 1..22: note = Probe
  source 1..22: mol_type = other DNA
gaaaatgtttagacgggctcac

SEQ ID NO: 25347 - DNA, 23 bp, synthetic construct
  misc_feature 1..23: note = Probe
  source 1..23: mol_type = other DNA
gaaaatgtttagacgggctcaca

SEQ ID NO: 25348 - DNA, 25 bp, synthetic construct
  misc_feature 1..25: note = Probe
  source 1..25: mol_type = other DNA
gaaaatgtttagacgggctcacatc

SEQ ID NO: 25349 - DNA, 28 bp, synthetic construct
  misc_feature 1..28: note = Probe
  source 1..28: mol_type = other DNA
gaaaatgtttagacgggctcacatcacc

SEQ ID NO: 25350 - DNA, 29 bp, synthetic construct
  misc_feature 1..29: note = Probe
  source 1..29: mol_type = other DNA
gaaaatgtttagacgggctcacatcaccc

SEQ ID NO: 25351 - DNA, 20 bp, synthetic construct
  misc_feature 1..20: note = Probe
  source 1..20: mol_type = other DNA
gaaagctcacaagaactgct

SEQ ID NO: 25352 - DNA, 24 bp, synthetic construct
  misc_feature 1..24: note = Probe
  source 1..24: mol_type = other DNA
gaaagctcacaagaactgctaact

SEQ ID NO: 25353 - DNA, 36 bp, synthetic construct
  misc_feature 1..36: note = Probe
  source 1..36: mol_type = other DNA
gaaagctcacaagaactgctaactcatgcccccatg

SEQ ID NO: 25354 - DNA, 36 bp, synthetic construct; identical to SEQ ID NO: 19987
  misc_feature 1..36: note = Probe
  source 1..36: mol_type = other DNA

SEQ ID NO: 25355 - DNA, 19 bp, synthetic construct
  misc_feature 1..19: note = Probe
  source 1..19: mol_type = other DNA
gaccgcgtggcctaatgga

SEQ ID NO: 25356 - DNA, 18 bp, synthetic construct
  misc_feature 1..18: note = Probe
  source 1..18: mol_type = other DNA
gagaaagctcacaagaac

SEQ ID NO: 25357 - DNA, 19 bp, synthetic construct
  misc_feature 1..19: note = Probe
  source 1..19: mol_type = other DNA
gagaaagctcacaagaact

SEQ ID NO: 25358 - DNA, 20 bp, synthetic construct
  misc_feature 1..20: note = Probe
  source 1..20: mol_type = other DNA
gagaaagctcacaagaactg

SEQ ID NO: 25359 - DNA, 21 bp, synthetic construct
  misc_feature 1..21: note = Probe
  source 1..21: mol_type = other DNA
gagaaagctcacaagaactgc

SEQ ID NO: 25360 - DNA, 22 bp, synthetic construct
  misc_feature 1..22: note = Probe
  source 1..22: mol_type = other DNA
gagaaagctcacaagaactgct

SEQ ID NO: 25361 - DNA, 23 bp, synthetic construct
  misc_feature 1..23: note = Probe
  source 1..23: mol_type = other DNA
gagaaagctcacaagaactgcta

SEQ ID NO: 25362 - DNA, 24 bp, synthetic construct
  misc_feature 1..24: note = Probe
  source 1..24: mol_type = other DNA
gagaaagctcacaagaactgctaa

SEQ ID NO: 25363 - DNA, 25 bp, synthetic construct
  misc_feature 1..25: note = Probe
  source 1..25: mol_type = other DNA
gagaaagctcacaagaactgctaac

SEQ ID NO: 25364 - DNA, 26 bp, synthetic construct
  misc_feature 1..26: note = Probe
  source 1..26: mol_type = other DNA
gagaaagctcacaagaactgctaact

SEQ ID NO: 25365 - DNA, 27 bp, synthetic construct
  misc_feature 1..27: note = Probe
  source 1..27: mol_type = other DNA
gagaaagctcacaagaactgctaactc

SEQ ID NO: 25366 - DNA, 28 bp, synthetic construct
  misc_feature 1..28: note = Probe
  source 1..28: mol_type = other DNA
gagaaagctcacaagaactgctaactca

SEQ ID NO: 25367 - DNA, 32 bp, synthetic construct; identical to SEQ ID NO: 934
  misc_feature 1..32: note = Probe
  source 1..32: mol_type = other DNA

SEQ ID NO: 25368 - DNA, 33 bp, synthetic construct; identical to SEQ ID NO: 935
  misc_feature 1..33: note = Probe
  source 1..33: mol_type = other DNA

SEQ ID NO: 25369 - DNA, 36 bp, synthetic construct; identical to SEQ ID NO: 938
  misc_feature 1..36: note = Probe
  source 1..36: mol_type = other DNA

SEQ ID NO: 25370 - DNA, 32 bp, synthetic construct; identical to SEQ ID NO: 952
  misc_feature 1..32: note = Probe
  source 1..32: mol_type = other DNA

SEQ ID NO: 25371 - DNA, 30 bp, synthetic construct; identical to SEQ ID NO: 960
  misc_feature 1..30: note = Probe
  source 1..30: mol_type = other DNA

SEQ ID NO: 25372 - DNA, 32 bp, synthetic construct; identical to SEQ ID NO: 20309
  misc_feature 1..32: note = Probe
  source 1..32: mol_type = other DNA

SEQ ID NO: 25373 - DNA, 18 bp, synthetic construct
  misc_feature 1..18: note = Probe
  source 1..18: mol_type = other DNA
gagtaaataataggagct

SEQ ID NO: 25374 - DNA, 21 bp, synthetic construct
  misc_feature 1..21: note = Probe
  source 1..21: mol_type = other DNA
gataacagctatccattggtc

SEQ ID NO: 25375 - DNA, 22 bp, synthetic construct
  misc_feature 1..22: note = Probe
  source 1..22: mol_type = other DNA
gataacagctatccattggtct

SEQ ID NO: 25376 - DNA, 22 bp, synthetic construct
  misc_feature 1..22: note = Probe
  source 1..22: mol_type = other DNA
gatagagtaaataataggagct

SEQ ID NO: 25377 - DNA, 29 bp, synthetic construct
  misc_feature 1..29: note = Probe
  source 1..29: mol_type = other DNA
gatagagtaaataataggagcttaaaccc

SEQ ID NO: 25378 - DNA, 30 bp, synthetic construct; identical to SEQ ID NO: 20396
  misc_feature 1..30: note = Probe
  source 1..30: mol_type = other DNA

SEQ ID NO: 25379 - DNA, 31 bp, synthetic construct; identical to SEQ ID NO: 20397
  misc_feature 1..31: note = Probe
  source 1..31: mol_type = other DNA

SEQ ID NO: 25380 - DNA, 24 bp, synthetic construct
  misc_feature 1..24: note = Probe
  source 1..24: mol_type = other DNA
gatgaaaacctttttccaaggaca

SEQ ID NO: 25381 - DNA, 36 bp, synthetic construct
  misc_feature 1..36: note = Probe
  source 1..36: mol_type = other DNA
gatggtttttcatatcattggtcgtggttgtagtcc

SEQ ID NO: 25382 - DNA, 24 bp, synthetic construct
  misc_feature 1..24: note = Probe
  source 1..24: mol_type = other DNA
gattagggtgcttagctgttaact

SEQ ID NO: 25383 - DNA, 20 bp, synthetic construct
  misc_feature 1..20: note = Probe
  source 1..20: mol_type = other DNA
gattcggcgctctcaccgcc

SEQ ID NO: 25384 - DNA, 27 bp, synthetic construct
  misc_feature 1..27: note = Probe
  source 1..27: mol_type = other DNA
gattcggcgctctcaccgccgcggccc

SEQ ID NO: 25385 - DNA, 31 bp, synthetic construct
  misc_feature 1..31: note = Probe
  source 1..31: mol_type = other DNA
gattcggcgctctcaccgccgcggcccgggt

SEQ ID NO: 25386 - DNA, 32 bp, synthetic construct; identical to SEQ ID NO: 5751
  misc_feature 1..32: note = Probe
  source 1..32: mol_type = other DNA

SEQ ID NO: 25387 - DNA, 33 bp, synthetic construct; identical to SEQ ID NO: 982
  misc_feature 1..33: note = Probe
  source 1..33: mol_type = other DNA

SEQ ID NO: 25388 - DNA, 36 bp, synthetic construct; identical to SEQ ID NO: 5753
  misc_feature 1..36: note = Probe
  source 1..36: mol_type = other DNA

SEQ ID NO: 25389 - DNA, 30 bp, synthetic construct
  misc_feature 1..30: note = Probe
  source 1..30: mol_type = other DNA
gcaatacactgaaaatgtttagacgggctc

SEQ ID NO: 25390 - DNA, 32 bp, synthetic construct
  misc_feature 1..32: note = Probe
  source 1..32: mol_type = other DNA
gcaatacactgaaaatgtttagacgggctcac

SEQ ID NO: 25391 - DNA, 32 bp, synthetic construct; identical to SEQ ID NO: 5795
  misc_feature 1..32: note = Probe
  source 1..32: mol_type = other DNA

SEQ ID NO: 25392 - DNA, 31 bp, synthetic construct; identical to SEQ ID NO: 5824
  misc_feature 1..31: note = Probe
  source 1..31: mol_type = other DNA

SEQ ID NO: 25393 - DNA, 32 bp, synthetic construct; identical to SEQ ID NO: 20552
  misc_feature 1..32: note = Probe
  source 1..32: mol_type = other DNA

SEQ ID NO: 25394 - DNA, 33 bp, synthetic construct
  misc_feature 1..33: note = Probe
  source 1..33: mol_type = other DNA
gcactctggactctgaatccagcgatccgagtt

SEQ ID NO: 25395 - DNA, 32 bp, synthetic construct; identical to SEQ ID NO: 991
  misc_feature 1..32: note = Probe
  source 1..32: mol_type = other DNA

SEQ ID NO: 25396 - DNA, 28 bp, synthetic construct
  misc_feature 1..28: note = Probe
  source 1..28: mol_type = other DNA
gcatgggtggttcagtggtagaattctc

SEQ ID NO: 25397 - DNA, 29 bp, synthetic construct
  misc_feature 1..29: note = Probe
  source 1..29: mol_type = other DNA
gcatgggtggttcagtggtagaattctcg

SEQ ID NO: 25398 - DNA, 30 bp, synthetic construct; identical to SEQ ID NO: 1002
  misc_feature 1..30: note = Probe
  source 1..30: mol_type = other DNA

SEQ ID NO: 25399 - DNA, 31 bp, synthetic construct; identical to SEQ ID NO: 1003
  misc_feature 1..31: note = Probe
  source 1..31: mol_type = other DNA

SEQ ID NO: 25400 - DNA, 32 bp, synthetic construct; identical to SEQ ID NO: 1004
  misc_feature 1..32: note = Probe
  source 1..32: mol_type = other DNA

SEQ ID NO: 25401 - DNA, 33 bp, synthetic construct; identical to SEQ ID NO: 1005
  misc_feature 1..33: note = Probe
  source 1..33: mol_type = other DNA

SEQ ID NO: 25402 - DNA, 34 bp, synthetic construct; identical to SEQ ID NO: 1006
  misc_feature 1..34: note = Probe
  source 1..34: mol_type = other DNA

SEQ ID NO: 25403 - DNA, 35 bp, synthetic construct; identical to SEQ ID NO: 1007
  misc_feature 1..35: note = Probe
  source 1..35: mol_type = other DNA

SEQ ID NO: 25404 - DNA, 36 bp, synthetic construct; identical to SEQ ID NO: 1008
  misc_feature 1..36: note = Probe
  source 1..36: mol_type = other DNA

SEQ ID NO: 25405 - DNA, 36 bp, synthetic construct
  misc_feature 1..36: note = Probe
  source 1..36: mol_type = other DNA
gcattggactgtaaatctaaagacaggggttaggcc

SEQ ID NO: 25406 - DNA, 32 bp, synthetic construct; identical to SEQ ID NO: 1013
  misc_feature 1..32: note = Probe
  source 1..32: mol_type = other DNA

SEQ ID NO: 25407 - DNA, 50 bp, synthetic construct
  misc_feature 1..50: note = Probe
  source 1..50: mol_type = other DNA
gcattggtggttcagtggtagaattctcgcctcccacgcgggagacccgg

SEQ ID NO: 25408 - DNA, 38 bp, synthetic construct; identical to SEQ ID NO: 1014
  misc_feature 1..38: note = Probe
  source 1..38: mol_type = other DNA

SEQ ID NO: 25409 - DNA, 50 bp, synthetic construct; identical to SEQ ID NO: 1020
  misc_feature 1..50: note = Probe
  source 1..50: mol_type = other DNA

SEQ ID NO: 25410 - DNA, 19 bp, synthetic construct
  misc_feature 1..19: note = Probe
  source 1..19: mol_type = other DNA
gcccggatagctcagtcgg

SEQ ID NO: 25411 - DNA, 32 bp, synthetic construct; identical to SEQ ID NO: 1040
  misc_feature 1..32: note = Probe
  source 1..32: mol_type = other DNA

SEQ ID NO: 25412 - DNA, 33 bp, synthetic construct; identical to SEQ ID NO: 1041
  misc_feature 1..33: note = Probe
  source 1..33: mol_type = other DNA

SEQ ID NO: 25413 - DNA, 36 bp, synthetic construct; identical to SEQ ID NO: 1044
  misc_feature 1..36: note = Probe
  source 1..36: mol_type = other DNA

SEQ ID NO: 25414 - DNA, 28 bp, synthetic construct
  misc_feature 1..28: note = Probe
  source 1..28: mol_type = other DNA
gcccggctagctcagtcggtagagcatg

SEQ ID NO: 25415 - DNA, 30 bp, synthetic construct; identical to SEQ ID NO: 1062
  misc_feature 1..30: note = Probe
  source 1..30: mol_type = other DNA

SEQ ID NO: 25416 - DNA, 32 bp, synthetic construct; identical to SEQ ID NO: 1064
  misc_feature 1..32: note = Probe
  source 1..32: mol_type = other DNA

SEQ ID NO: 25417 - DNA, 36 bp, synthetic construct; identical to SEQ ID NO: 1068
  misc_feature 1..36: note = Probe
  source 1..36: mol_type = other DNA

SEQ ID NO: 25418 - DNA, 33 bp, synthetic construct; identical to SEQ ID NO: 1070
  misc_feature 1..33: note = Probe
  source 1..33: mol_type = other DNA

SEQ ID NO: 25419 - DNA, 34 bp, synthetic construct; identical to SEQ ID NO: 1071
  misc_feature 1..34: note = Probe
  source 1..34: mol_type = other DNA

SEQ ID NO: 25420 - DNA, 35 bp, synthetic construct; identical to SEQ ID NO: 1072
  misc_feature 1..35: note = Probe
  source 1..35: mol_type = other DNA

SEQ ID NO: 25421 - DNA, 36 bp, synthetic construct; identical to SEQ ID NO: 1073
  misc_feature 1..36: note = Probe
  source 1..36: mol_type = other DNA

SEQ ID NO: 25422 - DNA, 41 bp, synthetic construct; identical to SEQ ID NO: 5997
  misc_feature 1..41: note = Probe
  source 1..41: mol_type = other DNA

SEQ ID NO: 25423 - DNA, 29 bp, synthetic construct
  misc_feature 1..29: note = Probe
  source 1..29: mol_type = other DNA
gcccggctagctcagtcggtagagcatgg

SEQ ID NO: 25424 - DNA, 30 bp, synthetic construct; identical to SEQ ID NO: 1080
  misc_feature 1..30: note = Probe
  source 1..30: mol_type = other DNA

SEQ ID NO: 25425 - DNA, 32 bp, synthetic construct; identical to SEQ ID NO: 1082
  misc_feature 1..32: note = Probe
  source 1..32: mol_type = other DNA

SEQ ID NO: 25426 - DNA, 33 bp, synthetic construct; identical to SEQ ID NO: 1083
  misc_feature 1..33: note = Probe
  source 1..33: mol_type = other DNA

SEQ ID NO: 25427 - DNA, 34 bp, synthetic construct; identical to SEQ ID NO: 1084
  misc_feature 1..34: note = Probe
  source 1..34: mol_type = other DNA

SEQ ID NO: 25428 - DNA, 35 bp, synthetic construct; identical to SEQ ID NO: 1085
  misc_feature 1..35: note = Probe
  source 1..35: mol_type = other DNA

SEQ ID NO: 25429 - DNA, 36 bp, synthetic construct; identical to SEQ ID NO: 1086
  misc_feature 1..36: note = Probe
  source 1..36: mol_type = other DNA

SEQ ID NO: 25430 - DNA, 41 bp, synthetic construct; identical to SEQ ID NO: 6002
  misc_feature 1..41: note = Probe
  source 1..41: mol_type = other DNA

SEQ ID NO: 25431 - DNA, 33 bp, synthetic construct; identical to SEQ ID NO: 1103
  misc_feature 1..33: note = Probe
  source 1..33: mol_type = other DNA

SEQ ID NO: 25432 - DNA, 30 bp, synthetic construct; identical to SEQ ID NO: 1105
  misc_feature 1..30: note = Probe
  source 1..30: mol_type = other DNA

SEQ ID NO: 25433 - DNA, 31 bp, synthetic construct; identical to SEQ ID NO: 1106
  misc_feature 1..31: note = Probe
  source 1..31: mol_type = other DNA

SEQ ID NO: 25434 - DNA, 32 bp, synthetic construct; identical to SEQ ID NO: 1107
  misc_feature 1..32: note = Probe
  source 1..32: mol_type = other DNA

SEQ ID NO: 25435 - DNA, 33 bp, synthetic construct; identical to SEQ ID NO: 1108
  misc_feature 1..33: note = Probe
  source 1..33: mol_type = other DNA

SEQ ID NO: 25436 - DNA, 34 bp, synthetic construct; identical to SEQ ID NO: 1109
  misc_feature 1..34: note = Probe
  source 1..34: mol_type = other DNA

SEQ ID NO: 25437 - DNA, 36 bp, synthetic construct; identical to SEQ ID NO: 1111
  misc_feature 1..36: note = Probe
  source 1..36: mol_type = other DNA

SEQ ID NO: 25438 - DNA, 32 bp, synthetic construct; identical to SEQ ID NO: 1151
  misc_feature 1..32: note = Probe
  source 1..32: mol_type = other DNA

SEQ ID NO: 25439 - DNA, 33 bp, synthetic construct; identical to SEQ ID NO: 1152
  misc_feature 1..33: note = Probe
  source 1..33: mol_type = other DNA

SEQ ID NO: 25440 - DNA, 35 bp, synthetic construct; identical to SEQ ID NO: 1154
  misc_feature 1..35: note = Probe
  source 1..35: mol_type = other DNA

SEQ ID NO: 25441 - DNA, 36 bp, synthetic construct; identical to SEQ ID NO: 1155
  misc_feature 1..36: note = Probe
  source 1..36: mol_type = other DNA

SEQ ID NO: 25442 - DNA, 50 bp, synthetic construct; identical to SEQ ID NO: 1161
  misc_feature 1..50: note = Probe
  source 1..50: mol_type = other DNA

SEQ ID NO: 25443 - DNA, 36 bp, synthetic construct
  misc_feature 1..36: note = Probe
  source 1..36: mol_type = other DNA
gcgctctcaccgccgcggcccgggttcgattcccgg

SEQ ID NO: 25444 - DNA, 33 bp, synthetic construct; identical to SEQ ID NO: 1172
  misc_feature 1..33: note = Probe
  source 1..33: mol_type = other DNA

SEQ ID NO: 25445 - DNA, 32 bp, synthetic construct; identical to SEQ ID NO: 1185
  misc_feature 1..32: note = Probe
  source 1..32: mol_type = other DNA

SEQ ID NO: 25446 - DNA, 36 bp, synthetic construct; identical to SEQ ID NO: 1189
  misc_feature 1..36: note = Probe
  source 1..36: mol_type = other DNA

SEQ ID NO: 25447 - DNA, 50 bp, synthetic construct; identical to SEQ ID NO: 1195
  misc_feature 1..50: note = Probe
  source 1..50: mol_type = other DNA

SEQ ID NO: 25448 - DNA, 27 bp, synthetic construct
  misc_feature 1..27: note = Probe
  source 1..27: mol_type = other DNA
gctagctcagtcggtagagcatgggac

SEQ ID NO: 25449 - DNA, 28 bp, synthetic construct
  misc_feature 1..28: note = Probe
  source 1..28: mol_type = other DNA
gctagctcagtcggtagagcatgggact

SEQ ID NO: 25450 - DNA, 29 bp, synthetic construct
  misc_feature 1..29: note = Probe
  source 1..29: mol_type = other DNA
gctagctcagtcggtagagcatgggactc

SEQ ID NO: 25451 - DNA, 22 bp, synthetic construct
  misc_feature 1..22: note = Probe
  source 1..22: mol_type = other DNA
gctatccattggtcttaggccc

SEQ ID NO: 25452 - DNA, 20 bp, synthetic construct
  misc_feature 1..20: note = Probe
  source 1..20: mol_type = other DNA
gctcacaagaactgctaact

SEQ ID NO: 25453 - DNA, 36 bp, synthetic construct
  misc_feature 1..36: note = Probe
  source 1..36: mol_type = other DNA
gctcacaagaactgctaactcatgcccccatgtcta

SEQ ID NO: 25454 - DNA, 25 bp, synthetic construct
  misc_feature 1..25: note = Probe
  source 1..25: mol_type = other DNA
gctcagtcggtagagcatgggactc

SEQ ID NO: 25455 - DNA, 23 bp, synthetic construct
  misc_feature 1..23: note = Probe
  source 1..23: mol_type = other DNA
gctccgaggtgattttcatattg

SEQ ID NO: 25456 - DNA, 36 bp, synthetic construct
  misc_feature 1..36: note = Probe
  source 1..36: mol_type = other DNA
gctggtgtagtggtatcatgcaagattcccattctt

SEQ ID NO: 25457 - DNA, 32 bp, synthetic construct; identical to SEQ ID NO: 1214
  misc_feature 1..32: note = Probe
  source 1..32: mol_type = other DNA

SEQ ID NO: 25458 - DNA, 33 bp, synthetic construct; identical to SEQ ID NO: 1215
  misc_feature 1..33: note = Probe
  source 1..33: mol_type = other DNA

SEQ ID NO: 25459 - DNA, 34 bp, synthetic construct; identical to SEQ ID NO: 1216
  misc_feature 1..34: note = Probe
  source 1..34: mol_type = other DNA

SEQ ID NO: 25460 - DNA, 36 bp, synthetic construct; identical to SEQ ID NO: 1218
  misc_feature 1..36: note = Probe
  source 1..36: mol_type = other DNA

SEQ ID NO: 25461 - DNA, 24 bp, synthetic construct
  misc_feature 1..24: note = Probe
  source 1..24: mol_type = other DNA
gctttgcacgtatgaggccccggg

SEQ ID NO: 25462 - DNA, 25 bp, synthetic construct
  misc_feature 1..25: note = Probe
  source 1..25: mol_type = other DNA
gctttgcacgtatgaggccccgggt

SEQ ID NO: 25463 - DNA, 26 bp, synthetic construct
  misc_feature 1..26: note = Probe
  source 1..26: mol_type = other DNA
gctttgcacgtatgaggccccgggtt

SEQ ID NO: 25464 - DNA, 36 bp, synthetic construct
  misc_feature 1..36: note = Probe
  source 1..36: mol_type = other DNA
gctttgggtgctaatggtggagttaaagactttttc

SEQ ID NO: 25465 - DNA, 26 bp, synthetic construct
  misc_feature 1..26: note = Probe
  source 1..26: mol_type = other DNA
ggagatgaaaacctttttccaaggac

SEQ ID NO: 25466 - DNA, 22 bp, synthetic construct
  misc_feature 1..22: note = Probe
  source 1..22: mol_type = other DNA
ggataacagctatccattggtc

SEQ ID NO: 25467 - DNA, 24 bp, synthetic construct
  misc_feature 1..24: note = Probe
  source 1..24: mol_type = other DNA
ggatagctcagtcggtagagcatc

SEQ ID NO: 25468 - DNA, 31 bp, synthetic construct; identical to SEQ ID NO: 1252
  misc_feature 1..31: note = Probe
  source 1..31: mol_type = other DNA

SEQ ID NO: 25469 - DNA, 32 bp, synthetic construct; identical to SEQ ID NO: 1253
  misc_feature 1..32: note = Probe
  source 1..32: mol_type = other DNA

SEQ ID NO: 25470 - DNA, 21 bp, synthetic construct
  misc_feature 1..21: note = Probe
  source 1..21: mol_type = other DNA
ggattcggcgctctcaccgcc

SEQ ID NO: 25471 - DNA, 28 bp, synthetic construct
  misc_feature 1..28: note = Probe
  source 1..28: mol_type = other DNA
ggattcggcgctctcaccgccgcggccc

SEQ ID NO: 25472 - DNA, 36 bp, synthetic construct; identical to SEQ ID NO: 1264
  misc_feature 1..36: note = Probe
  source 1..36: mol_type = other DNA

SEQ ID NO: 25473 - DNA, 18 bp, synthetic construct
  misc_feature 1..18: note = Probe
  source 1..18: mol_type = other DNA
ggctagctcagtcggtag

SEQ ID NO: 25474 - DNA, 20 bp, synthetic construct
  misc_feature 1..20: note = Probe
  source 1..20: mol_type = other DNA
ggctagctcagtcggtagag

SEQ ID NO: 25475 - DNA, 29 bp, synthetic construct
  misc_feature 1..29: note = Probe
  source 1..29: mol_type = other DNA
ggctagctcagtcggtagagcatgagact

SEQ ID NO: 25476 - DNA, 28 bp, synthetic construct
  misc_feature 1..28: note = Probe
  source 1..28: mol_type = other DNA
ggctagctcagtcggtagagcatgggac

SEQ ID NO: 25477 - DNA, 29 bp, synthetic construct
  misc_feature 1..29: note = Probe
  source 1..29: mol_type = other DNA
ggctagctcagtcggtagagcatgggact

SEQ ID NO: 25478 - DNA, 30 bp, synthetic construct; identical to SEQ ID NO: 1292
  misc_feature 1..30: note = Probe
  source 1..30: mol_type = other DNA

SEQ ID NO: 25479 - DNA, 31 bp, synthetic construct; identical to SEQ ID NO: 1293
  misc_feature 1..31: note = Probe
  source 1..31: mol_type = other DNA

SEQ ID NO: 25480 - DNA, 19 bp, synthetic construct
  misc_feature 1..19: note = Probe
  source 1..19: mol_type = other DNA
ggctccgtggcgcaatgga

SEQ ID NO: 25481 - DNA, 27 bp, synthetic construct
  misc_feature 1..27: note = Probe
  source 1..27: mol_type = other DNA
ggctccgtggcgcaatggatagcgcat

SEQ ID NO: 25482 - DNA, 31 bp, synthetic construct; identical to SEQ ID NO: 6502
  misc_feature 1..31: note = Probe
  source 1..31: mol_type = other DNA

SEQ ID NO: 25483 - DNA, 36 bp, synthetic construct; identical to SEQ ID NO: 21810
  misc_feature 1..36: note = Probe
  source 1..36: mol_type = other DNA

SEQ ID NO: 25484 - DNA, 18 bp, synthetic construct
  misc_feature 1..18: note = Probe
  source 1..18: mol_type = other DNA
ggggatgtagctcagtgg

SEQ ID NO: 25485 - DNA, 19 bp, synthetic construct
  misc_feature 1..19: note = Probe
  source 1..19: mol_type = other DNA
ggggatgtagctcagtggt

SEQ ID NO: 25486 - DNA, 22 bp, synthetic construct
  misc_feature 1..22: note = Probe
  source 1..22: mol_type = other DNA
ggggatgtagctcagtggtaga

SEQ ID NO: 25487 - DNA, 23 bp, synthetic construct
  misc_feature 1..23: note = Probe
  source 1..23: mol_type = other DNA
ggggatgtagctcagtggtagag

SEQ ID NO: 25488 - DNA, 36 bp, synthetic construct; identical to SEQ ID NO: 21857
  misc_feature 1..36: note = Probe
  source 1..36: mol_type = other DNA

SEQ ID NO: 25489 - DNA, 30 bp, synthetic construct; identical to SEQ ID NO: 1367
  misc_feature 1..30: note = Probe
  source 1..30: mol_type = other DNA

SEQ ID NO: 25490 - DNA, 32 bp, synthetic construct; identical to SEQ ID NO: 1369
  misc_feature 1..32: note = Probe
  source 1..32: mol_type = other DNA

SEQ ID NO: 25491 - DNA, 17 bp, synthetic construct
  misc_feature 1..17: note = Probe
  source 1..17: mol_type = other DNA
ggggtatgattctcggt

SEQ ID NO: 25492 - DNA, 16 bp, synthetic construct
  misc_feature 1..16: note = Probe
  source 1..16: mol_type = other DNA
gggtatgattctcggt

SEQ ID NO: 25493 - DNA, 22 bp, synthetic construct
  misc_feature 1..22: note = Probe
  source 1..22: mol_type = other DNA
gggttcgattcccggtcaggga

SEQ ID NO: 25494 - DNA, 24 bp, synthetic construct
  misc_feature 1..24: note = Probe
  source 1..24: mol_type = other DNA
ggtaatcgcataaaacttaaaact

SEQ ID NO: 25495 - DNA, 25 bp, synthetic construct
  misc_feature 1..25: note = Probe
  source 1..25: mol_type = other DNA
ggtaatcgcataaaacttaaaactt

SEQ ID NO: 25496 - DNA, 36 bp, synthetic construct
  misc_feature 1..36: note = Probe
  source 1..36: mol_type = other DNA
ggtagaattctcgcctgccacgcgggaggcccgggt

SEQ ID NO: 25497 - DNA, 17 bp, synthetic construct
  misc_feature 1..17: note = Probe
  source 1..17: mol_type = other DNA
ggtagagcatgggactc

SEQ ID NO: 25498 - DNA, 16 bp, synthetic construct
  misc_feature 1..16: note = Probe
  source 1..16: mol_type = other DNA
ggtagcgtggccgagc

SEQ ID NO: 25499 - DNA, 21 bp, synthetic construct
  misc_feature 1..21: note = Probe
  source 1..21: mol_type = other DNA
ggtagcgtggccgagcggtct

SEQ ID NO: 25500 - DNA, 32 bp, synthetic construct; identical to SEQ ID NO: 1414
  misc_feature 1..32: note = Probe
  source 1..32: mol_type = other DNA

SEQ ID NO: 25501 - DNA, 36 bp, synthetic construct; identical to SEQ ID NO: 1416
  misc_feature 1..36: note = Probe
  source 1..36: mol_type = other DNA

SEQ ID NO: 25502 - DNA, 36 bp, synthetic construct
  misc_feature 1..36: note = Probe
  source 1..36: mol_type = other DNA
ggtgagcactctggactctgaatccagcgatccgag

SEQ ID NO: 25503 - DNA, 36 bp, synthetic construct
  misc_feature 1..36: note = Probe
  source 1..36: mol_type = other DNA
ggtgtaatggttagcactctggactctgaatccagc

SEQ ID NO: 25504 - DNA, 23 bp, synthetic construct
  misc_feature 1..23: note = Probe
  source 1..23: mol_type = other DNA
ggttagcactctggactctgaat

SEQ ID NO: 25505 - DNA, 24 bp, synthetic construct
  misc_feature 1..24: note = Probe
  source 1..24: mol_type = other DNA
ggttagcactctggactctgaatc

SEQ ID NO: 25506 - DNA, 25 bp, synthetic construct
  misc_feature 1..25: note = Probe
  source 1..25: mol_type = other DNA
ggttagcactctggactctgaatcc

SEQ ID NO: 25507 - DNA, 32 bp, synthetic construct
  misc_feature 1..32: note = Probe
  source 1..32: mol_type = other DNA
ggttagcactctggactctgaatccagcgatc

SEQ ID NO: 25508 - DNA, 33 bp, synthetic construct; identical to SEQ ID NO: 22249
  misc_feature 1..33: note = Probe
  source 1..33: mol_type = other DNA

SEQ ID NO: 25509 - DNA, 34 bp, synthetic construct; identical to SEQ ID NO: 22250
  misc_feature 1..34: note = Probe
  source 1..34: mol_type = other DNA

SEQ ID NO: 25510 - DNA, 36 bp, synthetic construct; identical to SEQ ID NO: 13947
  misc_feature 1..36: note = Probe
  source 1..36: mol_type = other DNA

SEQ ID NO: 25511 - DNA, 37 bp, synthetic construct
  misc_feature 1..37: note = Probe
  source 1..37: mol_type = other DNA
ggttagcactctggactctgaatccagcgatccgagt

SEQ ID NO: 25512 - DNA, 38 bp, synthetic construct; identical to SEQ ID NO: 22251
  misc_feature 1..38: note = Probe
  source 1..38: mol_type = other DNA

SEQ ID NO: 25513 - DNA, 24 bp, synthetic construct
  misc_feature 1..24: note = Probe
  source 1..24: mol_type = other DNA
ggttagcactctggactttgaatc

SEQ ID NO: 25514 - DNA, 36 bp, synthetic construct
  misc_feature 1..36: note = Probe
  source 1..36: mol_type = other DNA
ggttagcactctggactttgaatccagcaatccgag

SEQ ID NO: 25515 - DNA, 36 bp, synthetic construct; identical to SEQ ID NO: 13949
  misc_feature 1..36: note = Probe
  source 1..36: mol_type = other DNA

SEQ ID NO: 25516 - DNA, 38 bp, synthetic construct; identical to SEQ ID NO: 22254
  misc_feature 1..38: note = Probe
  source 1..38: mol_type = other DNA

SEQ ID NO: 25517 - DNA, 16 bp, synthetic construct
  misc_feature 1..16: note = Probe
  source 1..16: mol_type = other DNA
ggttaggattcggcgc

SEQ ID NO: 25518 - DNA, 18 bp, synthetic construct
  misc_feature 1..18: note = Probe
  source 1..18: mol_type = other DNA
ggttaggattcggcgctc

SEQ ID NO: 25519 - DNA, 26 bp, synthetic construct
  misc_feature 1..26: note = Probe
  source 1..26: mol_type = other DNA
ggttaggattcggcgctctcaccgcc

SEQ ID NO: 25520 - DNA, 33 bp, synthetic construct; identical to SEQ ID NO: 22258
  misc_feature 1..33: note = Probe
  source 1..33: mol_type = other DNA

SEQ ID NO: 25521 - DNA, 36 bp, synthetic construct
  misc_feature 1..36: note = Probe
  source 1..36: mol_type = other DNA
ggttaggattcggcgctctcaccgccgcggcccggg

SEQ ID NO: 25522 - DNA, 16 bp, synthetic construct
  misc_feature 1..16: note = Probe
  source 1..16: mol_type = other DNA
ggttagtactctgcgt

SEQ ID NO: 25523 - DNA, 36 bp, synthetic construct; identical to SEQ ID NO: 1436
  misc_feature 1..36: note = Probe
  source 1..36: mol_type = other DNA

SEQ ID NO: 25524 - DNA, 30 bp, synthetic construct; identical to SEQ ID NO: 1451
  misc_feature 1..30: note = Probe
  source 1..30: mol_type = other DNA

SEQ ID NO: 25525 - DNA, 31 bp, synthetic construct; identical to SEQ ID NO: 1452
  misc_feature 1..31: note = Probe
  source 1..31: mol_type = other DNA

SEQ ID NO: 25526 - DNA, 32 bp, synthetic construct; identical to SEQ ID NO: 1453
  misc_feature 1..32: note = Probe
  source 1..32: mol_type = other DNA

SEQ ID NO: 25527 - DNA, 33 bp, synthetic construct; identical to SEQ ID NO: 1454
  misc_feature 1..33: note = Probe
  source 1..33: mol_type = other DNA

SEQ ID NO: 25528 - DNA, 36 bp, synthetic construct; identical to SEQ ID NO: 1456
  misc_feature 1..36: note = Probe
  source 1..36: mol_type = other DNA

SEQ ID NO: 25529 - DNA, 32 bp, synthetic construct; identical to SEQ ID NO: 6827
  misc_feature 1..32: note = Probe
  source 1..32: mol_type = other DNA

SEQ ID NO: 25530 - DNA, 33 bp, synthetic construct; identical to SEQ ID NO: 1458
  misc_feature 1..33: note = Probe
  source 1..33: mol_type = other DNA

SEQ ID NO: 25531 - DNA, 34 bp, synthetic construct; identical to SEQ ID NO: 1459
  misc_feature 1..34: note = Probe
  source 1..34: mol_type = other DNA

SEQ ID NO: 25532 - DNA, 36 bp, synthetic construct; identical to SEQ ID NO: 1460
  misc_feature 1..36: note = Probe
  source 1..36: mol_type = other DNA

SEQ ID NO: 25533 - DNA, 50 bp, synthetic construct
  misc_feature 1..50: note = Probe
  source 1..50: mol_type = other DNA
ggttccatggtgtaatggttagcactctggactctgaatccagcgatccg

SEQ ID NO: 25534 - DNA, 32 bp, synthetic construct; identical to SEQ ID NO: 22374
  misc_feature 1..32: note = Probe
  source 1..32: mol_type = other DNA

SEQ ID NO: 25535 - DNA, 33 bp, synthetic construct; identical to SEQ ID NO: 6869
  misc_feature 1..33: note = Probe
  source 1..33: mol_type = other DNA

SEQ ID NO: 25536 - DNA, 36 bp, synthetic construct; identical to SEQ ID NO: 6870
  misc_feature 1..36: note = Probe
  source 1..36: mol_type = other DNA

SEQ ID NO: 25537 - DNA, 41 bp, synthetic construct
  misc_feature 1..41: note = Probe
  source 1..41: mol_type = other DNA
ggtttttcatatcattggtcgtggttgtagtccgtgcgaga

SEQ ID NO: 25538 - DNA, 42 bp, synthetic construct
  misc_feature 1..42: note = Probe
  source 1..42: mol_type = other DNA
ggtttttcatatcattggtcgtggttgtagtccgtgcgagaa

SEQ ID NO: 25539 - DNA, 20 bp, synthetic construct
  misc_feature 1..20: note = Probe
  source 1..20: mol_type = other DNA
gtaaaccaggggtcgcgagt

SEQ ID NO: 25540 - DNA, 20 bp, synthetic construct
  misc_feature 1..20: note = Probe
  source 1..20: mol_type = other DNA
gtaaaccgaagatcgcgggt

SEQ ID NO: 25541 - DNA, 36 bp, synthetic construct
  misc_feature 1..36: note = Probe
  source 1..36: mol_type = other DNA
gtaatggttagcactctggactctgaatccagcgat

SEQ ID NO: 25542 - DNA, 32 bp, synthetic construct; identical to SEQ ID NO: 22428
  misc_feature 1..32: note = Probe
  source 1..32: mol_type = other DNA

SEQ ID NO: 25543 - DNA, 36 bp, synthetic construct; identical to SEQ ID NO: 22439
  misc_feature 1..36: note = Probe
  source 1..36: mol_type = other DNA

SEQ ID NO: 25544 - DNA, 31 bp, synthetic construct; identical to SEQ ID NO: 22440
  misc_feature 1..31: note = Probe
  source 1..31: mol_type = other DNA

SEQ ID NO: 25545 - DNA, 33 bp, synthetic construct
  misc_feature 1..33: note = Probe
  source 1..33: mol_type = other DNA
gtagaattctcgcctgccacgcgggaggcccgg

SEQ ID NO: 25546 - DNA, 34 bp, synthetic construct
  misc_feature 1..34: note = Probe
  source 1..34: mol_type = other DNA
gtagaattctcgcctgccacgcgggaggcccggg

SEQ ID NO: 25547 - DNA, 35 bp, synthetic construct; identical to SEQ ID NO: 22441
  misc_feature 1..35: note = Probe
  source 1..35: mol_type = other DNA

SEQ ID NO: 25548 - DNA, 36 bp, synthetic construct; identical to SEQ ID NO: 14013
  misc_feature 1..36: note = Probe
  source 1..36: mol_type = other DNA

SEQ ID NO: 25549 - DNA, 16 bp, synthetic construct
  misc_feature 1..16: note = Probe
  source 1..16: mol_type = other DNA
gtagtcgtggccgagt

SEQ ID NO: 25550 - DNA, 18 bp, synthetic construct
  misc_feature 1..18: note = Probe
  source 1..18: mol_type = other DNA
gtagtcgtggccgagtgg

SEQ ID NO: 25551 - DNA, 23 bp, synthetic construct
  misc_feature 1..23: note = Probe
  source 1..23: mol_type = other DNA
gtagtcgtggccgagtggttaag

SEQ ID NO: 25552 - DNA, 24 bp, synthetic construct
  misc_feature 1..24: note = Probe
  source 1..24: mol_type = other DNA
gtagtcgtggccgagtggttaagg

SEQ ID NO: 25553 - DNA, 36 bp, synthetic construct; identical to SEQ ID NO: 14022
  misc_feature 1..36: note = Probe
  source 1..36: mol_type = other DNA

SEQ ID NO: 25554 - DNA, 25 bp, synthetic construct
  misc_feature 1..25: note = Probe
  source 1..25: mol_type = other DNA
gtcaggatggccgagtggtctaagg

SEQ ID NO: 25555 - DNA, 26 bp, synthetic construct
  misc_feature 1..26: note = Probe
  source 1..26: mol_type = other DNA
gtcaggatggccgagtggtctaaggc

SEQ ID NO: 25556 - DNA, 17 bp, synthetic construct
  misc_feature 1..17: note = Probe
  source 1..17: mol_type = other DNA
gtcggtagagcatcaga

SEQ ID NO: 25557 - DNA, 18 bp, synthetic construct
  misc_feature 1..18: note = Probe
  source 1..18: mol_type = other DNA
gtcggtagagcatcagac

SEQ ID NO: 25558 - DNA, 17 bp, synthetic construct
  misc_feature 1..17: note = Probe
  source 1..17: mol_type = other DNA
gtcggtagagcatggga

SEQ ID NO: 25559 - DNA, 18 bp, synthetic construct
  misc_feature 1..18: note = Probe
  source 1..18: mol_type = other DNA
gtcggtagagcatgggac

SEQ ID NO: 25560 - DNA, 19 bp, synthetic construct
  misc_feature 1..19: note = Probe
  source 1..19: mol_type = other DNA
gtcggtagagcatgggact

SEQ ID NO: 25561 - DNA, 20 bp, synthetic construct
  misc_feature 1..20: note = Probe
  source 1..20: mol_type = other DNA
gtcggtagagcatgggactc

SEQ ID NO: 25562 - DNA, 28 bp, synthetic construct
  misc_feature 1..28: note = Probe
  source 1..28: mol_type = other DNA
gtcggtagagcatgggactcttaatccc

SEQ ID NO: 25563 - DNA, 24 bp, synthetic construct
  misc_feature 1..24: note = Probe
  source 1..24: mol_type = other DNA
gtcgtggttgtagtccgtgcgaga

SEQ ID NO: 25564 - DNA, 25 bp, synthetic construct
  misc_feature 1..25: note = Probe
  source 1..25: mol_type = other DNA
gtcgtggttgtagtccgtgcgagaa

SEQ ID NO: 25565 - DNA, 36 bp, synthetic construct; identical to SEQ ID NO: 22708
  misc_feature 1..36: note = Probe
  source 1..36: mol_type = other DNA

SEQ ID NO: 25566 - DNA, 19 bp, synthetic construct
  misc_feature 1..19: note = Probe
  source 1..19: mol_type = other DNA
gtgagtatccccgcctgtc

SEQ ID NO: 25567 - DNA, 28 bp, synthetic construct
  misc_feature 1..28: note = Probe
  source 1..28: mol_type = other DNA
gtggttaggattcggcgctctcaccgcc

SEQ ID NO: 25568 - DNA, 35 bp, synthetic construct; identical to SEQ ID NO: 14107
  misc_feature 1..35: note = Probe
  source 1..35: mol_type = other DNA

SEQ ID NO: 25569 - DNA, 36 bp, synthetic construct; identical to SEQ ID NO: 22856
  misc_feature 1..36: note = Probe
  source 1..36: mol_type = other DNA

SEQ ID NO: 25570 - DNA, 19 bp, synthetic construct
  misc_feature 1..19: note = Probe
  source 1..19: mol_type = other DNA
gtggttagtactctgcgtt

SEQ ID NO: 25571 - DNA, 21 bp, synthetic construct
  misc_feature 1..21: note = Probe
  source 1..21: mol_type = other DNA
gtggttgtagtccgtgcgaga

SEQ ID NO: 25572 - DNA, 22 bp, synthetic construct
  misc_feature 1..22: note = Probe
  source 1..22: mol_type = other DNA
gtggttgtagtccgtgcgagaa

SEQ ID NO: 25573 - DNA, 23 bp, synthetic construct
  misc_feature 1..23: note = Probe
  source 1..23: mol_type = other DNA
gtggttgtagtccgtgcgagaat

SEQ ID NO: 25574 - DNA, 24 bp, synthetic construct
  misc_feature 1..24: note = Probe
  source 1..24: mol_type = other DNA
gtggttgtagtccgtgcgagaata

SEQ ID NO: 25575 - DNA, 36 bp, synthetic construct
  misc_feature 1..36: note = Probe
  source 1..36: mol_type = other DNA
gtgtaatggttagcactctggactctgaatccagcg

SEQ ID NO: 25576 - DNA, 36 bp, synthetic construct
  misc_feature 1..36: note = Probe
  source 1..36: mol_type = other DNA
gttaactaagtgtttgtgggtttaagtcccattggt

SEQ ID NO: 25577 - DNA, 21 bp, synthetic construct
  misc_feature 1..21: note = Probe
  source 1..21: mol_type = other DNA
gttaagatggcagagcccggt

SEQ ID NO: 25578 - DNA, 22 bp, synthetic construct
  misc_feature 1..22: note = Probe
  source 1..22: mol_type = other DNA
gttaagatggcagagcccggta

SEQ ID NO: 25579 - DNA, 24 bp, synthetic construct
  misc_feature 1..24: note = Probe
  source 1..24: mol_type = other DNA
gttaagatggcagagcccggtaat

SEQ ID NO: 25580 - DNA, 25 bp, synthetic construct
  misc_feature 1..25: note = Probe
  source 1..25: mol_type = other DNA
gttaagatggcagagcccggtaatc

SEQ ID NO: 25581 - DNA, 26 bp, synthetic construct
  misc_feature 1..26: note = Probe
  source 1..26: mol_type = other DNA
gttaagatggcagagcccggtaatcg

SEQ ID NO: 25582 - DNA, 28 bp, synthetic construct
  misc_feature 1..28: note = Probe
  source 1..28: mol_type = other DNA
gttaagatggcagagcccggtaatcgca

SEQ ID NO: 25583 - DNA, 29 bp, synthetic construct
  misc_feature 1..29: note = Probe
  source 1..29: mol_type = other DNA
gttaagatggcagagcccggtaatcgcat

SEQ ID NO: 25584 - DNA, 30 bp, synthetic construct; identical to SEQ ID NO: 1521
  misc_feature 1..30: note = Probe
  source 1..30: mol_type = other DNA

SEQ ID NO: 25585 - DNA, 31 bp, synthetic construct; identical to SEQ ID NO: 22952
  misc_feature 1..31: note = Probe
  source 1..31: mol_type = other DNA

SEQ ID NO: 25586 - DNA, 32 bp, synthetic construct; identical to SEQ ID NO: 7138
  misc_feature 1..32: note = Probe
  source 1..32: mol_type = other DNA

SEQ ID NO: 25587 - DNA, 33 bp, synthetic construct; identical to SEQ ID NO: 22954
  misc_feature 1..33: note = Probe
  source 1..33: mol_type = other DNA

SEQ ID NO: 25588 - DNA, 34 bp, synthetic construct; identical to SEQ ID NO: 1522
  misc_feature 1..34: note = Probe
  source 1..34: mol_type = other DNA

SEQ ID NO: 25589 - DNA, 35 bp, synthetic construct; identical to SEQ ID NO: 7139
  misc_feature 1..35: note = Probe
  source 1..35: mol_type = other DNA

SEQ ID NO: 25590 - DNA, 36 bp, synthetic construct; identical to SEQ ID NO: 22957
  misc_feature 1..36: note = Probe
  source 1..36: mol_type = other DNA

SEQ ID NO: 25591 - DNA, 37 bp, synthetic construct; identical to SEQ ID NO: 1523
  misc_feature 1..37: note = Probe
  source 1..37: mol_type = other DNA

SEQ ID NO: 25592 - DNA, 41 bp, synthetic construct; identical to SEQ ID NO: 7142
  misc_feature 1..41: note = Probe
  source 1..41: mol_type = other DNA

SEQ ID NO: 25593 - DNA, 42 bp, synthetic construct; identical to SEQ ID NO: 1524
  misc_feature 1..42: note = Probe
  source 1..42: mol_type = other DNA

SEQ ID NO: 25594 - DNA, 43 bp, synthetic construct; identical to SEQ ID NO: 7143
  misc_feature 1..43: note = Probe
  source 1..43: mol_type = other DNA

SEQ ID NO: 25595 - DNA, 36 bp, synthetic construct
  misc_feature 1..36: note = Probe
  source 1..36: mol_type = other DNA
gttagcactctggactctgaatccagcgatccgagt

SEQ ID NO: 25596 - DNA, 36 bp, synthetic construct
  misc_feature 1..36: note = Probe
  source 1..36: mol_type = other DNA
gttagcactctggactttgaatccagcgatccgagt

SEQ ID NO: 25597 - DNA, 17 bp, synthetic construct
  misc_feature 1..17: note = Probe
  source 1..17: mol_type = other DNA
gttaggattcggcgctc

SEQ ID NO: 25598 - DNA, 25 bp, synthetic construct
  misc_feature 1..25: note = Probe
  source 1..25: mol_type = other DNA
gttaggattcggcgctctcaccgcc

SEQ ID NO: 25599 - DNA, 31 bp, synthetic construct
  misc_feature 1..31: note = Probe
  source 1..31: mol_type = other DNA
gttaggattcggcgctctcaccgccgcggcc

SEQ ID NO: 25600 - DNA, 32 bp, synthetic construct; identical to SEQ ID NO: 22966
  misc_feature 1..32: note = Probe
  source 1..32: mol_type = other DNA

SEQ ID NO: 25601 - DNA, 36 bp, synthetic construct
  misc_feature 1..36: note = Probe
  source 1..36: mol_type = other DNA
gttaggattcggcgctctcaccgccgcggcccgggt

SEQ ID NO: 25602 - DNA, 36 bp, synthetic construct
  misc_feature 1..36: note = Probe
  source 1..36: mol_type = other DNA
gttccatggtgtaatggttagcactctggactctga

SEQ ID NO: 25603 - DNA, 36 bp, synthetic construct
  misc_feature 1..36: note = Probe
  source 1..36: mol_type = other DNA
gttgaaatacaacgatggtttttcatatcattggtc

SEQ ID NO: 25604 - DNA, 27 bp, synthetic construct
  misc_feature 1..27: note = Probe
  source 1..27: mol_type = other DNA
gttgattagggtgcttagctgttaact

SEQ ID NO: 25605 - DNA, 36 bp, synthetic construct
  misc_feature 1..36: note = Probe
  source 1..36: mol_type = other DNA
gttgattagggtgcttagctgttaactaagtgtttg

SEQ ID NO: 25606 - DNA, 27 bp, synthetic construct
  misc_feature 1..27: note = Probe
  source 1..27: mol_type = other DNA
gtttaaacaaaacgaatgatttcgact

SEQ ID NO: 25607 - DNA, 17 bp, synthetic construct
  misc_feature 1..17: note = Probe
  source 1..17: mol_type = other DNA
gtttatgtagcttacct

SEQ ID NO: 25608 - DNA, 18 bp, synthetic construct
  misc_feature 1..18: note = Probe
  source 1..18: mol_type = other DNA
gtttatgtagcttacctc

SEQ ID NO: 25609 - DNA, 19 bp, synthetic construct
  misc_feature 1..19: note = Probe
  source 1..19: mol_type = other DNA
gtttatgtagcttacctcc

SEQ ID NO: 25610 - DNA, 20 bp, synthetic construct
  misc_feature 1..20: note = Probe
  source 1..20: mol_type = other DNA
gtttatgtagcttacctcct

SEQ ID NO: 25611 - DNA, 21 bp, synthetic construct
  misc_feature 1..21: note = Probe
  source 1..21: mol_type = other DNA
gtttatgtagcttacctcctc

SEQ ID NO: 25612 - DNA, 22 bp, synthetic construct
  misc_feature 1..22: note = Probe
  source 1..22: mol_type = other DNA
gtttatgtagcttacctcctca

SEQ ID NO: 25613 - DNA, 36 bp, synthetic construct; identical to SEQ ID NO: 1540
  misc_feature 1..36: note = Probe
  source 1..36: mol_type = other DNA

SEQ ID NO: 25614 - DNA, 33 bp, synthetic construct; identical to SEQ ID NO: 7252
  misc_feature 1..33: note = Probe
  source 1..33: mol_type = other DNA

SEQ ID NO: 25615 - DNA, 32 bp, synthetic construct; identical to SEQ ID NO: 1548
  misc_feature 1..32: note = Probe
  source 1..32: mol_type = other DNA

SEQ ID NO: 25616 - DNA, 33 bp, synthetic construct; identical to SEQ ID NO: 1549
  misc_feature 1..33: note = Probe
  source 1..33: mol_type = other DNA

SEQ ID NO: 25617 - DNA, 34 bp, synthetic construct; identical to SEQ ID NO: 1550
  misc_feature 1..34: note = Probe
  source 1..34: mol_type = other DNA

SEQ ID NO: 25618 - DNA, 36 bp, synthetic construct; identical to SEQ ID NO: 1552
  misc_feature 1..36: note = Probe
  source 1..36: mol_type = other DNA

SEQ ID NO: 25619 - DNA, 23 bp, synthetic construct
  misc_feature 1..23: note = Probe
  source 1..23: mol_type = other DNA
gtttccgtagtgtagtggtcatc

SEQ ID NO: 25620 - DNA, 32 bp, synthetic construct; identical to SEQ ID NO: 1560
  misc_feature 1..32: note = Probe
  source 1..32: mol_type = other DNA

SEQ ID NO: 25621 - DNA, 33 bp, synthetic construct; identical to SEQ ID NO: 1561
  misc_feature 1..33: note = Probe
  source 1..33: mol_type = other DNA

SEQ ID NO: 25622 - DNA, 50 bp, synthetic construct; identical to SEQ ID NO: 1564
  misc_feature 1..50: note = Probe
  source 1..50: mol_type = other DNA

SEQ ID NO: 25623 - DNA, 33 bp, synthetic construct; identical to SEQ ID NO: 23139
  misc_feature 1..33: note = Probe
  source 1..33: mol_type = other DNA

SEQ ID NO: 25624 - DNA, 32 bp, synthetic construct
  misc_feature 1..32: note = Probe
  source 1..32: mol_type = other DNA
gtttttcatatcattggtcgtggttgtagtcc

SEQ ID NO: 25625 - DNA, 36 bp, synthetic construct
  misc_feature 1..36: note = Probe
  source 1..36: mol_type = other DNA
gtttttcatatcattggtcgtggttgtagtccgtgc

SEQ ID NO: 25626 - DNA, 24 bp, synthetic construct
  misc_feature 1..24: note = Probe
  source 1..24: mol_type = other DNA
taaacaaaacgaatgatttcgact

SEQ ID NO: 25627 - DNA, 25 bp, synthetic construct
  misc_feature 1..25: note = Probe
  source 1..25: mol_type = other DNA
taaacaaaacgaatgatttcgactc

SEQ ID NO: 25628 - DNA, 36 bp, synthetic construct; identical to SEQ ID NO: 23185
  misc_feature 1..36: note = Probe
  source 1..36: mol_type = other DNA

SEQ ID NO: 25629 - DNA, 19 bp, synthetic construct
  misc_feature 1..19: note = Probe
  source 1..19: mol_type = other DNA
taaagacaggggttaggcc

SEQ ID NO: 25630 - DNA, 20 bp, synthetic construct
  misc_feature 1..20: note = Probe
  source 1..20: mol_type = other DNA
taaagacaggggttaggcct

SEQ ID NO: 25631 - DNA, 26 bp, synthetic construct
  misc_feature 1..26: note = Probe
  source 1..26: mol_type = other DNA
taaaggataacagctatccattggtc

SEQ ID NO: 25632 - DNA, 22 bp, synthetic construct
  misc_feature 1..22: note = Probe
  source 1..22: mol_type = other DNA
taaataataggagcttaaaccc

SEQ ID NO: 25633 - DNA, 19 bp, synthetic construct
  misc_feature 1..19: note = Probe
  source 1..19: mol_type = other DNA
taaatacagaccaagagcc

SEQ ID NO: 25634 - DNA, 20 bp, synthetic construct
  misc_feature 1..20: note = Probe
  source 1..20: mol_type = other DNA
taaatacagaccaagagcct

SEQ ID NO: 25635 - DNA, 32 bp, synthetic construct
  misc_feature 1..32: note = Probe
  source 1..32: mol_type = other DNA
taaattagaatcttagctttgggtgctaatgg

SEQ ID NO: 25636 - DNA, 19 bp, synthetic construct
  misc_feature 1..19: note = Probe
  source 1..19: mol_type = other DNA
taacagctatccattggtc

SEQ ID NO: 25637 - DNA, 20 bp, synthetic construct
  misc_feature 1..20: note = Probe
  source 1..20: mol_type = other DNA
taacagctatccattggtct

SEQ ID NO: 25638 - DNA, 36 bp, synthetic construct
  misc_feature 1..36: note = Probe
  source 1..36: mol_type = other DNA
taagatggcagagcccggtaatcgcataaaacttaa

SEQ ID NO: 25639 - DNA, 18 bp, synthetic construct
  misc_feature 1..18: note = Probe
  source 1..18: mol_type = other DNA
taataggagcttaaaccc

SEQ ID NO: 25640 - DNA, 36 bp, synthetic construct
  misc_feature 1..36: note = Probe
  source 1..36: mol_type = other DNA
taatctgaaggtcgtgagttcgagcctcacacgggg

SEQ ID NO: 25641 - DNA, 36 bp, synthetic construct
  misc_feature 1..36: note = Probe
  source 1..36: mol_type = other DNA
taatggttagcactctggactctgaatccagcgatc

SEQ ID NO: 25642 - DNA, 36 bp, synthetic construct; identical to SEQ ID NO: 1577
  misc_feature 1..36: note = Probe
  source 1..36: mol_type = other DNA

SEQ ID NO: 25643 - DNA, 31 bp, synthetic construct
  misc_feature 1..31: note = Probe
  source 1..31: mol_type = other DNA
taccgttaacttccaattaactagttttgac

SEQ ID NO: 25644 - DNA, 23 bp, synthetic construct
  misc_feature 1..23: note = Probe
  source 1..23: mol_type = other DNA
tacctcctcaaagcaatacactg

SEQ ID NO: 25645 - DNA, 36 bp, synthetic construct
  misc_feature 1..36: note = Probe
  source 1..36: mol_type = other DNA
tagaatcttagctttgggtgctaatggtggagttaa

SEQ ID NO: 25646 - DNA, 20 bp, synthetic construct
  misc_feature 1..20: note = Probe
  source 1..20: mol_type = other DNA
tagaattctcgcctgccacg

SEQ ID NO: 25647 - DNA, 21 bp, synthetic construct
  misc_feature 1..21: note = Probe
  source 1..21: mol_type = other DNA
tagaattctcgcctgccacgc

SEQ ID NO: 25648 - DNA, 20 bp, synthetic construct
  misc_feature 1..20: note = Probe
  source 1..20: mol_type = other DNA
tagagtaaataataggagct

SEQ ID NO: 25649 - DNA, 33 bp, synthetic construct; identical to SEQ ID NO: 23436
  misc_feature 1..33: note = Probe
  source 1..33: mol_type = other DNA

SEQ ID NO: 25650 - DNA, 36 bp, synthetic construct; identical to SEQ ID NO: 7555
  misc_feature 1..36: note = Probe
  source 1..36: mol_type = other DNA

SEQ ID NO: 25651 - DNA, 33 bp, synthetic construct; identical to SEQ ID NO: 23444
  misc_feature 1..33: note = Probe
  source 1..33: mol_type = other DNA

SEQ ID NO: 25652 - DNA, 36 bp, synthetic construct; identical to SEQ ID NO: 1584
  misc_feature 1..36: note = Probe
  source 1..36: mol_type = other DNA

SEQ ID NO: 25653 - DNA, 26 bp, synthetic construct
  misc_feature 1..26: note = Probe
  source 1..26: mol_type = other DNA
tagctcagtcggtagagcatcagact

SEQ ID NO: 25654 - DNA, 28 bp, synthetic construct
  misc_feature 1..28: note = Probe
  source 1..28: mol_type = other DNA
tagctcagtcggtagagcatcagacttt

SEQ ID NO: 25655 - DNA, 29 bp, synthetic construct
  misc_feature 1..29: note = Probe
  source 1..29: mol_type = other DNA
tagctcagtcggtagagcatcagactttt

SEQ ID NO: 25656 - DNA, 25 bp, synthetic construct
  misc_feature 1..25: note = Probe
  source 1..25: mol_type = other DNA
tagctcagtcggtagagcatgggac

SEQ ID NO: 25657 - DNA, 26 bp, synthetic construct
  misc_feature 1..26: note = Probe
  source 1..26: mol_type = other DNA
tagctcagtcggtagagcatgggact

SEQ ID NO: 25658 - DNA, 27 bp, synthetic construct
  misc_feature 1..27: note = Probe
  source 1..27: mol_type = other DNA
tagctcagtcggtagagcatgggactc

SEQ ID NO: 25659 - DNA, 36 bp, synthetic construct
  misc_feature 1..36: note = Probe
  source 1..36: mol_type = other DNA
tagctgttaactaagtgtttgtgggtttaagtccca

SEQ ID NO: 25660 - DNA, 36 bp, synthetic construct
  misc_feature 1..36: note = Probe
  source 1..36: mol_type = other DNA
tagctttgggtgctaatggtggagttaaagactttt

SEQ ID NO: 25661 - DNA, 16 bp, synthetic construct
  misc_feature 1..16: note = Probe
  source 1..16: mol_type = other DNA
taggagcttaaacccc

SEQ ID NO: 25662 - DNA, 19 bp, synthetic construct
  misc_feature 1..19: note = Probe
  source 1..19: mol_type = other DNA
taggatggggtgtgatagg

SEQ ID NO: 25663 - DNA, 20 bp, synthetic construct
  misc_feature 1..20: note = Probe
  source 1..20: mol_type = other DNA
taggatggggtgtgataggt

SEQ ID NO: 25664 - DNA, 21 bp, synthetic construct
  misc_feature 1..21: note = Probe
  source 1..21: mol_type = other DNA
taggatggggtgtgataggtg

SEQ ID NO: 25665 - DNA, 22 bp, synthetic construct
  misc_feature 1..22: note = Probe
  source 1..22: mol_type = other DNA
taggatggggtgtgataggtgg

SEQ ID NO: 25666 - DNA, 23 bp, synthetic construct
  misc_feature 1..23: note = Probe
  source 1..23: mol_type = other DNA
taggatggggtgtgataggtggc

SEQ ID NO: 25667 - DNA, 24 bp, synthetic construct
  misc_feature 1..24: note = Probe
  source 1..24: mol_type = other DNA
taggatggggtgtgataggtggca

SEQ ID NO: 25668 - DNA, 25 bp, synthetic construct
  misc_feature 1..25: note = Probe
  source 1..25: mol_type = other DNA
taggatggggtgtgataggtggcac

SEQ ID NO: 25669 - DNA, 26 bp, synthetic construct
  misc_feature 1..26: note = Probe
  source 1..26: mol_type = other DNA
taggatggggtgtgataggtggcacg

SEQ ID NO: 25670 - DNA, 27 bp, synthetic construct
  misc_feature 1..27: note = Probe
  source 1..27: mol_type = other DNA
taggatggggtgtgataggtggcacgg

SEQ ID NO: 25671 - DNA, 28 bp, synthetic construct
  misc_feature 1..28: note = Probe
  source 1..28: mol_type = other DNA
taggatggggtgtgataggtggcacgga

SEQ ID NO: 25672 - DNA, 29 bp, synthetic construct
  misc_feature 1..29: note = Probe
  source 1..29: mol_type = other DNA
taggatggggtgtgataggtggcacggag

SEQ ID NO: 25673 - DNA, 30 bp, synthetic construct; identical to SEQ ID NO: 1592
  misc_feature 1..30: note = Probe
  source 1..30: mol_type = other DNA

SEQ ID NO: 25674 - DNA, 31 bp, synthetic construct; identical to SEQ ID NO: 7585
  misc_feature 1..31: note = Probe
  source 1..31: mol_type = other DNA

SEQ ID NO: 25675 - DNA, 32 bp, synthetic construct; identical to SEQ ID NO: 1593
  misc_feature 1..32: note = Probe
  source 1..32: mol_type = other DNA

SEQ ID NO: 25676 - DNA, 33 bp, synthetic construct; identical to SEQ ID NO: 1594
  misc_feature 1..33: note = Probe
  source 1..33: mol_type = other DNA

SEQ ID NO: 25677 - DNA, 34 bp, synthetic construct; identical to SEQ ID NO: 7586
  misc_feature 1..34: note = Probe
  source 1..34: mol_type = other DNA

SEQ ID NO: 25678 - DNA, 35 bp, synthetic construct; identical to SEQ ID NO: 7587
  misc_feature 1..35: note = Probe
  source 1..35: mol_type = other DNA

SEQ ID NO: 25679 - DNA, 36 bp, synthetic construct; identical to SEQ ID NO: 1595
  misc_feature 1..36: note = Probe
  source 1..36: mol_type = other DNA

SEQ ID NO: 25680 - DNA, 41 bp, synthetic construct
  misc_feature 1..41: note = Probe
  source 1..41: mol_type = other DNA
taggatggggtgtgataggtggcacggagaattttggattc

SEQ ID NO: 25681 - DNA, 30 bp, synthetic construct; identical to SEQ ID NO: 23497
  misc_feature 1..30: note = Probe
  source 1..30: mol_type = other DNA

SEQ ID NO: 25682 - DNA, 30 bp, synthetic construct; identical to SEQ ID NO: 23547
  misc_feature 1..30: note = Probe
  source 1..30: mol_type = other DNA

SEQ ID NO: 25683 - DNA, 36 bp, synthetic construct; identical to SEQ ID NO: 23550
  misc_feature 1..36: note = Probe
  source 1..36: mol_type = other DNA

SEQ ID NO: 25684 - DNA, 37 bp, synthetic construct; identical to SEQ ID NO: 14220
  misc_feature 1..37: note = Probe
  source 1..37: mol_type = other DNA

SEQ ID NO: 25685 - DNA, 19 bp, synthetic construct
  misc_feature 1..19: note = Probe
  source 1..19: mol_type = other DNA
tagtggttagtactctgcg

SEQ ID NO: 25686 - DNA, 21 bp, synthetic construct
  misc_feature 1..21: note = Probe
  source 1..21: mol_type = other DNA
tagtggttagtactctgcgtt

SEQ ID NO: 25687 - DNA, 23 bp, synthetic construct
  misc_feature 1..23: note = Probe
  source 1..23: mol_type = other DNA
tatcattggtcgtggttgtagtc

SEQ ID NO: 25688 - DNA, 24 bp, synthetic construct
  misc_feature 1..24: note = Probe
  source 1..24: mol_type = other DNA
tatcattggtcgtggttgtagtcc

SEQ ID NO: 25689 - DNA, 25 bp, synthetic construct
  misc_feature 1..25: note = Probe
  source 1..25: mol_type = other DNA
tatcattggtcgtggttgtagtccg

SEQ ID NO: 25690 - DNA, 27 bp, synthetic construct
  misc_feature 1..27: note = Probe
  source 1..27: mol_type = other DNA
tatcattggtcgtggttgtagtccgtg

SEQ ID NO: 25691 - DNA, 29 bp, synthetic construct
  misc_feature 1..29: note = Probe
  source 1..29: mol_type = other DNA
tatcattggtcgtggttgtagtccgtgcg

SEQ ID NO: 25692 - DNA, 30 bp, synthetic construct
  misc_feature 1..30: note = Probe
  source 1..30: mol_type = other DNA
tatcattggtcgtggttgtagtccgtgcga

SEQ ID NO: 25693 - DNA, 31 bp, synthetic construct; identical to SEQ ID NO: 23604
  misc_feature 1..31: note = Probe
  source 1..31: mol_type = other DNA

SEQ ID NO: 25694 - DNA, 32 bp, synthetic construct; identical to SEQ ID NO: 23605
  misc_feature 1..32: note = Probe
  source 1..32: mol_type = other DNA

SEQ ID NO: 25695 - DNA, 33 bp, synthetic construct; identical to SEQ ID NO: 23606
  misc_feature 1..33: note = Probe
  source 1..33: mol_type = other DNA

SEQ ID NO: 25696 - DNA, 20 bp, synthetic construct
  misc_feature 1..20: note = Probe
  source 1..20: mol_type = other DNA
tatccattggtcttaggccc

SEQ ID NO: 25697 - DNA, 21 bp, synthetic construct
  misc_feature 1..21: note = Probe
  source 1..21: mol_type = other DNA
tatccattggtcttaggcccc

SEQ ID NO: 25698 - DNA, 36 bp, synthetic construct
  misc_feature 1..36: note = Probe
  source 1..36: mol_type = other DNA
tatcgggcccataccccgaaaatgttggttataccc

SEQ ID NO: 25699 - DNA, 35 bp, synthetic construct; identical to SEQ ID NO: 23614
  misc_feature 1..35: note = Probe
  source 1..35: mol_type = other DNA

SEQ ID NO: 25700 - DNA, 35 bp, synthetic construct
  misc_feature 1..35: note = Probe
  source 1..35: mol_type = other DNA
tatgattctcgcttcgggtgtgagaggtcccgggt

SEQ ID NO: 25701 - DNA, 35 bp, synthetic construct; identical to SEQ ID NO: 23617
  misc_feature 1..35: note = Probe
  source 1..35: mol_type = other DNA

SEQ ID NO: 25702 - DNA, 36 bp, synthetic construct; identical to SEQ ID NO: 23618
  misc_feature 1..36: note = Probe
  source 1..36: mol_type = other DNA

SEQ ID NO: 25703 - DNA, 36 bp, synthetic construct; identical to SEQ ID NO: 23620
  misc_feature 1..36: note = Probe
  source 1..36: mol_type = other DNA

SEQ ID NO: 25704 - DNA, 20 bp, synthetic construct
  misc_feature 1..20: note = Probe
  source 1..20: mol_type = other DNA
tcaaatcccggacgagcccc

SEQ ID NO: 25705 - DNA, 21 bp, synthetic construct
  misc_feature 1..21: note = Probe
  source 1..21: mol_type = other DNA
tcaaatcccggacgagccccc

SEQ ID NO: 25706 - DNA, 22 bp, synthetic construct
  misc_feature 1..22: note = Probe
  source 1..22: mol_type = other DNA
tcaatccccggcacctccacca

SEQ ID NO: 25707 - DNA, 18 bp, synthetic construct
  misc_feature 1..18: note = Probe
  source 1..18: mol_type = other DNA
tcacaagaactgctaact

SEQ ID NO: 25708 - DNA, 36 bp, synthetic construct
  misc_feature 1..36: note = Probe
  source 1..36: mol_type = other DNA
tcacaagaactgctaactcatgcccccatgtctaac

SEQ ID NO: 25709 - DNA, 36 bp, synthetic construct
  misc_feature 1..36: note = Probe
  source 1..36: mol_type = other DNA
tcaccgccgcggcccgggttcgattcccggtcaggg

SEQ ID NO: 25710 - DNA, 36 bp, synthetic construct; identical to SEQ ID NO: 1616
  misc_feature 1..36: note = Probe
  source 1..36: mol_type = other DNA

SEQ ID NO: 25711 - DNA, 36 bp, synthetic construct; identical to SEQ ID NO: 1622
  misc_feature 1..36: note = Probe
  source 1..36: mol_type = other DNA

SEQ ID NO: 25712 - DNA, 36 bp, synthetic construct
  misc_feature 1..36: note = Probe
  source 1..36: mol_type = other DNA
tcagattgtgaatctgacaacagaggcttacgaccc

SEQ ID NO: 25713 - DNA, 17 bp, synthetic construct
  misc_feature 1..17: note = Probe
  source 1..17: mol_type = other DNA
tcagtcggtagagcatc

SEQ ID NO: 25714 - DNA, 21 bp, synthetic construct
  misc_feature 1..21: note = Probe
  source 1..21: mol_type = other DNA
tcagtcggtagagcatcagac

SEQ ID NO: 25715 - DNA, 25 bp, synthetic construct
  misc_feature 1..25: note = Probe
  source 1..25: mol_type = other DNA
tcagtcggtagagcatcagactttt

SEQ ID NO: 25716 - DNA, 22 bp, synthetic construct
  misc_feature 1..22: note = Probe
  source 1..22: mol_type = other DNA
tcagtcggtagagcatgggact

SEQ ID NO: 25717 - DNA, 36 bp, synthetic construct
  misc_feature 1..36: note = Probe
  source 1..36: mol_type = other DNA
tcatatcattggtcgtggttgtagtccgtgcgagaa

SEQ ID NO: 25718 - DNA, 21 bp, synthetic construct
  misc_feature 1..21: note = Probe
  source 1..21: mol_type = other DNA
tcattggtcgtggttgtagtc

SEQ ID NO: 25719 - DNA, 22 bp, synthetic construct
  misc_feature 1..22: note = Probe
  source 1..22: mol_type = other DNA
tcattggtcgtggttgtagtcc

SEQ ID NO: 25720 - DNA, 29 bp, synthetic construct
  misc_feature 1..29: note = Probe
  source 1..29: mol_type = other DNA
tcattggtcgtggttgtagtccgtgcgag

SEQ ID NO: 25721 - DNA, 30 bp, synthetic construct; identical to SEQ ID NO: 23752
  misc_feature 1..30: note = Probe
  source 1..30: mol_type = other DNA

SEQ ID NO: 25722 - DNA, 31 bp, synthetic construct; identical to SEQ ID NO: 23753
  misc_feature 1..31: note = Probe
  source 1..31: mol_type = other DNA

SEQ ID NO: 25723 - DNA, 32 bp, synthetic construct
  misc_feature 1..32: note = Probe
  source 1..32: mol_type = other DNA
tcattggtcgtggttgtagtccgtgcgagaat

SEQ ID NO: 25724 - DNA, 33 bp, synthetic construct; identical to SEQ ID NO: 7770
  misc_feature 1..33: note = Probe
  source 1..33: mol_type = other DNA

SEQ ID NO: 25725 - DNA, 18 bp, synthetic construct
  misc_feature 1..18: note = Probe
  source 1..18: mol_type = other DNA
tccattggtcttaggccc

SEQ ID NO: 25726 - DNA, 19 bp, synthetic construct
  misc_feature 1..19: note = Probe
  source 1..19: mol_type = other DNA
tccattggtcttaggcccc

SEQ ID NO: 25727 - DNA, 25 bp, synthetic construct
  misc_feature 1..25: note = Probe
  source 1..25: mol_type = other DNA
tcccacatggtctagcggttaggat

SEQ ID NO: 25728 - DNA, 26 bp, synthetic construct
  misc_feature 1..26: note = Probe
  source 1..26: mol_type = other DNA
tcccacatggtctagcggttaggatt

SEQ ID NO: 25729 - DNA, 28 bp, synthetic construct
  misc_feature 1..28: note = Probe
  source 1..28: mol_type = other DNA
tcccacatggtctagcggttaggattcc

SEQ ID NO: 25730 - DNA, 29 bp, synthetic construct
  misc_feature 1..29: note = Probe
  source 1..29: mol_type = other DNA
tcccacatggtctagcggttaggattcct

SEQ ID NO: 25731 - DNA, 30 bp, synthetic construct; identical to SEQ ID NO: 1643
  misc_feature 1..30: note = Probe
  source 1..30: mol_type = other DNA

SEQ ID NO: 25732 - DNA, 31 bp, synthetic construct; identical to SEQ ID NO: 1644
  misc_feature 1..31: note = Probe
  source 1..31: mol_type = other DNA

SEQ ID NO: 25733 - DNA, 32 bp, synthetic construct; identical to SEQ ID NO: 1645
  misc_feature 1..32: note = Probe
  source 1..32: mol_type = other DNA

SEQ ID NO: 25734 - DNA, 33 bp, synthetic construct; identical to SEQ ID NO: 1646
  misc_feature 1..33: note = Probe
  source 1..33: mol_type = other DNA

SEQ ID NO: 25735 - DNA, 34 bp, synthetic construct; identical to SEQ ID NO: 1647
  misc_feature 1..34: note = Probe
  source 1..34: mol_type = other DNA

SEQ ID NO: 25736 - DNA, 35 bp, synthetic construct; identical to SEQ ID NO: 1648
  misc_feature 1..35: note = Probe
  source 1..35: mol_type = other DNA

SEQ ID NO: 25737 - DNA, 36 bp, synthetic construct; identical to SEQ ID NO: 1649
  misc_feature 1..36: note = Probe
  source 1..36: mol_type = other DNA

SEQ ID NO: 25738 - DNA, 50 bp, synthetic construct; identical to SEQ ID NO: 7798
  misc_feature 1..50: note = Probe
  source 1..50: mol_type = other DNA

SEQ ID NO: 25739 - DNA, 28 bp, synthetic construct
  misc_feature 1..28: note = Probe
  source 1..28: mol_type = other DNA
tcccatatggtctagcggttaggattcc

SEQ ID NO: 25740 - DNA, 29 bp, synthetic construct
  misc_feature 1..29: note = Probe
  source 1..29: mol_type = other DNA
tcccatatggtctagcggttaggattcct

SEQ ID NO: 25741 - DNA, 30 bp, synthetic construct; identical to SEQ ID NO: 1659
  misc_feature 1..30: note = Probe
  source 1..30: mol_type = other DNA

SEQ ID NO: 25742 - DNA, 32 bp, synthetic construct; identical to SEQ ID NO: 1661
  misc_feature 1..32: note = Probe
  source 1..32: mol_type = other DNA

SEQ ID NO: 25743 - DNA, 33 bp, synthetic construct; identical to SEQ ID NO: 1662
  misc_feature 1..33: note = Probe
  source 1..33: mol_type = other DNA

SEQ ID NO: 25744 - DNA, 36 bp, synthetic construct; identical to SEQ ID NO: 1665
  misc_feature 1..36: note = Probe
  source 1..36: mol_type = other DNA

SEQ ID NO: 25745 - DNA, 16 bp, synthetic construct
  misc_feature 1..16: note = Probe
  source 1..16: mol_type = other DNA
tccccggcacctccac

SEQ ID NO: 25746 - DNA, 17 bp, synthetic construct
  misc_feature 1..17: note = Probe
  source 1..17: mol_type = other DNA
tccccggcacctccacc

SEQ ID NO: 25747 - DNA, 18 bp, synthetic construct
  misc_feature 1..18: note = Probe
  source 1..18: mol_type = other DNA
tccccggcacctccacca

SEQ ID NO: 25748 - DNA, 31 bp, synthetic construct; identical to SEQ ID NO: 1671
  misc_feature 1..31: note = Probe
  source 1..31: mol_type = other DNA

SEQ ID NO: 25749 - DNA, 32 bp, synthetic construct; identical to SEQ ID NO: 1672
  misc_feature 1..32: note = Probe
  source 1..32: mol_type = other DNA

SEQ ID NO: 25750 - DNA, 33 bp, synthetic construct; identical to SEQ ID NO: 1673
  misc_feature 1..33: note = Probe
  source 1..33: mol_type = other DNA

SEQ ID NO: 25751 - DNA, 34 bp, synthetic construct; identical to SEQ ID NO: 1674
  misc_feature 1..34: note = Probe
  source 1..34: mol_type = other DNA

SEQ ID NO: 25752 - DNA, 35 bp, synthetic construct; identical to SEQ ID NO: 1675
  misc_feature 1..35: note = Probe
  source 1..35: mol_type = other DNA

SEQ ID NO: 25753 - DNA, 36 bp, synthetic construct; identical to SEQ ID NO: 1676
  misc_feature 1..36: note = Probe
  source 1..36: mol_type = other DNA

SEQ ID NO: 25754 - DNA, 39 bp, synthetic construct; identical to SEQ ID NO: 7857
  misc_feature 1..39: note = Probe
  source 1..39: mol_type = other DNA

SEQ ID NO: 25755 - DNA, 31 bp, synthetic construct; identical to SEQ ID NO: 1679
  misc_feature 1..31: note = Probe
  source 1..31: mol_type = other DNA

SEQ ID NO: 25756 - DNA, 32 bp, synthetic construct; identical to SEQ ID NO: 1680
  misc_feature 1..32: note = Probe
  source 1..32: mol_type = other DNA

SEQ ID NO: 25757 - DNA, 33 bp, synthetic construct; identical to SEQ ID NO: 1681
  misc_feature 1..33: note = Probe
  source 1..33: mol_type = other DNA

SEQ ID NO: 25758 - DNA, 34 bp, synthetic construct; identical to SEQ ID NO: 1682
  misc_feature 1..34: note = Probe
  source 1..34: mol_type = other DNA

SEQ ID NO: 25759 - DNA, 35 bp, synthetic construct; identical to SEQ ID NO: 1683
  misc_feature 1..35: note = Probe
  source 1..35: mol_type = other DNA

SEQ ID NO: 25760 - DNA, 36 bp, synthetic construct; identical to SEQ ID NO: 1684
  misc_feature 1..36: note = Probe
  source 1..36: mol_type = other DNA

SEQ ID NO: 25761 - DNA, 37 bp, synthetic construct; identical to SEQ ID NO: 1685
  misc_feature 1..37: note = Probe
  source 1..37: mol_type = other DNA

SEQ ID NO: 25762 - DNA, 39 bp, synthetic construct; identical to SEQ ID NO: 1687
  misc_feature 1..39: note = Probe
  source 1..39: mol_type = other DNA

SEQ ID NO: 25763 - DNA, 50 bp, synthetic construct; identical to SEQ ID NO: 1691
  misc_feature 1..50: note = Probe
  source 1..50: mol_type = other DNA

SEQ ID NO: 25764 - DNA, 29 bp, synthetic construct
  misc_feature 1..29: note = Probe
  source 1..29: mol_type = other DNA
tccgtagtgtagtggtcatcacgttcgcc

SEQ ID NO: 25765 - DNA, 30 bp, synthetic construct; identical to SEQ ID NO: 14328
  misc_feature 1..30: note = Probe
  source 1..30: mol_type = other DNA

SEQ ID NO: 25766 - DNA, 32 bp, synthetic construct; identical to SEQ ID NO: 1703
  misc_feature 1..32: note = Probe
  source 1..32: mol_type = other DNA

SEQ ID NO: 25767 - DNA, 33 bp, synthetic construct; identical to SEQ ID NO: 1704
  misc_feature 1..33: note = Probe
  source 1..33: mol_type = other DNA

SEQ ID NO: 25768 - DNA, 36 bp, synthetic construct; identical to SEQ ID NO: 1707
  misc_feature 1..36: note = Probe
  source 1..36: mol_type = other DNA

SEQ ID NO: 25769 - DNA, 26 bp, synthetic construct
  misc_feature 1..26: note = Probe
  source 1..26: mol_type = other DNA
tcgcctgccacgcgggaggcccgggt

SEQ ID NO: 25770 - DNA, 24 bp, synthetic construct
  misc_feature 1..24: note = Probe
  source 1..24: mol_type = other DNA
tcggcgctctcaccgccgcggccc

SEQ ID NO: 25771 - DNA, 25 bp, synthetic construct
  misc_feature 1..25: note = Probe
  source 1..25: mol_type = other DNA
tcggcgctctcaccgccgcggcccg

SEQ ID NO: 25772 - DNA, 25 bp, synthetic construct
  misc_feature 1..25: note = Probe
  source 1..25: mol_type = other DNA
tcggctgttaaccgaaaggttggtg

SEQ ID NO: 25773 - DNA, 26 bp, synthetic construct
  misc_feature 1..26: note = Probe
  source 1..26: mol_type = other DNA
tcggctgttaaccgaaaggttggtgg

SEQ ID NO: 25774 - DNA, 27 bp, synthetic construct
  misc_feature 1..27: note = Probe
  source 1..27: mol_type = other DNA
tcggctgttaaccgaaaggttggtggt

SEQ ID NO: 25775 - DNA, 18 bp, synthetic construct
  misc_feature 1..18: note = Probe
  source 1..18: mol_type = other DNA
tcgggtgcgagaggtccc

SEQ ID NO: 25776 - DNA, 21 bp, synthetic construct
  misc_feature 1..21: note = Probe
  source 1..21: mol_type = other DNA
tcgggtgcgagaggtcccggg

SEQ ID NO: 25777 - DNA, 22 bp, synthetic construct
  misc_feature 1..22: note = Probe
  source 1..22: mol_type = other DNA
tcgggtgcgagaggtcccgggt

SEQ ID NO: 25778 - DNA, 23 bp, synthetic construct
  misc_feature 1..23: note = Probe
  source 1..23: mol_type = other DNA
tcgggtgcgagaggtcccgggtt

SEQ ID NO: 25779 - DNA, 16 bp, synthetic construct
  misc_feature 1..16: note = Probe
  source 1..16: mol_type = other DNA
tcggtagagcatcaga

SEQ ID NO: 25780 - DNA, 17 bp, synthetic construct
  misc_feature 1..17: note = Probe
  source 1..17: mol_type = other DNA
tcggtagagcatcagac

SEQ ID NO: 25781 - DNA, 18 bp, synthetic construct
  misc_feature 1..18: note = Probe
  source 1..18: mol_type = other DNA
tcggtagagcatcagact

SEQ ID NO: 25782 - DNA, 19 bp, synthetic construct
  misc_feature 1..19: note = Probe
  source 1..19: mol_type = other DNA
tcggtagagcatgagaccc

SEQ ID NO: 25783 - DNA, 17 bp, synthetic construct
  misc_feature 1..17: note = Probe
  source 1..17: mol_type = other DNA
tcggtagagcatgggac

SEQ ID NO: 25784 - DNA, 18 bp, synthetic construct
  misc_feature 1..18: note = Probe
  source 1..18: mol_type = other DNA
tcggtagagcatgggact

SEQ ID NO: 25785 - DNA, 19 bp, synthetic construct
  misc_feature 1..19: note = Probe
  source 1..19: mol_type = other DNA
tcggtagagcatgggactc

SEQ ID NO: 25786 - DNA, 26 bp, synthetic construct
  misc_feature 1..26: note = Probe
  source 1..26: mol_type = other DNA
tcggtagagcatgggactcttaatcc

SEQ ID NO: 25787 - DNA, 27 bp, synthetic construct
  misc_feature 1..27: note = Probe
  source 1..27: mol_type = other DNA
tcggtagagcatgggactcttaatccc

SEQ ID NO: 25788 - DNA, 22 bp, synthetic construct
  misc_feature 1..22: note = Probe
  source 1..22: mol_type = other DNA
tcgtaaaccgaagatcgcgggt

SEQ ID NO: 25789 - DNA, 24 bp, synthetic construct
  misc_feature 1..24: note = Probe
  source 1..24: mol_type = other DNA
tcgtatagtggttagtactctgcg

SEQ ID NO: 25790 - DNA, 23 bp, synthetic construct
  misc_feature 1..23: note = Probe
  source 1..23: mol_type = other DNA
tcgtggttgtagtccgtgcgaga

SEQ ID NO: 25791 - DNA, 24 bp, synthetic construct
  misc_feature 1..24: note = Probe
  source 1..24: mol_type = other DNA
tcgtggttgtagtccgtgcgagaa

SEQ ID NO: 25792 - DNA, 36 bp, synthetic construct
  misc_feature 1..36: note = Probe
  source 1..36: mol_type = other DNA
tctagtggttaggattcggcgctctcaccgccgcgg

SEQ ID NO: 25793 - DNA, 36 bp, synthetic construct
  misc_feature 1..36: note = Probe
  source 1..36: mol_type = other DNA
tctcagggtcgtgggttcgagccccacgttgggcgc

SEQ ID NO: 25794 - DNA, 36 bp, synthetic construct
  misc_feature 1..36: note = Probe
  source 1..36: mol_type = other DNA
tctgaaggtcgtgagttcgatcctcacacggggcac

SEQ ID NO: 25795 - DNA, 20 bp, synthetic construct
  misc_feature 1..20: note = Probe
  source 1..20: mol_type = other DNA
tctgaatccagcgatccgag

SEQ ID NO: 25796 - DNA, 21 bp, synthetic construct
  misc_feature 1..21: note = Probe
  source 1..21: mol_type = other DNA
tctgaatccagcgatccgagt

SEQ ID NO: 25797 - DNA, 22 bp, synthetic construct
  misc_feature 1..22: note = Probe
  source 1..22: mol_type = other DNA
tctgaatccagcgatccgagtt

SEQ ID NO: 25798 - DNA, 28 bp, synthetic construct
  misc_feature 1..28: note = Probe
  source 1..28: mol_type = other DNA
tctggactctgaatccagcgatccgagt

SEQ ID NO: 25799 - DNA, 29 bp, synthetic construct
  misc_feature 1..29: note = Probe
  source 1..29: mol_type = other DNA
tctggactctgaatccagcgatccgagtt

SEQ ID NO: 25800 - DNA, 36 bp, synthetic construct
  misc_feature 1..36: note = Probe
  source 1..36: mol_type = other DNA
tcttagctttgggtgctaatggtggagttaaagact

SEQ ID NO: 25801 - DNA, 21 bp, synthetic construct
  misc_feature 1..21: note = Probe
  source 1..21: mol_type = other DNA
tgaaaacctttttccaaggac

SEQ ID NO: 25802 - DNA, 22 bp, synthetic construct
  misc_feature 1..22: note = Probe
  source 1..22: mol_type = other DNA
tgaaaacctttttccaaggaca

SEQ ID NO: 25803 - DNA, 18 bp, synthetic construct
  misc_feature 1..18: note = Probe
  source 1..18: mol_type = other DNA
tgaatccagcgatccgag

SEQ ID NO: 25804 - DNA, 19 bp, synthetic construct
  misc_feature 1..19: note = Probe
  source 1..19: mol_type = other DNA
tgaatccagcgatccgagt

SEQ ID NO: 25805 - DNA, 20 bp, synthetic construct
  misc_feature 1..20: note = Probe
  source 1..20: mol_type = other DNA
tgaatccagcgatccgagtt

SEQ ID NO: 25806 - DNA, 28 bp, synthetic construct
  misc_feature 1..28: note = Probe
  source 1..28: mol_type = other DNA
tgaatctgacaacagaggcttacgaccc

SEQ ID NO: 25807 - DNA, 29 bp, synthetic construct
  misc_feature 1..29: note = Probe
  source 1..29: mol_type = other DNA
tgaatctgacaacagaggcttacgacccc

SEQ ID NO: 25808 - DNA, 30 bp, synthetic construct; identical to SEQ ID NO: 1734
  misc_feature 1..30: note = Probe
  source 1..30: mol_type = other DNA

SEQ ID NO: 25809 - DNA, 31 bp, synthetic construct; identical to SEQ ID NO: 1735
  misc_feature 1..31: note = Probe
  source 1..31: mol_type = other DNA

SEQ ID NO: 25810 - DNA, 32 bp, synthetic construct; identical to SEQ ID NO: 1736
  misc_feature 1..32: note = Probe
  source 1..32: mol_type = other DNA

SEQ ID NO: 25811 - DNA, 36 bp, synthetic construct; identical to SEQ ID NO: 1740
  misc_feature 1..36: note = Probe
  source 1..36: mol_type = other DNA

SEQ ID NO: 25812 - DNA, 26 bp, synthetic construct
  misc_feature 1..26: note = Probe
  source 1..26: mol_type = other DNA
tgactgcagatcaagaggtccccggt

SEQ ID NO: 25813 - DNA, 25 bp, synthetic construct
  misc_feature 1..25: note = Probe
  source 1..25: mol_type = other DNA
tggactctgaatccagcgatccgag

SEQ ID NO: 25814 - DNA, 26 bp, synthetic construct
  misc_feature 1..26: note = Probe
  source 1..26: mol_type = other DNA
tggactctgaatccagcgatccgagt

SEQ ID NO: 25815 - DNA, 27 bp, synthetic construct
  misc_feature 1..27: note = Probe
  source 1..27: mol_type = other DNA
tggactctgaatccagcgatccgagtt

SEQ ID NO: 25816 - DNA, 16 bp, synthetic construct
  misc_feature 1..16: note = Probe
  source 1..16: mol_type = other DNA
tggataaggcgtctga

SEQ ID NO: 25817 - DNA, 21 bp, synthetic construct
  misc_feature 1..21: note = Probe
  source 1..21: mol_type = other DNA
tgggtgcgagaggtcccgggt

SEQ ID NO: 25818 - DNA, 32 bp, synthetic construct; identical to SEQ ID NO: 1767
  misc_feature 1..32: note = Probe
  source 1..32: mol_type = other DNA

SEQ ID NO: 25819 - DNA, 23 bp, synthetic construct
  misc_feature 1..23: note = Probe
  source 1..23: mol_type = other DNA
tggtagaattctcgcctgccacg

SEQ ID NO: 25820 - DNA, 24 bp, synthetic construct
  misc_feature 1..24: note = Probe
  source 1..24: mol_type = other DNA
tggtagaattctcgcctgccacgc

SEQ ID NO: 25821 - DNA, 25 bp, synthetic construct
  misc_feature 1..25: note = Probe
  source 1..25: mol_type = other DNA
tggtagaattctcgcctgccacgcg

SEQ ID NO: 25822 - DNA, 26 bp, synthetic construct
  misc_feature 1..26: note = Probe
  source 1..26: mol_type = other DNA
tggtagaattctcgcctgccacgcgg

SEQ ID NO: 25823 - DNA, 28 bp, synthetic construct
  misc_feature 1..28: note = Probe
  source 1..28: mol_type = other DNA
tggtagaattctcgcctgccacgcggga

SEQ ID NO: 25824 - DNA, 33 bp, synthetic construct; identical to SEQ ID NO: 1768
  misc_feature 1..33: note = Probe
  source 1..33: mol_type = other DNA

SEQ ID NO: 25825 - DNA, 36 bp, synthetic construct
  misc_feature 1..36: note = Probe
  source 1..36: mol_type = other DNA
tggtagaattctcgcctgccacgcgggaggcccggg

SEQ ID NO: 25826 - DNA, 36 bp, synthetic construct; identical to SEQ ID NO: 1771
  misc_feature 1..36: note = Probe
  source 1..36: mol_type = other DNA

SEQ ID NO: 25827 - DNA, 26 bp, synthetic construct
  misc_feature 1..26: note = Probe
  source 1..26: mol_type = other DNA
tggtcgtggttgtagtccgtgcgaga

SEQ ID NO: 25828 - DNA, 27 bp, synthetic construct
  misc_feature 1..27: note = Probe
  source 1..27: mol_type = other DNA
tggtcgtggttgtagtccgtgcgagaa

SEQ ID NO: 25829 - DNA, 28 bp, synthetic construct
  misc_feature 1..28: note = Probe
  source 1..28: mol_type = other DNA
tggtcgtggttgtagtccgtgcgagaat

SEQ ID NO: 25830 - DNA, 29 bp, synthetic construct
  misc_feature 1..29: note = Probe
  source 1..29: mol_type = other DNA
tggtcgtggttgtagtccgtgcgagaata

SEQ ID NO: 25831 - DNA, 32 bp, synthetic construct
  misc_feature 1..32: note = Probe
  source 1..32: mol_type = other DNA
tggtgtaatggttagcactctggactctgaat

SEQ ID NO: 25832 - DNA, 33 bp, synthetic construct
  misc_feature 1..33: note = Probe
  source 1..33: mol_type = other DNA
tggtgtaatggttagcactctggactctgaatc

SEQ ID NO: 25833 - DNA, 36 bp, synthetic construct
  misc_feature 1..36: note = Probe
  source 1..36: mol_type = other DNA
tggtgtaatggttagcactctggactctgaatccag

SEQ ID NO: 25834 - DNA, 33 bp, synthetic construct
  misc_feature 1..33: note = Probe
  source 1..33: mol_type = other DNA
tggtgtaatggttagcactctggactttgaatc

SEQ ID NO: 25835 - DNA, 24 bp, synthetic construct
  misc_feature 1..24: note = Probe
  source 1..24: mol_type = other DNA
tggttagcactctggactctgaat

SEQ ID NO: 25836 - DNA, 25 bp, synthetic construct
  misc_feature 1..25: note = Probe
  source 1..25: mol_type = other DNA
tggttagcactctggactctgaatc

SEQ ID NO: 25837 - DNA, 36 bp, synthetic construct
  misc_feature 1..36: note = Probe
  source 1..36: mol_type = other DNA
tggttagcactctggactctgaatccagcgatccga

SEQ ID NO: 25838 - DNA, 16 bp, synthetic construct
  misc_feature 1..16: note = Probe
  source 1..16: mol_type = other DNA
tggttaggattcggcg

SEQ ID NO: 25839 - DNA, 17 bp, synthetic construct
  misc_feature 1..17: note = Probe
  source 1..17: mol_type = other DNA
tggttaggattcggcgc

SEQ ID NO: 25840 - DNA, 18 bp, synthetic construct
  misc_feature 1..18: note = Probe
  source 1..18: mol_type = other DNA
tggttaggattcggcgct

SEQ ID NO: 25841 - DNA, 19 bp, synthetic construct
  misc_feature 1..19: note = Probe
  source 1..19: mol_type = other DNA
tggttaggattcggcgctc

SEQ ID NO: 25842 - DNA, 24 bp, synthetic construct
  misc_feature 1..24: note = Probe
  source 1..24: mol_type = other DNA
tggttaggattcggcgctctcacc

SEQ ID NO: 25843 - DNA, 27 bp, synthetic construct
  misc_feature 1..27: note = Probe
  source 1..27: mol_type = other DNA
tggttaggattcggcgctctcaccgcc

SEQ ID NO: 25844 - DNA, 34 bp, synthetic construct; identical to SEQ ID NO: 14437
  misc_feature 1..34: note = Probe
  source 1..34: mol_type = other DNA

SEQ ID NO: 25845 - DNA, 36 bp, synthetic construct
  misc_feature 1..36: note = Probe
  source 1..36: mol_type = other DNA
tggttaggattcggcgctctcaccgccgcggcccgg

SEQ ID NO: 25846 - DNA, 17 bp, synthetic construct
  misc_feature 1..17: note = Probe
  source 1..17: mol_type = other DNA
tggttagtactctgcgt

SEQ ID NO: 25847 - DNA, 18 bp, synthetic construct
  misc_feature 1..18: note = Probe
  source 1..18: mol_type = other DNA
tggttagtactctgcgtt

SEQ ID NO: 25848 - DNA, 16 bp, synthetic construct
  misc_feature 1..16: note = Probe
  source 1..16: mol_type = other DNA
tggttatcacgtctgc

SEQ ID NO: 25849 - DNA, 20 bp, synthetic construct
  misc_feature 1..20: note = Probe
  source 1..20: mol_type = other DNA
tggttgtagtccgtgcgaga

SEQ ID NO: 25850 - DNA, 21 bp, synthetic construct
  misc_feature 1..21: note = Probe
  source 1..21: mol_type = other DNA
tggttgtagtccgtgcgagaa

SEQ ID NO: 25851 - DNA, 22 bp, synthetic construct
  misc_feature 1..22: note = Probe
  source 1..22: mol_type = other DNA
tggttgtagtccgtgcgagaat

SEQ ID NO: 25852 - DNA, 23 bp, synthetic construct
  misc_feature 1..23: note = Probe
  source 1..23: mol_type = other DNA
tggttgtagtccgtgcgagaata

SEQ ID NO: 25853 - DNA, 36 bp, synthetic construct
  misc_feature 1..36: note = Probe
  source 1..36: mol_type = other DNA
tggtttttcatatcattggtcgtggttgtagtccgt

SEQ ID NO: 25854 - DNA, 21 bp, synthetic construct
  misc_feature 1..21: note = Probe
  source 1..21: mol_type = other DNA
tgtaaaccggagatgaaaacc

SEQ ID NO: 25855 - DNA, 29 bp, synthetic construct
  misc_feature 1..29: note = Probe
  source 1..29: mol_type = other DNA
tgtaatggttagcactctggactctgaat

SEQ ID NO: 25856 - DNA, 30 bp, synthetic construct
  misc_feature 1..30: note = Probe
  source 1..30: mol_type = other DNA
tgtaatggttagcactctggactctgaatc

SEQ ID NO: 25857 - DNA, 31 bp, synthetic construct
  misc_feature 1..31: note = Probe
  source 1..31: mol_type = other DNA
tgtaatggttagcactctggactctgaatcc

SEQ ID NO: 25858 - DNA, 32 bp, synthetic construct
  misc_feature 1..32: note = Probe
  source 1..32: mol_type = other DNA
tgtaatggttagcactctggactctgaatcca

SEQ ID NO: 25859 - DNA, 36 bp, synthetic construct
  misc_feature 1..36: note = Probe
  source 1..36: mol_type = other DNA
tgtaatggttagcactctggactctgaatccagcga

SEQ ID NO: 25860 - DNA, 30 bp, synthetic construct
  misc_feature 1..30: note = Probe
  source 1..30: mol_type = other DNA
tgtaatggttagcactctggactttgaatc

SEQ ID NO: 25861 - DNA, 17 bp, synthetic construct
  misc_feature 1..17: note = Probe
  source 1..17: mol_type = other DNA
tgtcacgcgggagaccg

SEQ ID NO: 25862 - DNA, 36 bp, synthetic construct
  misc_feature 1..36: note = Probe
  source 1..36: mol_type = other DNA
tgtgaatctgacaacagaggcttacgaccccttatt

SEQ ID NO: 25863 - DNA, 27 bp, synthetic construct
  misc_feature 1..27: note = Probe
  source 1..27: mol_type = other DNA
ttaaaggataacagctatccattggtc

SEQ ID NO: 25864 - DNA, 36 bp, synthetic construct
  misc_feature 1..36: note = Probe
  source 1..36: mol_type = other DNA
ttaaccgaaaggttggtggttcgagcccacccaggg

SEQ ID NO: 25865 - DNA, 36 bp, synthetic construct; identical to SEQ ID NO: 1789
  misc_feature 1..36: note = Probe
  source 1..36: mol_type = other DNA

SEQ ID NO: 25866 - DNA, 26 bp, synthetic construct
  misc_feature 1..26: note = Probe
  source 1..26: mol_type = other DNA
ttaacttccaattaactagttttgac

SEQ ID NO: 25867 - DNA, 21 bp, synthetic construct
  misc_feature 1..21: note = Probe
  source 1..21: mol_type = other DNA
ttacagtcagaggttcaattc

SEQ ID NO: 25868 - DNA, 22 bp, synthetic construct
  misc_feature 1..22: note = Probe
  source 1..22: mol_type = other DNA
ttagcactctggactctgaatc

SEQ ID NO: 25869 - DNA, 34 bp, synthetic construct
  misc_feature 1..34: note = Probe
  source 1..34: mol_type = other DNA
ttagcactctggactctgaatccagcgatccgag

SEQ ID NO: 25870 - DNA, 35 bp, synthetic construct
  misc_feature 1..35: note = Probe
  source 1..35: mol_type = other DNA
ttagcactctggactctgaatccagcgatccgagt

SEQ ID NO: 25871 - DNA, 36 bp, synthetic construct
  misc_feature 1..36: note = Probe
  source 1..36: mol_type = other DNA
ttagcactctggactctgaatccagcgatccgagtt

SEQ ID NO: 25872 - DNA, 36 bp, synthetic construct
  misc_feature 1..36: note = Probe
  source 1..36: mol_type = other DNA
ttagcactctggactttgaatccagcgatccgagtt

SEQ ID NO: 25873 - DNA, 36 bp, synthetic construct; identical to SEQ ID NO: 24619
  misc_feature 1..36: note = Probe
  source 1..36: mol_type = other DNA

SEQ ID NO: 25874 - DNA, 36 bp, synthetic construct
  misc_feature 1..36: note = Probe
  source 1..36: mol_type = other DNA
ttagctgttaactaagtgtttgtgggtttaagtccc

SEQ ID NO: 25875 - DNA, 16 bp, synthetic construct
  misc_feature 1..16: note = Probe
  source 1..16: mol_type = other DNA
ttaggattcggcgctc

SEQ ID NO: 25876 - DNA, 24 bp, synthetic construct
  misc_feature 1..24: note = Probe
  source 1..24: mol_type = other DNA
ttaggattcggcgctctcaccgcc

SEQ ID NO: 25877 - DNA, 30 bp, synthetic construct
  misc_feature 1..30: note = Probe
  source 1..30: mol_type = other DNA
ttaggattcggcgctctcaccgccgcggcc

SEQ ID NO: 25878 - DNA, 31 bp, synthetic construct
  misc_feature 1..31: note = Probe
  source 1..31: mol_type = other DNA
ttaggattcggcgctctcaccgccgcggccc

SEQ ID NO: 25879 - DNA, 36 bp, synthetic construct
  misc_feature 1..36: note = Probe
  source 1..36: mol_type = other DNA
ttaggattcggcgctctcaccgccgcggcccgggtt

SEQ ID NO: 25880 - DNA, 36 bp, synthetic construct
  misc_feature 1..36: note = Probe
  source 1..36: mol_type = other DNA
ttagggtgcttagctgttaactaagtgtttgtgggt

SEQ ID NO: 25881 - DNA, 36 bp, synthetic construct
  misc_feature 1..36: note = Probe
  source 1..36: mol_type = other DNA
ttcaaaggttgtgggttcgagtcccaccagagtcgc

SEQ ID NO: 25882 - DNA, 18 bp, synthetic construct
  misc_feature 1..18: note = Probe
  source 1..18: mol_type = other DNA
ttcaggtcgcagtctccc

SEQ ID NO: 25883 - DNA, 36 bp, synthetic construct
  misc_feature 1..36: note = Probe
  source 1..36: mol_type = other DNA
ttcatatcattggtcgtggttgtagtccgtgcgaga

SEQ ID NO: 25884 - DNA, 21 bp, synthetic construct
  misc_feature 1..21: note = Probe
  source 1..21: mol_type = other DNA
ttccaattaactagttttgac

SEQ ID NO: 25885 - DNA, 16 bp, synthetic construct
  misc_feature 1..16: note = Probe
  source 1..16: mol_type = other DNA
ttccggctcgaaggac

SEQ ID NO: 25886 - DNA, 30 bp, synthetic construct; identical to SEQ ID NO: 24686
  misc_feature 1..30: note = Probe
  source 1..30: mol_type = other DNA

SEQ ID NO: 25887 - DNA, 31 bp, synthetic construct; identical to SEQ ID NO: 8421
  misc_feature 1..31: note = Probe
  source 1..31: mol_type = other DNA

SEQ ID NO: 25888 - DNA, 25 bp, synthetic construct
  misc_feature 1..25: note = Probe
  source 1..25: mol_type = other DNA
ttcggcgctctcaccgccgcggccc

SEQ ID NO: 25889 - DNA, 29 bp, synthetic construct
  misc_feature 1..29: note = Probe
  source 1..29: mol_type = other DNA
ttcggcgctctcaccgccgcggcccgggt

SEQ ID NO: 25890 - DNA, 30 bp, synthetic construct
  misc_feature 1..30: note = Probe
  source 1..30: mol_type = other DNA
ttcggcgctctcaccgccgcggcccgggtt

SEQ ID NO: 25891 - DNA, 36 bp, synthetic construct
  misc_feature 1..36: note = Probe
  source 1..36: mol_type = other DNA
ttcggcgctctcaccgccgcggcccgggttcgattc

SEQ ID NO: 25892 - DNA, 36 bp, synthetic construct
  misc_feature 1..36: note = Probe
  source 1..36: mol_type = other DNA
ttctggtctccggatggaggcgtgggttcgaatccc

SEQ ID NO: 25893 - DNA, 30 bp, synthetic construct
  misc_feature 1..30: note = Probe
  source 1..30: mol_type = other DNA
ttctgtagtgtagtggttatcacgttcgcc

SEQ ID NO: 25894 - DNA, 31 bp, synthetic construct; identical to SEQ ID NO: 24742
  misc_feature 1..31: note = Probe
  source 1..31: mol_type = other DNA

SEQ ID NO: 25895 - DNA, 27 bp, synthetic construct
  misc_feature 1..27: note = Probe
  source 1..27: mol_type = other DNA
ttgactgcagatcaagaggtccccggt

SEQ ID NO: 25896 - DNA, 24 bp, synthetic construct
  misc_feature 1..24: note = Probe
  source 1..24: mol_type = other DNA
ttgatagagtaaataataggagct

SEQ ID NO: 25897 - DNA, 31 bp, synthetic construct
  misc_feature 1..31: note = Probe
  source 1..31: mol_type = other DNA
ttgatagagtaaataataggagcttaaaccc

SEQ ID NO: 25898 - DNA, 36 bp, synthetic construct
  misc_feature 1..36: note = Probe
  source 1..36: mol_type = other DNA
ttgattagggtgcttagctgttaactaagtgtttgt

SEQ ID NO: 25899 - DNA, 22 bp, synthetic construct
  misc_feature 1..22: note = Probe
  source 1..22: mol_type = other DNA
ttgcacgtatgaggccccgggt

SEQ ID NO: 25900 - DNA, 36 bp, synthetic construct
  misc_feature 1..36: note = Probe
  source 1..36: mol_type = other DNA
ttggactgtaaatctaaagacaggggttaggcctct

SEQ ID NO: 25901 - DNA, 16 bp, synthetic construct
  misc_feature 1..16: note = Probe
  source 1..16: mol_type = other DNA
ttggggggttcgattc

SEQ ID NO: 25902 - DNA, 18 bp, synthetic construct
  misc_feature 1..18: note = Probe
  source 1..18: mol_type = other DNA
ttgggtgcgagaggtccc

SEQ ID NO: 25903 - DNA, 21 bp, synthetic construct
  misc_feature 1..21: note = Probe
  source 1..21: mol_type = other DNA
ttgggtgcgagaggtcccggg

SEQ ID NO: 25904 - DNA, 22 bp, synthetic construct
  misc_feature 1..22: note = Probe
  source 1..22: mol_type = other DNA
ttgggtgcgagaggtcccgggt

SEQ ID NO: 25905 - DNA, 23 bp, synthetic construct
  misc_feature 1..23: note = Probe
  source 1..23: mol_type = other DNA
ttgggtgcgagaggtcccgggtt

SEQ ID NO: 25906 - DNA, 36 bp, synthetic construct
  misc_feature 1..36: note = Probe
  source 1..36: mol_type = other DNA
ttgggtgctaatggtggagttaaagactttttctct

SEQ ID NO: 25907 - DNA, 18 bp, synthetic construct
  misc_feature 1..18: note = Probe
  source 1..18: mol_type = other DNA
ttggtcgtggttgtagtc

SEQ ID NO: 25908 - DNA, 19 bp, synthetic construct
  misc_feature 1..19: note = Probe
  source 1..19: mol_type = other DNA
ttggtcgtggttgtagtcc

SEQ ID NO: 25909 - DNA, 20 bp, synthetic construct
  misc_feature 1..20: note = Probe
  source 1..20: mol_type = other DNA
ttggtcgtggttgtagtccg

SEQ ID NO: 25910 - DNA, 22 bp, synthetic construct
  misc_feature 1..22: note = Probe
  source 1..22: mol_type = other DNA
ttggtcgtggttgtagtccgtg

SEQ ID NO: 25911 - DNA, 23 bp, synthetic construct
  misc_feature 1..23: note = Probe
  source 1..23: mol_type = other DNA
ttggtcgtggttgtagtccgtgc

SEQ ID NO: 25912 - DNA, 24 bp, synthetic construct
  misc_feature 1..24: note = Probe
  source 1..24: mol_type = other DNA
ttggtcgtggttgtagtccgtgcg

SEQ ID NO: 25913 - DNA, 25 bp, synthetic construct
  misc_feature 1..25: note = Probe
  source 1..25: mol_type = other DNA
ttggtcgtggttgtagtccgtgcga

SEQ ID NO: 25914 - DNA, 26 bp, synthetic construct
  misc_feature 1..26: note = Probe
  source 1..26: mol_type = other DNA
ttggtcgtggttgtagtccgtgcgag

SEQ ID NO: 25915 - DNA, 27 bp, synthetic construct
  misc_feature 1..27: note = Probe
  source 1..27: mol_type = other DNA
ttggtcgtggttgtagtccgtgcgaga

SEQ ID NO: 25916 - DNA, 28 bp, synthetic construct
  misc_feature 1..28: note = Probe
  source 1..28: mol_type = other DNA
ttggtcgtggttgtagtccgtgcgagaa

SEQ ID NO: 25917 - DNA, 29 bp, synthetic construct
  misc_feature 1..29: note = Probe
  source 1..29: mol_type = other DNA
ttggtcgtggttgtagtccgtgcgagaat

SEQ ID NO: 25918 - DNA, 30 bp, synthetic construct; identical to SEQ ID NO: 24765
  misc_feature 1..30: note = Probe
  source 1..30: mol_type = other DNA

SEQ ID NO: 25919 - DNA, 36 bp, synthetic construct
  misc_feature 1..36: note = Probe
  source 1..36: mol_type = other DNA
ttggtggttcagtggtagaattctcgcctgccacgc

SEQ ID NO: 25920 - DNA, 22 bp, synthetic construct
  misc_feature 1..22: note = Probe
  source 1..22: mol_type = other DNA
ttgtaaaccggagatgaaaacc

SEQ ID NO: 25921 - DNA, 23 bp, synthetic construct
  misc_feature 1..23: note = Probe
  source 1..23: mol_type = other DNA
ttgtaaaccggagatgaaaacct

SEQ ID NO: 25922 - DNA, 36 bp, synthetic construct; identical to SEQ ID NO: 1800
  misc_feature 1..36: note = Probe
  source 1..36: mol_type = other DNA

SEQ ID NO: 25923 - DNA, 30 bp, synthetic construct; identical to SEQ ID NO: 12419
  misc_feature 1..30: note = Probe
  source 1..30: mol_type = other DNA

SEQ ID NO: 25924 - DNA, 31 bp, synthetic construct
  misc_feature 1..31: note = Probe
  source 1..31: mol_type = other DNA
ttgtgaatctgacaacagaggcttacgaccc

SEQ ID NO: 25925 - DNA, 32 bp, synthetic construct; identical to SEQ ID NO: 8509
  misc_feature 1..32: note = Probe
  source 1..32: mol_type = other DNA

SEQ ID NO: 25926 - DNA, 33 bp, synthetic construct
  misc_feature 1..33: note = Probe
  source 1..33: mol_type = other DNA
ttgtgaatctgacaacagaggcttacgacccct

SEQ ID NO: 25927 - DNA, 36 bp, synthetic construct
  misc_feature 1..36: note = Probe
  source 1..36: mol_type = other DNA
ttgtgaatctgacaacagaggcttacgaccccttat

SEQ ID NO: 25928 - DNA, 28 bp, synthetic construct
  misc_feature 1..28: note = Probe
  source 1..28: mol_type = other DNA
tttaaaggataacagctatccattggtc

SEQ ID NO: 25929 - DNA, 36 bp, synthetic construct
  misc_feature 1..36: note = Probe
  source 1..36: mol_type = other DNA
tttcatatcattggtcgtggttgtagtccgtgcgag

SEQ ID NO: 25930 - DNA, 31 bp, synthetic construct
  misc_feature 1..31: note = Probe
  source 1..31: mol_type = other DNA
tttccgtagtgtagtggtcatcacgttcgcc

SEQ ID NO: 25931 - DNA, 32 bp, synthetic construct
  misc_feature 1..32: note = Probe
  source 1..32: mol_type = other DNA
tttccgtagtgtagtggtcatcacgttcgcct

SEQ ID NO: 25932 - DNA, 25 bp, synthetic construct
  misc_feature 1..25: note = Probe
  source 1..25: mol_type = other DNA
tttgatagagtaaataataggagct

SEQ ID NO: 25933 - DNA, 32 bp, synthetic construct
  misc_feature 1..32: note = Probe
  source 1..32: mol_type = other DNA
tttgatagagtaaataataggagcttaaaccc

SEQ ID NO: 25934 - DNA, 19 bp, synthetic construct
  misc_feature 1..19: note = Probe
  source 1..19: mol_type = other DNA
tttgcacgtatgaggcccc

SEQ ID NO: 25935 - DNA, 23 bp, synthetic construct
  misc_feature 1..23: note = Probe
  source 1..23: mol_type = other DNA
tttgcacgtatgaggccccgggt

SEQ ID NO: 25936 - DNA, 24 bp, synthetic construct
  misc_feature 1..24: note = Probe
  source 1..24: mol_type = other DNA
tttgcacgtatgaggccccgggtt

SEQ ID NO: 25937 - DNA, 19 bp, synthetic construct
  misc_feature 1..19: note = Probe
  source 1..19: mol_type = other DNA
tttgggtgcgagaggtccc

SEQ ID NO: 25938 - DNA, 22 bp, synthetic construct
  misc_feature 1..22: note = Probe
  source 1..22: mol_type = other DNA
tttgggtgcgagaggtcccggg

SEQ ID NO: 25939 - DNA, 23 bp, synthetic construct
  misc_feature 1..23: note = Probe
  source 1..23: mol_type = other DNA
tttgggtgcgagaggtcccgggt

SEQ ID NO: 25940 - DNA, 24 bp, synthetic construct
  misc_feature 1..24: note = Probe
  source 1..24: mol_type = other DNA
tttgggtgcgagaggtcccgggtt

SEQ ID NO: 25941 - DNA, 36 bp, synthetic construct
  misc_feature 1..36: note = Probe
  source 1..36: mol_type = other DNA
tttgggtgctaatggtggagttaaagactttttctc

SEQ ID NO: 25942 - DNA, 29 bp, synthetic construct
  misc_feature 1..29: note = Probe
  source 1..29: mol_type = other DNA
ttttaaaggataacagctatccattggtc

SEQ ID NO: 25943 - DNA, 36 bp, synthetic construct
  misc_feature 1..36: note = Probe
  source 1..36: mol_type = other DNA
ttttcacccaggcggcccgggttcgactcccggtgt

SEQ ID NO: 25944 - DNA, 36 bp, synthetic construct
  misc_feature 1..36: note = Probe
  source 1..36: mol_type = other DNA
ttttcatatcattggtcgtggttgtagtccgtgcga

SEQ ID NO: 25945 - DNA, 36 bp, synthetic construct
  misc_feature 1..36: note = Probe
  source 1..36: mol_type = other DNA
tttttcatatcattggtcgtggttgtagtccgtgcg

SEQ ID NO: 25946 - DNA, 15 bp, synthetic construct
  misc_feature 1..15: note = Probe
  source 1..15: mol_type = other DNA
aaaaaggattagact

SEQ ID NO: 25947 - DNA, 20 bp, synthetic construct
  misc_feature 1..20: note = Probe
  source 1..20: mol_type = other DNA
aaaaaggattagactgaacc

SEQ ID NO: 25948 - DNA, 24 bp, synthetic construct
  misc_feature 1..24: note = Probe
  source 1..24: mol_type = other DNA
aaaaaggattagactgaaccgaat

SEQ ID NO: 25949 - DNA, 16 bp, synthetic construct
  misc_feature 1..16: note = Probe
  source 1..16: mol_type = other DNA
aaaaagtcatggaggc

SEQ ID NO: 25950 - DNA, 22 bp, synthetic construct
  misc_feature 1..22: note = Probe
  source 1..22: mol_type = other DNA
aaaaagtctttaactccaccat

SEQ ID NO: 25951 - DNA, 18 bp, synthetic construct
  misc_feature 1..18: note = Probe
  source 1..18: mol_type = other DNA
aaaaattttggtgcaact

SEQ ID NO: 25952 - DNA, 19 bp, synthetic construct
  misc_feature 1..19: note = Probe
  source 1..19: mol_type = other DNA
aaaaattttggtgcaactc

SEQ ID NO: 25953 - DNA, 20 bp, synthetic construct
  misc_feature 1..20: note = Probe
  source 1..20: mol_type = other DNA
aaaaattttggtgcaactcc

SEQ ID NO: 25954 - DNA, 21 bp, synthetic construct
  misc_feature 1..21: note = Probe
  source 1..21: mol_type = other DNA
aaaaattttggtgcaactcca

SEQ ID NO: 25955 - DNA, 15 bp, synthetic construct
  misc_feature 1..15: note = Probe
  source 1..15: mol_type = other DNA
aaaacatcagattgt

SEQ ID NO: 25956 - DNA, 20 bp, synthetic construct
  misc_feature 1..20: note = Probe
  source 1..20: mol_type = other DNA
aaaacatcagattgtgaatc

SEQ ID NO: 25957 - DNA, 21 bp, synthetic construct
  misc_feature 1..21: note = Probe
  source 1..21: mol_type = other DNA
aaaacatcagattgtgaatct

SEQ ID NO: 25958 - DNA, 30 bp, synthetic construct
  misc_feature 1..30: note = Probe
  source 1..30: mol_type = other DNA
aaaacatcagattgtgaatctgacaacaga

SEQ ID NO: 25959 - DNA, 33 bp, synthetic construct; identical to SEQ ID NO: 1805
  misc_feature 1..33: note = Probe
  source 1..33: mol_type = other DNA

SEQ ID NO: 25960 - DNA, 34 bp, synthetic construct; identical to SEQ ID NO: 1806
  misc_feature 1..34: note = Probe
  source 1..34: mol_type = other DNA

SEQ ID NO: 25961 - DNA, 35 bp, synthetic construct; identical to SEQ ID NO: 1807
  misc_feature 1..35: note = Probe
  source 1..35: mol_type = other DNA

SEQ ID NO: 25962 - DNA, 37 bp, synthetic construct
  misc_feature 1..37: note = Probe
  source 1..37: mol_type = other DNA
aaaacatcagattgtgaatctgacaacagaggcttac

SEQ ID NO: 25963 - DNA, 38 bp, synthetic construct; identical to SEQ ID NO: 1808
  misc_feature 1..38: note = Probe
  source 1..38: mol_type = other DNA

SEQ ID NO: 25964 - DNA, 39 bp, synthetic construct
  misc_feature 1..39: note = Probe
  source 1..39: mol_type = other DNA
aaaacatcagattgtgaatctgacaacagaggcttacga

SEQ ID NO: 25965 - DNA, 40 bp, synthetic construct; identical to SEQ ID NO: 1809
  misc_feature 1..40: note = Probe
  source 1..40: mol_type = other DNA

SEQ ID NO: 25966 - DNA, 41 bp, synthetic construct
  misc_feature 1..41: note = Probe
  source 1..41: mol_type = other DNA
aaaacatcagattgtgaatctgacaacagaggcttacgacc

SEQ ID NO: 25967 - DNA, 42 bp, synthetic construct; identical to SEQ ID NO: 14481
  misc_feature 1..42: note = Probe
  source 1..42: mol_type = other DNA

SEQ ID NO: 25968 - DNA, 43 bp, synthetic construct; identical to SEQ ID NO: 1
  misc_feature 1..43: note = Probe
  source 1..43: mol_type = other DNA

SEQ ID NO: 25969 - DNA, 50 bp, synthetic construct; identical to SEQ ID NO: 4
  misc_feature 1..50: note = Probe
  source 1..50: mol_type = other DNA

SEQ ID NO: 25970 - DNA, 19 bp, synthetic construct
  misc_feature 1..19: note = Probe
  source 1..19: mol_type = other DNA
aaaacgaatgatttcgact

SEQ ID NO: 25971 - DNA, 20 bp, synthetic construct
  misc_feature 1..20: note = Probe
  source 1..20: mol_type = other DNA
aaaacgaatgatttcgactc

SEQ ID NO: 25972 - DNA, 21 bp, synthetic construct
  misc_feature 1..21: note = Probe
  source 1..21: mol_type = other DNA
aaaacgaatgatttcgactca

SEQ ID NO: 25973 - DNA, 36 bp, synthetic construct
  misc_feature 1..36: note = Probe
  source 1..36: mol_type = other DNA
aaaacgaatgatttcgactcattaaattatgataat

SEQ ID NO: 25974 - DNA, 45 bp, synthetic construct
  misc_feature 1..45: note = Probe
  source 1..45: mol_type = other DNA
aaaacgaatgatttcgactcattaaattatgataatcatatttac

SEQ ID NO: 25975 - DNA, 25 bp, synthetic construct
  misc_feature 1..25: note = Probe
  source 1..25: mol_type = other DNA
aaaacttaaaactttacagtcagag

SEQ ID NO: 25976 - DNA, 26 bp, synthetic construct
  misc_feature 1..26: note = Probe
  source 1..26: mol_type = other DNA
aaaacttaaaactttacagtcagagg

SEQ ID NO: 25977 - DNA, 36 bp, synthetic construct
  misc_feature 1..36: note = Probe
  source 1..36: mol_type = other DNA
aaaacttaaaactttacagtcagaggttcaattcct

SEQ ID NO: 25978 - DNA, 36 bp, synthetic construct
  misc_feature 1..36: note = Probe
  source 1..36: mol_type = other DNA
aaaagaacctgggtagctcagtaggtagaacatcag

SEQ ID NO: 25979 - DNA, 36 bp, synthetic construct
  misc_feature 1..36: note = Probe
  source 1..36: mol_type = other DNA
aaaagagttactttgatagagtaaataataggagct

SEQ ID NO: 25980 - DNA, 18 bp, synthetic construct
  misc_feature 1..18: note = Probe
  source 1..18: mol_type = other DNA
aaaaggattagactgaac

SEQ ID NO: 25981 - DNA, 19 bp, synthetic construct
  misc_feature 1..19: note = Probe
  source 1..19: mol_type = other DNA
aaaaggattagactgaacc

SEQ ID NO: 25982 - DNA, 20 bp, synthetic construct
  misc_feature 1..20: note = Probe
  source 1..20: mol_type = other DNA
aaaaggattagactgaaccg

SEQ ID NO: 25983 - DNA, 23 bp, synthetic construct
  misc_feature 1..23: note = Probe
  source 1..23: mol_type = other DNA
aaaaggattagactgaaccgaat

SEQ ID NO: 25984 - DNA, 15 bp, synthetic construct
  misc_feature 1..15: note = Probe
  source 1..15: mol_type = other DNA
aaaagtcatggaggc

SEQ ID NO: 25985 - DNA, 16 bp, synthetic construct
  misc_feature 1..16: note = Probe
  source 1..16: mol_type = other DNA
aaaagtcatggaggcc

SEQ ID NO: 25986 - DNA, 21 bp, synthetic construct
  misc_feature 1..21: note = Probe
  source 1..21: mol_type = other DNA
aaaagtctttaactccaccat

SEQ ID NO: 25987 - DNA, 18 bp, synthetic construct
  misc_feature 1..18: note = Probe
  source 1..18: mol_type = other DNA
aaaatactcaaatgggcc

SEQ ID NO: 25988 - DNA, 26 bp, synthetic construct
  misc_feature 1..26: note = Probe
  source 1..26: mol_type = other DNA
aaaatggctgagtgaagcattggact

SEQ ID NO: 25989 - DNA, 16 bp, synthetic construct
  misc_feature 1..16: note = Probe
  source 1..16: mol_type = other DNA
aaaatgttggttatac

SEQ ID NO: 25990 - DNA, 17 bp, synthetic construct
  misc_feature 1..17: note = Probe
  source 1..17: mol_type = other DNA
aaaatgttggttatacc

SEQ ID NO: 25991 - DNA, 18 bp, synthetic construct
  misc_feature 1..18: note = Probe
  source 1..18: mol_type = other DNA
aaaatgttggttataccc

SEQ ID NO: 25992 - DNA, 17 bp, synthetic construct
  misc_feature 1..17: note = Probe
  source 1..17: mol_type = other DNA
aaaatgtttagacgggc

SEQ ID NO: 25993 - DNA, 24 bp, synthetic construct
  misc_feature 1..24: note = Probe
  source 1..24: mol_type = other DNA
aaaatgtttagacgggctcacatc

SEQ ID NO: 25994 - DNA, 25 bp, synthetic construct
  misc_feature 1..25: note = Probe
  source 1..25: mol_type = other DNA
aaaatgtttagacgggctcacatca

SEQ ID NO: 25995 - DNA, 29 bp, synthetic construct
  misc_feature 1..29: note = Probe
  source 1..29: mol_type = other DNA
aaaatgtttagacgggctcacatcacccc

SEQ ID NO: 25996 - DNA, 32 bp, synthetic construct
  misc_feature 1..32: note = Probe
  source 1..32: mol_type = other DNA
aaaatgtttagacgggctcacatcaccccata

SEQ ID NO: 25997 - DNA, 34 bp, synthetic construct
  misc_feature 1..34: note = Probe
  source 1..34: mol_type = other DNA
aaaatgtttagacgggctcacatcaccccataaa

SEQ ID NO: 25998 - DNA, 36 bp, synthetic construct
  misc_feature 1..36: note = Probe
  source 1..36: mol_type = other DNA
aaaatgtttagacgggctcacatcaccccataaaca

SEQ ID NO: 25999 - DNA, 18 bp, synthetic construct
  misc_feature 1..18: note = Probe
  source 1..18: mol_type = other DNA
aaaattttggtgcaactc

SEQ ID NO: 26000 - DNA, 19 bp, synthetic construct
  misc_feature 1..19: note = Probe
  source 1..19: mol_type = other DNA
aaaattttggtgcaactcc

SEQ ID NO: 26001 - DNA, 22 bp, synthetic construct
  misc_feature 1..22: note = Probe
  source 1..22: mol_type = other DNA
aaacaaaacgaatgatttcgac

SEQ ID NO: 26002 - DNA, 23 bp, synthetic construct
  misc_feature 1..23: note = Probe
  source 1..23: mol_type = other DNA
aaacaaaacgaatgatttcgact

SEQ ID NO: 26003 - DNA, 24 bp, synthetic construct
  misc_feature 1..24: note = Probe
  source 1..24: mol_type = other DNA
aaacaaaacgaatgatttcgactc

SEQ ID NO: 26004 - DNA, 25 bp, synthetic construct
  misc_feature 1..25: note = Probe
  source 1..25: mol_type = other DNA
aaacaaaacgaatgatttcgactca

SEQ ID NO: 26005 - DNA, 36 bp, synthetic construct
  misc_feature 1..36: note = Probe
  source 1..36: mol_type = other DNA
aaacaaaacgaatgatttcgactcattaaattatga

SEQ ID NO: 26006 - DNA, 19 bp, synthetic construct
  misc_feature 1..19: note = Probe
  source 1..19: mol_type = other DNA
aaacatcagattgtgaatc

SEQ ID NO: 26007 - DNA, 20 bp, synthetic construct
  misc_feature 1..20: note = Probe
  source 1..20: mol_type = other DNA
aaacatcagattgtgaatct

SEQ ID NO: 26008 - DNA, 29 bp, synthetic construct
  misc_feature 1..29: note = Probe
  source 1..29: mol_type = other DNA
aaacatcagattgtgaatctgacaacaga

SEQ ID NO: 26009 - DNA, 31 bp, synthetic construct
  misc_feature 1..31: note = Probe
  source 1..31: mol_type = other DNA
aaacatcagattgtgaatctgacaacagagg

SEQ ID NO: 26010 - DNA, 32 bp, synthetic construct; identical to SEQ ID NO: 1850
  misc_feature 1..32: note = Probe
  source 1..32: mol_type = other DNA

SEQ ID NO: 26011 - DNA, 33 bp, synthetic construct
  misc_feature 1..33: note = Probe
  source 1..33: mol_type = other DNA
aaacatcagattgtgaatctgacaacagaggct

SEQ ID NO: 26012 - DNA, 42 bp, synthetic construct; identical to SEQ ID NO: 14527
  misc_feature 1..42: note = Probe
  source 1..42: mol_type = other DNA

SEQ ID NO: 26013 - DNA, 43 bp, synthetic construct; identical to SEQ ID NO: 1851
  misc_feature 1..43: note = Probe
  source 1..43: mol_type = other DNA

SEQ ID NO: 26014 - DNA, 44 bp, synthetic construct; identical to SEQ ID NO: 12
  misc_feature 1..44: note = Probe
  source 1..44: mol_type = other DNA

SEQ ID NO: 26015 - DNA, 45 bp, synthetic construct; identical to SEQ ID NO: 13
  misc_feature 1..45: note = Probe
  source 1..45: mol_type = other DNA

SEQ ID NO: 26016 - DNA, 50 bp, synthetic construct; identical to SEQ ID NO: 14
  misc_feature 1..50: note = Probe
  source 1..50: mol_type = other DNA

SEQ ID NO: 26017 - DNA, 15 bp, synthetic construct
  misc_feature 1..15: note = Probe
  source 1..15: mol_type = other DNA
aaacccactccacct

SEQ ID NO: 26018 - DNA, 36 bp, synthetic construct
  misc_feature 1..36: note = Probe
  source 1..36: mol_type = other DNA
aaacccccttatttctaggactatgagaatcgaacc

SEQ ID NO: 26019 - DNA, 18 bp, synthetic construct
  misc_feature 1..18: note = Probe
  source 1..18: mol_type = other DNA
aaaccgggcagaagcaac

SEQ ID NO: 26020 - DNA, 17 bp, synthetic construct
  misc_feature 1..17: note = Probe
  source 1..17: mol_type = other DNA
aaaccgggcggaaacac

SEQ ID NO: 26021 - DNA, 19 bp, synthetic construct
  misc_feature 1..19: note = Probe
  source 1..19: mol_type = other DNA
aaaccgggcggaaacacct

SEQ ID NO: 26022 - DNA, 17 bp, synthetic construct
  misc_feature 1..17: note = Probe
  source 1..17: mol_type = other DNA
aaacctagccccaaacc

SEQ ID NO: 26023 - DNA, 18 bp, synthetic construct
  misc_feature 1..18: note = Probe
  source 1..18: mol_type = other DNA
aaacctagccccaaaccc

SEQ ID NO: 26024 - DNA, 23 bp, synthetic construct
  misc_feature 1..23: note = Probe
  source 1..23: mol_type = other DNA
aaacctagccccaaacccactcc

SEQ ID NO: 26025 - DNA, 25 bp, synthetic construct
  misc_feature 1..25: note = Probe
  source 1..25: mol_type = other DNA
aaacctagccccaaacccactccac

SEQ ID NO: 26026 - DNA, 26 bp, synthetic construct
  misc_feature 1..26: note = Probe
  source 1..26: mol_type = other DNA
aaacctagccccaaacccactccacc

SEQ ID NO: 26027 - DNA, 27 bp, synthetic construct
  misc_feature 1..27: note = Probe
  source 1..27: mol_type = other DNA
aaacctagccccaaacccactccacct

SEQ ID NO: 26028 - DNA, 15 bp, synthetic construct
  misc_feature 1..15: note = Probe
  source 1..15: mol_type = other DNA
aaacctgccggggct

SEQ ID NO: 26029 - DNA, 18 bp, synthetic construct
  misc_feature 1..18: note = Probe
  source 1..18: mol_type = other DNA
aaacctgccggggcttct

SEQ ID NO: 26030 - DNA, 17 bp, synthetic construct
  misc_feature 1..17: note = Probe
  source 1..17: mol_type = other DNA
aaacgaatgatttcgac

SEQ ID NO: 26031 - DNA, 18 bp, synthetic construct
  misc_feature 1..18: note = Probe
  source 1..18: mol_type = other DNA
aaacgaatgatttcgact

SEQ ID NO: 26032 - DNA, 19 bp, synthetic construct
  misc_feature 1..19: note = Probe
  source 1..19: mol_type = other DNA
aaacgaatgatttcgactc

SEQ ID NO: 26033 - DNA, 20 bp, synthetic construct
  misc_feature 1..20: note = Probe
  source 1..20: mol_type = other DNA
aaacgaatgatttcgactca

SEQ ID NO: 26034 - DNA, 21 bp, synthetic construct
  misc_feature 1..21: note = Probe
  source 1..21: mol_type = other DNA
aaacgaatgatttcgactcat

SEQ ID NO: 26035 - DNA, 36 bp, synthetic construct
  misc_feature 1..36: note = Probe
  source 1..36: mol_type = other DNA
aaacgaatgatttcgactcattaaattatgataatc

SEQ ID NO: 26036 - DNA, 24 bp, synthetic construct
  misc_feature 1..24: note = Probe
  source 1..24: mol_type = other DNA
aaacttaaaactttacagtcagag

SEQ ID NO: 26037 - DNA, 36 bp, synthetic construct
  misc_feature 1..36: note = Probe
  source 1..36: mol_type = other DNA
aaacttaaaactttacagtcagaggttcaattcctc

SEQ ID NO: 26038 - DNA, 21 bp, synthetic construct
  misc_feature 1..21: note = Probe
  source 1..21: mol_type = other DNA
aaactttacagtcagaggttc

SEQ ID NO: 26039 - DNA, 28 bp, synthetic construct
  misc_feature 1..28: note = Probe
  source 1..28: mol_type = other DNA
aaagaacagagaatagtttaaattagaa

SEQ ID NO: 26040 - DNA, 36 bp, synthetic construct; identical to SEQ ID NO: 14569
  misc_feature 1..36: note = Probe
  source 1..36: mol_type = other DNA

SEQ ID NO: 26041 - DNA, 36 bp, synthetic construct
  misc_feature 1..36: note = Probe
  source 1..36: mol_type = other DNA
aaagaacctgggtagctcagtaggtagaacatcaga

SEQ ID NO: 26042 - DNA, 16 bp, synthetic construct
  misc_feature 1..16: note = Probe
  source 1..16: mol_type = other DNA
aaagacaccccccaca

SEQ ID NO: 26043 - DNA, 28 bp, synthetic construct
  misc_feature 1..28: note = Probe
  source 1..28: mol_type = other DNA
aaagacaccccccacagtttatgtagct

SEQ ID NO: 26044 - DNA, 31 bp, synthetic construct; identical to SEQ ID NO: 14583
  misc_feature 1..31: note = Probe
  source 1..31: mol_type = other DNA

SEQ ID NO: 26045 - DNA, 32 bp, synthetic construct; identical to SEQ ID NO: 1908
  misc_feature 1..32: note = Probe
  source 1..32: mol_type = other DNA

SEQ ID NO: 26046 - DNA, 33 bp, synthetic construct; identical to SEQ ID NO: 1909
  misc_feature 1..33: note = Probe
  source 1..33: mol_type = other DNA

SEQ ID NO: 26047 - DNA, 34 bp, synthetic construct; identical to SEQ ID NO: 14586
  misc_feature 1..34: note = Probe
  source 1..34: mol_type = other DNA

SEQ ID NO: 26048 - DNA, 35 bp, synthetic construct; identical to SEQ ID NO: 1910
  misc_feature 1..35: note = Probe
  source 1..35: mol_type = other DNA

SEQ ID NO: 26049 - DNA, 36 bp, synthetic construct; identical to SEQ ID NO: 1911
  misc_feature 1..36: note = Probe
  source 1..36: mol_type = other DNA

SEQ ID NO: 26050 - DNA, 17 bp, synthetic construct
  misc_feature 1..17: note = Probe
  source 1..17: mol_type = other DNA
aaagacaggggttaggc

SEQ ID NO: 26051 - DNA, 18 bp, synthetic construct
  misc_feature 1..18: note = Probe
  source 1..18: mol_type = other DNA
aaagacaggggttaggcc

SEQ ID NO: 26052 - DNA, 28 bp, synthetic construct
  misc_feature 1..28: note = Probe
  source 1..28: mol_type = other DNA
aaagacaggggttaggcctctttttacc

SEQ ID NO: 26053 - DNA, 31 bp, synthetic construct; identical to SEQ ID NO: 1924
  misc_feature 1..31: note = Probe
  source 1..31: mol_type = other DNA

SEQ ID NO: 26054 - DNA, 15 bp, synthetic construct
  misc_feature 1..15: note = Probe
  source 1..15: mol_type = other DNA
aaagactttttctct

SEQ ID NO: 26055 - DNA, 16 bp, synthetic construct
  misc_feature 1..16: note = Probe
  source 1..16: mol_type = other DNA
aaagaggagttgtttt

SEQ ID NO: 26056 - DNA, 20 bp, synthetic construct
  misc_feature 1..20: note = Probe
  source 1..20: mol_type = other DNA
aaagagttactttgatagag

SEQ ID NO: 26057 - DNA, 35 bp, synthetic construct
  misc_feature 1..35: note = Probe
  source 1..35: mol_type = other DNA
aaagagttactttgatagagtaaataataggagct

SEQ ID NO: 26058 - DNA, 36 bp, synthetic construct
  misc_feature 1..36: note = Probe
  source 1..36: mol_type = other DNA
aaagagttactttgatagagtaaataataggagctt

SEQ ID NO: 26059 - DNA, 15 bp, synthetic construct
  misc_feature 1..15: note = Probe
  source 1..15: mol_type = other DNA
aaagattaagagaac

SEQ ID NO: 26060 - DNA, 16 bp, synthetic construct
  misc_feature 1..16: note = Probe
  source 1..16: mol_type = other DNA
aaagattaagagaacc

SEQ ID NO: 26061 - DNA, 17 bp, synthetic construct
  misc_feature 1..17: note = Probe
  source 1..17: mol_type = other DNA
aaagattaagagaacca

SEQ ID NO: 26062 - DNA, 19 bp, synthetic construct
  misc_feature 1..19: note = Probe
  source 1..19: mol_type = other DNA
aaagattaagagaaccaac

SEQ ID NO: 26063 - DNA, 20 bp, synthetic construct
  misc_feature 1..20: note = Probe
  source 1..20: mol_type = other DNA
aaagattaagagaaccaaca

SEQ ID NO: 26064 - DNA, 21 bp, synthetic construct
  misc_feature 1..21: note = Probe
  source 1..21: mol_type = other DNA
aaagattaagagaaccaacac

SEQ ID NO: 26065 - DNA, 22 bp, synthetic construct
  misc_feature 1..22: note = Probe
  source 1..22: mol_type = other DNA
aaagattaagagaaccaacacc

SEQ ID NO: 26066 - DNA, 23 bp, synthetic construct
  misc_feature 1..23: note = Probe
  source 1..23: mol_type = other DNA
aaagattaagagaaccaacacct

SEQ ID NO: 26067 - DNA, 24 bp, synthetic construct
  misc_feature 1..24: note = Probe
  source 1..24: mol_type = other DNA
aaagattaagagaaccaacacctc

SEQ ID NO: 26068 - DNA, 25 bp, synthetic construct
  misc_feature 1..25: note = Probe
  source 1..25: mol_type = other DNA
aaagattaagagaaccaacacctct

SEQ ID NO: 26069 - DNA, 35 bp, synthetic construct; identical to SEQ ID NO: 1928
  misc_feature 1..35: note = Probe
  source 1..35: mol_type = other DNA

SEQ ID NO: 26070 - DNA, 31 bp, synthetic construct; identical to SEQ ID NO: 1933
  misc_feature 1..31: note = Probe
  source 1..31: mol_type = other DNA

SEQ ID NO: 26071 - DNA, 34 bp, synthetic construct; identical to SEQ ID NO: 20
  misc_feature 1..34: note = Probe
  source 1..34: mol_type = other DNA

SEQ ID NO: 26072 - DNA, 36 bp, synthetic construct; identical to SEQ ID NO: 21
  misc_feature 1..36: note = Probe
  source 1..36: mol_type = other DNA

SEQ ID NO: 26073 - DNA, 41 bp, synthetic construct
  misc_feature 1..41: note = Probe
  source 1..41: mol_type = other DNA
aaagcaatacactgaaaatgtttagacgggctcacatcacc

SEQ ID NO: 26074 - DNA, 36 bp, synthetic construct; identical to SEQ ID NO: 14628
  misc_feature 1..36: note = Probe
  source 1..36: mol_type = other DNA

SEQ ID NO: 26075 - DNA, 50 bp, synthetic construct; identical to SEQ ID NO: 1962
  misc_feature 1..50: note = Probe
  source 1..50: mol_type = other DNA

SEQ ID NO: 26076 - DNA, 16 bp, synthetic construct
  misc_feature 1..16: note = Probe
  source 1..16: mol_type = other DNA
aaagctcacaagaact

SEQ ID NO: 26077 - DNA, 17 bp, synthetic construct
  misc_feature 1..17: note = Probe
  source 1..17: mol_type = other DNA
aaagctcacaagaactg

SEQ ID NO: 26078 - DNA, 27 bp, synthetic construct
  misc_feature 1..27: note = Probe
  source 1..27: mol_type = other DNA
aaagctcacaagaactgctaactcatg

SEQ ID NO: 26079 - DNA, 29 bp, synthetic construct
  misc_feature 1..29: note = Probe
  source 1..29: mol_type = other DNA
aaagctcacaagaactgctaactcatgcc

SEQ ID NO: 26080 - DNA, 30 bp, synthetic construct
  misc_feature 1..30: note = Probe
  source 1..30: mol_type = other DNA
aaagctcacaagaactgctaactcatgccc

SEQ ID NO: 26081 - DNA, 42 bp, synthetic construct
  misc_feature 1..42: note = Probe
  source 1..42: mol_type = other DNA
aaagctcacaagaactgctaactcatgcccccatgtctaaca

SEQ ID NO: 26082 - DNA, 24 bp, synthetic construct
  misc_feature 1..24: note = Probe
  source 1..24: mol_type = other DNA
aaaggataacagctatccattggt

SEQ ID NO: 26083 - DNA, 26 bp, synthetic construct
  misc_feature 1..26: note = Probe
  source 1..26: mol_type = other DNA
aaaggataacagctatccattggtct

SEQ ID NO: 26084 - DNA, 27 bp, synthetic construct
  misc_feature 1..27: note = Probe
  source 1..27: mol_type = other DNA
aaaggataacagctatccattggtctt

SEQ ID NO: 26085 - DNA, 28 bp, synthetic construct
  misc_feature 1..28: note = Probe
  source 1..28: mol_type = other DNA
aaaggataacagctatccattggtctta

SEQ ID NO: 26086 - DNA, 29 bp, synthetic construct
  misc_feature 1..29: note = Probe
  source 1..29: mol_type = other DNA
aaaggataacagctatccattggtcttag

SEQ ID NO: 26087 - DNA, 32 bp, synthetic construct
  misc_feature 1..32: note = Probe
  source 1..32: mol_type = other DNA
aaaggataacagctatccattggtcttaggcc

SEQ ID NO: 26088 - DNA, 33 bp, synthetic construct
  misc_feature 1..33: note = Probe
  source 1..33: mol_type = other DNA
aaaggataacagctatccattggtcttaggccc

SEQ ID NO: 26089 - DNA, 34 bp, synthetic construct
  misc_feature 1..34: note = Probe
  source 1..34: mol_type = other DNA
aaaggataacagctatccattggtcttaggcccc

SEQ ID NO: 26090 - DNA, 36 bp, synthetic construct
  misc_feature 1..36: note = Probe
  source 1..36: mol_type = other DNA
aaaggataacagctatccattggtcttaggccccaa

SEQ ID NO: 26091 - DNA, 18 bp, synthetic construct
  misc_feature 1..18: note = Probe
  source 1..18: mol_type = other DNA
aaaggattagactgaacc

SEQ ID NO: 26092 - DNA, 36 bp, synthetic construct
  misc_feature 1..36: note = Probe
  source 1..36: mol_type = other DNA
aaagggagggggatgtagctcagtggtagagcgcat

SEQ ID NO: 26093 - DNA, 30 bp, synthetic construct
  misc_feature 1..30: note = Probe
  source 1..30: mol_type = other DNA
aaagggtctttttcaccccgctgttgctct

SEQ ID NO: 26094 - DNA, 15 bp, synthetic construct
  misc_feature 1..15: note = Probe
  source 1..15: mol_type = other DNA
aaagtcatggaggcc

SEQ ID NO: 26095 - DNA, 23 bp, synthetic construct
  misc_feature 1..23: note = Probe
  source 1..23: mol_type = other DNA
aaagtcatggaggccatggggtt

SEQ ID NO: 26096 - DNA, 20 bp, synthetic construct
  misc_feature 1..20: note = Probe
  source 1..20: mol_type = other DNA
aaagtctttaactccaccat

SEQ ID NO: 26097 - DNA, 15 bp, synthetic construct
  misc_feature 1..15: note = Probe
  source 1..15: mol_type = other DNA
aaagtgcacttggac

SEQ ID NO: 26098 - DNA, 16 bp, synthetic construct
  misc_feature 1..16: note = Probe
  source 1..16: mol_type = other DNA
aaagtgcacttggacg

SEQ ID NO: 26099 - DNA, 20 bp, synthetic construct
  misc_feature 1..20: note = Probe
  source 1..20: mol_type = other DNA
aaagtgcacttggacgaacc

SEQ ID NO: 26100 - DNA, 15 bp, synthetic construct
  misc_feature 1..15: note = Probe
  source 1..15: mol_type = other DNA
aaagtggctgatttg

SEQ ID NO: 26101 - DNA, 16 bp, synthetic construct
  misc_feature 1..16: note = Probe
  source 1..16: mol_type = other DNA
aaagtggctgatttgc

SEQ ID NO: 26102 - DNA, 36 bp, synthetic construct; identical to SEQ ID NO: 14651
  misc_feature 1..36: note = Probe
  source 1..36: mol_type = other DNA

SEQ ID NO: 26103 - DNA, 18 bp, synthetic construct
  misc_feature 1..18: note = Probe
  source 1..18: mol_type = other DNA
aaagttaaattataggct

SEQ ID NO: 26104 - DNA, 16 bp, synthetic construct
  misc_feature 1..16: note = Probe
  source 1..16: mol_type = other DNA
aaataagctatcgggc

SEQ ID NO: 26105 - DNA, 17 bp, synthetic construct
  misc_feature 1..17: note = Probe
  source 1..17: mol_type = other DNA
aaataagctatcgggcc

SEQ ID NO: 26106 - DNA, 18 bp, synthetic construct
  misc_feature 1..18: note = Probe
  source 1..18: mol_type = other DNA
aaataagctatcgggccc

SEQ ID NO: 26107 - DNA, 19 bp, synthetic construct
  misc_feature 1..19: note = Probe
  source 1..19: mol_type = other DNA
aaataagctatcgggccca

SEQ ID NO: 26108 - DNA, 20 bp, synthetic construct
  misc_feature 1..20: note = Probe
  source 1..20: mol_type = other DNA
aaataagctatcgggcccat

SEQ ID NO: 26109 - DNA, 21 bp, synthetic construct
  misc_feature 1..21: note = Probe
  source 1..21: mol_type = other DNA
aaataagctatcgggcccata

SEQ ID NO: 26110 - DNA, 23 bp, synthetic construct
  misc_feature 1..23: note = Probe
  source 1..23: mol_type = other DNA
aaataagctatcgggcccatacc

SEQ ID NO: 26111 - DNA, 24 bp, synthetic construct
  misc_feature 1..24: note = Probe
  source 1..24: mol_type = other DNA
aaataagctatcgggcccataccc

SEQ ID NO: 26112 - DNA, 25 bp, synthetic construct
  misc_feature 1..25: note = Probe
  source 1..25: mol_type = other DNA
aaataagctatcgggcccatacccc

SEQ ID NO: 26113 - DNA, 27 bp, synthetic construct
  misc_feature 1..27: note = Probe
  source 1..27: mol_type = other DNA
aaataagctatcgggcccataccccga

SEQ ID NO: 26114 - DNA, 28 bp, synthetic construct
  misc_feature 1..28: note = Probe
  source 1..28: mol_type = other DNA
aaataagctatcgggcccataccccgaa

SEQ ID NO: 26115 - DNA, 29 bp, synthetic construct
  misc_feature 1..29: note = Probe
  source 1..29: mol_type = other DNA
aaataagctatcgggcccataccccgaaa

SEQ ID NO: 26116 - DNA, 33 bp, synthetic construct; identical to SEQ ID NO: 1985
  misc_feature 1..33: note = Probe
  source 1..33: mol_type = other DNA

SEQ ID NO: 26117 - DNA, 38 bp, synthetic construct; identical to SEQ ID NO: 14670
  misc_feature 1..38: note = Probe
  source 1..38: mol_type = other DNA

SEQ ID NO: 26118 - DNA, 20 bp, synthetic construct
  misc_feature 1..20: note = Probe
  source 1..20: mol_type = other DNA
aaataagggggtttaagctc

SEQ ID NO: 26119 - DNA, 15 bp, synthetic construct
  misc_feature 1..15: note = Probe
  source 1..15: mol_type = other DNA
aaataataggagctt

SEQ ID NO: 26120 - DNA, 20 bp, synthetic construct
  misc_feature 1..20: note = Probe
  source 1..20: mol_type = other DNA
aaataataggagcttaaacc

SEQ ID NO: 26121 - DNA, 22 bp, synthetic construct
  misc_feature 1..22: note = Probe
  source 1..22: mol_type = other DNA
aaataataggagcttaaacccc

SEQ ID NO: 26122 - DNA, 33 bp, synthetic construct
  misc_feature 1..33: note = Probe
  source 1..33: mol_type = other DNA
aaatacaacgatggtttttcatatcattggtcg

SEQ ID NO: 26123 - DNA, 35 bp, synthetic construct
  misc_feature 1..35: note = Probe
  source 1..35: mol_type = other DNA
aaatacaacgatggtttttcatatcattggtcgtg

SEQ ID NO: 26124 - DNA, 36 bp, synthetic construct
  misc_feature 1..36: note = Probe
  source 1..36: mol_type = other DNA
aaatacaacgatggtttttcatatcattggtcgtgg

SEQ ID NO: 26125 - DNA, 44 bp, synthetic construct
  misc_feature 1..44: note = Probe
  source 1..44: mol_type = other DNA
aaatacaacgatggtttttcatatcattggtcgtggttgtagtc

SEQ ID NO: 26126 - DNA, 45 bp, synthetic construct
  misc_feature 1..45: note = Probe
  source 1..45: mol_type = other DNA
aaatacaacgatggtttttcatatcattggtcgtggttgtagtcc

SEQ ID NO: 26127 - DNA, 50 bp, synthetic construct
  misc_feature 1..50: note = Probe
  source 1..50: mol_type = other DNA
aaatacaacgatggtttttcatatcattggtcgtggttgtagtccgtgcg

SEQ ID NO: 26128 - DNA, 19 bp, synthetic construct
  misc_feature 1..19: note = Probe
  source 1..19: mol_type = other DNA
aaatacagaccaagagcct

SEQ ID NO: 26129 - DNA, 27 bp, synthetic construct
  misc_feature 1..27: note = Probe
  source 1..27: mol_type = other DNA
aaatacagaccaagagccttcaaagcc

SEQ ID NO: 26130 - DNA, 17 bp, synthetic construct
  misc_feature 1..17: note = Probe
  source 1..17: mol_type = other DNA
aaatactaccgtatggc

SEQ ID NO: 26131 - DNA, 17 bp, synthetic construct
  misc_feature 1..17: note = Probe
  source 1..17: mol_type = other DNA
aaatactcaaatgggcc

SEQ ID NO: 26132 - DNA, 18 bp, synthetic construct
  misc_feature 1..18: note = Probe
  source 1..18: mol_type = other DNA
aaatactcaaatgggcct

SEQ ID NO: 26133 - DNA, 19 bp, synthetic construct
  misc_feature 1..19: note = Probe
  source 1..19: mol_type = other DNA
aaatactcaaatgggcctg

SEQ ID NO: 26134 - DNA, 16 bp, synthetic construct
  misc_feature 1..16: note = Probe
  source 1..16: mol_type = other DNA
aaatagtaccgttaac

SEQ ID NO: 26135 - DNA, 17 bp, synthetic construct
  misc_feature 1..17: note = Probe
  source 1..17: mol_type = other DNA
aaatagtaccgttaact

SEQ ID NO: 26136 - DNA, 19 bp, synthetic construct
  misc_feature 1..19: note = Probe
  source 1..19: mol_type = other DNA
aaatagtaccgttaacttc

SEQ ID NO: 26137 - DNA, 20 bp, synthetic construct
  misc_feature 1..20: note = Probe
  source 1..20: mol_type = other DNA
aaatagtaccgttaacttcc

SEQ ID NO: 26138 - DNA, 36 bp, synthetic construct
  misc_feature 1..36: note = Probe
  source 1..36: mol_type = other DNA
aaatagtaccgttaacttccaattaactagttttga

SEQ ID NO: 26139 - DNA, 15 bp, synthetic construct
  misc_feature 1..15: note = Probe
  source 1..15: mol_type = other DNA
aaatcccggacgagc

SEQ ID NO: 26140 - DNA, 16 bp, synthetic construct
  misc_feature 1..16: note = Probe
  source 1..16: mol_type = other DNA
aaatcccggacgagcc

SEQ ID NO: 26141 - DNA, 17 bp, synthetic construct
  misc_feature 1..17: note = Probe
  source 1..17: mol_type = other DNA
aaatcccggacgagccc

SEQ ID NO: 26142 - DNA, 19 bp, synthetic construct
  misc_feature 1..19: note = Probe
  source 1..19: mol_type = other DNA
aaatcccggacgagcccac

SEQ ID NO: 26143 - DNA, 20 bp, synthetic construct
  misc_feature 1..20: note = Probe
  source 1..20: mol_type = other DNA
aaatcccggacgagcccaca

SEQ ID NO: 26144 - DNA, 20 bp, synthetic construct
  misc_feature 1..20: note = Probe
  source 1..20: mol_type = other DNA
aaatcccggacgagcccact

SEQ ID NO: 26145 - DNA, 21 bp, synthetic construct
  misc_feature 1..21: note = Probe
  source 1..21: mol_type = other DNA
aaatcccggacgagcccactt

SEQ ID NO: 26146 - DNA, 22 bp, synthetic construct
  misc_feature 1..22: note = Probe
  source 1..22: mol_type = other DNA
aaatcccggacgagcccacttc

SEQ ID NO: 26147 - DNA, 23 bp, synthetic construct
  misc_feature 1..23: note = Probe
  source 1..23: mol_type = other DNA
aaatcccggacgagcccacttca

SEQ ID NO: 26148 - DNA, 24 bp, synthetic construct
  misc_feature 1..24: note = Probe
  source 1..24: mol_type = other DNA
aaatcccggacgagcccacttcat

SEQ ID NO: 26149 - DNA, 22 bp, synthetic construct
  misc_feature 1..22: note = Probe
  source 1..22: mol_type = other DNA
aaatcccggacgagcccacttt

SEQ ID NO: 26150 - DNA, 23 bp, synthetic construct
  misc_feature 1..23: note = Probe
  source 1..23: mol_type = other DNA
aaatcccggacgagcccactttt

SEQ ID NO: 26151 - DNA, 18 bp, synthetic construct
  misc_feature 1..18: note = Probe
  source 1..18: mol_type = other DNA
aaatcccggacgagcccc

SEQ ID NO: 26152 - DNA, 19 bp, synthetic construct
  misc_feature 1..19: note = Probe
  source 1..19: mol_type = other DNA
aaatcccggacgagccccc

SEQ ID NO: 26153 - DNA, 20 bp, synthetic construct
  misc_feature 1..20: note = Probe
  source 1..20: mol_type = other DNA
aaatcccggacgagccccct

SEQ ID NO: 26154 - DNA, 20 bp, synthetic construct
  misc_feature 1..20: note = Probe
  source 1..20: mol_type = other DNA
aaatcccggacgagccctca

SEQ ID NO: 26155 - DNA, 25 bp, synthetic construct
  misc_feature 1..25: note = Probe
  source 1..25: mol_type = other DNA
aaatctaaagacaggggttaggcct

SEQ ID NO: 26156 - DNA, 20 bp, synthetic construct
  misc_feature 1..20: note = Probe
  source 1..20: mol_type = other DNA
aaatctcggtggaacctgca

SEQ ID NO: 26157 - DNA, 24 bp, synthetic construct
  misc_feature 1..24: note = Probe
  source 1..24: mol_type = other DNA
aaatggctgagtgaagcattggac

SEQ ID NO: 26158 - DNA, 25 bp, synthetic construct
  misc_feature 1..25: note = Probe
  source 1..25: mol_type = other DNA
aaatggctgagtgaagcattggact

SEQ ID NO: 26159 - DNA, 28 bp, synthetic construct
  misc_feature 1..28: note = Probe
  source 1..28: mol_type = other DNA
aaatggctgagtgaagcattggactgta

SEQ ID NO: 26160 - DNA, 29 bp, synthetic construct
  misc_feature 1..29: note = Probe
  source 1..29: mol_type = other DNA
aaatggctgagtgaagcattggactgtaa

SEQ ID NO: 26161 - DNA, 30 bp, synthetic construct
  misc_feature 1..30: note = Probe
  source 1..30: mol_type = other DNA
aaatggctgagtgaagcattggactgtaaa

SEQ ID NO: 26162 - DNA, 36 bp, synthetic construct
  misc_feature 1..36: note = Probe
  source 1..36: mol_type = other DNA
aaatggctgagtgaagcattggactgtaaatctaaa

SEQ ID NO: 26163 - DNA, 18 bp, synthetic construct
  misc_feature 1..18: note = Probe
  source 1..18: mol_type = other DNA
aaatggtagagcgctcgc

SEQ ID NO: 26164 - DNA, 16 bp, synthetic construct
  misc_feature 1..16: note = Probe
  source 1..16: mol_type = other DNA
aaatgttggttatacc

SEQ ID NO: 26165 - DNA, 16 bp, synthetic construct
  misc_feature 1..16: note = Probe
  source 1..16: mol_type = other DNA
aaatgtttagacgggc

SEQ ID NO: 26166 - DNA, 21 bp, synthetic construct
  misc_feature 1..21: note = Probe
  source 1..21: mol_type = other DNA
aaatgtttagacgggctcaca

SEQ ID NO: 26167 - DNA, 23 bp, synthetic construct
  misc_feature 1..23: note = Probe
  source 1..23: mol_type = other DNA
aaatgtttagacgggctcacatc

SEQ ID NO: 26168 - DNA, 24 bp, synthetic construct
  misc_feature 1..24: note = Probe
  source 1..24: mol_type = other DNA
aaatgtttagacgggctcacatca

SEQ ID NO: 26169 - DNA, 25 bp, synthetic construct
  misc_feature 1..25: note = Probe
  source 1..25: mol_type = other DNA
aaatgtttagacgggctcacatcac

SEQ ID NO: 26170 - DNA, 27 bp, synthetic construct
  misc_feature 1..27: note = Probe
  source 1..27: mol_type = other DNA
aaatgtttagacgggctcacatcaccc

SEQ ID NO: 26171 - DNA, 28 bp, synthetic construct
  misc_feature 1..28: note = Probe
  source 1..28: mol_type = other DNA
aaatgtttagacgggctcacatcacccc

SEQ ID NO: 26172 - DNA, 29 bp, synthetic construct
  misc_feature 1..29: note = Probe
  source 1..29: mol_type = other DNA
aaatgtttagacgggctcacatcacccca

SEQ ID NO: 26173 - DNA, 31 bp, synthetic construct
  misc_feature 1..31: note = Probe
  source 1..31: mol_type = other DNA
aaatgtttagacgggctcacatcaccccata

SEQ ID NO: 26174 - DNA, 32 bp, synthetic construct
  misc_feature 1..32: note = Probe
  source 1..32: mol_type = other DNA
aaatgtttagacgggctcacatcaccccataa

SEQ ID NO: 26175 - DNA, 33 bp, synthetic construct
  misc_feature 1..33: note = Probe
  source 1..33: mol_type = other DNA
aaatgtttagacgggctcacatcaccccataaa

SEQ ID NO: 26176 - DNA, 21 bp, synthetic construct
  misc_feature 1..21: note = Probe
  source 1..21: mol_type = other DNA
aaattagaatcttagctttgg

SEQ ID NO: 26177 - DNA, 45 bp, synthetic construct
  misc_feature 1..45: note = Probe
  source 1..45: mol_type = other DNA
aaattagaatcttagctttgggtgctaatggtggagttaaagact

SEQ ID NO: 26178 - DNA, 50 bp, synthetic construct; identical to SEQ ID NO: 36
  misc_feature 1..50: note = Probe
  source 1..50: mol_type = other DNA

SEQ ID NO: 26179 - DNA, 36 bp, synthetic construct
  misc_feature 1..36: note = Probe
  source 1..36: mol_type = other DNA
aaattcgaagaagcagcttcaaacctgccggggctt

SEQ ID NO: 26180 - DNA, 17 bp, synthetic construct
  misc_feature 1..17: note = Probe
  source 1..17: mol_type = other DNA
aaattttggtgcaactc

SEQ ID NO: 26181 - DNA, 18 bp, synthetic construct
  misc_feature 1..18: note = Probe
  source 1..18: mol_type = other DNA
aaattttggtgcaactcc

SEQ ID NO: 26182 - DNA, 22 bp, synthetic construct
  misc_feature 1..22: note = Probe
  source 1..22: mol_type = other DNA
aacaaaacgaatgatttcgact

SEQ ID NO: 26183 - DNA, 23 bp, synthetic construct
  misc_feature 1..23: note = Probe
  source 1..23: mol_type = other DNA
aacaaaacgaatgatttcgactc

SEQ ID NO: 26184 - DNA, 24 bp, synthetic construct
  misc_feature 1..24: note = Probe
  source 1..24: mol_type = other DNA
aacaaaacgaatgatttcgactca

SEQ ID NO: 26185 - DNA, 36 bp, synthetic construct
  misc_feature 1..36: note = Probe
  source 1..36: mol_type = other DNA
aacaaaacgaatgatttcgactcattaaattatgat

SEQ ID NO: 26186 - DNA, 17 bp, synthetic construct
  misc_feature 1..17: note = Probe
  source 1..17: mol_type = other DNA
aacaacatggctttctc

SEQ ID NO: 26187 - DNA, 20 bp, synthetic construct
  misc_feature 1..20: note = Probe
  source 1..20: mol_type = other DNA
aacaacatggctttctcaac

SEQ ID NO: 26188 - DNA, 15 bp, synthetic construct
  misc_feature 1..15: note = Probe
  source 1..15: mol_type = other DNA
aacaagactgtgttt

SEQ ID NO: 26189 - DNA, 16 bp, synthetic construct
  misc_feature 1..16: note = Probe
  source 1..16: mol_type = other DNA
aacaagactgtgtttt

SEQ ID NO: 26190 - DNA, 24 bp, synthetic construct
  misc_feature 1..24: note = Probe
  source 1..24: mol_type = other DNA
aacacaaagcacccaacttacact

SEQ ID NO: 26191 - DNA, 26 bp, synthetic construct
  misc_feature 1..26: note = Probe
  source 1..26: mol_type = other DNA
aacacaaagcacccaacttacactta

SEQ ID NO: 26192 - DNA, 27 bp, synthetic construct
  misc_feature 1..27: note = Probe
  source 1..27: mol_type = other DNA
aacacaaagcacccaacttacacttag

SEQ ID NO: 26193 - DNA, 36 bp, synthetic construct; identical to SEQ ID NO: 2031
  misc_feature 1..36: note = Probe
  source 1..36: mol_type = other DNA

SEQ ID NO: 26194 - DNA, 50 bp, synthetic construct; identical to SEQ ID NO: 39
  misc_feature 1..50: note = Probe
  source 1..50: mol_type = other DNA

SEQ ID NO: 26195 - DNA, 19 bp, synthetic construct
  misc_feature 1..19: note = Probe
  source 1..19: mol_type = other DNA
aacacctctttacagtgaa

SEQ ID NO: 26196 - DNA, 16 bp, synthetic construct
  misc_feature 1..16: note = Probe
  source 1..16: mol_type = other DNA
aacagaggcttacgac

SEQ ID NO: 26197 - DNA, 17 bp, synthetic construct
  misc_feature 1..17: note = Probe
  source 1..17: mol_type = other DNA
aacagaggcttacgacc

SEQ ID NO: 26198 - DNA, 18 bp, synthetic construct
  misc_feature 1..18: note = Probe
  source 1..18: mol_type = other DNA
aacagaggcttacgaccc

SEQ ID NO: 26199 - DNA, 20 bp, synthetic construct
  misc_feature 1..20: note = Probe
  source 1..20: mol_type = other DNA
aacagccggctccatagctc

SEQ ID NO: 26200 - DNA, 23 bp, synthetic construct
  misc_feature 1..23: note = Probe
  source 1..23: mol_type = other DNA
aacagccggctccatagctcagg

SEQ ID NO: 26201 - DNA, 36 bp, synthetic construct
  misc_feature 1..36: note = Probe
  source 1..36: mol_type = other DNA
aacagccggctccatagctcaggggttagagcactg

SEQ ID NO: 26202 - DNA, 40 bp, synthetic construct
  misc_feature 1..40: note = Probe
  source 1..40: mol_type = other DNA
aacagccggctccatagctcaggggttagagcactggtct

SEQ ID NO: 26203 - DNA, 29 bp, synthetic construct
  misc_feature 1..29: note = Probe
  source 1..29: mol_type = other DNA
aacagcgccgctggtgtagtggtatcatg

SEQ ID NO: 26204 - DNA, 36 bp, synthetic construct; identical to SEQ ID NO: 14728
  misc_feature 1..36: note = Probe
  source 1..36: mol_type = other DNA

SEQ ID NO: 26205 - DNA, 15 bp, synthetic construct
  misc_feature 1..15: note = Probe
  source 1..15: mol_type = other DNA
aacagctaaggactg

SEQ ID NO: 26206 - DNA, 16 bp, synthetic construct
  misc_feature 1..16: note = Probe
  source 1..16: mol_type = other DNA
aacagctaaggactgc

SEQ ID NO: 26207 - DNA, 17 bp, synthetic construct
  misc_feature 1..17: note = Probe
  source 1..17: mol_type = other DNA
aacagctaaggactgca

SEQ ID NO: 26208 - DNA, 21 bp, synthetic construct
  misc_feature 1..21: note = Probe
  source 1..21: mol_type = other DNA
aacagctaaggactgcaaaac

SEQ ID NO: 26209 - DNA, 22 bp, synthetic construct
  misc_feature 1..22: note = Probe
  source 1..22: mol_type = other DNA
aacagctaaggactgcaaaacc

SEQ ID NO: 26210 - DNA, 23 bp, synthetic construct
  misc_feature 1..23: note = Probe
  source 1..23: mol_type = other DNA
aacagctaaggactgcaaaaccc

SEQ ID NO: 26211 - DNA, 24 bp, synthetic construct
  misc_feature 1..24: note = Probe
  source 1..24: mol_type = other DNA
aacagctaaggactgcaaaacccc

SEQ ID NO: 26212 - DNA, 25 bp, synthetic construct
  misc_feature 1..25: note = Probe
  source 1..25: mol_type = other DNA
aacagctaaggactgcaaaacccca

SEQ ID NO: 26213 - DNA, 26 bp, synthetic construct
  misc_feature 1..26: note = Probe
  source 1..26: mol_type = other DNA
aacagctaaggactgcaaaaccccac

SEQ ID NO: 26214 - DNA, 27 bp, synthetic construct
  misc_feature 1..27: note = Probe
  source 1..27: mol_type = other DNA
aacagctaaggactgcaaaaccccact

SEQ ID NO: 26215 - DNA, 28 bp, synthetic construct
  misc_feature 1..28: note = Probe
  source 1..28: mol_type = other DNA
aacagctaaggactgcaaaaccccactc

SEQ ID NO: 26216 - DNA, 29 bp, synthetic construct
  misc_feature 1..29: note = Probe
  source 1..29: mol_type = other DNA
aacagctaaggactgcaaaaccccactct

SEQ ID NO: 26217 - DNA, 17 bp, synthetic construct
  misc_feature 1..17: note = Probe
  source 1..17: mol_type = other DNA
aacagctatccattggt

SEQ ID NO: 26218 - DNA, 20 bp, synthetic construct
  misc_feature 1..20: note = Probe
  source 1..20: mol_type = other DNA
aacagctatccattggtctt

SEQ ID NO: 26219 - DNA, 21 bp, synthetic construct
  misc_feature 1..21: note = Probe
  source 1..21: mol_type = other DNA
aacagctatccattggtctta

SEQ ID NO: 26220 - DNA, 26 bp, synthetic construct
  misc_feature 1..26: note = Probe
  source 1..26: mol_type = other DNA
aacagctatccattggtcttaggccc

SEQ ID NO: 26221 - DNA, 27 bp, synthetic construct
  misc_feature 1..27: note = Probe
  source 1..27: mol_type = other DNA
aacagctatccattggtcttaggcccc

SEQ ID NO: 26222 - DNA, 28 bp, synthetic construct
  misc_feature 1..28: note = Probe
  source 1..28: mol_type = other DNA
aacagctatccattggtcttaggcccca

SEQ ID NO: 26223 - DNA, 36 bp, synthetic construct
  misc_feature 1..36: note = Probe
  source 1..36: mol_type = other DNA
aacagctatccattggtcttaggccccaaaaatttt

SEQ ID NO: 26224 - DNA, 36 bp, synthetic construct
  misc_feature 1..36: note = Probe
  source 1..36: mol_type = other DNA
aacagctggttccatgggttaatggtgagcaccctg

SEQ ID NO: 26225 - DNA, 15 bp, synthetic construct
  misc_feature 1..15: note = Probe
  source 1..15: mol_type = other DNA
aacagggtttgttaa

SEQ ID NO: 26226 - DNA, 31 bp, synthetic construct
  misc_feature 1..31: note = Probe
  source 1..31: mol_type = other DNA
aacatacccatggccaacctcctactcctca

SEQ ID NO: 26227 - DNA, 18 bp, synthetic construct
  misc_feature 1..18: note = Probe
  source 1..18: mol_type = other DNA
aacatcagattgtgaatc

SEQ ID NO: 26228 - DNA, 19 bp, synthetic construct
  misc_feature 1..19: note = Probe
  source 1..19: mol_type = other DNA
aacatcagattgtgaatct

SEQ ID NO: 26229 - DNA, 30 bp, synthetic construct; identical to SEQ ID NO: 8902
  misc_feature 1..30: note = Probe
  source 1..30: mol_type = other DNA

SEQ ID NO: 26230 - DNA, 31 bp, synthetic construct
  misc_feature 1..31: note = Probe
  source 1..31: mol_type = other DNA
aacatcagattgtgaatctgacaacagaggc

SEQ ID NO: 26231 - DNA, 32 bp, synthetic construct; identical to SEQ ID NO: 2054
  misc_feature 1..32: note = Probe
  source 1..32: mol_type = other DNA

SEQ ID NO: 26232 - DNA, 34 bp, synthetic construct
  misc_feature 1..34: note = Probe
  source 1..34: mol_type = other DNA
aacatcagattgtgaatctgacaacagaggctta

SEQ ID NO: 26233 - DNA, 41 bp, synthetic construct; identical to SEQ ID NO: 2056
  misc_feature 1..41: note = Probe
  source 1..41: mol_type = other DNA

SEQ ID NO: 26234 - DNA, 42 bp, synthetic construct; identical to SEQ ID NO: 2057
  misc_feature 1..42: note = Probe
  source 1..42: mol_type = other DNA

SEQ ID NO: 26235 - DNA, 43 bp, synthetic construct; identical to SEQ ID NO: 40
  misc_feature 1..43: note = Probe
  source 1..43: mol_type = other DNA

SEQ ID NO: 26236 - DNA, 44 bp, synthetic construct; identical to SEQ ID NO: 41
  misc_feature 1..44: note = Probe
  source 1..44: mol_type = other DNA

SEQ ID NO: 26237 - DNA, 17 bp, synthetic construct
  misc_feature 1..17: note = Probe
  source 1..17: mol_type = other DNA
aacatggctttctcaac

SEQ ID NO: 26238 - DNA, 19 bp, synthetic construct
  misc_feature 1..19: note = Probe
  source 1..19: mol_type = other DNA
aaccaaaacatcagattgt

SEQ ID NO: 26239 - DNA, 23 bp, synthetic construct
  misc_feature 1..23: note = Probe
  source 1..23: mol_type = other DNA
aaccaaaacatcagattgtgaat

SEQ ID NO: 26240 - DNA, 24 bp, synthetic construct
  misc_feature 1..24: note = Probe
  source 1..24: mol_type = other DNA
aaccaaaacatcagattgtgaatc

SEQ ID NO: 26241 - DNA, 25 bp, synthetic construct
  misc_feature 1..25: note = Probe
  source 1..25: mol_type = other DNA
aaccaaaacatcagattgtgaatct

SEQ ID NO: 26242 - DNA, 31 bp, synthetic construct; identical to SEQ ID NO: 2064
  misc_feature 1..31: note = Probe
  source 1..31: mol_type = other DNA

SEQ ID NO: 26243 - DNA, 32 bp, synthetic construct; identical to SEQ ID NO: 2065
  misc_feature 1..32: note = Probe
  source 1..32: mol_type = other DNA

SEQ ID NO: 26244 - DNA, 33 bp, synthetic construct; identical to SEQ ID NO: 2066
  misc_feature 1..33: note = Probe
  source 1..33: mol_type = other DNA

SEQ ID NO: 26245 - DNA, 34 bp, synthetic construct; identical to SEQ ID NO: 14767
  misc_feature 1..34: note = Probe
  source 1..34: mol_type = other DNA

SEQ ID NO: 26246 - DNA, 35 bp, synthetic construct; identical to SEQ ID NO: 14768
  misc_feature 1..35: note = Probe
  source 1..35: mol_type = other DNA

SEQ ID NO: 26247 - DNA, 36 bp, synthetic construct; identical to SEQ ID NO: 2067
  misc_feature 1..36: note = Probe
  source 1..36: mol_type = other DNA

SEQ ID NO: 26248 - DNA, 38 bp, synthetic construct; identical to SEQ ID NO: 2069
  misc_feature 1..38: note = Probe
  source 1..38: mol_type = other DNA

SEQ ID NO: 26249 - DNA, 39 bp, synthetic construct; identical to SEQ ID NO: 2070
  misc_feature 1..39: note = Probe
  source 1..39: mol_type = other DNA

SEQ ID NO: 26250 - DNA, 46 bp, synthetic construct; identical to SEQ ID NO: 45
  misc_feature 1..46: note = Probe
  source 1..46: mol_type = other DNA

SEQ ID NO: 26251 - DNA, 47 bp, synthetic construct; identical to SEQ ID NO: 2071
  misc_feature 1..47: note = Probe
  source 1..47: mol_type = other DNA

SEQ ID NO: 26252 - DNA, 23 bp, synthetic construct
  misc_feature 1..23: note = Probe
  source 1..23: mol_type = other DNA
aaccaacacctctttacagtgaa

SEQ ID NO: 26253 - DNA, 29 bp, synthetic construct
  misc_feature 1..29: note = Probe
  source 1..29: mol_type = other DNA
aaccagagtgtagcttaacacaaagcacc

SEQ ID NO: 26254 - DNA, 30 bp, synthetic construct
  misc_feature 1..30: note = Probe
  source 1..30: mol_type = other DNA
aaccagagtgtagcttaacacaaagcaccc

SEQ ID NO: 26255 - DNA, 31 bp, synthetic construct
  misc_feature 1..31: note = Probe
  source 1..31: mol_type = other DNA
aaccagagtgtagcttaacacaaagcaccca

SEQ ID NO: 26256 - DNA, 36 bp, synthetic construct
  misc_feature 1..36: note = Probe
  source 1..36: mol_type = other DNA
aaccagagtgtagcttaacacaaagcacccaactta

SEQ ID NO: 26257 - DNA, 28 bp, synthetic construct
  misc_feature 1..28: note = Probe
  source 1..28: mol_type = other DNA
aaccatgcacactactataaccacccta

SEQ ID NO: 26258 - DNA, 20 bp, synthetic construct
  misc_feature 1..20: note = Probe
  source 1..20: mol_type = other DNA
aacccagaggtcgatggatc

SEQ ID NO: 26259 - DNA, 21 bp, synthetic construct
  misc_feature 1..21: note = Probe
  source 1..21: mol_type = other DNA
aacccagaggtcgatggatcg

SEQ ID NO: 26260 - DNA, 22 bp, synthetic construct
  misc_feature 1..22: note = Probe
  source 1..22: mol_type = other DNA
aacccagaggtcgatggatcga

SEQ ID NO: 26261 - DNA, 15 bp, synthetic construct
  misc_feature 1..15: note = Probe
  source 1..15: mol_type = other DNA
aacccatccctgaga

SEQ ID NO: 26262 - DNA, 35 bp, synthetic construct
  misc_feature 1..35: note = Probe
  source 1..35: mol_type = other DNA
aacccccttatttctaggactatgagaatcgaacc

SEQ ID NO: 26263 - DNA, 36 bp, synthetic construct
  misc_feature 1..36: note = Probe
  source 1..36: mol_type = other DNA
aacccccttatttctaggactatgagaatcgaaccc

SEQ ID NO: 26264 - DNA, 36 bp, synthetic construct
  misc_feature 1..36: note = Probe
  source 1..36: mol_type = other DNA
aacccgggaccacgtggcctaatggataaggcgtct

SEQ ID NO: 26265 - DNA, 36 bp, synthetic construct
  misc_feature 1..36: note = Probe
  source 1..36: mol_type = other DNA
aaccgaaaggttggtggttcgagcccacccagggac

SEQ ID NO: 26266 - DNA, 36 bp, synthetic construct
  misc_feature 1..36: note = Probe
  source 1..36: mol_type = other DNA
aaccgacgggccgcgtggcctaatggataaggcgtc

SEQ ID NO: 26267 - DNA, 39 bp, synthetic construct
  misc_feature 1..39: note = Probe
  source 1..39: mol_type = other DNA
aaccgacgggccgcgtggcctaatggataaggcgtctga

SEQ ID NO: 26268 - DNA, 15 bp, synthetic construct
  misc_feature 1..15: note = Probe
  source 1..15: mol_type = other DNA
aaccgagcgtccaag

SEQ ID NO: 26269 - DNA, 16 bp, synthetic construct
  misc_feature 1..16: note = Probe
  source 1..16: mol_type = other DNA
aaccgagcgtccaagc

SEQ ID NO: 26270 - DNA, 17 bp, synthetic construct
  misc_feature 1..17: note = Probe
  source 1..17: mol_type = other DNA
aaccgagcgtccaagct

SEQ ID NO: 26271 - DNA, 18 bp, synthetic construct
  misc_feature 1..18: note = Probe
  source 1..18: mol_type = other DNA
aaccgagcgtccaagctc

SEQ ID NO: 26272 - DNA, 24 bp, synthetic construct
  misc_feature 1..24: note = Probe
  source 1..24: mol_type = other DNA
aaccgagcgtccaagctctttcca

SEQ ID NO: 26273 - DNA, 25 bp, synthetic construct
  misc_feature 1..25: note = Probe
  source 1..25: mol_type = other DNA
aaccgagcgtccaagctctttccat

SEQ ID NO: 26274 - DNA, 26 bp, synthetic construct
  misc_feature 1..26: note = Probe
  source 1..26: mol_type = other DNA
aaccgagcgtccaagctctttccatt

SEQ ID NO: 26275 - DNA, 27 bp, synthetic construct
  misc_feature 1..27: note = Probe
  source 1..27: mol_type = other DNA
aaccgagcgtccaagctctttccattt

SEQ ID NO: 26276 - DNA, 28 bp, synthetic construct
  misc_feature 1..28: note = Probe
  source 1..28: mol_type = other DNA
aaccgagcgtccaagctctttccatttt

SEQ ID NO: 26277 - DNA, 29 bp, synthetic construct
  misc_feature 1..29: note = Probe
  source 1..29: mol_type = other DNA
aaccgagcgtccaagctctttccattttt

SEQ ID NO: 26278 - DNA, 16 bp, synthetic construct
  misc_feature 1..16: note = Probe
  source 1..16: mol_type = other DNA
aaccggagatgaaaac

SEQ ID NO: 26279 - DNA, 17 bp, synthetic construct
  misc_feature 1..17: note = Probe
  source 1..17: mol_type = other DNA
aaccggagatgaaaacc

SEQ ID NO: 26280 - DNA, 18 bp, synthetic construct
  misc_feature 1..18: note = Probe
  source 1..18: mol_type = other DNA
aaccggagatgaaaacct

SEQ ID NO: 26281 - DNA, 17 bp, synthetic construct
  misc_feature 1..17: note = Probe
  source 1..17: mol_type = other DNA
aaccgggcagaagcaac

SEQ ID NO: 26282 - DNA, 15 bp, synthetic construct
  misc_feature 1..15: note = Probe
  source 1..15: mol_type = other DNA
aaccgggcggaaaca

SEQ ID NO: 26283 - DNA, 18 bp, synthetic construct
  misc_feature 1..18: note = Probe
  source 1..18: mol_type = other DNA
aaccgggcggaaacaaga

SEQ ID NO: 26284 - DNA, 17 bp, synthetic construct
  misc_feature 1..17: note = Probe
  source 1..17: mol_type = other DNA
aaccgggcggaaacaca

SEQ ID NO: 26285 - DNA, 18 bp, synthetic construct
  misc_feature 1..18: note = Probe
  source 1..18: mol_type = other DNA
aaccgggcggaaacacac

SEQ ID NO: 26286 - DNA, 27 bp, synthetic construct
  misc_feature 1..27: note = Probe
  source 1..27: mol_type = other DNA
aaccgggcggaaacacactaaaaaatc

SEQ ID NO: 26287 - DNA, 30 bp, synthetic construct
  misc_feature 1..30: note = Probe
  source 1..30: mol_type = other DNA
aaccgggcggaaacacactaaaaaatccct

SEQ ID NO: 26288 - DNA, 18 bp, synthetic construct
  misc_feature 1..18: note = Probe
  source 1..18: mol_type = other DNA
aaccgggcggaaacacct

SEQ ID NO: 26289 - DNA, 17 bp, synthetic construct
  misc_feature 1..17: note = Probe
  source 1..17: mol_type = other DNA
aaccgggcggaaacacg

SEQ ID NO: 26290 - DNA, 18 bp, synthetic construct
  misc_feature 1..18: note = Probe
  source 1..18: mol_type = other DNA
aaccgggcggaaacacgt

SEQ ID NO: 26291 - DNA, 20 bp, synthetic construct
  misc_feature 1..20: note = Probe
  source 1..20: mol_type = other DNA
aaccgggcggaaacacgttt

SEQ ID NO: 26292 - DNA, 18 bp, synthetic construct
  misc_feature 1..18: note = Probe
  source 1..18: mol_type = other DNA
aaccgggcggaaacagaa

SEQ ID NO: 26293 - DNA, 17 bp, synthetic construct
  misc_feature 1..17: note = Probe
  source 1..17: mol_type = other DNA
aaccgggcggaaacagt

SEQ ID NO: 26294 - DNA, 18 bp, synthetic construct
  misc_feature 1..18: note = Probe
  source 1..18: mol_type = other DNA
aaccgggcggaaacataa

SEQ ID NO: 26295 - DNA, 25 bp, synthetic construct
  misc_feature 1..25: note = Probe
  source 1..25: mol_type = other DNA
aaccgttggtttccgtagtgtagtg

SEQ ID NO: 26296 - DNA, 36 bp, synthetic construct
  misc_feature 1..36: note = Probe
  source 1..36: mol_type = other DNA
aaccgttggtttccgtagtgtagtggttatcacgtt

SEQ ID NO: 26297 - DNA, 41 bp, synthetic construct
  misc_feature 1..41: note = Probe
  source 1..41: mol_type = other DNA
aaccgttggtttccgtagtgtagtggttatcacgttcgcct

SEQ ID NO: 26298 - DNA, 25 bp, synthetic construct
  misc_feature 1..25: note = Probe
  source 1..25: mol_type = other DNA
aacctagccccaaacccactccacc

SEQ ID NO: 26299 - DNA, 26 bp, synthetic construct
  misc_feature 1..26: note = Probe
  source 1..26: mol_type = other DNA
aacctagccccaaacccactccacct

SEQ ID NO: 26300 - DNA, 16 bp, synthetic construct
  misc_feature 1..16: note = Probe
  source 1..16: mol_type = other DNA
aacctcctactcctca

SEQ ID NO: 26301 - DNA, 23 bp, synthetic construct
  misc_feature 1..23: note = Probe
  source 1..23: mol_type = other DNA
aaccttcagctatagggtggaga

SEQ ID NO: 26302 - DNA, 29 bp, synthetic construct
  misc_feature 1..29: note = Probe
  source 1..29: mol_type = other DNA
aaccttttaagttaaagattaagagaacc

SEQ ID NO: 26303 - DNA, 35 bp, synthetic construct
  misc_feature 1..35: note = Probe
  source 1..35: mol_type = other DNA
aaccttttaagttaaagattaagagaaccaacacc

SEQ ID NO: 26304 - DNA, 36 bp, synthetic construct
  misc_feature 1..36: note = Probe
  source 1..36: mol_type = other DNA
aaccttttaagttaaagattaagagaaccaacacct

SEQ ID NO: 26305 - DNA, 17 bp, synthetic construct
  misc_feature 1..17: note = Probe
  source 1..17: mol_type = other DNA
aacgaatgatttcgact

SEQ ID NO: 26306 - DNA, 18 bp, synthetic construct
  misc_feature 1..18: note = Probe
  source 1..18: mol_type = other DNA
aacgaatgatttcgactc

SEQ ID NO: 26307 - DNA, 19 bp, synthetic construct
  misc_feature 1..19: note = Probe
  source 1..19: mol_type = other DNA
aacgaatgatttcgactca

SEQ ID NO: 26308 - DNA, 20 bp, synthetic construct
  misc_feature 1..20: note = Probe
  source 1..20: mol_type = other DNA
aacgaatgatttcgactcat

SEQ ID NO: 26309 - DNA, 36 bp, synthetic construct
  misc_feature 1..36: note = Probe
  source 1..36: mol_type = other DNA
aacgaatgatttcgactcattaaattatgataatca

SEQ ID NO: 26310 - DNA, 36 bp, synthetic construct
  misc_feature 1..36: note = Probe
  source 1..36: mol_type = other DNA
aacgactcctcgttagtatagtggttagtatccccg

SEQ ID NO: 26311 - DNA, 32 bp, synthetic construct
  misc_feature 1..32: note = Probe
  source 1..32: mol_type = other DNA
aacgatggtttttcatatcattggtcgtggtt

SEQ ID NO: 26312 - DNA, 33 bp, synthetic construct
  misc_feature 1..33: note = Probe
  source 1..33: mol_type = other DNA
aacgatggtttttcatatcattggtcgtggttg

SEQ ID NO: 26313 - DNA, 34 bp, synthetic construct
  misc_feature 1..34: note = Probe
  source 1..34: mol_type = other DNA
aacgatggtttttcatatcattggtcgtggttgt

SEQ ID NO: 26314 - DNA, 35 bp, synthetic construct
  misc_feature 1..35: note = Probe
  source 1..35: mol_type = other DNA
aacgatggtttttcatatcattggtcgtggttgta

SEQ ID NO: 26315 - DNA, 36 bp, synthetic construct
  misc_feature 1..36: note = Probe
  source 1..36: mol_type = other DNA
aacgatggtttttcatatcattggtcgtggttgtag

SEQ ID NO: 26316 - DNA, 38 bp, synthetic construct
  misc_feature 1..38: note = Probe
  source 1..38: mol_type = other DNA
aacgatggtttttcatatcattggtcgtggttgtagtc

SEQ ID NO: 26317 - DNA, 39 bp, synthetic construct
  misc_feature 1..39: note = Probe
  source 1..39: mol_type = other DNA
aacgatggtttttcatatcattggtcgtggttgtagtcc

SEQ ID NO: 26318 - DNA, 40 bp, synthetic construct
  misc_feature 1..40: note = Probe
  source 1..40: mol_type = other DNA
aacgatggtttttcatatcattggtcgtggttgtagtccg

SEQ ID NO: 26319 - DNA, 50 bp, synthetic construct
  misc_feature 1..50: note = Probe
  source 1..50: mol_type = other DNA
aacgatggtttttcatatcattggtcgtggttgtagtccgtgcgagaata

SEQ ID NO: 26320 - DNA, 36 bp, synthetic construct
  misc_feature 1..36: note = Probe
  source 1..36: mol_type = other DNA
aacgcaggcgcggtggccaagtggtaaggcgtcggt

SEQ ID NO: 26321 - DNA, 36 bp, synthetic construct
  misc_feature 1..36: note = Probe
  source 1..36: mol_type = other DNA
aacggctgccgaaatagctcagttgggagagcgtta

SEQ ID NO: 26322 - DNA, 19 bp, synthetic construct
  misc_feature 1..19: note = Probe
  source 1..19: mol_type = other DNA
aacggtagcgcgtctgact

SEQ ID NO: 26323 - DNA, 21 bp, synthetic construct
  misc_feature 1..21: note = Probe
  source 1..21: mol_type = other DNA
aactaaatactaccgtatggc

SEQ ID NO: 26324 - DNA, 17 bp, synthetic construct
  misc_feature 1..17: note = Probe
  source 1..17: mol_type = other DNA
aactaagtgtttgtggg

SEQ ID NO: 26325 - DNA, 18 bp, synthetic construct
  misc_feature 1..18: note = Probe
  source 1..18: mol_type = other DNA
aactaagtgtttgtgggt

SEQ ID NO: 26326 - DNA, 19 bp, synthetic construct
  misc_feature 1..19: note = Probe
  source 1..19: mol_type = other DNA
aactaagtgtttgtgggtt

SEQ ID NO: 26327 - DNA, 20 bp, synthetic construct
  misc_feature 1..20: note = Probe
  source 1..20: mol_type = other DNA
aactaagtgtttgtgggttt

SEQ ID NO: 26328 - DNA, 25 bp, synthetic construct
  misc_feature 1..25: note = Probe
  source 1..25: mol_type = other DNA
aactaagtgtttgtgggtttaagtc

SEQ ID NO: 26329 - DNA, 26 bp, synthetic construct
  misc_feature 1..26: note = Probe
  source 1..26: mol_type = other DNA
aactaagtgtttgtgggtttaagtcc

SEQ ID NO: 26330 - DNA, 27 bp, synthetic construct
  misc_feature 1..27: note = Probe
  source 1..27: mol_type = other DNA
aactaagtgtttgtgggtttaagtccc

SEQ ID NO: 26331 - DNA, 40 bp, synthetic construct; identical to SEQ ID NO: 2131
  misc_feature 1..40: note = Probe
  source 1..40: mol_type = other DNA

SEQ ID NO: 26332 - DNA, 36 bp, synthetic construct
  misc_feature 1..36: note = Probe
  source 1..36: mol_type = other DNA
aactagacagccggctcgttggtctaggggtatgat

SEQ ID NO: 26333 - DNA, 16 bp, synthetic construct
  misc_feature 1..16: note = Probe
  source 1..16: mol_type = other DNA
aactagttttgacaac

SEQ ID NO: 26334 - DNA, 18 bp, synthetic construct
  misc_feature 1..18: note = Probe
  source 1..18: mol_type = other DNA
aactcatgcccccatgtc

SEQ ID NO: 26335 - DNA, 19 bp, synthetic construct
  misc_feature 1..19: note = Probe
  source 1..19: mol_type = other DNA
aactcatgcccccatgtct

SEQ ID NO: 26336 - DNA, 22 bp, synthetic construct
  misc_feature 1..22: note = Probe
  source 1..22: mol_type = other DNA
aactcatgcccccatgtctaac

SEQ ID NO: 26337 - DNA, 23 bp, synthetic construct
  misc_feature 1..23: note = Probe
  source 1..23: mol_type = other DNA
aactcatgcccccatgtctaaca

SEQ ID NO: 26338 - DNA, 26 bp, synthetic construct
  misc_feature 1..26: note = Probe
  source 1..26: mol_type = other DNA
aactcatgcccccatgtctaacaaca

SEQ ID NO: 26339 - DNA, 31 bp, synthetic construct; identical to SEQ ID NO: 2140
  misc_feature 1..31: note = Probe
  source 1..31: mol_type = other DNA

SEQ ID NO: 26340 - DNA, 36 bp, synthetic construct; identical to SEQ ID NO: 2145
  misc_feature 1..36: note = Probe
  source 1..36: mol_type = other DNA

SEQ ID NO: 26341 - DNA, 39 bp, synthetic construct; identical to SEQ ID NO: 2148
  misc_feature 1..39: note = Probe
  source 1..39: mol_type = other DNA

SEQ ID NO: 26342 - DNA, 40 bp, synthetic construct; identical to SEQ ID NO: 2149
  misc_feature 1..40: note = Probe
  source 1..40: mol_type = other DNA

SEQ ID NO: 26343 - DNA, 36 bp, synthetic construct; identical to SEQ ID NO: 14879
  misc_feature 1..36: note = Probe
  source 1..36: mol_type = other DNA

SEQ ID NO: 26344 - DNA, 37 bp, synthetic construct; identical to SEQ ID NO: 2152
  misc_feature 1..37: note = Probe
  source 1..37: mol_type = other DNA

SEQ ID NO: 26345 - DNA, 38 bp, synthetic construct
  misc_feature 1..38: note = Probe
  source 1..38: mol_type = other DNA
aactgcccggctagctcagtcggtagagcatgggactc

SEQ ID NO: 26346 - DNA, 15 bp, synthetic construct
  misc_feature 1..15: note = Probe
  source 1..15: mol_type = other DNA
aactgctaactcatg

SEQ ID NO: 26347 - DNA, 17 bp, synthetic construct
  misc_feature 1..17: note = Probe
  source 1..17: mol_type = other DNA
aactgctaactcatgcc

SEQ ID NO: 26348 - DNA, 18 bp, synthetic construct
  misc_feature 1..18: note = Probe
  source 1..18: mol_type = other DNA
aactgctaactcatgccc

SEQ ID NO: 26349 - DNA, 19 bp, synthetic construct
  misc_feature 1..19: note = Probe
  source 1..19: mol_type = other DNA
aactgctaactcatgcccc

SEQ ID NO: 26350 - DNA, 20 bp, synthetic construct
  misc_feature 1..20: note = Probe
  source 1..20: mol_type = other DNA
aactgctaactcatgccccc

SEQ ID NO: 26351 - DNA, 21 bp, synthetic construct
  misc_feature 1..21: note = Probe
  source 1..21: mol_type = other DNA
aactgctaactcatgccccca

SEQ ID NO: 26352 - DNA, 23 bp, synthetic construct
  misc_feature 1..23: note = Probe
  source 1..23: mol_type = other DNA
aactgctaactcatgcccccatg

SEQ ID NO: 26353 - DNA, 25 bp, synthetic construct
  misc_feature 1..25: note = Probe
  source 1..25: mol_type = other DNA
aactgctaactcatgcccccatgtc

SEQ ID NO: 26354 - DNA, 26 bp, synthetic construct
  misc_feature 1..26: note = Probe
  source 1..26: mol_type = other DNA
aactgctaactcatgcccccatgtct

SEQ ID NO: 26355 - DNA, 28 bp, synthetic construct
  misc_feature 1..28: note = Probe
  source 1..28: mol_type = other DNA
aactgctaactcatgcccccatgtctaa

SEQ ID NO: 26356 - DNA, 29 bp, synthetic construct
  misc_feature 1..29: note = Probe
  source 1..29: mol_type = other DNA
aactgctaactcatgcccccatgtctaac

SEQ ID NO: 26357 - DNA, 30 bp, synthetic construct; identical to SEQ ID NO: 14885
  misc_feature 1..30: note = Probe
  source 1..30: mol_type = other DNA

SEQ ID NO: 26358 - DNA, 32 bp, synthetic construct
  misc_feature 1..32: note = Probe
  source 1..32: mol_type = other DNA
aactgctaactcatgcccccatgtctaacaac

SEQ ID NO: 26359 - DNA, 33 bp, synthetic construct; identical to SEQ ID NO: 14887
  misc_feature 1..33: note = Probe
  source 1..33: mol_type = other DNA

SEQ ID NO: 26360 - DNA, 34 bp, synthetic construct
  misc_feature 1..34: note = Probe
  source 1..34: mol_type = other DNA
aactgctaactcatgcccccatgtctaacaacat

SEQ ID NO: 26361 - DNA, 35 bp, synthetic construct
  misc_feature 1..35: note = Probe
  source 1..35: mol_type = other DNA
aactgctaactcatgcccccatgtctaacaacatg

SEQ ID NO: 26362 - DNA, 36 bp, synthetic construct
  misc_feature 1..36: note = Probe
  source 1..36: mol_type = other DNA
aactgctaactcatgcccccatgtctaacaacatgg

SEQ ID NO: 26363 - DNA, 38 bp, synthetic construct; identical to SEQ ID NO: 2157
  misc_feature 1..38: note = Probe
  source 1..38: mol_type = other DNA

SEQ ID NO: 26364 - DNA, 46 bp, synthetic construct; identical to SEQ ID NO: 2165
  misc_feature 1..46: note = Probe
  source 1..46: mol_type = other DNA

SEQ ID NO: 26365 - DNA, 47 bp, synthetic construct
  misc_feature 1..47: note = Probe
  source 1..47: mol_type = other DNA
aactgctaactcatgcccccatgtctaacaacatggctttctcaact

SEQ ID NO: 26366 - DNA, 20 bp, synthetic construct
  misc_feature 1..20: note = Probe
  source 1..20: mol_type = other DNA
aactgggtctctgtggcgca

SEQ ID NO: 26367 - DNA, 32 bp, synthetic construct
  misc_feature 1..32: note = Probe
  source 1..32: mol_type = other DNA
aactgggtctctgtggcgcaatcggttagcgc

SEQ ID NO: 26368 - DNA, 33 bp, synthetic construct
  misc_feature 1..33: note = Probe
  source 1..33: mol_type = other DNA
aactgggtctctgtggcgcaatcggttagcgcg

SEQ ID NO: 26369 - DNA, 36 bp, synthetic construct
  misc_feature 1..36: note = Probe
  source 1..36: mol_type = other DNA
aactgggtctctgtggcgcaatcggttagcgcgttc

SEQ ID NO: 26370 - DNA, 36 bp, synthetic construct
  misc_feature 1..36: note = Probe
  source 1..36: mol_type = other DNA
aacttaaaactttacagtcagaggttcaattcctct

SEQ ID NO: 26371 - DNA, 38 bp, synthetic construct; identical to SEQ ID NO: 61
  misc_feature 1..38: note = Probe
  source 1..38: mol_type = other DNA

SEQ ID NO: 26372 - DNA, 15 bp, synthetic construct
  misc_feature 1..15: note = Probe
  source 1..15: mol_type = other DNA
aacttaacttgaccg

SEQ ID NO: 26373 - DNA, 17 bp, synthetic construct
  misc_feature 1..17: note = Probe
  source 1..17: mol_type = other DNA
aacttaacttgaccgct

SEQ ID NO: 26374 - DNA, 18 bp, synthetic construct
  misc_feature 1..18: note = Probe
  source 1..18: mol_type = other DNA
aacttaacttgaccgctc

SEQ ID NO: 26375 - DNA, 19 bp, synthetic construct
  misc_feature 1..19: note = Probe
  source 1..19: mol_type = other DNA
aacttaacttgaccgctct

SEQ ID NO: 26376 - DNA, 20 bp, synthetic construct
  misc_feature 1..20: note = Probe
  source 1..20: mol_type = other DNA
aacttaacttgaccgctctg

SEQ ID NO: 26377 - DNA, 21 bp, synthetic construct
  misc_feature 1..21: note = Probe
  source 1..21: mol_type = other DNA
aacttaacttgaccgctctga

SEQ ID NO: 26378 - DNA, 22 bp, synthetic construct
  misc_feature 1..22: note = Probe
  source 1..22: mol_type = other DNA
aacttaacttgaccgctctgag

SEQ ID NO: 26379 - DNA, 23 bp, synthetic construct
  misc_feature 1..23: note = Probe
  source 1..23: mol_type = other DNA
aacttaacttgaccgctctgagc

SEQ ID NO: 26380 - DNA, 24 bp, synthetic construct
  misc_feature 1..24: note = Probe
  source 1..24: mol_type = other DNA
aacttaacttgaccgctctgagct

SEQ ID NO: 26381 - DNA, 29 bp, synthetic construct
  misc_feature 1..29: note = Probe
  source 1..29: mol_type = other DNA
aacttaacttgaccgctctgagctaaacc

SEQ ID NO: 26382 - DNA, 30 bp, synthetic construct
  misc_feature 1..30: note = Probe
  source 1..30: mol_type = other DNA
aacttaacttgaccgctctgagctaaacct

SEQ ID NO: 26383 - DNA, 36 bp, synthetic construct
  misc_feature 1..36: note = Probe
  source 1..36: mol_type = other DNA
aacttaacttgaccgctctgagctaaacctagcccc

SEQ ID NO: 26384 - DNA, 16 bp, synthetic construct
  misc_feature 1..16: note = Probe
  source 1..16: mol_type = other DNA
aacttacacttaggag

SEQ ID NO: 26385 - DNA, 21 bp, synthetic construct
  misc_feature 1..21: note = Probe
  source 1..21: mol_type = other DNA
aacttacacttaggagatttc

SEQ ID NO: 26386 - DNA, 22 bp, synthetic construct
  misc_feature 1..22: note = Probe
  source 1..22: mol_type = other DNA
aacttacacttaggagatttca

SEQ ID NO: 26387 - DNA, 24 bp, synthetic construct
  misc_feature 1..24: note = Probe
  source 1..24: mol_type = other DNA
aacttacacttaggagatttcaac

SEQ ID NO: 26388 - DNA, 25 bp, synthetic construct
  misc_feature 1..25: note = Probe
  source 1..25: mol_type = other DNA
aacttacacttaggagatttcaact

SEQ ID NO: 26389 - DNA, 26 bp, synthetic construct
  misc_feature 1..26: note = Probe
  source 1..26: mol_type = other DNA
aacttacacttaggagatttcaactt

SEQ ID NO: 26390 - DNA, 27 bp, synthetic construct
  misc_feature 1..27: note = Probe
  source 1..27: mol_type = other DNA
aacttacacttaggagatttcaactta

SEQ ID NO: 26391 - DNA, 30 bp, synthetic construct; identical to SEQ ID NO: 14931
  misc_feature 1..30: note = Probe
  source 1..30: mol_type = other DNA

SEQ ID NO: 26392 - DNA, 31 bp, synthetic construct; identical to SEQ ID NO: 14932
  misc_feature 1..31: note = Probe
  source 1..31: mol_type = other DNA

SEQ ID NO: 26393 - DNA, 35 bp, synthetic construct; identical to SEQ ID NO: 14934
  misc_feature 1..35: note = Probe
  source 1..35: mol_type = other DNA

SEQ ID NO: 26394 - DNA, 36 bp, synthetic construct; identical to SEQ ID NO: 2188
  misc_feature 1..36: note = Probe
  source 1..36: mol_type = other DNA

SEQ ID NO: 26395 - DNA, 38 bp, synthetic construct; identical to SEQ ID NO: 2190
  misc_feature 1..38: note = Probe
  source 1..38: mol_type = other DNA

SEQ ID NO: 26396 - DNA, 39 bp, synthetic construct; identical to SEQ ID NO: 2191
  misc_feature 1..39: note = Probe
  source 1..39: mol_type = other DNA

SEQ ID NO: 26397 - DNA, 40 bp, synthetic construct; identical to SEQ ID NO: 14939
  misc_feature 1..40: note = Probe
  source 1..40: mol_type = other DNA

SEQ ID NO: 26398 - DNA, 43 bp, synthetic construct; identical to SEQ ID NO: 2193
  misc_feature 1..43: note = Probe
  source 1..43: mol_type = other DNA

SEQ ID NO: 26399 - DNA, 44 bp, synthetic construct; identical to SEQ ID NO: 2194
  misc_feature 1..44: note = Probe
  source 1..44: mol_type = other DNA

SEQ ID NO: 26400 - DNA, 45 bp, synthetic construct; identical to SEQ ID NO: 2195
  misc_feature 1..45: note = Probe
  source 1..45: mol_type = other DNA

SEQ ID NO: 26401 - DNA, 50 bp, synthetic construct; identical to SEQ ID NO: 2197
  misc_feature 1..50: note = Probe
  source 1..50: mol_type = other DNA

SEQ ID NO: 26402 - DNA, 40 bp, synthetic construct; identical to SEQ ID NO: 12486
  misc_feature 1..40: note = Probe
  source 1..40: mol_type = other DNA

SEQ ID NO: 26403 - DNA, 47 bp, synthetic construct
  misc_feature 1..47: note = Probe
  source 1..47: mol_type = other DNA
aacttagcattaaccttttaagttaaagattaagagaaccaacacct

SEQ ID NO: 26404 - DNA, 24 bp, synthetic construct
  misc_feature 1..24: note = Probe
  source 1..24: mol_type = other DNA
aacttccaattaactagttttgac

SEQ ID NO: 26405 - DNA, 27 bp, synthetic construct
  misc_feature 1..27: note = Probe
  source 1..27: mol_type = other DNA
aacttcgccttaattttaataatcaac

SEQ ID NO: 26406 - DNA, 15 bp, synthetic construct
  misc_feature 1..15: note = Probe
  source 1..15: mol_type = other DNA
aacttgaccgctctg

SEQ ID NO: 26407 - DNA, 16 bp, synthetic construct
  misc_feature 1..16: note = Probe
  source 1..16: mol_type = other DNA
aacttgaccgctctga

SEQ ID NO: 26408 - DNA, 17 bp, synthetic construct
  misc_feature 1..17: note = Probe
  source 1..17: mol_type = other DNA
aacttgaccgctctgag

SEQ ID NO: 26409 - DNA, 18 bp, synthetic construct
  misc_feature 1..18: note = Probe
  source 1..18: mol_type = other DNA
aacttgaccgctctgagc

SEQ ID NO: 26410 - DNA, 19 bp, synthetic construct
  misc_feature 1..19: note = Probe
  source 1..19: mol_type = other DNA
aacttgaccgctctgagct

SEQ ID NO: 26411 - DNA, 24 bp, synthetic construct
  misc_feature 1..24: note = Probe
  source 1..24: mol_type = other DNA
aacttgaccgctctgagctaaacc

SEQ ID NO: 26412 - DNA, 25 bp, synthetic construct
  misc_feature 1..25: note = Probe
  source 1..25: mol_type = other DNA
aacttgaccgctctgagctaaacct

SEQ ID NO: 26413 - DNA, 29 bp, synthetic construct
  misc_feature 1..29: note = Probe
  source 1..29: mol_type = other DNA
aacttgaccgctctgagctaaacctagcc

SEQ ID NO: 26414 - DNA, 30 bp, synthetic construct
  misc_feature 1..30: note = Probe
  source 1..30: mol_type = other DNA
aacttgaccgctctgagctaaacctagccc

SEQ ID NO: 26415 - DNA, 31 bp, synthetic construct
  misc_feature 1..31: note = Probe
  source 1..31: mol_type = other DNA
aacttgaccgctctgagctaaacctagcccc

SEQ ID NO: 26416 - DNA, 32 bp, synthetic construct
  misc_feature 1..32: note = Probe
  source 1..32: mol_type = other DNA
aacttgaccgctctgagctaaacctagcccca

SEQ ID NO: 26417 - DNA, 36 bp, synthetic construct
  misc_feature 1..36: note = Probe
  source 1..36: mol_type = other DNA
aacttgaccgctctgagctaaacctagccccaaacc

SEQ ID NO: 26418 - DNA, 32 bp, synthetic construct
  misc_feature 1..32: note = Probe
  source 1..32: mol_type = other DNA
aacttggccccatggtgtaatggtcagcactc

SEQ ID NO: 26419 - DNA, 20 bp, synthetic construct
  misc_feature 1..20: note = Probe
  source 1..20: mol_type = other DNA
aactttacagtcagaggttc

SEQ ID NO: 26420 - DNA, 25 bp, synthetic construct
  misc_feature 1..25: note = Probe
  source 1..25: mol_type = other DNA
aactttacagtcagaggttcaattc

SEQ ID NO: 26421 - DNA, 27 bp, synthetic construct
  misc_feature 1..27: note = Probe
  source 1..27: mol_type = other DNA
aactttgtcaaagttaaattataggct

SEQ ID NO: 26422 - DNA, 36 bp, synthetic construct
  misc_feature 1..36: note = Probe
  source 1..36: mol_type = other DNA
aagaacagagaatagtttaaattagaatcttagctt

SEQ ID NO: 26423 - DNA, 15 bp, synthetic construct
  misc_feature 1..15: note = Probe
  source 1..15: mol_type = other DNA
aagaacagggtttgt

SEQ ID NO: 26424 - DNA, 16 bp, synthetic construct
  misc_feature 1..16: note = Probe
  source 1..16: mol_type = other DNA
aagaacagggtttgtt

SEQ ID NO: 26425 - DNA, 17 bp, synthetic construct
  misc_feature 1..17: note = Probe
  source 1..17: mol_type = other DNA
aagaacagggtttgtta

SEQ ID NO: 26426 - DNA, 18 bp, synthetic construct
  misc_feature 1..18: note = Probe
  source 1..18: mol_type = other DNA
aagaacagggtttgttaa

SEQ ID NO: 26427 - DNA, 19 bp, synthetic construct
  misc_feature 1..19: note = Probe
  source 1..19: mol_type = other DNA
aagaacagggtttgttaag

SEQ ID NO: 26428 - DNA, 20 bp, synthetic construct
  misc_feature 1..20: note = Probe
  source 1..20: mol_type = other DNA
aagaacagggtttgttaaga

SEQ ID NO: 26429 - DNA, 21 bp, synthetic construct
  misc_feature 1..21: note = Probe
  source 1..21: mol_type = other DNA
aagaacagggtttgttaagat

SEQ ID NO: 26430 - DNA, 15 bp, synthetic construct
  misc_feature 1..15: note = Probe
  source 1..15: mol_type = other DNA
aagaactgctaactc

SEQ ID NO: 26431 - DNA, 16 bp, synthetic construct
  misc_feature 1..16: note = Probe
  source 1..16: mol_type = other DNA
aagaactgctaactca

SEQ ID NO: 26432 - DNA, 18 bp, synthetic construct
  misc_feature 1..18: note = Probe
  source 1..18: mol_type = other DNA
aagaactgctaactcatg

SEQ ID NO: 26433 - DNA, 19 bp, synthetic construct
  misc_feature 1..19: note = Probe
  source 1..19: mol_type = other DNA
aagaactgctaactcatgc

SEQ ID NO: 26434 - DNA, 20 bp, synthetic construct
  misc_feature 1..20: note = Probe
  source 1..20: mol_type = other DNA
aagaactgctaactcatgcc

SEQ ID NO: 26435 - DNA, 21 bp, synthetic construct
  misc_feature 1..21: note = Probe
  source 1..21: mol_type = other DNA
aagaactgctaactcatgccc

SEQ ID NO: 26436 - DNA, 22 bp, synthetic construct
  misc_feature 1..22: note = Probe
  source 1..22: mol_type = other DNA
aagaactgctaactcatgcccc

SEQ ID NO: 26437 - DNA, 23 bp, synthetic construct
  misc_feature 1..23: note = Probe
  source 1..23: mol_type = other DNA
aagaactgctaactcatgccccc

SEQ ID NO: 26438 - DNA, 24 bp, synthetic construct
  misc_feature 1..24: note = Probe
  source 1..24: mol_type = other DNA
aagaactgctaactcatgccccca

SEQ ID NO: 26439 - DNA, 25 bp, synthetic construct
  misc_feature 1..25: note = Probe
  source 1..25: mol_type = other DNA
aagaactgctaactcatgcccccat

SEQ ID NO: 26440 - DNA, 26 bp, synthetic construct
  misc_feature 1..26: note = Probe
  source 1..26: mol_type = other DNA
aagaactgctaactcatgcccccatg

SEQ ID NO: 26441 - DNA, 27 bp, synthetic construct
  misc_feature 1..27: note = Probe
  source 1..27: mol_type = other DNA
aagaactgctaactcatgcccccatgt

SEQ ID NO: 26442 - DNA, 30 bp, synthetic construct; identical to SEQ ID NO: 2223
  misc_feature 1..30: note = Probe
  source 1..30: mol_type = other DNA

SEQ ID NO: 26443 - DNA, 31 bp, synthetic construct
  misc_feature 1..31: note = Probe
  source 1..31: mol_type = other DNA
aagaactgctaactcatgcccccatgtctaa

SEQ ID NO: 26444 - DNA, 34 bp, synthetic construct
  misc_feature 1..34: note = Probe
  source 1..34: mol_type = other DNA
aagaactgctaactcatgcccccatgtctaacaa

SEQ ID NO: 26445 - DNA, 35 bp, synthetic construct
  misc_feature 1..35: note = Probe
  source 1..35: mol_type = other DNA
aagaactgctaactcatgcccccatgtctaacaac

SEQ ID NO: 26446 - DNA, 37 bp, synthetic construct
  misc_feature 1..37: note = Probe
  source 1..37: mol_type = other DNA
aagaactgctaactcatgcccccatgtctaacaacat

SEQ ID NO: 26447 - DNA, 38 bp, synthetic construct
  misc_feature 1..38: note = Probe
  source 1..38: mol_type = other DNA
aagaactgctaactcatgcccccatgtctaacaacatg

SEQ ID NO: 26448 - DNA, 40 bp, synthetic construct; identical to SEQ ID NO: 2226
  misc_feature 1..40: note = Probe
  source 1..40: mol_type = other DNA

SEQ ID NO: 26449 - DNA, 41 bp, synthetic construct; identical to SEQ ID NO: 66
  misc_feature 1..41: note = Probe
  source 1..41: mol_type = other DNA

SEQ ID NO: 26450 - DNA, 42 bp, synthetic construct; identical to SEQ ID NO: 2227
  misc_feature 1..42: note = Probe
  source 1..42: mol_type = other DNA

SEQ ID NO: 26451 - DNA, 43 bp, synthetic construct; identical to SEQ ID NO: 67
  misc_feature 1..43: note = Probe
  source 1..43: mol_type = other DNA

SEQ ID NO: 26452 - DNA, 44 bp, synthetic construct; identical to SEQ ID NO: 68
  misc_feature 1..44: note = Probe
  source 1..44: mol_type = other DNA

SEQ ID NO: 26453 - DNA, 45 bp, synthetic construct; identical to SEQ ID NO: 69
  misc_feature 1..45: note = Probe
  source 1..45: mol_type = other DNA

SEQ ID NO: 26454 - DNA, 50 bp, synthetic construct; identical to SEQ ID NO: 2230
  misc_feature 1..50: note = Probe
  source 1..50: mol_type = other DNA

SEQ ID NO: 26455 - DNA, 36 bp, synthetic construct
  misc_feature 1..36: note = Probe
  source 1..36: mol_type = other DNA
aagaacttggccccatggtgtaatggtcagcactct

SEQ ID NO: 26456 - DNA, 27 bp, synthetic construct
  misc_feature 1..27: note = Probe
  source 1..27: mol_type = other DNA
aagaagcagcttcaaacctgccggggc

SEQ ID NO: 26457 - DNA, 28 bp, synthetic construct
  misc_feature 1..28: note = Probe
  source 1..28: mol_type = other DNA
aagaagcagcttcaaacctgccggggct

SEQ ID NO: 26458 - DNA, 29 bp, synthetic construct
  misc_feature 1..29: note = Probe
  source 1..29: mol_type = other DNA
aagaagcagcttcaaacctgccggggctt

SEQ ID NO: 26459 - DNA, 30 bp, synthetic construct; identical to SEQ ID NO: 14981
  misc_feature 1..30: note = Probe
  source 1..30: mol_type = other DNA

SEQ ID NO: 26460 - DNA, 31 bp, synthetic construct; identical to SEQ ID NO: 2232
  misc_feature 1..31: note = Probe
  source 1..31: mol_type = other DNA

SEQ ID NO: 26461 - DNA, 31 bp, synthetic construct
  misc_feature 1..31: note = Probe
  source 1..31: mol_type = other DNA
aagaagcctggatagctcagttggtagagca

SEQ ID NO: 26462 - DNA, 15 bp, synthetic construct
  misc_feature 1..15: note = Probe
  source 1..15: mol_type = other DNA
aagacaccccccaca

SEQ ID NO: 26463 - DNA, 31 bp, synthetic construct; identical to SEQ ID NO: 2236
  misc_feature 1..31: note = Probe
  source 1..31: mol_type = other DNA

SEQ ID NO: 26464 - DNA, 32 bp, synthetic construct; identical to SEQ ID NO: 2237
  misc_feature 1..32: note = Probe
  source 1..32: mol_type = other DNA

SEQ ID NO: 26465 - DNA, 33 bp, synthetic construct; identical to SEQ ID NO: 2238
  misc_feature 1..33: note = Probe
  source 1..33: mol_type = other DNA

SEQ ID NO: 26466 - DNA, 36 bp, synthetic construct; identical to SEQ ID NO: 14995
  misc_feature 1..36: note = Probe
  source 1..36: mol_type = other DNA

SEQ ID NO: 26467 - DNA, 17 bp, synthetic construct
  misc_feature 1..17: note = Probe
  source 1..17: mol_type = other DNA
aagacaggggttaggcc

SEQ ID NO: 26468 - DNA, 19 bp, synthetic construct
  misc_feature 1..19: note = Probe
  source 1..19: mol_type = other DNA
aagacaggggttaggcctc

SEQ ID NO: 26469 - DNA, 27 bp, synthetic construct
  misc_feature 1..27: note = Probe
  source 1..27: mol_type = other DNA
aagacaggggttaggcctctttttacc

SEQ ID NO: 26470 - DNA, 30 bp, synthetic construct; identical to SEQ ID NO: 2246
  misc_feature 1..30: note = Probe
  source 1..30: mol_type = other DNA

SEQ ID NO: 26471 - DNA, 15 bp, synthetic construct
  misc_feature 1..15: note = Probe
  source 1..15: mol_type = other DNA
aagagaaccaacacc

SEQ ID NO: 26472 - DNA, 16 bp, synthetic construct
  misc_feature 1..16: note = Probe
  source 1..16: mol_type = other DNA
aagagaaccaacacct

SEQ ID NO: 26473 - DNA, 28 bp, synthetic construct
  misc_feature 1..28: note = Probe
  source 1..28: mol_type = other DNA
aagagaaccaacacctctttacagtgaa

SEQ ID NO: 26474 - DNA, 29 bp, synthetic construct
  misc_feature 1..29: note = Probe
  source 1..29: mol_type = other DNA
aagagaaccaacacctctttacagtgaaa

SEQ ID NO: 26475 - DNA, 15 bp, synthetic construct
  misc_feature 1..15: note = Probe
  source 1..15: mol_type = other DNA
aagagagtcgctttt

SEQ ID NO: 26476 - DNA, 16 bp, synthetic construct
  misc_feature 1..16: note = Probe
  source 1..16: mol_type = other DNA
aagagagtcgcttttt

SEQ ID NO: 26477 - DNA, 17 bp, synthetic construct
  misc_feature 1..17: note = Probe
  source 1..17: mol_type = other DNA
aagagagtcgctttttt

SEQ ID NO: 26478 - DNA, 18 bp, synthetic construct
  misc_feature 1..18: note = Probe
  source 1..18: mol_type = other DNA
aagagagtcgcttttttt

SEQ ID NO: 26479 - DNA, 19 bp, synthetic construct
  misc_feature 1..19: note = Probe
  source 1..19: mol_type = other DNA
aagagagtcgctttttttt

SEQ ID NO: 26480 - DNA, 23 bp, synthetic construct
  misc_feature 1..23: note = Probe
  source 1..23: mol_type = other DNA
aagagcccggatagctcagtcgg

SEQ ID NO: 26481 - DNA, 24 bp, synthetic construct
  misc_feature 1..24: note = Probe
  source 1..24: mol_type = other DNA
aagagcccggatagctcagtcggt

SEQ ID NO: 26482 - DNA, 25 bp, synthetic construct
  misc_feature 1..25: note = Probe
  source 1..25: mol_type = other DNA
aagagcccggatagctcagtcggta

SEQ ID NO: 26483 - DNA, 26 bp, synthetic construct
  misc_feature 1..26: note = Probe
  source 1..26: mol_type = other DNA
aagagcccggatagctcagtcggtag

SEQ ID NO: 26484 - DNA, 27 bp, synthetic construct
  misc_feature 1..27: note = Probe
  source 1..27: mol_type = other DNA
aagagcccggatagctcagtcggtaga

SEQ ID NO: 26485 - DNA, 28 bp, synthetic construct
  misc_feature 1..28: note = Probe
  source 1..28: mol_type = other DNA
aagagcccggatagctcagtcggtagag

SEQ ID NO: 26486 - DNA, 29 bp, synthetic construct
  misc_feature 1..29: note = Probe
  source 1..29: mol_type = other DNA
aagagcccggatagctcagtcggtagagc

SEQ ID NO: 26487 - DNA, 30 bp, synthetic construct
  misc_feature 1..30: note = Probe
  source 1..30: mol_type = other DNA
aagagcccggatagctcagtcggtagagca

SEQ ID NO: 26488 - DNA, 31 bp, synthetic construct
  misc_feature 1..31: note = Probe
  source 1..31: mol_type = other DNA
aagagcccggatagctcagtcggtagagcat

SEQ ID NO: 26489 - DNA, 32 bp, synthetic construct
  misc_feature 1..32: note = Probe
  source 1..32: mol_type = other DNA
aagagcccggatagctcagtcggtagagcatc

SEQ ID NO: 26490 - DNA, 33 bp, synthetic construct
  misc_feature 1..33: note = Probe
  source 1..33: mol_type = other DNA
aagagcccggatagctcagtcggtagagcatca

SEQ ID NO: 26491 - DNA, 34 bp, synthetic construct
  misc_feature 1..34: note = Probe
  source 1..34: mol_type = other DNA
aagagcccggatagctcagtcggtagagcatcag

SEQ ID NO: 26492 - DNA, 35 bp, synthetic construct; identical to SEQ ID NO: 15010
  misc_feature 1..35: note = Probe
  source 1..35: mol_type = other DNA

SEQ ID NO: 26493 - DNA, 36 bp, synthetic construct; identical to SEQ ID NO: 15011
  misc_feature 1..36: note = Probe
  source 1..36: mol_type = other DNA

SEQ ID NO: 26494 - DNA, 37 bp, synthetic construct; identical to SEQ ID NO: 15012
  misc_feature 1..37: note = Probe
  source 1..37: mol_type = other DNA

SEQ ID NO: 26495 - DNA, 38 bp, synthetic construct; identical to SEQ ID NO: 15013
  misc_feature 1..38: note = Probe
  source 1..38: mol_type = other DNA

SEQ ID NO: 26496 - DNA, 39 bp, synthetic construct; identical to SEQ ID NO: 15014
  misc_feature 1..39: note = Probe
  source 1..39: mol_type = other DNA

SEQ ID NO: 26497 - DNA, 40 bp, synthetic construct; identical to SEQ ID NO: 15015
  misc_feature 1..40: note = Probe
  source 1..40: mol_type = other DNA

SEQ ID NO: 26498 - DNA, 41 bp, synthetic construct
  misc_feature 1..41: note = Probe
  source 1..41: mol_type = other DNA
aagagcccggatagctcagtcggtagagcatcagactttta

SEQ ID NO: 26499 - DNA, 42 bp, synthetic construct
  misc_feature 1..42: note = Probe
  source 1..42: mol_type = other DNA
aagagcccggatagctcagtcggtagagcatcagacttttaa

SEQ ID NO: 26500 - DNA, 15 bp, synthetic construct
  misc_feature 1..15: note = Probe
  source 1..15: mol_type = other DNA
aagaggagttgtttt

SEQ ID NO: 26501 - DNA, 16 bp, synthetic construct
  misc_feature 1..16: note = Probe
  source 1..16: mol_type = other DNA
aagaggagttgttttt

SEQ ID NO: 26502 - DNA, 30 bp, synthetic construct
  misc_feature 1..30: note = Probe
  source 1..30: mol_type = other DNA
aagaggagttgtttttcctggcaaaaacct

SEQ ID NO: 26503 - DNA, 15 bp, synthetic construct
  misc_feature 1..15: note = Probe
  source 1..15: mol_type = other DNA
aagaggtccctggtt

SEQ ID NO: 26504 - DNA, 34 bp, synthetic construct
  misc_feature 1..34: note = Probe
  source 1..34: mol_type = other DNA
aagagttactttgatagagtaaataataggagct

SEQ ID NO: 26505 - DNA, 36 bp, synthetic construct
  misc_feature 1..36: note = Probe
  source 1..36: mol_type = other DNA
aagagttactttgatagagtaaataataggagctta

SEQ ID NO: 26506 - DNA, 15 bp, synthetic construct
  misc_feature 1..15: note = Probe
  source 1..15: mol_type = other DNA
aagatggcagagccc

SEQ ID NO: 26507 - DNA, 27 bp, synthetic construct
  misc_feature 1..27: note = Probe
  source 1..27: mol_type = other DNA
aagatggcagagcccggtaatcgcata

SEQ ID NO: 26508 - DNA, 36 bp, synthetic construct
  misc_feature 1..36: note = Probe
  source 1..36: mol_type = other DNA
aagatggcagagcccggtaatcgcataaaacttaaa

SEQ ID NO: 26509 - DNA, 39 bp, synthetic construct
  misc_feature 1..39: note = Probe
  source 1..39: mol_type = other DNA
aagatggcagagcccggtaatcgcataaaacttaaaact

SEQ ID NO: 26510 - DNA, 15 bp, synthetic construct
  misc_feature 1..15: note = Probe
  source 1..15: mol_type = other DNA
aagattaagagaacc

SEQ ID NO: 26511 - DNA, 16 bp, synthetic construct
  misc_feature 1..16: note = Probe
  source 1..16: mol_type = other DNA
aagattaagagaacca

SEQ ID NO: 26512 - DNA, 18 bp, synthetic construct
  misc_feature 1..18: note = Probe
  source 1..18: mol_type = other DNA
aagattaagagaaccaac

SEQ ID NO: 26513 - DNA, 19 bp, synthetic construct
  misc_feature 1..19: note = Probe
  source 1..19: mol_type = other DNA
aagattaagagaaccaaca

SEQ ID NO: 26514 - DNA, 20 bp, synthetic construct
  misc_feature 1..20: note = Probe
  source 1..20: mol_type = other DNA
aagattaagagaaccaacac

SEQ ID NO: 26515 - DNA, 21 bp, synthetic construct
  misc_feature 1..21: note = Probe
  source 1..21: mol_type = other DNA
aagattaagagaaccaacacc

SEQ ID NO: 26516 - DNA, 22 bp, synthetic construct
  misc_feature 1..22: note = Probe
  source 1..22: mol_type = other DNA
aagattaagagaaccaacacct

SEQ ID NO: 26517 - DNA, 23 bp, synthetic construct
  misc_feature 1..23: note = Probe
  source 1..23: mol_type = other DNA
aagattaagagaaccaacacctc

SEQ ID NO: 26518 - DNA, 24 bp, synthetic construct
  misc_feature 1..24: note = Probe
  source 1..24: mol_type = other DNA
aagattaagagaaccaacacctct

SEQ ID NO: 26519 - DNA, 32 bp, synthetic construct; identical to SEQ ID NO: 2257
  misc_feature 1..32: note = Probe
  source 1..32: mol_type = other DNA

SEQ ID NO: 26520 - DNA, 34 bp, synthetic construct; identical to SEQ ID NO: 2259
  misc_feature 1..34: note = Probe
  source 1..34: mol_type = other DNA

SEQ ID NO: 26521 - DNA, 30 bp, synthetic construct
  misc_feature 1..30: note = Probe
  source 1..30: mol_type = other DNA
aagcaatacactgaaaatgtttagacgggc

SEQ ID NO: 26522 - DNA, 33 bp, synthetic construct
  misc_feature 1..33: note = Probe
  source 1..33: mol_type = other DNA
aagcaatacactgaaaatgtttagacgggctca

SEQ ID NO: 26523 - DNA, 34 bp, synthetic construct; identical to SEQ ID NO: 2267
  misc_feature 1..34: note = Probe
  source 1..34: mol_type = other DNA

SEQ ID NO: 26524 - DNA, 36 bp, synthetic construct
  misc_feature 1..36: note = Probe
  source 1..36: mol_type = other DNA
aagcaatacactgaaaatgtttagacgggctcacat

SEQ ID NO: 26525 - DNA, 36 bp, synthetic construct; identical to SEQ ID NO: 15055
  misc_feature 1..36: note = Probe
  source 1..36: mol_type = other DNA

SEQ ID NO: 26526 - DNA, 50 bp, synthetic construct; identical to SEQ ID NO: 2283
  misc_feature 1..50: note = Probe
  source 1..50: mol_type = other DNA

SEQ ID NO: 26527 - DNA, 20 bp, synthetic construct
  misc_feature 1..20: note = Probe
  source 1..20: mol_type = other DNA
aagcaccttgcctgcgggct

SEQ ID NO: 26528 - DNA, 24 bp, synthetic construct
  misc_feature 1..24: note = Probe
  source 1..24: mol_type = other DNA
aagcagcttcaaacctgccggggc

SEQ ID NO: 26529 - DNA, 25 bp, synthetic construct
  misc_feature 1..25: note = Probe
  source 1..25: mol_type = other DNA
aagcagcttcaaacctgccggggct

SEQ ID NO: 26530 - DNA, 26 bp, synthetic construct
  misc_feature 1..26: note = Probe
  source 1..26: mol_type = other DNA
aagcagcttcaaacctgccggggctt

SEQ ID NO: 26531 - DNA, 27 bp, synthetic construct
  misc_feature 1..27: note = Probe
  source 1..27: mol_type = other DNA
aagcagcttcaaacctgccggggcttc

SEQ ID NO: 26532 - DNA, 28 bp, synthetic construct
  misc_feature 1..28: note = Probe
  source 1..28: mol_type = other DNA
aagcagcttcaaacctgccggggcttct

SEQ ID NO: 26533 - DNA, 32 bp, synthetic construct
  misc_feature 1..32: note = Probe
  source 1..32: mol_type = other DNA
aagcaggctctgtggcgcaatggatagcgcat

SEQ ID NO: 26534 - DNA, 15 bp, synthetic construct
  misc_feature 1..15: note = Probe
  source 1..15: mol_type = other DNA
aagcaggcttatagg

SEQ ID NO: 26535 - DNA, 16 bp, synthetic construct
  misc_feature 1..16: note = Probe
  source 1..16: mol_type = other DNA
aagcaggcttataggt

SEQ ID NO: 26536 - DNA, 17 bp, synthetic construct
  misc_feature 1..17: note = Probe
  source 1..17: mol_type = other DNA
aagcaggcttataggtg

SEQ ID NO: 26537 - DNA, 18 bp, synthetic construct
  misc_feature 1..18: note = Probe
  source 1..18: mol_type = other DNA
aagcaggcttataggtgg

SEQ ID NO: 26538 - DNA, 36 bp, synthetic construct
  misc_feature 1..36: note = Probe
  source 1..36: mol_type = other DNA
aagcaggcttataggtggccccatggtgtaatggtt

SEQ ID NO: 26539 - DNA, 16 bp, synthetic construct
  misc_feature 1..16: note = Probe
  source 1..16: mol_type = other DNA
aagcagtcaggatggc

SEQ ID NO: 26540 - DNA, 31 bp, synthetic construct
  misc_feature 1..31: note = Probe
  source 1..31: mol_type = other DNA
aagcagtcaggatggccgagcggtctaaggc

SEQ ID NO: 26541 - DNA, 36 bp, synthetic construct
  misc_feature 1..36: note = Probe
  source 1..36: mol_type = other DNA
aagcagtcaggatggccgagcggtctaaggcgctgc

SEQ ID NO: 26542 - DNA, 36 bp, synthetic construct; identical to SEQ ID NO: 15067
  misc_feature 1..36: note = Probe
  source 1..36: mol_type = other DNA

SEQ ID NO: 26543 - DNA, 15 bp, synthetic construct
  misc_feature 1..15: note = Probe
  source 1..15: mol_type = other DNA
aagcattggactgta

SEQ ID NO: 26544 - DNA, 16 bp, synthetic construct
  misc_feature 1..16: note = Probe
  source 1..16: mol_type = other DNA
aagcattggactgtaa

SEQ ID NO: 26545 - DNA, 17 bp, synthetic construct
  misc_feature 1..17: note = Probe
  source 1..17: mol_type = other DNA
aagcattggactgtaaa

SEQ ID NO: 26546 - DNA, 19 bp, synthetic construct
  misc_feature 1..19: note = Probe
  source 1..19: mol_type = other DNA
aagcattggactgtaaatc

SEQ ID NO: 26547 - DNA, 20 bp, synthetic construct
  misc_feature 1..20: note = Probe
  source 1..20: mol_type = other DNA
aagcattggactgtaaatct

SEQ ID NO: 26548 - DNA, 22 bp, synthetic construct
  misc_feature 1..22: note = Probe
  source 1..22: mol_type = other DNA
aagcattggactgtaaatctaa

SEQ ID NO: 26549 - DNA, 34 bp, synthetic construct
  misc_feature 1..34: note = Probe
  source 1..34: mol_type = other DNA
aagcattggtggttcagtggtagaattctcgcct

SEQ ID NO: 26550 - DNA, 36 bp, synthetic construct
  misc_feature 1..36: note = Probe
  source 1..36: mol_type = other DNA
aagccagggattgtgggttcgagtcccacccggggt

SEQ ID NO: 26551 - DNA, 36 bp, synthetic construct
  misc_feature 1..36: note = Probe
  source 1..36: mol_type = other DNA
aagccagggattgtgggttcgagtcccatctggggt

SEQ ID NO: 26552 - DNA, 39 bp, synthetic construct; identical to SEQ ID NO: 2294
  misc_feature 1..39: note = Probe
  source 1..39: mol_type = other DNA

SEQ ID NO: 26553 - DNA, 40 bp, synthetic construct; identical to SEQ ID NO: 2295
  misc_feature 1..40: note = Probe
  source 1..40: mol_type = other DNA

SEQ ID NO: 26554 - DNA, 33 bp, synthetic construct
  misc_feature 1..33: note = Probe
  source 1..33: mol_type = other DNA
aagccagttgattagggtgcttagctgttaact

SEQ ID NO: 26555 - DNA, 25 bp, synthetic construct
  misc_feature 1..25: note = Probe
  source 1..25: mol_type = other DNA
aagccgcgcattggtggttcagtgg

SEQ ID NO: 26556 - DNA, 37 bp, synthetic construct
  misc_feature 1..37: note = Probe
  source 1..37: mol_type = other DNA
aagccgcgcattggtggttcagtggtagaattctcgc

SEQ ID NO: 26557 - DNA, 38 bp, synthetic construct
  misc_feature 1..38: note = Probe
  source 1..38: mol_type = other DNA
aagccgcgcattggtggttcagtggtagaattctcgcc

SEQ ID NO: 26558 - DNA, 39 bp, synthetic construct
  misc_feature 1..39: note = Probe
  source 1..39: mol_type = other DNA
aagccgcgcattggtggttcagtggtagaattctcgcct

SEQ ID NO: 26559 - DNA, 36 bp, synthetic construct
  misc_feature 1..36: note = Probe
  source 1..36: mol_type = other DNA
aagccggtttccgtagtgtagtggttatcacgttcg

SEQ ID NO: 26560 - DNA, 36 bp, synthetic construct
  misc_feature 1..36: note = Probe
  source 1..36: mol_type = other DNA
aagcctcgtagtcgtggccgagtggttaaggcgatg

SEQ ID NO: 26561 - DNA, 24 bp, synthetic construct
  misc_feature 1..24: note = Probe
  source 1..24: mol_type = other DNA
aagcgagtttccgtagtgtagtgg

SEQ ID NO: 26562 - DNA, 17 bp, synthetic construct
  misc_feature 1..17: note = Probe
  source 1..17: mol_type = other DNA
aagcgcgtcaggatggc

SEQ ID NO: 26563 - DNA, 32 bp, synthetic construct
  misc_feature 1..32: note = Probe
  source 1..32: mol_type = other DNA
aagcgcgtcaggatggccgagcggtctaaggc

SEQ ID NO: 26564 - DNA, 33 bp, synthetic construct; identical to SEQ ID NO: 15087
  misc_feature 1..33: note = Probe
  source 1..33: mol_type = other DNA

SEQ ID NO: 26565 - DNA, 34 bp, synthetic construct
  misc_feature 1..34: note = Probe
  source 1..34: mol_type = other DNA
aagcgcgtcaggatggccgagcggtctaaggcgc

SEQ ID NO: 26566 - DNA, 36 bp, synthetic construct
  misc_feature 1..36: note = Probe
  source 1..36: mol_type = other DNA
aagcgcgtcaggatggccgagcggtctaaggcgctg

SEQ ID NO: 26567 - DNA, 37 bp, synthetic construct
  misc_feature 1..37: note = Probe
  source 1..37: mol_type = other DNA
aagcgcgtcaggatggccgagcggtctaaggcgctgc

SEQ ID NO: 26568 - DNA, 36 bp, synthetic construct
  misc_feature 1..36: note = Probe
  source 1..36: mol_type = other DNA
aagcggcggctcgttggtctaggggtatgattctcg

SEQ ID NO: 26569 - DNA, 17 bp, synthetic construct
  misc_feature 1..17: note = Probe
  source 1..17: mol_type = other DNA
aagcgggtgctcttatt

SEQ ID NO: 26570 - DNA, 18 bp, synthetic construct
  misc_feature 1..18: note = Probe
  source 1..18: mol_type = other DNA
aagcgggtgctcttattt

SEQ ID NO: 26571 - DNA, 19 bp, synthetic construct
  misc_feature 1..19: note = Probe
  source 1..19: mol_type = other DNA
aagcgggtgctcttatttt

SEQ ID NO: 26572 - DNA, 20 bp, synthetic construct
  misc_feature 1..20: note = Probe
  source 1..20: mol_type = other DNA
aagcgggtgctcttattttt

SEQ ID NO: 26573 - DNA, 15 bp, synthetic construct
  misc_feature 1..15: note = Probe
  source 1..15: mol_type = other DNA
aagcgtgctgggccc

SEQ ID NO: 26574 - DNA, 36 bp, synthetic construct
  misc_feature 1..36: note = Probe
  source 1..36: mol_type = other DNA
aagctaacttagcattaaccttttaagttaaagatt

SEQ ID NO: 26575 - DNA, 15 bp, synthetic construct
  misc_feature 1..15: note = Probe
  source 1..15: mol_type = other DNA
aagctatcgggccca

SEQ ID NO: 26576 - DNA, 16 bp, synthetic construct
  misc_feature 1..16: note = Probe
  source 1..16: mol_type = other DNA
aagctatcgggcccat

SEQ ID NO: 26577 - DNA, 17 bp, synthetic construct
  misc_feature 1..17: note = Probe
  source 1..17: mol_type = other DNA
aagctatcgggcccata

SEQ ID NO: 26578 - DNA, 19 bp, synthetic construct
  misc_feature 1..19: note = Probe
  source 1..19: mol_type = other DNA
aagctatcgggcccatacc

SEQ ID NO: 26579 - DNA, 20 bp, synthetic construct
  misc_feature 1..20: note = Probe
  source 1..20: mol_type = other DNA
aagctatcgggcccataccc

SEQ ID NO: 26580 - DNA, 34 bp, synthetic construct; identical to SEQ ID NO: 2310
  misc_feature 1..34: note = Probe
  source 1..34: mol_type = other DNA

SEQ ID NO: 26581 - DNA, 15 bp, synthetic construct
  misc_feature 1..15: note = Probe
  source 1..15: mol_type = other DNA
aagctcacaagaact

SEQ ID NO: 26582 - DNA, 16 bp, synthetic construct
  misc_feature 1..16: note = Probe
  source 1..16: mol_type = other DNA
aagctcacaagaactg

SEQ ID NO: 26583 - DNA, 26 bp, synthetic construct
  misc_feature 1..26: note = Probe
  source 1..26: mol_type = other DNA
aagctcacaagaactgctaactcatg

SEQ ID NO: 26584 - DNA, 28 bp, synthetic construct
  misc_feature 1..28: note = Probe
  source 1..28: mol_type = other DNA
aagctcacaagaactgctaactcatgcc

SEQ ID NO: 26585 - DNA, 29 bp, synthetic construct
  misc_feature 1..29: note = Probe
  source 1..29: mol_type = other DNA
aagctcacaagaactgctaactcatgccc

SEQ ID NO: 26586 - DNA, 41 bp, synthetic construct
  misc_feature 1..41: note = Probe
  source 1..41: mol_type = other DNA
aagctcacaagaactgctaactcatgcccccatgtctaaca

SEQ ID NO: 26587 - DNA, 44 bp, synthetic construct
  misc_feature 1..44: note = Probe
  source 1..44: mol_type = other DNA
aagctcacaagaactgctaactcatgcccccatgtctaacaaca

SEQ ID NO: 26588 - DNA, 36 bp, synthetic construct
  misc_feature 1..36: note = Probe
  source 1..36: mol_type = other DNA
aaggaagcccggctagctcagtcgatagagcatgag

SEQ ID NO: 26589 - DNA, 36 bp, synthetic construct
  misc_feature 1..36: note = Probe
  source 1..36: mol_type = other DNA
aaggacaaatcagagaaaaagtctttaactccacca

SEQ ID NO: 26590 - DNA, 15 bp, synthetic construct
  misc_feature 1..15: note = Probe
  source 1..15: mol_type = other DNA
aaggactgcaaaacc

SEQ ID NO: 26591 - DNA, 16 bp, synthetic construct
  misc_feature 1..16: note = Probe
  source 1..16: mol_type = other DNA
aaggactgcaaaaccc

SEQ ID NO: 26592 - DNA, 17 bp, synthetic construct
  misc_feature 1..17: note = Probe
  source 1..17: mol_type = other DNA
aaggactgcaaaacccc

SEQ ID NO: 26593 - DNA, 20 bp, synthetic construct
  misc_feature 1..20: note = Probe
  source 1..20: mol_type = other DNA
aaggactgcaaaaccccact

SEQ ID NO: 26594 - DNA, 22 bp, synthetic construct
  misc_feature 1..22: note = Probe
  source 1..22: mol_type = other DNA
aaggactgcaaaaccccactct

SEQ ID NO: 26595 - DNA, 30 bp, synthetic construct
  misc_feature 1..30: note = Probe
  source 1..30: mol_type = other DNA
aaggagcctgggtagctcagtcggtagagc

SEQ ID NO: 26596 - DNA, 31 bp, synthetic construct
  misc_feature 1..31: note = Probe
  source 1..31: mol_type = other DNA
aaggagcctgggtagctcagtcggtagagca

SEQ ID NO: 26597 - DNA, 33 bp, synthetic construct
  misc_feature 1..33: note = Probe
  source 1..33: mol_type = other DNA
aaggagcctgggtagctcagtcggtagagcatc

SEQ ID NO: 26598 - DNA, 34 bp, synthetic construct
  misc_feature 1..34: note = Probe
  source 1..34: mol_type = other DNA
aaggagcctgggtagctcagtcggtagagcatca

SEQ ID NO: 26599 - DNA, 36 bp, synthetic construct
  misc_feature 1..36: note = Probe
  source 1..36: mol_type = other DNA
aaggagcctgggtagctcagtcggtagagcatcaga

SEQ ID NO: 26600 - DNA, 37 bp, synthetic construct
  misc_feature 1..37: note = Probe
  source 1..37: mol_type = other DNA
aaggagcctgggtagctcagtcggtagagcatcagac

SEQ ID NO: 26601 - DNA, 38 bp, synthetic construct
  misc_feature 1..38: note = Probe
  source 1..38: mol_type = other DNA
aaggagcctgggtagctcagtcggtagagcatcagact

SEQ ID NO: 26602 - DNA, 40 bp, synthetic construct
  misc_feature 1..40: note = Probe
  source 1..40: mol_type = other DNA
aaggagcctgggtagctcagtcggtagagcatcagacttt

SEQ ID NO: 26603 - DNA, 36 bp, synthetic construct
  misc_feature 1..36: note = Probe
  source 1..36: mol_type = other DNA
aaggaggccggttagctcagttggttagagcgtggt

SEQ ID NO: 26604 - DNA, 23 bp, synthetic construct
  misc_feature 1..23: note = Probe
  source 1..23: mol_type = other DNA
aaggataacagctatccattggt

SEQ ID NO: 26605 - DNA, 26 bp, synthetic construct
  misc_feature 1..26: note = Probe
  source 1..26: mol_type = other DNA
aaggataacagctatccattggtctt

SEQ ID NO: 26606 - DNA, 27 bp, synthetic construct
  misc_feature 1..27: note = Probe
  source 1..27: mol_type = other DNA
aaggataacagctatccattggtctta

SEQ ID NO: 26607 - DNA, 28 bp, synthetic construct
  misc_feature 1..28: note = Probe
  source 1..28: mol_type = other DNA
aaggataacagctatccattggtcttag

SEQ ID NO: 26608 - DNA, 30 bp, synthetic construct
  misc_feature 1..30: note = Probe
  source 1..30: mol_type = other DNA
aaggataacagctatccattggtcttaggc

SEQ ID NO: 26609 - DNA, 31 bp, synthetic construct
  misc_feature 1..31: note = Probe
  source 1..31: mol_type = other DNA
aaggataacagctatccattggtcttaggcc

SEQ ID NO: 26610 - DNA, 32 bp, synthetic construct
  misc_feature 1..32: note = Probe
  source 1..32: mol_type = other DNA
aaggataacagctatccattggtcttaggccc

SEQ ID NO: 26611 - DNA, 33 bp, synthetic construct
  misc_feature 1..33: note = Probe
  source 1..33: mol_type = other DNA
aaggataacagctatccattggtcttaggcccc

SEQ ID NO: 26612 - DNA, 36 bp, synthetic construct
  misc_feature 1..36: note = Probe
  source 1..36: mol_type = other DNA
aaggataacagctatccattggtcttaggccccaaa

SEQ ID NO: 26613 - DNA, 17 bp, synthetic construct
  misc_feature 1..17: note = Probe
  source 1..17: mol_type = other DNA
aaggattagactgaacc

SEQ ID NO: 26614 - DNA, 33 bp, synthetic construct
  misc_feature 1..33: note = Probe
  source 1..33: mol_type = other DNA
aagggaacctgggtagcttagttggtagagcat

SEQ ID NO: 26615 - DNA, 17 bp, synthetic construct
  misc_feature 1..17: note = Probe
  source 1..17: mol_type = other DNA
aagggaggttatgatta

SEQ ID NO: 26616 - DNA, 20 bp, synthetic construct
  misc_feature 1..20: note = Probe
  source 1..20: mol_type = other DNA
aagggaggttatgattaact

SEQ ID NO: 26617 - DNA, 21 bp, synthetic construct
  misc_feature 1..21: note = Probe
  source 1..21: mol_type = other DNA
aagggaggttatgattaactt

SEQ ID NO: 26618 - DNA, 22 bp, synthetic construct
  misc_feature 1..22: note = Probe
  source 1..22: mol_type = other DNA
aagggaggttatgattaacttt

SEQ ID NO: 26619 - DNA, 23 bp, synthetic construct
  misc_feature 1..23: note = Probe
  source 1..23: mol_type = other DNA
aagggaggttatgattaactttt

SEQ ID NO: 26620 - DNA, 16 bp, synthetic construct
  misc_feature 1..16: note = Probe
  source 1..16: mol_type = other DNA
aagggcttagcttaat

SEQ ID NO: 26621 - DNA, 17 bp, synthetic construct
  misc_feature 1..17: note = Probe
  source 1..17: mol_type = other DNA
aagggcttagcttaatt

SEQ ID NO: 26622 - DNA, 18 bp, synthetic construct
  misc_feature 1..18: note = Probe
  source 1..18: mol_type = other DNA
aagggcttagcttaatta

SEQ ID NO: 26623 - DNA, 21 bp, synthetic construct
  misc_feature 1..21: note = Probe
  source 1..21: mol_type = other DNA
aagggcttagcttaattaaag

SEQ ID NO: 26624 - DNA, 22 bp, synthetic construct
  misc_feature 1..22: note = Probe
  source 1..22: mol_type = other DNA
aagggcttagcttaattaaagt

SEQ ID NO: 26625 - DNA, 23 bp, synthetic construct
  misc_feature 1..23: note = Probe
  source 1..23: mol_type = other DNA
aagggcttagcttaattaaagtg

SEQ ID NO: 26626 - DNA, 25 bp, synthetic construct
  misc_feature 1..25: note = Probe
  source 1..25: mol_type = other DNA
aagggcttagcttaattaaagtggc

SEQ ID NO: 26627 - DNA, 26 bp, synthetic construct
  misc_feature 1..26: note = Probe
  source 1..26: mol_type = other DNA
aagggcttagcttaattaaagtggct

SEQ ID NO: 26628 - DNA, 29 bp, synthetic construct
  misc_feature 1..29: note = Probe
  source 1..29: mol_type = other DNA
aagggcttagcttaattaaagtggctgat

SEQ ID NO: 26629 - DNA, 30 bp, synthetic construct
  misc_feature 1..30: note = Probe
  source 1..30: mol_type = other DNA
aagggcttagcttaattaaagtggctgatt

SEQ ID NO: 26630 - DNA, 33 bp, synthetic construct; identical to SEQ ID NO: 2327
  misc_feature 1..33: note = Probe
  source 1..33: mol_type = other DNA

SEQ ID NO: 26631 - DNA, 36 bp, synthetic construct; identical to SEQ ID NO: 15125
  misc_feature 1..36: note = Probe
  source 1..36: mol_type = other DNA

SEQ ID NO: 26632 - DNA, 40 bp, synthetic construct
  misc_feature 1..40: note = Probe
  source 1..40: mol_type = other DNA
aagggcttagcttaattaaagtggctgatttgcgttcagt

SEQ ID NO: 26633 - DNA, 41 bp, synthetic construct
  misc_feature 1..41: note = Probe
  source 1..41: mol_type = other DNA
aagggcttagcttaattaaagtggctgatttgcgttcagtt

SEQ ID NO: 26634 - DNA, 36 bp, synthetic construct
  misc_feature 1..36: note = Probe
  source 1..36: mol_type = other DNA
aaggggtaggggatgtagctcagtggtagagcgcat

SEQ ID NO: 26635 - DNA, 16 bp, synthetic construct
  misc_feature 1..16: note = Probe
  source 1..16: mol_type = other DNA
aaggtattagaaaaac

SEQ ID NO: 26636 - DNA, 17 bp, synthetic construct
  misc_feature 1..17: note = Probe
  source 1..17: mol_type = other DNA
aaggtattagaaaaacc

SEQ ID NO: 26637 - DNA, 33 bp, synthetic construct; identical to SEQ ID NO: 2331
  misc_feature 1..33: note = Probe
  source 1..33: mol_type = other DNA

SEQ ID NO: 26638 - DNA, 40 bp, synthetic construct
  misc_feature 1..40: note = Probe
  source 1..40: mol_type = other DNA
aaggtattagaaaaaccatttcataactttgtcaaagtta

SEQ ID NO: 26639 - DNA, 50 bp, synthetic construct
  misc_feature 1..50: note = Probe
  source 1..50: mol_type = other DNA
aaggtattagaaaaaccatttcataactttgtcaaagttaaattataggc

SEQ ID NO: 26640 - DNA, 27 bp, synthetic construct
  misc_feature 1..27: note = Probe
  source 1..27: mol_type = other DNA
aaggtcagctaaataagctatcgggcc

SEQ ID NO: 26641 - DNA, 28 bp, synthetic construct
  misc_feature 1..28: note = Probe
  source 1..28: mol_type = other DNA
aaggtcagctaaataagctatcgggccc

SEQ ID NO: 26642 - DNA, 29 bp, synthetic construct
  misc_feature 1..29: note = Probe
  source 1..29: mol_type = other DNA
aaggtcagctaaataagctatcgggccca

SEQ ID NO: 26643 - DNA, 36 bp, synthetic construct
  misc_feature 1..36: note = Probe
  source 1..36: mol_type = other DNA
aaggtcagctaaataagctatcgggcccataccccg

SEQ ID NO: 26644 - DNA, 30 bp, synthetic construct
  misc_feature 1..30: note = Probe
  source 1..30: mol_type = other DNA
aaggtcgcgggttcgatccccgtacgggcc

SEQ ID NO: 26645 - DNA, 36 bp, synthetic construct
  misc_feature 1..36: note = Probe
  source 1..36: mol_type = other DNA
aaggttccgggttcgagtcccggcggagtcgtaacg

SEQ ID NO: 26646 - DNA, 36 bp, synthetic construct
  misc_feature 1..36: note = Probe
  source 1..36: mol_type = other DNA
aaggttgtgggttcgagtcccaccagagtcgctttt

SEQ ID NO: 26647 - DNA, 32 bp, synthetic construct
  misc_feature 1..32: note = Probe
  source 1..32: mol_type = other DNA
aagtaaggtcagctaaataagctatcgggccc

SEQ ID NO: 26648 - DNA, 33 bp, synthetic construct
  misc_feature 1..33: note = Probe
  source 1..33: mol_type = other DNA
aagtagggttccatggtgtaatggttagcactc

SEQ ID NO: 26649 - DNA, 22 bp, synthetic construct
  misc_feature 1..22: note = Probe
  source 1..22: mol_type = other DNA
aagtcatggaggccatggggtt

SEQ ID NO: 26650 - DNA, 17 bp, synthetic construct
  misc_feature 1..17: note = Probe
  source 1..17: mol_type = other DNA
aagtccctgttcgggcg

SEQ ID NO: 26651 - DNA, 26 bp, synthetic construct
  misc_feature 1..26: note = Probe
  source 1..26: mol_type = other DNA
aagtccctgttcgggcggatgctgtt

SEQ ID NO: 26652 - DNA, 27 bp, synthetic construct
  misc_feature 1..27: note = Probe
  source 1..27: mol_type = other DNA
aagtccctgttcgggcggatgctgttt

SEQ ID NO: 26653 - DNA, 29 bp, synthetic construct
  misc_feature 1..29: note = Probe
  source 1..29: mol_type = other DNA
aagtccctgttcgggcgggagtggtggct

SEQ ID NO: 26654 - DNA, 31 bp, synthetic construct
  misc_feature 1..31: note = Probe
  source 1..31: mol_type = other DNA
aagtccctgttcgggcgggagtggtggcttt

SEQ ID NO: 26655 - DNA, 28 bp, synthetic construct
  misc_feature 1..28: note = Probe
  source 1..28: mol_type = other DNA
aagtcgcattttgtgaaccctgggtttt

SEQ ID NO: 26656 - DNA, 36 bp, synthetic construct
  misc_feature 1..36: note = Probe
  source 1..36: mol_type = other DNA
aagtcggggccagtggcgcaatggataacgcgtctg

SEQ ID NO: 26657 - DNA, 36 bp, synthetic construct
  misc_feature 1..36: note = Probe
  source 1..36: mol_type = other DNA
aagtcttcctcgttagtatagtggtgagtgtccccg

SEQ ID NO: 26658 - DNA, 19 bp, synthetic construct
  misc_feature 1..19: note = Probe
  source 1..19: mol_type = other DNA
aagtctttaactccaccat

SEQ ID NO: 26659 - DNA, 15 bp, synthetic construct
  misc_feature 1..15: note = Probe
  source 1..15: mol_type = other DNA
aagtgcacttggacg

SEQ ID NO: 26660 - DNA, 18 bp, synthetic construct
  misc_feature 1..18: note = Probe
  source 1..18: mol_type = other DNA
aagtgcacttggacgaac

SEQ ID NO: 26661 - DNA, 19 bp, synthetic construct
  misc_feature 1..19: note = Probe
  source 1..19: mol_type = other DNA
aagtgcacttggacgaacc

SEQ ID NO: 26662 - DNA, 36 bp, synthetic construct
  misc_feature 1..36: note = Probe
  source 1..36: mol_type = other DNA
aagtggctcgttggtctaggggtatgattctcgctt

SEQ ID NO: 26663 - DNA, 15 bp, synthetic construct
  misc_feature 1..15: note = Probe
  source 1..15: mol_type = other DNA
aagtggctgatttgc

SEQ ID NO: 26664 - DNA, 15 bp, synthetic construct
  misc_feature 1..15: note = Probe
  source 1..15: mol_type = other DNA
aagtggttcccgttt

SEQ ID NO: 26665 - DNA, 16 bp, synthetic construct
  misc_feature 1..16: note = Probe
  source 1..16: mol_type = other DNA
aagtggttcccgtttt

SEQ ID NO: 26666 - DNA, 17 bp, synthetic construct
  misc_feature 1..17: note = Probe
  source 1..17: mol_type = other DNA
aagtggttcccgttttt

SEQ ID NO: 26667 - DNA, 15 bp, synthetic construct
  misc_feature 1..15: note = Probe
  source 1..15: mol_type = other DNA
aagtgtactggaaag

SEQ ID NO: 26668 - DNA, 16 bp, synthetic construct
  misc_feature 1..16: note = Probe
  source 1..16: mol_type = other DNA
aagtgtactggaaagt

SEQ ID NO: 26669 - DNA, 17 bp, synthetic construct
  misc_feature 1..17: note = Probe
  source 1..17: mol_type = other DNA
aagtgtactggaaagtg

SEQ ID NO: 26670 - DNA, 18 bp, synthetic construct
  misc_feature 1..18: note = Probe
  source 1..18: mol_type = other DNA
aagtgtactggaaagtgc

SEQ ID NO: 26671 - DNA, 19 bp, synthetic construct
  misc_feature 1..19: note = Probe
  source 1..19: mol_type = other DNA
aagtgtactggaaagtgca

SEQ ID NO: 26672 - DNA, 20 bp, synthetic construct
  misc_feature 1..20: note = Probe
  source 1..20: mol_type = other DNA
aagtgtactggaaagtgcac

SEQ ID NO: 26673 - DNA, 21 bp, synthetic construct
  misc_feature 1..21: note = Probe
  source 1..21: mol_type = other DNA
aagtgtactggaaagtgcact

SEQ ID NO: 26674 - DNA, 22 bp, synthetic construct
  misc_feature 1..22: note = Probe
  source 1..22: mol_type = other DNA
aagtgtactggaaagtgcactt

SEQ ID NO: 26675 - DNA, 23 bp, synthetic construct
  misc_feature 1..23: note = Probe
  source 1..23: mol_type = other DNA
aagtgtactggaaagtgcacttg

SEQ ID NO: 26676 - DNA, 26 bp, synthetic construct
  misc_feature 1..26: note = Probe
  source 1..26: mol_type = other DNA
aagtgtactggaaagtgcacttggac

SEQ ID NO: 26677 - DNA, 27 bp, synthetic construct
  misc_feature 1..27: note = Probe
  source 1..27: mol_type = other DNA
aagtgtactggaaagtgcacttggacg

SEQ ID NO: 26678 - DNA, 28 bp, synthetic construct
  misc_feature 1..28: note = Probe
  source 1..28: mol_type = other DNA
aagtgtactggaaagtgcacttggacga

SEQ ID NO: 26679 - DNA, 29 bp, synthetic construct
  misc_feature 1..29: note = Probe
  source 1..29: mol_type = other DNA
aagtgtactggaaagtgcacttggacgaa

SEQ ID NO: 26680 - DNA, 30 bp, synthetic construct; identical to SEQ ID NO: 2379
  misc_feature 1..30: note = Probe
  source 1..30: mol_type = other DNA

SEQ ID NO: 26681 - DNA, 31 bp, synthetic construct; identical to SEQ ID NO: 2380
  misc_feature 1..31: note = Probe
  source 1..31: mol_type = other DNA

SEQ ID NO: 26682 - DNA, 32 bp, synthetic construct; identical to SEQ ID NO: 2381
  misc_feature 1..32: note = Probe
  source 1..32: mol_type = other DNA

SEQ ID NO: 26683 - DNA, 33 bp, synthetic construct; identical to SEQ ID NO: 2382
  misc_feature 1..33: note = Probe
  source 1..33: mol_type = other DNA

SEQ ID NO: 26684 - DNA, 34 bp, synthetic construct; identical to SEQ ID NO: 2383
  misc_feature 1..34: note = Probe
  source 1..34: mol_type = other DNA

SEQ ID NO: 26685 - DNA, 15 bp, synthetic construct
  misc_feature 1..15: note = Probe
  source 1..15: mol_type = other DNA
aagtgtttgtgggtt

SEQ ID NO: 26686 - DNA, 16 bp, synthetic construct
  misc_feature 1..16: note = Probe
  source 1..16: mol_type = other DNA
aagtgtttgtgggttt

SEQ ID NO: 26687 - DNA, 17 bp, synthetic construct
  misc_feature 1..17: note = Probe
  source 1..17: mol_type = other DNA
aagtgtttgtgggttta

SEQ ID NO: 26688 - DNA, 19 bp, synthetic construct
  misc_feature 1..19: note = Probe
  source 1..19: mol_type = other DNA
aagtgtttgtgggtttaag

SEQ ID NO: 26689 - DNA, 20 bp, synthetic construct
  misc_feature 1..20: note = Probe
  source 1..20: mol_type = other DNA
aagtgtttgtgggtttaagt

SEQ ID NO: 26690 - DNA, 23 bp, synthetic construct
  misc_feature 1..23: note = Probe
  source 1..23: mol_type = other DNA
aagtgtttgtgggtttaagtccc

SEQ ID NO: 26691 - DNA, 25 bp, synthetic construct
  misc_feature 1..25: note = Probe
  source 1..25: mol_type = other DNA
aagtgtttgtgggtttaagtcccat

SEQ ID NO: 26692 - DNA, 30 bp, synthetic construct; identical to SEQ ID NO: 2390
  misc_feature 1..30: note = Probe
  source 1..30: mol_type = other DNA

SEQ ID NO: 26693 - DNA, 31 bp, synthetic construct; identical to SEQ ID NO: 86
  misc_feature 1..31: note = Probe
  source 1..31: mol_type = other DNA

SEQ ID NO: 26694 - DNA, 32 bp, synthetic construct; identical to SEQ ID NO: 2391
  misc_feature 1..32: note = Probe
  source 1..32: mol_type = other DNA

SEQ ID NO: 26695 - DNA, 36 bp, synthetic construct; identical to SEQ ID NO: 15184
  misc_feature 1..36: note = Probe
  source 1..36: mol_type = other DNA

SEQ ID NO: 26696 - DNA, 21 bp, synthetic construct
  misc_feature 1..21: note = Probe
  source 1..21: mol_type = other DNA
aagttaaagattaagagaacc

SEQ ID NO: 26697 - DNA, 26 bp, synthetic construct
  misc_feature 1..26: note = Probe
  source 1..26: mol_type = other DNA
aagttaaagattaagagaaccaacac

SEQ ID NO: 26698 - DNA, 27 bp, synthetic construct
  misc_feature 1..27: note = Probe
  source 1..27: mol_type = other DNA
aagttaaagattaagagaaccaacacc

SEQ ID NO: 26699 - DNA, 28 bp, synthetic construct
  misc_feature 1..28: note = Probe
  source 1..28: mol_type = other DNA
aagttaaagattaagagaaccaacacct

SEQ ID NO: 26700 - DNA, 36 bp, synthetic construct
  misc_feature 1..36: note = Probe
  source 1..36: mol_type = other DNA
aagttaaagattaagagaaccaacacctctttacag

SEQ ID NO: 26701 - DNA, 40 bp, synthetic construct; identical to SEQ ID NO: 2397
  misc_feature 1..40: note = Probe
  source 1..40: mol_type = other DNA

SEQ ID NO: 26702 - DNA, 41 bp, synthetic construct; identical to SEQ ID NO: 2398
  misc_feature 1..41: note = Probe
  source 1..41: mol_type = other DNA

SEQ ID NO: 26703 - DNA, 17 bp, synthetic construct
  misc_feature 1..17: note = Probe
  source 1..17: mol_type = other DNA
aagttaaattataggct

SEQ ID NO: 26704 - DNA, 36 bp, synthetic construct; identical to SEQ ID NO: 15195
  misc_feature 1..36: note = Probe
  source 1..36: mol_type = other DNA

SEQ ID NO: 26705 - DNA, 30 bp, synthetic construct
  misc_feature 1..30: note = Probe
  source 1..30: mol_type = other DNA
aagttgctcgtctgggtagtcagctgatcc

SEQ ID NO: 26706 - DNA, 35 bp, synthetic construct
  misc_feature 1..35: note = Probe
  source 1..35: mol_type = other DNA
aagtttccgtagtgtagtggttatcacgttcgcct

SEQ ID NO: 26707 - DNA, 36 bp, synthetic construct
  misc_feature 1..36: note = Probe
  source 1..36: mol_type = other DNA
aagtttccgtagtgtagtggttatcacgttcgccta

SEQ ID NO: 26708 - DNA, 15 bp, synthetic construct
  misc_feature 1..15: note = Probe
  source 1..15: mol_type = other DNA
aataacgccaaggtc

SEQ ID NO: 26709 - DNA, 15 bp, synthetic construct
  misc_feature 1..15: note = Probe
  source 1..15: mol_type = other DNA
aataagctatcgggc

SEQ ID NO: 26710 - DNA, 16 bp, synthetic construct
  misc_feature 1..16: note = Probe
  source 1..16: mol_type = other DNA
aataagctatcgggcc

SEQ ID NO: 26711 - DNA, 17 bp, synthetic construct
  misc_feature 1..17: note = Probe
  source 1..17: mol_type = other DNA
aataagctatcgggccc

SEQ ID NO: 26712 - DNA, 18 bp, synthetic construct
  misc_feature 1..18: note = Probe
  source 1..18: mol_type = other DNA
aataagctatcgggccca

SEQ ID NO: 26713 - DNA, 19 bp, synthetic construct
  misc_feature 1..19: note = Probe
  source 1..19: mol_type = other DNA
aataagctatcgggcccat

SEQ ID NO: 26714 - DNA, 22 bp, synthetic construct
  misc_feature 1..22: note = Probe
  source 1..22: mol_type = other DNA
aataagctatcgggcccatacc

SEQ ID NO: 26715 - DNA, 23 bp, synthetic construct
  misc_feature 1..23: note = Probe
  source 1..23: mol_type = other DNA
aataagctatcgggcccataccc

SEQ ID NO: 26716 - DNA, 27 bp, synthetic construct
  misc_feature 1..27: note = Probe
  source 1..27: mol_type = other DNA
aataagctatcgggcccataccccgaa

SEQ ID NO: 26717 - DNA, 36 bp, synthetic construct
  misc_feature 1..36: note = Probe
  source 1..36: mol_type = other DNA
aataagctatcgggcccataccccgaaaatgttggt

SEQ ID NO: 26718 - DNA, 37 bp, synthetic construct
  misc_feature 1..37: note = Probe
  source 1..37: mol_type = other DNA
aataagctatcgggcccataccccgaaaatgttggtt

SEQ ID NO: 26719 - DNA, 19 bp, synthetic construct
  misc_feature 1..19: note = Probe
  source 1..19: mol_type = other DNA
aataataggagcttaaacc

SEQ ID NO: 26720 - DNA, 21 bp, synthetic construct
  misc_feature 1..21: note = Probe
  source 1..21: mol_type = other DNA
aataataggagcttaaacccc

SEQ ID NO: 26721 - DNA, 22 bp, synthetic construct
  misc_feature 1..22: note = Probe
  source 1..22: mol_type = other DNA
aataataggagcttaaaccccc

SEQ ID NO: 26722 - DNA, 32 bp, synthetic construct
  misc_feature 1..32: note = Probe
  source 1..32: mol_type = other DNA
aatacaacgatggtttttcatatcattggtcg

SEQ ID NO: 26723 - DNA, 33 bp, synthetic construct
  misc_feature 1..33: note = Probe
  source 1..33: mol_type = other DNA
aatacaacgatggtttttcatatcattggtcgt

SEQ ID NO: 26724 - DNA, 36 bp, synthetic construct
  misc_feature 1..36: note = Probe
  source 1..36: mol_type = other DNA
aatacaacgatggtttttcatatcattggtcgtggt

SEQ ID NO: 26725 - DNA, 44 bp, synthetic construct
  misc_feature 1..44: note = Probe
  source 1..44: mol_type = other DNA
aatacaacgatggtttttcatatcattggtcgtggttgtagtcc

SEQ ID NO: 26726 - DNA, 50 bp, synthetic construct
  misc_feature 1..50: note = Probe
  source 1..50: mol_type = other DNA
aatacaacgatggtttttcatatcattggtcgtggttgtagtccgtgcga

SEQ ID NO: 26727 - DNA, 27 bp, synthetic construct
  misc_feature 1..27: note = Probe
  source 1..27: mol_type = other DNA
aatacactgaaaatgtttagacgggct

SEQ ID NO: 26728 - DNA, 29 bp, synthetic construct
  misc_feature 1..29: note = Probe
  source 1..29: mol_type = other DNA
aatacactgaaaatgtttagacgggctca

SEQ ID NO: 26729 - DNA, 30 bp, synthetic construct
  misc_feature 1..30: note = Probe
  source 1..30: mol_type = other DNA
aatacactgaaaatgtttagacgggctcac

SEQ ID NO: 26730 - DNA, 31 bp, synthetic construct
  misc_feature 1..31: note = Probe
  source 1..31: mol_type = other DNA
aatacactgaaaatgtttagacgggctcaca

SEQ ID NO: 26731 - DNA, 33 bp, synthetic construct
  misc_feature 1..33: note = Probe
  source 1..33: mol_type = other DNA
aatacactgaaaatgtttagacgggctcacatc

SEQ ID NO: 26732 - DNA, 36 bp, synthetic construct
  misc_feature 1..36: note = Probe
  source 1..36: mol_type = other DNA
aatacactgaaaatgtttagacgggctcacatcacc

SEQ ID NO: 26733 - DNA, 18 bp, synthetic construct
  misc_feature 1..18: note = Probe
  source 1..18: mol_type = other DNA
aatacagaccaagagcct

SEQ ID NO: 26734 - DNA, 26 bp, synthetic construct
  misc_feature 1..26: note = Probe
  source 1..26: mol_type = other DNA
aatacagaccaagagccttcaaagcc

SEQ ID NO: 26735 - DNA, 16 bp, synthetic construct
  misc_feature 1..16: note = Probe
  source 1..16: mol_type = other DNA
aatactaccgtatggc

SEQ ID NO: 26736 - DNA, 16 bp, synthetic construct
  misc_feature 1..16: note = Probe
  source 1..16: mol_type = other DNA
aatactcaaatgggcc

SEQ ID NO: 26737 - DNA, 17 bp, synthetic construct
  misc_feature 1..17: note = Probe
  source 1..17: mol_type = other DNA
aatactcaaatgggcct

SEQ ID NO: 26738 - DNA, 36 bp, synthetic construct
  misc_feature 1..36: note = Probe
  source 1..36: mol_type = other DNA
aatagctcagttgggagagcgttagactgaagatct

SEQ ID NO: 26739 - DNA, 16 bp, synthetic construct
  misc_feature 1..16: note = Probe
  source 1..16: mol_type = other DNA
aataggagcttaaacc

SEQ ID NO: 26740 - DNA, 19 bp, synthetic construct
  misc_feature 1..19: note = Probe
  source 1..19: mol_type = other DNA
aataggagcttaaaccccc

SEQ ID NO: 26741 - DNA, 36 bp, synthetic construct
  misc_feature 1..36: note = Probe
  source 1..36: mol_type = other DNA
aataggagcttaaacccccttatttctaggactatg

SEQ ID NO: 26742 - DNA, 15 bp, synthetic construct
  misc_feature 1..15: note = Probe
  source 1..15: mol_type = other DNA
aataggtttggtcct

SEQ ID NO: 26743 - DNA, 24 bp, synthetic construct
  misc_feature 1..24: note = Probe
  source 1..24: mol_type = other DNA
aataggtttggtcctagcctttct

SEQ ID NO: 26744 - DNA, 30 bp, synthetic construct; identical to SEQ ID NO: 2424
  misc_feature 1..30: note = Probe
  source 1..30: mol_type = other DNA

SEQ ID NO: 26745 - DNA, 15 bp, synthetic construct
  misc_feature 1..15: note = Probe
  source 1..15: mol_type = other DNA
aatagtaccgttaac

SEQ ID NO: 26746 - DNA, 18 bp, synthetic construct
  misc_feature 1..18: note = Probe
  source 1..18: mol_type = other DNA
aatagtaccgttaacttc

SEQ ID NO: 26747 - DNA, 36 bp, synthetic construct
  misc_feature 1..36: note = Probe
  source 1..36: mol_type = other DNA
aatatagtttaaccaaaacatcagattgtgaatctg

SEQ ID NO: 26748 - DNA, 29 bp, synthetic construct
  misc_feature 1..29: note = Probe
  source 1..29: mol_type = other DNA
aatcacgtcggggtcaaacaaaacattgt

SEQ ID NO: 26749 - DNA, 30 bp, synthetic construct
  misc_feature 1..30: note = Probe
  source 1..30: mol_type = other DNA
aatcacgtcggggtcaaacaaaacattgtt

SEQ ID NO: 26750 - DNA, 19 bp, synthetic construct
  misc_feature 1..19: note = Probe
  source 1..19: mol_type = other DNA
aatcacgtcggggtcaaca

SEQ ID NO: 26751 - DNA, 23 bp, synthetic construct
  misc_feature 1..23: note = Probe
  source 1..23: mol_type = other DNA
aatcagagaaaaagtctttaact

SEQ ID NO: 26752 - DNA, 24 bp, synthetic construct
  misc_feature 1..24: note = Probe
  source 1..24: mol_type = other DNA
aatcagagaaaaagtctttaactc

SEQ ID NO: 26753 - DNA, 25 bp, synthetic construct
  misc_feature 1..25: note = Probe
  source 1..25: mol_type = other DNA
aatcagagaaaaagtctttaactcc

SEQ ID NO: 26754 - DNA, 28 bp, synthetic construct
  misc_feature 1..28: note = Probe
  source 1..28: mol_type = other DNA
aatcagagaaaaagtctttaactccacc

SEQ ID NO: 26755 - DNA, 30 bp, synthetic construct; identical to SEQ ID NO: 15218
  misc_feature 1..30: note = Probe
  source 1..30: mol_type = other DNA

SEQ ID NO: 26756 - DNA, 20 bp, synthetic construct
  misc_feature 1..20: note = Probe
  source 1..20: mol_type = other DNA
aatcagtgcccggctagctc

SEQ ID NO: 26757 - DNA, 25 bp, synthetic construct
  misc_feature 1..25: note = Probe
  source 1..25: mol_type = other DNA
aatcagtgcccggctagctcagtcg

SEQ ID NO: 26758 - DNA, 36 bp, synthetic construct
  misc_feature 1..36: note = Probe
  source 1..36: mol_type = other DNA
aatcagtgcccggctagctcagtcggtagagcatga

SEQ ID NO: 26759 - DNA, 19 bp, synthetic construct
  misc_feature 1..19: note = Probe
  source 1..19: mol_type = other DNA
aatccagcgatccgagttc

SEQ ID NO: 26760 - DNA, 23 bp, synthetic construct
  misc_feature 1..23: note = Probe
  source 1..23: mol_type = other DNA
aatccagcgatccgagttcaaat

SEQ ID NO: 26761 - DNA, 36 bp, synthetic construct; identical to SEQ ID NO: 93
  misc_feature 1..36: note = Probe
  source 1..36: mol_type = other DNA

SEQ ID NO: 26762 - DNA, 36 bp, synthetic construct; identical to SEQ ID NO: 15234
  misc_feature 1..36: note = Probe
  source 1..36: mol_type = other DNA

SEQ ID NO: 26763 - DNA, 18 bp, synthetic construct
  misc_feature 1..18: note = Probe
  source 1..18: mol_type = other DNA
aatcccaccgctgccaca

SEQ ID NO: 26764 - DNA, 18 bp, synthetic construct
  misc_feature 1..18: note = Probe
  source 1..18: mol_type = other DNA
aatcccaccgctgccagc

SEQ ID NO: 26765 - DNA, 19 bp, synthetic construct
  misc_feature 1..19: note = Probe
  source 1..19: mol_type = other DNA
aatcccagcggtgcctcaa

SEQ ID NO: 26766 - DNA, 19 bp, synthetic construct
  misc_feature 1..19: note = Probe
  source 1..19: mol_type = other DNA
aatcccagcggtgcctccg

SEQ ID NO: 26767 - DNA, 18 bp, synthetic construct
  misc_feature 1..18: note = Probe
  source 1..18: mol_type = other DNA
aatcccatcctcgtcgct

SEQ ID NO: 26768 - DNA, 18 bp, synthetic construct
  misc_feature 1..18: note = Probe
  source 1..18: mol_type = other DNA
aatcccatcctcgtcggc

SEQ ID NO: 26769 - DNA, 36 bp, synthetic construct
  misc_feature 1..36: note = Probe
  source 1..36: mol_type = other DNA
aatcccatcctcgtcggctgcatagcaagccttttg

SEQ ID NO: 26770 - DNA, 15 bp, synthetic construct
  misc_feature 1..15: note = Probe
  source 1..15: mol_type = other DNA
aatccccggcacctc

SEQ ID NO: 26771 - DNA, 19 bp, synthetic construct
  misc_feature 1..19: note = Probe
  source 1..19: mol_type = other DNA
aatccccggcacctccacc

SEQ ID NO: 26772 - DNA, 17 bp, synthetic construct
  misc_feature 1..17: note = Probe
  source 1..17: mol_type = other DNA
aatcccctggcccaacc

SEQ ID NO: 26773 - DNA, 18 bp, synthetic construct
  misc_feature 1..18: note = Probe
  source 1..18: mol_type = other DNA
aatcccctggcccaaccc

SEQ ID NO: 26774 - DNA, 19 bp, synthetic construct
  misc_feature 1..19: note = Probe
  source 1..19: mol_type = other DNA
aatcccctggcccaacccg

SEQ ID NO: 26775 - DNA, 21 bp, synthetic construct
  misc_feature 1..21: note = Probe
  source 1..21: mol_type = other DNA
aatcccctggcccaacccgtc

SEQ ID NO: 26776 - DNA, 27 bp, synthetic construct
  misc_feature 1..27: note = Probe
  source 1..27: mol_type = other DNA
aatcccctggcccaacccgtcatctac

SEQ ID NO: 26777 - DNA, 15 bp, synthetic construct
  misc_feature 1..15: note = Probe
  source 1..15: mol_type = other DNA
aatcccggacgagcc

SEQ ID NO: 26778 - DNA, 16 bp, synthetic construct
  misc_feature 1..16: note = Probe
  source 1..16: mol_type = other DNA
aatcccggacgagccc

SEQ ID NO: 26779 - DNA, 17 bp, synthetic construct
  misc_feature 1..17: note = Probe
  source 1..17: mol_type = other DNA
aatcccggacgagccca

SEQ ID NO: 26780 - DNA, 19 bp, synthetic construct
  misc_feature 1..19: note = Probe
  source 1..19: mol_type = other DNA
aatcccggacgagcccaca

SEQ ID NO: 26781 - DNA, 19 bp, synthetic construct
  misc_feature 1..19: note = Probe
  source 1..19: mol_type = other DNA
aatcccggacgagcccact

SEQ ID NO: 26782 - DNA, 20 bp, synthetic construct
  misc_feature 1..20: note = Probe
  source 1..20: mol_type = other DNA
aatcccggacgagcccactt

SEQ ID NO: 26783 - DNA, 21 bp, synthetic construct
  misc_feature 1..21: note = Probe
  source 1..21: mol_type = other DNA
aatcccggacgagcccacttc

SEQ ID NO: 26784 - DNA, 22 bp, synthetic construct
  misc_feature 1..22: note = Probe
  source 1..22: mol_type = other DNA
aatcccggacgagcccacttca

SEQ ID NO: 26785 - DNA, 21 bp, synthetic construct
  misc_feature 1..21: note = Probe
  source 1..21: mol_type = other DNA
aatcccggacgagcccacttt

SEQ ID NO: 26786 - DNA, 22 bp, synthetic construct
  misc_feature 1..22: note = Probe
  source 1..22: mol_type = other DNA
aatcccggacgagcccactttt

SEQ ID NO: 26787 - DNA, 23 bp, synthetic construct
  misc_feature 1..23: note = Probe
  source 1..23: mol_type = other DNA
aatcccggacgagcccaggcttt

SEQ ID NO: 26788 - DNA, 17 bp, synthetic construct
  misc_feature 1..17: note = Probe
  source 1..17: mol_type = other DNA
aatcccggacgagcccc

SEQ ID NO: 26789 - DNA, 18 bp, synthetic construct
  misc_feature 1..18: note = Probe
  source 1..18: mol_type = other DNA
aatcccggacgagccccc

SEQ ID NO: 26790 - DNA, 19 bp, synthetic construct
  misc_feature 1..19: note = Probe
  source 1..19: mol_type = other DNA
aatcccggacgagccccct

SEQ ID NO: 26791 - DNA, 18 bp, synthetic construct
  misc_feature 1..18: note = Probe
  source 1..18: mol_type = other DNA
aatcccggacgagcccct

SEQ ID NO: 26792 - DNA, 22 bp, synthetic construct
  misc_feature 1..22: note = Probe
  source 1..22: mol_type = other DNA
aatcccggacgagcccctcttt

SEQ ID NO: 26793 - DNA, 17 bp, synthetic construct
  misc_feature 1..17: note = Probe
  source 1..17: mol_type = other DNA
aatcccggacgagccct

SEQ ID NO: 26794 - DNA, 18 bp, synthetic construct
  misc_feature 1..18: note = Probe
  source 1..18: mol_type = other DNA
aatcccggacgagccctc

SEQ ID NO: 26795 - DNA, 19 bp, synthetic construct
  misc_feature 1..19: note = Probe
  source 1..19: mol_type = other DNA
aatcccggacgagccctca

SEQ ID NO: 26796 - DNA, 20 bp, synthetic construct
  misc_feature 1..20: note = Probe
  source 1..20: mol_type = other DNA
aatcccggacgagccctcat

SEQ ID NO: 26797 - DNA, 21 bp, synthetic construct
  misc_feature 1..21: note = Probe
  source 1..21: mol_type = other DNA
aatcccggacgagccctcatt

SEQ ID NO: 26798 - DNA, 22 bp, synthetic construct
  misc_feature 1..22: note = Probe
  source 1..22: mol_type = other DNA
aatcccggacgagccctcattt

SEQ ID NO: 26799 - DNA, 23 bp, synthetic construct
  misc_feature 1..23: note = Probe
  source 1..23: mol_type = other DNA
aatcccggacgagccctcatttt

SEQ ID NO: 26800 - DNA, 24 bp, synthetic construct
  misc_feature 1..24: note = Probe
  source 1..24: mol_type = other DNA
aatcccggacgagccctcattttc

SEQ ID NO: 26801 - DNA, 25 bp, synthetic construct
  misc_feature 1..25: note = Probe
  source 1..25: mol_type = other DNA
aatcccggacgagccctcattttct

SEQ ID NO: 26802 - DNA, 26 bp, synthetic construct
  misc_feature 1..26: note = Probe
  source 1..26: mol_type = other DNA
aatcccggacgagccctcattttctt

SEQ ID NO: 26803 - DNA, 27 bp, synthetic construct
  misc_feature 1..27: note = Probe
  source 1..27: mol_type = other DNA
aatcccggacgagccctcattttcttt

SEQ ID NO: 26804 - DNA, 19 bp, synthetic construct
  misc_feature 1..19: note = Probe
  source 1..19: mol_type = other DNA
aatcccggacgagccctcg

SEQ ID NO: 26805 - DNA, 19 bp, synthetic construct
  misc_feature 1..19: note = Probe
  source 1..19: mol_type = other DNA
aatcccggacgagccctgt

SEQ ID NO: 26806 - DNA, 20 bp, synthetic construct
  misc_feature 1..20: note = Probe
  source 1..20: mol_type = other DNA
aatcccggacgagccctgtt

SEQ ID NO: 26807 - DNA, 21 bp, synthetic construct
  misc_feature 1..21: note = Probe
  source 1..21: mol_type = other DNA
aatcccggacgagccctgttt

SEQ ID NO: 26808 - DNA, 22 bp, synthetic construct
  misc_feature 1..22: note = Probe
  source 1..22: mol_type = other DNA
aatcccggacgagccctgtttt

SEQ ID NO: 26809 - DNA, 17 bp, synthetic construct
  misc_feature 1..17: note = Probe
  source 1..17: mol_type = other DNA
aatccgggtgccccctc

SEQ ID NO: 26810 - DNA, 19 bp, synthetic construct
  misc_feature 1..19: note = Probe
  source 1..19: mol_type = other DNA
aatccgggtgccccctcaa

SEQ ID NO: 26811 - DNA, 19 bp, synthetic construct
  misc_feature 1..19: note = Probe
  source 1..19: mol_type = other DNA
aatcctgccgactacggca

SEQ ID NO: 26812 - DNA, 19 bp, synthetic construct
  misc_feature 1..19: note = Probe
  source 1..19: mol_type = other DNA
aatcctgccgactacgtca

SEQ ID NO: 26813 - DNA, 20 bp, synthetic construct
  misc_feature 1..20: note = Probe
  source 1..20: mol_type = other DNA
aatcgaacccatccctgaga

SEQ ID NO: 26814 - DNA, 36 bp, synthetic construct; identical to SEQ ID NO: 100
  misc_feature 1..36: note = Probe
  source 1..36: mol_type = other DNA

SEQ ID NO: 26815 - DNA, 27 bp, synthetic construct
  misc_feature 1..27: note = Probe
  source 1..27: mol_type = other DNA
aatcggttagcgcgttcggctgttaac

SEQ ID NO: 26816 - DNA, 24 bp, synthetic construct
  misc_feature 1..24: note = Probe
  source 1..24: mol_type = other DNA
aatctaaagacaggggttaggcct

SEQ ID NO: 26817 - DNA, 36 bp, synthetic construct; identical to SEQ ID NO: 2466
  misc_feature 1..36: note = Probe
  source 1..36: mol_type = other DNA

SEQ ID NO: 26818 - DNA, 36 bp, synthetic construct
  misc_feature 1..36: note = Probe
  source 1..36: mol_type = other DNA
aatctcagggtcgtgggttcgagccccacgttgggc

SEQ ID NO: 26819 - DNA, 40 bp, synthetic construct
  misc_feature 1..40: note = Probe
  source 1..40: mol_type = other DNA
aatctcagggtcgtgggttcgagccccacgttgggcggca

SEQ ID NO: 26820 - DNA, 19 bp, synthetic construct
  misc_feature 1..19: note = Probe
  source 1..19: mol_type = other DNA
aatctcggtggaacctgca

SEQ ID NO: 26821 - DNA, 27 bp, synthetic construct
  misc_feature 1..27: note = Probe
  source 1..27: mol_type = other DNA
aatctcggtggaacctgcattggtttt

SEQ ID NO: 26822 - DNA, 36 bp, synthetic construct
  misc_feature 1..36: note = Probe
  source 1..36: mol_type = other DNA
aatctgaaggtcctgagttcgaacctcagagggggc

SEQ ID NO: 26823 - DNA, 40 bp, synthetic construct
  misc_feature 1..40: note = Probe
  source 1..40: mol_type = other DNA
aatctgaaggtcctgagttcgaacctcagagggggcagct

SEQ ID NO: 26824 - DNA, 36 bp, synthetic construct
  misc_feature 1..36: note = Probe
  source 1..36: mol_type = other DNA
aatctgaaggtcgtgagttcgagcctcacacggggc

SEQ ID NO: 26825 - DNA, 36 bp, synthetic construct
  misc_feature 1..36: note = Probe
  source 1..36: mol_type = other DNA
aatctgaaggtcgtgagttcgatcctcacacggggc

SEQ ID NO: 26826 - DNA, 40 bp, synthetic construct; identical to SEQ ID NO: 2472
  misc_feature 1..40: note = Probe
  source 1..40: mol_type = other DNA

SEQ ID NO: 26827 - DNA, 26 bp, synthetic construct
  misc_feature 1..26: note = Probe
  source 1..26: mol_type = other DNA
aatctgacaacagaggcttacgaccc

SEQ ID NO: 26828 - DNA, 38 bp, synthetic construct; identical to SEQ ID NO: 2479
  misc_feature 1..38: note = Probe
  source 1..38: mol_type = other DNA

SEQ ID NO: 26829 - DNA, 36 bp, synthetic construct
  misc_feature 1..36: note = Probe
  source 1..36: mol_type = other DNA
aatctgagggtccagggttcaagtccctgttcgggc

SEQ ID NO: 26830 - DNA, 39 bp, synthetic construct
  misc_feature 1..39: note = Probe
  source 1..39: mol_type = other DNA
aatctgagggtccagggttcaagtccctgttcgggcggc

SEQ ID NO: 26831 - DNA, 40 bp, synthetic construct
  misc_feature 1..40: note = Probe
  source 1..40: mol_type = other DNA
aatctgagggtccagggttcaagtccctgttcgggcggca

SEQ ID NO: 26832 - DNA, 39 bp, synthetic construct
  misc_feature 1..39: note = Probe
  source 1..39: mol_type = other DNA
aatctgagggtccagggttcaagtccctgttcgggcgtc

SEQ ID NO: 26833 - DNA, 37 bp, synthetic construct
  misc_feature 1..37: note = Probe
  source 1..37: mol_type = other DNA
aatcttagctttgggtgctaatggtggagttaaagac

SEQ ID NO: 26834 - DNA, 38 bp, synthetic construct
  misc_feature 1..38: note = Probe
  source 1..38: mol_type = other DNA
aatcttagctttgggtgctaatggtggagttaaagact

SEQ ID NO: 26835 - DNA, 50 bp, synthetic construct; identical to SEQ ID NO: 2483
  misc_feature 1..50: note = Probe
  source 1..50: mol_type = other DNA

SEQ ID NO: 26836 - DNA, 36 bp, synthetic construct
  misc_feature 1..36: note = Probe
  source 1..36: mol_type = other DNA
aatgacatccttcgatagctcagctggtagagcgga

SEQ ID NO: 26837 - DNA, 15 bp, synthetic construct
  misc_feature 1..15: note = Probe
  source 1..15: mol_type = other DNA
aatgatttcgactca

SEQ ID NO: 26838 - DNA, 16 bp, synthetic construct
  misc_feature 1..16: note = Probe
  source 1..16: mol_type = other DNA
aatgatttcgactcat

SEQ ID NO: 26839 - DNA, 17 bp, synthetic construct
  misc_feature 1..17: note = Probe
  source 1..17: mol_type = other DNA
aatgatttcgactcatt

SEQ ID NO: 26840 - DNA, 36 bp, synthetic construct
  misc_feature 1..36: note = Probe
  source 1..36: mol_type = other DNA
aatgatttcgactcattaaattatgataatcatatt

SEQ ID NO: 26841 - DNA, 19 bp, synthetic construct
  misc_feature 1..19: note = Probe
  source 1..19: mol_type = other DNA
aatgccccaactaaatact

SEQ ID NO: 26842 - DNA, 22 bp, synthetic construct
  misc_feature 1..22: note = Probe
  source 1..22: mol_type = other DNA
aatgccccaactaaatactacc

SEQ ID NO: 26843 - DNA, 23 bp, synthetic construct
  misc_feature 1..23: note = Probe
  source 1..23: mol_type = other DNA
aatgccccaactaaatactaccg

SEQ ID NO: 26844 - DNA, 29 bp, synthetic construct
  misc_feature 1..29: note = Probe
  source 1..29: mol_type = other DNA
aatgccccaactaaatactaccgtatggc

SEQ ID NO: 26845 - DNA, 36 bp, synthetic construct
  misc_feature 1..36: note = Probe
  source 1..36: mol_type = other DNA
aatggaggcgtgggttcgaatcccacttctgacaca

SEQ ID NO: 26846 - DNA, 20 bp, synthetic construct
  misc_feature 1..20: note = Probe
  source 1..20: mol_type = other DNA
aatggataacgcgtctgact

SEQ ID NO: 26847 - DNA, 27 bp, synthetic construct
  misc_feature 1..27: note = Probe
  source 1..27: mol_type = other DNA
aatggataacgcgtctgactacggatc

SEQ ID NO: 26848 - DNA, 16 bp, synthetic construct
  misc_feature 1..16: note = Probe
  source 1..16: mol_type = other DNA
aatggataaggcactg

SEQ ID NO: 26849 - DNA, 18 bp, synthetic construct
  misc_feature 1..18: note = Probe
  source 1..18: mol_type = other DNA
aatggataaggcactggc

SEQ ID NO: 26850 - DNA, 16 bp, synthetic construct
  misc_feature 1..16: note = Probe
  source 1..16: mol_type = other DNA
aatggataaggcattg

SEQ ID NO: 26851 - DNA, 18 bp, synthetic construct
  misc_feature 1..18: note = Probe
  source 1..18: mol_type = other DNA
aatggataaggcattggc

SEQ ID NO: 26852 - DNA, 18 bp, synthetic construct
  misc_feature 1..18: note = Probe
  source 1..18: mol_type = other DNA
aatggataaggcgtctga

SEQ ID NO: 26853 - DNA, 20 bp, synthetic construct
  misc_feature 1..20: note = Probe
  source 1..20: mol_type = other DNA
aatggataaggcgtctgact

SEQ ID NO: 26854 - DNA, 18 bp, synthetic construct
  misc_feature 1..18: note = Probe
  source 1..18: mol_type = other DNA
aatggatagcgcattgga

SEQ ID NO: 26855 - DNA, 19 bp, synthetic construct
  misc_feature 1..19: note = Probe
  source 1..19: mol_type = other DNA
aatggatagcgcattggac

SEQ ID NO: 26856 - DNA, 20 bp, synthetic construct
  misc_feature 1..20: note = Probe
  source 1..20: mol_type = other DNA
aatggatagcgcattggact

SEQ ID NO: 26857 - DNA, 20 bp, synthetic construct
  misc_feature 1..20: note = Probe
  source 1..20: mol_type = other DNA
aatggcacggcaaggggctc

SEQ ID NO: 26858 - DNA, 23 bp, synthetic construct
  misc_feature 1..23: note = Probe
  source 1..23: mol_type = other DNA
aatggctgagtgaagcattggac

SEQ ID NO: 26859 - DNA, 24 bp, synthetic construct
  misc_feature 1..24: note = Probe
  source 1..24: mol_type = other DNA
aatggctgagtgaagcattggact

SEQ ID NO: 26860 - DNA, 27 bp, synthetic construct
  misc_feature 1..27: note = Probe
  source 1..27: mol_type = other DNA
aatggctgagtgaagcattggactgta

SEQ ID NO: 26861 - DNA, 28 bp, synthetic construct
  misc_feature 1..28: note = Probe
  source 1..28: mol_type = other DNA
aatggctgagtgaagcattggactgtaa

SEQ ID NO: 26862 - DNA, 29 bp, synthetic construct
  misc_feature 1..29: note = Probe
  source 1..29: mol_type = other DNA
aatggctgagtgaagcattggactgtaaa

SEQ ID NO: 26863 - DNA, 36 bp, synthetic construct
  misc_feature 1..36: note = Probe
  source 1..36: mol_type = other DNA
aatggctgagtgaagcattggactgtaaatctaaag

SEQ ID NO: 26864 - DNA, 15 bp, synthetic construct
  misc_feature 1..15: note = Probe
  source 1..15: mol_type = other DNA
aatggcttggttttt

SEQ ID NO: 26865 - DNA, 17 bp, synthetic construct
  misc_feature 1..17: note = Probe
  source 1..17: mol_type = other DNA
aatggtagagcgctcgc

SEQ ID NO: 26866 - DNA, 19 bp, synthetic construct
  misc_feature 1..19: note = Probe
  source 1..19: mol_type = other DNA
aatggtagcgcgtctgact

SEQ ID NO: 26867 - DNA, 18 bp, synthetic construct
  misc_feature 1..18: note = Probe
  source 1..18: mol_type = other DNA
aatggtgagcactctgga

SEQ ID NO: 26868 - DNA, 15 bp, synthetic construct
  misc_feature 1..15: note = Probe
  source 1..15: mol_type = other DNA
aatggtggagttaaa

SEQ ID NO: 26869 - DNA, 16 bp, synthetic construct
  misc_feature 1..16: note = Probe
  source 1..16: mol_type = other DNA
aatggtggagttaaag

SEQ ID NO: 26870 - DNA, 17 bp, synthetic construct
  misc_feature 1..17: note = Probe
  source 1..17: mol_type = other DNA
aatggtggagttaaaga

SEQ ID NO: 26871 - DNA, 19 bp, synthetic construct
  misc_feature 1..19: note = Probe
  source 1..19: mol_type = other DNA
aatggtggagttaaagact

SEQ ID NO: 26872 - DNA, 20 bp, synthetic construct
  misc_feature 1..20: note = Probe
  source 1..20: mol_type = other DNA
aatggtggagttaaagactt

SEQ ID NO: 26873 - DNA, 21 bp, synthetic construct
  misc_feature 1..21: note = Probe
  source 1..21: mol_type = other DNA
aatggtggagttaaagacttt

SEQ ID NO: 26874 - DNA, 27 bp, synthetic construct
  misc_feature 1..27: note = Probe
  source 1..27: mol_type = other DNA
aatggtggagttaaagactttttctct

SEQ ID NO: 26875 - DNA, 28 bp, synthetic construct
  misc_feature 1..28: note = Probe
  source 1..28: mol_type = other DNA
aatggtggagttaaagactttttctctg

SEQ ID NO: 26876 - DNA, 30 bp, synthetic construct; identical to SEQ ID NO: 8969
  misc_feature 1..30: note = Probe
  source 1..30: mol_type = other DNA

SEQ ID NO: 26877 - DNA, 31 bp, synthetic construct; identical to SEQ ID NO: 2497
  misc_feature 1..31: note = Probe
  source 1..31: mol_type = other DNA

SEQ ID NO: 26878 - DNA, 17 bp, synthetic construct
  misc_feature 1..17: note = Probe
  source 1..17: mol_type = other DNA
aatggttagcactctgg

SEQ ID NO: 26879 - DNA, 18 bp, synthetic construct
  misc_feature 1..18: note = Probe
  source 1..18: mol_type = other DNA
aatggttagcactctgga

SEQ ID NO: 26880 - DNA, 19 bp, synthetic construct
  misc_feature 1..19: note = Probe
  source 1..19: mol_type = other DNA
aatggttagcactctggac

SEQ ID NO: 26881 - DNA, 20 bp, synthetic construct
  misc_feature 1..20: note = Probe
  source 1..20: mol_type = other DNA
aatggttagcactctggact

SEQ ID NO: 26882 - DNA, 21 bp, synthetic construct
  misc_feature 1..21: note = Probe
  source 1..21: mol_type = other DNA
aatggttagcactctggactc

SEQ ID NO: 26883 - DNA, 24 bp, synthetic construct
  misc_feature 1..24: note = Probe
  source 1..24: mol_type = other DNA
aatggttagcactctggactctga

SEQ ID NO: 26884 - DNA, 25 bp, synthetic construct
  misc_feature 1..25: note = Probe
  source 1..25: mol_type = other DNA
aatggttagcactctggactctgaa

SEQ ID NO: 26885 - DNA, 28 bp, synthetic construct
  misc_feature 1..28: note = Probe
  source 1..28: mol_type = other DNA
aatggttagcactctggactctgaatcc

SEQ ID NO: 26886 - DNA, 39 bp, synthetic construct
  misc_feature 1..39: note = Probe
  source 1..39: mol_type = other DNA
aatggttagcactctggactctgaatccagcgatccgag

SEQ ID NO: 26887 - DNA, 40 bp, synthetic construct
  misc_feature 1..40: note = Probe
  source 1..40: mol_type = other DNA
aatggttagcactctggactctgaatccagcgatccgagt

SEQ ID NO: 26888 - DNA, 41 bp, synthetic construct
  misc_feature 1..41: note = Probe
  source 1..41: mol_type = other DNA
aatggttagcactctggactctgaatccagcgatccgagtt

SEQ ID NO: 26889 - DNA, 26 bp, synthetic construct
  misc_feature 1..26: note = Probe
  source 1..26: mol_type = other DNA
aatggttagcactctggactttgaat

SEQ ID NO: 26890 - DNA, 27 bp, synthetic construct
  misc_feature 1..27: note = Probe
  source 1..27: mol_type = other DNA
aatggttagcactctggactttgaatc

SEQ ID NO: 26891 - DNA, 28 bp, synthetic construct
  misc_feature 1..28: note = Probe
  source 1..28: mol_type = other DNA
aatggttagcactctggactttgaatcc

SEQ ID NO: 26892 - DNA, 29 bp, synthetic construct
  misc_feature 1..29: note = Probe
  source 1..29: mol_type = other DNA
aatggttagcactctggactttgaatcca

SEQ ID NO: 26893 - DNA, 36 bp, synthetic construct
  misc_feature 1..36: note = Probe
  source 1..36: mol_type = other DNA
aatggttagcactctggactttgaatccagcgatcc

SEQ ID NO: 26894 - DNA, 41 bp, synthetic construct
  misc_feature 1..41: note = Probe
  source 1..41: mol_type = other DNA
aatggttagcactctggactttgaatccagcgatccgagtt

SEQ ID NO: 26895 - DNA, 15 bp, synthetic construct
  misc_feature 1..15: note = Probe
  source 1..15: mol_type = other DNA
aatgttggttatacc

SEQ ID NO: 26896 - DNA, 16 bp, synthetic construct
  misc_feature 1..16: note = Probe
  source 1..16: mol_type = other DNA
aatgttggttataccc

SEQ ID NO: 26897 - DNA, 15 bp, synthetic construct
  misc_feature 1..15: note = Probe
  source 1..15: mol_type = other DNA
aatgtttagacgggc

SEQ ID NO: 26898 - DNA, 22 bp, synthetic construct
  misc_feature 1..22: note = Probe
  source 1..22: mol_type = other DNA
aatgtttagacgggctcacatc

SEQ ID NO: 26899 - DNA, 23 bp, synthetic construct
  misc_feature 1..23: note = Probe
  source 1..23: mol_type = other DNA
aatgtttagacgggctcacatca

SEQ ID NO: 26900 - DNA, 27 bp, synthetic construct
  misc_feature 1..27: note = Probe
  source 1..27: mol_type = other DNA
aatgtttagacgggctcacatcacccc

SEQ ID NO: 26901 - DNA, 30 bp, synthetic construct
  misc_feature 1..30: note = Probe
  source 1..30: mol_type = other DNA
aatgtttagacgggctcacatcaccccata

SEQ ID NO: 26902 - DNA, 16 bp, synthetic construct
  misc_feature 1..16: note = Probe
  source 1..16: mol_type = other DNA
aattaaagtggctgat

SEQ ID NO: 26903 - DNA, 17 bp, synthetic construct
  misc_feature 1..17: note = Probe
  source 1..17: mol_type = other DNA
aattaaagtggctgatt

SEQ ID NO: 26904 - DNA, 20 bp, synthetic construct
  misc_feature 1..20: note = Probe
  source 1..20: mol_type = other DNA
aattaaagtggctgatttgc

SEQ ID NO: 26905 - DNA, 17 bp, synthetic construct
  misc_feature 1..17: note = Probe
  source 1..17: mol_type = other DNA
aattaactagttttgac

SEQ ID NO: 26906 - DNA, 20 bp, synthetic construct
  misc_feature 1..20: note = Probe
  source 1..20: mol_type = other DNA
aattaactagttttgacaac

SEQ ID NO: 26907 - DNA, 21 bp, synthetic construct
  misc_feature 1..21: note = Probe
  source 1..21: mol_type = other DNA
aattaactagttttgacaaca

SEQ ID NO: 26908 - DNA, 36 bp, synthetic construct; identical to SEQ ID NO: 15306
  misc_feature 1..36: note = Probe
  source 1..36: mol_type = other DNA

SEQ ID NO: 26909 - DNA, 21 bp, synthetic construct
  misc_feature 1..21: note = Probe
  source 1..21: mol_type = other DNA
aattaatcccctggcccaacc

SEQ ID NO: 26910 - DNA, 22 bp, synthetic construct
  misc_feature 1..22: note = Probe
  source 1..22: mol_type = other DNA
aattaatcccctggcccaaccc

SEQ ID NO: 26911 - DNA, 31 bp, synthetic construct
  misc_feature 1..31: note = Probe
  source 1..31: mol_type = other DNA
aattaatcccctggcccaacccgtcatctac

SEQ ID NO: 26912 - DNA, 16 bp, synthetic construct
  misc_feature 1..16: note = Probe
  source 1..16: mol_type = other DNA
aattagaatcttagct

SEQ ID NO: 26913 - DNA, 17 bp, synthetic construct
  misc_feature 1..17: note = Probe
  source 1..17: mol_type = other DNA
aattagaatcttagctt

SEQ ID NO: 26914 - DNA, 20 bp, synthetic construct
  misc_feature 1..20: note = Probe
  source 1..20: mol_type = other DNA
aattagaatcttagctttgg

SEQ ID NO: 26915 - DNA, 25 bp, synthetic construct
  misc_feature 1..25: note = Probe
  source 1..25: mol_type = other DNA
aattagaatcttagctttgggtgct

SEQ ID NO: 26916 - DNA, 44 bp, synthetic construct
  misc_feature 1..44: note = Probe
  source 1..44: mol_type = other DNA
aattagaatcttagctttgggtgctaatggtggagttaaagact

SEQ ID NO: 26917 - DNA, 50 bp, synthetic construct; identical to SEQ ID NO: 113
  misc_feature 1..50: note = Probe
  source 1..50: mol_type = other DNA

SEQ ID NO: 26918 - DNA, 33 bp, synthetic construct
  misc_feature 1..33: note = Probe
  source 1..33: mol_type = other DNA
aattcgaagaagcagcttcaaacctgccggggc

SEQ ID NO: 26919 - DNA, 34 bp, synthetic construct
  misc_feature 1..34: note = Probe
  source 1..34: mol_type = other DNA
aattcgaagaagcagcttcaaacctgccggggct

SEQ ID NO: 26920 - DNA, 35 bp, synthetic construct
  misc_feature 1..35: note = Probe
  source 1..35: mol_type = other DNA
aattcgaagaagcagcttcaaacctgccggggctt

SEQ ID NO: 26921 - DNA, 36 bp, synthetic construct
  misc_feature 1..36: note = Probe
  source 1..36: mol_type = other DNA
aattcgaagaagcagcttcaaacctgccggggcttc

SEQ ID NO: 26922 - DNA, 37 bp, synthetic construct; identical to SEQ ID NO: 2507
  misc_feature 1..37: note = Probe
  source 1..37: mol_type = other DNA

SEQ ID NO: 26923 - DNA, 15 bp, synthetic construct
  misc_feature 1..15: note = Probe
  source 1..15: mol_type = other DNA
aattctcgcctgcca

SEQ ID NO: 26924 - DNA, 16 bp, synthetic construct
  misc_feature 1..16: note = Probe
  source 1..16: mol_type = other DNA
aattctcgcctgccac

SEQ ID NO: 26925 - DNA, 18 bp, synthetic construct
  misc_feature 1..18: note = Probe
  source 1..18: mol_type = other DNA
aattctcgcctgccacgc

SEQ ID NO: 26926 - DNA, 28 bp, synthetic construct
  misc_feature 1..28: note = Probe
  source 1..28: mol_type = other DNA
aattgaaaacaaaatactcaaatgggcc

SEQ ID NO: 26927 - DNA, 29 bp, synthetic construct
  misc_feature 1..29: note = Probe
  source 1..29: mol_type = other DNA
aattgaaaacaaaatactcaaatgggcct

SEQ ID NO: 26928 - DNA, 36 bp, synthetic construct; identical to SEQ ID NO: 2512
  misc_feature 1..36: note = Probe
  source 1..36: mol_type = other DNA

SEQ ID NO: 26929 - DNA, 36 bp, synthetic construct
  misc_feature 1..36: note = Probe
  source 1..36: mol_type = other DNA
aattttggattctcagggatgggttcgattctcata

SEQ ID NO: 26930 - DNA, 41 bp, synthetic construct
  misc_feature 1..41: note = Probe
  source 1..41: mol_type = other DNA
aattttggattctcagggatgggttcgattctcatagtcct

SEQ ID NO: 26931 - DNA, 16 bp, synthetic construct
  misc_feature 1..16: note = Probe
  source 1..16: mol_type = other DNA
aattttggtgcaactc

SEQ ID NO: 26932 - DNA, 17 bp, synthetic construct
  misc_feature 1..17: note = Probe
  source 1..17: mol_type = other DNA
aattttggtgcaactcc

SEQ ID NO: 26933 - DNA, 17 bp, synthetic construct
  misc_feature 1..17: note = Probe
  source 1..17: mol_type = other DNA
acaaaaaggattagact

SEQ ID NO: 26934 - DNA, 22 bp, synthetic construct
  misc_feature 1..22: note = Probe
  source 1..22: mol_type = other DNA
acaaaaaggattagactgaacc

SEQ ID NO: 26935 - DNA, 23 bp, synthetic construct
  misc_feature 1..23: note = Probe
  source 1..23: mol_type = other DNA
acaaaaaggattagactgaaccg

SEQ ID NO: 26936 - DNA, 26 bp, synthetic construct
  misc_feature 1..26: note = Probe
  source 1..26: mol_type = other DNA
acaaaaaggattagactgaaccgaat

SEQ ID NO: 26937 - DNA, 21 bp, synthetic construct
  misc_feature 1..21: note = Probe
  source 1..21: mol_type = other DNA
acaaaacgaatgatttcgact

SEQ ID NO: 26938 - DNA, 22 bp, synthetic construct
  misc_feature 1..22: note = Probe
  source 1..22: mol_type = other DNA
acaaaacgaatgatttcgactc

SEQ ID NO: 26939 - DNA, 23 bp, synthetic construct
  misc_feature 1..23: note = Probe
  source 1..23: mol_type = other DNA
acaaaacgaatgatttcgactca

SEQ ID NO: 26940 - DNA, 36 bp, synthetic construct
  misc_feature 1..36: note = Probe
  source 1..36: mol_type = other DNA
acaaaacgaatgatttcgactcattaaattatgata

SEQ ID NO: 26941 - DNA, 36 bp, synthetic construct; identical to SEQ ID NO: 15324
  misc_feature 1..36: note = Probe
  source 1..36: mol_type = other DNA

SEQ ID NO: 26942 - DNA, 50 bp, synthetic construct; identical to SEQ ID NO: 117
  misc_feature 1..50: note = Probe
  source 1..50: mol_type = other DNA

SEQ ID NO: 26943 - DNA, 15 bp, synthetic construct
  misc_feature 1..15: note = Probe
  source 1..15: mol_type = other DNA
acaacagaggcttac

SEQ ID NO: 26944 - DNA, 16 bp, synthetic construct
  misc_feature 1..16: note = Probe
  source 1..16: mol_type = other DNA
acaacagaggcttacg

SEQ ID NO: 26945 - DNA, 17 bp, synthetic construct
  misc_feature 1..17: note = Probe
  source 1..17: mol_type = other DNA
acaacagaggcttacga

SEQ ID NO: 26946 - DNA, 18 bp, synthetic construct
  misc_feature 1..18: note = Probe
  source 1..18: mol_type = other DNA
acaacagaggcttacgac

SEQ ID NO: 26947 - DNA, 19 bp, synthetic construct
  misc_feature 1..19: note = Probe
  source 1..19: mol_type = other DNA
acaacagaggcttacgacc

SEQ ID NO: 26948 - DNA, 20 bp, synthetic construct
  misc_feature 1..20: note = Probe
  source 1..20: mol_type = other DNA
acaacagaggcttacgaccc

SEQ ID NO: 26949 - DNA, 21 bp, synthetic construct
  misc_feature 1..21: note = Probe
  source 1..21: mol_type = other DNA
acaacagaggcttacgacccc

SEQ ID NO: 26950 - DNA, 22 bp, synthetic construct
  misc_feature 1..22: note = Probe
  source 1..22: mol_type = other DNA
acaacagaggcttacgacccct

SEQ ID NO: 26951 - DNA, 23 bp, synthetic construct
  misc_feature 1..23: note = Probe
  source 1..23: mol_type = other DNA
acaacagaggcttacgacccctt

SEQ ID NO: 26952 - DNA, 24 bp, synthetic construct
  misc_feature 1..24: note = Probe
  source 1..24: mol_type = other DNA
acaacagaggcttacgacccctta

SEQ ID NO: 26953 - DNA, 25 bp, synthetic construct
  misc_feature 1..25: note = Probe
  source 1..25: mol_type = other DNA
acaacagaggcttacgaccccttat

SEQ ID NO: 26954 - DNA, 26 bp, synthetic construct
  misc_feature 1..26: note = Probe
  source 1..26: mol_type = other DNA
acaacagaggcttacgaccccttatt

SEQ ID NO: 26955 - DNA, 27 bp, synthetic construct
  misc_feature 1..27: note = Probe
  source 1..27: mol_type = other DNA
acaacagaggcttacgaccccttattt

SEQ ID NO: 26956 - DNA, 28 bp, synthetic construct
  misc_feature 1..28: note = Probe
  source 1..28: mol_type = other DNA
acaacagaggcttacgaccccttattta

SEQ ID NO: 26957 - DNA, 29 bp, synthetic construct
  misc_feature 1..29: note = Probe
  source 1..29: mol_type = other DNA
acaacagaggcttacgaccccttatttac

SEQ ID NO: 26958 - DNA, 30 bp, synthetic construct; identical to SEQ ID NO: 2562
  misc_feature 1..30: note = Probe
  source 1..30: mol_type = other DNA

SEQ ID NO: 26959 - DNA, 31 bp, synthetic construct; identical to SEQ ID NO: 2563
  misc_feature 1..31: note = Probe
  source 1..31: mol_type = other DNA

SEQ ID NO: 26960 - DNA, 32 bp, synthetic construct; identical to SEQ ID NO: 2564
  misc_feature 1..32: note = Probe
  source 1..32: mol_type = other DNA

SEQ ID NO: 26961 - DNA, 19 bp, synthetic construct
  misc_feature 1..19: note = Probe
  source 1..19: mol_type = other DNA
acaacatggctttctcaac

SEQ ID NO: 26962 - DNA, 35 bp, synthetic construct
  misc_feature 1..35: note = Probe
  source 1..35: mol_type = other DNA
acaacgatggtttttcatatcattggtcgtggttg

SEQ ID NO: 26963 - DNA, 36 bp, synthetic construct
  misc_feature 1..36: note = Probe
  source 1..36: mol_type = other DNA
acaacgatggtttttcatatcattggtcgtggttgt

SEQ ID NO: 26964 - DNA, 40 bp, synthetic construct
  misc_feature 1..40: note = Probe
  source 1..40: mol_type = other DNA
acaacgatggtttttcatatcattggtcgtggttgtagtc

SEQ ID NO: 26965 - DNA, 50 bp, synthetic construct; identical to SEQ ID NO: 118
  misc_feature 1..50: note = Probe
  source 1..50: mol_type = other DNA

SEQ ID NO: 26966 - DNA, 15 bp, synthetic construct
  misc_feature 1..15: note = Probe
  source 1..15: mol_type = other DNA
acaagaactgctaac

SEQ ID NO: 26967 - DNA, 16 bp, synthetic construct
  misc_feature 1..16: note = Probe
  source 1..16: mol_type = other DNA
acaagaactgctaact

SEQ ID NO: 26968 - DNA, 17 bp, synthetic construct
  misc_feature 1..17: note = Probe
  source 1..17: mol_type = other DNA
acaagaactgctaactc

SEQ ID NO: 26969 - DNA, 18 bp, synthetic construct
  misc_feature 1..18: note = Probe
  source 1..18: mol_type = other DNA
acaagaactgctaactca

SEQ ID NO: 26970 - DNA, 20 bp, synthetic construct
  misc_feature 1..20: note = Probe
  source 1..20: mol_type = other DNA
acaagaactgctaactcatg

SEQ ID NO: 26971 - DNA, 21 bp, synthetic construct
  misc_feature 1..21: note = Probe
  source 1..21: mol_type = other DNA
acaagaactgctaactcatgc

SEQ ID NO: 26972 - DNA, 22 bp, synthetic construct
  misc_feature 1..22: note = Probe
  source 1..22: mol_type = other DNA
acaagaactgctaactcatgcc

SEQ ID NO: 26973 - DNA, 23 bp, synthetic construct
  misc_feature 1..23: note = Probe
  source 1..23: mol_type = other DNA
acaagaactgctaactcatgccc

SEQ ID NO: 26974 - DNA, 24 bp, synthetic construct
  misc_feature 1..24: note = Probe
  source 1..24: mol_type = other DNA
acaagaactgctaactcatgcccc

SEQ ID NO: 26975 - DNA, 25 bp, synthetic construct
  misc_feature 1..25: note = Probe
  source 1..25: mol_type = other DNA
acaagaactgctaactcatgccccc

SEQ ID NO: 26976 - DNA, 26 bp, synthetic construct
  misc_feature 1..26: note = Probe
  source 1..26: mol_type = other DNA
acaagaactgctaactcatgccccca

SEQ ID NO: 26977 - DNA, 29 bp, synthetic construct
  misc_feature 1..29: note = Probe
  source 1..29: mol_type = other DNA
acaagaactgctaactcatgcccccatgt

SEQ ID NO: 26978 - DNA, 33 bp, synthetic construct; identical to SEQ ID NO: 15367
  misc_feature 1..33: note = Probe
  source 1..33: mol_type = other DNA

SEQ ID NO: 26979 - DNA, 34 bp, synthetic construct; identical to SEQ ID NO: 15368
  misc_feature 1..34: note = Probe
  source 1..34: mol_type = other DNA

SEQ ID NO: 26980 - DNA, 38 bp, synthetic construct; identical to SEQ ID NO: 12518
  misc_feature 1..38: note = Probe
  source 1..38: mol_type = other DNA

SEQ ID NO: 26981 - DNA, 39 bp, synthetic construct; identical to SEQ ID NO: 15370
  misc_feature 1..39: note = Probe
  source 1..39: mol_type = other DNA

SEQ ID NO: 26982 - DNA, 40 bp, synthetic construct
  misc_feature 1..40: note = Probe
  source 1..40: mol_type = other DNA
acaagaactgctaactcatgcccccatgtctaacaacatg

SEQ ID NO: 26983 - DNA, 41 bp, synthetic construct
  misc_feature 1..41: note = Probe
  source 1..41: mol_type = other DNA
acaagaactgctaactcatgcccccatgtctaacaacatgg

SEQ ID NO: 26984 - DNA, 42 bp, synthetic construct
  misc_feature 1..42: note = Probe
  source 1..42: mol_type = other DNA
acaagaactgctaactcatgcccccatgtctaacaacatggc

SEQ ID NO: 26985 - DNA, 43 bp, synthetic construct; identical to SEQ ID NO: 119
  misc_feature 1..43: note = Probe
  source 1..43: mol_type = other DNA

SEQ ID NO: 26986 - DNA, 44 bp, synthetic construct; identical to SEQ ID NO: 120
  misc_feature 1..44: note = Probe
  source 1..44: mol_type = other DNA

SEQ ID NO: 26987 - DNA, 46 bp, synthetic construct; identical to SEQ ID NO: 122
  misc_feature 1..46: note = Probe
  source 1..46: mol_type = other DNA

SEQ ID NO: 26988 - DNA, 47 bp, synthetic construct
  misc_feature 1..47: note = Probe
  source 1..47: mol_type = other DNA
acaagaactgctaactcatgcccccatgtctaacaacatggctttct

SEQ ID NO: 26989 - DNA, 50 bp, synthetic construct; identical to SEQ ID NO: 2588
  misc_feature 1..50: note = Probe
  source 1..50: mol_type = other DNA

SEQ ID NO: 26990 - DNA, 15 bp, synthetic construct
  misc_feature 1..15: note = Probe
  source 1..15: mol_type = other DNA
acaagtgcggttttt

SEQ ID NO: 26991 - DNA, 16 bp, synthetic construct
  misc_feature 1..16: note = Probe
  source 1..16: mol_type = other DNA
acaagtgcggtttttt

SEQ ID NO: 26992 - DNA, 17 bp, synthetic construct
  misc_feature 1..17: note = Probe
  source 1..17: mol_type = other DNA
acaagtgcggttttttt

SEQ ID NO: 26993 - DNA, 18 bp, synthetic construct
  misc_feature 1..18: note = Probe
  source 1..18: mol_type = other DNA
acaagtgcggtttttttc

SEQ ID NO: 26994 - DNA, 23 bp, synthetic construct
  misc_feature 1..23: note = Probe
  source 1..23: mol_type = other DNA
acacaaagcacccaacttacact

SEQ ID NO: 26995 - DNA, 36 bp, synthetic construct
  misc_feature 1..36: note = Probe
  source 1..36: mol_type = other DNA
acacaaagcacccaacttacacttaggagatttcaa

SEQ ID NO: 26996 - DNA, 50 bp, synthetic construct; identical to SEQ ID NO: 124
  misc_feature 1..50: note = Probe
  source 1..50: mol_type = other DNA

SEQ ID NO: 26997 - DNA, 36 bp, synthetic construct
  misc_feature 1..36: note = Probe
  source 1..36: mol_type = other DNA
acacagccagtagtcgtggccgagtggttaaggcga

SEQ ID NO: 26998 - DNA, 16 bp, synthetic construct
  misc_feature 1..16: note = Probe
  source 1..16: mol_type = other DNA
acacccacccaagaac

SEQ ID NO: 26999 - DNA, 17 bp, synthetic construct
  misc_feature 1..17: note = Probe
  source 1..17: mol_type = other DNA
acacccacccaagaaca

SEQ ID NO: 27000 - DNA, 24 bp, synthetic construct
  misc_feature 1..24: note = Probe
  source 1..24: mol_type = other DNA
acacccacccaagaacagggtttg

SEQ ID NO: 27001 - DNA, 27 bp, synthetic construct
  misc_feature 1..27: note = Probe
  source 1..27: mol_type = other DNA
acacccacccaagaacagggtttgtta

SEQ ID NO: 27002 - DNA, 30 bp, synthetic construct; identical to SEQ ID NO: 15398
  misc_feature 1..30: note = Probe
  source 1..30: mol_type = other DNA

SEQ ID NO: 27003 - DNA, 36 bp, synthetic construct
  misc_feature 1..36: note = Probe
  source 1..36: mol_type = other DNA
acaccgaagtctctgtggcgcaatcggttagcgcgt

SEQ ID NO: 27004 - DNA, 18 bp, synthetic construct
  misc_feature 1..18: note = Probe
  source 1..18: mol_type = other DNA
acacctctttacagtgaa

SEQ ID NO: 27005 - DNA, 17 bp, synthetic construct
  misc_feature 1..17: note = Probe
  source 1..17: mol_type = other DNA
acacgcagaaggtcctg

SEQ ID NO: 27006 - DNA, 31 bp, synthetic construct
  misc_feature 1..31: note = Probe
  source 1..31: mol_type = other DNA
acacgcagaaggtcctgggttcgagccccag

SEQ ID NO: 27007 - DNA, 41 bp, synthetic construct; identical to SEQ ID NO: 15408
  misc_feature 1..41: note = Probe
  source 1..41: mol_type = other DNA

SEQ ID NO: 27008 - DNA, 36 bp, synthetic construct
  misc_feature 1..36: note = Probe
  source 1..36: mol_type = other DNA
acacgtcccttcgatagctcagctggtagagcggag

SEQ ID NO: 27009 - DNA, 20 bp, synthetic construct
  misc_feature 1..20: note = Probe
  source 1..20: mol_type = other DNA
acactactataaccacccta

SEQ ID NO: 27010 - DNA, 24 bp, synthetic construct
  misc_feature 1..24: note = Probe
  source 1..24: mol_type = other DNA
acactgaaaatgtttagacgggct

SEQ ID NO: 27011 - DNA, 25 bp, synthetic construct
  misc_feature 1..25: note = Probe
  source 1..25: mol_type = other DNA
acactgaaaatgtttagacgggctc

SEQ ID NO: 27012 - DNA, 27 bp, synthetic construct
  misc_feature 1..27: note = Probe
  source 1..27: mol_type = other DNA
acactgaaaatgtttagacgggctcac

SEQ ID NO: 27013 - DNA, 33 bp, synthetic construct
  misc_feature 1..33: note = Probe
  source 1..33: mol_type = other DNA
acactgaaaatgtttagacgggctcacatcacc

SEQ ID NO: 27014 - DNA, 20 bp, synthetic construct
  misc_feature 1..20: note = Probe
  source 1..20: mol_type = other DNA
acacttaggagatttcaact

SEQ ID NO: 27015 - DNA, 21 bp, synthetic construct
  misc_feature 1..21: note = Probe
  source 1..21: mol_type = other DNA
acacttaggagatttcaactt

SEQ ID NO: 27016 - DNA, 25 bp, synthetic construct
  misc_feature 1..25: note = Probe
  source 1..25: mol_type = other DNA
acacttaggagatttcaacttaact

SEQ ID NO: 27017 - DNA, 30 bp, synthetic construct; identical to SEQ ID NO: 8999
  misc_feature 1..30: note = Probe
  source 1..30: mol_type = other DNA

SEQ ID NO: 27018 - DNA, 33 bp, synthetic construct; identical to SEQ ID NO: 2627
  misc_feature 1..33: note = Probe
  source 1..33: mol_type = other DNA

SEQ ID NO: 27019 - DNA, 34 bp, synthetic construct; identical to SEQ ID NO: 2628
  misc_feature 1..34: note = Probe
  source 1..34: mol_type = other DNA

SEQ ID NO: 27020 - DNA, 35 bp, synthetic construct; identical to SEQ ID NO: 15431
  misc_feature 1..35: note = Probe
  source 1..35: mol_type = other DNA

SEQ ID NO: 27021 - DNA, 36 bp, synthetic construct
  misc_feature 1..36: note = Probe
  source 1..36: mol_type = other DNA
acacttaggagatttcaacttaacttgaccgctctg

SEQ ID NO: 27022 - DNA, 38 bp, synthetic construct; identical to SEQ ID NO: 2630
  misc_feature 1..38: note = Probe
  source 1..38: mol_type = other DNA

SEQ ID NO: 27023 - DNA, 39 bp, synthetic construct; identical to SEQ ID NO: 2631
  misc_feature 1..39: note = Probe
  source 1..39: mol_type = other DNA

SEQ ID NO: 27024 - DNA, 40 bp, synthetic construct; identical to SEQ ID NO: 2632
  misc_feature 1..40: note = Probe
  source 1..40: mol_type = other DNA

SEQ ID NO: 27025 - DNA, 16 bp, synthetic construct
  misc_feature 1..16: note = Probe
  source 1..16: mol_type = other DNA
acagaatcagcacggc

SEQ ID NO: 27026 - DNA, 15 bp, synthetic construct
  misc_feature 1..15: note = Probe
  source 1..15: mol_type = other DNA
acagaccaagagcct

SEQ ID NO: 27027 - DNA, 17 bp, synthetic construct
  misc_feature 1..17: note = Probe
  source 1..17: mol_type = other DNA
acagaccaagagccttc

SEQ ID NO: 27028 - DNA, 18 bp, synthetic construct
  misc_feature 1..18: note = Probe
  source 1..18: mol_type = other DNA
acagaccaagagccttca

SEQ ID NO: 27029 - DNA, 24 bp, synthetic construct
  misc_feature 1..24: note = Probe
  source 1..24: mol_type = other DNA
acagaccaagagccttcaaagccc

SEQ ID NO: 27030 - DNA, 27 bp, synthetic construct
  misc_feature 1..27: note = Probe
  source 1..27: mol_type = other DNA
acagaccaagagccttcaaagccctca

SEQ ID NO: 27031 - DNA, 30 bp, synthetic construct
  misc_feature 1..30: note = Probe
  source 1..30: mol_type = other DNA
acagaccaagagccttcaaagccctcagta

SEQ ID NO: 27032 - DNA, 36 bp, synthetic construct; identical to SEQ ID NO: 15442
  misc_feature 1..36: note = Probe
  source 1..36: mol_type = other DNA

SEQ ID NO: 27033 - DNA, 15 bp, synthetic construct
  misc_feature 1..15: note = Probe
  source 1..15: mol_type = other DNA
acagaggcttacgac

SEQ ID NO: 27034 - DNA, 36 bp, synthetic construct
  misc_feature 1..36: note = Probe
  source 1..36: mol_type = other DNA
acagccagtagtcgtggccgagtggttaaggcgatg

SEQ ID NO: 27035 - DNA, 21 bp, synthetic construct
  misc_feature 1..21: note = Probe
  source 1..21: mol_type = other DNA
acagctaaggactgcaaaacc

SEQ ID NO: 27036 - DNA, 22 bp, synthetic construct
  misc_feature 1..22: note = Probe
  source 1..22: mol_type = other DNA
acagctaaggactgcaaaaccc

SEQ ID NO: 27037 - DNA, 23 bp, synthetic construct
  misc_feature 1..23: note = Probe
  source 1..23: mol_type = other DNA
acagctaaggactgcaaaacccc

SEQ ID NO: 27038 - DNA, 26 bp, synthetic construct
  misc_feature 1..26: note = Probe
  source 1..26: mol_type = other DNA
acagctaaggactgcaaaaccccact

SEQ ID NO: 27039 - DNA, 28 bp, synthetic construct
  misc_feature 1..28: note = Probe
  source 1..28: mol_type = other DNA
acagctaaggactgcaaaaccccactct

SEQ ID NO: 27040 - DNA, 16 bp, synthetic construct
  misc_feature 1..16: note = Probe
  source 1..16: mol_type = other DNA
acagctatccattggt

SEQ ID NO: 27041 - DNA, 19 bp, synthetic construct
  misc_feature 1..19: note = Probe
  source 1..19: mol_type = other DNA
acagctatccattggtctt

SEQ ID NO: 27042 - DNA, 20 bp, synthetic construct
  misc_feature 1..20: note = Probe
  source 1..20: mol_type = other DNA
acagctatccattggtctta

SEQ ID NO: 27043 - DNA, 25 bp, synthetic construct
  misc_feature 1..25: note = Probe
  source 1..25: mol_type = other DNA
acagctatccattggtcttaggccc

SEQ ID NO: 27044 - DNA, 26 bp, synthetic construct
  misc_feature 1..26: note = Probe
  source 1..26: mol_type = other DNA
acagctatccattggtcttaggcccc

SEQ ID NO: 27045 - DNA, 27 bp, synthetic construct
  misc_feature 1..27: note = Probe
  source 1..27: mol_type = other DNA
acagctatccattggtcttaggcccca

SEQ ID NO: 27046 - DNA, 36 bp, synthetic construct
  misc_feature 1..36: note = Probe
  source 1..36: mol_type = other DNA
acagctatccattggtcttaggccccaaaaattttg

SEQ ID NO: 27047 - DNA, 33 bp, synthetic construct
  misc_feature 1..33: note = Probe
  source 1..33: mol_type = other DNA
acagctgtagtcgtggccgagtggttaaggcga

SEQ ID NO: 27048 - DNA, 36 bp, synthetic construct; identical to SEQ ID NO: 15460
  misc_feature 1..36: note = Probe
  source 1..36: mol_type = other DNA

SEQ ID NO: 27049 - DNA, 33 bp, synthetic construct; identical to SEQ ID NO: 2645
  misc_feature 1..33: note = Probe
  source 1..33: mol_type = other DNA

SEQ ID NO: 27050 - DNA, 36 bp, synthetic construct; identical to SEQ ID NO: 15467
  misc_feature 1..36: note = Probe
  source 1..36: mol_type = other DNA

SEQ ID NO: 27051 - DNA, 36 bp, synthetic construct
  misc_feature 1..36: note = Probe
  source 1..36: mol_type = other DNA
acaggagatcctgggttcgaatcccagcggtgcctt

SEQ ID NO: 27052 - DNA, 15 bp, synthetic construct
  misc_feature 1..15: note = Probe
  source 1..15: mol_type = other DNA
acaggggttaggcct

SEQ ID NO: 27053 - DNA, 16 bp, synthetic construct
  misc_feature 1..16: note = Probe
  source 1..16: mol_type = other DNA
acaggggttaggcctc

SEQ ID NO: 27054 - DNA, 27 bp, synthetic construct
  misc_feature 1..27: note = Probe
  source 1..27: mol_type = other DNA
acaggggttaggcctctttttaccagc

SEQ ID NO: 27055 - DNA, 36 bp, synthetic construct; identical to SEQ ID NO: 15472
  misc_feature 1..36: note = Probe
  source 1..36: mol_type = other DNA

SEQ ID NO: 27056 - DNA, 36 bp, synthetic construct
  misc_feature 1..36: note = Probe
  source 1..36: mol_type = other DNA
acagtagcattggtggttcagtggtagaattctcgc

SEQ ID NO: 27057 - DNA, 38 bp, synthetic construct
  misc_feature 1..38: note = Probe
  source 1..38: mol_type = other DNA
acagtagcattggtggttcagtggtagaattctcgcct

SEQ ID NO: 27058 - DNA, 19 bp, synthetic construct
  misc_feature 1..19: note = Probe
  source 1..19: mol_type = other DNA
acagtcagaggttcaattc

SEQ ID NO: 27059 - DNA, 33 bp, synthetic construct
  misc_feature 1..33: note = Probe
  source 1..33: mol_type = other DNA
acagtggctcgttggtctaggggtatgattctc

SEQ ID NO: 27060 - DNA, 36 bp, synthetic construct; identical to SEQ ID NO: 15489
  misc_feature 1..36: note = Probe
  source 1..36: mol_type = other DNA

SEQ ID NO: 27061 - DNA, 17 bp, synthetic construct
  misc_feature 1..17: note = Probe
  source 1..17: mol_type = other DNA
acagtgtcaggatggcc

SEQ ID NO: 27062 - DNA, 36 bp, synthetic construct
  misc_feature 1..36: note = Probe
  source 1..36: mol_type = other DNA
acagtgtcaggatggccgagtggtctaaggcgccag

SEQ ID NO: 27063 - DNA, 19 bp, synthetic construct
  misc_feature 1..19: note = Probe
  source 1..19: mol_type = other DNA
acagtttatgtagcttacc

SEQ ID NO: 27064 - DNA, 22 bp, synthetic construct
  misc_feature 1..22: note = Probe
  source 1..22: mol_type = other DNA
acagtttatgtagcttacctcc

SEQ ID NO: 27065 - DNA, 23 bp, synthetic construct
  misc_feature 1..23: note = Probe
  source 1..23: mol_type = other DNA
acagtttatgtagcttacctcct

SEQ ID NO: 27066 - DNA, 15 bp, synthetic construct
  misc_feature 1..15: note = Probe
  source 1..15: mol_type = other DNA
acatacccatggcca

SEQ ID NO: 27067 - DNA, 16 bp, synthetic construct
  misc_feature 1..16: note = Probe
  source 1..16: mol_type = other DNA
acatacccatggccaa

SEQ ID NO: 27068 - DNA, 17 bp, synthetic construct
  misc_feature 1..17: note = Probe
  source 1..17: mol_type = other DNA
acatacccatggccaac

SEQ ID NO: 27069 - DNA, 18 bp, synthetic construct
  misc_feature 1..18: note = Probe
  source 1..18: mol_type = other DNA
acatacccatggccaacc

SEQ ID NO: 27070 - DNA, 19 bp, synthetic construct
  misc_feature 1..19: note = Probe
  source 1..19: mol_type = other DNA
acatacccatggccaacct

SEQ ID NO: 27071 - DNA, 20 bp, synthetic construct
  misc_feature 1..20: note = Probe
  source 1..20: mol_type = other DNA
acatacccatggccaacctc

SEQ ID NO: 27072 - DNA, 21 bp, synthetic construct
  misc_feature 1..21: note = Probe
  source 1..21: mol_type = other DNA
acatacccatggccaacctcc

SEQ ID NO: 27073 - DNA, 22 bp, synthetic construct
  misc_feature 1..22: note = Probe
  source 1..22: mol_type = other DNA
acatacccatggccaacctcct

SEQ ID NO: 27074 - DNA, 23 bp, synthetic construct
  misc_feature 1..23: note = Probe
  source 1..23: mol_type = other DNA
acatacccatggccaacctccta

SEQ ID NO: 27075 - DNA, 24 bp, synthetic construct
  misc_feature 1..24: note = Probe
  source 1..24: mol_type = other DNA
acatacccatggccaacctcctac

SEQ ID NO: 27076 - DNA, 25 bp, synthetic construct
  misc_feature 1..25: note = Probe
  source 1..25: mol_type = other DNA
acatacccatggccaacctcctact

SEQ ID NO: 27077 - DNA, 26 bp, synthetic construct
  misc_feature 1..26: note = Probe
  source 1..26: mol_type = other DNA
acatacccatggccaacctcctactc

SEQ ID NO: 27078 - DNA, 27 bp, synthetic construct
  misc_feature 1..27: note = Probe
  source 1..27: mol_type = other DNA
acatacccatggccaacctcctactcc

SEQ ID NO: 27079 - DNA, 28 bp, synthetic construct
  misc_feature 1..28: note = Probe
  source 1..28: mol_type = other DNA
acatacccatggccaacctcctactcct

SEQ ID NO: 27080 - DNA, 29 bp, synthetic construct
  misc_feature 1..29: note = Probe
  source 1..29: mol_type = other DNA
acatacccatggccaacctcctactcctc

SEQ ID NO: 27081 - DNA, 30 bp, synthetic construct; identical to SEQ ID NO: 2668
  misc_feature 1..30: note = Probe
  source 1..30: mol_type = other DNA

SEQ ID NO: 27082 - DNA, 17 bp, synthetic construct
  misc_feature 1..17: note = Probe
  source 1..17: mol_type = other DNA
acatcagattgtgaatc

SEQ ID NO: 27083 - DNA, 18 bp, synthetic construct
  misc_feature 1..18: note = Probe
  source 1..18: mol_type = other DNA
acatcagattgtgaatct

SEQ ID NO: 27084 - DNA, 30 bp, synthetic construct
  misc_feature 1..30: note = Probe
  source 1..30: mol_type = other DNA
acatcagattgtgaatctgacaacagaggc

SEQ ID NO: 27085 - DNA, 31 bp, synthetic construct; identical to SEQ ID NO: 2676
  misc_feature 1..31: note = Probe
  source 1..31: mol_type = other DNA

SEQ ID NO: 27086 - DNA, 32 bp, synthetic construct; identical to SEQ ID NO: 2677
  misc_feature 1..32: note = Probe
  source 1..32: mol_type = other DNA

SEQ ID NO: 27087 - DNA, 37 bp, synthetic construct
  misc_feature 1..37: note = Probe
  source 1..37: mol_type = other DNA
acatcagattgtgaatctgacaacagaggcttacgac

SEQ ID NO: 27088 - DNA, 38 bp, synthetic construct
  misc_feature 1..38: note = Probe
  source 1..38: mol_type = other DNA
acatcagattgtgaatctgacaacagaggcttacgacc

SEQ ID NO: 27089 - DNA, 39 bp, synthetic construct; identical to SEQ ID NO: 2679
  misc_feature 1..39: note = Probe
  source 1..39: mol_type = other DNA

SEQ ID NO: 27090 - DNA, 26 bp, synthetic construct
  misc_feature 1..26: note = Probe
  source 1..26: mol_type = other DNA
acatggtctagcggttaggattcctg

SEQ ID NO: 27091 - DNA, 29 bp, synthetic construct
  misc_feature 1..29: note = Probe
  source 1..29: mol_type = other DNA
acatggtctagcggttaggattcctggtt

SEQ ID NO: 27092 - DNA, 36 bp, synthetic construct
  misc_feature 1..36: note = Probe
  source 1..36: mol_type = other DNA
acatggtctagcggttaggattcctggttttcaccc

SEQ ID NO: 27093 - DNA, 23 bp, synthetic construct
  misc_feature 1..23: note = Probe
  source 1..23: mol_type = other DNA
accaaaacatcagattgtgaatc

SEQ ID NO: 27094 - DNA, 24 bp, synthetic construct
  misc_feature 1..24: note = Probe
  source 1..24: mol_type = other DNA
accaaaacatcagattgtgaatct

SEQ ID NO: 27095 - DNA, 31 bp, synthetic construct; identical to SEQ ID NO: 2695
  misc_feature 1..31: note = Probe
  source 1..31: mol_type = other DNA

SEQ ID NO: 27096 - DNA, 33 bp, synthetic construct; identical to SEQ ID NO: 15520
  misc_feature 1..33: note = Probe
  source 1..33: mol_type = other DNA

SEQ ID NO: 27097 - DNA, 36 bp, synthetic construct; identical to SEQ ID NO: 15522
  misc_feature 1..36: note = Probe
  source 1..36: mol_type = other DNA

SEQ ID NO: 27098 - DNA, 37 bp, synthetic construct; identical to SEQ ID NO: 2697
  misc_feature 1..37: note = Probe
  source 1..37: mol_type = other DNA

SEQ ID NO: 27099 - DNA, 45 bp, synthetic construct; identical to SEQ ID NO: 2700
  misc_feature 1..45: note = Probe
  source 1..45: mol_type = other DNA

SEQ ID NO: 27100 - DNA, 21 bp, synthetic construct
  misc_feature 1..21: note = Probe
  source 1..21: mol_type = other DNA
accaaggaggccggttagctc

SEQ ID NO: 27101 - DNA, 36 bp, synthetic construct
  misc_feature 1..36: note = Probe
  source 1..36: mol_type = other DNA
accaaggaggccggttagctcagttggttagagcgt

SEQ ID NO: 27102 - DNA, 36 bp, synthetic construct
  misc_feature 1..36: note = Probe
  source 1..36: mol_type = other DNA
accagccctccctggtggtctagtggctaggattcg

SEQ ID NO: 27103 - DNA, 15 bp, synthetic construct
  misc_feature 1..15: note = Probe
  source 1..15: mol_type = other DNA
accaggatggccgag

SEQ ID NO: 27104 - DNA, 16 bp, synthetic construct
  misc_feature 1..16: note = Probe
  source 1..16: mol_type = other DNA
accaggatggccgagt

SEQ ID NO: 27105 - DNA, 17 bp, synthetic construct
  misc_feature 1..17: note = Probe
  source 1..17: mol_type = other DNA
accaggatggccgagtg

SEQ ID NO: 27106 - DNA, 18 bp, synthetic construct
  misc_feature 1..18: note = Probe
  source 1..18: mol_type = other DNA
accaggatggccgagtgg

SEQ ID NO: 27107 - DNA, 23 bp, synthetic construct
  misc_feature 1..23: note = Probe
  source 1..23: mol_type = other DNA
accaggatggccgagtggttaag

SEQ ID NO: 27108 - DNA, 24 bp, synthetic construct
  misc_feature 1..24: note = Probe
  source 1..24: mol_type = other DNA
accaggatggccgagtggttaagg

SEQ ID NO: 27109 - DNA, 25 bp, synthetic construct
  misc_feature 1..25: note = Probe
  source 1..25: mol_type = other DNA
accaggatggccgagtggttaaggc

SEQ ID NO: 27110 - DNA, 32 bp, synthetic construct
  misc_feature 1..32: note = Probe
  source 1..32: mol_type = other DNA
accaggatggccgagtggttaaggcgttggac

SEQ ID NO: 27111 - DNA, 36 bp, synthetic construct
  misc_feature 1..36: note = Probe
  source 1..36: mol_type = other DNA
accaggatggccgagtggttaaggcgttggacttaa

SEQ ID NO: 27112 - DNA, 50 bp, synthetic construct
  misc_feature 1..50: note = Probe
  source 1..50: mol_type = other DNA
accaggatggccgagtggttaaggcgttggacttaagatccaatggacat

SEQ ID NO: 27113 - DNA, 27 bp, synthetic construct
  misc_feature 1..27: note = Probe
  source 1..27: mol_type = other DNA
accatgcacactactataaccacccta

SEQ ID NO: 27114 - DNA, 35 bp, synthetic construct
  misc_feature 1..35: note = Probe
  source 1..35: mol_type = other DNA
acccaacttacacttaggagatttcaacttaactt

SEQ ID NO: 27115 - DNA, 36 bp, synthetic construct
  misc_feature 1..36: note = Probe
  source 1..36: mol_type = other DNA
acccaacttacacttaggagatttcaacttaacttg

SEQ ID NO: 27116 - DNA, 47 bp, synthetic construct
  misc_feature 1..47: note = Probe
  source 1..47: mol_type = other DNA
acccaacttacacttaggagatttcaacttaacttgaccgctctgag

SEQ ID NO: 27117 - DNA, 50 bp, synthetic construct; identical to SEQ ID NO: 2749
  misc_feature 1..50: note = Probe
  source 1..50: mol_type = other DNA

SEQ ID NO: 27118 - DNA, 18 bp, synthetic construct
  misc_feature 1..18: note = Probe
  source 1..18: mol_type = other DNA
acccagaggcgtcgctga

SEQ ID NO: 27119 - DNA, 19 bp, synthetic construct
  misc_feature 1..19: note = Probe
  source 1..19: mol_type = other DNA
acccagaggcgtcgctgat

SEQ ID NO: 27120 - DNA, 20 bp, synthetic construct
  misc_feature 1..20: note = Probe
  source 1..20: mol_type = other DNA
acccagaggcgtcgctgata

SEQ ID NO: 27121 - DNA, 20 bp, synthetic construct
  misc_feature 1..20: note = Probe
  source 1..20: mol_type = other DNA
acccagaggcgtcgctgatc

SEQ ID NO: 27122 - DNA, 21 bp, synthetic construct
  misc_feature 1..21: note = Probe
  source 1..21: mol_type = other DNA
acccagaggcgtcgctgatct

SEQ ID NO: 27123 - DNA, 22 bp, synthetic construct
  misc_feature 1..22: note = Probe
  source 1..22: mol_type = other DNA
acccagaggcgtcgctgatctt

SEQ ID NO: 27124 - DNA, 23 bp, synthetic construct
  misc_feature 1..23: note = Probe
  source 1..23: mol_type = other DNA
acccagaggcgtcgctgatcttt

SEQ ID NO: 27125 - DNA, 19 bp, synthetic construct
  misc_feature 1..19: note = Probe
  source 1..19: mol_type = other DNA
acccagaggtcgatggatc

SEQ ID NO: 27126 - DNA, 20 bp, synthetic construct
  misc_feature 1..20: note = Probe
  source 1..20: mol_type = other DNA
acccagaggtcgatggatcg

SEQ ID NO: 27127 - DNA, 37 bp, synthetic construct; identical to SEQ ID NO: 151
  misc_feature 1..37: note = Probe
  source 1..37: mol_type = other DNA

SEQ ID NO: 27128 - DNA, 38 bp, synthetic construct; identical to SEQ ID NO: 15595
  misc_feature 1..38: note = Probe
  source 1..38: mol_type = other DNA

SEQ ID NO: 27129 - DNA, 39 bp, synthetic construct; identical to SEQ ID NO: 2764
  misc_feature 1..39: note = Probe
  source 1..39: mol_type = other DNA

SEQ ID NO: 27130 - DNA, 39 bp, synthetic construct
  misc_feature 1..39: note = Probe
  source 1..39: mol_type = other DNA
acccaggcggcccgggttcgactcccggtgtgggaatga

SEQ ID NO: 27131 - DNA, 25 bp, synthetic construct
  misc_feature 1..25: note = Probe
  source 1..25: mol_type = other DNA
acccagggacgcctctttgagcttt

SEQ ID NO: 27132 - DNA, 26 bp, synthetic construct
  misc_feature 1..26: note = Probe
  source 1..26: mol_type = other DNA
acccagggacgcctctttgagctttt

SEQ ID NO: 27133 - DNA, 21 bp, synthetic construct
  misc_feature 1..21: note = Probe
  source 1..21: mol_type = other DNA
acccagggacgctatgacctt

SEQ ID NO: 27134 - DNA, 24 bp, synthetic construct
  misc_feature 1..24: note = Probe
  source 1..24: mol_type = other DNA
acccagggacgcttattggaactt

SEQ ID NO: 27135 - DNA, 25 bp, synthetic construct
  misc_feature 1..25: note = Probe
  source 1..25: mol_type = other DNA
acccagggacgcttattggaacttt

SEQ ID NO: 27136 - DNA, 26 bp, synthetic construct
  misc_feature 1..26: note = Probe
  source 1..26: mol_type = other DNA
acccagggacgcttattggaactttt

SEQ ID NO: 27137 - DNA, 24 bp, synthetic construct
  misc_feature 1..24: note = Probe
  source 1..24: mol_type = other DNA
acccagggacgcttgtttgagctt

SEQ ID NO: 27138 - DNA, 25 bp, synthetic construct
  misc_feature 1..25: note = Probe
  source 1..25: mol_type = other DNA
acccagggacgcttgtttgagcttt

SEQ ID NO: 27139 - DNA, 36 bp, synthetic construct
  misc_feature 1..36: note = Probe
  source 1..36: mol_type = other DNA
acccagggcctggatagctcagttggtagaacatca

SEQ ID NO: 27140 - DNA, 43 bp, synthetic construct
  misc_feature 1..43: note = Probe
  source 1..43: mol_type = other DNA
acccagggcctggatagctcagttggtagaacatcagactttt

SEQ ID NO: 27141 - DNA, 44 bp, synthetic construct
  misc_feature 1..44: note = Probe
  source 1..44: mol_type = other DNA
acccagggcctggatagctcagttggtagaacatcagactttta

SEQ ID NO: 27142 - DNA, 15 bp, synthetic construct
  misc_feature 1..15: note = Probe
  source 1..15: mol_type = other DNA
acccatggccaacct

SEQ ID NO: 27143 - DNA, 17 bp, synthetic construct
  misc_feature 1..17: note = Probe
  source 1..17: mol_type = other DNA
acccatggccaacctcc

SEQ ID NO: 27144 - DNA, 26 bp, synthetic construct
  misc_feature 1..26: note = Probe
  source 1..26: mol_type = other DNA
acccatggccaacctcctactcctca

SEQ ID NO: 27145 - DNA, 15 bp, synthetic construct
  misc_feature 1..15: note = Probe
  source 1..15: mol_type = other DNA
accccactcctggta

SEQ ID NO: 27146 - DNA, 18 bp, synthetic construct
  misc_feature 1..18: note = Probe
  source 1..18: mol_type = other DNA
accccactcctggtagct

SEQ ID NO: 27147 - DNA, 28 bp, synthetic construct
  misc_feature 1..28: note = Probe
  source 1..28: mol_type = other DNA
accccccacagtttatgtagcttacctc

SEQ ID NO: 27148 - DNA, 36 bp, synthetic construct; identical to SEQ ID NO: 2771
  misc_feature 1..36: note = Probe
  source 1..36: mol_type = other DNA

SEQ ID NO: 27149 - DNA, 16 bp, synthetic construct
  misc_feature 1..16: note = Probe
  source 1..16: mol_type = other DNA
accccgacatcattac

SEQ ID NO: 27150 - DNA, 17 bp, synthetic construct
  misc_feature 1..17: note = Probe
  source 1..17: mol_type = other DNA
accccgacatcattacc

SEQ ID NO: 27151 - DNA, 18 bp, synthetic construct
  misc_feature 1..18: note = Probe
  source 1..18: mol_type = other DNA
accccgacatcattaccg

SEQ ID NO: 27152 - DNA, 27 bp, synthetic construct
  misc_feature 1..27: note = Probe
  source 1..27: mol_type = other DNA
accccgacatcattaccgggttttcct

SEQ ID NO: 27153 - DNA, 15 bp, synthetic construct
  misc_feature 1..15: note = Probe
  source 1..15: mol_type = other DNA
accccgtccgtgcct

SEQ ID NO: 27154 - DNA, 16 bp, synthetic construct
  misc_feature 1..16: note = Probe
  source 1..16: mol_type = other DNA
accccgtccgtgcctg

SEQ ID NO: 27155 - DNA, 16 bp, synthetic construct
  misc_feature 1..16: note = Probe
  source 1..16: mol_type = other DNA
accctgctcgctgcgg

SEQ ID NO: 27156 - DNA, 18 bp, synthetic construct
  misc_feature 1..18: note = Probe
  source 1..18: mol_type = other DNA
accctgtggtctagtggc

SEQ ID NO: 27157 - DNA, 19 bp, synthetic construct
  misc_feature 1..19: note = Probe
  source 1..19: mol_type = other DNA
accctgtggtctagtggct

SEQ ID NO: 27158 - DNA, 15 bp, synthetic construct
  misc_feature 1..15: note = Probe
  source 1..15: mol_type = other DNA
acccttcccgtacta

SEQ ID NO: 27159 - DNA, 20 bp, synthetic construct
  misc_feature 1..20: note = Probe
  source 1..20: mol_type = other DNA
accgaagtctctgtggcgca

SEQ ID NO: 27160 - DNA, 23 bp, synthetic construct
  misc_feature 1..23: note = Probe
  source 1..23: mol_type = other DNA
accgaagtctctgtggcgcaatc

SEQ ID NO: 27161 - DNA, 24 bp, synthetic construct
  misc_feature 1..24: note = Probe
  source 1..24: mol_type = other DNA
accgaagtctctgtggcgcaatcg

SEQ ID NO: 27162 - DNA, 33 bp, synthetic construct
  misc_feature 1..33: note = Probe
  source 1..33: mol_type = other DNA
accgaagtctctgtggcgcaatcggttagcgcg

SEQ ID NO: 27163 - DNA, 36 bp, synthetic construct; identical to SEQ ID NO: 15647
  misc_feature 1..36: note = Probe
  source 1..36: mol_type = other DNA

SEQ ID NO: 27164 - DNA, 50 bp, synthetic construct
  misc_feature 1..50: note = Probe
  source 1..50: mol_type = other DNA
accgaagtctctgtggcgcaatcggttagcgcgttcggctgttaaccgaa

SEQ ID NO: 27165 - DNA, 36 bp, synthetic construct
  misc_feature 1..36: note = Probe
  source 1..36: mol_type = other DNA
accgacgggccgcgtggcctaatggataaggcgtct

SEQ ID NO: 27166 - DNA, 26 bp, synthetic construct
  misc_feature 1..26: note = Probe
  source 1..26: mol_type = other DNA
accgagcgtccaagctctttccattt

SEQ ID NO: 27167 - DNA, 27 bp, synthetic construct
  misc_feature 1..27: note = Probe
  source 1..27: mol_type = other DNA
accgagcgtccaagctctttccatttt

SEQ ID NO: 27168 - DNA, 39 bp, synthetic construct; identical to SEQ ID NO: 2791
  misc_feature 1..39: note = Probe
  source 1..39: mol_type = other DNA

SEQ ID NO: 27169 - DNA, 16 bp, synthetic construct
  misc_feature 1..16: note = Probe
  source 1..16: mol_type = other DNA
accgccgcggcccggg

SEQ ID NO: 27170 - DNA, 18 bp, synthetic construct
  misc_feature 1..18: note = Probe
  source 1..18: mol_type = other DNA
accgccgcggcccgggtt

SEQ ID NO: 27171 - DNA, 19 bp, synthetic construct
  misc_feature 1..19: note = Probe
  source 1..19: mol_type = other DNA
accgccgcggcccgggttc

SEQ ID NO: 27172 - DNA, 36 bp, synthetic construct; identical to SEQ ID NO: 15656
  misc_feature 1..36: note = Probe
  source 1..36: mol_type = other DNA

SEQ ID NO: 27173 - DNA, 29 bp, synthetic construct
  misc_feature 1..29: note = Probe
  source 1..29: mol_type = other DNA
accgccgcggcccgggttcgattcccggt

SEQ ID NO: 27174 - DNA, 30 bp, synthetic construct; identical to SEQ ID NO: 9032
  misc_feature 1..30: note = Probe
  source 1..30: mol_type = other DNA

SEQ ID NO: 27175 - DNA, 32 bp, synthetic construct
  misc_feature 1..32: note = Probe
  source 1..32: mol_type = other DNA
accgccgcggcccgggttcgattcccggtcag

SEQ ID NO: 27176 - DNA, 33 bp, synthetic construct; identical to SEQ ID NO: 12557
  misc_feature 1..33: note = Probe
  source 1..33: mol_type = other DNA

SEQ ID NO: 27177 - DNA, 34 bp, synthetic construct; identical to SEQ ID NO: 15659
  misc_feature 1..34: note = Probe
  source 1..34: mol_type = other DNA

SEQ ID NO: 27178 - DNA, 35 bp, synthetic construct; identical to SEQ ID NO: 12558
  misc_feature 1..35: note = Probe
  source 1..35: mol_type = other DNA

SEQ ID NO: 27179 - DNA, 37 bp, synthetic construct; identical to SEQ ID NO: 2792
  misc_feature 1..37: note = Probe
  source 1..37: mol_type = other DNA

SEQ ID NO: 27180 - DNA, 39 bp, synthetic construct; identical to SEQ ID NO: 15662
  misc_feature 1..39: note = Probe
  source 1..39: mol_type = other DNA

SEQ ID NO: 27181 - DNA, 37 bp, synthetic construct; identical to SEQ ID NO: 2793
  misc_feature 1..37: note = Probe
  source 1..37: mol_type = other DNA

SEQ ID NO: 27182 - DNA, 38 bp, synthetic construct; identical to SEQ ID NO: 15664
  misc_feature 1..38: note = Probe
  source 1..38: mol_type = other DNA

SEQ ID NO: 27183 - DNA, 39 bp, synthetic construct; identical to SEQ ID NO: 2794
  misc_feature 1..39: note = Probe
  source 1..39: mol_type = other DNA

SEQ ID NO: 27184 - DNA, 37 bp, synthetic construct; identical to SEQ ID NO: 2796
  misc_feature 1..37: note = Probe
  source 1..37: mol_type = other DNA

SEQ ID NO: 27185 - DNA, 39 bp, synthetic construct; identical to SEQ ID NO: 15670
  misc_feature 1..39: note = Probe
  source 1..39: mol_type = other DNA

SEQ ID NO: 27186 - DNA, 36 bp, synthetic construct; identical to SEQ ID NO: 15674
  misc_feature 1..36: note = Probe
  source 1..36: mol_type = other DNA

SEQ ID NO: 27187 - DNA, 19 bp, synthetic construct
  misc_feature 1..19: note = Probe
  source 1..19: mol_type = other DNA
accgctctgagctaaacct

SEQ ID NO: 27188 - DNA, 36 bp, synthetic construct
  misc_feature 1..36: note = Probe
  source 1..36: mol_type = other DNA
accgcttgccttgtggcccgccgtgatcgtatagtg

SEQ ID NO: 27189 - DNA, 15 bp, synthetic construct
  misc_feature 1..15: note = Probe
  source 1..15: mol_type = other DNA
accggagatgaaaac

SEQ ID NO: 27190 - DNA, 17 bp, synthetic construct
  misc_feature 1..17: note = Probe
  source 1..17: mol_type = other DNA
accggagatgaaaacct

SEQ ID NO: 27191 - DNA, 29 bp, synthetic construct
  misc_feature 1..29: note = Probe
  source 1..29: mol_type = other DNA
accggagatgaaaacctttttccaaggac

SEQ ID NO: 27192 - DNA, 32 bp, synthetic construct
  misc_feature 1..32: note = Probe
  source 1..32: mol_type = other DNA
accgggacgaggtggccgagtggttaaggcga

SEQ ID NO: 27193 - DNA, 16 bp, synthetic construct
  misc_feature 1..16: note = Probe
  source 1..16: mol_type = other DNA
accgggcggaaacaaa

SEQ ID NO: 27194 - DNA, 17 bp, synthetic construct
  misc_feature 1..17: note = Probe
  source 1..17: mol_type = other DNA
accgggcggaaacaaga

SEQ ID NO: 27195 - DNA, 25 bp, synthetic construct
  misc_feature 1..25: note = Probe
  source 1..25: mol_type = other DNA
accgggcggaaacaagactgtgttt

SEQ ID NO: 27196 - DNA, 26 bp, synthetic construct
  misc_feature 1..26: note = Probe
  source 1..26: mol_type = other DNA
accgggcggaaacaagactgtgtttt

SEQ ID NO: 27197 - DNA, 27 bp, synthetic construct
  misc_feature 1..27: note = Probe
  source 1..27: mol_type = other DNA
accgggcggaaacaagactgtgttttc

SEQ ID NO: 27198 - DNA, 15 bp, synthetic construct
  misc_feature 1..15: note = Probe
  source 1..15: mol_type = other DNA
accgggcggaaacac

SEQ ID NO: 27199 - DNA, 16 bp, synthetic construct
  misc_feature 1..16: note = Probe
  source 1..16: mol_type = other DNA
accgggcggaaacaca

SEQ ID NO: 27200 - DNA, 17 bp, synthetic construct
  misc_feature 1..17: note = Probe
  source 1..17: mol_type = other DNA
accgggcggaaacacac

SEQ ID NO: 27201 - DNA, 25 bp, synthetic construct
  misc_feature 1..25: note = Probe
  source 1..25: mol_type = other DNA
accgggcggaaacacactaaaaaat

SEQ ID NO: 27202 - DNA, 26 bp, synthetic construct
  misc_feature 1..26: note = Probe
  source 1..26: mol_type = other DNA
accgggcggaaacacactaaaaaatc

SEQ ID NO: 27203 - DNA, 27 bp, synthetic construct
  misc_feature 1..27: note = Probe
  source 1..27: mol_type = other DNA
accgggcggaaacacactaaaaaatcc

SEQ ID NO: 27204 - DNA, 29 bp, synthetic construct
  misc_feature 1..29: note = Probe
  source 1..29: mol_type = other DNA
accgggcggaaacacactaaaaaatccct

SEQ ID NO: 27205 - DNA, 17 bp, synthetic construct
  misc_feature 1..17: note = Probe
  source 1..17: mol_type = other DNA
accgggcggaaacacct

SEQ ID NO: 27206 - DNA, 16 bp, synthetic construct
  misc_feature 1..16: note = Probe
  source 1..16: mol_type = other DNA
accgggcggaaacacg

SEQ ID NO: 27207 - DNA, 17 bp, synthetic construct
  misc_feature 1..17: note = Probe
  source 1..17: mol_type = other DNA
accgggcggaaacacgt

SEQ ID NO: 27208 - DNA, 17 bp, synthetic construct
  misc_feature 1..17: note = Probe
  source 1..17: mol_type = other DNA
accgggcggaaacagaa

SEQ ID NO: 27209 - DNA, 29 bp, synthetic construct
  misc_feature 1..29: note = Probe
  source 1..29: mol_type = other DNA
accggggttcgattccccgacggggagac

SEQ ID NO: 27210 - DNA, 29 bp, synthetic construct
  misc_feature 1..29: note = Probe
  source 1..29: mol_type = other DNA
accggggttcgattccccgacggggaggc

SEQ ID NO: 27211 - DNA, 30 bp, synthetic construct; identical to SEQ ID NO: 2811
  misc_feature 1..30: note = Probe
  source 1..30: mol_type = other DNA

SEQ ID NO: 27212 - DNA, 15 bp, synthetic construct
  misc_feature 1..15: note = Probe
  source 1..15: mol_type = other DNA
accggtccctgggct

SEQ ID NO: 27213 - DNA, 16 bp, synthetic construct
  misc_feature 1..16: note = Probe
  source 1..16: mol_type = other DNA
accggtccctgggctg

SEQ ID NO: 27214 - DNA, 36 bp, synthetic construct
  misc_feature 1..36: note = Probe
  source 1..36: mol_type = other DNA
accgtgagcccggatagctcagtcggtagagcatca

SEQ ID NO: 27215 - DNA, 36 bp, synthetic construct
  misc_feature 1..36: note = Probe
  source 1..36: mol_type = other DNA
accgttaacttccaattaactagttttgacaacatt

SEQ ID NO: 27216 - DNA, 24 bp, synthetic construct
  misc_feature 1..24: note = Probe
  source 1..24: mol_type = other DNA
acctagccccaaacccactccacc

SEQ ID NO: 27217 - DNA, 25 bp, synthetic construct
  misc_feature 1..25: note = Probe
  source 1..25: mol_type = other DNA
acctagccccaaacccactccacct

SEQ ID NO: 27218 - DNA, 15 bp, synthetic construct
  misc_feature 1..15: note = Probe
  source 1..15: mol_type = other DNA
acctattctcaaact

SEQ ID NO: 27219 - DNA, 16 bp, synthetic construct
  misc_feature 1..16: note = Probe
  source 1..16: mol_type = other DNA
acctattctcaaactt

SEQ ID NO: 27220 - DNA, 17 bp, synthetic construct
  misc_feature 1..17: note = Probe
  source 1..17: mol_type = other DNA
acctattctcaaacttt

SEQ ID NO: 27221 - DNA, 18 bp, synthetic construct
  misc_feature 1..18: note = Probe
  source 1..18: mol_type = other DNA
acctattctcaaacttta

SEQ ID NO: 27222 - DNA, 19 bp, synthetic construct
  misc_feature 1..19: note = Probe
  source 1..19: mol_type = other DNA
acctattctcaaactttaa

SEQ ID NO: 27223 - DNA, 20 bp, synthetic construct
  misc_feature 1..20: note = Probe
  source 1..20: mol_type = other DNA
acctattctcaaactttaaa

SEQ ID NO: 27224 - DNA, 21 bp, synthetic construct
  misc_feature 1..21: note = Probe
  source 1..21: mol_type = other DNA
acctattctcaaactttaaat

SEQ ID NO: 27225 - DNA, 22 bp, synthetic construct
  misc_feature 1..22: note = Probe
  source 1..22: mol_type = other DNA
acctattctcaaactttaaatg

SEQ ID NO: 27226 - DNA, 23 bp, synthetic construct
  misc_feature 1..23: note = Probe
  source 1..23: mol_type = other DNA
acctattctcaaactttaaatgg

SEQ ID NO: 27227 - DNA, 24 bp, synthetic construct
  misc_feature 1..24: note = Probe
  source 1..24: mol_type = other DNA
acctattctcaaactttaaatggg

SEQ ID NO: 27228 - DNA, 25 bp, synthetic construct
  misc_feature 1..25: note = Probe
  source 1..25: mol_type = other DNA
acctattctcaaactttaaatgggc

SEQ ID NO: 27229 - DNA, 26 bp, synthetic construct
  misc_feature 1..26: note = Probe
  source 1..26: mol_type = other DNA
acctattctcaaactttaaatgggca

SEQ ID NO: 27230 - DNA, 27 bp, synthetic construct
  misc_feature 1..27: note = Probe
  source 1..27: mol_type = other DNA
acctattctcaaactttaaatgggcaa

SEQ ID NO: 27231 - DNA, 28 bp, synthetic construct
  misc_feature 1..28: note = Probe
  source 1..28: mol_type = other DNA
acctattctcaaactttaaatgggcaag

SEQ ID NO: 27232 - DNA, 30 bp, synthetic construct
  misc_feature 1..30: note = Probe
  source 1..30: mol_type = other DNA
acctattctcaaactttaaatgggcaagaa

SEQ ID NO: 27233 - DNA, 31 bp, synthetic construct; identical to SEQ ID NO: 15733
  misc_feature 1..31: note = Probe
  source 1..31: mol_type = other DNA

SEQ ID NO: 27234 - DNA, 32 bp, synthetic construct; identical to SEQ ID NO: 2827
  misc_feature 1..32: note = Probe
  source 1..32: mol_type = other DNA

SEQ ID NO: 27235 - DNA, 33 bp, synthetic construct; identical to SEQ ID NO: 2828
  misc_feature 1..33: note = Probe
  source 1..33: mol_type = other DNA

SEQ ID NO: 27236 - DNA, 34 bp, synthetic construct; identical to SEQ ID NO: 15736
  misc_feature 1..34: note = Probe
  source 1..34: mol_type = other DNA

SEQ ID NO: 27237 - DNA, 37 bp, synthetic construct; identical to SEQ ID NO: 2830
  misc_feature 1..37: note = Probe
  source 1..37: mol_type = other DNA

SEQ ID NO: 27238 - DNA, 38 bp, synthetic construct; identical to SEQ ID NO: 15740
  misc_feature 1..38: note = Probe
  source 1..38: mol_type = other DNA

SEQ ID NO: 27239 - DNA, 17 bp, synthetic construct
  misc_feature 1..17: note = Probe
  source 1..17: mol_type = other DNA
acctcagaaggtctcac

SEQ ID NO: 27240 - DNA, 18 bp, synthetic construct
  misc_feature 1..18: note = Probe
  source 1..18: mol_type = other DNA
acctcagaaggtctcact

SEQ ID NO: 27241 - DNA, 19 bp, synthetic construct
  misc_feature 1..19: note = Probe
  source 1..19: mol_type = other DNA
acctcagaaggtctcactt

SEQ ID NO: 27242 - DNA, 20 bp, synthetic construct
  misc_feature 1..20: note = Probe
  source 1..20: mol_type = other DNA
acctcagaaggtctcacttt

SEQ ID NO: 27243 - DNA, 21 bp, synthetic construct
  misc_feature 1..21: note = Probe
  source 1..21: mol_type = other DNA
acctcagaaggtctcactttt

SEQ ID NO: 27244 - DNA, 22 bp, synthetic construct
  misc_feature 1..22: note = Probe
  source 1..22: mol_type = other DNA
acctcagaaggtctcacttttc

SEQ ID NO: 27245 - DNA, 16 bp, synthetic construct
  misc_feature 1..16: note = Probe
  source 1..16: mol_type = other DNA
acctgtctctgtggcg

SEQ ID NO: 27246 - DNA, 17 bp, synthetic construct
  misc_feature 1..17: note = Probe
  source 1..17: mol_type = other DNA
acctgtctctgtggcgc

SEQ ID NO: 27247 - DNA, 18 bp, synthetic construct
  misc_feature 1..18: note = Probe
  source 1..18: mol_type = other DNA
acctgtctctgtggcgca

SEQ ID NO: 27248 - DNA, 23 bp, synthetic construct
  misc_feature 1..23: note = Probe
  source 1..23: mol_type = other DNA
acctgtctctgtggcgcaatcgg

SEQ ID NO: 27249 - DNA, 28 bp, synthetic construct
  misc_feature 1..28: note = Probe
  source 1..28: mol_type = other DNA
acctgtctctgtggcgcaatcggttagc

SEQ ID NO: 27250 - DNA, 31 bp, synthetic construct
  misc_feature 1..31: note = Probe
  source 1..31: mol_type = other DNA
acctgtctctgtggcgcaatcggttagcgca

SEQ ID NO: 27251 - DNA, 36 bp, synthetic construct
  misc_feature 1..36: note = Probe
  source 1..36: mol_type = other DNA
acctgtctctgtggcgcaatcggttagcgcattcgg

SEQ ID NO: 27252 - DNA, 31 bp, synthetic construct; identical to SEQ ID NO: 15754
  misc_feature 1..31: note = Probe
  source 1..31: mol_type = other DNA

SEQ ID NO: 27253 - DNA, 36 bp, synthetic construct; identical to SEQ ID NO: 15758
  misc_feature 1..36: note = Probe
  source 1..36: mol_type = other DNA

SEQ ID NO: 27254 - DNA, 22 bp, synthetic construct
  misc_feature 1..22: note = Probe
  source 1..22: mol_type = other DNA
accttcagctatagggtggaga

SEQ ID NO: 27255 - DNA, 15 bp, synthetic construct
  misc_feature 1..15: note = Probe
  source 1..15: mol_type = other DNA
accttgcctgcgggc

SEQ ID NO: 27256 - DNA, 28 bp, synthetic construct
  misc_feature 1..28: note = Probe
  source 1..28: mol_type = other DNA
accttttaagttaaagattaagagaacc

SEQ ID NO: 27257 - DNA, 33 bp, synthetic construct
  misc_feature 1..33: note = Probe
  source 1..33: mol_type = other DNA
accttttaagttaaagattaagagaaccaacac

SEQ ID NO: 27258 - DNA, 34 bp, synthetic construct
  misc_feature 1..34: note = Probe
  source 1..34: mol_type = other DNA
accttttaagttaaagattaagagaaccaacacc

SEQ ID NO: 27259 - DNA, 35 bp, synthetic construct
  misc_feature 1..35: note = Probe
  source 1..35: mol_type = other DNA
accttttaagttaaagattaagagaaccaacacct

SEQ ID NO: 27260 - DNA, 36 bp, synthetic construct
  misc_feature 1..36: note = Probe
  source 1..36: mol_type = other DNA
accttttaagttaaagattaagagaaccaacacctc

SEQ ID NO: 27261 - DNA, 16 bp, synthetic construct
  misc_feature 1..16: note = Probe
  source 1..16: mol_type = other DNA
acgaatgatttcgact

SEQ ID NO: 27262 - DNA, 17 bp, synthetic construct
  misc_feature 1..17: note = Probe
  source 1..17: mol_type = other DNA
acgaatgatttcgactc

SEQ ID NO: 27263 - DNA, 18 bp, synthetic construct
  misc_feature 1..18: note = Probe
  source 1..18: mol_type = other DNA
acgaatgatttcgactca

SEQ ID NO: 27264 - DNA, 36 bp, synthetic construct
  misc_feature 1..36: note = Probe
  source 1..36: mol_type = other DNA
acgaatgatttcgactcattaaattatgataatcat

SEQ ID NO: 27265 - DNA, 36 bp, synthetic construct
  misc_feature 1..36: note = Probe
  source 1..36: mol_type = other DNA
acgagggaggttccatggtgtaatggttagcactct

SEQ ID NO: 27266 - DNA, 25 bp, synthetic construct
  misc_feature 1..25: note = Probe
  source 1..25: mol_type = other DNA
acgatggtttttcatatcattggtc

SEQ ID NO: 27267 - DNA, 31 bp, synthetic construct
  misc_feature 1..31: note = Probe
  source 1..31: mol_type = other DNA
acgatggtttttcatatcattggtcgtggtt

SEQ ID NO: 27268 - DNA, 32 bp, synthetic construct
  misc_feature 1..32: note = Probe
  source 1..32: mol_type = other DNA
acgatggtttttcatatcattggtcgtggttg

SEQ ID NO: 27269 - DNA, 33 bp, synthetic construct
  misc_feature 1..33: note = Probe
  source 1..33: mol_type = other DNA
acgatggtttttcatatcattggtcgtggttgt

SEQ ID NO: 27270 - DNA, 34 bp, synthetic construct
  misc_feature 1..34: note = Probe
  source 1..34: mol_type = other DNA
acgatggtttttcatatcattggtcgtggttgta

SEQ ID NO: 27271 - DNA, 35 bp, synthetic construct
  misc_feature 1..35: note = Probe
  source 1..35: mol_type = other DNA
acgatggtttttcatatcattggtcgtggttgtag

SEQ ID NO: 27272 - DNA, 37 bp, synthetic construct
  misc_feature 1..37: note = Probe
  source 1..37: mol_type = other DNA
acgatggtttttcatatcattggtcgtggttgtagtc

SEQ ID NO: 27273 - DNA, 38 bp, synthetic construct
  misc_feature 1..38: note = Probe
  source 1..38: mol_type = other DNA
acgatggtttttcatatcattggtcgtggttgtagtcc

SEQ ID NO: 27274 - DNA, 39 bp, synthetic construct
  misc_feature 1..39: note = Probe
  source 1..39: mol_type = other DNA
acgatggtttttcatatcattggtcgtggttgtagtccg

SEQ ID NO: 27275 - DNA, 46 bp, synthetic construct
  misc_feature 1..46: note = Probe
  source 1..46: mol_type = other DNA
acgatggtttttcatatcattggtcgtggttgtagtccgtgcgaga

SEQ ID NO: 27276 - DNA, 47 bp, synthetic construct
  misc_feature 1..47: note = Probe
  source 1..47: mol_type = other DNA
acgatggtttttcatatcattggtcgtggttgtagtccgtgcgagaa

SEQ ID NO: 27277 - DNA, 50 bp, synthetic construct; identical to SEQ ID NO: 2843
  misc_feature 1..50: note = Probe
  source 1..50: mol_type = other DNA

SEQ ID NO: 27278 - DNA, 15 bp, synthetic construct
  misc_feature 1..15: note = Probe
  source 1..15: mol_type = other DNA
acgcagaaggtcctg

SEQ ID NO: 27279 - DNA, 39 bp, synthetic construct; identical to SEQ ID NO: 2845
  misc_feature 1..39: note = Probe
  source 1..39: mol_type = other DNA

SEQ ID NO: 27280 - DNA, 26 bp, synthetic construct
  misc_feature 1..26: note = Probe
  source 1..26: mol_type = other DNA
acgcagaggcattggtggttcagtgg

SEQ ID NO: 27281 - DNA, 18 bp, synthetic construct
  misc_feature 1..18: note = Probe
  source 1..18: mol_type = other DNA
acgccggtagtcgactcg

SEQ ID NO: 27282 - DNA, 18 bp, synthetic construct
  misc_feature 1..18: note = Probe
  source 1..18: mol_type = other DNA
acgcgaaaggtccccggt

SEQ ID NO: 27283 - DNA, 25 bp, synthetic construct
  misc_feature 1..25: note = Probe
  source 1..25: mol_type = other DNA
acgcgaggcattggtggttcagtgg

SEQ ID NO: 27284 - DNA, 32 bp, synthetic construct
  misc_feature 1..32: note = Probe
  source 1..32: mol_type = other DNA
acgcggctgtgatggccgagtggttaaggcgt

SEQ ID NO: 27285 - DNA, 36 bp, synthetic construct; identical to SEQ ID NO: 15805
  misc_feature 1..36: note = Probe
  source 1..36: mol_type = other DNA

SEQ ID NO: 27286 - DNA, 17 bp, synthetic construct
  misc_feature 1..17: note = Probe
  source 1..17: mol_type = other DNA
acgcgggagaccggggt

SEQ ID NO: 27287 - DNA, 33 bp, synthetic construct; identical to SEQ ID NO: 185
  misc_feature 1..33: note = Probe
  source 1..33: mol_type = other DNA

SEQ ID NO: 27288 - DNA, 34 bp, synthetic construct; identical to SEQ ID NO: 186
  misc_feature 1..34: note = Probe
  source 1..34: mol_type = other DNA

SEQ ID NO: 27289 - DNA, 35 bp, synthetic construct; identical to SEQ ID NO: 187
  misc_feature 1..35: note = Probe
  source 1..35: mol_type = other DNA

SEQ ID NO: 27290 - DNA, 37 bp, synthetic construct; identical to SEQ ID NO: 2865
  misc_feature 1..37: note = Probe
  source 1..37: mol_type = other DNA

SEQ ID NO: 27291 - DNA, 38 bp, synthetic construct; identical to SEQ ID NO: 2869
  misc_feature 1..38: note = Probe
  source 1..38: mol_type = other DNA

SEQ ID NO: 27292 - DNA, 37 bp, synthetic construct; identical to SEQ ID NO: 2872
  misc_feature 1..37: note = Probe
  source 1..37: mol_type = other DNA

SEQ ID NO: 27293 - DNA, 38 bp, synthetic construct; identical to SEQ ID NO: 2873
  misc_feature 1..38: note = Probe
  source 1..38: mol_type = other DNA

SEQ ID NO: 27294 - DNA, 39 bp, synthetic construct; identical to SEQ ID NO: 2874
  misc_feature 1..39: note = Probe
  source 1..39: mol_type = other DNA

SEQ ID NO: 27295 - DNA, 17 bp, synthetic construct
  misc_feature 1..17: note = Probe
  source 1..17: mol_type = other DNA
acgcgggaggcccgggt

SEQ ID NO: 27296 - DNA, 30 bp, synthetic construct; identical to SEQ ID NO: 15846
  misc_feature 1..30: note = Probe
  source 1..30: mol_type = other DNA

SEQ ID NO: 27297 - DNA, 34 bp, synthetic construct; identical to SEQ ID NO: 15849
  misc_feature 1..34: note = Probe
  source 1..34: mol_type = other DNA

SEQ ID NO: 27298 - DNA, 38 bp, synthetic construct; identical to SEQ ID NO: 15852
  misc_feature 1..38: note = Probe
  source 1..38: mol_type = other DNA

SEQ ID NO: 27299 - DNA, 38 bp, synthetic construct; identical to SEQ ID NO: 15856
  misc_feature 1..38: note = Probe
  source 1..38: mol_type = other DNA

SEQ ID NO: 27300 - DNA, 39 bp, synthetic construct; identical to SEQ ID NO: 2882
  misc_feature 1..39: note = Probe
  source 1..39: mol_type = other DNA

SEQ ID NO: 27301 - DNA, 38 bp, synthetic construct; identical to SEQ ID NO: 15858
  misc_feature 1..38: note = Probe
  source 1..38: mol_type = other DNA

SEQ ID NO: 27302 - DNA, 38 bp, synthetic construct
  misc_feature 1..38: note = Probe
  source 1..38: mol_type = other DNA
acgcgggaggcccgggttcgattcccggccaatgcagc

SEQ ID NO: 27303 - DNA, 39 bp, synthetic construct; identical to SEQ ID NO: 2883
  misc_feature 1..39: note = Probe
  source 1..39: mol_type = other DNA

SEQ ID NO: 27304 - DNA, 34 bp, synthetic construct; identical to SEQ ID NO: 2884
  misc_feature 1..34: note = Probe
  source 1..34: mol_type = other DNA

SEQ ID NO: 27305 - DNA, 36 bp, synthetic construct; identical to SEQ ID NO: 15864
  misc_feature 1..36: note = Probe
  source 1..36: mol_type = other DNA

SEQ ID NO: 27306 - DNA, 39 bp, synthetic construct; identical to SEQ ID NO: 2886
  misc_feature 1..39: note = Probe
  source 1..39: mol_type = other DNA

SEQ ID NO: 27307 - DNA, 22 bp, synthetic construct
  misc_feature 1..22: note = Probe
  source 1..22: mol_type = other DNA
acggatcagaagattctaggtt

SEQ ID NO: 27308 - DNA, 33 bp, synthetic construct
  misc_feature 1..33: note = Probe
  source 1..33: mol_type = other DNA
acggatcagaagattctaggttcgactcctggc

SEQ ID NO: 27309 - DNA, 36 bp, synthetic construct
  misc_feature 1..36: note = Probe
  source 1..36: mol_type = other DNA
acggcagccgaaatagctcagttgggagagcgttag

SEQ ID NO: 27310 - DNA, 36 bp, synthetic construct
  misc_feature 1..36: note = Probe
  source 1..36: mol_type = other DNA
acggcattgtgaggacaatggcacggcaaggggagt

SEQ ID NO: 27311 - DNA, 36 bp, synthetic construct
  misc_feature 1..36: note = Probe
  source 1..36: mol_type = other DNA
acggcattgtgggaacaatggcacggcaaggggctc

SEQ ID NO: 27312 - DNA, 36 bp, synthetic construct; identical to SEQ ID NO: 15871
  misc_feature 1..36: note = Probe
  source 1..36: mol_type = other DNA

SEQ ID NO: 27313 - DNA, 40 bp, synthetic construct
  misc_feature 1..40: note = Probe
  source 1..40: mol_type = other DNA
acggcttgtcctcgttagtatagtggtgagtatccccgcc

SEQ ID NO: 27314 - DNA, 41 bp, synthetic construct
  misc_feature 1..41: note = Probe
  source 1..41: mol_type = other DNA
acggcttgtcctcgttagtatagtggtgagtatccccgcct

SEQ ID NO: 27315 - DNA, 19 bp, synthetic construct
  misc_feature 1..19: note = Probe
  source 1..19: mol_type = other DNA
acgggagcccggatagctc

SEQ ID NO: 27316 - DNA, 25 bp, synthetic construct
  misc_feature 1..25: note = Probe
  source 1..25: mol_type = other DNA
acgggagcccggatagctcagtcgg

SEQ ID NO: 27317 - DNA, 26 bp, synthetic construct
  misc_feature 1..26: note = Probe
  source 1..26: mol_type = other DNA
acgggagcccggatagctcagtcggt

SEQ ID NO: 27318 - DNA, 27 bp, synthetic construct
  misc_feature 1..27: note = Probe
  source 1..27: mol_type = other DNA
acgggagcccggatagctcagtcggta

SEQ ID NO: 27319 - DNA, 28 bp, synthetic construct
  misc_feature 1..28: note = Probe
  source 1..28: mol_type = other DNA
acgggagcccggatagctcagtcggtag

SEQ ID NO: 27320 - DNA, 29 bp, synthetic construct
  misc_feature 1..29: note = Probe
  source 1..29: mol_type = other DNA
acgggagcccggatagctcagtcggtaga

SEQ ID NO: 27321 - DNA, 30 bp, synthetic construct; identical to SEQ ID NO: 15874
  misc_feature 1..30: note = Probe
  source 1..30: mol_type = other DNA

SEQ ID NO: 27322 - DNA, 31 bp, synthetic construct
  misc_feature 1..31: note = Probe
  source 1..31: mol_type = other DNA
acgggagcccggatagctcagtcggtagagc

SEQ ID NO: 27323 - DNA, 32 bp, synthetic construct
  misc_feature 1..32: note = Probe
  source 1..32: mol_type = other DNA
acgggagcccggatagctcagtcggtagagca

SEQ ID NO: 27324 - DNA, 34 bp, synthetic construct
  misc_feature 1..34: note = Probe
  source 1..34: mol_type = other DNA
acgggagcccggatagctcagtcggtagagcatc

SEQ ID NO: 27325 - DNA, 35 bp, synthetic construct
  misc_feature 1..35: note = Probe
  source 1..35: mol_type = other DNA
acgggagcccggatagctcagtcggtagagcatca

SEQ ID NO: 27326 - DNA, 36 bp, synthetic construct; identical to SEQ ID NO: 15875
  misc_feature 1..36: note = Probe
  source 1..36: mol_type = other DNA

SEQ ID NO: 27327 - DNA, 37 bp, synthetic construct; identical to SEQ ID NO: 15876
  misc_feature 1..37: note = Probe
  source 1..37: mol_type = other DNA

SEQ ID NO: 27328 - DNA, 38 bp, synthetic construct; identical to SEQ ID NO: 15877
  misc_feature 1..38: note = Probe
  source 1..38: mol_type = other DNA

SEQ ID NO: 27329 - DNA, 39 bp, synthetic construct
  misc_feature 1..39: note = Probe
  source 1..39: mol_type = other DNA
acgggagcccggatagctcagtcggtagagcatcagact

SEQ ID NO: 27330 - DNA, 40 bp, synthetic construct
  misc_feature 1..40: note = Probe
  source 1..40: mol_type = other DNA
acgggagcccggatagctcagtcggtagagcatcagactt

SEQ ID NO: 27331 - DNA, 41 bp, synthetic construct; identical to SEQ ID NO: 15878
  misc_feature 1..41: note = Probe
  source 1..41: mol_type = other DNA

SEQ ID NO: 27332 - DNA, 42 bp, synthetic construct; identical to SEQ ID NO: 15879
  misc_feature 1..42: note = Probe
  source 1..42: mol_type = other DNA

SEQ ID NO: 27333 - DNA, 43 bp, synthetic construct; identical to SEQ ID NO: 15880
  misc_feature 1..43: note = Probe
  source 1..43: mol_type = other DNA

SEQ ID NO: 27334 - DNA, 44 bp, synthetic construct
  misc_feature 1..44: note = Probe
  source 1..44: mol_type = other DNA
acgggagcccggatagctcagtcggtagagcatcagacttttaa

SEQ ID NO: 27335 - DNA, 45 bp, synthetic construct
  misc_feature 1..45: note = Probe
  source 1..45: mol_type = other DNA
acgggagcccggatagctcagtcggtagagcatcagacttttaat

SEQ ID NO: 27336 - DNA, 36 bp, synthetic construct
  misc_feature 1..36: note = Probe
  source 1..36: mol_type = other DNA
acgggaggctcgttggtctaggggtatgattctcgc

SEQ ID NO: 27337 - DNA, 17 bp, synthetic construct
  misc_feature 1..17: note = Probe
  source 1..17: mol_type = other DNA
acgggccaactttgttt

SEQ ID NO: 27338 - DNA, 18 bp, synthetic construct
  misc_feature 1..18: note = Probe
  source 1..18: mol_type = other DNA
acgggccaactttgtttt

SEQ ID NO: 27339 - DNA, 19 bp, synthetic construct
  misc_feature 1..19: note = Probe
  source 1..19: mol_type = other DNA
acgggccaggattgaaact

SEQ ID NO: 27340 - DNA, 20 bp, synthetic construct
  misc_feature 1..20: note = Probe
  source 1..20: mol_type = other DNA
acgggccaggattgaaactt

SEQ ID NO: 27341 - DNA, 21 bp, synthetic construct
  misc_feature 1..21: note = Probe
  source 1..21: mol_type = other DNA
acgggccaggattgaaacttt

SEQ ID NO: 27342 - DNA, 22 bp, synthetic construct
  misc_feature 1..22: note = Probe
  source 1..22: mol_type = other DNA
acgggccaggattgaaactttt

SEQ ID NO: 27343 - DNA, 15 bp, synthetic construct
  misc_feature 1..15: note = Probe
  source 1..15: mol_type = other DNA
acgggctcacatcac

SEQ ID NO: 27344 - DNA, 16 bp, synthetic construct
  misc_feature 1..16: note = Probe
  source 1..16: mol_type = other DNA
acgggctcacatcacc

SEQ ID NO: 27345 - DNA, 17 bp, synthetic construct
  misc_feature 1..17: note = Probe
  source 1..17: mol_type = other DNA
acgggctcacatcaccc

SEQ ID NO: 27346 - DNA, 23 bp, synthetic construct
  misc_feature 1..23: note = Probe
  source 1..23: mol_type = other DNA
acggggaggcacagtaattgttt

SEQ ID NO: 27347 - DNA, 17 bp, synthetic construct
  misc_feature 1..17: note = Probe
  source 1..17: mol_type = other DNA
acggggcacaataattt

SEQ ID NO: 27348 - DNA, 36 bp, synthetic construct
  misc_feature 1..36: note = Probe
  source 1..36: mol_type = other DNA
acgggggtgtagctcagtggtagagcgcgtgcttag

SEQ ID NO: 27349 - DNA, 16 bp, synthetic construct
  misc_feature 1..16: note = Probe
  source 1..16: mol_type = other DNA
acgggtccccggtagc

SEQ ID NO: 27350 - DNA, 17 bp, synthetic construct
  misc_feature 1..17: note = Probe
  source 1..17: mol_type = other DNA
acgggtccccggtagct

SEQ ID NO: 27351 - DNA, 18 bp, synthetic construct
  misc_feature 1..18: note = Probe
  source 1..18: mol_type = other DNA
acgggtccccggtagctc

SEQ ID NO: 27352 - DNA, 19 bp, synthetic construct
  misc_feature 1..19: note = Probe
  source 1..19: mol_type = other DNA
acgggtccccggtagctcg

SEQ ID NO: 27353 - DNA, 21 bp, synthetic construct
  misc_feature 1..21: note = Probe
  source 1..21: mol_type = other DNA
acgggtccccggtagctcgcc

SEQ ID NO: 27354 - DNA, 33 bp, synthetic construct
  misc_feature 1..33: note = Probe
  source 1..33: mol_type = other DNA
acgggtccccggtagctcgccgtgatcgtatag

SEQ ID NO: 27355 - DNA, 20 bp, synthetic construct
  misc_feature 1..20: note = Probe
  source 1..20: mol_type = other DNA
acggtagcgcgtctgactcc

SEQ ID NO: 27356 - DNA, 36 bp, synthetic construct
  misc_feature 1..36: note = Probe
  source 1..36: mol_type = other DNA
acggtggccgagatagctcagttgggagagcgttag

SEQ ID NO: 27357 - DNA, 33 bp, synthetic construct
  misc_feature 1..33: note = Probe
  source 1..33: mol_type = other DNA
acgtaggacgaggtggccgagtggttaaggcga

SEQ ID NO: 27358 - DNA, 18 bp, synthetic construct
  misc_feature 1..18: note = Probe
  source 1..18: mol_type = other DNA
acgtatgaggccccgggt

SEQ ID NO: 27359 - DNA, 36 bp, synthetic construct
  misc_feature 1..36: note = Probe
  source 1..36: mol_type = other DNA
acgtcccttcgatagctcagctggtagagcggagga

SEQ ID NO: 27360 - DNA, 44 bp, synthetic construct
  misc_feature 1..44: note = Probe
  source 1..44: mol_type = other DNA
acgtcccttcgatagctcagctggtagagcggaggactgtagct

SEQ ID NO: 27361 - DNA, 47 bp, synthetic construct
  misc_feature 1..47: note = Probe
  source 1..47: mol_type = other DNA
acgtcccttcgatagctcagctggtagagcggaggactgtagctact

SEQ ID NO: 27362 - DNA, 36 bp, synthetic construct
  misc_feature 1..36: note = Probe
  source 1..36: mol_type = other DNA
acgtgggctccatagctcagtggttagagcactggt

SEQ ID NO: 27363 - DNA, 20 bp, synthetic construct
  misc_feature 1..20: note = Probe
  source 1..20: mol_type = other DNA
actaaatactaccgtatggc

SEQ ID NO: 27364 - DNA, 16 bp, synthetic construct
  misc_feature 1..16: note = Probe
  source 1..16: mol_type = other DNA
actaagtgtttgtggg

SEQ ID NO: 27365 - DNA, 18 bp, synthetic construct
  misc_feature 1..18: note = Probe
  source 1..18: mol_type = other DNA
actaagtgtttgtgggtt

SEQ ID NO: 27366 - DNA, 19 bp, synthetic construct
  misc_feature 1..19: note = Probe
  source 1..19: mol_type = other DNA
actaagtgtttgtgggttt

SEQ ID NO: 27367 - DNA, 24 bp, synthetic construct
  misc_feature 1..24: note = Probe
  source 1..24: mol_type = other DNA
actaagtgtttgtgggtttaagtc

SEQ ID NO: 27368 - DNA, 33 bp, synthetic construct; identical to SEQ ID NO: 191
  misc_feature 1..33: note = Probe
  source 1..33: mol_type = other DNA

SEQ ID NO: 27369 - DNA, 38 bp, synthetic construct; identical to SEQ ID NO: 2896
  misc_feature 1..38: note = Probe
  source 1..38: mol_type = other DNA

SEQ ID NO: 27370 - DNA, 39 bp, synthetic construct; identical to SEQ ID NO: 2897
  misc_feature 1..39: note = Probe
  source 1..39: mol_type = other DNA

SEQ ID NO: 27371 - DNA, 25 bp, synthetic construct
  misc_feature 1..25: note = Probe
  source 1..25: mol_type = other DNA
actacaaaaaggattagactgaacc

SEQ ID NO: 27372 - DNA, 18 bp, synthetic construct
  misc_feature 1..18: note = Probe
  source 1..18: mol_type = other DNA
actactataaccacccta

SEQ ID NO: 27373 - DNA, 18 bp, synthetic construct
  misc_feature 1..18: note = Probe
  source 1..18: mol_type = other DNA
actagtctggtgttattt

SEQ ID NO: 27374 - DNA, 15 bp, synthetic construct
  misc_feature 1..15: note = Probe
  source 1..15: mol_type = other DNA
actagttttgacaac

SEQ ID NO: 27375 - DNA, 15 bp, synthetic construct
  misc_feature 1..15: note = Probe
  source 1..15: mol_type = other DNA
actataaccacccta

SEQ ID NO: 27376 - DNA, 16 bp, synthetic construct
  misc_feature 1..16: note = Probe
  source 1..16: mol_type = other DNA
actatgagaatcgaac

SEQ ID NO: 27377 - DNA, 17 bp, synthetic construct
  misc_feature 1..17: note = Probe
  source 1..17: mol_type = other DNA
actatgagaatcgaacc

SEQ ID NO: 27378 - DNA, 18 bp, synthetic construct
  misc_feature 1..18: note = Probe
  source 1..18: mol_type = other DNA
actatgagaatcgaaccc

SEQ ID NO: 27379 - DNA, 20 bp, synthetic construct
  misc_feature 1..20: note = Probe
  source 1..20: mol_type = other DNA
actatgagaatcgaacccat

SEQ ID NO: 27380 - DNA, 23 bp, synthetic construct
  misc_feature 1..23: note = Probe
  source 1..23: mol_type = other DNA
actatgagaatcgaacccatccc

SEQ ID NO: 27381 - DNA, 27 bp, synthetic construct
  misc_feature 1..27: note = Probe
  source 1..27: mol_type = other DNA
actatgagaatcgaacccatccctgag

SEQ ID NO: 27382 - DNA, 28 bp, synthetic construct
  misc_feature 1..28: note = Probe
  source 1..28: mol_type = other DNA
actatgagaatcgaacccatccctgaga

SEQ ID NO: 27383 - DNA, 18 bp, synthetic construct
  misc_feature 1..18: note = Probe
  source 1..18: mol_type = other DNA
actcatgcccccatgtct

SEQ ID NO: 27384 - DNA, 22 bp, synthetic construct
  misc_feature 1..22: note = Probe
  source 1..22: mol_type = other DNA
actcatgcccccatgtctaaca

SEQ ID NO: 27385 - DNA, 36 bp, synthetic construct; identical to SEQ ID NO: 2912
  misc_feature 1..36: note = Probe
  source 1..36: mol_type = other DNA

SEQ ID NO: 27386 - DNA, 39 bp, synthetic construct; identical to SEQ ID NO: 2915
  misc_feature 1..39: note = Probe
  source 1..39: mol_type = other DNA

SEQ ID NO: 27387 - DNA, 18 bp, synthetic construct
  misc_feature 1..18: note = Probe
  source 1..18: mol_type = other DNA
actcccggtgtgggaacg

SEQ ID NO: 27388 - DNA, 21 bp, synthetic construct
  misc_feature 1..21: note = Probe
  source 1..21: mol_type = other DNA
actcctgacagttcgtacttt

SEQ ID NO: 27389 - DNA, 16 bp, synthetic construct
  misc_feature 1..16: note = Probe
  source 1..16: mol_type = other DNA
actctgcgttgtggcc

SEQ ID NO: 27390 - DNA, 15 bp, synthetic construct
  misc_feature 1..15: note = Probe
  source 1..15: mol_type = other DNA
actctggactctgaa

SEQ ID NO: 27391 - DNA, 16 bp, synthetic construct
  misc_feature 1..16: note = Probe
  source 1..16: mol_type = other DNA
actctggactctgaat

SEQ ID NO: 27392 - DNA, 17 bp, synthetic construct
  misc_feature 1..17: note = Probe
  source 1..17: mol_type = other DNA
actctggactctgaatc

SEQ ID NO: 27393 - DNA, 18 bp, synthetic construct
  misc_feature 1..18: note = Probe
  source 1..18: mol_type = other DNA
actctggactctgaatcc

SEQ ID NO: 27394 - DNA, 19 bp, synthetic construct
  misc_feature 1..19: note = Probe
  source 1..19: mol_type = other DNA
actctggactctgaatcca

SEQ ID NO: 27395 - DNA, 21 bp, synthetic construct
  misc_feature 1..21: note = Probe
  source 1..21: mol_type = other DNA
actctggactctgaatccagc

SEQ ID NO: 27396 - DNA, 29 bp, synthetic construct
  misc_feature 1..29: note = Probe
  source 1..29: mol_type = other DNA
actctggactctgaatccagcgatccgag

SEQ ID NO: 27397 - DNA, 30 bp, synthetic construct
  misc_feature 1..30: note = Probe
  source 1..30: mol_type = other DNA
actctggactctgaatccagcgatccgagt

SEQ ID NO: 27398 - DNA, 31 bp, synthetic construct
  misc_feature 1..31: note = Probe
  source 1..31: mol_type = other DNA
actctggactctgaatccagcgatccgagtt

SEQ ID NO: 27399 - DNA, 32 bp, synthetic construct
  misc_feature 1..32: note = Probe
  source 1..32: mol_type = other DNA
actctggactctgaatccagcgatccgagttc

SEQ ID NO: 27400 - DNA, 17 bp, synthetic construct
  misc_feature 1..17: note = Probe
  source 1..17: mol_type = other DNA
actctggactttgaatc

SEQ ID NO: 27401 - DNA, 18 bp, synthetic construct
  misc_feature 1..18: note = Probe
  source 1..18: mol_type = other DNA
actctggactttgaatcc

SEQ ID NO: 27402 - DNA, 29 bp, synthetic construct
  misc_feature 1..29: note = Probe
  source 1..29: mol_type = other DNA
actcttttagtataaatagtaccgttaac

SEQ ID NO: 27403 - DNA, 30 bp, synthetic construct; identical to SEQ ID NO: 2927
  misc_feature 1..30: note = Probe
  source 1..30: mol_type = other DNA

SEQ ID NO: 27404 - DNA, 31 bp, synthetic construct; identical to SEQ ID NO: 2928
  misc_feature 1..31: note = Probe
  source 1..31: mol_type = other DNA

SEQ ID NO: 27405 - DNA, 32 bp, synthetic construct; identical to SEQ ID NO: 195
  misc_feature 1..32: note = Probe
  source 1..32: mol_type = other DNA

SEQ ID NO: 27406 - DNA, 33 bp, synthetic construct; identical to SEQ ID NO: 196
  misc_feature 1..33: note = Probe
  source 1..33: mol_type = other DNA

SEQ ID NO: 27407 - DNA, 34 bp, synthetic construct; identical to SEQ ID NO: 197
  misc_feature 1..34: note = Probe
  source 1..34: mol_type = other DNA

SEQ ID NO: 27408 - DNA, 36 bp, synthetic construct
  misc_feature 1..36: note = Probe
  source 1..36: mol_type = other DNA
actcttttagtataaatagtaccgttaacttccaat

SEQ ID NO: 27409 - DNA, 50 bp, synthetic construct; identical to SEQ ID NO: 199
  misc_feature 1..50: note = Probe
  source 1..50: mol_type = other DNA

SEQ ID NO: 27410 - DNA, 24 bp, synthetic construct
  misc_feature 1..24: note = Probe
  source 1..24: mol_type = other DNA
actgaaaatgtttagacgggctca

SEQ ID NO: 27411 - DNA, 25 bp, synthetic construct
  misc_feature 1..25: note = Probe
  source 1..25: mol_type = other DNA
actgaaaatgtttagacgggctcac

SEQ ID NO: 27412 - DNA, 26 bp, synthetic construct
  misc_feature 1..26: note = Probe
  source 1..26: mol_type = other DNA
actgaaaatgtttagacgggctcaca

SEQ ID NO: 27413 - DNA, 28 bp, synthetic construct
  misc_feature 1..28: note = Probe
  source 1..28: mol_type = other DNA
actgaaaatgtttagacgggctcacatc

SEQ ID NO: 27414 - DNA, 31 bp, synthetic construct
  misc_feature 1..31: note = Probe
  source 1..31: mol_type = other DNA
actgaaaatgtttagacgggctcacatcacc

SEQ ID NO: 27415 - DNA, 32 bp, synthetic construct
  misc_feature 1..32: note = Probe
  source 1..32: mol_type = other DNA
actgaaaatgtttagacgggctcacatcaccc

SEQ ID NO: 27416 - DNA, 22 bp, synthetic construct
  misc_feature 1..22: note = Probe
  source 1..22: mol_type = other DNA
actgactagtctggtgttattt

SEQ ID NO: 27417 - DNA, 36 bp, synthetic construct
  misc_feature 1..36: note = Probe
  source 1..36: mol_type = other DNA
actgcccggctagctcagtcggtagagcatgggact

SEQ ID NO: 27418 - DNA, 16 bp, synthetic construct
  misc_feature 1..16: note = Probe
  source 1..16: mol_type = other DNA
actgctaactcatgcc

SEQ ID NO: 27419 - DNA, 17 bp, synthetic construct
  misc_feature 1..17: note = Probe
  source 1..17: mol_type = other DNA
actgctaactcatgccc

SEQ ID NO: 27420 - DNA, 29 bp, synthetic construct
  misc_feature 1..29: note = Probe
  source 1..29: mol_type = other DNA
actgctaactcatgcccccatgtctaaca

SEQ ID NO: 27421 - DNA, 32 bp, synthetic construct
  misc_feature 1..32: note = Probe
  source 1..32: mol_type = other DNA
actgctaactcatgcccccatgtctaacaaca

SEQ ID NO: 27422 - DNA, 36 bp, synthetic construct
  misc_feature 1..36: note = Probe
  source 1..36: mol_type = other DNA
actgctaactcatgcccccatgtctaacaacatggc

SEQ ID NO: 27423 - DNA, 20 bp, synthetic construct
  misc_feature 1..20: note = Probe
  source 1..20: mol_type = other DNA
actggaaagtgcacttggac

SEQ ID NO: 27424 - DNA, 21 bp, synthetic construct
  misc_feature 1..21: note = Probe
  source 1..21: mol_type = other DNA
actggaaagtgcacttggacg

SEQ ID NO: 27425 - DNA, 22 bp, synthetic construct
  misc_feature 1..22: note = Probe
  source 1..22: mol_type = other DNA
actggaaagtgcacttggacga

SEQ ID NO: 27426 - DNA, 23 bp, synthetic construct
  misc_feature 1..23: note = Probe
  source 1..23: mol_type = other DNA
actggaaagtgcacttggacgaa

SEQ ID NO: 27427 - DNA, 24 bp, synthetic construct
  misc_feature 1..24: note = Probe
  source 1..24: mol_type = other DNA
actggaaagtgcacttggacgaac

SEQ ID NO: 27428 - DNA, 25 bp, synthetic construct
  misc_feature 1..25: note = Probe
  source 1..25: mol_type = other DNA
actggaaagtgcacttggacgaacc

SEQ ID NO: 27429 - DNA, 26 bp, synthetic construct
  misc_feature 1..26: note = Probe
  source 1..26: mol_type = other DNA
actggaaagtgcacttggacgaacca

SEQ ID NO: 27430 - DNA, 30 bp, synthetic construct
  misc_feature 1..30: note = Probe
  source 1..30: mol_type = other DNA
actggtggttcagtggtagaattctcgcct

SEQ ID NO: 27431 - DNA, 36 bp, synthetic construct
  misc_feature 1..36: note = Probe
  source 1..36: mol_type = other DNA
actgtaaagctaacttagcattaaccttttaagtta

SEQ ID NO: 27432 - DNA, 50 bp, synthetic construct
  misc_feature 1..50: note = Probe
  source 1..50: mol_type = other DNA
actgtaaagctaacttagcattaaccttttaagttaaagattaagagaac

SEQ ID NO: 27433 - DNA, 36 bp, synthetic construct
  misc_feature 1..36: note = Probe
  source 1..36: mol_type = other DNA
actgtaaatctaaagacaggggttaggcctcttttt

SEQ ID NO: 27434 - DNA, 36 bp, synthetic construct
  misc_feature 1..36: note = Probe
  source 1..36: mol_type = other DNA
acttaaaactttacagtcagaggttcaattcctctt

SEQ ID NO: 27435 - DNA, 16 bp, synthetic construct
  misc_feature 1..16: note = Probe
  source 1..16: mol_type = other DNA
acttaacttgaccgct

SEQ ID NO: 27436 - DNA, 17 bp, synthetic construct
  misc_feature 1..17: note = Probe
  source 1..17: mol_type = other DNA
acttaacttgaccgctc

SEQ ID NO: 27437 - DNA, 18 bp, synthetic construct
  misc_feature 1..18: note = Probe
  source 1..18: mol_type = other DNA
acttaacttgaccgctct

SEQ ID NO: 27438 - DNA, 19 bp, synthetic construct
  misc_feature 1..19: note = Probe
  source 1..19: mol_type = other DNA
acttaacttgaccgctctg

SEQ ID NO: 27439 - DNA, 20 bp, synthetic construct
  misc_feature 1..20: note = Probe
  source 1..20: mol_type = other DNA
acttaacttgaccgctctga

SEQ ID NO: 27440 - DNA, 21 bp, synthetic construct
  misc_feature 1..21: note = Probe
  source 1..21: mol_type = other DNA
acttaacttgaccgctctgag

SEQ ID NO: 27441 - DNA, 22 bp, synthetic construct
  misc_feature 1..22: note = Probe
  source 1..22: mol_type = other DNA
acttaacttgaccgctctgagc

SEQ ID NO: 27442 - DNA, 23 bp, synthetic construct
  misc_feature 1..23: note = Probe
  source 1..23: mol_type = other DNA
acttaacttgaccgctctgagct

SEQ ID NO: 27443 - DNA, 28 bp, synthetic construct
  misc_feature 1..28: note = Probe
  source 1..28: mol_type = other DNA
acttaacttgaccgctctgagctaaacc

SEQ ID NO: 27444 - DNA, 29 bp, synthetic construct
  misc_feature 1..29: note = Probe
  source 1..29: mol_type = other DNA
acttaacttgaccgctctgagctaaacct

SEQ ID NO: 27445 - DNA, 33 bp, synthetic construct
  misc_feature 1..33: note = Probe
  source 1..33: mol_type = other DNA
acttaacttgaccgctctgagctaaacctagcc

SEQ ID NO: 27446 - DNA, 34 bp, synthetic construct
  misc_feature 1..34: note = Probe
  source 1..34: mol_type = other DNA
acttaacttgaccgctctgagctaaacctagccc

SEQ ID NO: 27447 - DNA, 35 bp, synthetic construct
  misc_feature 1..35: note = Probe
  source 1..35: mol_type = other DNA
acttaacttgaccgctctgagctaaacctagcccc

SEQ ID NO: 27448 - DNA, 36 bp, synthetic construct
  misc_feature 1..36: note = Probe
  source 1..36: mol_type = other DNA
acttaacttgaccgctctgagctaaacctagcccca

SEQ ID NO: 27449 - DNA, 15 bp, synthetic construct
  misc_feature 1..15: note = Probe
  source 1..15: mol_type = other DNA
acttacacttaggag

SEQ ID NO: 27450 - DNA, 21 bp, synthetic construct
  misc_feature 1..21: note = Probe
  source 1..21: mol_type = other DNA
acttacacttaggagatttca

SEQ ID NO: 27451 - DNA, 23 bp, synthetic construct
  misc_feature 1..23: note = Probe
  source 1..23: mol_type = other DNA
acttacacttaggagatttcaac

SEQ ID NO: 27452 - DNA, 24 bp, synthetic construct
  misc_feature 1..24: note = Probe
  source 1..24: mol_type = other DNA
acttacacttaggagatttcaact

SEQ ID NO: 27453 - DNA, 25 bp, synthetic construct
  misc_feature 1..25: note = Probe
  source 1..25: mol_type = other DNA
acttacacttaggagatttcaactt

SEQ ID NO: 27454 - DNA, 29 bp, synthetic construct
  misc_feature 1..29: note = Probe
  source 1..29: mol_type = other DNA
acttacacttaggagatttcaacttaact

SEQ ID NO: 27455 - DNA, 30 bp, synthetic construct
  misc_feature 1..30: note = Probe
  source 1..30: mol_type = other DNA
acttacacttaggagatttcaacttaactt

SEQ ID NO: 27456 - DNA, 34 bp, synthetic construct; identical to SEQ ID NO: 16000
  misc_feature 1..34: note = Probe
  source 1..34: mol_type = other DNA

SEQ ID NO: 27457 - DNA, 35 bp, synthetic construct; identical to SEQ ID NO: 2982
  misc_feature 1..35: note = Probe
  source 1..35: mol_type = other DNA

SEQ ID NO: 27458 - DNA, 36 bp, synthetic construct; identical to SEQ ID NO: 2983
  misc_feature 1..36: note = Probe
  source 1..36: mol_type = other DNA

SEQ ID NO: 27459 - DNA, 37 bp, synthetic construct; identical to SEQ ID NO: 2984
  misc_feature 1..37: note = Probe
  source 1..37: mol_type = other DNA

SEQ ID NO: 27460 - DNA, 38 bp, synthetic construct; identical to SEQ ID NO: 16004
  misc_feature 1..38: note = Probe
  source 1..38: mol_type = other DNA

SEQ ID NO: 27461 - DNA, 39 bp, synthetic construct; identical to SEQ ID NO: 2985
  misc_feature 1..39: note = Probe
  source 1..39: mol_type = other DNA

SEQ ID NO: 27462 - DNA, 40 bp, synthetic construct; identical to SEQ ID NO: 2986
  misc_feature 1..40: note = Probe
  source 1..40: mol_type = other DNA

SEQ ID NO: 27463 - DNA, 43 bp, synthetic construct; identical to SEQ ID NO: 2989
  misc_feature 1..43: note = Probe
  source 1..43: mol_type = other DNA

SEQ ID NO: 27464 - DNA, 44 bp, synthetic construct; identical to SEQ ID NO: 2990
  misc_feature 1..44: note = Probe
  source 1..44: mol_type = other DNA

SEQ ID NO: 27465 - DNA, 36 bp, synthetic construct; identical to SEQ ID NO: 16011
  misc_feature 1..36: note = Probe
  source 1..36: mol_type = other DNA

SEQ ID NO: 27466 - DNA, 39 bp, synthetic construct; identical to SEQ ID NO: 12625
  misc_feature 1..39: note = Probe
  source 1..39: mol_type = other DNA

SEQ ID NO: 27467 - DNA, 19 bp, synthetic construct
  misc_feature 1..19: note = Probe
  source 1..19: mol_type = other DNA
acttaggagatttcaactt

SEQ ID NO: 27468 - DNA, 23 bp, synthetic construct
  misc_feature 1..23: note = Probe
  source 1..23: mol_type = other DNA
acttaggagatttcaacttaact

SEQ ID NO: 27469 - DNA, 28 bp, synthetic construct
  misc_feature 1..28: note = Probe
  source 1..28: mol_type = other DNA
acttaggagatttcaacttaacttgacc

SEQ ID NO: 27470 - DNA, 29 bp, synthetic construct
  misc_feature 1..29: note = Probe
  source 1..29: mol_type = other DNA
acttaggagatttcaacttaacttgaccg

SEQ ID NO: 27471 - DNA, 31 bp, synthetic construct; identical to SEQ ID NO: 2999
  misc_feature 1..31: note = Probe
  source 1..31: mol_type = other DNA

SEQ ID NO: 27472 - DNA, 32 bp, synthetic construct; identical to SEQ ID NO: 3000
  misc_feature 1..32: note = Probe
  source 1..32: mol_type = other DNA

SEQ ID NO: 27473 - DNA, 33 bp, synthetic construct; identical to SEQ ID NO: 3001
  misc_feature 1..33: note = Probe
  source 1..33: mol_type = other DNA

SEQ ID NO: 27474 - DNA, 36 bp, synthetic construct; identical to SEQ ID NO: 3003
  misc_feature 1..36: note = Probe
  source 1..36: mol_type = other DNA

SEQ ID NO: 27475 - DNA, 37 bp, synthetic construct; identical to SEQ ID NO: 3004
  misc_feature 1..37: note = Probe
  source 1..37: mol_type = other DNA

SEQ ID NO: 27476 - DNA, 38 bp, synthetic construct; identical to SEQ ID NO: 3005
  misc_feature 1..38: note = Probe
  source 1..38: mol_type = other DNA

SEQ ID NO: 27477 - DNA, 23 bp, synthetic construct
  misc_feature 1..23: note = Probe
  source 1..23: mol_type = other DNA
acttccaattaactagttttgac

SEQ ID NO: 27478 - DNA, 22 bp, synthetic construct
  misc_feature 1..22: note = Probe
  source 1..22: mol_type = other DNA
acttctgacacagcctgatctt

SEQ ID NO: 27479 - DNA, 23 bp, synthetic construct
  misc_feature 1..23: note = Probe
  source 1..23: mol_type = other DNA
acttctgacacagcctgatcttt

SEQ ID NO: 27480 - DNA, 25 bp, synthetic construct
  misc_feature 1..25: note = Probe
  source 1..25: mol_type = other DNA
acttctgacagagctcaattacttt

SEQ ID NO: 27481 - DNA, 15 bp, synthetic construct
  misc_feature 1..15: note = Probe
  source 1..15: mol_type = other DNA
acttgaccgctctga

SEQ ID NO: 27482 - DNA, 16 bp, synthetic construct
  misc_feature 1..16: note = Probe
  source 1..16: mol_type = other DNA
acttgaccgctctgag

SEQ ID NO: 27483 - DNA, 17 bp, synthetic construct
  misc_feature 1..17: note = Probe
  source 1..17: mol_type = other DNA
acttgaccgctctgagc

SEQ ID NO: 27484 - DNA, 18 bp, synthetic construct
  misc_feature 1..18: note = Probe
  source 1..18: mol_type = other DNA
acttgaccgctctgagct

SEQ ID NO: 27485 - DNA, 23 bp, synthetic construct
  misc_feature 1..23: note = Probe
  source 1..23: mol_type = other DNA
acttgaccgctctgagctaaacc

SEQ ID NO: 27486 - DNA, 24 bp, synthetic construct
  misc_feature 1..24: note = Probe
  source 1..24: mol_type = other DNA
acttgaccgctctgagctaaacct

SEQ ID NO: 27487 - DNA, 28 bp, synthetic construct
  misc_feature 1..28: note = Probe
  source 1..28: mol_type = other DNA
acttgaccgctctgagctaaacctagcc

SEQ ID NO: 27488 - DNA, 29 bp, synthetic construct
  misc_feature 1..29: note = Probe
  source 1..29: mol_type = other DNA
acttgaccgctctgagctaaacctagccc

SEQ ID NO: 27489 - DNA, 30 bp, synthetic construct
  misc_feature 1..30: note = Probe
  source 1..30: mol_type = other DNA
acttgaccgctctgagctaaacctagcccc

SEQ ID NO: 27490 - DNA, 31 bp, synthetic construct
  misc_feature 1..31: note = Probe
  source 1..31: mol_type = other DNA
acttgaccgctctgagctaaacctagcccca

SEQ ID NO: 27491 - DNA, 36 bp, synthetic construct
  misc_feature 1..36: note = Probe
  source 1..36: mol_type = other DNA
acttgaccgctctgagctaaacctagccccaaaccc

SEQ ID NO: 27492 - DNA, 36 bp, synthetic construct
  misc_feature 1..36: note = Probe
  source 1..36: mol_type = other DNA
acttggacgaaccagagtgtagcttaacacaaagca

SEQ ID NO: 27493 - DNA, 36 bp, synthetic construct
  misc_feature 1..36: note = Probe
  source 1..36: mol_type = other DNA
acttggccccatggtgtaatggtcagcactctggac

SEQ ID NO: 27494 - DNA, 18 bp, synthetic construct
  misc_feature 1..18: note = Probe
  source 1..18: mol_type = other DNA
actttacagtcagaggtt

SEQ ID NO: 27495 - DNA, 19 bp, synthetic construct
  misc_feature 1..19: note = Probe
  source 1..19: mol_type = other DNA
actttacagtcagaggttc

SEQ ID NO: 27496 - DNA, 24 bp, synthetic construct
  misc_feature 1..24: note = Probe
  source 1..24: mol_type = other DNA
actttacagtcagaggttcaattc

SEQ ID NO: 27497 - DNA, 22 bp, synthetic construct
  misc_feature 1..22: note = Probe
  source 1..22: mol_type = other DNA
actttgaatccagcaatccgag

SEQ ID NO: 27498 - DNA, 23 bp, synthetic construct
  misc_feature 1..23: note = Probe
  source 1..23: mol_type = other DNA
actttgaatccagcaatccgagt

SEQ ID NO: 27499 - DNA, 24 bp, synthetic construct
  misc_feature 1..24: note = Probe
  source 1..24: mol_type = other DNA
actttgaatccagcaatccgagtt

SEQ ID NO: 27500 - DNA, 22 bp, synthetic construct
  misc_feature 1..22: note = Probe
  source 1..22: mol_type = other DNA
actttgaatccagcgatccgag

SEQ ID NO: 27501 - DNA, 23 bp, synthetic construct
  misc_feature 1..23: note = Probe
  source 1..23: mol_type = other DNA
actttgaatccagcgatccgagt

SEQ ID NO: 27502 - DNA, 24 bp, synthetic construct
  misc_feature 1..24: note = Probe
  source 1..24: mol_type = other DNA
actttgaatccagcgatccgagtt

SEQ ID NO: 27503 - DNA, 27 bp, synthetic construct
  misc_feature 1..27: note = Probe
  source 1..27: mol_type = other DNA
actttgatagagtaaataataggagct

SEQ ID NO: 27504 - DNA, 28 bp, synthetic construct
  misc_feature 1..28: note = Probe
  source 1..28: mol_type = other DNA
actttgatagagtaaataataggagctt

SEQ ID NO: 27505 - DNA, 33 bp, synthetic construct; identical to SEQ ID NO: 3022
  misc_feature 1..33: note = Probe
  source 1..33: mol_type = other DNA

SEQ ID NO: 27506 - DNA, 34 bp, synthetic construct; identical to SEQ ID NO: 3023
  misc_feature 1..34: note = Probe
  source 1..34: mol_type = other DNA

SEQ ID NO: 27507 - DNA, 36 bp, synthetic construct; identical to SEQ ID NO: 3025
  misc_feature 1..36: note = Probe
  source 1..36: mol_type = other DNA

SEQ ID NO: 27508 - DNA, 26 bp, synthetic construct
  misc_feature 1..26: note = Probe
  source 1..26: mol_type = other DNA
actttgtcaaagttaaattataggct

SEQ ID NO: 27509 - DNA, 28 bp, synthetic construct
  misc_feature 1..28: note = Probe
  source 1..28: mol_type = other DNA
actttgtcaaagttaaattataggctaa

SEQ ID NO: 27510 - DNA, 36 bp, synthetic construct
  misc_feature 1..36: note = Probe
  source 1..36: mol_type = other DNA
actttgtcaaagttaaattataggctaaatcctata

SEQ ID NO: 27511 - DNA, 16 bp, synthetic construct
  misc_feature 1..16: note = Probe
  source 1..16: mol_type = other DNA
acttttaaaggataac

SEQ ID NO: 27512 - DNA, 19 bp, synthetic construct
  misc_feature 1..19: note = Probe
  source 1..19: mol_type = other DNA
acttttaaaggataacagc

SEQ ID NO: 27513 - DNA, 30 bp, synthetic construct; identical to SEQ ID NO: 209
  misc_feature 1..30: note = Probe
  source 1..30: mol_type = other DNA

SEQ ID NO: 27514 - DNA, 33 bp, synthetic construct; identical to SEQ ID NO: 3035
  misc_feature 1..33: note = Probe
  source 1..33: mol_type = other DNA

SEQ ID NO: 27515 - DNA, 34 bp, synthetic construct; identical to SEQ ID NO: 212
  misc_feature 1..34: note = Probe
  source 1..34: mol_type = other DNA

SEQ ID NO: 27516 - DNA, 37 bp, synthetic construct
  misc_feature 1..37: note = Probe
  source 1..37: mol_type = other DNA
acttttaaaggataacagctatccattggtcttaggc

SEQ ID NO: 27517 - DNA, 38 bp, synthetic construct; identical to SEQ ID NO: 16055
  misc_feature 1..38: note = Probe
  source 1..38: mol_type = other DNA

SEQ ID NO: 27518 - DNA, 39 bp, synthetic construct; identical to SEQ ID NO: 3036
  misc_feature 1..39: note = Probe
  source 1..39: mol_type = other DNA

SEQ ID NO: 27519 - DNA, 40 bp, synthetic construct; identical to SEQ ID NO: 16056
  misc_feature 1..40: note = Probe
  source 1..40: mol_type = other DNA

SEQ ID NO: 27520 - DNA, 41 bp, synthetic construct; identical to SEQ ID NO: 3037
  misc_feature 1..41: note = Probe
  source 1..41: mol_type = other DNA

SEQ ID NO: 27521 - DNA, 42 bp, synthetic construct; identical to SEQ ID NO: 16058
  misc_feature 1..42: note = Probe
  source 1..42: mol_type = other DNA

SEQ ID NO: 27522 - DNA, 50 bp, synthetic construct; identical to SEQ ID NO: 3039
  misc_feature 1..50: note = Probe
  source 1..50: mol_type = other DNA

SEQ ID NO: 27523 - DNA, 24 bp, synthetic construct
  misc_feature 1..24: note = Probe
  source 1..24: mol_type = other DNA
agaaaaagtctttaactccaccat

SEQ ID NO: 27524 - DNA, 18 bp, synthetic construct
  misc_feature 1..18: note = Probe
  source 1..18: mol_type = other DNA
agaaagctcacaagaact

SEQ ID NO: 27525 - DNA, 19 bp, synthetic construct
  misc_feature 1..19: note = Probe
  source 1..19: mol_type = other DNA
agaaagctcacaagaactg

SEQ ID NO: 27526 - DNA, 26 bp, synthetic construct
  misc_feature 1..26: note = Probe
  source 1..26: mol_type = other DNA
agaaagctcacaagaactgctaactc

SEQ ID NO: 27527 - DNA, 29 bp, synthetic construct
  misc_feature 1..29: note = Probe
  source 1..29: mol_type = other DNA
agaaagctcacaagaactgctaactcatg

SEQ ID NO: 27528 - DNA, 32 bp, synthetic construct; identical to SEQ ID NO: 3040
  misc_feature 1..32: note = Probe
  source 1..32: mol_type = other DNA

SEQ ID NO: 27529 - DNA, 33 bp, synthetic construct; identical to SEQ ID NO: 3041
  misc_feature 1..33: note = Probe
  source 1..33: mol_type = other DNA

SEQ ID NO: 27530 - DNA, 34 bp, synthetic construct
  misc_feature 1..34: note = Probe
  source 1..34: mol_type = other DNA
agaaagctcacaagaactgctaactcatgccccc

SEQ ID NO: 27531 - DNA, 47 bp, synthetic construct
  misc_feature 1..47: note = Probe
  source 1..47: mol_type = other DNA
agaaagctcacaagaactgctaactcatgcccccatgtctaacaaca

SEQ ID NO: 27532 - DNA, 15 bp, synthetic construct
  misc_feature 1..15: note = Probe
  source 1..15: mol_type = other DNA
agaaaggccgaattt

SEQ ID NO: 27533 - DNA, 16 bp, synthetic construct
  misc_feature 1..16: note = Probe
  source 1..16: mol_type = other DNA
agaaaggccgaatttt

SEQ ID NO: 27534 - DNA, 15 bp, synthetic construct
  misc_feature 1..15: note = Probe
  source 1..15: mol_type = other DNA
agaaatatgtctgat

SEQ ID NO: 27535 - DNA, 32 bp, synthetic construct
  misc_feature 1..32: note = Probe
  source 1..32: mol_type = other DNA
agaaatatgtctgataaaagagttactttgat

SEQ ID NO: 27536 - DNA, 36 bp, synthetic construct
  misc_feature 1..36: note = Probe
  source 1..36: mol_type = other DNA
agaaatatgtctgataaaagagttactttgatagag

SEQ ID NO: 27537 - DNA, 50 bp, synthetic construct; identical to SEQ ID NO: 217
  misc_feature 1..50: note = Probe
  source 1..50: mol_type = other DNA

SEQ ID NO: 27538 - DNA, 24 bp, synthetic construct
  misc_feature 1..24: note = Probe
  source 1..24: mol_type = other DNA
agaaatttaggttaaatacagacc

SEQ ID NO: 27539 - DNA, 31 bp, synthetic construct; identical to SEQ ID NO: 3044
  misc_feature 1..31: note = Probe
  source 1..31: mol_type = other DNA

SEQ ID NO: 27540 - DNA, 36 bp, synthetic construct
  misc_feature 1..36: note = Probe
  source 1..36: mol_type = other DNA
agaaatttaggttaaatacagaccaagagccttcaa

SEQ ID NO: 27541 - DNA, 36 bp, synthetic construct
  misc_feature 1..36: note = Probe
  source 1..36: mol_type = other DNA
agaacagcagagtggcgcagcggaagcgtgctgggc

SEQ ID NO: 27542 - DNA, 15 bp, synthetic construct
  misc_feature 1..15: note = Probe
  source 1..15: mol_type = other DNA
agaacagggtttgtt

SEQ ID NO: 27543 - DNA, 16 bp, synthetic construct
  misc_feature 1..16: note = Probe
  source 1..16: mol_type = other DNA
agaacagggtttgtta

SEQ ID NO: 27544 - DNA, 17 bp, synthetic construct
  misc_feature 1..17: note = Probe
  source 1..17: mol_type = other DNA
agaacagggtttgttaa

SEQ ID NO: 27545 - DNA, 19 bp, synthetic construct
  misc_feature 1..19: note = Probe
  source 1..19: mol_type = other DNA
agaacagggtttgttaaga

SEQ ID NO: 27546 - DNA, 25 bp, synthetic construct
  misc_feature 1..25: note = Probe
  source 1..25: mol_type = other DNA
agaaccaacacctctttacagtgaa

SEQ ID NO: 27547 - DNA, 36 bp, synthetic construct
  misc_feature 1..36: note = Probe
  source 1..36: mol_type = other DNA
agaacctgggtagctcagtaggtagaacatcagact

SEQ ID NO: 27548 - DNA, 15 bp, synthetic construct
  misc_feature 1..15: note = Probe
  source 1..15: mol_type = other DNA
agaactgctaactca

SEQ ID NO: 27549 - DNA, 17 bp, synthetic construct
  misc_feature 1..17: note = Probe
  source 1..17: mol_type = other DNA
agaactgctaactcatg

SEQ ID NO: 27550 - DNA, 18 bp, synthetic construct
  misc_feature 1..18: note = Probe
  source 1..18: mol_type = other DNA
agaactgctaactcatgc

SEQ ID NO: 27551 - DNA, 19 bp, synthetic construct
  misc_feature 1..19: note = Probe
  source 1..19: mol_type = other DNA
agaactgctaactcatgcc

SEQ ID NO: 27552 - DNA, 20 bp, synthetic construct
  misc_feature 1..20: note = Probe
  source 1..20: mol_type = other DNA
agaactgctaactcatgccc

SEQ ID NO: 27553 - DNA, 21 bp, synthetic construct
  misc_feature 1..21: note = Probe
  source 1..21: mol_type = other DNA
agaactgctaactcatgcccc

SEQ ID NO: 27554 - DNA, 22 bp, synthetic construct
  misc_feature 1..22: note = Probe
  source 1..22: mol_type = other DNA
agaactgctaactcatgccccc

SEQ ID NO: 27555 - DNA, 23 bp, synthetic construct
  misc_feature 1..23: note = Probe
  source 1..23: mol_type = other DNA
agaactgctaactcatgccccca

SEQ ID NO: 27556 - DNA, 24 bp, synthetic construct
  misc_feature 1..24: note = Probe
  source 1..24: mol_type = other DNA
agaactgctaactcatgcccccat

SEQ ID NO: 27557 - DNA, 25 bp, synthetic construct
  misc_feature 1..25: note = Probe
  source 1..25: mol_type = other DNA
agaactgctaactcatgcccccatg

SEQ ID NO: 27558 - DNA, 26 bp, synthetic construct
  misc_feature 1..26: note = Probe
  source 1..26: mol_type = other DNA
agaactgctaactcatgcccccatgt

SEQ ID NO: 27559 - DNA, 29 bp, synthetic construct
  misc_feature 1..29: note = Probe
  source 1..29: mol_type = other DNA
agaactgctaactcatgcccccatgtcta

SEQ ID NO: 27560 - DNA, 34 bp, synthetic construct; identical to SEQ ID NO: 16097
  misc_feature 1..34: note = Probe
  source 1..34: mol_type = other DNA

SEQ ID NO: 27561 - DNA, 37 bp, synthetic construct
  misc_feature 1..37: note = Probe
  source 1..37: mol_type = other DNA
agaactgctaactcatgcccccatgtctaacaacatg

SEQ ID NO: 27562 - DNA, 38 bp, synthetic construct
  misc_feature 1..38: note = Probe
  source 1..38: mol_type = other DNA
agaactgctaactcatgcccccatgtctaacaacatgg

SEQ ID NO: 27563 - DNA, 39 bp, synthetic construct; identical to SEQ ID NO: 3067
  misc_feature 1..39: note = Probe
  source 1..39: mol_type = other DNA

SEQ ID NO: 27564 - DNA, 40 bp, synthetic construct; identical to SEQ ID NO: 218
  misc_feature 1..40: note = Probe
  source 1..40: mol_type = other DNA

SEQ ID NO: 27565 - DNA, 41 bp, synthetic construct; identical to SEQ ID NO: 219
  misc_feature 1..41: note = Probe
  source 1..41: mol_type = other DNA

SEQ ID NO: 27566 - DNA, 42 bp, synthetic construct; identical to SEQ ID NO: 220
  misc_feature 1..42: note = Probe
  source 1..42: mol_type = other DNA

SEQ ID NO: 27567 - DNA, 44 bp, synthetic construct; identical to SEQ ID NO: 222
  misc_feature 1..44: note = Probe
  source 1..44: mol_type = other DNA

SEQ ID NO: 27568 - DNA, 50 bp, synthetic construct; identical to SEQ ID NO: 3070
  misc_feature 1..50: note = Probe
  source 1..50: mol_type = other DNA

SEQ ID NO: 27569 - DNA, 15 bp, synthetic construct
  misc_feature 1..15: note = Probe
  source 1..15: mol_type = other DNA
agaagattctaggtt

SEQ ID NO: 27570 - DNA, 32 bp, synthetic construct; identical to SEQ ID NO: 3074
  misc_feature 1..32: note = Probe
  source 1..32: mol_type = other DNA

SEQ ID NO: 27571 - DNA, 36 bp, synthetic construct; identical to SEQ ID NO: 3076
  misc_feature 1..36: note = Probe
  source 1..36: mol_type = other DNA

SEQ ID NO: 27572 - DNA, 15 bp, synthetic construct
  misc_feature 1..15: note = Probe
  source 1..15: mol_type = other DNA
agaagattgagggtt

SEQ ID NO: 27573 - DNA, 15 bp, synthetic construct
  misc_feature 1..15: note = Probe
  source 1..15: mol_type = other DNA
agaagattgcaggtt

SEQ ID NO: 27574 - DNA, 36 bp, synthetic construct; identical to SEQ ID NO: 3087
  misc_feature 1..36: note = Probe
  source 1..36: mol_type = other DNA

SEQ ID NO: 27575 - DNA, 26 bp, synthetic construct
  misc_feature 1..26: note = Probe
  source 1..26: mol_type = other DNA
agaagcagcttcaaacctgccggggc

SEQ ID NO: 27576 - DNA, 27 bp, synthetic construct
  misc_feature 1..27: note = Probe
  source 1..27: mol_type = other DNA
agaagcagcttcaaacctgccggggct

SEQ ID NO: 27577 - DNA, 28 bp, synthetic construct
  misc_feature 1..28: note = Probe
  source 1..28: mol_type = other DNA
agaagcagcttcaaacctgccggggctt

SEQ ID NO: 27578 - DNA, 29 bp, synthetic construct
  misc_feature 1..29: note = Probe
  source 1..29: mol_type = other DNA
agaagcagcttcaaacctgccggggcttc

SEQ ID NO: 27579 - DNA, 30 bp, synthetic construct; identical to SEQ ID NO: 3090
  misc_feature 1..30: note = Probe
  source 1..30: mol_type = other DNA

SEQ ID NO: 27580 - DNA, 32 bp, synthetic construct
  misc_feature 1..32: note = Probe
  source 1..32: mol_type = other DNA
agaaggacgaggtggccgagtggttaaggcga

SEQ ID NO: 27581 - DNA, 15 bp, synthetic construct
  misc_feature 1..15: note = Probe
  source 1..15: mol_type = other DNA
agaaggtctcacttt

SEQ ID NO: 27582 - DNA, 16 bp, synthetic construct
  misc_feature 1..16: note = Probe
  source 1..16: mol_type = other DNA
agaaggtctcactttt

SEQ ID NO: 27583 - DNA, 22 bp, synthetic construct
  misc_feature 1..22: note = Probe
  source 1..22: mol_type = other DNA
agaatcgaacccatccctgaga

SEQ ID NO: 27584 - DNA, 33 bp, synthetic construct; identical to SEQ ID NO: 16127
  misc_feature 1..33: note = Probe
  source 1..33: mol_type = other DNA

SEQ ID NO: 27585 - DNA, 39 bp, synthetic construct
  misc_feature 1..39: note = Probe
  source 1..39: mol_type = other DNA
agaatcttagctttgggtgctaatggtggagttaaagac

SEQ ID NO: 27586 - DNA, 40 bp, synthetic construct
  misc_feature 1..40: note = Probe
  source 1..40: mol_type = other DNA
agaatcttagctttgggtgctaatggtggagttaaagact

SEQ ID NO: 27587 - DNA, 50 bp, synthetic construct; identical to SEQ ID NO: 235
  misc_feature 1..50: note = Probe
  source 1..50: mol_type = other DNA

SEQ ID NO: 27588 - DNA, 16 bp, synthetic construct
  misc_feature 1..16: note = Probe
  source 1..16: mol_type = other DNA
agaattctcgcctgcc

SEQ ID NO: 27589 - DNA, 18 bp, synthetic construct
  misc_feature 1..18: note = Probe
  source 1..18: mol_type = other DNA
agaattctcgcctgccac

SEQ ID NO: 27590 - DNA, 36 bp, synthetic construct
  misc_feature 1..36: note = Probe
  source 1..36: mol_type = other DNA
agacagccggctcgttggtctaggggtatgattctc

SEQ ID NO: 27591 - DNA, 16 bp, synthetic construct
  misc_feature 1..16: note = Probe
  source 1..16: mol_type = other DNA
agacaggggttaggcc

SEQ ID NO: 27592 - DNA, 17 bp, synthetic construct
  misc_feature 1..17: note = Probe
  source 1..17: mol_type = other DNA
agacaggggttaggcct

SEQ ID NO: 27593 - DNA, 29 bp, synthetic construct
  misc_feature 1..29: note = Probe
  source 1..29: mol_type = other DNA
agacaggggttaggcctctttttaccagc

SEQ ID NO: 27594 - DNA, 21 bp, synthetic construct
  misc_feature 1..21: note = Probe
  source 1..21: mol_type = other DNA
agaccaagagccttcaaagcc

SEQ ID NO: 27595 - DNA, 24 bp, synthetic construct
  misc_feature 1..24: note = Probe
  source 1..24: mol_type = other DNA
agacccgaggtagggctttggctg

SEQ ID NO: 27596 - DNA, 26 bp, synthetic construct
  misc_feature 1..26: note = Probe
  source 1..26: mol_type = other DNA
agacccgaggtagggctttggctgtg

SEQ ID NO: 27597 - DNA, 27 bp, synthetic construct
  misc_feature 1..27: note = Probe
  source 1..27: mol_type = other DNA
agacccgaggtagggctttggctgtgg

SEQ ID NO: 27598 - DNA, 29 bp, synthetic construct
  misc_feature 1..29: note = Probe
  source 1..29: mol_type = other DNA
agacccgaggtagggctttggctgtgggg

SEQ ID NO: 27599 - DNA, 32 bp, synthetic construct; identical to SEQ ID NO: 3122
  misc_feature 1..32: note = Probe
  source 1..32: mol_type = other DNA

SEQ ID NO: 27600 - DNA, 36 bp, synthetic construct
  misc_feature 1..36: note = Probe
  source 1..36: mol_type = other DNA
agacgagggctccatagctcaggggttagagcgctg

SEQ ID NO: 27601 - DNA, 15 bp, synthetic construct
  misc_feature 1..15: note = Probe
  source 1..15: mol_type = other DNA
agacgggctcacatc

SEQ ID NO: 27602 - DNA, 16 bp, synthetic construct
  misc_feature 1..16: note = Probe
  source 1..16: mol_type = other DNA
agacgggctcacatca

SEQ ID NO: 27603 - DNA, 17 bp, synthetic construct
  misc_feature 1..17: note = Probe
  source 1..17: mol_type = other DNA
agacgggctcacatcac

SEQ ID NO: 27604 - DNA, 18 bp, synthetic construct
  misc_feature 1..18: note = Probe
  source 1..18: mol_type = other DNA
agacgggctcacatcacc

SEQ ID NO: 27605 - DNA, 19 bp, synthetic construct
  misc_feature 1..19: note = Probe
  source 1..19: mol_type = other DNA
agacgggctcacatcaccc

SEQ ID NO: 27606 - DNA, 36 bp, synthetic construct
  misc_feature 1..36: note = Probe
  source 1..36: mol_type = other DNA
agacttttaatctgagggtccagggttcaagtccct

SEQ ID NO: 27607 - DNA, 50 bp, synthetic construct
  misc_feature 1..50: note = Probe
  source 1..50: mol_type = other DNA
agacttttaatctgagggtccagggttcaagtccctgttcgggcggcatg

SEQ ID NO: 27608 - DNA, 36 bp, synthetic construct
  misc_feature 1..36: note = Probe
  source 1..36: mol_type = other DNA
agacttttaatctgagggtccagggttcatgtccct

SEQ ID NO: 27609 - DNA, 26 bp, synthetic construct
  misc_feature 1..26: note = Probe
  source 1..26: mol_type = other DNA
agagaaaaagtctttaactccaccat

SEQ ID NO: 27610 - DNA, 15 bp, synthetic construct
  misc_feature 1..15: note = Probe
  source 1..15: mol_type = other DNA
agagaaccaacacct

SEQ ID NO: 27611 - DNA, 27 bp, synthetic construct
  misc_feature 1..27: note = Probe
  source 1..27: mol_type = other DNA
agagaaccaacacctctttacagtgaa

SEQ ID NO: 27612 - DNA, 26 bp, synthetic construct
  misc_feature 1..26: note = Probe
  source 1..26: mol_type = other DNA
agagagaggcactggtggttcagtgg

SEQ ID NO: 27613 - DNA, 36 bp, synthetic construct
  misc_feature 1..36: note = Probe
  source 1..36: mol_type = other DNA
agagagaggcactggtggttcagtggtagaattctc

SEQ ID NO: 27614 - DNA, 39 bp, synthetic construct
  misc_feature 1..39: note = Probe
  source 1..39: mol_type = other DNA
agagagaggcactggtggttcagtggtagaattctcgcc

SEQ ID NO: 27615 - DNA, 40 bp, synthetic construct
  misc_feature 1..40: note = Probe
  source 1..40: mol_type = other DNA
agagagaggcactggtggttcagtggtagaattctcgcct

SEQ ID NO: 27616 - DNA, 30 bp, synthetic construct
  misc_feature 1..30: note = Probe
  source 1..30: mol_type = other DNA
agagagcctggatagctcagtcggtagagc

SEQ ID NO: 27617 - DNA, 31 bp, synthetic construct
  misc_feature 1..31: note = Probe
  source 1..31: mol_type = other DNA
agagagcctggatagctcagtcggtagagca

SEQ ID NO: 27618 - DNA, 32 bp, synthetic construct
  misc_feature 1..32: note = Probe
  source 1..32: mol_type = other DNA
agagagcctggatagctcagtcggtagagcat

SEQ ID NO: 27619 - DNA, 33 bp, synthetic construct
  misc_feature 1..33: note = Probe
  source 1..33: mol_type = other DNA
agagagcctggatagctcagtcggtagagcatc

SEQ ID NO: 27620 - DNA, 34 bp, synthetic construct
  misc_feature 1..34: note = Probe
  source 1..34: mol_type = other DNA
agagagcctggatagctcagtcggtagagcatca

SEQ ID NO: 27621 - DNA, 35 bp, synthetic construct
  misc_feature 1..35: note = Probe
  source 1..35: mol_type = other DNA
agagagcctggatagctcagtcggtagagcatcag

SEQ ID NO: 27622 - DNA, 36 bp, synthetic construct
  misc_feature 1..36: note = Probe
  source 1..36: mol_type = other DNA
agagagcctggatagctcagtcggtagagcatcaga

SEQ ID NO: 27623 - DNA, 37 bp, synthetic construct
  misc_feature 1..37: note = Probe
  source 1..37: mol_type = other DNA
agagagcctggatagctcagtcggtagagcatcagac

SEQ ID NO: 27624 - DNA, 38 bp, synthetic construct
  misc_feature 1..38: note = Probe
  source 1..38: mol_type = other DNA
agagagcctggatagctcagtcggtagagcatcagact

SEQ ID NO: 27625 - DNA, 36 bp, synthetic construct
  misc_feature 1..36: note = Probe
  source 1..36: mol_type = other DNA
agagaggcactggtggttcagtggtagaattctcgc

SEQ ID NO: 27626 - DNA, 38 bp, synthetic construct
  misc_feature 1..38: note = Probe
  source 1..38: mol_type = other DNA
agagaggcactggtggttcagtggtagaattctcgcct

SEQ ID NO: 27627 - DNA, 36 bp, synthetic construct
  misc_feature 1..36: note = Probe
  source 1..36: mol_type = other DNA
agagaggcgttggtggtttagtggtagaattctcgc

SEQ ID NO: 27628 - DNA, 37 bp, synthetic construct
  misc_feature 1..37: note = Probe
  source 1..37: mol_type = other DNA
agagaggcgttggtggtttagtggtagaattctcgcc

SEQ ID NO: 27629 - DNA, 38 bp, synthetic construct
  misc_feature 1..38: note = Probe
  source 1..38: mol_type = other DNA
agagaggcgttggtggtttagtggtagaattctcgcct

SEQ ID NO: 27630 - DNA, 15 bp, synthetic construct
  misc_feature 1..15: note = Probe
  source 1..15: mol_type = other DNA
agagcatttgactgc

SEQ ID NO: 27631 - DNA, 18 bp, synthetic construct
  misc_feature 1..18: note = Probe
  source 1..18: mol_type = other DNA
agagcccactgtaaagct

SEQ ID NO: 27632 - DNA, 36 bp, synthetic construct
  misc_feature 1..36: note = Probe
  source 1..36: mol_type = other DNA
agagcccagtgtagagagcctggatagctcagtcgg

SEQ ID NO: 27633 - DNA, 26 bp, synthetic construct
  misc_feature 1..26: note = Probe
  source 1..26: mol_type = other DNA
agagcccggatagctcagtcggtaga

SEQ ID NO: 27634 - DNA, 27 bp, synthetic construct
  misc_feature 1..27: note = Probe
  source 1..27: mol_type = other DNA
agagcccggatagctcagtcggtagag

SEQ ID NO: 27635 - DNA, 28 bp, synthetic construct
  misc_feature 1..28: note = Probe
  source 1..28: mol_type = other DNA
agagcccggatagctcagtcggtagagc

SEQ ID NO: 27636 - DNA, 29 bp, synthetic construct
  misc_feature 1..29: note = Probe
  source 1..29: mol_type = other DNA
agagcccggatagctcagtcggtagagca

SEQ ID NO: 27637 - DNA, 31 bp, synthetic construct
  misc_feature 1..31: note = Probe
  source 1..31: mol_type = other DNA
agagcccggatagctcagtcggtagagcatc

SEQ ID NO: 27638 - DNA, 32 bp, synthetic construct
  misc_feature 1..32: note = Probe
  source 1..32: mol_type = other DNA
agagcccggatagctcagtcggtagagcatca

SEQ ID NO: 27639 - DNA, 34 bp, synthetic construct; identical to SEQ ID NO: 16213
  misc_feature 1..34: note = Probe
  source 1..34: mol_type = other DNA

SEQ ID NO: 27640 - DNA, 35 bp, synthetic construct
  misc_feature 1..35: note = Probe
  source 1..35: mol_type = other DNA
agagcccggatagctcagtcggtagagcatcagac

SEQ ID NO: 27641 - DNA, 36 bp, synthetic construct; identical to SEQ ID NO: 16214
  misc_feature 1..36: note = Probe
  source 1..36: mol_type = other DNA

SEQ ID NO: 27642 - DNA, 37 bp, synthetic construct
  misc_feature 1..37: note = Probe
  source 1..37: mol_type = other DNA
agagcccggatagctcagtcggtagagcatcagactt

SEQ ID NO: 27643 - DNA, 38 bp, synthetic construct; identical to SEQ ID NO: 16215
  misc_feature 1..38: note = Probe
  source 1..38: mol_type = other DNA

SEQ ID NO: 27644 - DNA, 39 bp, synthetic construct
  misc_feature 1..39: note = Probe
  source 1..39: mol_type = other DNA
agagcccggatagctcagtcggtagagcatcagactttt

SEQ ID NO: 27645 - DNA, 31 bp, synthetic construct; identical to SEQ ID NO: 248
  misc_feature 1..31: note = Probe
  source 1..31: mol_type = other DNA

SEQ ID NO: 27646 - DNA, 28 bp, synthetic construct
  misc_feature 1..28: note = Probe
  source 1..28: mol_type = other DNA
agagcctggatagctcagtcggtagagc

SEQ ID NO: 27647 - DNA, 29 bp, synthetic construct
  misc_feature 1..29: note = Probe
  source 1..29: mol_type = other DNA
agagcctggatagctcagtcggtagagca

SEQ ID NO: 27648 - DNA, 31 bp, synthetic construct
  misc_feature 1..31: note = Probe
  source 1..31: mol_type = other DNA
agagcctggatagctcagtcggtagagcatc

SEQ ID NO: 27649 - DNA, 32 bp, synthetic construct
  misc_feature 1..32: note = Probe
  source 1..32: mol_type = other DNA
agagcctggatagctcagtcggtagagcatca

SEQ ID NO: 27650 - DNA, 33 bp, synthetic construct
  misc_feature 1..33: note = Probe
  source 1..33: mol_type = other DNA
agagcctggatagctcagtcggtagagcatcag

SEQ ID NO: 27651 - DNA, 34 bp, synthetic construct
  misc_feature 1..34: note = Probe
  source 1..34: mol_type = other DNA
agagcctggatagctcagtcggtagagcatcaga

SEQ ID NO: 27652 - DNA, 36 bp, synthetic construct
  misc_feature 1..36: note = Probe
  source 1..36: mol_type = other DNA
agagcctggatagctcagtcggtagagcatcagact

SEQ ID NO: 27653 - DNA, 38 bp, synthetic construct; identical to SEQ ID NO: 16225
  misc_feature 1..38: note = Probe
  source 1..38: mol_type = other DNA

SEQ ID NO: 27654 - DNA, 16 bp, synthetic construct
  misc_feature 1..16: note = Probe
  source 1..16: mol_type = other DNA
agagcggaggactgta

SEQ ID NO: 27655 - DNA, 17 bp, synthetic construct
  misc_feature 1..17: note = Probe
  source 1..17: mol_type = other DNA
agagcggaggactgtag

SEQ ID NO: 27656 - DNA, 36 bp, synthetic construct; identical to SEQ ID NO: 16229
  misc_feature 1..36: note = Probe
  source 1..36: mol_type = other DNA

SEQ ID NO: 27657 - DNA, 29 bp, synthetic construct
  misc_feature 1..29: note = Probe
  source 1..29: mol_type = other DNA
agaggagttgtttttcctggcaaaaacct

SEQ ID NO: 27658 - DNA, 35 bp, synthetic construct
  misc_feature 1..35: note = Probe
  source 1..35: mol_type = other DNA
agaggcactggtggttcagtggtagaattctcgcc

SEQ ID NO: 27659 - DNA, 36 bp, synthetic construct
  misc_feature 1..36: note = Probe
  source 1..36: mol_type = other DNA
agaggcactggtggttcagtggtagaattctcgcct

SEQ ID NO: 27660 - DNA, 33 bp, synthetic construct
  misc_feature 1..33: note = Probe
  source 1..33: mol_type = other DNA
agaggcattggtggttcagtggtagaattctcg

SEQ ID NO: 27661 - DNA, 34 bp, synthetic construct
  misc_feature 1..34: note = Probe
  source 1..34: mol_type = other DNA
agaggcattggtggttcagtggtagaattctcgc

SEQ ID NO: 27662 - DNA, 35 bp, synthetic construct
  misc_feature 1..35: note = Probe
  source 1..35: mol_type = other DNA
agaggcattggtggttcagtggtagaattctcgcc

SEQ ID NO: 27663 - DNA, 36 bp, synthetic construct
  misc_feature 1..36: note = Probe
  source 1..36: mol_type = other DNA
agaggcattggtggttcagtggtagaattctcgcct

SEQ ID NO: 27664 - DNA, 36 bp, synthetic construct
  misc_feature 1..36: note = Probe
  source 1..36: mol_type = other DNA
agaggccttggtggtgcagtggtagaattctcgcct

SEQ ID NO: 27665 - DNA, 15 bp, synthetic construct
  misc_feature 1..15: note = Probe
  source 1..15: mol_type = other DNA
agaggcttacgaccc

SEQ ID NO: 27666 - DNA, 27 bp, synthetic construct
  misc_feature 1..27: note = Probe
  source 1..27: mol_type = other DNA
agaggggctgtgctcgcaaggtttctt

SEQ ID NO: 27667 - DNA, 30 bp, synthetic construct; identical to SEQ ID NO: 16236
  misc_feature 1..30: note = Probe
  source 1..30: mol_type = other DNA

SEQ ID NO: 27668 - DNA, 18 bp, synthetic construct
  misc_feature 1..18: note = Probe
  source 1..18: mol_type = other DNA
agaggtatgattctcgct

SEQ ID NO: 27669 - DNA, 15 bp, synthetic construct
  misc_feature 1..15: note = Probe
  source 1..15: mol_type = other DNA
agaggtcgatggatc

SEQ ID NO: 27670 - DNA, 21 bp, synthetic construct
  misc_feature 1..21: note = Probe
  source 1..21: mol_type = other DNA
agaggtcgatggatcgaaacc

SEQ ID NO: 27671 - DNA, 18 bp, synthetic construct
  misc_feature 1..18: note = Probe
  source 1..18: mol_type = other DNA
agagtaaataataggagc

SEQ ID NO: 27672 - DNA, 19 bp, synthetic construct
  misc_feature 1..19: note = Probe
  source 1..19: mol_type = other DNA
agagtaaataataggagct

SEQ ID NO: 27673 - DNA, 20 bp, synthetic construct
  misc_feature 1..20: note = Probe
  source 1..20: mol_type = other DNA
agagtaaataataggagctt

SEQ ID NO: 27674 - DNA, 26 bp, synthetic construct
  misc_feature 1..26: note = Probe
  source 1..26: mol_type = other DNA
agagtaaataataggagcttaaaccc

SEQ ID NO: 27675 - DNA, 36 bp, synthetic construct
  misc_feature 1..36: note = Probe
  source 1..36: mol_type = other DNA
agagtgccaggatagttcaggtggtagagcatcaga

SEQ ID NO: 27676 - DNA, 28 bp, synthetic construct
  misc_feature 1..28: note = Probe
  source 1..28: mol_type = other DNA
agagtggcgcagcggaagcgtgctgggc

SEQ ID NO: 27677 - DNA, 29 bp, synthetic construct
  misc_feature 1..29: note = Probe
  source 1..29: mol_type = other DNA
agagtggcgcagcggaagcgtgctgggcc

SEQ ID NO: 27678 - DNA, 30 bp, synthetic construct; identical to SEQ ID NO: 12668
  misc_feature 1..30: note = Probe
  source 1..30: mol_type = other DNA

SEQ ID NO: 27679 - DNA, 26 bp, synthetic construct
  misc_feature 1..26: note = Probe
  source 1..26: mol_type = other DNA
agagtgtagcttaacacaaagcaccc

SEQ ID NO: 27680 - DNA, 36 bp, synthetic construct
  misc_feature 1..36: note = Probe
  source 1..36: mol_type = other DNA
agagtgtagcttaacacaaagcacccaacttacact

SEQ ID NO: 27681 - DNA, 36 bp, synthetic construct; identical to SEQ ID NO: 16268
  misc_feature 1..36: note = Probe
  source 1..36: mol_type = other DNA

SEQ ID NO: 27682 - DNA, 19 bp, synthetic construct
  misc_feature 1..19: note = Probe
  source 1..19: mol_type = other DNA
agatcaagaggtccccggt

SEQ ID NO: 27683 - DNA, 25 bp, synthetic construct
  misc_feature 1..25: note = Probe
  source 1..25: mol_type = other DNA
agatgaaaacctttttccaaggaca

SEQ ID NO: 27684 - DNA, 36 bp, synthetic construct
  misc_feature 1..36: note = Probe
  source 1..36: mol_type = other DNA
agatgcgttggtggtatagtggtgagcatagctgcc

SEQ ID NO: 27685 - DNA, 36 bp, synthetic construct
  misc_feature 1..36: note = Probe
  source 1..36: mol_type = other DNA
agatggcagagcccggtaatcgcataaaacttaaaa

SEQ ID NO: 27686 - DNA, 38 bp, synthetic construct
  misc_feature 1..38: note = Probe
  source 1..38: mol_type = other DNA
agatggcagagcccggtaatcgcataaaacttaaaact

SEQ ID NO: 27687 - DNA, 27 bp, synthetic construct
  misc_feature 1..27: note = Probe
  source 1..27: mol_type = other DNA
agatggctcgttggtctaggggtatga

SEQ ID NO: 27688 - DNA, 32 bp, synthetic construct
  misc_feature 1..32: note = Probe
  source 1..32: mol_type = other DNA
agatggctcgttggtctaggggtatgattctc

SEQ ID NO: 27689 - DNA, 36 bp, synthetic construct; identical to SEQ ID NO: 16285
  misc_feature 1..36: note = Probe
  source 1..36: mol_type = other DNA

SEQ ID NO: 27690 - DNA, 19 bp, synthetic construct
  misc_feature 1..19: note = Probe
  source 1..19: mol_type = other DNA
agattaagagaaccaacac

SEQ ID NO: 27691 - DNA, 20 bp, synthetic construct
  misc_feature 1..20: note = Probe
  source 1..20: mol_type = other DNA
agattaagagaaccaacacc

SEQ ID NO: 27692 - DNA, 21 bp, synthetic construct
  misc_feature 1..21: note = Probe
  source 1..21: mol_type = other DNA
agattaagagaaccaacacct

SEQ ID NO: 27693 - DNA, 22 bp, synthetic construct
  misc_feature 1..22: note = Probe
  source 1..22: mol_type = other DNA
agattaagagaaccaacacctc

SEQ ID NO: 27694 - DNA, 23 bp, synthetic construct
  misc_feature 1..23: note = Probe
  source 1..23: mol_type = other DNA
agattaagagaaccaacacctct

SEQ ID NO: 27695 - DNA, 33 bp, synthetic construct; identical to SEQ ID NO: 3177
  misc_feature 1..33: note = Probe
  source 1..33: mol_type = other DNA

SEQ ID NO: 27696 - DNA, 16 bp, synthetic construct
  misc_feature 1..16: note = Probe
  source 1..16: mol_type = other DNA
agattgtgaatctgac

SEQ ID NO: 27697 - DNA, 17 bp, synthetic construct
  misc_feature 1..17: note = Probe
  source 1..17: mol_type = other DNA
agattgtgaatctgaca

SEQ ID NO: 27698 - DNA, 19 bp, synthetic construct
  misc_feature 1..19: note = Probe
  source 1..19: mol_type = other DNA
agattgtgaatctgacaac

SEQ ID NO: 27699 - DNA, 20 bp, synthetic construct
  misc_feature 1..20: note = Probe
  source 1..20: mol_type = other DNA
agattgtgaatctgacaaca

SEQ ID NO: 27700 - DNA, 22 bp, synthetic construct
  misc_feature 1..22: note = Probe
  source 1..22: mol_type = other DNA
agattgtgaatctgacaacaga

SEQ ID NO: 27701 - DNA, 24 bp, synthetic construct
  misc_feature 1..24: note = Probe
  source 1..24: mol_type = other DNA
agattgtgaatctgacaacagagg

SEQ ID NO: 27702 - DNA, 25 bp, synthetic construct
  misc_feature 1..25: note = Probe
  source 1..25: mol_type = other DNA
agattgtgaatctgacaacagaggc

SEQ ID NO: 27703 - DNA, 26 bp, synthetic construct
  misc_feature 1..26: note = Probe
  source 1..26: mol_type = other DNA
agattgtgaatctgacaacagaggct

SEQ ID NO: 27704 - DNA, 27 bp, synthetic construct
  misc_feature 1..27: note = Probe
  source 1..27: mol_type = other DNA
agattgtgaatctgacaacagaggctt

SEQ ID NO: 27705 - DNA, 28 bp, synthetic construct
  misc_feature 1..28: note = Probe
  source 1..28: mol_type = other DNA
agattgtgaatctgacaacagaggctta

SEQ ID NO: 27706 - DNA, 29 bp, synthetic construct
  misc_feature 1..29: note = Probe
  source 1..29: mol_type = other DNA
agattgtgaatctgacaacagaggcttac

SEQ ID NO: 27707 - DNA, 30 bp, synthetic construct
  misc_feature 1..30: note = Probe
  source 1..30: mol_type = other DNA
agattgtgaatctgacaacagaggcttacg

SEQ ID NO: 27708 - DNA, 31 bp, synthetic construct
  misc_feature 1..31: note = Probe
  source 1..31: mol_type = other DNA
agattgtgaatctgacaacagaggcttacga

SEQ ID NO: 27709 - DNA, 32 bp, synthetic construct
  misc_feature 1..32: note = Probe
  source 1..32: mol_type = other DNA
agattgtgaatctgacaacagaggcttacgac

SEQ ID NO: 27710 - DNA, 34 bp, synthetic construct
  misc_feature 1..34: note = Probe
  source 1..34: mol_type = other DNA
agattgtgaatctgacaacagaggcttacgaccc

SEQ ID NO: 27711 - DNA, 35 bp, synthetic construct; identical to SEQ ID NO: 3196
  misc_feature 1..35: note = Probe
  source 1..35: mol_type = other DNA

SEQ ID NO: 27712 - DNA, 37 bp, synthetic construct; identical to SEQ ID NO: 266
  misc_feature 1..37: note = Probe
  source 1..37: mol_type = other DNA

SEQ ID NO: 27713 - DNA, 44 bp, synthetic construct; identical to SEQ ID NO: 3202
  misc_feature 1..44: note = Probe
  source 1..44: mol_type = other DNA

SEQ ID NO: 27714 - DNA, 45 bp, synthetic construct
  misc_feature 1..45: note = Probe
  source 1..45: mol_type = other DNA
agattgtgaatctgacaacagaggcttacgaccccttatttaccg

SEQ ID NO: 27715 - DNA, 46 bp, synthetic construct; identical to SEQ ID NO: 3203
  misc_feature 1..46: note = Probe
  source 1..46: mol_type = other DNA

SEQ ID NO: 27716 - DNA, 24 bp, synthetic construct
  misc_feature 1..24: note = Probe
  source 1..24: mol_type = other DNA
agatttcaacttaacttgaccgct

SEQ ID NO: 27717 - DNA, 25 bp, synthetic construct
  misc_feature 1..25: note = Probe
  source 1..25: mol_type = other DNA
agatttcaacttaacttgaccgctc

SEQ ID NO: 27718 - DNA, 26 bp, synthetic construct
  misc_feature 1..26: note = Probe
  source 1..26: mol_type = other DNA
agatttcaacttaacttgaccgctct

SEQ ID NO: 27719 - DNA, 27 bp, synthetic construct
  misc_feature 1..27: note = Probe
  source 1..27: mol_type = other DNA
agatttcaacttaacttgaccgctctg

SEQ ID NO: 27720 - DNA, 28 bp, synthetic construct
  misc_feature 1..28: note = Probe
  source 1..28: mol_type = other DNA
agatttcaacttaacttgaccgctctga

SEQ ID NO: 27721 - DNA, 29 bp, synthetic construct
  misc_feature 1..29: note = Probe
  source 1..29: mol_type = other DNA
agatttcaacttaacttgaccgctctgag

SEQ ID NO: 27722 - DNA, 30 bp, synthetic construct; identical to SEQ ID NO: 3214
  misc_feature 1..30: note = Probe
  source 1..30: mol_type = other DNA

SEQ ID NO: 27723 - DNA, 31 bp, synthetic construct; identical to SEQ ID NO: 3215
  misc_feature 1..31: note = Probe
  source 1..31: mol_type = other DNA

SEQ ID NO: 27724 - DNA, 36 bp, synthetic construct
  misc_feature 1..36: note = Probe
  source 1..36: mol_type = other DNA
agatttcaacttaacttgaccgctctgagctaaacc

SEQ ID NO: 27725 - DNA, 30 bp, synthetic construct
  misc_feature 1..30: note = Probe
  source 1..30: mol_type = other DNA
agcaatacactgaaaatgtttagacgggct

SEQ ID NO: 27726 - DNA, 32 bp, synthetic construct; identical to SEQ ID NO: 3223
  misc_feature 1..32: note = Probe
  source 1..32: mol_type = other DNA

SEQ ID NO: 27727 - DNA, 33 bp, synthetic construct; identical to SEQ ID NO: 3224
  misc_feature 1..33: note = Probe
  source 1..33: mol_type = other DNA

SEQ ID NO: 27728 - DNA, 36 bp, synthetic construct
  misc_feature 1..36: note = Probe
  source 1..36: mol_type = other DNA
agcaatacactgaaaatgtttagacgggctcacatc

SEQ ID NO: 27729 - DNA, 36 bp, synthetic construct; identical to SEQ ID NO: 3244
  misc_feature 1..36: note = Probe
  source 1..36: mol_type = other DNA

SEQ ID NO: 27730 - DNA, 50 bp, synthetic construct; identical to SEQ ID NO: 3251
  misc_feature 1..50: note = Probe
  source 1..50: mol_type = other DNA

SEQ ID NO: 27731 - DNA, 17 bp, synthetic construct
  misc_feature 1..17: note = Probe
  source 1..17: mol_type = other DNA
agcactctggactctga

SEQ ID NO: 27732 - DNA, 18 bp, synthetic construct
  misc_feature 1..18: note = Probe
  source 1..18: mol_type = other DNA
agcactctggactctgaa

SEQ ID NO: 27733 - DNA, 19 bp, synthetic construct
  misc_feature 1..19: note = Probe
  source 1..19: mol_type = other DNA
agcactctggactctgaat

SEQ ID NO: 27734 - DNA, 20 bp, synthetic construct
  misc_feature 1..20: note = Probe
  source 1..20: mol_type = other DNA
agcactctggactctgaatc

SEQ ID NO: 27735 - DNA, 21 bp, synthetic construct
  misc_feature 1..21: note = Probe
  source 1..21: mol_type = other DNA
agcactctggactctgaatcc

SEQ ID NO: 27736 - DNA, 22 bp, synthetic construct
  misc_feature 1..22: note = Probe
  source 1..22: mol_type = other DNA
agcactctggactctgaatcca

SEQ ID NO: 27737 - DNA, 25 bp, synthetic construct
  misc_feature 1..25: note = Probe
  source 1..25: mol_type = other DNA
agcactctggactctgaatccagcg

SEQ ID NO: 27738 - DNA, 32 bp, synthetic construct; identical to SEQ ID NO: 3254
  misc_feature 1..32: note = Probe
  source 1..32: mol_type = other DNA

SEQ ID NO: 27739 - DNA, 33 bp, synthetic construct
  misc_feature 1..33: note = Probe
  source 1..33: mol_type = other DNA
agcactctggactctgaatccagcgatccgagt

SEQ ID NO: 27740 - DNA, 34 bp, synthetic construct
  misc_feature 1..34: note = Probe
  source 1..34: mol_type = other DNA
agcactctggactctgaatccagcgatccgagtt

SEQ ID NO: 27741 - DNA, 36 bp, synthetic construct
  misc_feature 1..36: note = Probe
  source 1..36: mol_type = other DNA
agcactctggactctgaatccagcgatccgagttca

SEQ ID NO: 27742 - DNA, 36 bp, synthetic construct
  misc_feature 1..36: note = Probe
  source 1..36: mol_type = other DNA
agcactctggactctgaatccagcgatccgagttcg

SEQ ID NO: 27743 - DNA, 20 bp, synthetic construct
  misc_feature 1..20: note = Probe
  source 1..20: mol_type = other DNA
agcactctggactttgaatc

SEQ ID NO: 27744 - DNA, 21 bp, synthetic construct
  misc_feature 1..21: note = Probe
  source 1..21: mol_type = other DNA
agcactctggactttgaatcc

SEQ ID NO: 27745 - DNA, 33 bp, synthetic construct; identical to SEQ ID NO: 12675
  misc_feature 1..33: note = Probe
  source 1..33: mol_type = other DNA

SEQ ID NO: 27746 - DNA, 34 bp, synthetic construct
  misc_feature 1..34: note = Probe
  source 1..34: mol_type = other DNA
agcactctggactttgaatccagcgatccgagtt

SEQ ID NO: 27747 - DNA, 36 bp, synthetic construct
  misc_feature 1..36: note = Probe
  source 1..36: mol_type = other DNA
agcacttcccatatggtctagcggttaggattcctg

SEQ ID NO: 27748 - DNA, 39 bp, synthetic construct
  misc_feature 1..39: note = Probe
  source 1..39: mol_type = other DNA
agcacttcccatatggtctagcggttaggattcctggtt

SEQ ID NO: 27749 - DNA, 40 bp, synthetic construct; identical to SEQ ID NO: 16359
  misc_feature 1..40: note = Probe
  source 1..40: mol_type = other DNA

SEQ ID NO: 27750 - DNA, 41 bp, synthetic construct; identical to SEQ ID NO: 16360
  misc_feature 1..41: note = Probe
  source 1..41: mol_type = other DNA

SEQ ID NO: 27751 - DNA, 36 bp, synthetic construct
  misc_feature 1..36: note = Probe
  source 1..36: mol_type = other DNA
agcagagctccagtggcgcaatcggttagcgcgcgg

SEQ ID NO: 27752 - DNA, 19 bp, synthetic construct
  misc_feature 1..19: note = Probe
  source 1..19: mol_type = other DNA
agcagagtggcgcagcgga

SEQ ID NO: 27753 - DNA, 21 bp, synthetic construct
  misc_feature 1..21: note = Probe
  source 1..21: mol_type = other DNA
agcagagtggcgcagcggaag

SEQ ID NO: 27754 - DNA, 23 bp, synthetic construct
  misc_feature 1..23: note = Probe
  source 1..23: mol_type = other DNA
agcagagtggcgcagcggaagcg

SEQ ID NO: 27755 - DNA, 30 bp, synthetic construct; identical to SEQ ID NO: 8539
  misc_feature 1..30: note = Probe
  source 1..30: mol_type = other DNA

SEQ ID NO: 27756 - DNA, 34 bp, synthetic construct; identical to SEQ ID NO: 278
  misc_feature 1..34: note = Probe
  source 1..34: mol_type = other DNA

SEQ ID NO: 27757 - DNA, 35 bp, synthetic construct; identical to SEQ ID NO: 279
  misc_feature 1..35: note = Probe
  source 1..35: mol_type = other DNA

SEQ ID NO: 27758 - DNA, 50 bp, synthetic construct; identical to SEQ ID NO: 3258
  misc_feature 1..50: note = Probe
  source 1..50: mol_type = other DNA

SEQ ID NO: 27759 - DNA, 23 bp, synthetic construct
  misc_feature 1..23: note = Probe
  source 1..23: mol_type = other DNA
agcagcttcaaacctgccggggc

SEQ ID NO: 27760 - DNA, 24 bp, synthetic construct
  misc_feature 1..24: note = Probe
  source 1..24: mol_type = other DNA
agcagcttcaaacctgccggggct

SEQ ID NO: 27761 - DNA, 25 bp, synthetic construct
  misc_feature 1..25: note = Probe
  source 1..25: mol_type = other DNA
agcagcttcaaacctgccggggctt

SEQ ID NO: 27762 - DNA, 27 bp, synthetic construct
  misc_feature 1..27: note = Probe
  source 1..27: mol_type = other DNA
agcagcttcaaacctgccggggcttct

SEQ ID NO: 27763 - DNA, 15 bp, synthetic construct
  misc_feature 1..15: note = Probe
  source 1..15: mol_type = other DNA
agcaggcttataggt

SEQ ID NO: 27764 - DNA, 36 bp, synthetic construct
  misc_feature 1..36: note = Probe
  source 1..36: mol_type = other DNA
agcagggttgtttccgtagtgtagtggttatcacgt

SEQ ID NO: 27765 - DNA, 36 bp, synthetic construct
  misc_feature 1..36: note = Probe
  source 1..36: mol_type = other DNA
agcaggtcccatggtgtaatggttagcactctggac

SEQ ID NO: 27766 - DNA, 50 bp, synthetic construct
  misc_feature 1..50: note = Probe
  source 1..50: mol_type = other DNA
agcaggtcccatggtgtaatggttagcactctggactttgaatccagcga

SEQ ID NO: 27767 - DNA, 15 bp, synthetic construct
  misc_feature 1..15: note = Probe
  source 1..15: mol_type = other DNA
agcagtcaggatggc

SEQ ID NO: 27768 - DNA, 25 bp, synthetic construct
  misc_feature 1..25: note = Probe
  source 1..25: mol_type = other DNA
agcagtcaggatggccgagcggtct

SEQ ID NO: 27769 - DNA, 28 bp, synthetic construct
  misc_feature 1..28: note = Probe
  source 1..28: mol_type = other DNA
agcagtcaggatggccgagcggtctaag

SEQ ID NO: 27770 - DNA, 30 bp, synthetic construct
  misc_feature 1..30: note = Probe
  source 1..30: mol_type = other DNA
agcagtcaggatggccgagcggtctaaggc

SEQ ID NO: 27771 - DNA, 32 bp, synthetic construct
  misc_feature 1..32: note = Probe
  source 1..32: mol_type = other DNA
agcagtcaggatggccgagcggtctaaggcgc

SEQ ID NO: 27772 - DNA, 36 bp, synthetic construct
  misc_feature 1..36: note = Probe
  source 1..36: mol_type = other DNA
agcagtcaggatggccgagcggtctaaggcgctgcg

SEQ ID NO: 27773 - DNA, 36 bp, synthetic construct
  misc_feature 1..36: note = Probe
  source 1..36: mol_type = other DNA
agcagttcccatatggtctagcggttaggattcctg

SEQ ID NO: 27774 - DNA, 39 bp, synthetic construct; identical to SEQ ID NO: 16375
  misc_feature 1..39: note = Probe
  source 1..39: mol_type = other DNA

SEQ ID NO: 27775 - DNA, 19 bp, synthetic construct
  misc_feature 1..19: note = Probe
  source 1..19: mol_type = other DNA
agcatgagactcttaatct

SEQ ID NO: 27776 - DNA, 17 bp, synthetic construct
  misc_feature 1..17: note = Probe
  source 1..17: mol_type = other DNA
agcatgggactcttaat

SEQ ID NO: 27777 - DNA, 18 bp, synthetic construct
  misc_feature 1..18: note = Probe
  source 1..18: mol_type = other DNA
agcatgggactcttaatc

SEQ ID NO: 27778 - DNA, 19 bp, synthetic construct
  misc_feature 1..19: note = Probe
  source 1..19: mol_type = other DNA
agcatgggactcttaatcc

SEQ ID NO: 27779 - DNA, 35 bp, synthetic construct; identical to SEQ ID NO: 280
  misc_feature 1..35: note = Probe
  source 1..35: mol_type = other DNA

SEQ ID NO: 27780 - DNA, 36 bp, synthetic construct; identical to SEQ ID NO: 281
  misc_feature 1..36: note = Probe
  source 1..36: mol_type = other DNA

SEQ ID NO: 27781 - DNA, 42 bp, synthetic construct; identical to SEQ ID NO: 284
  misc_feature 1..42: note = Probe
  source 1..42: mol_type = other DNA

SEQ ID NO: 27782 - DNA, 15 bp, synthetic construct
  misc_feature 1..15: note = Probe
  source 1..15: mol_type = other DNA
agcattggactgtaa

SEQ ID NO: 27783 - DNA, 16 bp, synthetic construct
  misc_feature 1..16: note = Probe
  source 1..16: mol_type = other DNA
agcattggactgtaaa

SEQ ID NO: 27784 - DNA, 18 bp, synthetic construct
  misc_feature 1..18: note = Probe
  source 1..18: mol_type = other DNA
agcattggactgtaaatc

SEQ ID NO: 27785 - DNA, 33 bp, synthetic construct; identical to SEQ ID NO: 3282
  misc_feature 1..33: note = Probe
  source 1..33: mol_type = other DNA

SEQ ID NO: 27786 - DNA, 36 bp, synthetic construct; identical to SEQ ID NO: 16406
  misc_feature 1..36: note = Probe
  source 1..36: mol_type = other DNA

SEQ ID NO: 27787 - DNA, 36 bp, synthetic construct; identical to SEQ ID NO: 16409
  misc_feature 1..36: note = Probe
  source 1..36: mol_type = other DNA

SEQ ID NO: 27788 - DNA, 36 bp, synthetic construct; identical to SEQ ID NO: 288
  misc_feature 1..36: note = Probe
  source 1..36: mol_type = other DNA

SEQ ID NO: 27789 - DNA, 38 bp, synthetic construct; identical to SEQ ID NO: 16418
  misc_feature 1..38: note = Probe
  source 1..38: mol_type = other DNA

SEQ ID NO: 27790 - DNA, 39 bp, synthetic construct; identical to SEQ ID NO: 3287
  misc_feature 1..39: note = Probe
  source 1..39: mol_type = other DNA

SEQ ID NO: 27791 - DNA, 32 bp, synthetic construct
  misc_feature 1..32: note = Probe
  source 1..32: mol_type = other DNA
agccagtagtcgtggccgagtggttaaggcga

SEQ ID NO: 27792 - DNA, 17 bp, synthetic construct
  misc_feature 1..17: note = Probe
  source 1..17: mol_type = other DNA
agccccaaacccactcc

SEQ ID NO: 27793 - DNA, 19 bp, synthetic construct
  misc_feature 1..19: note = Probe
  source 1..19: mol_type = other DNA
agccccaaacccactccac

SEQ ID NO: 27794 - DNA, 20 bp, synthetic construct
  misc_feature 1..20: note = Probe
  source 1..20: mol_type = other DNA
agccccaaacccactccacc

SEQ ID NO: 27795 - DNA, 21 bp, synthetic construct
  misc_feature 1..21: note = Probe
  source 1..21: mol_type = other DNA
agccccaaacccactccacct

SEQ ID NO: 27796 - DNA, 36 bp, synthetic construct; identical to SEQ ID NO: 16429
  misc_feature 1..36: note = Probe
  source 1..36: mol_type = other DNA

SEQ ID NO: 27797 - DNA, 34 bp, synthetic construct
  misc_feature 1..34: note = Probe
  source 1..34: mol_type = other DNA
agcccggctagctcagtcggtagagcatgagact

SEQ ID NO: 27798 - DNA, 36 bp, synthetic construct
  misc_feature 1..36: note = Probe
  source 1..36: mol_type = other DNA
agcccggctagctcagtcggtagagcatgagactct

SEQ ID NO: 27799 - DNA, 34 bp, synthetic construct; identical to SEQ ID NO: 289
  misc_feature 1..34: note = Probe
  source 1..34: mol_type = other DNA

SEQ ID NO: 27800 - DNA, 36 bp, synthetic construct
  misc_feature 1..36: note = Probe
  source 1..36: mol_type = other DNA
agcccggctagctcagtcggtagagcatgggactct

SEQ ID NO: 27801 - DNA, 29 bp, synthetic construct
  misc_feature 1..29: note = Probe
  source 1..29: mol_type = other DNA
agcccggtaatcgcataaaacttaaaact

SEQ ID NO: 27802 - DNA, 36 bp, synthetic construct
  misc_feature 1..36: note = Probe
  source 1..36: mol_type = other DNA
agccctccctggtggtctagtggctaggattcggcg

SEQ ID NO: 27803 - DNA, 26 bp, synthetic construct
  misc_feature 1..26: note = Probe
  source 1..26: mol_type = other DNA
agccgcccggctagctcagtcggtag

SEQ ID NO: 27804 - DNA, 27 bp, synthetic construct
  misc_feature 1..27: note = Probe
  source 1..27: mol_type = other DNA
agccgcccggctagctcagtcggtaga

SEQ ID NO: 27805 - DNA, 28 bp, synthetic construct
  misc_feature 1..28: note = Probe
  source 1..28: mol_type = other DNA
agccgcccggctagctcagtcggtagag

SEQ ID NO: 27806 - DNA, 36 bp, synthetic construct
  misc_feature 1..36: note = Probe
  source 1..36: mol_type = other DNA
agccgcgcattggtggttcagtggtagaattctcgc

SEQ ID NO: 27807 - DNA, 37 bp, synthetic construct
  misc_feature 1..37: note = Probe
  source 1..37: mol_type = other DNA
agccgcgcattggtggttcagtggtagaattctcgcc

SEQ ID NO: 27808 - DNA, 38 bp, synthetic construct
  misc_feature 1..38: note = Probe
  source 1..38: mol_type = other DNA
agccgcgcattggtggttcagtggtagaattctcgcct

SEQ ID NO: 27809 - DNA, 36 bp, synthetic construct
  misc_feature 1..36: note = Probe
  source 1..36: mol_type = other DNA
agccggagaccgcgtggcctaatggataaggcgtct

SEQ ID NO: 27810 - DNA, 20 bp, synthetic construct
  misc_feature 1..20: note = Probe
  source 1..20: mol_type = other DNA
agccggctcgttggtctagg

SEQ ID NO: 27811 - DNA, 29 bp, synthetic construct
  misc_feature 1..29: note = Probe
  source 1..29: mol_type = other DNA
agccggctcgttggtctaggggtatgatt

SEQ ID NO: 27812 - DNA, 32 bp, synthetic construct
  misc_feature 1..32: note = Probe
  source 1..32: mol_type = other DNA
agccggctcgttggtctaggggtatgattctc

SEQ ID NO: 27813 - DNA, 33 bp, synthetic construct; identical to SEQ ID NO: 16454
  misc_feature 1..33: note = Probe
  source 1..33: mol_type = other DNA

SEQ ID NO: 27814 - DNA, 34 bp, synthetic construct; identical to SEQ ID NO: 16455
  misc_feature 1..34: note = Probe
  source 1..34: mol_type = other DNA

SEQ ID NO: 27815 - DNA, 35 bp, synthetic construct
  misc_feature 1..35: note = Probe
  source 1..35: mol_type = other DNA
agccggctcgttggtctaggggtatgattctcgct

SEQ ID NO: 27816 - DNA, 36 bp, synthetic construct
  misc_feature 1..36: note = Probe
  source 1..36: mol_type = other DNA
agccggctcgttggtctaggggtatgattctcgctt

SEQ ID NO: 27817 - DNA, 37 bp, synthetic construct; identical to SEQ ID NO: 16456
  misc_feature 1..37: note = Probe
  source 1..37: mol_type = other DNA

SEQ ID NO: 27818 - DNA, 23 bp, synthetic construct
  misc_feature 1..23: note = Probe
  source 1..23: mol_type = other DNA
agccggctctgtggcgcaatgga

SEQ ID NO: 27819 - DNA, 30 bp, synthetic construct
  misc_feature 1..30: note = Probe
  source 1..30: mol_type = other DNA
agccggctctgtggcgcaatggatagcgca

SEQ ID NO: 27820 - DNA, 31 bp, synthetic construct
  misc_feature 1..31: note = Probe
  source 1..31: mol_type = other DNA
agccggctctgtggcgcaatggatagcgcat

SEQ ID NO: 27821 - DNA, 36 bp, synthetic construct
  misc_feature 1..36: note = Probe
  source 1..36: mol_type = other DNA
agccggctctgtggcgcaatggatagcgcattggac

SEQ ID NO: 27822 - DNA, 18 bp, synthetic construct
  misc_feature 1..18: note = Probe
  source 1..18: mol_type = other DNA
agccgtaaggcggctgtt

SEQ ID NO: 27823 - DNA, 36 bp, synthetic construct
  misc_feature 1..36: note = Probe
  source 1..36: mol_type = other DNA
agccttcaaagccctcagtaagttgcaatacttaat

SEQ ID NO: 27824 - DNA, 15 bp, synthetic construct
  misc_feature 1..15: note = Probe
  source 1..15: mol_type = other DNA
agcctttctattagc

SEQ ID NO: 27825 - DNA, 19 bp, synthetic construct
  misc_feature 1..19: note = Probe
  source 1..19: mol_type = other DNA
agcgcaagtaggtctacaa

SEQ ID NO: 27826 - DNA, 36 bp, synthetic construct
  misc_feature 1..36: note = Probe
  source 1..36: mol_type = other DNA
agcgcccggatagctcagtcggtagagcatcagact

SEQ ID NO: 27827 - DNA, 25 bp, synthetic construct
  misc_feature 1..25: note = Probe
  source 1..25: mol_type = other DNA
agcgcgttcggctgttaaccgaaag

SEQ ID NO: 27828 - DNA, 36 bp, synthetic construct
  misc_feature 1..36: note = Probe
  source 1..36: mol_type = other DNA
agcgcgttcggctgttaaccgaaaggttggtggttc

SEQ ID NO: 27829 - DNA, 19 bp, synthetic construct
  misc_feature 1..19: note = Probe
  source 1..19: mol_type = other DNA
agcggaagcgtgctgggcc

SEQ ID NO: 27830 - DNA, 20 bp, synthetic construct
  misc_feature 1..20: note = Probe
  source 1..20: mol_type = other DNA
agcggaagcgtgctgggccc

SEQ ID NO: 27831 - DNA, 18 bp, synthetic construct
  misc_feature 1..18: note = Probe
  source 1..18: mol_type = other DNA
agcggagccttcgatagc

SEQ ID NO: 27832 - DNA, 20 bp, synthetic construct
  misc_feature 1..20: note = Probe
  source 1..20: mol_type = other DNA
agcggagccttcgatagctc

SEQ ID NO: 27833 - DNA, 36 bp, synthetic construct; identical to SEQ ID NO: 16492
  misc_feature 1..36: note = Probe
  source 1..36: mol_type = other DNA

SEQ ID NO: 27834 - DNA, 39 bp, synthetic construct; identical to SEQ ID NO: 16494
  misc_feature 1..39: note = Probe
  source 1..39: mol_type = other DNA

SEQ ID NO: 27835 - DNA, 40 bp, synthetic construct
  misc_feature 1..40: note = Probe
  source 1..40: mol_type = other DNA
agcggagccttcgatagctcagttggtagagcggaggact

SEQ ID NO: 27836 - DNA, 43 bp, synthetic construct; identical to SEQ ID NO: 16496
  misc_feature 1..43: note = Probe
  source 1..43: mol_type = other DNA

SEQ ID NO: 27837 - DNA, 15 bp, synthetic construct
  misc_feature 1..15: note = Probe
  source 1..15: mol_type = other DNA
agcggcctctggtgg

SEQ ID NO: 27838 - DNA, 33 bp, synthetic construct
  misc_feature 1..33: note = Probe
  source 1..33: mol_type = other DNA
agcggcctctggtggcgtgccgtgatcgtatag

SEQ ID NO: 27839 - DNA, 17 bp, synthetic construct
  misc_feature 1..17: note = Probe
  source 1..17: mol_type = other DNA
agcgggtgctcttattt

SEQ ID NO: 27840 - DNA, 18 bp, synthetic construct
  misc_feature 1..18: note = Probe
  source 1..18: mol_type = other DNA
agcgggtgctcttatttt

SEQ ID NO: 27841 - DNA, 31 bp, synthetic construct; identical to SEQ ID NO: 3315
  misc_feature 1..31: note = Probe
  source 1..31: mol_type = other DNA

SEQ ID NO: 27842 - DNA, 20 bp, synthetic construct
  misc_feature 1..20: note = Probe
  source 1..20: mol_type = other DNA
agctaaataagctatcgggc

SEQ ID NO: 27843 - DNA, 21 bp, synthetic construct
  misc_feature 1..21: note = Probe
  source 1..21: mol_type = other DNA
agctaaataagctatcgggcc

SEQ ID NO: 27844 - DNA, 22 bp, synthetic construct
  misc_feature 1..22: note = Probe
  source 1..22: mol_type = other DNA
agctaaataagctatcgggccc

SEQ ID NO: 27845 - DNA, 23 bp, synthetic construct
  misc_feature 1..23: note = Probe
  source 1..23: mol_type = other DNA
agctaaataagctatcgggccca

SEQ ID NO: 27846 - DNA, 24 bp, synthetic construct
  misc_feature 1..24: note = Probe
  source 1..24: mol_type = other DNA
agctaaataagctatcgggcccat

SEQ ID NO: 27847 - DNA, 27 bp, synthetic construct
  misc_feature 1..27: note = Probe
  source 1..27: mol_type = other DNA
agctaaataagctatcgggcccatacc

SEQ ID NO: 27848 - DNA, 19 bp, synthetic construct
  misc_feature 1..19: note = Probe
  source 1..19: mol_type = other DNA
agctaaggactgcaaaacc

SEQ ID NO: 27849 - DNA, 20 bp, synthetic construct
  misc_feature 1..20: note = Probe
  source 1..20: mol_type = other DNA
agctaaggactgcaaaaccc

SEQ ID NO: 27850 - DNA, 21 bp, synthetic construct
  misc_feature 1..21: note = Probe
  source 1..21: mol_type = other DNA
agctaaggactgcaaaacccc

SEQ ID NO: 27851 - DNA, 24 bp, synthetic construct
  misc_feature 1..24: note = Probe
  source 1..24: mol_type = other DNA
agctaaggactgcaaaaccccact

SEQ ID NO: 27852 - DNA, 26 bp, synthetic construct
  misc_feature 1..26: note = Probe
  source 1..26: mol_type = other DNA
agctaaggactgcaaaaccccactct

SEQ ID NO: 27853 - DNA, 36 bp, synthetic construct
  misc_feature 1..36: note = Probe
  source 1..36: mol_type = other DNA
agctacagtggctcgttggtctaggggtatgattct

SEQ ID NO: 27854 - DNA, 16 bp, synthetic construct
  misc_feature 1..16: note = Probe
  source 1..16: mol_type = other DNA
agctatagggtggaga

SEQ ID NO: 27855 - DNA, 15 bp, synthetic construct
  misc_feature 1..15: note = Probe
  source 1..15: mol_type = other DNA
agctatccattggtc

SEQ ID NO: 27856 - DNA, 16 bp, synthetic construct
  misc_feature 1..16: note = Probe
  source 1..16: mol_type = other DNA
agctatccattggtct

SEQ ID NO: 27857 - DNA, 23 bp, synthetic construct
  misc_feature 1..23: note = Probe
  source 1..23: mol_type = other DNA
agctatccattggtcttaggccc

SEQ ID NO: 27858 - DNA, 24 bp, synthetic construct
  misc_feature 1..24: note = Probe
  source 1..24: mol_type = other DNA
agctatccattggtcttaggcccc

SEQ ID NO: 27859 - DNA, 36 bp, synthetic construct
  misc_feature 1..36: note = Probe
  source 1..36: mol_type = other DNA
agctatccattggtcttaggccccaaaaattttggt

SEQ ID NO: 27860 - DNA, 15 bp, synthetic construct
  misc_feature 1..15: note = Probe
  source 1..15: mol_type = other DNA
agctatcgggcccat

SEQ ID NO: 27861 - DNA, 16 bp, synthetic construct
  misc_feature 1..16: note = Probe
  source 1..16: mol_type = other DNA
agctatcgggcccata

SEQ ID NO: 27862 - DNA, 18 bp, synthetic construct
  misc_feature 1..18: note = Probe
  source 1..18: mol_type = other DNA
agctatcgggcccatacc

SEQ ID NO: 27863 - DNA, 19 bp, synthetic construct
  misc_feature 1..19: note = Probe
  source 1..19: mol_type = other DNA
agctatcgggcccataccc

SEQ ID NO: 27864 - DNA, 20 bp, synthetic construct
  misc_feature 1..20: note = Probe
  source 1..20: mol_type = other DNA
agctatcgggcccatacccc

SEQ ID NO: 27865 - DNA, 33 bp, synthetic construct; identical to SEQ ID NO: 3340
  misc_feature 1..33: note = Probe
  source 1..33: mol_type = other DNA

SEQ ID NO: 27866 - DNA, 36 bp, synthetic construct
  misc_feature 1..36: note = Probe
  source 1..36: mol_type = other DNA
agctatcgggcccataccccgaaaatgttggttata

SEQ ID NO: 27867 - DNA, 15 bp, synthetic construct
  misc_feature 1..15: note = Probe
  source 1..15: mol_type = other DNA
agctcacaagaactg

SEQ ID NO: 27868 - DNA, 25 bp, synthetic construct
  misc_feature 1..25: note = Probe
  source 1..25: mol_type = other DNA
agctcacaagaactgctaactcatg

SEQ ID NO: 27869 - DNA, 27 bp, synthetic construct
  misc_feature 1..27: note = Probe
  source 1..27: mol_type = other DNA
agctcacaagaactgctaactcatgcc

SEQ ID NO: 27870 - DNA, 40 bp, synthetic construct
  misc_feature 1..40: note = Probe
  source 1..40: mol_type = other DNA
agctcacaagaactgctaactcatgcccccatgtctaaca

SEQ ID NO: 27871 - DNA, 36 bp, synthetic construct
  misc_feature 1..36: note = Probe
  source 1..36: mol_type = other DNA
agctcagctggtagagcggaggactgtagcctgtag

SEQ ID NO: 27872 - DNA, 25 bp, synthetic construct
  misc_feature 1..25: note = Probe
  source 1..25: mol_type = other DNA
agctcaggggttagagcactggtct

SEQ ID NO: 27873 - DNA, 15 bp, synthetic construct
  misc_feature 1..15: note = Probe
  source 1..15: mol_type = other DNA
agctcagtcggtaga

SEQ ID NO: 27874 - DNA, 16 bp, synthetic construct
  misc_feature 1..16: note = Probe
  source 1..16: mol_type = other DNA
agctcagtcggtagag

SEQ ID NO: 27875 - DNA, 17 bp, synthetic construct
  misc_feature 1..17: note = Probe
  source 1..17: mol_type = other DNA
agctcagtcggtagagc

SEQ ID NO: 27876 - DNA, 25 bp, synthetic construct
  misc_feature 1..25: note = Probe
  source 1..25: mol_type = other DNA
agctcagtcggtagagcatcagact

SEQ ID NO: 27877 - DNA, 24 bp, synthetic construct
  misc_feature 1..24: note = Probe
  source 1..24: mol_type = other DNA
agctcagtcggtagagcatgagac

SEQ ID NO: 27878 - DNA, 25 bp, synthetic construct
  misc_feature 1..25: note = Probe
  source 1..25: mol_type = other DNA
agctcagtcggtagagcatgagact

SEQ ID NO: 27879 - DNA, 27 bp, synthetic construct
  misc_feature 1..27: note = Probe
  source 1..27: mol_type = other DNA
agctcagtcggtagagcatgagactct

SEQ ID NO: 27880 - DNA, 24 bp, synthetic construct
  misc_feature 1..24: note = Probe
  source 1..24: mol_type = other DNA
agctcagtcggtagagcatgggac

SEQ ID NO: 27881 - DNA, 27 bp, synthetic construct
  misc_feature 1..27: note = Probe
  source 1..27: mol_type = other DNA
agctcagtcggtagagcatgggactct

SEQ ID NO: 27882 - DNA, 19 bp, synthetic construct
  misc_feature 1..19: note = Probe
  source 1..19: mol_type = other DNA
agctccgaggtgattttca

SEQ ID NO: 27883 - DNA, 31 bp, synthetic construct; identical to SEQ ID NO: 315
  misc_feature 1..31: note = Probe
  source 1..31: mol_type = other DNA

SEQ ID NO: 27884 - DNA, 36 bp, synthetic construct; identical to SEQ ID NO: 16561
  misc_feature 1..36: note = Probe
  source 1..36: mol_type = other DNA

SEQ ID NO: 27885 - DNA, 25 bp, synthetic construct
  misc_feature 1..25: note = Probe
  source 1..25: mol_type = other DNA
agctggagcattggtggttcagtgg

SEQ ID NO: 27886 - DNA, 36 bp, synthetic construct; identical to SEQ ID NO: 16572
  misc_feature 1..36: note = Probe
  source 1..36: mol_type = other DNA

SEQ ID NO: 27887 - DNA, 38 bp, synthetic construct
  misc_feature 1..38: note = Probe
  source 1..38: mol_type = other DNA
agctggggattgtgggttcgagtcccatctgggtcgcg

SEQ ID NO: 27888 - DNA, 33 bp, synthetic construct
  misc_feature 1..33: note = Probe
  source 1..33: mol_type = other DNA
agctgggtagcgtggccgagcggtctaaggcgc

SEQ ID NO: 27889 - DNA, 19 bp, synthetic construct
  misc_feature 1..19: note = Probe
  source 1..19: mol_type = other DNA
agctgtagtcgtggccgag

SEQ ID NO: 27890 - DNA, 21 bp, synthetic construct
  misc_feature 1..21: note = Probe
  source 1..21: mol_type = other DNA
agctgtagtcgtggccgagtg

SEQ ID NO: 27891 - DNA, 36 bp, synthetic construct
  misc_feature 1..36: note = Probe
  source 1..36: mol_type = other DNA
agctgtagtcgtggccgagtggttaaggcgatggac

SEQ ID NO: 27892 - DNA, 36 bp, synthetic construct
  misc_feature 1..36: note = Probe
  source 1..36: mol_type = other DNA
agctgttaactaagtgtttgtgggtttaagtcccat

SEQ ID NO: 27893 - DNA, 36 bp, synthetic construct; identical to SEQ ID NO: 16596
  misc_feature 1..36: note = Probe
  source 1..36: mol_type = other DNA

SEQ ID NO: 27894 - DNA, 15 bp, synthetic construct
  misc_feature 1..15: note = Probe
  source 1..15: mol_type = other DNA
agctttggggggttc

SEQ ID NO: 27895 - DNA, 16 bp, synthetic construct
  misc_feature 1..16: note = Probe
  source 1..16: mol_type = other DNA
agctttggggggttcg

SEQ ID NO: 27896 - DNA, 19 bp, synthetic construct
  misc_feature 1..19: note = Probe
  source 1..19: mol_type = other DNA
agctttggggggttcgatt

SEQ ID NO: 27897 - DNA, 20 bp, synthetic construct
  misc_feature 1..20: note = Probe
  source 1..20: mol_type = other DNA
agctttggggggttcgattc

SEQ ID NO: 27898 - DNA, 21 bp, synthetic construct
  misc_feature 1..21: note = Probe
  source 1..21: mol_type = other DNA
agctttggggggttcgattcc

SEQ ID NO: 27899 - DNA, 22 bp, synthetic construct
  misc_feature 1..22: note = Probe
  source 1..22: mol_type = other DNA
agctttggggggttcgattcct

SEQ ID NO: 27900 - DNA, 32 bp, synthetic construct
  misc_feature 1..32: note = Probe
  source 1..32: mol_type = other DNA
agctttgggtgctaatggtggagttaaagact

SEQ ID NO: 27901 - DNA, 22 bp, synthetic construct
  misc_feature 1..22: note = Probe
  source 1..22: mol_type = other DNA
aggaaagagagctagcaccgga

SEQ ID NO: 27902 - DNA, 36 bp, synthetic construct
  misc_feature 1..36: note = Probe
  source 1..36: mol_type = other DNA
aggaagcccggctagctcagtcgatagagcatgaga

SEQ ID NO: 27903 - DNA, 36 bp, synthetic construct
  misc_feature 1..36: note = Probe
  source 1..36: mol_type = other DNA
aggaagggggtgtagctcagtggtagagcgcatgct

SEQ ID NO: 27904 - DNA, 36 bp, synthetic construct
  misc_feature 1..36: note = Probe
  source 1..36: mol_type = other DNA
aggaagtcaggatggccgagcggtctaaggcgctgc

SEQ ID NO: 27905 - DNA, 16 bp, synthetic construct
  misc_feature 1..16: note = Probe
  source 1..16: mol_type = other DNA
aggaagtcctgtgctc

SEQ ID NO: 27906 - DNA, 36 bp, synthetic construct
  misc_feature 1..36: note = Probe
  source 1..36: mol_type = other DNA
aggacaaatcagagaaaaagtctttaactccaccat

SEQ ID NO: 27907 - DNA, 36 bp, synthetic construct; identical to SEQ ID NO: 16617
  misc_feature 1..36: note = Probe
  source 1..36: mol_type = other DNA

SEQ ID NO: 27908 - DNA, 36 bp, synthetic construct
  misc_feature 1..36: note = Probe
  source 1..36: mol_type = other DNA
aggacgaggtggccgagtggttaaggcgatggactg

SEQ ID NO: 27909 - DNA, 15 bp, synthetic construct
  misc_feature 1..15: note = Probe
  source 1..15: mol_type = other DNA
aggactatgagaatc

SEQ ID NO: 27910 - DNA, 16 bp, synthetic construct
  misc_feature 1..16: note = Probe
  source 1..16: mol_type = other DNA
aggactatgagaatcg

SEQ ID NO: 27911 - DNA, 19 bp, synthetic construct
  misc_feature 1..19: note = Probe
  source 1..19: mol_type = other DNA
aggactatgagaatcgaac

SEQ ID NO: 27912 - DNA, 20 bp, synthetic construct
  misc_feature 1..20: note = Probe
  source 1..20: mol_type = other DNA
aggactatgagaatcgaacc

SEQ ID NO: 27913 - DNA, 21 bp, synthetic construct
  misc_feature 1..21: note = Probe
  source 1..21: mol_type = other DNA
aggactatgagaatcgaaccc

SEQ ID NO: 27914 - DNA, 24 bp, synthetic construct
  misc_feature 1..24: note = Probe
  source 1..24: mol_type = other DNA
aggactatgagaatcgaacccatc

SEQ ID NO: 27915 - DNA, 25 bp, synthetic construct
  misc_feature 1..25: note = Probe
  source 1..25: mol_type = other DNA
aggactatgagaatcgaacccatcc

SEQ ID NO: 27916 - DNA, 26 bp, synthetic construct
  misc_feature 1..26: note = Probe
  source 1..26: mol_type = other DNA
aggactatgagaatcgaacccatccc

SEQ ID NO: 27917 - DNA, 31 bp, synthetic construct
  misc_feature 1..31: note = Probe
  source 1..31: mol_type = other DNA
aggactatgagaatcgaacccatccctgaga

SEQ ID NO: 27918 - DNA, 15 bp, synthetic construct
  misc_feature 1..15: note = Probe
  source 1..15: mol_type = other DNA
aggactgcaaaaccc

SEQ ID NO: 27919 - DNA, 16 bp, synthetic construct
  misc_feature 1..16: note = Probe
  source 1..16: mol_type = other DNA
aggactgcaaaacccc

SEQ ID NO: 27920 - DNA, 21 bp, synthetic construct
  misc_feature 1..21: note = Probe
  source 1..21: mol_type = other DNA
aggactgcaaaaccccactct

SEQ ID NO: 27921 - DNA, 15 bp, synthetic construct
  misc_feature 1..15: note = Probe
  source 1..15: mol_type = other DNA
aggagatcctgggtt

SEQ ID NO: 27922 - DNA, 24 bp, synthetic construct
  misc_feature 1..24: note = Probe
  source 1..24: mol_type = other DNA
aggagatttcaacttaacttgacc

SEQ ID NO: 27923 - DNA, 25 bp, synthetic construct
  misc_feature 1..25: note = Probe
  source 1..25: mol_type = other DNA
aggagatttcaacttaacttgaccg

SEQ ID NO: 27924 - DNA, 27 bp, synthetic construct
  misc_feature 1..27: note = Probe
  source 1..27: mol_type = other DNA
aggagatttcaacttaacttgaccgct

SEQ ID NO: 27925 - DNA, 28 bp, synthetic construct
  misc_feature 1..28: note = Probe
  source 1..28: mol_type = other DNA
aggagatttcaacttaacttgaccgctc

SEQ ID NO: 27926 - DNA, 29 bp, synthetic construct
  misc_feature 1..29: note = Probe
  source 1..29: mol_type = other DNA
aggagatttcaacttaacttgaccgctct

SEQ ID NO: 27927 - DNA, 30 bp, synthetic construct; identical to SEQ ID NO: 3410
  misc_feature 1..30: note = Probe
  source 1..30: mol_type = other DNA

SEQ ID NO: 27928 - DNA, 31 bp, synthetic construct; identical to SEQ ID NO: 3411
  misc_feature 1..31: note = Probe
  source 1..31: mol_type = other DNA

SEQ ID NO: 27929 - DNA, 32 bp, synthetic construct; identical to SEQ ID NO: 3412
  misc_feature 1..32: note = Probe
  source 1..32: mol_type = other DNA

SEQ ID NO: 27930 - DNA, 33 bp, synthetic construct; identical to SEQ ID NO: 3413
  misc_feature 1..33: note = Probe
  source 1..33: mol_type = other DNA

SEQ ID NO: 27931 - DNA, 36 bp, synthetic construct
  misc_feature 1..36: note = Probe
  source 1..36: mol_type = other DNA
aggagatttcaacttaacttgaccgctctgagctaa

SEQ ID NO: 27932 - DNA, 32 bp, synthetic construct
  misc_feature 1..32: note = Probe
  source 1..32: mol_type = other DNA
aggagcctgggtagctcagtcggtagagcatc

SEQ ID NO: 27933 - DNA, 33 bp, synthetic construct
  misc_feature 1..33: note = Probe
  source 1..33: mol_type = other DNA
aggagcctgggtagctcagtcggtagagcatca

SEQ ID NO: 27934 - DNA, 36 bp, synthetic construct
  misc_feature 1..36: note = Probe
  source 1..36: mol_type = other DNA
aggagcctgggtagctcagtcggtagagcatcagac

SEQ ID NO: 27935 - DNA, 39 bp, synthetic construct
  misc_feature 1..39: note = Probe
  source 1..39: mol_type = other DNA
aggagcctgggtagctcagtcggtagagcatcagacttt

SEQ ID NO: 27936 - DNA, 15 bp, synthetic construct
  misc_feature 1..15: note = Probe
  source 1..15: mol_type = other DNA
aggagcttaaacccc

SEQ ID NO: 27937 - DNA, 36 bp, synthetic construct
  misc_feature 1..36: note = Probe
  source 1..36: mol_type = other DNA
aggagcttaaacccccttatttctaggactatgaga

SEQ ID NO: 27938 - DNA, 22 bp, synthetic construct
  misc_feature 1..22: note = Probe
  source 1..22: mol_type = other DNA
aggataacagctatccattggt

SEQ ID NO: 27939 - DNA, 24 bp, synthetic construct
  misc_feature 1..24: note = Probe
  source 1..24: mol_type = other DNA
aggataacagctatccattggtct

SEQ ID NO: 27940 - DNA, 25 bp, synthetic construct
  misc_feature 1..25: note = Probe
  source 1..25: mol_type = other DNA
aggataacagctatccattggtctt

SEQ ID NO: 27941 - DNA, 26 bp, synthetic construct
  misc_feature 1..26: note = Probe
  source 1..26: mol_type = other DNA
aggataacagctatccattggtctta

SEQ ID NO: 27942 - DNA, 27 bp, synthetic construct
  misc_feature 1..27: note = Probe
  source 1..27: mol_type = other DNA
aggataacagctatccattggtcttag

SEQ ID NO: 27943 - DNA, 30 bp, synthetic construct
  misc_feature 1..30: note = Probe
  source 1..30: mol_type = other DNA
aggataacagctatccattggtcttaggcc

SEQ ID NO: 27944 - DNA, 31 bp, synthetic construct
  misc_feature 1..31: note = Probe
  source 1..31: mol_type = other DNA
aggataacagctatccattggtcttaggccc

SEQ ID NO: 27945 - DNA, 32 bp, synthetic construct
  misc_feature 1..32: note = Probe
  source 1..32: mol_type = other DNA
aggataacagctatccattggtcttaggcccc

SEQ ID NO: 27946 - DNA, 36 bp, synthetic construct
  misc_feature 1..36: note = Probe
  source 1..36: mol_type = other DNA
aggataacagctatccattggtcttaggccccaaaa

SEQ ID NO: 27947 - DNA, 17 bp, synthetic construct
  misc_feature 1..17: note = Probe
  source 1..17: mol_type = other DNA
aggatggccgagcggtc

SEQ ID NO: 27948 - DNA, 18 bp, synthetic construct
  misc_feature 1..18: note = Probe
  source 1..18: mol_type = other DNA
aggatggccgagcggtct

SEQ ID NO: 27949 - DNA, 19 bp, synthetic construct
  misc_feature 1..19: note = Probe
  source 1..19: mol_type = other DNA
aggatggccgagcggtcta

SEQ ID NO: 27950 - DNA, 21 bp, synthetic construct
  misc_feature 1..21: note = Probe
  source 1..21: mol_type = other DNA
aggatggccgagcggtctaag

SEQ ID NO: 27951 - DNA, 23 bp, synthetic construct
  misc_feature 1..23: note = Probe
  source 1..23: mol_type = other DNA
aggatggccgagcggtctaaggc

SEQ ID NO: 27952 - DNA, 28 bp, synthetic construct
  misc_feature 1..28: note = Probe
  source 1..28: mol_type = other DNA
aggatggccgagcggtctaaggcgctgc

SEQ ID NO: 27953 - DNA, 29 bp, synthetic construct
  misc_feature 1..29: note = Probe
  source 1..29: mol_type = other DNA
aggatggggtgtgataggtggcacggaga

SEQ ID NO: 27954 - DNA, 30 bp, synthetic construct
  misc_feature 1..30: note = Probe
  source 1..30: mol_type = other DNA
aggatggggtgtgataggtggcacggagaa

SEQ ID NO: 27955 - DNA, 31 bp, synthetic construct
  misc_feature 1..31: note = Probe
  source 1..31: mol_type = other DNA
aggatggggtgtgataggtggcacggagaat

SEQ ID NO: 27956 - DNA, 32 bp, synthetic construct
  misc_feature 1..32: note = Probe
  source 1..32: mol_type = other DNA
aggatggggtgtgataggtggcacggagaatt

SEQ ID NO: 27957 - DNA, 35 bp, synthetic construct; identical to SEQ ID NO: 16657
  misc_feature 1..35: note = Probe
  source 1..35: mol_type = other DNA

SEQ ID NO: 27958 - DNA, 36 bp, synthetic construct
  misc_feature 1..36: note = Probe
  source 1..36: mol_type = other DNA
aggatggggtgtgataggtggcacggagaattttgg

SEQ ID NO: 27959 - DNA, 16 bp, synthetic construct
  misc_feature 1..16: note = Probe
  source 1..16: mol_type = other DNA
aggattagactgaacc

SEQ ID NO: 27960 - DNA, 15 bp, synthetic construct
  misc_feature 1..15: note = Probe
  source 1..15: mol_type = other DNA
aggattcggcgctct

SEQ ID NO: 27961 - DNA, 16 bp, synthetic construct
  misc_feature 1..16: note = Probe
  source 1..16: mol_type = other DNA
aggattcggcgctctc

SEQ ID NO: 27962 - DNA, 19 bp, synthetic construct
  misc_feature 1..19: note = Probe
  source 1..19: mol_type = other DNA
aggattcggcgctctcacc

SEQ ID NO: 27963 - DNA, 30 bp, synthetic construct; identical to SEQ ID NO: 16665
  misc_feature 1..30: note = Probe
  source 1..30: mol_type = other DNA

SEQ ID NO: 27964 - DNA, 32 bp, synthetic construct
  misc_feature 1..32: note = Probe
  source 1..32: mol_type = other DNA
aggattcggcgctctcaccgccgcggcccggg

SEQ ID NO: 27965 - DNA, 33 bp, synthetic construct
  misc_feature 1..33: note = Probe
  source 1..33: mol_type = other DNA
aggattcggcgctctcaccgccgcggcccgggt

SEQ ID NO: 27966 - DNA, 36 bp, synthetic construct
  misc_feature 1..36: note = Probe
  source 1..36: mol_type = other DNA
aggattcggcgctctcaccgccgcggcccgggttcg

SEQ ID NO: 27967 - DNA, 21 bp, synthetic construct
  misc_feature 1..21: note = Probe
  source 1..21: mol_type = other DNA
aggcaggggccagtggcgcaa

SEQ ID NO: 27968 - DNA, 32 bp, synthetic construct
  misc_feature 1..32: note = Probe
  source 1..32: mol_type = other DNA
aggcattggtggttcagtggtagaattctcgc

SEQ ID NO: 27969 - DNA, 36 bp, synthetic construct
  misc_feature 1..36: note = Probe
  source 1..36: mol_type = other DNA
aggcctcgtggcgcaacggtagcgcgtctgactcca

SEQ ID NO: 27970 - DNA, 16 bp, synthetic construct
  misc_feature 1..16: note = Probe
  source 1..16: mol_type = other DNA
aggcgatcacgtagat

SEQ ID NO: 27971 - DNA, 17 bp, synthetic construct
  misc_feature 1..17: note = Probe
  source 1..17: mol_type = other DNA
aggcgatcacgtagatt

SEQ ID NO: 27972 - DNA, 18 bp, synthetic construct
  misc_feature 1..18: note = Probe
  source 1..18: mol_type = other DNA
aggcgatcacgtagattt

SEQ ID NO: 27973 - DNA, 19 bp, synthetic construct
  misc_feature 1..19: note = Probe
  source 1..19: mol_type = other DNA
aggcgatcacgtagatttt

SEQ ID NO: 27974 - DNA, 20 bp, synthetic construct
  misc_feature 1..20: note = Probe
  source 1..20: mol_type = other DNA
aggcgatcacgtagattttg

SEQ ID NO: 27975 - DNA, 26 bp, synthetic construct
  misc_feature 1..26: note = Probe
  source 1..26: mol_type = other DNA
aggcgcccggctagctcagtcggtag

SEQ ID NO: 27976 - DNA, 36 bp, synthetic construct; identical to SEQ ID NO: 16675
  misc_feature 1..36: note = Probe
  source 1..36: mol_type = other DNA

SEQ ID NO: 27977 - DNA, 50 bp, synthetic construct
  misc_feature 1..50: note = Probe
  source 1..50: mol_type = other DNA
aggcgcccggctagctcagtcggtagagcatgggactcttaatcccaggg

SEQ ID NO: 27978 - DNA, 28 bp, synthetic construct
  misc_feature 1..28: note = Probe
  source 1..28: mol_type = other DNA
aggcggcccgggttcgactcccggtgtg

SEQ ID NO: 27979 - DNA, 33 bp, synthetic construct; identical to SEQ ID NO: 327
  misc_feature 1..33: note = Probe
  source 1..33: mol_type = other DNA

SEQ ID NO: 27980 - DNA, 34 bp, synthetic construct; identical to SEQ ID NO: 16680
  misc_feature 1..34: note = Probe
  source 1..34: mol_type = other DNA

SEQ ID NO: 27981 - DNA, 20 bp, synthetic construct
  misc_feature 1..20: note = Probe
  source 1..20: mol_type = other DNA
aggcggccggttagctcagt

SEQ ID NO: 27982 - DNA, 23 bp, synthetic construct
  misc_feature 1..23: note = Probe
  source 1..23: mol_type = other DNA
aggcggccggttagctcagttgg

SEQ ID NO: 27983 - DNA, 36 bp, synthetic construct
  misc_feature 1..36: note = Probe
  source 1..36: mol_type = other DNA
aggcggccggttagctcagttggttagagcgtggtg

SEQ ID NO: 27984 - DNA, 36 bp, synthetic construct
  misc_feature 1..36: note = Probe
  source 1..36: mol_type = other DNA
aggcggctcgttggtctaggggtatgattctcgctt

SEQ ID NO: 27985 - DNA, 17 bp, synthetic construct
  misc_feature 1..17: note = Probe
  source 1..17: mol_type = other DNA
aggctgtcagctcttcc

SEQ ID NO: 27986 - DNA, 23 bp, synthetic construct
  misc_feature 1..23: note = Probe
  source 1..23: mol_type = other DNA
aggcttacgaccccttatttacc

SEQ ID NO: 27987 - DNA, 24 bp, synthetic construct
  misc_feature 1..24: note = Probe
  source 1..24: mol_type = other DNA
aggcttacgaccccttatttaccg

SEQ ID NO: 27988 - DNA, 24 bp, synthetic construct
  misc_feature 1..24: note = Probe
  source 1..24: mol_type = other DNA
agggagcccggatagctcagtcgg

SEQ ID NO: 27989 - DNA, 25 bp, synthetic construct
  misc_feature 1..25: note = Probe
  source 1..25: mol_type = other DNA
agggagcccggatagctcagtcggt

SEQ ID NO: 27990 - DNA, 26 bp, synthetic construct
  misc_feature 1..26: note = Probe
  source 1..26: mol_type = other DNA
agggagcccggatagctcagtcggta

SEQ ID NO: 27991 - DNA, 27 bp, synthetic construct
  misc_feature 1..27: note = Probe
  source 1..27: mol_type = other DNA
agggagcccggatagctcagtcggtag

SEQ ID NO: 27992 - DNA, 28 bp, synthetic construct
  misc_feature 1..28: note = Probe
  source 1..28: mol_type = other DNA
agggagcccggatagctcagtcggtaga

SEQ ID NO: 27993 - DNA, 29 bp, synthetic construct
  misc_feature 1..29: note = Probe
  source 1..29: mol_type = other DNA
agggagcccggatagctcagtcggtagag

SEQ ID NO: 27994 - DNA, 30 bp, synthetic construct; identical to SEQ ID NO: 16688
  misc_feature 1..30: note = Probe
  source 1..30: mol_type = other DNA

SEQ ID NO: 27995 - DNA, 31 bp, synthetic construct; identical to SEQ ID NO: 16689
  misc_feature 1..31: note = Probe
  source 1..31: mol_type = other DNA

SEQ ID NO: 27996 - DNA, 33 bp, synthetic construct
  misc_feature 1..33: note = Probe
  source 1..33: mol_type = other DNA
agggagcccggatagctcagtcggtagagcatc

SEQ ID NO: 27997 - DNA, 34 bp, synthetic construct
  misc_feature 1..34: note = Probe
  source 1..34: mol_type = other DNA
agggagcccggatagctcagtcggtagagcatca

SEQ ID NO: 27998 - DNA, 35 bp, synthetic construct
  misc_feature 1..35: note = Probe
  source 1..35: mol_type = other DNA
agggagcccggatagctcagtcggtagagcatcag

SEQ ID NO: 27999 - DNA, 36 bp, synthetic construct; identical to SEQ ID NO: 16690
  misc_feature 1..36: note = Probe
  source 1..36: mol_type = other DNA

SEQ ID NO: 28000 - DNA, 37 bp, synthetic construct; identical to SEQ ID NO: 16691
  misc_feature 1..37: note = Probe
  source 1..37: mol_type = other DNA

SEQ ID NO: 28001 - DNA, 38 bp, synthetic construct; identical to SEQ ID NO: 16692
  misc_feature 1..38: note = Probe
  source 1..38: mol_type = other DNA

SEQ ID NO: 28002 - DNA, 39 bp, synthetic construct
  misc_feature 1..39: note = Probe
  source 1..39: mol_type = other DNA
agggagcccggatagctcagtcggtagagcatcagactt

SEQ ID NO: 28003 - DNA, 40 bp, synthetic construct; identical to SEQ ID NO: 16693
  misc_feature 1..40: note = Probe
  source 1..40: mol_type = other DNA

SEQ ID NO: 28004 - DNA, 41 bp, synthetic construct; identical to SEQ ID NO: 16694
  misc_feature 1..41: note = Probe
  source 1..41: mol_type = other DNA

SEQ ID NO: 28005 - DNA, 42 bp, synthetic construct; identical to SEQ ID NO: 16695
  misc_feature 1..42: note = Probe
  source 1..42: mol_type = other DNA

SEQ ID NO: 28006 - DNA, 43 bp, synthetic construct
  misc_feature 1..43: note = Probe
  source 1..43: mol_type = other DNA
agggagcccggatagctcagtcggtagagcatcagacttttaa

SEQ ID NO: 28007 - DNA, 44 bp, synthetic construct
  misc_feature 1..44: note = Probe
  source 1..44: mol_type = other DNA
agggagcccggatagctcagtcggtagagcatcagacttttaat

SEQ ID NO: 28008 - DNA, 45 bp, synthetic construct
  misc_feature 1..45: note = Probe
  source 1..45: mol_type = other DNA
agggagcccggatagctcagtcggtagagcatcagacttttaatc

SEQ ID NO: 28009 - DNA, 15 bp, synthetic construct
  misc_feature 1..15: note = Probe
  source 1..15: mol_type = other DNA
agggaggttatgatt

SEQ ID NO: 28010 - DNA, 16 bp, synthetic construct
  misc_feature 1..16: note = Probe
  source 1..16: mol_type = other DNA
agggaggttatgatta

SEQ ID NO: 28011 - DNA, 19 bp, synthetic construct
  misc_feature 1..19: note = Probe
  source 1..19: mol_type = other DNA
agggaggttatgattaact

SEQ ID NO: 28012 - DNA, 20 bp, synthetic construct
  misc_feature 1..20: note = Probe
  source 1..20: mol_type = other DNA
agggaggttatgattaactt

SEQ ID NO: 28013 - DNA, 21 bp, synthetic construct
  misc_feature 1..21: note = Probe
  source 1..21: mol_type = other DNA
agggaggttatgattaacttt

SEQ ID NO: 28014 - DNA, 22 bp, synthetic construct
  misc_feature 1..22: note = Probe
  source 1..22: mol_type = other DNA
agggaggttatgattaactttt

SEQ ID NO: 28015 - DNA, 32 bp, synthetic construct
  misc_feature 1..32: note = Probe
  source 1..32: mol_type = other DNA
agggaggttccatggtgtaatggttagcactc

SEQ ID NO: 28016 - DNA, 26 bp, synthetic construct
  misc_feature 1..26: note = Probe
  source 1..26: mol_type = other DNA
agggatgggttcgattctcatagtcc

SEQ ID NO: 28017 - DNA, 27 bp, synthetic construct
  misc_feature 1..27: note = Probe
  source 1..27: mol_type = other DNA
agggatgggttcgattctcatagtcct

SEQ ID NO: 28018 - DNA, 32 bp, synthetic construct
  misc_feature 1..32: note = Probe
  source 1..32: mol_type = other DNA
agggattgtgggttcgagtcccacccggggta

SEQ ID NO: 28019 - DNA, 32 bp, synthetic construct
  misc_feature 1..32: note = Probe
  source 1..32: mol_type = other DNA
agggattgtgggttcgagtcccacctggggta

SEQ ID NO: 28020 - DNA, 34 bp, synthetic construct
  misc_feature 1..34: note = Probe
  source 1..34: mol_type = other DNA
agggattgtgggttcgagtcccatctggggtggc

SEQ ID NO: 28021 - DNA, 36 bp, synthetic construct
  misc_feature 1..36: note = Probe
  source 1..36: mol_type = other DNA
agggcctggatagctcagttggtagaacatcagact

SEQ ID NO: 28022 - DNA, 35 bp, synthetic construct
  misc_feature 1..35: note = Probe
  source 1..35: mol_type = other DNA
agggcttctgtagtgtagtggttatcacgttcgcc

SEQ ID NO: 28023 - DNA, 36 bp, synthetic construct
  misc_feature 1..36: note = Probe
  source 1..36: mol_type = other DNA
agggcttctgtagtgtagtggttatcacgttcgcct

SEQ ID NO: 28024 - DNA, 17 bp, synthetic construct
  misc_feature 1..17: note = Probe
  source 1..17: mol_type = other DNA
aggggcccggatagctc

SEQ ID NO: 28025 - DNA, 23 bp, synthetic construct
  misc_feature 1..23: note = Probe
  source 1..23: mol_type = other DNA
aggggcccggatagctcagtcgg

SEQ ID NO: 28026 - DNA, 24 bp, synthetic construct
  misc_feature 1..24: note = Probe
  source 1..24: mol_type = other DNA
aggggcccggatagctcagtcggt

SEQ ID NO: 28027 - DNA, 25 bp, synthetic construct
  misc_feature 1..25: note = Probe
  source 1..25: mol_type = other DNA
aggggcccggatagctcagtcggta

SEQ ID NO: 28028 - DNA, 26 bp, synthetic construct
  misc_feature 1..26: note = Probe
  source 1..26: mol_type = other DNA
aggggcccggatagctcagtcggtag

SEQ ID NO: 28029 - DNA, 27 bp, synthetic construct
  misc_feature 1..27: note = Probe
  source 1..27: mol_type = other DNA
aggggcccggatagctcagtcggtaga

SEQ ID NO: 28030 - DNA, 28 bp, synthetic construct
  misc_feature 1..28: note = Probe
  source 1..28: mol_type = other DNA
aggggcccggatagctcagtcggtagag

SEQ ID NO: 28031 - DNA, 29 bp, synthetic construct
  misc_feature 1..29: note = Probe
  source 1..29: mol_type = other DNA
aggggcccggatagctcagtcggtagagc

SEQ ID NO: 28032 - DNA, 30 bp, synthetic construct; identical to SEQ ID NO: 16710
  misc_feature 1..30: note = Probe
  source 1..30: mol_type = other DNA

SEQ ID NO: 28033 - DNA, 32 bp, synthetic construct
  misc_feature 1..32: note = Probe
  source 1..32: mol_type = other DNA
aggggcccggatagctcagtcggtagagcatc

SEQ ID NO: 28034 - DNA, 33 bp, synthetic construct
  misc_feature 1..33: note = Probe
  source 1..33: mol_type = other DNA
aggggcccggatagctcagtcggtagagcatca

SEQ ID NO: 28035 - DNA, 34 bp, synthetic construct
  misc_feature 1..34: note = Probe
  source 1..34: mol_type = other DNA
aggggcccggatagctcagtcggtagagcatcag

SEQ ID NO: 28036 - DNA, 35 bp, synthetic construct; identical to SEQ ID NO: 16711
  misc_feature 1..35: note = Probe
  source 1..35: mol_type = other DNA

SEQ ID NO: 28037 - DNA, 36 bp, synthetic construct; identical to SEQ ID NO: 16712
  misc_feature 1..36: note = Probe
  source 1..36: mol_type = other DNA

SEQ ID NO: 28038 - DNA, 37 bp, synthetic construct; identical to SEQ ID NO: 16713
  misc_feature 1..37: note = Probe
  source 1..37: mol_type = other DNA

SEQ ID NO: 28039 - DNA, 38 bp, synthetic construct; identical to SEQ ID NO: 16714
  misc_feature 1..38: note = Probe
  source 1..38: mol_type = other DNA

SEQ ID NO: 28040 - DNA, 39 bp, synthetic construct; identical to SEQ ID NO: 16715
  misc_feature 1..39: note = Probe
  source 1..39: mol_type = other DNA

SEQ ID NO: 28041 - DNA, 40 bp, synthetic construct; identical to SEQ ID NO: 16716
  misc_feature 1..40: note = Probe
  source 1..40: mol_type = other DNA

SEQ ID NO: 28042 - DNA, 41 bp, synthetic construct; identical to SEQ ID NO: 16717
  misc_feature 1..41: note = Probe
  source 1..41: mol_type = other DNA

SEQ ID NO: 28043 - DNA, 42 bp, synthetic construct
  misc_feature 1..42: note = Probe
  source 1..42: mol_type = other DNA
aggggcccggatagctcagtcggtagagcatcagacttttaa

SEQ ID NO: 28044 - DNA, 43 bp, synthetic construct
  misc_feature 1..43: note = Probe
  source 1..43: mol_type = other DNA
aggggcccggatagctcagtcggtagagcatcagacttttaat

SEQ ID NO: 28045 - DNA, 44 bp, synthetic construct
  misc_feature 1..44: note = Probe
  source 1..44: mol_type = other DNA
aggggcccggatagctcagtcggtagagcatcagacttttaatc

SEQ ID NO: 28046 - DNA, 15 bp, synthetic construct
  misc_feature 1..15: note = Probe
  source 1..15: mol_type = other DNA
aggggtatgattctc

SEQ ID NO: 28047 - DNA, 17 bp, synthetic construct
  misc_feature 1..17: note = Probe
  source 1..17: mol_type = other DNA
aggggtatgattctcgc

SEQ ID NO: 28048 - DNA, 18 bp, synthetic construct
  misc_feature 1..18: note = Probe
  source 1..18: mol_type = other DNA
aggggtatgattctcgct

SEQ ID NO: 28049 - DNA, 19 bp, synthetic construct
  misc_feature 1..19: note = Probe
  source 1..19: mol_type = other DNA
aggggtatgattctcgctt

SEQ ID NO: 28050 - DNA, 17 bp, synthetic construct
  misc_feature 1..17: note = Probe
  source 1..17: mol_type = other DNA
aggggtatgattctcgg

SEQ ID NO: 28051 - DNA, 25 bp, synthetic construct
  misc_feature 1..25: note = Probe
  source 1..25: mol_type = other DNA
aggggttaggcctctttttaccagc

SEQ ID NO: 28052 - DNA, 36 bp, synthetic construct
  misc_feature 1..36: note = Probe
  source 1..36: mol_type = other DNA
agggtaggggatgtagctcagtggtagagcgcatgc

SEQ ID NO: 28053 - DNA, 21 bp, synthetic construct
  misc_feature 1..21: note = Probe
  source 1..21: mol_type = other DNA
agggtgcgagaggtcccgggt

SEQ ID NO: 28054 - DNA, 22 bp, synthetic construct
  misc_feature 1..22: note = Probe
  source 1..22: mol_type = other DNA
agggtgcgagaggtcccgggtt

SEQ ID NO: 28055 - DNA, 20 bp, synthetic construct
  misc_feature 1..20: note = Probe
  source 1..20: mol_type = other DNA
agggtgcttagctgttaact

SEQ ID NO: 28056 - DNA, 36 bp, synthetic construct
  misc_feature 1..36: note = Probe
  source 1..36: mol_type = other DNA
agggtgcttagctgttaactaagtgtttgtgggttt

SEQ ID NO: 28057 - DNA, 15 bp, synthetic construct
  misc_feature 1..15: note = Probe
  source 1..15: mol_type = other DNA
agggtgtgcgtgttt

SEQ ID NO: 28058 - DNA, 16 bp, synthetic construct
  misc_feature 1..16: note = Probe
  source 1..16: mol_type = other DNA
agggtgtgcgtgtttt

SEQ ID NO: 28059 - DNA, 17 bp, synthetic construct
  misc_feature 1..17: note = Probe
  source 1..17: mol_type = other DNA
agggtgtgcgtgttttt

SEQ ID NO: 28060 - DNA, 18 bp, synthetic construct
  misc_feature 1..18: note = Probe
  source 1..18: mol_type = other DNA
agggtgtgcgtgtttttt

SEQ ID NO: 28061 - DNA, 19 bp, synthetic construct
  misc_feature 1..19: note = Probe
  source 1..19: mol_type = other DNA
agggtgtgcgtgttttttt

SEQ ID NO: 28062 - DNA, 20 bp, synthetic construct
  misc_feature 1..20: note = Probe
  source 1..20: mol_type = other DNA
agggtgtgcgtgtttttttt

SEQ ID NO: 28063 - DNA, 21 bp, synthetic construct
  misc_feature 1..21: note = Probe
  source 1..21: mol_type = other DNA
agggtgtgcgtgttttttttt

SEQ ID NO: 28064 - DNA, 36 bp, synthetic construct
  misc_feature 1..36: note = Probe
  source 1..36: mol_type = other DNA
agggttcaagtccctgttcaggcgaacttcagaagt

SEQ ID NO: 28065 - DNA, 23 bp, synthetic construct
  misc_feature 1..23: note = Probe
  source 1..23: mol_type = other DNA
agggttcaagtccctgttcgggc

SEQ ID NO: 28066 - DNA, 24 bp, synthetic construct
  misc_feature 1..24: note = Probe
  source 1..24: mol_type = other DNA
agggttcaagtccctgttcgggcg

SEQ ID NO: 28067 - DNA, 27 bp, synthetic construct
  misc_feature 1..27: note = Probe
  source 1..27: mol_type = other DNA
agggttcaagtccctgttcgggcggca

SEQ ID NO: 28068 - DNA, 36 bp, synthetic construct
  misc_feature 1..36: note = Probe
  source 1..36: mol_type = other DNA
agggttcaagtccctgttcgggcgtttgtagttttc

SEQ ID NO: 28069 - DNA, 15 bp, synthetic construct
  misc_feature 1..15: note = Probe
  source 1..15: mol_type = other DNA
agggttgctgtcttt

SEQ ID NO: 28070 - DNA, 16 bp, synthetic construct
  misc_feature 1..16: note = Probe
  source 1..16: mol_type = other DNA
agggttgctgtctttt

SEQ ID NO: 28071 - DNA, 36 bp, synthetic construct
  misc_feature 1..36: note = Probe
  source 1..36: mol_type = other DNA
agggttgtttccgtagtgtagtggttatcacgttcg

SEQ ID NO: 28072 - DNA, 33 bp, synthetic construct
  misc_feature 1..33: note = Probe
  source 1..33: mol_type = other DNA
aggtaaaatggctgagtgaagcattggactgta

SEQ ID NO: 28073 - DNA, 25 bp, synthetic construct
  misc_feature 1..25: note = Probe
  source 1..25: mol_type = other DNA
aggtcagctaaataagctatcgggc

SEQ ID NO: 28074 - DNA, 26 bp, synthetic construct
  misc_feature 1..26: note = Probe
  source 1..26: mol_type = other DNA
aggtcagctaaataagctatcgggcc

SEQ ID NO: 28075 - DNA, 27 bp, synthetic construct
  misc_feature 1..27: note = Probe
  source 1..27: mol_type = other DNA
aggtcagctaaataagctatcgggccc

SEQ ID NO: 28076 - DNA, 28 bp, synthetic construct
  misc_feature 1..28: note = Probe
  source 1..28: mol_type = other DNA
aggtcagctaaataagctatcgggccca

SEQ ID NO: 28077 - DNA, 36 bp, synthetic construct; identical to SEQ ID NO: 3460
  misc_feature 1..36: note = Probe
  source 1..36: mol_type = other DNA

SEQ ID NO: 28078 - DNA, 33 bp, synthetic construct; identical to SEQ ID NO: 16762
  misc_feature 1..33: note = Probe
  source 1..33: mol_type = other DNA

SEQ ID NO: 28079 - DNA, 36 bp, synthetic construct
  misc_feature 1..36: note = Probe
  source 1..36: mol_type = other DNA
aggtccctcctcgttagtatagtggtgagtatcccc

SEQ ID NO: 28080 - DNA, 36 bp, synthetic construct
  misc_feature 1..36: note = Probe
  source 1..36: mol_type = other DNA
aggtcctgagttcgaacctcagagggggcaaggcgt

SEQ ID NO: 28081 - DNA, 36 bp, synthetic construct
  misc_feature 1..36: note = Probe
  source 1..36: mol_type = other DNA
aggtcctgagttcgaacctcagagggggcagctgcc

SEQ ID NO: 28082 - DNA, 36 bp, synthetic construct
  misc_feature 1..36: note = Probe
  source 1..36: mol_type = other DNA
aggtcctgagttcgagcctcagagagggcagctgtt

SEQ ID NO: 28083 - DNA, 36 bp, synthetic construct
  misc_feature 1..36: note = Probe
  source 1..36: mol_type = other DNA
aggtcctgagttcgagcctcagagagggcagctttt

SEQ ID NO: 28084 - DNA, 15 bp, synthetic construct
  misc_feature 1..15: note = Probe
  source 1..15: mol_type = other DNA
aggtgcctcgttagc

SEQ ID NO: 28085 - DNA, 27 bp, synthetic construct
  misc_feature 1..27: note = Probe
  source 1..27: mol_type = other DNA
aggtgcctcgttagcgcagtaggtagc

SEQ ID NO: 28086 - DNA, 32 bp, synthetic construct; identical to SEQ ID NO: 16791
  misc_feature 1..32: note = Probe
  source 1..32: mol_type = other DNA

SEQ ID NO: 28087 - DNA, 33 bp, synthetic construct; identical to SEQ ID NO: 16792
  misc_feature 1..33: note = Probe
  source 1..33: mol_type = other DNA

SEQ ID NO: 28088 - DNA, 36 bp, synthetic construct; identical to SEQ ID NO: 16795
  misc_feature 1..36: note = Probe
  source 1..36: mol_type = other DNA

SEQ ID NO: 28089 - DNA, 36 bp, synthetic construct
  misc_feature 1..36: note = Probe
  source 1..36: mol_type = other DNA
aggtggccccatggtgtaatggttagcactctggac

SEQ ID NO: 28090 - DNA, 31 bp, synthetic construct
  misc_feature 1..31: note = Probe
  source 1..31: mol_type = other DNA
aggtggctccgtggcgcaatggatagcgcat

SEQ ID NO: 28091 - DNA, 36 bp, synthetic construct
  misc_feature 1..36: note = Probe
  source 1..36: mol_type = other DNA
aggtggctccgtggcgcaatggatagcgcattggac

SEQ ID NO: 28092 - DNA, 50 bp, synthetic construct
  misc_feature 1..50: note = Probe
  source 1..50: mol_type = other DNA
aggtggctccgtggcgcaatggatagcgcattggacttctagaggctgaa

SEQ ID NO: 28093 - DNA, 36 bp, synthetic construct
  misc_feature 1..36: note = Probe
  source 1..36: mol_type = other DNA
aggtggctcgttggtctaggggtatgattctcgctt

SEQ ID NO: 28094 - DNA, 36 bp, synthetic construct
  misc_feature 1..36: note = Probe
  source 1..36: mol_type = other DNA
aggtggggatgtagctcagtggtagagcgcatgctt

SEQ ID NO: 28095 - DNA, 16 bp, synthetic construct
  misc_feature 1..16: note = Probe
  source 1..16: mol_type = other DNA
aggtgtcaggatggcc

SEQ ID NO: 28096 - DNA, 30 bp, synthetic construct
  misc_feature 1..30: note = Probe
  source 1..30: mol_type = other DNA
aggtgtcaggatggccgagtggtctaaggc

SEQ ID NO: 28097 - DNA, 33 bp, synthetic construct
  misc_feature 1..33: note = Probe
  source 1..33: mol_type = other DNA
aggtgtcaggatggccgagtggtctaaggcgcc

SEQ ID NO: 28098 - DNA, 36 bp, synthetic construct
  misc_feature 1..36: note = Probe
  source 1..36: mol_type = other DNA
aggtgtcaggatggccgagtggtctaaggcgccaga

SEQ ID NO: 28099 - DNA, 39 bp, synthetic construct; identical to SEQ ID NO: 16815
  misc_feature 1..39: note = Probe
  source 1..39: mol_type = other DNA

SEQ ID NO: 28100 - DNA, 36 bp, synthetic construct; identical to SEQ ID NO: 16817
  misc_feature 1..36: note = Probe
  source 1..36: mol_type = other DNA

SEQ ID NO: 28101 - DNA, 29 bp, synthetic construct
  misc_feature 1..29: note = Probe
  source 1..29: mol_type = other DNA
aggttccgggttcgagtcccggcggagtc

SEQ ID NO: 28102 - DNA, 22 bp, synthetic construct
  misc_feature 1..22: note = Probe
  source 1..22: mol_type = other DNA
aggttcgactcctggctggctc

SEQ ID NO: 28103 - DNA, 15 bp, synthetic construct
  misc_feature 1..15: note = Probe
  source 1..15: mol_type = other DNA
aggttgggttttttt

SEQ ID NO: 28104 - DNA, 16 bp, synthetic construct
  misc_feature 1..16: note = Probe
  source 1..16: mol_type = other DNA
aggttgggtttttttt

SEQ ID NO: 28105 - DNA, 27 bp, synthetic construct
  misc_feature 1..27: note = Probe
  source 1..27: mol_type = other DNA
aggtttggtcctagcctttctattagc

SEQ ID NO: 28106 - DNA, 36 bp, synthetic construct
  misc_feature 1..36: note = Probe
  source 1..36: mol_type = other DNA
agtaaacaggagatcctgggttcgaatcccagcggg

SEQ ID NO: 28107 - DNA, 39 bp, synthetic construct
  misc_feature 1..39: note = Probe
  source 1..39: mol_type = other DNA
agtaaacaggagatcctgggttcgaatcccagcggggcc

SEQ ID NO: 28108 - DNA, 40 bp, synthetic construct
  misc_feature 1..40: note = Probe
  source 1..40: mol_type = other DNA
agtaaacaggagatcctgggttcgaatcccagcggggcct

SEQ ID NO: 28109 - DNA, 36 bp, synthetic construct
  misc_feature 1..36: note = Probe
  source 1..36: mol_type = other DNA
agtaaacaggagatcctgggttcgaatcccagcggt

SEQ ID NO: 28110 - DNA, 16 bp, synthetic construct
  misc_feature 1..16: note = Probe
  source 1..16: mol_type = other DNA
agtaaataataggagc

SEQ ID NO: 28111 - DNA, 18 bp, synthetic construct
  misc_feature 1..18: note = Probe
  source 1..18: mol_type = other DNA
agtaaataataggagctt

SEQ ID NO: 28112 - DNA, 23 bp, synthetic construct
  misc_feature 1..23: note = Probe
  source 1..23: mol_type = other DNA
agtaaataataggagcttaaacc

SEQ ID NO: 28113 - DNA, 25 bp, synthetic construct
  misc_feature 1..25: note = Probe
  source 1..25: mol_type = other DNA
agtaaataataggagcttaaacccc

SEQ ID NO: 28114 - DNA, 15 bp, synthetic construct
  misc_feature 1..15: note = Probe
  source 1..15: mol_type = other DNA
agtaaggtcagctaa

SEQ ID NO: 28115 - DNA, 16 bp, synthetic construct
  misc_feature 1..16: note = Probe
  source 1..16: mol_type = other DNA
agtaaggtcagctaaa

SEQ ID NO: 28116 - DNA, 17 bp, synthetic construct
  misc_feature 1..17: note = Probe
  source 1..17: mol_type = other DNA
agtaaggtcagctaaat

SEQ ID NO: 28117 - DNA, 18 bp, synthetic construct
  misc_feature 1..18: note = Probe
  source 1..18: mol_type = other DNA
agtaaggtcagctaaata

SEQ ID NO: 28118 - DNA, 19 bp, synthetic construct
  misc_feature 1..19: note = Probe
  source 1..19: mol_type = other DNA
agtaaggtcagctaaataa

SEQ ID NO: 28119 - DNA, 20 bp, synthetic construct
  misc_feature 1..20: note = Probe
  source 1..20: mol_type = other DNA
agtaaggtcagctaaataag

SEQ ID NO: 28120 - DNA, 21 bp, synthetic construct
  misc_feature 1..21: note = Probe
  source 1..21: mol_type = other DNA
agtaaggtcagctaaataagc

SEQ ID NO: 28121 - DNA, 22 bp, synthetic construct
  misc_feature 1..22: note = Probe
  source 1..22: mol_type = other DNA
agtaaggtcagctaaataagct

SEQ ID NO: 28122 - DNA, 25 bp, synthetic construct
  misc_feature 1..25: note = Probe
  source 1..25: mol_type = other DNA
agtaaggtcagctaaataagctatc

SEQ ID NO: 28123 - DNA, 28 bp, synthetic construct
  misc_feature 1..28: note = Probe
  source 1..28: mol_type = other DNA
agtaaggtcagctaaataagctatcggg

SEQ ID NO: 28124 - DNA, 29 bp, synthetic construct
  misc_feature 1..29: note = Probe
  source 1..29: mol_type = other DNA
agtaaggtcagctaaataagctatcgggc

SEQ ID NO: 28125 - DNA, 30 bp, synthetic construct; identical to SEQ ID NO: 3514
  misc_feature 1..30: note = Probe
  source 1..30: mol_type = other DNA

SEQ ID NO: 28126 - DNA, 31 bp, synthetic construct; identical to SEQ ID NO: 3515
  misc_feature 1..31: note = Probe
  source 1..31: mol_type = other DNA

SEQ ID NO: 28127 - DNA, 32 bp, synthetic construct; identical to SEQ ID NO: 3516
  misc_feature 1..32: note = Probe
  source 1..32: mol_type = other DNA

SEQ ID NO: 28128 - DNA, 33 bp, synthetic construct; identical to SEQ ID NO: 3517
  misc_feature 1..33: note = Probe
  source 1..33: mol_type = other DNA

SEQ ID NO: 28129 - DNA, 34 bp, synthetic construct; identical to SEQ ID NO: 3518
  misc_feature 1..34: note = Probe
  source 1..34: mol_type = other DNA

SEQ ID NO: 28130 - DNA, 35 bp, synthetic construct; identical to SEQ ID NO: 3519
  misc_feature 1..35: note = Probe
  source 1..35: mol_type = other DNA

SEQ ID NO: 28131 - DNA, 36 bp, synthetic construct; identical to SEQ ID NO: 3520
  misc_feature 1..36: note = Probe
  source 1..36: mol_type = other DNA

SEQ ID NO: 28132 - DNA, 37 bp, synthetic construct; identical to SEQ ID NO: 3521
  misc_feature 1..37: note = Probe
  source 1..37: mol_type = other DNA

SEQ ID NO: 28133 - DNA, 38 bp, synthetic construct; identical to SEQ ID NO: 3522
  misc_feature 1..38: note = Probe
  source 1..38: mol_type = other DNA

SEQ ID NO: 28134 - DNA, 39 bp, synthetic construct; identical to SEQ ID NO: 3523
  misc_feature 1..39: note = Probe
  source 1..39: mol_type = other DNA

SEQ ID NO: 28135 - DNA, 40 bp, synthetic construct; identical to SEQ ID NO: 3524
  misc_feature 1..40: note = Probe
  source 1..40: mol_type = other DNA

SEQ ID NO: 28136 - DNA, 41 bp, synthetic construct; identical to SEQ ID NO: 3525
  misc_feature 1..41: note = Probe
  source 1..41: mol_type = other DNA

SEQ ID NO: 28137 - DNA, 42 bp, synthetic construct; identical to SEQ ID NO: 3526
  misc_feature 1..42: note = Probe
  source 1..42: mol_type = other DNA

SEQ ID NO: 28138 - DNA, 43 bp, synthetic construct; identical to SEQ ID NO: 3527
  misc_feature 1..43: note = Probe
  source 1..43: mol_type = other DNA

SEQ ID NO: 28139 - DNA, 45 bp, synthetic construct; identical to SEQ ID NO: 3529
  misc_feature 1..45: note = Probe
  source 1..45: mol_type = other DNA

SEQ ID NO: 28140 - DNA, 46 bp, synthetic construct; identical to SEQ ID NO: 3530
  misc_feature 1..46: note = Probe
  source 1..46: mol_type = other DNA

SEQ ID NO: 28141 - DNA, 47 bp, synthetic construct; identical to SEQ ID NO: 3531
  misc_feature 1..47: note = Probe
  source 1..47: mol_type = other DNA

SEQ ID NO: 28142 - DNA, 50 bp, synthetic construct; identical to SEQ ID NO: 3534
  misc_feature 1..50: note = Probe
  source 1..50: mol_type = other DNA

SEQ ID NO: 28143 - DNA, 16 bp, synthetic construct
  misc_feature 1..16: note = Probe
  source 1..16: mol_type = other DNA
agtaccgttaacttcc

SEQ ID NO: 28144 - DNA, 36 bp, synthetic construct
  misc_feature 1..36: note = Probe
  source 1..36: mol_type = other DNA
agtacctgtctctgtggcgcaatcggttagcgcgtt

SEQ ID NO: 28145 - DNA, 36 bp, synthetic construct; identical to SEQ ID NO: 16871
  misc_feature 1..36: note = Probe
  source 1..36: mol_type = other DNA

SEQ ID NO: 28146 - DNA, 34 bp, synthetic construct
  misc_feature 1..34: note = Probe
  source 1..34: mol_type = other DNA
agtactctgcgttgtggccgcagcaacctcggtt

SEQ ID NO: 28147 - DNA, 36 bp, synthetic construct
  misc_feature 1..36: note = Probe
  source 1..36: mol_type = other DNA
agtactctgcgttgtggccgcagcaacctcggttcg

SEQ ID NO: 28148 - DNA, 18 bp, synthetic construct
  misc_feature 1..18: note = Probe
  source 1..18: mol_type = other DNA
agtagaactgacagtacc

SEQ ID NO: 28149 - DNA, 19 bp, synthetic construct
  misc_feature 1..19: note = Probe
  source 1..19: mol_type = other DNA
agtagaactgacagtacct

SEQ ID NO: 28150 - DNA, 36 bp, synthetic construct
  misc_feature 1..36: note = Probe
  source 1..36: mol_type = other DNA
agtagcattggtggttcagtggtagaattctcgcct

SEQ ID NO: 28151 - DNA, 19 bp, synthetic construct
  misc_feature 1..19: note = Probe
  source 1..19: mol_type = other DNA
agtaggtagcgcatcagtc

SEQ ID NO: 28152 - DNA, 20 bp, synthetic construct
  misc_feature 1..20: note = Probe
  source 1..20: mol_type = other DNA
agtaggtagcgcatcagtct

SEQ ID NO: 28153 - DNA, 19 bp, synthetic construct
  misc_feature 1..19: note = Probe
  source 1..19: mol_type = other DNA
agtaggtagcgcgtcagtc

SEQ ID NO: 28154 - DNA, 20 bp, synthetic construct
  misc_feature 1..20: note = Probe
  source 1..20: mol_type = other DNA
agtaggtagcgcgtcagtct

SEQ ID NO: 28155 - DNA, 36 bp, synthetic construct
  misc_feature 1..36: note = Probe
  source 1..36: mol_type = other DNA
agtaggtggggatgtagctcagtggtagagcgcatg

SEQ ID NO: 28156 - DNA, 36 bp, synthetic construct
  misc_feature 1..36: note = Probe
  source 1..36: mol_type = other DNA
agtataaatagtaccgttaacttccaattaactagt

SEQ ID NO: 28157 - DNA, 16 bp, synthetic construct
  misc_feature 1..16: note = Probe
  source 1..16: mol_type = other DNA
agtatccccgcctgtc

SEQ ID NO: 28158 - DNA, 16 bp, synthetic construct
  misc_feature 1..16: note = Probe
  source 1..16: mol_type = other DNA
agtattctctgtggct

SEQ ID NO: 28159 - DNA, 17 bp, synthetic construct
  misc_feature 1..17: note = Probe
  source 1..17: mol_type = other DNA
agtattctctgtggctt

SEQ ID NO: 28160 - DNA, 18 bp, synthetic construct
  misc_feature 1..18: note = Probe
  source 1..18: mol_type = other DNA
agtattctctgtggcttt

SEQ ID NO: 28161 - DNA, 19 bp, synthetic construct
  misc_feature 1..19: note = Probe
  source 1..19: mol_type = other DNA
agtattctctgtggctttt

SEQ ID NO: 28162 - DNA, 36 bp, synthetic construct
  misc_feature 1..36: note = Probe
  source 1..36: mol_type = other DNA
agtcaccgggatggccgagtggttaaggcgttggac

SEQ ID NO: 28163 - DNA, 20 bp, synthetic construct
  misc_feature 1..20: note = Probe
  source 1..20: mol_type = other DNA
agtcggctagagcgtggtgc

SEQ ID NO: 28164 - DNA, 15 bp, synthetic construct
  misc_feature 1..15: note = Probe
  source 1..15: mol_type = other DNA
agtcggtagagcatc

SEQ ID NO: 28165 - DNA, 17 bp, synthetic construct
  misc_feature 1..17: note = Probe
  source 1..17: mol_type = other DNA
agtcggtagagcatcag

SEQ ID NO: 28166 - DNA, 15 bp, synthetic construct
  misc_feature 1..15: note = Probe
  source 1..15: mol_type = other DNA
agtcggtagagcatg

SEQ ID NO: 28167 - DNA, 18 bp, synthetic construct
  misc_feature 1..18: note = Probe
  source 1..18: mol_type = other DNA
agtcggtagagcatgaga

SEQ ID NO: 28168 - DNA, 19 bp, synthetic construct
  misc_feature 1..19: note = Probe
  source 1..19: mol_type = other DNA
agtcggtagagcatgagac

SEQ ID NO: 28169 - DNA, 20 bp, synthetic construct
  misc_feature 1..20: note = Probe
  source 1..20: mol_type = other DNA
agtcggtagagcatgagacc

SEQ ID NO: 28170 - DNA, 21 bp, synthetic construct
  misc_feature 1..21: note = Probe
  source 1..21: mol_type = other DNA
agtcggtagagcatgagaccc

SEQ ID NO: 28171 - DNA, 20 bp, synthetic construct
  misc_feature 1..20: note = Probe
  source 1..20: mol_type = other DNA
agtcggtagagcatgagact

SEQ ID NO: 28172 - DNA, 21 bp, synthetic construct
  misc_feature 1..21: note = Probe
  source 1..21: mol_type = other DNA
agtcggtagagcatgagactc

SEQ ID NO: 28173 - DNA, 17 bp, synthetic construct
  misc_feature 1..17: note = Probe
  source 1..17: mol_type = other DNA
agtcggtagagcatggg

SEQ ID NO: 28174 - DNA, 18 bp, synthetic construct
  misc_feature 1..18: note = Probe
  source 1..18: mol_type = other DNA
agtcggtagagcatggga

SEQ ID NO: 28175 - DNA, 20 bp, synthetic construct
  misc_feature 1..20: note = Probe
  source 1..20: mol_type = other DNA
agtcggtagagcatgggact

SEQ ID NO: 28176 - DNA, 28 bp, synthetic construct
  misc_feature 1..28: note = Probe
  source 1..28: mol_type = other DNA
agtcggtagagcatgggactcttaatcc

SEQ ID NO: 28177 - DNA, 29 bp, synthetic construct
  misc_feature 1..29: note = Probe
  source 1..29: mol_type = other DNA
agtcggtagagcatgggactcttaatccc

SEQ ID NO: 28178 - DNA, 26 bp, synthetic construct
  misc_feature 1..26: note = Probe
  source 1..26: mol_type = other DNA
agtcttgtaaaccggagatgaaaacc

SEQ ID NO: 28179 - DNA, 27 bp, synthetic construct
  misc_feature 1..27: note = Probe
  source 1..27: mol_type = other DNA
agtcttgtaaaccggagatgaaaacct

SEQ ID NO: 28180 - DNA, 36 bp, synthetic construct
  misc_feature 1..36: note = Probe
  source 1..36: mol_type = other DNA
agtcttgtaaaccggagatgaaaacctttttccaag

SEQ ID NO: 28181 - DNA, 18 bp, synthetic construct
  misc_feature 1..18: note = Probe
  source 1..18: mol_type = other DNA
agtctttaactccaccat

SEQ ID NO: 28182 - DNA, 15 bp, synthetic construct
  misc_feature 1..15: note = Probe
  source 1..15: mol_type = other DNA
agtgaagcattggac

SEQ ID NO: 28183 - DNA, 16 bp, synthetic construct
  misc_feature 1..16: note = Probe
  source 1..16: mol_type = other DNA
agtgaagcattggact

SEQ ID NO: 28184 - DNA, 18 bp, synthetic construct
  misc_feature 1..18: note = Probe
  source 1..18: mol_type = other DNA
agtgaagcattggactgt

SEQ ID NO: 28185 - DNA, 19 bp, synthetic construct
  misc_feature 1..19: note = Probe
  source 1..19: mol_type = other DNA
agtgaagcattggactgta

SEQ ID NO: 28186 - DNA, 20 bp, synthetic construct
  misc_feature 1..20: note = Probe
  source 1..20: mol_type = other DNA
agtgaagcattggactgtaa

SEQ ID NO: 28187 - DNA, 21 bp, synthetic construct
  misc_feature 1..21: note = Probe
  source 1..21: mol_type = other DNA
agtgaagcattggactgtaaa

SEQ ID NO: 28188 - DNA, 22 bp, synthetic construct
  misc_feature 1..22: note = Probe
  source 1..22: mol_type = other DNA
agtgaagcattggactgtaaat

SEQ ID NO: 28189 - DNA, 23 bp, synthetic construct
  misc_feature 1..23: note = Probe
  source 1..23: mol_type = other DNA
agtgaagcattggactgtaaatc

SEQ ID NO: 28190 - DNA, 24 bp, synthetic construct
  misc_feature 1..24: note = Probe
  source 1..24: mol_type = other DNA
agtgaagcattggactgtaaatct

SEQ ID NO: 28191 - DNA, 25 bp, synthetic construct
  misc_feature 1..25: note = Probe
  source 1..25: mol_type = other DNA
agtgaagcattggactgtaaatcta

SEQ ID NO: 28192 - DNA, 26 bp, synthetic construct
  misc_feature 1..26: note = Probe
  source 1..26: mol_type = other DNA
agtgaagcattggactgtaaatctaa

SEQ ID NO: 28193 - DNA, 36 bp, synthetic construct
  misc_feature 1..36: note = Probe
  source 1..36: mol_type = other DNA
agtgaagcattggactgtaaatctaaagacaggggt

SEQ ID NO: 28194 - DNA, 15 bp, synthetic construct
  misc_feature 1..15: note = Probe
  source 1..15: mol_type = other DNA
agtgcacttggacga

SEQ ID NO: 28195 - DNA, 17 bp, synthetic construct
  misc_feature 1..17: note = Probe
  source 1..17: mol_type = other DNA
agtgcacttggacgaac

SEQ ID NO: 28196 - DNA, 18 bp, synthetic construct
  misc_feature 1..18: note = Probe
  source 1..18: mol_type = other DNA
agtgcacttggacgaacc

SEQ ID NO: 28197 - DNA, 16 bp, synthetic construct
  misc_feature 1..16: note = Probe
  source 1..16: mol_type = other DNA
agtgcccggctagctc

SEQ ID NO: 28198 - DNA, 31 bp, synthetic construct
  misc_feature 1..31: note = Probe
  source 1..31: mol_type = other DNA
agtgcccggctagctcagtcggtagagcatg

SEQ ID NO: 28199 - DNA, 36 bp, synthetic construct; identical to SEQ ID NO: 16918
  misc_feature 1..36: note = Probe
  source 1..36: mol_type = other DNA

SEQ ID NO: 28200 - DNA, 37 bp, synthetic construct
  misc_feature 1..37: note = Probe
  source 1..37: mol_type = other DNA
agtgcccggctagctcagtcggtagagcatgagactc

SEQ ID NO: 28201 - DNA, 36 bp, synthetic construct
  misc_feature 1..36: note = Probe
  source 1..36: mol_type = other DNA
agtggccggttagctcagttggttagagcgtggtgc

SEQ ID NO: 28202 - DNA, 26 bp, synthetic construct
  misc_feature 1..26: note = Probe
  source 1..26: mol_type = other DNA
agtggcgcagcggaagcgtgctgggc

SEQ ID NO: 28203 - DNA, 17 bp, synthetic construct
  misc_feature 1..17: note = Probe
  source 1..17: mol_type = other DNA
agtggctaggattcggc

SEQ ID NO: 28204 - DNA, 36 bp, synthetic construct
  misc_feature 1..36: note = Probe
  source 1..36: mol_type = other DNA
agtggctcgttggtctaggggtatgattctcgctta

SEQ ID NO: 28205 - DNA, 36 bp, synthetic construct
  misc_feature 1..36: note = Probe
  source 1..36: mol_type = other DNA
agtggctcgttggtctaggggtatgattctcgcttt

SEQ ID NO: 28206 - DNA, 36 bp, synthetic construct
  misc_feature 1..36: note = Probe
  source 1..36: mol_type = other DNA
agtggggtttccgtagtgtagtggttatcacgttcg

SEQ ID NO: 28207 - DNA, 39 bp, synthetic construct
  misc_feature 1..39: note = Probe
  source 1..39: mol_type = other DNA
agtggggtttccgtagtgtagtggttatcacgttcgcct

SEQ ID NO: 28208 - DNA, 36 bp, synthetic construct
  misc_feature 1..36: note = Probe
  source 1..36: mol_type = other DNA
agtgggtttccgtagtgtagtggttatcacgttcgc

SEQ ID NO: 28209 - DNA, 37 bp, synthetic construct
  misc_feature 1..37: note = Probe
  source 1..37: mol_type = other DNA
agtgggtttccgtagtgtagtggttatcacgttcgcc

SEQ ID NO: 28210 - DNA, 38 bp, synthetic construct
  misc_feature 1..38: note = Probe
  source 1..38: mol_type = other DNA
agtgggtttccgtagtgtagtggttatcacgttcgcct

SEQ ID NO: 28211 - DNA, 17 bp, synthetic construct
  misc_feature 1..17: note = Probe
  source 1..17: mol_type = other DNA
agtggtagaattctcgc

SEQ ID NO: 28212 - DNA, 18 bp, synthetic construct
  misc_feature 1..18: note = Probe
  source 1..18: mol_type = other DNA
agtggtagaattctcgcc

SEQ ID NO: 28213 - DNA, 19 bp, synthetic construct
  misc_feature 1..19: note = Probe
  source 1..19: mol_type = other DNA
agtggtagaattctcgcct

SEQ ID NO: 28214 - DNA, 36 bp, synthetic construct
  misc_feature 1..36: note = Probe
  source 1..36: mol_type = other DNA
agtggtagaattctcgcctcccacgcgggagacccg

SEQ ID NO: 28215 - DNA, 21 bp, synthetic construct
  misc_feature 1..21: note = Probe
  source 1..21: mol_type = other DNA
agtggtagaattctcgcctgc

SEQ ID NO: 28216 - DNA, 22 bp, synthetic construct
  misc_feature 1..22: note = Probe
  source 1..22: mol_type = other DNA
agtggtagaattctcgcctgcc

SEQ ID NO: 28217 - DNA, 23 bp, synthetic construct
  misc_feature 1..23: note = Probe
  source 1..23: mol_type = other DNA
agtggtagaattctcgcctgcca

SEQ ID NO: 28218 - DNA, 36 bp, synthetic construct
  misc_feature 1..36: note = Probe
  source 1..36: mol_type = other DNA
agtggtagaattctcgcctgccacgcgggaggcccg

SEQ ID NO: 28219 - DNA, 19 bp, synthetic construct
  misc_feature 1..19: note = Probe
  source 1..19: mol_type = other DNA
agtggtagagcatttgact

SEQ ID NO: 28220 - DNA, 21 bp, synthetic construct
  misc_feature 1..21: note = Probe
  source 1..21: mol_type = other DNA
agtggtagagcatttgactgc

SEQ ID NO: 28221 - DNA, 17 bp, synthetic construct
  misc_feature 1..17: note = Probe
  source 1..17: mol_type = other DNA
agtggtatgattctcgc

SEQ ID NO: 28222 - DNA, 18 bp, synthetic construct
  misc_feature 1..18: note = Probe
  source 1..18: mol_type = other DNA
agtggtatgattctcgct

SEQ ID NO: 28223 - DNA, 19 bp, synthetic construct
  misc_feature 1..19: note = Probe
  source 1..19: mol_type = other DNA
agtggtcatcacgttcgcc

SEQ ID NO: 28224 - DNA, 15 bp, synthetic construct
  misc_feature 1..15: note = Probe
  source 1..15: mol_type = other DNA
agtggtctaaggcgc

SEQ ID NO: 28225 - DNA, 18 bp, synthetic construct
  misc_feature 1..18: note = Probe
  source 1..18: mol_type = other DNA
agtggtgagtatccccgc

SEQ ID NO: 28226 - DNA, 17 bp, synthetic construct
  misc_feature 1..17: note = Probe
  source 1..17: mol_type = other DNA
agtggttaggattcggc

SEQ ID NO: 28227 - DNA, 19 bp, synthetic construct
  misc_feature 1..19: note = Probe
  source 1..19: mol_type = other DNA
agtggttaggattcggcgc

SEQ ID NO: 28228 - DNA, 20 bp, synthetic construct
  misc_feature 1..20: note = Probe
  source 1..20: mol_type = other DNA
agtggttaggattcggcgct

SEQ ID NO: 28229 - DNA, 21 bp, synthetic construct
  misc_feature 1..21: note = Probe
  source 1..21: mol_type = other DNA
agtggttaggattcggcgctc

SEQ ID NO: 28230 - DNA, 22 bp, synthetic construct
  misc_feature 1..22: note = Probe
  source 1..22: mol_type = other DNA
agtggttaggattcggcgctct

SEQ ID NO: 28231 - DNA, 26 bp, synthetic construct
  misc_feature 1..26: note = Probe
  source 1..26: mol_type = other DNA
agtggttaggattcggcgctctcacc

SEQ ID NO: 28232 - DNA, 31 bp, synthetic construct; identical to SEQ ID NO: 16956
  misc_feature 1..31: note = Probe
  source 1..31: mol_type = other DNA

SEQ ID NO: 28233 - DNA, 32 bp, synthetic construct; identical to SEQ ID NO: 16957
  misc_feature 1..32: note = Probe
  source 1..32: mol_type = other DNA

SEQ ID NO: 28234 - DNA, 33 bp, synthetic construct; identical to SEQ ID NO: 16958
  misc_feature 1..33: note = Probe
  source 1..33: mol_type = other DNA

SEQ ID NO: 28235 - DNA, 34 bp, synthetic construct
  misc_feature 1..34: note = Probe
  source 1..34: mol_type = other DNA
agtggttaggattcggcgctctcaccgccgcggc

SEQ ID NO: 28236 - DNA, 35 bp, synthetic construct; identical to SEQ ID NO: 12776
  misc_feature 1..35: note = Probe
  source 1..35: mol_type = other DNA

SEQ ID NO: 28237 - DNA, 37 bp, synthetic construct; identical to SEQ ID NO: 12778
  misc_feature 1..37: note = Probe
  source 1..37: mol_type = other DNA

SEQ ID NO: 28238 - DNA, 40 bp, synthetic construct; identical to SEQ ID NO: 12779
  misc_feature 1..40: note = Probe
  source 1..40: mol_type = other DNA

SEQ ID NO: 28239 - DNA, 17 bp, synthetic construct
  misc_feature 1..17: note = Probe
  source 1..17: mol_type = other DNA
agtggttagtactctgc

SEQ ID NO: 28240 - DNA, 18 bp, synthetic construct
  misc_feature 1..18: note = Probe
  source 1..18: mol_type = other DNA
agtggttagtactctgcg

SEQ ID NO: 28241 - DNA, 19 bp, synthetic construct
  misc_feature 1..19: note = Probe
  source 1..19: mol_type = other DNA
agtggttagtactctgcgt

SEQ ID NO: 28242 - DNA, 20 bp, synthetic construct
  misc_feature 1..20: note = Probe
  source 1..20: mol_type = other DNA
agtggttagtactctgcgtt

SEQ ID NO: 28243 - DNA, 19 bp, synthetic construct
  misc_feature 1..19: note = Probe
  source 1..19: mol_type = other DNA
agtggttatcacattcgcc

SEQ ID NO: 28244 - DNA, 18 bp, synthetic construct
  misc_feature 1..18: note = Probe
  source 1..18: mol_type = other DNA
agtggttatcacgtctgc

SEQ ID NO: 28245 - DNA, 19 bp, synthetic construct
  misc_feature 1..19: note = Probe
  source 1..19: mol_type = other DNA
agtggttatcacgttcgcc

SEQ ID NO: 28246 - DNA, 25 bp, synthetic construct
  misc_feature 1..25: note = Probe
  source 1..25: mol_type = other DNA
agtgtactggaaagtgcacttggac

SEQ ID NO: 28247 - DNA, 36 bp, synthetic construct
  misc_feature 1..36: note = Probe
  source 1..36: mol_type = other DNA
agtgtagagagcctggatagctcagtcggtagagca

SEQ ID NO: 28248 - DNA, 39 bp, synthetic construct
  misc_feature 1..39: note = Probe
  source 1..39: mol_type = other DNA
agtgtagagagcctggatagctcagtcggtagagcatca

SEQ ID NO: 28249 - DNA, 25 bp, synthetic construct
  misc_feature 1..25: note = Probe
  source 1..25: mol_type = other DNA
agtgtagtggtcatcacgttcgcct

SEQ ID NO: 28250 - DNA, 24 bp, synthetic construct
  misc_feature 1..24: note = Probe
  source 1..24: mol_type = other DNA
agtgtagtggttatcacgttcgcc

SEQ ID NO: 28251 - DNA, 36 bp, synthetic construct
  misc_feature 1..36: note = Probe
  source 1..36: mol_type = other DNA
agtgtcgtctctgtggcgcaatcggttagcgcgttc

SEQ ID NO: 28252 - DNA, 17 bp, synthetic construct
  misc_feature 1..17: note = Probe
  source 1..17: mol_type = other DNA
agtgtgtcaggatggcc

SEQ ID NO: 28253 - DNA, 36 bp, synthetic construct; identical to SEQ ID NO: 16982
  misc_feature 1..36: note = Probe
  source 1..36: mol_type = other DNA

SEQ ID NO: 28254 - DNA, 40 bp, synthetic construct; identical to SEQ ID NO: 16986
  misc_feature 1..40: note = Probe
  source 1..40: mol_type = other DNA

SEQ ID NO: 28255 - DNA, 20 bp, synthetic construct
  misc_feature 1..20: note = Probe
  source 1..20: mol_type = other DNA
agtgtttgtgggtttaagtc

SEQ ID NO: 28256 - DNA, 21 bp, synthetic construct
  misc_feature 1..21: note = Probe
  source 1..21: mol_type = other DNA
agtgtttgtgggtttaagtcc

SEQ ID NO: 28257 - DNA, 29 bp, synthetic construct
  misc_feature 1..29: note = Probe
  source 1..29: mol_type = other DNA
agtgtttgtgggtttaagtcccattggtc

SEQ ID NO: 28258 - DNA, 33 bp, synthetic construct; identical to SEQ ID NO: 16996
  misc_feature 1..33: note = Probe
  source 1..33: mol_type = other DNA

SEQ ID NO: 28259 - DNA, 19 bp, synthetic construct
  misc_feature 1..19: note = Probe
  source 1..19: mol_type = other DNA
agttaaagactttttctct

SEQ ID NO: 28260 - DNA, 22 bp, synthetic construct
  misc_feature 1..22: note = Probe
  source 1..22: mol_type = other DNA
agttaaagactttttctctgat

SEQ ID NO: 28261 - DNA, 19 bp, synthetic construct
  misc_feature 1..19: note = Probe
  source 1..19: mol_type = other DNA
agttaaagattaagagaac

SEQ ID NO: 28262 - DNA, 20 bp, synthetic construct
  misc_feature 1..20: note = Probe
  source 1..20: mol_type = other DNA
agttaaagattaagagaacc

SEQ ID NO: 28263 - DNA, 25 bp, synthetic construct
  misc_feature 1..25: note = Probe
  source 1..25: mol_type = other DNA
agttaaagattaagagaaccaacac

SEQ ID NO: 28264 - DNA, 26 bp, synthetic construct
  misc_feature 1..26: note = Probe
  source 1..26: mol_type = other DNA
agttaaagattaagagaaccaacacc

SEQ ID NO: 28265 - DNA, 27 bp, synthetic construct
  misc_feature 1..27: note = Probe
  source 1..27: mol_type = other DNA
agttaaagattaagagaaccaacacct

SEQ ID NO: 28266 - DNA, 29 bp, synthetic construct
  misc_feature 1..29: note = Probe
  source 1..29: mol_type = other DNA
agttaaagattaagagaaccaacacctct

SEQ ID NO: 28267 - DNA, 36 bp, synthetic construct
  misc_feature 1..36: note = Probe
  source 1..36: mol_type = other DNA
agttaaagattaagagaaccaacacctctttacagt

SEQ ID NO: 28268 - DNA, 16 bp, synthetic construct
  misc_feature 1..16: note = Probe
  source 1..16: mol_type = other DNA
agttaaattataggct

SEQ ID NO: 28269 - DNA, 36 bp, synthetic construct
  misc_feature 1..36: note = Probe
  source 1..36: mol_type = other DNA
agttaccagaatggccgagtggttaaggcgttggac

SEQ ID NO: 28270 - DNA, 22 bp, synthetic construct
  misc_feature 1..22: note = Probe
  source 1..22: mol_type = other DNA
agttagcggggagtgatatatt

SEQ ID NO: 28271 - DNA, 23 bp, synthetic construct
  misc_feature 1..23: note = Probe
  source 1..23: mol_type = other DNA
agttagcggggagtgatatatta

SEQ ID NO: 28272 - DNA, 25 bp, synthetic construct
  misc_feature 1..25: note = Probe
  source 1..25: mol_type = other DNA
agttagcggggagtgatatattatt

SEQ ID NO: 28273 - DNA, 36 bp, synthetic construct
  misc_feature 1..36: note = Probe
  source 1..36: mol_type = other DNA
agttcccatatggtctagcggttaggattcctggtt

SEQ ID NO: 28274 - DNA, 36 bp, synthetic construct
  misc_feature 1..36: note = Probe
  source 1..36: mol_type = other DNA
agttctggctcgttggtctagtggtatgattctcgc

SEQ ID NO: 28275 - DNA, 37 bp, synthetic construct
  misc_feature 1..37: note = Probe
  source 1..37: mol_type = other DNA
agttctggctcgttggtctagtggtatgattctcgct

SEQ ID NO: 28276 - DNA, 38 bp, synthetic construct
  misc_feature 1..38: note = Probe
  source 1..38: mol_type = other DNA
agttctggctcgttggtctagtggtatgattctcgctt

SEQ ID NO: 28277 - DNA, 39 bp, synthetic construct; identical to SEQ ID NO: 17012
  misc_feature 1..39: note = Probe
  source 1..39: mol_type = other DNA

SEQ ID NO: 28278 - DNA, 36 bp, synthetic construct
  misc_feature 1..36: note = Probe
  source 1..36: mol_type = other DNA
agttgaaatacaacgatggtttttcatatcattggt

SEQ ID NO: 28279 - DNA, 28 bp, synthetic construct
  misc_feature 1..28: note = Probe
  source 1..28: mol_type = other DNA
agttgatgcagagtggggttttgcagtc

SEQ ID NO: 28280 - DNA, 29 bp, synthetic construct
  misc_feature 1..29: note = Probe
  source 1..29: mol_type = other DNA
agttgatgcagagtggggttttgcagtcc

SEQ ID NO: 28281 - DNA, 30 bp, synthetic construct; identical to SEQ ID NO: 12788
  misc_feature 1..30: note = Probe
  source 1..30: mol_type = other DNA

SEQ ID NO: 28282 - DNA, 36 bp, synthetic construct
  misc_feature 1..36: note = Probe
  source 1..36: mol_type = other DNA
agttgatgcagagtggggttttgcagtccttagctg

SEQ ID NO: 28283 - DNA, 16 bp, synthetic construct
  misc_feature 1..16: note = Probe
  source 1..16: mol_type = other DNA
agttgattagggtgct

SEQ ID NO: 28284 - DNA, 17 bp, synthetic construct
  misc_feature 1..17: note = Probe
  source 1..17: mol_type = other DNA
agttgattagggtgctt

SEQ ID NO: 28285 - DNA, 18 bp, synthetic construct
  misc_feature 1..18: note = Probe
  source 1..18: mol_type = other DNA
agttgattagggtgctta

SEQ ID NO: 28286 - DNA, 20 bp, synthetic construct
  misc_feature 1..20: note = Probe
  source 1..20: mol_type = other DNA
agttgattagggtgcttagc

SEQ ID NO: 28287 - DNA, 23 bp, synthetic construct
  misc_feature 1..23: note = Probe
  source 1..23: mol_type = other DNA
agttgattagggtgcttagctgt

SEQ ID NO: 28288 - DNA, 27 bp, synthetic construct
  misc_feature 1..27: note = Probe
  source 1..27: mol_type = other DNA
agttgattagggtgcttagctgttaac

SEQ ID NO: 28289 - DNA, 29 bp, synthetic construct
  misc_feature 1..29: note = Probe
  source 1..29: mol_type = other DNA
agttgattagggtgcttagctgttaacta

SEQ ID NO: 28290 - DNA, 30 bp, synthetic construct
  misc_feature 1..30: note = Probe
  source 1..30: mol_type = other DNA
agttgattagggtgcttagctgttaactaa

SEQ ID NO: 28291 - DNA, 31 bp, synthetic construct
  misc_feature 1..31: note = Probe
  source 1..31: mol_type = other DNA
agttgattagggtgcttagctgttaactaag

SEQ ID NO: 28292 - DNA, 33 bp, synthetic construct
  misc_feature 1..33: note = Probe
  source 1..33: mol_type = other DNA
agttgattagggtgcttagctgttaactaagtg

SEQ ID NO: 28293 - DNA, 43 bp, synthetic construct; identical to SEQ ID NO: 364
  misc_feature 1..43: note = Probe
  source 1..43: mol_type = other DNA

SEQ ID NO: 28294 - DNA, 44 bp, synthetic construct; identical to SEQ ID NO: 3617
  misc_feature 1..44: note = Probe
  source 1..44: mol_type = other DNA

SEQ ID NO: 28295 - DNA, 36 bp, synthetic construct
  misc_feature 1..36: note = Probe
  source 1..36: mol_type = other DNA
agttgcctccttagcgcagtaggcagcgcgtcagtc

SEQ ID NO: 28296 - DNA, 22 bp, synthetic construct
  misc_feature 1..22: note = Probe
  source 1..22: mol_type = other DNA
agttgggagagcgttagactga

SEQ ID NO: 28297 - DNA, 23 bp, synthetic construct
  misc_feature 1..23: note = Probe
  source 1..23: mol_type = other DNA
agttgggagagcgttagactgaa

SEQ ID NO: 28298 - DNA, 15 bp, synthetic construct
  misc_feature 1..15: note = Probe
  source 1..15: mol_type = other DNA
agttggtagagcatc

SEQ ID NO: 28299 - DNA, 18 bp, synthetic construct
  misc_feature 1..18: note = Probe
  source 1..18: mol_type = other DNA
agttggtagagcggagga

SEQ ID NO: 28300 - DNA, 19 bp, synthetic construct
  misc_feature 1..19: note = Probe
  source 1..19: mol_type = other DNA
agttggtagagcggaggac

SEQ ID NO: 28301 - DNA, 23 bp, synthetic construct
  misc_feature 1..23: note = Probe
  source 1..23: mol_type = other DNA
agttggtagagcggaggactgta

SEQ ID NO: 28302 - DNA, 20 bp, synthetic construct
  misc_feature 1..20: note = Probe
  source 1..20: mol_type = other DNA
agttggttagagcgtggtgc

SEQ ID NO: 28303 - DNA, 28 bp, synthetic construct
  misc_feature 1..28: note = Probe
  source 1..28: mol_type = other DNA
agtttaaacaaaacgaatgatttcgact

SEQ ID NO: 28304 - DNA, 29 bp, synthetic construct
  misc_feature 1..29: note = Probe
  source 1..29: mol_type = other DNA
agtttaaacaaaacgaatgatttcgactc

SEQ ID NO: 28305 - DNA, 30 bp, synthetic construct
  misc_feature 1..30: note = Probe
  source 1..30: mol_type = other DNA
agtttaaacaaaacgaatgatttcgactca

SEQ ID NO: 28306 - DNA, 26 bp, synthetic construct
  misc_feature 1..26: note = Probe
  source 1..26: mol_type = other DNA
agtttaaattagaatcttagctttgg

SEQ ID NO: 28307 - DNA, 33 bp, synthetic construct
  misc_feature 1..33: note = Probe
  source 1..33: mol_type = other DNA
agtttaaattagaatcttagctttgggtgctaa

SEQ ID NO: 28308 - DNA, 36 bp, synthetic construct
  misc_feature 1..36: note = Probe
  source 1..36: mol_type = other DNA
agtttaaccaaaacatcagattgtgaatctgacaac

SEQ ID NO: 28309 - DNA, 43 bp, synthetic construct
  misc_feature 1..43: note = Probe
  source 1..43: mol_type = other DNA
agtttaaccaaaacatcagattgtgaatctgacaacagaggct

SEQ ID NO: 28310 - DNA, 18 bp, synthetic construct
  misc_feature 1..18: note = Probe
  source 1..18: mol_type = other DNA
agtttatgtagcttacct

SEQ ID NO: 28311 - DNA, 20 bp, synthetic construct
  misc_feature 1..20: note = Probe
  source 1..20: mol_type = other DNA
agtttatgtagcttacctcc

SEQ ID NO: 28312 - DNA, 21 bp, synthetic construct
  misc_feature 1..21: note = Probe
  source 1..21: mol_type = other DNA
agtttatgtagcttacctcct

SEQ ID NO: 28313 - DNA, 34 bp, synthetic construct
  misc_feature 1..34: note = Probe
  source 1..34: mol_type = other DNA
agtttccgtagtgtagtggttatcacgttcgcct

SEQ ID NO: 28314 - DNA, 36 bp, synthetic construct
  misc_feature 1..36: note = Probe
  source 1..36: mol_type = other DNA
ataaaagagttactttgatagagtaaataataggag

SEQ ID NO: 28315 - DNA, 27 bp, synthetic construct
  misc_feature 1..27: note = Probe
  source 1..27: mol_type = other DNA
ataaacttcgccttaattttaataatc

SEQ ID NO: 28316 - DNA, 30 bp, synthetic construct; identical to SEQ ID NO: 3625
  misc_feature 1..30: note = Probe
  source 1..30: mol_type = other DNA

SEQ ID NO: 28317 - DNA, 17 bp, synthetic construct
  misc_feature 1..17: note = Probe
  source 1..17: mol_type = other DNA
ataacagctatccattg

SEQ ID NO: 28318 - DNA, 19 bp, synthetic construct
  misc_feature 1..19: note = Probe
  source 1..19: mol_type = other DNA
ataacagctatccattggt

SEQ ID NO: 28319 - DNA, 22 bp, synthetic construct
  misc_feature 1..22: note = Probe
  source 1..22: mol_type = other DNA
ataacagctatccattggtctt

SEQ ID NO: 28320 - DNA, 23 bp, synthetic construct
  misc_feature 1..23: note = Probe
  source 1..23: mol_type = other DNA
ataacagctatccattggtctta

SEQ ID NO: 28321 - DNA, 27 bp, synthetic construct
  misc_feature 1..27: note = Probe
  source 1..27: mol_type = other DNA
ataacagctatccattggtcttaggcc

SEQ ID NO: 28322 - DNA, 28 bp, synthetic construct
  misc_feature 1..28: note = Probe
  source 1..28: mol_type = other DNA
ataacagctatccattggtcttaggccc

SEQ ID NO: 28323 - DNA, 29 bp, synthetic construct
  misc_feature 1..29: note = Probe
  source 1..29: mol_type = other DNA
ataacagctatccattggtcttaggcccc

SEQ ID NO: 28324 - DNA, 30 bp, synthetic construct
  misc_feature 1..30: note = Probe
  source 1..30: mol_type = other DNA
ataacagctatccattggtcttaggcccca

SEQ ID NO: 28325 - DNA, 36 bp, synthetic construct
  misc_feature 1..36: note = Probe
  source 1..36: mol_type = other DNA
ataacagctatccattggtcttaggccccaaaaatt

SEQ ID NO: 28326 - DNA, 18 bp, synthetic construct
  misc_feature 1..18: note = Probe
  source 1..18: mol_type = other DNA
ataaccatgcacactact

SEQ ID NO: 28327 - DNA, 19 bp, synthetic construct
  misc_feature 1..19: note = Probe
  source 1..19: mol_type = other DNA
ataaccatgcacactacta

SEQ ID NO: 28328 - DNA, 20 bp, synthetic construct
  misc_feature 1..20: note = Probe
  source 1..20: mol_type = other DNA
ataaccatgcacactactat

SEQ ID NO: 28329 - DNA, 21 bp, synthetic construct
  misc_feature 1..21: note = Probe
  source 1..21: mol_type = other DNA
ataaccatgcacactactata

SEQ ID NO: 28330 - DNA, 24 bp, synthetic construct
  misc_feature 1..24: note = Probe
  source 1..24: mol_type = other DNA
ataaccatgcacactactataacc

SEQ ID NO: 28331 - DNA, 25 bp, synthetic construct
  misc_feature 1..25: note = Probe
  source 1..25: mol_type = other DNA
ataaccatgcacactactataacca

SEQ ID NO: 28332 - DNA, 26 bp, synthetic construct
  misc_feature 1..26: note = Probe
  source 1..26: mol_type = other DNA
ataaccatgcacactactataaccac

SEQ ID NO: 28333 - DNA, 27 bp, synthetic construct
  misc_feature 1..27: note = Probe
  source 1..27: mol_type = other DNA
ataaccatgcacactactataaccacc

SEQ ID NO: 28334 - DNA, 28 bp, synthetic construct
  misc_feature 1..28: note = Probe
  source 1..28: mol_type = other DNA
ataaccatgcacactactataaccaccc

SEQ ID NO: 28335 - DNA, 29 bp, synthetic construct
  misc_feature 1..29: note = Probe
  source 1..29: mol_type = other DNA
ataaccatgcacactactataaccaccct

SEQ ID NO: 28336 - DNA, 30 bp, synthetic construct; identical to SEQ ID NO: 3631
  misc_feature 1..30: note = Probe
  source 1..30: mol_type = other DNA

SEQ ID NO: 28337 - DNA, 22 bp, synthetic construct
  misc_feature 1..22: note = Probe
  source 1..22: mol_type = other DNA
ataacccagaggtcgatggatc

SEQ ID NO: 28338 - DNA, 23 bp, synthetic construct
  misc_feature 1..23: note = Probe
  source 1..23: mol_type = other DNA
ataacccagaggtcgatggatcg

SEQ ID NO: 28339 - DNA, 24 bp, synthetic construct
  misc_feature 1..24: note = Probe
  source 1..24: mol_type = other DNA
ataacccagaggtcgatggatcga

SEQ ID NO: 28340 - DNA, 20 bp, synthetic construct
  misc_feature 1..20: note = Probe
  source 1..20: mol_type = other DNA
ataacgccaaggtcgcgggt

SEQ ID NO: 28341 - DNA, 29 bp, synthetic construct
  misc_feature 1..29: note = Probe
  source 1..29: mol_type = other DNA
ataactttgtcaaagttaaattataggct

SEQ ID NO: 28342 - DNA, 33 bp, synthetic construct; identical to SEQ ID NO: 17058
  misc_feature 1..33: note = Probe
  source 1..33: mol_type = other DNA

SEQ ID NO: 28343 - DNA, 34 bp, synthetic construct
  misc_feature 1..34: note = Probe
  source 1..34: mol_type = other DNA
ataagcattggtggttcagtggtagaattctcgc

SEQ ID NO: 28344 - DNA, 35 bp, synthetic construct; identical to SEQ ID NO: 17059
  misc_feature 1..35: note = Probe
  source 1..35: mol_type = other DNA

SEQ ID NO: 28345 - DNA, 36 bp, synthetic construct; identical to SEQ ID NO: 17060
  misc_feature 1..36: note = Probe
  source 1..36: mol_type = other DNA

SEQ ID NO: 28346 - DNA, 37 bp, synthetic construct; identical to SEQ ID NO: 17061
  misc_feature 1..37: note = Probe
  source 1..37: mol_type = other DNA

SEQ ID NO: 28347 - DNA, 38 bp, synthetic construct; identical to SEQ ID NO: 17062
  misc_feature 1..38: note = Probe
  source 1..38: mol_type = other DNA

SEQ ID NO: 28348 - DNA, 15 bp, synthetic construct
  misc_feature 1..15: note = Probe
  source 1..15: mol_type = other DNA
ataagctatcgggcc

SEQ ID NO: 28349 - DNA, 16 bp, synthetic construct
  misc_feature 1..16: note = Probe
  source 1..16: mol_type = other DNA
ataagctatcgggccc

SEQ ID NO: 28350 - DNA, 17 bp, synthetic construct
  misc_feature 1..17: note = Probe
  source 1..17: mol_type = other DNA
ataagctatcgggccca

SEQ ID NO: 28351 - DNA, 18 bp, synthetic construct
  misc_feature 1..18: note = Probe
  source 1..18: mol_type = other DNA
ataagctatcgggcccat

SEQ ID NO: 28352 - DNA, 21 bp, synthetic construct
  misc_feature 1..21: note = Probe
  source 1..21: mol_type = other DNA
ataagctatcgggcccatacc

SEQ ID NO: 28353 - DNA, 22 bp, synthetic construct
  misc_feature 1..22: note = Probe
  source 1..22: mol_type = other DNA
ataagctatcgggcccataccc

SEQ ID NO: 28354 - DNA, 36 bp, synthetic construct; identical to SEQ ID NO: 3648
  misc_feature 1..36: note = Probe
  source 1..36: mol_type = other DNA

SEQ ID NO: 28355 - DNA, 18 bp, synthetic construct
  misc_feature 1..18: note = Probe
  source 1..18: mol_type = other DNA
ataataggagcttaaacc

SEQ ID NO: 28356 - DNA, 20 bp, synthetic construct
  misc_feature 1..20: note = Probe
  source 1..20: mol_type = other DNA
ataataggagcttaaacccc

SEQ ID NO: 28357 - DNA, 20 bp, synthetic construct
  misc_feature 1..20: note = Probe
  source 1..20: mol_type = other DNA
ataatctgaaggtcctgagt

SEQ ID NO: 28358 - DNA, 36 bp, synthetic construct
  misc_feature 1..36: note = Probe
  source 1..36: mol_type = other DNA
ataatctgaaggtcctgagttcgaacctcagagggg

SEQ ID NO: 28359 - DNA, 36 bp, synthetic construct
  misc_feature 1..36: note = Probe
  source 1..36: mol_type = other DNA
ataatctgaaggtcgtgagttcgatcctcacacggg

SEQ ID NO: 28360 - DNA, 42 bp, synthetic construct
  misc_feature 1..42: note = Probe
  source 1..42: mol_type = other DNA
ataatctgaaggtcgtgagttcgatcctcacacggggcacaa

SEQ ID NO: 28361 - DNA, 31 bp, synthetic construct; identical to SEQ ID NO: 17084
  misc_feature 1..31: note = Probe
  source 1..31: mol_type = other DNA

SEQ ID NO: 28362 - DNA, 32 bp, synthetic construct
  misc_feature 1..32: note = Probe
  source 1..32: mol_type = other DNA
atacaacgatggtttttcatatcattggtcgt

SEQ ID NO: 28363 - DNA, 36 bp, synthetic construct
  misc_feature 1..36: note = Probe
  source 1..36: mol_type = other DNA
atacaacgatggtttttcatatcattggtcgtggtt

SEQ ID NO: 28364 - DNA, 42 bp, synthetic construct; identical to SEQ ID NO: 17085
  misc_feature 1..42: note = Probe
  source 1..42: mol_type = other DNA

SEQ ID NO: 28365 - DNA, 43 bp, synthetic construct
  misc_feature 1..43: note = Probe
  source 1..43: mol_type = other DNA
atacaacgatggtttttcatatcattggtcgtggttgtagtcc

SEQ ID NO: 28366 - DNA, 50 bp, synthetic construct
  misc_feature 1..50: note = Probe
  source 1..50: mol_type = other DNA
atacaacgatggtttttcatatcattggtcgtggttgtagtccgtgcgag

SEQ ID NO: 28367 - DNA, 22 bp, synthetic construct
  misc_feature 1..22: note = Probe
  source 1..22: mol_type = other DNA
atacactgaaaatgtttagacg

SEQ ID NO: 28368 - DNA, 25 bp, synthetic construct
  misc_feature 1..25: note = Probe
  source 1..25: mol_type = other DNA
atacactgaaaatgtttagacgggc

SEQ ID NO: 28369 - DNA, 28 bp, synthetic construct
  misc_feature 1..28: note = Probe
  source 1..28: mol_type = other DNA
atacactgaaaatgtttagacgggctca

SEQ ID NO: 28370 - DNA, 29 bp, synthetic construct
  misc_feature 1..29: note = Probe
  source 1..29: mol_type = other DNA
atacactgaaaatgtttagacgggctcac

SEQ ID NO: 28371 - DNA, 30 bp, synthetic construct; identical to SEQ ID NO: 17086
  misc_feature 1..30: note = Probe
  source 1..30: mol_type = other DNA

SEQ ID NO: 28372 - DNA, 32 bp, synthetic construct
  misc_feature 1..32: note = Probe
  source 1..32: mol_type = other DNA
atacactgaaaatgtttagacgggctcacatc

SEQ ID NO: 28373 - DNA, 35 bp, synthetic construct
  misc_feature 1..35: note = Probe
  source 1..35: mol_type = other DNA
atacactgaaaatgtttagacgggctcacatcacc

SEQ ID NO: 28374 - DNA, 36 bp, synthetic construct
  misc_feature 1..36: note = Probe
  source 1..36: mol_type = other DNA
atacactgaaaatgtttagacgggctcacatcaccc

SEQ ID NO: 28375 - DNA, 15 bp, synthetic construct
  misc_feature 1..15: note = Probe
  source 1..15: mol_type = other DNA
atacagaccaagagc

SEQ ID NO: 28376 - DNA, 17 bp, synthetic construct
  misc_feature 1..17: note = Probe
  source 1..17: mol_type = other DNA
atacagaccaagagcct

SEQ ID NO: 28377 - DNA, 25 bp, synthetic construct
  misc_feature 1..25: note = Probe
  source 1..25: mol_type = other DNA
atacagaccaagagccttcaaagcc

SEQ ID NO: 28378 - DNA, 16 bp, synthetic construct
  misc_feature 1..16: note = Probe
  source 1..16: mol_type = other DNA
atacccacacccaccc

SEQ ID NO: 28379 - DNA, 30 bp, synthetic construct; identical to SEQ ID NO: 3660
  misc_feature 1..30: note = Probe
  source 1..30: mol_type = other DNA

SEQ ID NO: 28380 - DNA, 33 bp, synthetic construct; identical to SEQ ID NO: 3663
  misc_feature 1..33: note = Probe
  source 1..33: mol_type = other DNA

SEQ ID NO: 28381 - DNA, 16 bp, synthetic construct
  misc_feature 1..16: note = Probe
  source 1..16: mol_type = other DNA
atacccatggccaacc

SEQ ID NO: 28382 - DNA, 17 bp, synthetic construct
  misc_feature 1..17: note = Probe
  source 1..17: mol_type = other DNA
atacccatggccaacct

SEQ ID NO: 28383 - DNA, 19 bp, synthetic construct
  misc_feature 1..19: note = Probe
  source 1..19: mol_type = other DNA
atacccatggccaacctcc

SEQ ID NO: 28384 - DNA, 23 bp, synthetic construct
  misc_feature 1..23: note = Probe
  source 1..23: mol_type = other DNA
atacccatggccaacctcctact

SEQ ID NO: 28385 - DNA, 28 bp, synthetic construct
  misc_feature 1..28: note = Probe
  source 1..28: mol_type = other DNA
atacccatggccaacctcctactcctca

SEQ ID NO: 28386 - DNA, 36 bp, synthetic construct; identical to SEQ ID NO: 17099
  misc_feature 1..36: note = Probe
  source 1..36: mol_type = other DNA

SEQ ID NO: 28387 - DNA, 16 bp, synthetic construct
  misc_feature 1..16: note = Probe
  source 1..16: mol_type = other DNA
atacccttcccgtact

SEQ ID NO: 28388 - DNA, 15 bp, synthetic construct
  misc_feature 1..15: note = Probe
  source 1..15: mol_type = other DNA
atactaccgtatggc

SEQ ID NO: 28389 - DNA, 15 bp, synthetic construct
  misc_feature 1..15: note = Probe
  source 1..15: mol_type = other DNA
atactcaaatgggcc

SEQ ID NO: 28390 - DNA, 24 bp, synthetic construct
  misc_feature 1..24: note = Probe
  source 1..24: mol_type = other DNA
atactgactagtctggtgttattt

SEQ ID NO: 28391 - DNA, 36 bp, synthetic construct
  misc_feature 1..36: note = Probe
  source 1..36: mol_type = other DNA
atagagcagagtggcgcagcggaagcgtgctgggcc

SEQ ID NO: 28392 - DNA, 20 bp, synthetic construct
  misc_feature 1..20: note = Probe
  source 1..20: mol_type = other DNA
atagagtaaataataggagc

SEQ ID NO: 28393 - DNA, 22 bp, synthetic construct
  misc_feature 1..22: note = Probe
  source 1..22: mol_type = other DNA
atagagtaaataataggagctt

SEQ ID NO: 28394 - DNA, 27 bp, synthetic construct
  misc_feature 1..27: note = Probe
  source 1..27: mol_type = other DNA
atagagtaaataataggagcttaaacc

SEQ ID NO: 28395 - DNA, 29 bp, synthetic construct
  misc_feature 1..29: note = Probe
  source 1..29: mol_type = other DNA
atagagtaaataataggagcttaaacccc

SEQ ID NO: 28396 - DNA, 25 bp, synthetic construct
  misc_feature 1..25: note = Probe
  source 1..25: mol_type = other DNA
atagccgcccggctagctcagtcgg

SEQ ID NO: 28397 - DNA, 26 bp, synthetic construct
  misc_feature 1..26: note = Probe
  source 1..26: mol_type = other DNA
atagccgcccggctagctcagtcggt

SEQ ID NO: 28398 - DNA, 27 bp, synthetic construct
  misc_feature 1..27: note = Probe
  source 1..27: mol_type = other DNA
atagccgcccggctagctcagtcggta

SEQ ID NO: 28399 - DNA, 28 bp, synthetic construct
  misc_feature 1..28: note = Probe
  source 1..28: mol_type = other DNA
atagccgcccggctagctcagtcggtag

SEQ ID NO: 28400 - DNA, 29 bp, synthetic construct
  misc_feature 1..29: note = Probe
  source 1..29: mol_type = other DNA
atagccgcccggctagctcagtcggtaga

SEQ ID NO: 28401 - DNA, 36 bp, synthetic construct
  misc_feature 1..36: note = Probe
  source 1..36: mol_type = other DNA
atagccgcccggctagctcagtcggtagagcatgag

SEQ ID NO: 28402 - DNA, 39 bp, synthetic construct
  misc_feature 1..39: note = Probe
  source 1..39: mol_type = other DNA
atagccgcccggctagctcagtcggtagagcatgagacc

SEQ ID NO: 28403 - DNA, 43 bp, synthetic construct
  misc_feature 1..43: note = Probe
  source 1..43: mol_type = other DNA
atagccgcccggctagctcagtcggtagagcatgagaccctta

SEQ ID NO: 28404 - DNA, 18 bp, synthetic construct
  misc_feature 1..18: note = Probe
  source 1..18: mol_type = other DNA
atagctcagtcggtagag

SEQ ID NO: 28405 - DNA, 26 bp, synthetic construct
  misc_feature 1..26: note = Probe
  source 1..26: mol_type = other DNA
atagctcagtcggtagagcatcagac

SEQ ID NO: 28406 - DNA, 27 bp, synthetic construct
  misc_feature 1..27: note = Probe
  source 1..27: mol_type = other DNA
atagctcagtcggtagagcatcagact

SEQ ID NO: 28407 - DNA, 28 bp, synthetic construct
  misc_feature 1..28: note = Probe
  source 1..28: mol_type = other DNA
atagctcagtcggtagagcatcagactt

SEQ ID NO: 28408 - DNA, 29 bp, synthetic construct
  misc_feature 1..29: note = Probe
  source 1..29: mol_type = other DNA
atagctcagtcggtagagcatcagacttt

SEQ ID NO: 28409 - DNA, 31 bp, synthetic construct; identical to SEQ ID NO: 12798
  misc_feature 1..31: note = Probe
  source 1..31: mol_type = other DNA

SEQ ID NO: 28410 - DNA, 15 bp, synthetic construct
  misc_feature 1..15: note = Probe
  source 1..15: mol_type = other DNA
ataggagcttaaacc

SEQ ID NO: 28411 - DNA, 18 bp, synthetic construct
  misc_feature 1..18: note = Probe
  source 1..18: mol_type = other DNA
ataggagcttaaaccccc

SEQ ID NO: 28412 - DNA, 36 bp, synthetic construct
  misc_feature 1..36: note = Probe
  source 1..36: mol_type = other DNA
ataggagcttaaacccccttatttctaggactatga

SEQ ID NO: 28413 - DNA, 15 bp, synthetic construct
  misc_feature 1..15: note = Probe
  source 1..15: mol_type = other DNA
ataggtattaaggtt

SEQ ID NO: 28414 - DNA, 16 bp, synthetic construct
  misc_feature 1..16: note = Probe
  source 1..16: mol_type = other DNA
ataggtattaaggttt

SEQ ID NO: 28415 - DNA, 17 bp, synthetic construct
  misc_feature 1..17: note = Probe
  source 1..17: mol_type = other DNA
ataggtattaaggtttt

SEQ ID NO: 28416 - DNA, 22 bp, synthetic construct
  misc_feature 1..22: note = Probe
  source 1..22: mol_type = other DNA
ataggtggcacggagaattttg

SEQ ID NO: 28417 - DNA, 36 bp, synthetic construct
  misc_feature 1..36: note = Probe
  source 1..36: mol_type = other DNA
ataggtggcacggagaattttggattctcagggatg

SEQ ID NO: 28418 - DNA, 38 bp, synthetic construct
  misc_feature 1..38: note = Probe
  source 1..38: mol_type = other DNA
ataggtggcacggagaattttggattctcagggatggg

SEQ ID NO: 28419 - DNA, 36 bp, synthetic construct
  misc_feature 1..36: note = Probe
  source 1..36: mol_type = other DNA
ataggtggctcgttggtctaggggtatgattctcgc

SEQ ID NO: 28420 - DNA, 15 bp, synthetic construct
  misc_feature 1..15: note = Probe
  source 1..15: mol_type = other DNA
ataggtttggtccta

SEQ ID NO: 28421 - DNA, 17 bp, synthetic construct
  misc_feature 1..17: note = Probe
  source 1..17: mol_type = other DNA
ataggtttggtcctagc

SEQ ID NO: 28422 - DNA, 18 bp, synthetic construct
  misc_feature 1..18: note = Probe
  source 1..18: mol_type = other DNA
ataggtttggtcctagcc

SEQ ID NO: 28423 - DNA, 19 bp, synthetic construct
  misc_feature 1..19: note = Probe
  source 1..19: mol_type = other DNA
ataggtttggtcctagcct

SEQ ID NO: 28424 - DNA, 22 bp, synthetic construct
  misc_feature 1..22: note = Probe
  source 1..22: mol_type = other DNA
ataggtttggtcctagcctttc

SEQ ID NO: 28425 - DNA, 23 bp, synthetic construct
  misc_feature 1..23: note = Probe
  source 1..23: mol_type = other DNA
ataggtttggtcctagcctttct

SEQ ID NO: 28426 - DNA, 24 bp, synthetic construct
  misc_feature 1..24: note = Probe
  source 1..24: mol_type = other DNA
ataggtttggtcctagcctttcta

SEQ ID NO: 28427 - DNA, 25 bp, synthetic construct
  misc_feature 1..25: note = Probe
  source 1..25: mol_type = other DNA
ataggtttggtcctagcctttctat

SEQ ID NO: 28428 - DNA, 26 bp, synthetic construct
  misc_feature 1..26: note = Probe
  source 1..26: mol_type = other DNA
ataggtttggtcctagcctttctatt

SEQ ID NO: 28429 - DNA, 27 bp, synthetic construct
  misc_feature 1..27: note = Probe
  source 1..27: mol_type = other DNA
ataggtttggtcctagcctttctatta

SEQ ID NO: 28430 - DNA, 29 bp, synthetic construct
  misc_feature 1..29: note = Probe
  source 1..29: mol_type = other DNA
ataggtttggtcctagcctttctattagc

SEQ ID NO: 28431 - DNA, 15 bp, synthetic construct
  misc_feature 1..15: note = Probe
  source 1..15: mol_type = other DNA
atagtaccgttaact

SEQ ID NO: 28432 - DNA, 17 bp, synthetic construct
  misc_feature 1..17: note = Probe
  source 1..17: mol_type = other DNA
atagtaccgttaacttc

SEQ ID NO: 28433 - DNA, 35 bp, synthetic construct
  misc_feature 1..35: note = Probe
  source 1..35: mol_type = other DNA
atagtaccgttaacttccaattaactagttttgac

SEQ ID NO: 28434 - DNA, 36 bp, synthetic construct; identical to SEQ ID NO: 17131
  misc_feature 1..36: note = Probe
  source 1..36: mol_type = other DNA

SEQ ID NO: 28435 - DNA, 22 bp, synthetic construct
  misc_feature 1..22: note = Probe
  source 1..22: mol_type = other DNA
atagtggttagtactctgcgtt

SEQ ID NO: 28436 - DNA, 30 bp, synthetic construct
  misc_feature 1..30: note = Probe
  source 1..30: mol_type = other DNA
atagtttaaacaaaacgaatgatttcgact

SEQ ID NO: 28437 - DNA, 36 bp, synthetic construct; identical to SEQ ID NO: 3688
  misc_feature 1..36: note = Probe
  source 1..36: mol_type = other DNA

SEQ ID NO: 28438 - DNA, 32 bp, synthetic construct
  misc_feature 1..32: note = Probe
  source 1..32: mol_type = other DNA
atatagtttaaacaaaacgaatgatttcgact

SEQ ID NO: 28439 - DNA, 36 bp, synthetic construct
  misc_feature 1..36: note = Probe
  source 1..36: mol_type = other DNA
atatagtttaaccaaaacatcagattgtgaatctga

SEQ ID NO: 28440 - DNA, 36 bp, synthetic construct
  misc_feature 1..36: note = Probe
  source 1..36: mol_type = other DNA
atatcaggagaggcctggccgagtggttaaggcgat

SEQ ID NO: 28441 - DNA, 27 bp, synthetic construct
  misc_feature 1..27: note = Probe
  source 1..27: mol_type = other DNA
atatcattggtcgtggttgtagtccgt

SEQ ID NO: 28442 - DNA, 29 bp, synthetic construct
  misc_feature 1..29: note = Probe
  source 1..29: mol_type = other DNA
atatcattggtcgtggttgtagtccgtgc

SEQ ID NO: 28443 - DNA, 35 bp, synthetic construct; identical to SEQ ID NO: 12801
  misc_feature 1..35: note = Probe
  source 1..35: mol_type = other DNA

SEQ ID NO: 28444 - DNA, 38 bp, synthetic construct; identical to SEQ ID NO: 17142
  misc_feature 1..38: note = Probe
  source 1..38: mol_type = other DNA

SEQ ID NO: 28445 - DNA, 39 bp, synthetic construct; identical to SEQ ID NO: 3695
  misc_feature 1..39: note = Probe
  source 1..39: mol_type = other DNA

SEQ ID NO: 28446 - DNA, 26 bp, synthetic construct
  misc_feature 1..26: note = Probe
  source 1..26: mol_type = other DNA
atatccaaccttcagctatagggtgg

SEQ ID NO: 28447 - DNA, 29 bp, synthetic construct
  misc_feature 1..29: note = Probe
  source 1..29: mol_type = other DNA
atatccaaccttcagctatagggtggaga

SEQ ID NO: 28448 - DNA, 26 bp, synthetic construct
  misc_feature 1..26: note = Probe
  source 1..26: mol_type = other DNA
atatgcagtttctgtggtgtagtggt

SEQ ID NO: 28449 - DNA, 27 bp, synthetic construct
  misc_feature 1..27: note = Probe
  source 1..27: mol_type = other DNA
atatgcagtttctgtggtgtagtggtt

SEQ ID NO: 28450 - DNA, 31 bp, synthetic construct
  misc_feature 1..31: note = Probe
  source 1..31: mol_type = other DNA
atatgcagtttctgtggtgtagtggttatta

SEQ ID NO: 28451 - DNA, 32 bp, synthetic construct
  misc_feature 1..32: note = Probe
  source 1..32: mol_type = other DNA
atatgcagtttctgtggtgtagtggttattat

SEQ ID NO: 28452 - DNA, 33 bp, synthetic construct
  misc_feature 1..33: note = Probe
  source 1..33: mol_type = other DNA
atatgcagtttctgtggtgtagtggttattatg

SEQ ID NO: 28453 - DNA, 20 bp, synthetic construct
  misc_feature 1..20: note = Probe
  source 1..20: mol_type = other DNA
atatgtgttttccgtcctta

SEQ ID NO: 28454 - DNA, 22 bp, synthetic construct
  misc_feature 1..22: note = Probe
  source 1..22: mol_type = other DNA
atatgtgttttccgtccttact

SEQ ID NO: 28455 - DNA, 23 bp, synthetic construct
  misc_feature 1..23: note = Probe
  source 1..23: mol_type = other DNA
atatgtgttttccgtccttactt

SEQ ID NO: 28456 - DNA, 24 bp, synthetic construct
  misc_feature 1..24: note = Probe
  source 1..24: mol_type = other DNA
atatgtgttttccgtccttacttt

SEQ ID NO: 28457 - DNA, 25 bp, synthetic construct
  misc_feature 1..25: note = Probe
  source 1..25: mol_type = other DNA
atatgtgttttccgtccttactttt

SEQ ID NO: 28458 - DNA, 36 bp, synthetic construct
  misc_feature 1..36: note = Probe
  source 1..36: mol_type = other DNA
atattgaattgcaaattcgaagaagcagcttcaaac

SEQ ID NO: 28459 - DNA, 32 bp, synthetic construct
  misc_feature 1..32: note = Probe
  source 1..32: mol_type = other DNA
atcaagacgaggtggccgagtggttaaggcga

SEQ ID NO: 28460 - DNA, 15 bp, synthetic construct
  misc_feature 1..15: note = Probe
  source 1..15: mol_type = other DNA
atcacgtcggggtca

SEQ ID NO: 28461 - DNA, 28 bp, synthetic construct
  misc_feature 1..28: note = Probe
  source 1..28: mol_type = other DNA
atcacgtcggggtcaaacaaaacattgt

SEQ ID NO: 28462 - DNA, 29 bp, synthetic construct
  misc_feature 1..29: note = Probe
  source 1..29: mol_type = other DNA
atcacgtcggggtcaaacaaaacattgtt

SEQ ID NO: 28463 - DNA, 30 bp, synthetic construct
  misc_feature 1..30: note = Probe
  source 1..30: mol_type = other DNA
atcacgtcggggtcaaacaaaacattgttt

SEQ ID NO: 28464 - DNA, 18 bp, synthetic construct
  misc_feature 1..18: note = Probe
  source 1..18: mol_type = other DNA
atcacgtcggggtcagcg

SEQ ID NO: 28465 - DNA, 19 bp, synthetic construct
  misc_feature 1..19: note = Probe
  source 1..19: mol_type = other DNA
atcacgttcgcctaacacg

SEQ ID NO: 28466 - DNA, 19 bp, synthetic construct
  misc_feature 1..19: note = Probe
  source 1..19: mol_type = other DNA
atcacgttcgcctcacacg

SEQ ID NO: 28467 - DNA, 35 bp, synthetic construct
  misc_feature 1..35: note = Probe
  source 1..35: mol_type = other DNA
atcagaagattctaggttcgactcctggctggctc

SEQ ID NO: 28468 - DNA, 36 bp, synthetic construct; identical to SEQ ID NO: 12805
  misc_feature 1..36: note = Probe
  source 1..36: mol_type = other DNA

SEQ ID NO: 28469 - DNA, 38 bp, synthetic construct; identical to SEQ ID NO: 17162
  misc_feature 1..38: note = Probe
  source 1..38: mol_type = other DNA

SEQ ID NO: 28470 - DNA, 39 bp, synthetic construct; identical to SEQ ID NO: 3707
  misc_feature 1..39: note = Probe
  source 1..39: mol_type = other DNA

SEQ ID NO: 28471 - DNA, 38 bp, synthetic construct; identical to SEQ ID NO: 17164
  misc_feature 1..38: note = Probe
  source 1..38: mol_type = other DNA

SEQ ID NO: 28472 - DNA, 36 bp, synthetic construct; identical to SEQ ID NO: 17166
  misc_feature 1..36: note = Probe
  source 1..36: mol_type = other DNA

SEQ ID NO: 28473 - DNA, 38 bp, synthetic construct
  misc_feature 1..38: note = Probe
  source 1..38: mol_type = other DNA
atcagaagattgagggttcgagtcccttcgtggtcgtc

SEQ ID NO: 28474 - DNA, 36 bp, synthetic construct
  misc_feature 1..36: note = Probe
  source 1..36: mol_type = other DNA
atcagaagattgcaggttcgagtcctgccgcggtcg

SEQ ID NO: 28475 - DNA, 36 bp, synthetic construct; identical to SEQ ID NO: 17171
  misc_feature 1..36: note = Probe
  source 1..36: mol_type = other DNA

SEQ ID NO: 28476 - DNA, 23 bp, synthetic construct
  misc_feature 1..23: note = Probe
  source 1..23: mol_type = other DNA
atcagagaaaaagtctttaactc

SEQ ID NO: 28477 - DNA, 29 bp, synthetic construct
  misc_feature 1..29: note = Probe
  source 1..29: mol_type = other DNA
atcagagaaaaagtctttaactccaccat

SEQ ID NO: 28478 - DNA, 15 bp, synthetic construct
  misc_feature 1..15: note = Probe
  source 1..15: mol_type = other DNA
atcagattgtgaatc

SEQ ID NO: 28479 - DNA, 29 bp, synthetic construct
  misc_feature 1..29: note = Probe
  source 1..29: mol_type = other DNA
atcagattgtgaatctgacaacagaggct

SEQ ID NO: 28480 - DNA, 36 bp, synthetic construct
  misc_feature 1..36: note = Probe
  source 1..36: mol_type = other DNA
atcagattgtgaatctgacaacagaggcttacgacc

SEQ ID NO: 28481 - DNA, 33 bp, synthetic construct
  misc_feature 1..33: note = Probe
  source 1..33: mol_type = other DNA
atcaggagaggcctggccgagtggttaaggcga

SEQ ID NO: 28482 - DNA, 36 bp, synthetic construct; identical to SEQ ID NO: 17179
  misc_feature 1..36: note = Probe
  source 1..36: mol_type = other DNA

SEQ ID NO: 28483 - DNA, 19 bp, synthetic construct
  misc_feature 1..19: note = Probe
  source 1..19: mol_type = other DNA
atcattggtcgtggttgta

SEQ ID NO: 28484 - DNA, 24 bp, synthetic construct
  misc_feature 1..24: note = Probe
  source 1..24: mol_type = other DNA
atcattggtcgtggttgtagtccg

SEQ ID NO: 28485 - DNA, 26 bp, synthetic construct
  misc_feature 1..26: note = Probe
  source 1..26: mol_type = other DNA
atcattggtcgtggttgtagtccgtg

SEQ ID NO: 28486 - DNA, 27 bp, synthetic construct
  misc_feature 1..27: note = Probe
  source 1..27: mol_type = other DNA
atcattggtcgtggttgtagtccgtgc

SEQ ID NO: 28487 - DNA, 28 bp, synthetic construct
  misc_feature 1..28: note = Probe
  source 1..28: mol_type = other DNA
atcattggtcgtggttgtagtccgtgcg

SEQ ID NO: 28488 - DNA, 29 bp, synthetic construct
  misc_feature 1..29: note = Probe
  source 1..29: mol_type = other DNA
atcattggtcgtggttgtagtccgtgcga

SEQ ID NO: 28489 - DNA, 34 bp, synthetic construct; identical to SEQ ID NO: 12808
  misc_feature 1..34: note = Probe
  source 1..34: mol_type = other DNA

SEQ ID NO: 28490 - DNA, 35 bp, synthetic construct
  misc_feature 1..35: note = Probe
  source 1..35: mol_type = other DNA
atcattggtcgtggttgtagtccgtgcgagaataa

SEQ ID NO: 28491 - DNA, 36 bp, synthetic construct
  misc_feature 1..36: note = Probe
  source 1..36: mol_type = other DNA
atcattggtcgtggttgtagtccgtgcgagaataat

SEQ ID NO: 28492 - DNA, 15 bp, synthetic construct
  misc_feature 1..15: note = Probe
  source 1..15: mol_type = other DNA
atccaatggacatat

SEQ ID NO: 28493 - DNA, 18 bp, synthetic construct
  misc_feature 1..18: note = Probe
  source 1..18: mol_type = other DNA
atccagcgatccgagttc

SEQ ID NO: 28494 - DNA, 18 bp, synthetic construct
  misc_feature 1..18: note = Probe
  source 1..18: mol_type = other DNA
atccaggtgccccctaca

SEQ ID NO: 28495 - DNA, 16 bp, synthetic construct
  misc_feature 1..16: note = Probe
  source 1..16: mol_type = other DNA
atccaggtgccccctc

SEQ ID NO: 28496 - DNA, 17 bp, synthetic construct
  misc_feature 1..17: note = Probe
  source 1..17: mol_type = other DNA
atccaggtgccccctcc

SEQ ID NO: 28497 - DNA, 18 bp, synthetic construct
  misc_feature 1..18: note = Probe
  source 1..18: mol_type = other DNA
atccaggtgccccctccc

SEQ ID NO: 28498 - DNA, 36 bp, synthetic construct
  misc_feature 1..36: note = Probe
  source 1..36: mol_type = other DNA
atccattggggtttccccgcgcaggttcgaatcctg

SEQ ID NO: 28499 - DNA, 15 bp, synthetic construct
  misc_feature 1..15: note = Probe
  source 1..15: mol_type = other DNA
atccattggtcttag

SEQ ID NO: 28500 - DNA, 17 bp, synthetic construct
  misc_feature 1..17: note = Probe
  source 1..17: mol_type = other DNA
atccattggtcttaggc

SEQ ID NO: 28501 - DNA, 21 bp, synthetic construct
  misc_feature 1..21: note = Probe
  source 1..21: mol_type = other DNA
atccattggtcttaggcccca

SEQ ID NO: 28502 - DNA, 24 bp, synthetic construct
  misc_feature 1..24: note = Probe
  source 1..24: mol_type = other DNA
atccattggtcttaggccccaaaa

SEQ ID NO: 28503 - DNA, 25 bp, synthetic construct
  misc_feature 1..25: note = Probe
  source 1..25: mol_type = other DNA
atccattggtcttaggccccaaaaa

SEQ ID NO: 28504 - DNA, 26 bp, synthetic construct
  misc_feature 1..26: note = Probe
  source 1..26: mol_type = other DNA
atccattggtcttaggccccaaaaat

SEQ ID NO: 28505 - DNA, 31 bp, synthetic construct
  misc_feature 1..31: note = Probe
  source 1..31: mol_type = other DNA
atccattggtcttaggccccaaaaattttgg

SEQ ID NO: 28506 - DNA, 33 bp, synthetic construct
  misc_feature 1..33: note = Probe
  source 1..33: mol_type = other DNA
atccattggtcttaggccccaaaaattttggtg

SEQ ID NO: 28507 - DNA, 38 bp, synthetic construct
  misc_feature 1..38: note = Probe
  source 1..38: mol_type = other DNA
atccattggtcttaggccccaaaaattttggtgcaact

SEQ ID NO: 28508 - DNA, 39 bp, synthetic construct
  misc_feature 1..39: note = Probe
  source 1..39: mol_type = other DNA
atccattggtcttaggccccaaaaattttggtgcaactc

SEQ ID NO: 28509 - DNA, 40 bp, synthetic construct
  misc_feature 1..40: note = Probe
  source 1..40: mol_type = other DNA
atccattggtcttaggccccaaaaattttggtgcaactcc

SEQ ID NO: 28510 - DNA, 41 bp, synthetic construct
  misc_feature 1..41: note = Probe
  source 1..41: mol_type = other DNA
atccattggtcttaggccccaaaaattttggtgcaactcca

SEQ ID NO: 28511 - DNA, 45 bp, synthetic construct; identical to SEQ ID NO: 3727
  misc_feature 1..45: note = Probe
  source 1..45: mol_type = other DNA

SEQ ID NO: 28512 - DNA, 50 bp, synthetic construct
  misc_feature 1..50: note = Probe
  source 1..50: mol_type = other DNA
atccattggtcttaggccccaaaaattttggtgcaactccaaataaaagt

SEQ ID NO: 28513 - DNA, 15 bp, synthetic construct
  misc_feature 1..15: note = Probe
  source 1..15: mol_type = other DNA
atcccaccactgcca

SEQ ID NO: 28514 - DNA, 16 bp, synthetic construct
  misc_feature 1..16: note = Probe
  source 1..16: mol_type = other DNA
atcccaccagagtcga

SEQ ID NO: 28515 - DNA, 28 bp, synthetic construct
  misc_feature 1..28: note = Probe
  source 1..28: mol_type = other DNA
atcccacccagggacggaagtcgcattt

SEQ ID NO: 28516 - DNA, 16 bp, synthetic construct
  misc_feature 1..16: note = Probe
  source 1..16: mol_type = other DNA
atcccaccctcgtcgg

SEQ ID NO: 28517 - DNA, 15 bp, synthetic construct
  misc_feature 1..15: note = Probe
  source 1..15: mol_type = other DNA
atcccaccgctgcca

SEQ ID NO: 28518 - DNA, 16 bp, synthetic construct
  misc_feature 1..16: note = Probe
  source 1..16: mol_type = other DNA
atcccaccgctgccaa

SEQ ID NO: 28519 - DNA, 17 bp, synthetic construct
  misc_feature 1..17: note = Probe
  source 1..17: mol_type = other DNA
atcccaccgctgccaca

SEQ ID NO: 28520 - DNA, 18 bp, synthetic construct
  misc_feature 1..18: note = Probe
  source 1..18: mol_type = other DNA
atcccaccgctgccacac

SEQ ID NO: 28521 - DNA, 17 bp, synthetic construct
  misc_feature 1..17: note = Probe
  source 1..17: mol_type = other DNA
atcccaccgctgccagc

SEQ ID NO: 28522 - DNA, 18 bp, synthetic construct
  misc_feature 1..18: note = Probe
  source 1..18: mol_type = other DNA
atcccaccgctgccagct

SEQ ID NO: 28523 - DNA, 17 bp, synthetic construct
  misc_feature 1..17: note = Probe
  source 1..17: mol_type = other DNA
atcccaccgctgccagt

SEQ ID NO: 28524 - DNA, 16 bp, synthetic construct
  misc_feature 1..16: note = Probe
  source 1..16: mol_type = other DNA
atcccaccttcgtcga

SEQ ID NO: 28525 - DNA, 17 bp, synthetic construct
  misc_feature 1..17: note = Probe
  source 1..17: mol_type = other DNA
atcccaccttcgtcgac

SEQ ID NO: 28526 - DNA, 15 bp, synthetic construct
  misc_feature 1..15: note = Probe
  source 1..15: mol_type = other DNA
atcccactcctgaca

SEQ ID NO: 28527 - DNA, 17 bp, synthetic construct
  misc_feature 1..17: note = Probe
  source 1..17: mol_type = other DNA
atcccactcctgacaat

SEQ ID NO: 28528 - DNA, 18 bp, synthetic construct
  misc_feature 1..18: note = Probe
  source 1..18: mol_type = other DNA
atcccactcctgacaata

SEQ ID NO: 28529 - DNA, 17 bp, synthetic construct
  misc_feature 1..17: note = Probe
  source 1..17: mol_type = other DNA
atcccactcctgacagt

SEQ ID NO: 28530 - DNA, 15 bp, synthetic construct
  misc_feature 1..15: note = Probe
  source 1..15: mol_type = other DNA
atcccacttctgaca

SEQ ID NO: 28531 - DNA, 16 bp, synthetic construct
  misc_feature 1..16: note = Probe
  source 1..16: mol_type = other DNA
atcccacttctgacac

SEQ ID NO: 28532 - DNA, 17 bp, synthetic construct
  misc_feature 1..17: note = Probe
  source 1..17: mol_type = other DNA
atcccacttctgacaca

SEQ ID NO: 28533 - DNA, 18 bp, synthetic construct
  misc_feature 1..18: note = Probe
  source 1..18: mol_type = other DNA
atcccacttctgacacaa

SEQ ID NO: 28534 - DNA, 19 bp, synthetic construct
  misc_feature 1..19: note = Probe
  source 1..19: mol_type = other DNA
atcccacttctgacacata

SEQ ID NO: 28535 - DNA, 19 bp, synthetic construct
  misc_feature 1..19: note = Probe
  source 1..19: mol_type = other DNA
atcccacttctgacacatt

SEQ ID NO: 28536 - DNA, 16 bp, synthetic construct
  misc_feature 1..16: note = Probe
  source 1..16: mol_type = other DNA
atcccagcggtgcctc

SEQ ID NO: 28537 - DNA, 18 bp, synthetic construct
  misc_feature 1..18: note = Probe
  source 1..18: mol_type = other DNA
atcccagcggtgcctcaa

SEQ ID NO: 28538 - DNA, 17 bp, synthetic construct
  misc_feature 1..17: note = Probe
  source 1..17: mol_type = other DNA
atcccagcggtgcctcc

SEQ ID NO: 28539 - DNA, 18 bp, synthetic construct
  misc_feature 1..18: note = Probe
  source 1..18: mol_type = other DNA
atcccagcggtgcctccg

SEQ ID NO: 28540 - DNA, 36 bp, synthetic construct
  misc_feature 1..36: note = Probe
  source 1..36: mol_type = other DNA
atcccagggtcgtgggttcgagccccacgttgggcg

SEQ ID NO: 28541 - DNA, 15 bp, synthetic construct
  misc_feature 1..15: note = Probe
  source 1..15: mol_type = other DNA
atcccagtagagcct

SEQ ID NO: 28542 - DNA, 16 bp, synthetic construct
  misc_feature 1..16: note = Probe
  source 1..16: mol_type = other DNA
atcccagtagagcctt

SEQ ID NO: 28543 - DNA, 17 bp, synthetic construct
  misc_feature 1..17: note = Probe
  source 1..17: mol_type = other DNA
atcccatcctcgtcgct

SEQ ID NO: 28544 - DNA, 17 bp, synthetic construct
  misc_feature 1..17: note = Probe
  source 1..17: mol_type = other DNA
atcccatcctcgtcggc

SEQ ID NO: 28545 - DNA, 18 bp, synthetic construct
  misc_feature 1..18: note = Probe
  source 1..18: mol_type = other DNA
atcccatcctcgtcggct

SEQ ID NO: 28546 - DNA, 19 bp, synthetic construct
  misc_feature 1..19: note = Probe
  source 1..19: mol_type = other DNA
atccccagcacctccacaa

SEQ ID NO: 28547 - DNA, 17 bp, synthetic construct
  misc_feature 1..17: note = Probe
  source 1..17: mol_type = other DNA
atccccggcatctccaa

SEQ ID NO: 28548 - DNA, 17 bp, synthetic construct
  misc_feature 1..17: note = Probe
  source 1..17: mol_type = other DNA
atccccggcatctccag

SEQ ID NO: 28549 - DNA, 17 bp, synthetic construct
  misc_feature 1..17: note = Probe
  source 1..17: mol_type = other DNA
atccccggcatctccat

SEQ ID NO: 28550 - DNA, 15 bp, synthetic construct
  misc_feature 1..15: note = Probe
  source 1..15: mol_type = other DNA
atccccgtacgggcc

SEQ ID NO: 28551 - DNA, 29 bp, synthetic construct
  misc_feature 1..29: note = Probe
  source 1..29: mol_type = other DNA
atccccgtacgggccaggattgaaacttt

SEQ ID NO: 28552 - DNA, 30 bp, synthetic construct
  misc_feature 1..30: note = Probe
  source 1..30: mol_type = other DNA
atccccgtacgggccaggattgaaactttt

SEQ ID NO: 28553 - DNA, 16 bp, synthetic construct
  misc_feature 1..16: note = Probe
  source 1..16: mol_type = other DNA
atcccctggcccaacc

SEQ ID NO: 28554 - DNA, 17 bp, synthetic construct
  misc_feature 1..17: note = Probe
  source 1..17: mol_type = other DNA
atcccctggcccaaccc

SEQ ID NO: 28555 - DNA, 18 bp, synthetic construct
  misc_feature 1..18: note = Probe
  source 1..18: mol_type = other DNA
atcccctggcccaacccg

SEQ ID NO: 28556 - DNA, 20 bp, synthetic construct
  misc_feature 1..20: note = Probe
  source 1..20: mol_type = other DNA
atcccctggcccaacccgtc

SEQ ID NO: 28557 - DNA, 26 bp, synthetic construct
  misc_feature 1..26: note = Probe
  source 1..26: mol_type = other DNA
atcccctggcccaacccgtcatctac

SEQ ID NO: 28558 - DNA, 15 bp, synthetic construct
  misc_feature 1..15: note = Probe
  source 1..15: mol_type = other DNA
atcccggacgagccc

SEQ ID NO: 28559 - DNA, 16 bp, synthetic construct
  misc_feature 1..16: note = Probe
  source 1..16: mol_type = other DNA
atcccggacgagccca

SEQ ID NO: 28560 - DNA, 17 bp, synthetic construct
  misc_feature 1..17: note = Probe
  source 1..17: mol_type = other DNA
atcccggacgagcccac

SEQ ID NO: 28561 - DNA, 18 bp, synthetic construct
  misc_feature 1..18: note = Probe
  source 1..18: mol_type = other DNA
atcccggacgagcccaca

SEQ ID NO: 28562 - DNA, 18 bp, synthetic construct
  misc_feature 1..18: note = Probe
  source 1..18: mol_type = other DNA
atcccggacgagcccact

SEQ ID NO: 28563 - DNA, 19 bp, synthetic construct
  misc_feature 1..19: note = Probe
  source 1..19: mol_type = other DNA
atcccggacgagcccactt

SEQ ID NO: 28564 - DNA, 20 bp, synthetic construct
  misc_feature 1..20: note = Probe
  source 1..20: mol_type = other DNA
atcccggacgagcccacttc

SEQ ID NO: 28565 - DNA, 21 bp, synthetic construct
  misc_feature 1..21: note = Probe
  source 1..21: mol_type = other DNA
atcccggacgagcccacttca

SEQ ID NO: 28566 - DNA, 20 bp, synthetic construct
  misc_feature 1..20: note = Probe
  source 1..20: mol_type = other DNA
atcccggacgagcccacttt

SEQ ID NO: 28567 - DNA, 21 bp, synthetic construct
  misc_feature 1..21: note = Probe
  source 1..21: mol_type = other DNA
atcccggacgagcccactttt

SEQ ID NO: 28568 - DNA, 17 bp, synthetic construct
  misc_feature 1..17: note = Probe
  source 1..17: mol_type = other DNA
atcccggacgagcccag

SEQ ID NO: 28569 - DNA, 22 bp, synthetic construct
  misc_feature 1..22: note = Probe
  source 1..22: mol_type = other DNA
atcccggacgagcccaggcttt

SEQ ID NO: 28570 - DNA, 16 bp, synthetic construct
  misc_feature 1..16: note = Probe
  source 1..16: mol_type = other DNA
atcccggacgagcccc

SEQ ID NO: 28571 - DNA, 17 bp, synthetic construct
  misc_feature 1..17: note = Probe
  source 1..17: mol_type = other DNA
atcccggacgagccccc

SEQ ID NO: 28572 - DNA, 18 bp, synthetic construct
  misc_feature 1..18: note = Probe
  source 1..18: mol_type = other DNA
atcccggacgagccccct

SEQ ID NO: 28573 - DNA, 19 bp, synthetic construct
  misc_feature 1..19: note = Probe
  source 1..19: mol_type = other DNA
atcccggacgagccccctt

SEQ ID NO: 28574 - DNA, 20 bp, synthetic construct
  misc_feature 1..20: note = Probe
  source 1..20: mol_type = other DNA
atcccggacgagcccccttt

SEQ ID NO: 28575 - DNA, 21 bp, synthetic construct
  misc_feature 1..21: note = Probe
  source 1..21: mol_type = other DNA
atcccggacgagccccctttt

SEQ ID NO: 28576 - DNA, 17 bp, synthetic construct
  misc_feature 1..17: note = Probe
  source 1..17: mol_type = other DNA
atcccggacgagcccct

SEQ ID NO: 28577 - DNA, 18 bp, synthetic construct
  misc_feature 1..18: note = Probe
  source 1..18: mol_type = other DNA
atcccggacgagcccctc

SEQ ID NO: 28578 - DNA, 21 bp, synthetic construct
  misc_feature 1..21: note = Probe
  source 1..21: mol_type = other DNA
atcccggacgagcccctcttt

SEQ ID NO: 28579 - DNA, 18 bp, synthetic construct
  misc_feature 1..18: note = Probe
  source 1..18: mol_type = other DNA
atcccggacgagcccctt

SEQ ID NO: 28580 - DNA, 19 bp, synthetic construct
  misc_feature 1..19: note = Probe
  source 1..19: mol_type = other DNA
atcccggacgagccccttt

SEQ ID NO: 28581 - DNA, 16 bp, synthetic construct
  misc_feature 1..16: note = Probe
  source 1..16: mol_type = other DNA
atcccggacgagcccg

SEQ ID NO: 28582 - DNA, 17 bp, synthetic construct
  misc_feature 1..17: note = Probe
  source 1..17: mol_type = other DNA
atcccggacgagcccgc

SEQ ID NO: 28583 - DNA, 18 bp, synthetic construct
  misc_feature 1..18: note = Probe
  source 1..18: mol_type = other DNA
atcccggacgagcccgct

SEQ ID NO: 28584 - DNA, 16 bp, synthetic construct
  misc_feature 1..16: note = Probe
  source 1..16: mol_type = other DNA
atcccggacgagccct

SEQ ID NO: 28585 - DNA, 17 bp, synthetic construct
  misc_feature 1..17: note = Probe
  source 1..17: mol_type = other DNA
atcccggacgagcccta

SEQ ID NO: 28586 - DNA, 17 bp, synthetic construct
  misc_feature 1..17: note = Probe
  source 1..17: mol_type = other DNA
atcccggacgagccctc

SEQ ID NO: 28587 - DNA, 18 bp, synthetic construct
  misc_feature 1..18: note = Probe
  source 1..18: mol_type = other DNA
atcccggacgagccctca

SEQ ID NO: 28588 - DNA, 19 bp, synthetic construct
  misc_feature 1..19: note = Probe
  source 1..19: mol_type = other DNA
atcccggacgagccctcat

SEQ ID NO: 28589 - DNA, 20 bp, synthetic construct
  misc_feature 1..20: note = Probe
  source 1..20: mol_type = other DNA
atcccggacgagccctcatt

SEQ ID NO: 28590 - DNA, 21 bp, synthetic construct
  misc_feature 1..21: note = Probe
  source 1..21: mol_type = other DNA
atcccggacgagccctcattt

SEQ ID NO: 28591 - DNA, 22 bp, synthetic construct
  misc_feature 1..22: note = Probe
  source 1..22: mol_type = other DNA
atcccggacgagccctcatttt

SEQ ID NO: 28592 - DNA, 23 bp, synthetic construct
  misc_feature 1..23: note = Probe
  source 1..23: mol_type = other DNA
atcccggacgagccctcattttc

SEQ ID NO: 28593 - DNA, 24 bp, synthetic construct
  misc_feature 1..24: note = Probe
  source 1..24: mol_type = other DNA
atcccggacgagccctcattttct

SEQ ID NO: 28594 - DNA, 18 bp, synthetic construct
  misc_feature 1..18: note = Probe
  source 1..18: mol_type = other DNA
atcccggacgagccctcc

SEQ ID NO: 28595 - DNA, 22 bp, synthetic construct
  misc_feature 1..22: note = Probe
  source 1..22: mol_type = other DNA
atcccggacgagccctccttta

SEQ ID NO: 28596 - DNA, 18 bp, synthetic construct
  misc_feature 1..18: note = Probe
  source 1..18: mol_type = other DNA
atcccggacgagccctcg

SEQ ID NO: 28597 - DNA, 19 bp, synthetic construct
  misc_feature 1..19: note = Probe
  source 1..19: mol_type = other DNA
atcccggacgagccctcgc

SEQ ID NO: 28598 - DNA, 19 bp, synthetic construct
  misc_feature 1..19: note = Probe
  source 1..19: mol_type = other DNA
atcccggacgagccctcgt

SEQ ID NO: 28599 - DNA, 17 bp, synthetic construct
  misc_feature 1..17: note = Probe
  source 1..17: mol_type = other DNA
atcccggacgagccctg

SEQ ID NO: 28600 - DNA, 18 bp, synthetic construct
  misc_feature 1..18: note = Probe
  source 1..18: mol_type = other DNA
atcccggacgagccctgt

SEQ ID NO: 28601 - DNA, 19 bp, synthetic construct
  misc_feature 1..19: note = Probe
  source 1..19: mol_type = other DNA
atcccggacgagccctgtt

SEQ ID NO: 28602 - DNA, 20 bp, synthetic construct
  misc_feature 1..20: note = Probe
  source 1..20: mol_type = other DNA
atcccggacgagccctgttt

SEQ ID NO: 28603 - DNA, 21 bp, synthetic construct
  misc_feature 1..21: note = Probe
  source 1..21: mol_type = other DNA
atcccggacgagccctgtttt

SEQ ID NO: 28604 - DNA, 17 bp, synthetic construct
  misc_feature 1..17: note = Probe
  source 1..17: mol_type = other DNA
atcccgggtttcggcac

SEQ ID NO: 28605 - DNA, 18 bp, synthetic construct
  misc_feature 1..18: note = Probe
  source 1..18: mol_type = other DNA
atcccgggtttcggcact

SEQ ID NO: 28606 - DNA, 18 bp, synthetic construct
  misc_feature 1..18: note = Probe
  source 1..18: mol_type = other DNA
atcccgggtttcggcagc

SEQ ID NO: 28607 - DNA, 17 bp, synthetic construct
  misc_feature 1..17: note = Probe
  source 1..17: mol_type = other DNA
atccggccggttagctc

SEQ ID NO: 28608 - DNA, 18 bp, synthetic construct
  misc_feature 1..18: note = Probe
  source 1..18: mol_type = other DNA
atccggccggttagctca

SEQ ID NO: 28609 - DNA, 20 bp, synthetic construct
  misc_feature 1..20: note = Probe
  source 1..20: mol_type = other DNA
atccggccggttagctcagt

SEQ ID NO: 28610 - DNA, 28 bp, synthetic construct
  misc_feature 1..28: note = Probe
  source 1..28: mol_type = other DNA
atccggccggttagctcagttggttaga

SEQ ID NO: 28611 - DNA, 34 bp, synthetic construct
  misc_feature 1..34: note = Probe
  source 1..34: mol_type = other DNA
atccggccggttagctcagttggttagagcgtgg

SEQ ID NO: 28612 - DNA, 35 bp, synthetic construct
  misc_feature 1..35: note = Probe
  source 1..35: mol_type = other DNA
atccggccggttagctcagttggttagagcgtggt

SEQ ID NO: 28613 - DNA, 36 bp, synthetic construct
  misc_feature 1..36: note = Probe
  source 1..36: mol_type = other DNA
atccggccggttagctcagttggttagagcgtggtg

SEQ ID NO: 28614 - DNA, 42 bp, synthetic construct
  misc_feature 1..42: note = Probe
  source 1..42: mol_type = other DNA
atccggccggttagctcagttggttagagcgtggtgctaata

SEQ ID NO: 28615 - DNA, 15 bp, synthetic construct
  misc_feature 1..15: note = Probe
  source 1..15: mol_type = other DNA
atccggctcgaagga

SEQ ID NO: 28616 - DNA, 17 bp, synthetic construct
  misc_feature 1..17: note = Probe
  source 1..17: mol_type = other DNA
atccggctcgaaggacg

SEQ ID NO: 28617 - DNA, 18 bp, synthetic construct
  misc_feature 1..18: note = Probe
  source 1..18: mol_type = other DNA
atccggctcgaaggacga

SEQ ID NO: 28618 - DNA, 16 bp, synthetic construct
  misc_feature 1..16: note = Probe
  source 1..16: mol_type = other DNA
atccggctcggaggac

SEQ ID NO: 28619 - DNA, 17 bp, synthetic construct
  misc_feature 1..17: note = Probe
  source 1..17: mol_type = other DNA
atccggctcggaggacg

SEQ ID NO: 28620 - DNA, 15 bp, synthetic construct
  misc_feature 1..15: note = Probe
  source 1..15: mol_type = other DNA
atccgggtgccccct

SEQ ID NO: 28621 - DNA, 17 bp, synthetic construct
  misc_feature 1..17: note = Probe
  source 1..17: mol_type = other DNA
atccgggtgccccctca

SEQ ID NO: 28622 - DNA, 18 bp, synthetic construct
  misc_feature 1..18: note = Probe
  source 1..18: mol_type = other DNA
atccgggtgccccctcaa

SEQ ID NO: 28623 - DNA, 17 bp, synthetic construct
  misc_feature 1..17: note = Probe
  source 1..17: mol_type = other DNA
atccgggtgccccctcg

SEQ ID NO: 28624 - DNA, 18 bp, synthetic construct
  misc_feature 1..18: note = Probe
  source 1..18: mol_type = other DNA
atccgggtgccccctcgg

SEQ ID NO: 28625 - DNA, 17 bp, synthetic construct
  misc_feature 1..17: note = Probe
  source 1..17: mol_type = other DNA
atccgggtgccccctct

SEQ ID NO: 28626 - DNA, 18 bp, synthetic construct
  misc_feature 1..18: note = Probe
  source 1..18: mol_type = other DNA
atccgggtgccccctctg

SEQ ID NO: 28627 - DNA, 17 bp, synthetic construct
  misc_feature 1..17: note = Probe
  source 1..17: mol_type = other DNA
atccgggtgccccctgc

SEQ ID NO: 28628 - DNA, 17 bp, synthetic construct
  misc_feature 1..17: note = Probe
  source 1..17: mol_type = other DNA
atccgggtgcccccttc

SEQ ID NO: 28629 - DNA, 15 bp, synthetic construct
  misc_feature 1..15: note = Probe
  source 1..15: mol_type = other DNA
atcctgccgactacg

SEQ ID NO: 28630 - DNA, 16 bp, synthetic construct
  misc_feature 1..16: note = Probe
  source 1..16: mol_type = other DNA
atcctgccgactacga

SEQ ID NO: 28631 - DNA, 16 bp, synthetic construct
  misc_feature 1..16: note = Probe
  source 1..16: mol_type = other DNA
atcctgccgactacgg

SEQ ID NO: 28632 - DNA, 17 bp, synthetic construct
  misc_feature 1..17: note = Probe
  source 1..17: mol_type = other DNA
atcctgccgactacggc

SEQ ID NO: 28633 - DNA, 18 bp, synthetic construct
  misc_feature 1..18: note = Probe
  source 1..18: mol_type = other DNA
atcctgccgactacggca

SEQ ID NO: 28634 - DNA, 18 bp, synthetic construct
  misc_feature 1..18: note = Probe
  source 1..18: mol_type = other DNA
atcctgccgactacggcg

SEQ ID NO: 28635 - DNA, 18 bp, synthetic construct
  misc_feature 1..18: note = Probe
  source 1..18: mol_type = other DNA
atcctgccgactacggga

SEQ ID NO: 28636 - DNA, 16 bp, synthetic construct
  misc_feature 1..16: note = Probe
  source 1..16: mol_type = other DNA
atcctgccgactacgt

SEQ ID NO: 28637 - DNA, 17 bp, synthetic construct
  misc_feature 1..17: note = Probe
  source 1..17: mol_type = other DNA
atcctgccgactacgtc

SEQ ID NO: 28638 - DNA, 18 bp, synthetic construct
  misc_feature 1..18: note = Probe
  source 1..18: mol_type = other DNA
atcctgccgactacgtca

SEQ ID NO: 28639 - DNA, 16 bp, synthetic construct
  misc_feature 1..16: note = Probe
  source 1..16: mol_type = other DNA
atcctgtcggctacgg

SEQ ID NO: 28640 - DNA, 15 bp, synthetic construct
  misc_feature 1..15: note = Probe
  source 1..15: mol_type = other DNA
atccttaggtcgctg

SEQ ID NO: 28641 - DNA, 17 bp, synthetic construct
  misc_feature 1..17: note = Probe
  source 1..17: mol_type = other DNA
atccttaggtcgctggt

SEQ ID NO: 28642 - DNA, 23 bp, synthetic construct
  misc_feature 1..23: note = Probe
  source 1..23: mol_type = other DNA
atccttaggtcgctggttcgatt

SEQ ID NO: 28643 - DNA, 30 bp, synthetic construct
  misc_feature 1..30: note = Probe
  source 1..30: mol_type = other DNA
atccttaggtcgctggttcgattccggctc

SEQ ID NO: 28644 - DNA, 35 bp, synthetic construct
  misc_feature 1..35: note = Probe
  source 1..35: mol_type = other DNA
atccttaggtcgctggttcgattccggctcgaagg

SEQ ID NO: 28645 - DNA, 50 bp, synthetic construct; identical to SEQ ID NO: 3753
  misc_feature 1..50: note = Probe
  source 1..50: mol_type = other DNA

SEQ ID NO: 28646 - DNA, 19 bp, synthetic construct
  misc_feature 1..19: note = Probe
  source 1..19: mol_type = other DNA
atcgaaaccatcctctgct

SEQ ID NO: 28647 - DNA, 19 bp, synthetic construct
  misc_feature 1..19: note = Probe
  source 1..19: mol_type = other DNA
atcgaacccatccctgaga

SEQ ID NO: 28648 - DNA, 31 bp, synthetic construct; identical to SEQ ID NO: 17315
  misc_feature 1..31: note = Probe
  source 1..31: mol_type = other DNA

SEQ ID NO: 28649 - DNA, 36 bp, synthetic construct
  misc_feature 1..36: note = Probe
  source 1..36: mol_type = other DNA
atcgcataaaacttaaaactttacagtcagaggttc

SEQ ID NO: 28650 - DNA, 36 bp, synthetic construct; identical to SEQ ID NO: 17323
  misc_feature 1..36: note = Probe
  source 1..36: mol_type = other DNA

SEQ ID NO: 28651 - DNA, 36 bp, synthetic construct
  misc_feature 1..36: note = Probe
  source 1..36: mol_type = other DNA
atcgggaggtagcgtggccgagtggtctaaggcgct

SEQ ID NO: 28652 - DNA, 15 bp, synthetic construct
  misc_feature 1..15: note = Probe
  source 1..15: mol_type = other DNA
atcgggcccataccc

SEQ ID NO: 28653 - DNA, 29 bp, synthetic construct
  misc_feature 1..29: note = Probe
  source 1..29: mol_type = other DNA
atcgggcccataccccgaaaatgttggtt

SEQ ID NO: 28654 - DNA, 36 bp, synthetic construct
  misc_feature 1..36: note = Probe
  source 1..36: mol_type = other DNA
atcgggcccataccccgaaaatgttggttataccct

SEQ ID NO: 28655 - DNA, 26 bp, synthetic construct
  misc_feature 1..26: note = Probe
  source 1..26: mol_type = other DNA
atcgggcgcccggctagctcagtcgg

SEQ ID NO: 28656 - DNA, 27 bp, synthetic construct
  misc_feature 1..27: note = Probe
  source 1..27: mol_type = other DNA
atcgggcgcccggctagctcagtcggt

SEQ ID NO: 28657 - DNA, 28 bp, synthetic construct
  misc_feature 1..28: note = Probe
  source 1..28: mol_type = other DNA
atcgggcgcccggctagctcagtcggta

SEQ ID NO: 28658 - DNA, 30 bp, synthetic construct
  misc_feature 1..30: note = Probe
  source 1..30: mol_type = other DNA
atcgggcgcccggctagctcagtcggtaga

SEQ ID NO: 28659 - DNA, 31 bp, synthetic construct
  misc_feature 1..31: note = Probe
  source 1..31: mol_type = other DNA
atcgggcgcccggctagctcagtcggtagag

SEQ ID NO: 28660 - DNA, 36 bp, synthetic construct
  misc_feature 1..36: note = Probe
  source 1..36: mol_type = other DNA
atcgggcgcccggctagctcagtcggtagagcatga

SEQ ID NO: 28661 - DNA, 38 bp, synthetic construct
  misc_feature 1..38: note = Probe
  source 1..38: mol_type = other DNA
atcgggcgcccggctagctcagtcggtagagcatgaga

SEQ ID NO: 28662 - DNA, 39 bp, synthetic construct
  misc_feature 1..39: note = Probe
  source 1..39: mol_type = other DNA
atcgggcgcccggctagctcagtcggtagagcatgagac

SEQ ID NO: 28663 - DNA, 40 bp, synthetic construct
  misc_feature 1..40: note = Probe
  source 1..40: mol_type = other DNA
atcgggcgcccggctagctcagtcggtagagcatgagact

SEQ ID NO: 28664 - DNA, 41 bp, synthetic construct
  misc_feature 1..41: note = Probe
  source 1..41: mol_type = other DNA
atcgggcgcccggctagctcagtcggtagagcatgagactc

SEQ ID NO: 28665 - DNA, 44 bp, synthetic construct
  misc_feature 1..44: note = Probe
  source 1..44: mol_type = other DNA
atcgggcgcccggctagctcagtcggtagagcatgagactctta

SEQ ID NO: 28666 - DNA, 22 bp, synthetic construct
  misc_feature 1..22: note = Probe
  source 1..22: mol_type = other DNA
atcggtgcatgggtggttcagt

SEQ ID NO: 28667 - DNA, 23 bp, synthetic construct
  misc_feature 1..23: note = Probe
  source 1..23: mol_type = other DNA
atcggtgcatgggtggttcagtg

SEQ ID NO: 28668 - DNA, 24 bp, synthetic construct
  misc_feature 1..24: note = Probe
  source 1..24: mol_type = other DNA
atcggtgcatgggtggttcagtgg

SEQ ID NO: 28669 - DNA, 25 bp, synthetic construct
  misc_feature 1..25: note = Probe
  source 1..25: mol_type = other DNA
atcggtgcatgggtggttcagtggt

SEQ ID NO: 28670 - DNA, 26 bp, synthetic construct
  misc_feature 1..26: note = Probe
  source 1..26: mol_type = other DNA
atcggtgcatgggtggttcagtggta

SEQ ID NO: 28671 - DNA, 27 bp, synthetic construct
  misc_feature 1..27: note = Probe
  source 1..27: mol_type = other DNA
atcggtgcatgggtggttcagtggtag

SEQ ID NO: 28672 - DNA, 28 bp, synthetic construct
  misc_feature 1..28: note = Probe
  source 1..28: mol_type = other DNA
atcggtgcatgggtggttcagtggtaga

SEQ ID NO: 28673 - DNA, 29 bp, synthetic construct
  misc_feature 1..29: note = Probe
  source 1..29: mol_type = other DNA
atcggtgcatgggtggttcagtggtagaa

SEQ ID NO: 28674 - DNA, 30 bp, synthetic construct; identical to SEQ ID NO: 17334
  misc_feature 1..30: note = Probe
  source 1..30: mol_type = other DNA

SEQ ID NO: 28675 - DNA, 31 bp, synthetic construct; identical to SEQ ID NO: 17335
  misc_feature 1..31: note = Probe
  source 1..31: mol_type = other DNA

SEQ ID NO: 28676 - DNA, 32 bp, synthetic construct; identical to SEQ ID NO: 17336
  misc_feature 1..32: note = Probe
  source 1..32: mol_type = other DNA

SEQ ID NO: 28677 - DNA, 33 bp, synthetic construct; identical to SEQ ID NO: 17337
  misc_feature 1..33: note = Probe
  source 1..33: mol_type = other DNA

SEQ ID NO: 28678 - DNA, 35 bp, synthetic construct; identical to SEQ ID NO: 17338
  misc_feature 1..35: note = Probe
  source 1..35: mol_type = other DNA

SEQ ID NO: 28679 - DNA, 36 bp, synthetic construct; identical to SEQ ID NO: 17339
  misc_feature 1..36: note = Probe
  source 1..36: mol_type = other DNA

SEQ ID NO: 28680 - DNA, 37 bp, synthetic construct; identical to SEQ ID NO: 17340
  misc_feature 1..37: note = Probe
  source 1..37: mol_type = other DNA

SEQ ID NO: 28681 - DNA, 38 bp, synthetic construct; identical to SEQ ID NO: 17341
  misc_feature 1..38: note = Probe
  source 1..38: mol_type = other DNA

SEQ ID NO: 28682 - DNA, 39 bp, synthetic construct
  misc_feature 1..39: note = Probe
  source 1..39: mol_type = other DNA
atcggtgcatgggtggttcagtggtagaattctcgcctg

SEQ ID NO: 28683 - DNA, 19 bp, synthetic construct
  misc_feature 1..19: note = Probe
  source 1..19: mol_type = other DNA
atcggttagcgcattcggc

SEQ ID NO: 28684 - DNA, 19 bp, synthetic construct
  misc_feature 1..19: note = Probe
  source 1..19: mol_type = other DNA
atcggttagcgccttcggc

SEQ ID NO: 28685 - DNA, 19 bp, synthetic construct
  misc_feature 1..19: note = Probe
  source 1..19: mol_type = other DNA
atcggttagcgcgttcggc

SEQ ID NO: 28686 - DNA, 26 bp, synthetic construct
  misc_feature 1..26: note = Probe
  source 1..26: mol_type = other DNA
atcggttagcgcgttcggctgttaac

SEQ ID NO: 28687 - DNA, 36 bp, synthetic construct
  misc_feature 1..36: note = Probe
  source 1..36: mol_type = other DNA
atcgtggccctgtagctcagcggttggagcgctggt

SEQ ID NO: 28688 - DNA, 23 bp, synthetic construct
  misc_feature 1..23: note = Probe
  source 1..23: mol_type = other DNA
atctaaagacaggggttaggcct

SEQ ID NO: 28689 - DNA, 35 bp, synthetic construct; identical to SEQ ID NO: 3765
  misc_feature 1..35: note = Probe
  source 1..35: mol_type = other DNA

SEQ ID NO: 28690 - DNA, 36 bp, synthetic construct; identical to SEQ ID NO: 3766
  misc_feature 1..36: note = Probe
  source 1..36: mol_type = other DNA

SEQ ID NO: 28691 - DNA, 36 bp, synthetic construct; identical to SEQ ID NO: 393
  misc_feature 1..36: note = Probe
  source 1..36: mol_type = other DNA

SEQ ID NO: 28692 - DNA, 37 bp, synthetic construct; identical to SEQ ID NO: 394
  misc_feature 1..37: note = Probe
  source 1..37: mol_type = other DNA

SEQ ID NO: 28693 - DNA, 17 bp, synthetic construct
  misc_feature 1..17: note = Probe
  source 1..17: mol_type = other DNA
atctattgatgagggtc

SEQ ID NO: 28694 - DNA, 18 bp, synthetic construct
  misc_feature 1..18: note = Probe
  source 1..18: mol_type = other DNA
atctattgatgagggtct

SEQ ID NO: 28695 - DNA, 36 bp, synthetic construct
  misc_feature 1..36: note = Probe
  source 1..36: mol_type = other DNA
atctcagggccagtggcgcaatggataacgcgtctg

SEQ ID NO: 28696 - DNA, 39 bp, synthetic construct
  misc_feature 1..39: note = Probe
  source 1..39: mol_type = other DNA
atctcagggccagtggcgcaatggataacgcgtctgact

SEQ ID NO: 28697 - DNA, 36 bp, synthetic construct
  misc_feature 1..36: note = Probe
  source 1..36: mol_type = other DNA
atctcagggtcgtgggttcgagccccacgttgggcg

SEQ ID NO: 28698 - DNA, 39 bp, synthetic construct
  misc_feature 1..39: note = Probe
  source 1..39: mol_type = other DNA
atctcagggtcgtgggttcgagccccacgttgggcggca

SEQ ID NO: 28699 - DNA, 18 bp, synthetic construct
  misc_feature 1..18: note = Probe
  source 1..18: mol_type = other DNA
atctccagcattccccct

SEQ ID NO: 28700 - DNA, 19 bp, synthetic construct
  misc_feature 1..19: note = Probe
  source 1..19: mol_type = other DNA
atctccagcattccccctc

SEQ ID NO: 28701 - DNA, 20 bp, synthetic construct
  misc_feature 1..20: note = Probe
  source 1..20: mol_type = other DNA
atctccagcattccccctca

SEQ ID NO: 28702 - DNA, 24 bp, synthetic construct
  misc_feature 1..24: note = Probe
  source 1..24: mol_type = other DNA
atctccagcattccccctcaaacc

SEQ ID NO: 28703 - DNA, 25 bp, synthetic construct
  misc_feature 1..25: note = Probe
  source 1..25: mol_type = other DNA
atctccagcattccccctcaaacct

SEQ ID NO: 28704 - DNA, 15 bp, synthetic construct
  misc_feature 1..15: note = Probe
  source 1..15: mol_type = other DNA
atctcgctggggcct

SEQ ID NO: 28705 - DNA, 16 bp, synthetic construct
  misc_feature 1..16: note = Probe
  source 1..16: mol_type = other DNA
atctcgctggggcctc

SEQ ID NO: 28706 - DNA, 15 bp, synthetic construct
  misc_feature 1..15: note = Probe
  source 1..15: mol_type = other DNA
atctcggtggaacct

SEQ ID NO: 28707 - DNA, 16 bp, synthetic construct
  misc_feature 1..16: note = Probe
  source 1..16: mol_type = other DNA
atctcggtggaacctg

SEQ ID NO: 28708 - DNA, 17 bp, synthetic construct
  misc_feature 1..17: note = Probe
  source 1..17: mol_type = other DNA
atctcggtggaacctgc

SEQ ID NO: 28709 - DNA, 18 bp, synthetic construct
  misc_feature 1..18: note = Probe
  source 1..18: mol_type = other DNA
atctcggtggaacctgca

SEQ ID NO: 28710 - DNA, 26 bp, synthetic construct
  misc_feature 1..26: note = Probe
  source 1..26: mol_type = other DNA
atctcggtggaacctgcattggtttt

SEQ ID NO: 28711 - DNA, 16 bp, synthetic construct
  misc_feature 1..16: note = Probe
  source 1..16: mol_type = other DNA
atctcggtggaacctt

SEQ ID NO: 28712 - DNA, 15 bp, synthetic construct
  misc_feature 1..15: note = Probe
  source 1..15: mol_type = other DNA
atctcggtgggacct

SEQ ID NO: 28713 - DNA, 16 bp, synthetic construct
  misc_feature 1..16: note = Probe
  source 1..16: mol_type = other DNA
atctcggtgggacctc

SEQ ID NO: 28714 - DNA, 22 bp, synthetic construct
  misc_feature 1..22: note = Probe
  source 1..22: mol_type = other DNA
atctcggtgggacctcacgaga

SEQ ID NO: 28715 - DNA, 24 bp, synthetic construct
  misc_feature 1..24: note = Probe
  source 1..24: mol_type = other DNA
atctcggtgggacctcacgagact

SEQ ID NO: 28716 - DNA, 17 bp, synthetic construct
  misc_feature 1..17: note = Probe
  source 1..17: mol_type = other DNA
atctcggtgggacctgt

SEQ ID NO: 28717 - DNA, 36 bp, synthetic construct
  misc_feature 1..36: note = Probe
  source 1..36: mol_type = other DNA
atctgaaggtcctgagttcgaacctcagagggggca

SEQ ID NO: 28718 - DNA, 39 bp, synthetic construct; identical to SEQ ID NO: 3780
  misc_feature 1..39: note = Probe
  source 1..39: mol_type = other DNA

SEQ ID NO: 28719 - DNA, 36 bp, synthetic construct
  misc_feature 1..36: note = Probe
  source 1..36: mol_type = other DNA
atctgaaggtcgtgagttcgagcctcacacggggca

SEQ ID NO: 28720 - DNA, 36 bp, synthetic construct; identical to SEQ ID NO: 17365
  misc_feature 1..36: note = Probe
  source 1..36: mol_type = other DNA

SEQ ID NO: 28721 - DNA, 38 bp, synthetic construct
  misc_feature 1..38: note = Probe
  source 1..38: mol_type = other DNA
atctgaaggtcgtgagttcgatcctcacacggggcaca

SEQ ID NO: 28722 - DNA, 39 bp, synthetic construct; identical to SEQ ID NO: 3783
  misc_feature 1..39: note = Probe
  source 1..39: mol_type = other DNA

SEQ ID NO: 28723 - DNA, 27 bp, synthetic construct
  misc_feature 1..27: note = Probe
  source 1..27: mol_type = other DNA
atctgacaacagaggcttacgacccct

SEQ ID NO: 28724 - DNA, 36 bp, synthetic construct; identical to SEQ ID NO: 3790
  misc_feature 1..36: note = Probe
  source 1..36: mol_type = other DNA

SEQ ID NO: 28725 - DNA, 36 bp, synthetic construct
  misc_feature 1..36: note = Probe
  source 1..36: mol_type = other DNA
atctgagggtccagggttcaagtccctgtccaggcg

SEQ ID NO: 28726 - DNA, 39 bp, synthetic construct
  misc_feature 1..39: note = Probe
  source 1..39: mol_type = other DNA
atctgagggtccagggttcaagtccctgtccaggcgcta

SEQ ID NO: 28727 - DNA, 36 bp, synthetic construct
  misc_feature 1..36: note = Probe
  source 1..36: mol_type = other DNA
atctgagggtccagggttcaagtccctgttcaggcg

SEQ ID NO: 28728 - DNA, 38 bp, synthetic construct
  misc_feature 1..38: note = Probe
  source 1..38: mol_type = other DNA
atctgagggtccagggttcaagtccctgttcgggcggc

SEQ ID NO: 28729 - DNA, 39 bp, synthetic construct; identical to SEQ ID NO: 3794
  misc_feature 1..39: note = Probe
  source 1..39: mol_type = other DNA

SEQ ID NO: 28730 - DNA, 38 bp, synthetic construct
  misc_feature 1..38: note = Probe
  source 1..38: mol_type = other DNA
atctgagggtccagggttcaagtccctgttcgggcgtc

SEQ ID NO: 28731 - DNA, 20 bp, synthetic construct
  misc_feature 1..20: note = Probe
  source 1..20: mol_type = other DNA
atctggggtggcctgtgact

SEQ ID NO: 28732 - DNA, 17 bp, synthetic construct
  misc_feature 1..17: note = Probe
  source 1..17: mol_type = other DNA
atctgtagtcgtggccg

SEQ ID NO: 28733 - DNA, 18 bp, synthetic construct
  misc_feature 1..18: note = Probe
  source 1..18: mol_type = other DNA
atctgtagtcgtggccga

SEQ ID NO: 28734 - DNA, 19 bp, synthetic construct
  misc_feature 1..19: note = Probe
  source 1..19: mol_type = other DNA
atctgtagtcgtggccgag

SEQ ID NO: 28735 - DNA, 20 bp, synthetic construct
  misc_feature 1..20: note = Probe
  source 1..20: mol_type = other DNA
atctgtagtcgtggccgagt

SEQ ID NO: 28736 - DNA, 21 bp, synthetic construct
  misc_feature 1..21: note = Probe
  source 1..21: mol_type = other DNA
atctgtagtcgtggccgagtg

SEQ ID NO: 28737 - DNA, 36 bp, synthetic construct
  misc_feature 1..36: note = Probe
  source 1..36: mol_type = other DNA
atctgtagtcgtggccgagtggttaaggcgatggac

SEQ ID NO: 28738 - DNA, 36 bp, synthetic construct
  misc_feature 1..36: note = Probe
  source 1..36: mol_type = other DNA
atctgtttccgtagtgtagtggttatcacgttcgcc

SEQ ID NO: 28739 - DNA, 37 bp, synthetic construct
  misc_feature 1..37: note = Probe
  source 1..37: mol_type = other DNA
atctgtttccgtagtgtagtggttatcacgttcgcct

SEQ ID NO: 28740 - DNA, 36 bp, synthetic construct
  misc_feature 1..36: note = Probe
  source 1..36: mol_type = other DNA
atcttagctttgggtgctaatggtggagttaaagac

SEQ ID NO: 28741 - DNA, 22 bp, synthetic construct
  misc_feature 1..22: note = Probe
  source 1..22: mol_type = other DNA
atgaaaacctttttccaaggac

SEQ ID NO: 28742 - DNA, 24 bp, synthetic construct
  misc_feature 1..24: note = Probe
  source 1..24: mol_type = other DNA
atgaaaacctttttccaaggacaa

SEQ ID NO: 28743 - DNA, 15 bp, synthetic construct
  misc_feature 1..15: note = Probe
  source 1..15: mol_type = other DNA
atgagaatcgaaccc

SEQ ID NO: 28744 - DNA, 20 bp, synthetic construct
  misc_feature 1..20: note = Probe
  source 1..20: mol_type = other DNA
atgagaatcgaacccatccc

SEQ ID NO: 28745 - DNA, 23 bp, synthetic construct
  misc_feature 1..23: note = Probe
  source 1..23: mol_type = other DNA
atgagaatcgaacccatccctga

SEQ ID NO: 28746 - DNA, 24 bp, synthetic construct
  misc_feature 1..24: note = Probe
  source 1..24: mol_type = other DNA
atgagaatcgaacccatccctgag

SEQ ID NO: 28747 - DNA, 25 bp, synthetic construct
  misc_feature 1..25: note = Probe
  source 1..25: mol_type = other DNA
atgagaatcgaacccatccctgaga

SEQ ID NO: 28748 - DNA, 15 bp, synthetic construct
  misc_feature 1..15: note = Probe
  source 1..15: mol_type = other DNA
atgaggccccgggtt

SEQ ID NO: 28749 - DNA, 16 bp, synthetic construct
  misc_feature 1..16: note = Probe
  source 1..16: mol_type = other DNA
atgaggccccgggttc

SEQ ID NO: 28750 - DNA, 17 bp, synthetic construct
  misc_feature 1..17: note = Probe
  source 1..17: mol_type = other DNA
atgatgtatgctttgtt

SEQ ID NO: 28751 - DNA, 18 bp, synthetic construct
  misc_feature 1..18: note = Probe
  source 1..18: mol_type = other DNA
atgatgtatgctttgttt

SEQ ID NO: 28752 - DNA, 19 bp, synthetic construct
  misc_feature 1..19: note = Probe
  source 1..19: mol_type = other DNA
atgatgtatgctttgtttc

SEQ ID NO: 28753 - DNA, 20 bp, synthetic construct
  misc_feature 1..20: note = Probe
  source 1..20: mol_type = other DNA
atgatgtatgctttgtttct

SEQ ID NO: 28754 - DNA, 21 bp, synthetic construct
  misc_feature 1..21: note = Probe
  source 1..21: mol_type = other DNA
atgatgtatgctttgtttctg

SEQ ID NO: 28755 - DNA, 23 bp, synthetic construct
  misc_feature 1..23: note = Probe
  source 1..23: mol_type = other DNA
atgatgtatgctttgtttctgtt

SEQ ID NO: 28756 - DNA, 24 bp, synthetic construct
  misc_feature 1..24: note = Probe
  source 1..24: mol_type = other DNA
atgatgtatgctttgtttctgttg

SEQ ID NO: 28757 - DNA, 26 bp, synthetic construct
  misc_feature 1..26: note = Probe
  source 1..26: mol_type = other DNA
atgatgtatgctttgtttctgttgag

SEQ ID NO: 28758 - DNA, 27 bp, synthetic construct
  misc_feature 1..27: note = Probe
  source 1..27: mol_type = other DNA
atgatgtatgctttgtttctgttgagt

SEQ ID NO: 28759 - DNA, 28 bp, synthetic construct
  misc_feature 1..28: note = Probe
  source 1..28: mol_type = other DNA
atgatgtatgctttgtttctgttgagtg

SEQ ID NO: 28760 - DNA, 29 bp, synthetic construct
  misc_feature 1..29: note = Probe
  source 1..29: mol_type = other DNA
atgatgtatgctttgtttctgttgagtgt

SEQ ID NO: 28761 - DNA, 30 bp, synthetic construct; identical to SEQ ID NO: 17384
  misc_feature 1..30: note = Probe
  source 1..30: mol_type = other DNA

SEQ ID NO: 28762 - DNA, 34 bp, synthetic construct
  misc_feature 1..34: note = Probe
  source 1..34: mol_type = other DNA
atgattctcgcttagggtgcgagaggtcccgggt

SEQ ID NO: 28763 - DNA, 34 bp, synthetic construct; identical to SEQ ID NO: 17389
  misc_feature 1..34: note = Probe
  source 1..34: mol_type = other DNA

SEQ ID NO: 28764 - DNA, 34 bp, synthetic construct
  misc_feature 1..34: note = Probe
  source 1..34: mol_type = other DNA
atgattctcgctttgggtgcgagaggtcccgggt

SEQ ID NO: 28765 - DNA, 36 bp, synthetic construct
  misc_feature 1..36: note = Probe
  source 1..36: mol_type = other DNA
atgatttcgactcattaaattatgataatcatattt

SEQ ID NO: 28766 - DNA, 21 bp, synthetic construct
  misc_feature 1..21: note = Probe
  source 1..21: mol_type = other DNA
atgcacactactataaccacc

SEQ ID NO: 28767 - DNA, 22 bp, synthetic construct
  misc_feature 1..22: note = Probe
  source 1..22: mol_type = other DNA
atgcacactactataaccaccc

SEQ ID NO: 28768 - DNA, 23 bp, synthetic construct
  misc_feature 1..23: note = Probe
  source 1..23: mol_type = other DNA
atgcacactactataaccaccct

SEQ ID NO: 28769 - DNA, 24 bp, synthetic construct
  misc_feature 1..24: note = Probe
  source 1..24: mol_type = other DNA
atgcacactactataaccacccta

SEQ ID NO: 28770 - DNA, 36 bp, synthetic construct
  misc_feature 1..36: note = Probe
  source 1..36: mol_type = other DNA
atgcaggtttccgtagtgtagtggttatcacgttcg

SEQ ID NO: 28771 - DNA, 36 bp, synthetic construct
  misc_feature 1..36: note = Probe
  source 1..36: mol_type = other DNA
atgcatccttcgatagctcagctggtagagcggagg

SEQ ID NO: 28772 - DNA, 28 bp, synthetic construct
  misc_feature 1..28: note = Probe
  source 1..28: mol_type = other DNA
atgccccaactaaatactaccgtatggc

SEQ ID NO: 28773 - DNA, 17 bp, synthetic construct
  misc_feature 1..17: note = Probe
  source 1..17: mol_type = other DNA
atgcccccatgtctaac

SEQ ID NO: 28774 - DNA, 18 bp, synthetic construct
  misc_feature 1..18: note = Probe
  source 1..18: mol_type = other DNA
atgcccccatgtctaaca

SEQ ID NO: 28775 - DNA, 34 bp, synthetic construct; identical to SEQ ID NO: 3822
  misc_feature 1..34: note = Probe
  source 1..34: mol_type = other DNA

SEQ ID NO: 28776 - DNA, 16 bp, synthetic construct
  misc_feature 1..16: note = Probe
  source 1..16: mol_type = other DNA
atgcccctcatttaca

SEQ ID NO: 28777 - DNA, 17 bp, synthetic construct
  misc_feature 1..17: note = Probe
  source 1..17: mol_type = other DNA
atgcccctcatttacat

SEQ ID NO: 28778 - DNA, 18 bp, synthetic construct
  misc_feature 1..18: note = Probe
  source 1..18: mol_type = other DNA
atgcccctcatttacata

SEQ ID NO: 28779 - DNA, 30 bp, synthetic construct; identical to SEQ ID NO: 3825
  misc_feature 1..30: note = Probe
  source 1..30: mol_type = other DNA

SEQ ID NO: 28780 - DNA, 19 bp, synthetic construct
  misc_feature 1..19: note = Probe
  source 1..19: mol_type = other DNA
atgccgaggttgtgagttc

SEQ ID NO: 28781 - DNA, 36 bp, synthetic construct; identical to SEQ ID NO: 17435
  misc_feature 1..36: note = Probe
  source 1..36: mol_type = other DNA

SEQ ID NO: 28782 - DNA, 17 bp, synthetic construct
  misc_feature 1..17: note = Probe
  source 1..17: mol_type = other DNA
atggaggccatggggtt

SEQ ID NO: 28783 - DNA, 28 bp, synthetic construct
  misc_feature 1..28: note = Probe
  source 1..28: mol_type = other DNA
atggaggccatggggttggcttgaaacc

SEQ ID NO: 28784 - DNA, 36 bp, synthetic construct
  misc_feature 1..36: note = Probe
  source 1..36: mol_type = other DNA
atggaggcgtgggttcgaatcccacttctgacacaa

SEQ ID NO: 28785 - DNA, 36 bp, synthetic construct
  misc_feature 1..36: note = Probe
  source 1..36: mol_type = other DNA
atggaggcgtgggttcgaatcccacttctgacacat

SEQ ID NO: 28786 - DNA, 19 bp, synthetic construct
  misc_feature 1..19: note = Probe
  source 1..19: mol_type = other DNA
atggataacgcgtctgact

SEQ ID NO: 28787 - DNA, 22 bp, synthetic construct
  misc_feature 1..22: note = Probe
  source 1..22: mol_type = other DNA
atggataacgcgtctgactacg

SEQ ID NO: 28788 - DNA, 23 bp, synthetic construct
  misc_feature 1..23: note = Probe
  source 1..23: mol_type = other DNA
atggataacgcgtctgactacgg

SEQ ID NO: 28789 - DNA, 24 bp, synthetic construct
  misc_feature 1..24: note = Probe
  source 1..24: mol_type = other DNA
atggataacgcgtctgactacgga

SEQ ID NO: 28790 - DNA, 26 bp, synthetic construct
  misc_feature 1..26: note = Probe
  source 1..26: mol_type = other DNA
atggataacgcgtctgactacggatc

SEQ ID NO: 28791 - DNA, 30 bp, synthetic construct
  misc_feature 1..30: note = Probe
  source 1..30: mol_type = other DNA
atggataacgcgtctgactacggatcagaa

SEQ ID NO: 28792 - DNA, 32 bp, synthetic construct
  misc_feature 1..32: note = Probe
  source 1..32: mol_type = other DNA
atggataacgcgtctgactacggatcagaaga

SEQ ID NO: 28793 - DNA, 15 bp, synthetic construct
  misc_feature 1..15: note = Probe
  source 1..15: mol_type = other DNA
atggataaggcactg

SEQ ID NO: 28794 - DNA, 17 bp, synthetic construct
  misc_feature 1..17: note = Probe
  source 1..17: mol_type = other DNA
atggataaggcactggc

SEQ ID NO: 28795 - DNA, 15 bp, synthetic construct
  misc_feature 1..15: note = Probe
  source 1..15: mol_type = other DNA
atggataaggcatca

SEQ ID NO: 28796 - DNA, 17 bp, synthetic construct
  misc_feature 1..17: note = Probe
  source 1..17: mol_type = other DNA
atggataaggcatcagc

SEQ ID NO: 28797 - DNA, 19 bp, synthetic construct
  misc_feature 1..19: note = Probe
  source 1..19: mol_type = other DNA
atggataaggcatcagcct

SEQ ID NO: 28798 - DNA, 36 bp, synthetic construct
  misc_feature 1..36: note = Probe
  source 1..36: mol_type = other DNA
atggataaggcatcagcctccggagctggggattgt

SEQ ID NO: 28799 - DNA, 15 bp, synthetic construct
  misc_feature 1..15: note = Probe
  source 1..15: mol_type = other DNA
atggataaggcattg

SEQ ID NO: 28800 - DNA, 17 bp, synthetic construct
  misc_feature 1..17: note = Probe
  source 1..17: mol_type = other DNA
atggataaggcattggc

SEQ ID NO: 28801 - DNA, 18 bp, synthetic construct
  misc_feature 1..18: note = Probe
  source 1..18: mol_type = other DNA
atggataaggcattggcc

SEQ ID NO: 28802 - DNA, 20 bp, synthetic construct
  misc_feature 1..20: note = Probe
  source 1..20: mol_type = other DNA
atggataaggcattggcctc

SEQ ID NO: 28803 - DNA, 16 bp, synthetic construct
  misc_feature 1..16: note = Probe
  source 1..16: mol_type = other DNA
atggataaggcgtctg

SEQ ID NO: 28804 - DNA, 19 bp, synthetic construct
  misc_feature 1..19: note = Probe
  source 1..19: mol_type = other DNA
atggataaggcgtctgact

SEQ ID NO: 28805 - DNA, 36 bp, synthetic construct
  misc_feature 1..36: note = Probe
  source 1..36: mol_type = other DNA
atggataaggcgtctgacttcggatcagaagattga

SEQ ID NO: 28806 - DNA, 40 bp, synthetic construct
  misc_feature 1..40: note = Probe
  source 1..40: mol_type = other DNA
atggataaggcgtctgacttcggatcagaagattgagggt

SEQ ID NO: 28807 - DNA, 41 bp, synthetic construct
  misc_feature 1..41: note = Probe
  source 1..41: mol_type = other DNA
atggataaggcgtctgacttcggatcagaagattgagggtt

SEQ ID NO: 28808 - DNA, 16 bp, synthetic construct
  misc_feature 1..16: note = Probe
  source 1..16: mol_type = other DNA
atggatagcgcattgg

SEQ ID NO: 28809 - DNA, 17 bp, synthetic construct
  misc_feature 1..17: note = Probe
  source 1..17: mol_type = other DNA
atggatagcgcattgga

SEQ ID NO: 28810 - DNA, 18 bp, synthetic construct
  misc_feature 1..18: note = Probe
  source 1..18: mol_type = other DNA
atggatagcgcattggac

SEQ ID NO: 28811 - DNA, 19 bp, synthetic construct
  misc_feature 1..19: note = Probe
  source 1..19: mol_type = other DNA
atggatagcgcattggact

SEQ ID NO: 28812 - DNA, 16 bp, synthetic construct
  misc_feature 1..16: note = Probe
  source 1..16: mol_type = other DNA
atggcacatgcagcgc

SEQ ID NO: 28813 - DNA, 23 bp, synthetic construct
  misc_feature 1..23: note = Probe
  source 1..23: mol_type = other DNA
atggcacatgcagcgcaagtagg

SEQ ID NO: 28814 - DNA, 24 bp, synthetic construct
  misc_feature 1..24: note = Probe
  source 1..24: mol_type = other DNA
atggcacatgcagcgcaagtaggt

SEQ ID NO: 28815 - DNA, 25 bp, synthetic construct
  misc_feature 1..25: note = Probe
  source 1..25: mol_type = other DNA
atggcacatgcagcgcaagtaggtc

SEQ ID NO: 28816 - DNA, 26 bp, synthetic construct
  misc_feature 1..26: note = Probe
  source 1..26: mol_type = other DNA
atggcacatgcagcgcaagtaggtct

SEQ ID NO: 28817 - DNA, 27 bp, synthetic construct
  misc_feature 1..27: note = Probe
  source 1..27: mol_type = other DNA
atggcacatgcagcgcaagtaggtcta

SEQ ID NO: 28818 - DNA, 28 bp, synthetic construct
  misc_feature 1..28: note = Probe
  source 1..28: mol_type = other DNA
atggcacatgcagcgcaagtaggtctac

SEQ ID NO: 28819 - DNA, 29 bp, synthetic construct
  misc_feature 1..29: note = Probe
  source 1..29: mol_type = other DNA
atggcacatgcagcgcaagtaggtctaca

SEQ ID NO: 28820 - DNA, 30 bp, synthetic construct; identical to SEQ ID NO: 3841
  misc_feature 1..30: note = Probe
  source 1..30: mol_type = other DNA

SEQ ID NO: 28821 - DNA, 19 bp, synthetic construct
  misc_feature 1..19: note = Probe
  source 1..19: mol_type = other DNA
atggcacggcaaggggagt

SEQ ID NO: 28822 - DNA, 19 bp, synthetic construct
  misc_feature 1..19: note = Probe
  source 1..19: mol_type = other DNA
atggcacggcaaggggctc

SEQ ID NO: 28823 - DNA, 20 bp, synthetic construct
  misc_feature 1..20: note = Probe
  source 1..20: mol_type = other DNA
atggcagagcccggtaatcg

SEQ ID NO: 28824 - DNA, 24 bp, synthetic construct
  misc_feature 1..24: note = Probe
  source 1..24: mol_type = other DNA
atggcagagcccggtaatcgcata

SEQ ID NO: 28825 - DNA, 36 bp, synthetic construct
  misc_feature 1..36: note = Probe
  source 1..36: mol_type = other DNA
atggcagagcccggtaatcgcataaaacttaaaact

SEQ ID NO: 28826 - DNA, 20 bp, synthetic construct
  misc_feature 1..20: note = Probe
  source 1..20: mol_type = other DNA
atggccaacctcctactcct

SEQ ID NO: 28827 - DNA, 22 bp, synthetic construct
  misc_feature 1..22: note = Probe
  source 1..22: mol_type = other DNA
atggccaacctcctactcctca

SEQ ID NO: 28828 - DNA, 16 bp, synthetic construct
  misc_feature 1..16: note = Probe
  source 1..16: mol_type = other DNA
atggccgcatatattt

SEQ ID NO: 28829 - DNA, 17 bp, synthetic construct
  misc_feature 1..17: note = Probe
  source 1..17: mol_type = other DNA
atggccgcatatatttt

SEQ ID NO: 28830 - DNA, 18 bp, synthetic construct
  misc_feature 1..18: note = Probe
  source 1..18: mol_type = other DNA
atggccgcatatatttta

SEQ ID NO: 28831 - DNA, 25 bp, synthetic construct
  misc_feature 1..25: note = Probe
  source 1..25: mol_type = other DNA
atggccgcccggctagctcagtcgg

SEQ ID NO: 28832 - DNA, 28 bp, synthetic construct
  misc_feature 1..28: note = Probe
  source 1..28: mol_type = other DNA
atggccgcccggctagctcagtcggtag

SEQ ID NO: 28833 - DNA, 29 bp, synthetic construct
  misc_feature 1..29: note = Probe
  source 1..29: mol_type = other DNA
atggccgcccggctagctcagtcggtaga

SEQ ID NO: 28834 - DNA, 30 bp, synthetic construct
  misc_feature 1..30: note = Probe
  source 1..30: mol_type = other DNA
atggccgcccggctagctcagtcggtagag

SEQ ID NO: 28835 - DNA, 36 bp, synthetic construct
  misc_feature 1..36: note = Probe
  source 1..36: mol_type = other DNA
atggccgcccggctagctcagtcggtagagcatgag

SEQ ID NO: 28836 - DNA, 39 bp, synthetic construct
  misc_feature 1..39: note = Probe
  source 1..39: mol_type = other DNA
atggccgcccggctagctcagtcggtagagcatgagact

SEQ ID NO: 28837 - DNA, 40 bp, synthetic construct
  misc_feature 1..40: note = Probe
  source 1..40: mol_type = other DNA
atggccgcccggctagctcagtcggtagagcatgagactc

SEQ ID NO: 28838 - DNA, 41 bp, synthetic construct
  misc_feature 1..41: note = Probe
  source 1..41: mol_type = other DNA
atggccgcccggctagctcagtcggtagagcatgagactct

SEQ ID NO: 28839 - DNA, 43 bp, synthetic construct
  misc_feature 1..43: note = Probe
  source 1..43: mol_type = other DNA
atggccgcccggctagctcagtcggtagagcatgagactctta

SEQ ID NO: 28840 - DNA, 50 bp, synthetic construct
  misc_feature 1..50: note = Probe
  source 1..50: mol_type = other DNA
atggccgcccggctagctcagtcggtagagcatgagactcttaatctcag

SEQ ID NO: 28841 - DNA, 15 bp, synthetic construct
  misc_feature 1..15: note = Probe
  source 1..15: mol_type = other DNA
atggcctccatgact

SEQ ID NO: 28842 - DNA, 21 bp, synthetic construct
  misc_feature 1..21: note = Probe
  source 1..21: mol_type = other DNA
atggcctccatgactttttca

SEQ ID NO: 28843 - DNA, 23 bp, synthetic construct
  misc_feature 1..23: note = Probe
  source 1..23: mol_type = other DNA
atggcctccatgactttttcaaa

SEQ ID NO: 28844 - DNA, 24 bp, synthetic construct
  misc_feature 1..24: note = Probe
  source 1..24: mol_type = other DNA
atggcctccatgactttttcaaaa

SEQ ID NO: 28845 - DNA, 25 bp, synthetic construct
  misc_feature 1..25: note = Probe
  source 1..25: mol_type = other DNA
atggcctccatgactttttcaaaaa

SEQ ID NO: 28846 - DNA, 26 bp, synthetic construct
  misc_feature 1..26: note = Probe
  source 1..26: mol_type = other DNA
atggcctccatgactttttcaaaaag

SEQ ID NO: 28847 - DNA, 22 bp, synthetic construct
  misc_feature 1..22: note = Probe
  source 1..22: mol_type = other DNA
atggctgagtgaagcattggac

SEQ ID NO: 28848 - DNA, 23 bp, synthetic construct
  misc_feature 1..23: note = Probe
  source 1..23: mol_type = other DNA
atggctgagtgaagcattggact

SEQ ID NO: 28849 - DNA, 25 bp, synthetic construct
  misc_feature 1..25: note = Probe
  source 1..25: mol_type = other DNA
atggctgagtgaagcattggactgt

SEQ ID NO: 28850 - DNA, 26 bp, synthetic construct
  misc_feature 1..26: note = Probe
  source 1..26: mol_type = other DNA
atggctgagtgaagcattggactgta

SEQ ID NO: 28851 - DNA, 27 bp, synthetic construct
  misc_feature 1..27: note = Probe
  source 1..27: mol_type = other DNA
atggctgagtgaagcattggactgtaa

SEQ ID NO: 28852 - DNA, 28 bp, synthetic construct
  misc_feature 1..28: note = Probe
  source 1..28: mol_type = other DNA
atggctgagtgaagcattggactgtaaa

SEQ ID NO: 28853 - DNA, 29 bp, synthetic construct
  misc_feature 1..29: note = Probe
  source 1..29: mol_type = other DNA
atggctgagtgaagcattggactgtaaat

SEQ ID NO: 28854 - DNA, 36 bp, synthetic construct
  misc_feature 1..36: note = Probe
  source 1..36: mol_type = other DNA
atggctgagtgaagcattggactgtaaatctaaaga

SEQ ID NO: 28855 - DNA, 36 bp, synthetic construct
  misc_feature 1..36: note = Probe
  source 1..36: mol_type = other DNA
atgggaccacgtggcctaatggataaggcgtctgac

SEQ ID NO: 28856 - DNA, 16 bp, synthetic construct
  misc_feature 1..16: note = Probe
  source 1..16: mol_type = other DNA
atgggcggtcctcgtt

SEQ ID NO: 28857 - DNA, 19 bp, synthetic construct
  misc_feature 1..19: note = Probe
  source 1..19: mol_type = other DNA
atgggcggtcctcgttagt

SEQ ID NO: 28858 - DNA, 26 bp, synthetic construct
  misc_feature 1..26: note = Probe
  source 1..26: mol_type = other DNA
atgggcggtcctcgttagtatagtgg

SEQ ID NO: 28859 - DNA, 31 bp, synthetic construct
  misc_feature 1..31: note = Probe
  source 1..31: mol_type = other DNA
atgggcggtcctcgttagtatagtggtgagt

SEQ ID NO: 28860 - DNA, 34 bp, synthetic construct
  misc_feature 1..34: note = Probe
  source 1..34: mol_type = other DNA
atgggcggtcctcgttagtatagtggtgagtatc

SEQ ID NO: 28861 - DNA, 36 bp, synthetic construct
  misc_feature 1..36: note = Probe
  source 1..36: mol_type = other DNA
atgggcggtcctcgttagtatagtggtgagtatccc

SEQ ID NO: 28862 - DNA, 26 bp, synthetic construct
  misc_feature 1..26: note = Probe
  source 1..26: mol_type = other DNA
atggggtgtgataggtggcacggaga

SEQ ID NO: 28863 - DNA, 32 bp, synthetic construct
  misc_feature 1..32: note = Probe
  source 1..32: mol_type = other DNA
atggggtgtgataggtggcacggagaattttg

SEQ ID NO: 28864 - DNA, 19 bp, synthetic construct
  misc_feature 1..19: note = Probe
  source 1..19: mol_type = other DNA
atggggttggcttgaaacc

SEQ ID NO: 28865 - DNA, 36 bp, synthetic construct
  misc_feature 1..36: note = Probe
  source 1..36: mol_type = other DNA
atggggttggcttgaaaccagctttggggggttcga

SEQ ID NO: 28866 - DNA, 28 bp, synthetic construct
  misc_feature 1..28: note = Probe
  source 1..28: mol_type = other DNA
atgggtggttcagtggtagaattctcgc

SEQ ID NO: 28867 - DNA, 31 bp, synthetic construct; identical to SEQ ID NO: 404
  misc_feature 1..31: note = Probe
  source 1..31: mol_type = other DNA

SEQ ID NO: 28868 - DNA, 32 bp, synthetic construct; identical to SEQ ID NO: 405
  misc_feature 1..32: note = Probe
  source 1..32: mol_type = other DNA

SEQ ID NO: 28869 - DNA, 34 bp, synthetic construct; identical to SEQ ID NO: 407
  misc_feature 1..34: note = Probe
  source 1..34: mol_type = other DNA

SEQ ID NO: 28870 - DNA, 36 bp, synthetic construct
  misc_feature 1..36: note = Probe
  source 1..36: mol_type = other DNA
atgggtggttcagtggtagaattctcgcctgccacg

SEQ ID NO: 28871 - DNA, 15 bp, synthetic construct
  misc_feature 1..15: note = Probe
  source 1..15: mol_type = other DNA
atggtagagcgctcg

SEQ ID NO: 28872 - DNA, 17 bp, synthetic construct
  misc_feature 1..17: note = Probe
  source 1..17: mol_type = other DNA
atggtagagcgctcgct

SEQ ID NO: 28873 - DNA, 36 bp, synthetic construct
  misc_feature 1..36: note = Probe
  source 1..36: mol_type = other DNA
atggtctagcggttaggattcctggttttcacccag

SEQ ID NO: 28874 - DNA, 17 bp, synthetic construct
  misc_feature 1..17: note = Probe
  source 1..17: mol_type = other DNA
atggtgagcactctgga

SEQ ID NO: 28875 - DNA, 28 bp, synthetic construct
  misc_feature 1..28: note = Probe
  source 1..28: mol_type = other DNA
atggtgagcactctggactctgaatcca

SEQ ID NO: 28876 - DNA, 36 bp, synthetic construct
  misc_feature 1..36: note = Probe
  source 1..36: mol_type = other DNA
atggtgagcactctggactctgaatccagcgatccg

SEQ ID NO: 28877 - DNA, 17 bp, synthetic construct
  misc_feature 1..17: note = Probe
  source 1..17: mol_type = other DNA
atggtggagttaaagac

SEQ ID NO: 28878 - DNA, 29 bp, synthetic construct
  misc_feature 1..29: note = Probe
  source 1..29: mol_type = other DNA
atggtggagttaaagactttttctctgat

SEQ ID NO: 28879 - DNA, 27 bp, synthetic construct
  misc_feature 1..27: note = Probe
  source 1..27: mol_type = other DNA
atggtggttcagtggtagaattctcgc

SEQ ID NO: 28880 - DNA, 28 bp, synthetic construct
  misc_feature 1..28: note = Probe
  source 1..28: mol_type = other DNA
atggtggttcagtggtagaattctcgcc

SEQ ID NO: 28881 - DNA, 29 bp, synthetic construct
  misc_feature 1..29: note = Probe
  source 1..29: mol_type = other DNA
atggtggttcagtggtagaattctcgcct

SEQ ID NO: 28882 - DNA, 50 bp, synthetic construct
  misc_feature 1..50: note = Probe
  source 1..50: mol_type = other DNA
atggtgtaatggtaagcactctggactctgaatccagcgatccgagttcg

SEQ ID NO: 28883 - DNA, 50 bp, synthetic construct
  misc_feature 1..50: note = Probe
  source 1..50: mol_type = other DNA
atggtgtaatggtgagcactctggactctgaatccagcgatccgagttcg

SEQ ID NO: 28884 - DNA, 27 bp, synthetic construct
  misc_feature 1..27: note = Probe
  source 1..27: mol_type = other DNA
atggtgtaatggttagcactctggact

SEQ ID NO: 28885 - DNA, 28 bp, synthetic construct
  misc_feature 1..28: note = Probe
  source 1..28: mol_type = other DNA
atggtgtaatggttagcactctggactc

SEQ ID NO: 28886 - DNA, 30 bp, synthetic construct
  misc_feature 1..30: note = Probe
  source 1..30: mol_type = other DNA
atggtgtaatggttagcactctggactctg

SEQ ID NO: 28887 - DNA, 50 bp, synthetic construct
  misc_feature 1..50: note = Probe
  source 1..50: mol_type = other DNA
atggtgtaatggttagcactctggactctgaatccagcgatccgagttca

SEQ ID NO: 28888 - DNA, 36 bp, synthetic construct
  misc_feature 1..36: note = Probe
  source 1..36: mol_type = other DNA
atggtgtaatggttagcactctggactttgaatcca

SEQ ID NO: 28889 - DNA, 15 bp, synthetic construct
  misc_feature 1..15: note = Probe
  source 1..15: mol_type = other DNA
atggttagcactctg

SEQ ID NO: 28890 - DNA, 16 bp, synthetic construct
  misc_feature 1..16: note = Probe
  source 1..16: mol_type = other DNA
atggttagcactctgg

SEQ ID NO: 28891 - DNA, 17 bp, synthetic construct
  misc_feature 1..17: note = Probe
  source 1..17: mol_type = other DNA
atggttagcactctgga

SEQ ID NO: 28892 - DNA, 18 bp, synthetic construct
  misc_feature 1..18: note = Probe
  source 1..18: mol_type = other DNA
atggttagcactctggac

SEQ ID NO: 28893 - DNA, 19 bp, synthetic construct
  misc_feature 1..19: note = Probe
  source 1..19: mol_type = other DNA
atggttagcactctggact

SEQ ID NO: 28894 - DNA, 20 bp, synthetic construct
  misc_feature 1..20: note = Probe
  source 1..20: mol_type = other DNA
atggttagcactctggactc

SEQ ID NO: 28895 - DNA, 21 bp, synthetic construct
  misc_feature 1..21: note = Probe
  source 1..21: mol_type = other DNA
atggttagcactctggactct

SEQ ID NO: 28896 - DNA, 23 bp, synthetic construct
  misc_feature 1..23: note = Probe
  source 1..23: mol_type = other DNA
atggttagcactctggactctga

SEQ ID NO: 28897 - DNA, 24 bp, synthetic construct
  misc_feature 1..24: note = Probe
  source 1..24: mol_type = other DNA
atggttagcactctggactctgaa

SEQ ID NO: 28898 - DNA, 30 bp, synthetic construct; identical to SEQ ID NO: 9399
  misc_feature 1..30: note = Probe
  source 1..30: mol_type = other DNA

SEQ ID NO: 28899 - DNA, 38 bp, synthetic construct; identical to SEQ ID NO: 17471
  misc_feature 1..38: note = Probe
  source 1..38: mol_type = other DNA

SEQ ID NO: 28900 - DNA, 39 bp, synthetic construct; identical to SEQ ID NO: 17472
  misc_feature 1..39: note = Probe
  source 1..39: mol_type = other DNA

SEQ ID NO: 28901 - DNA, 40 bp, synthetic construct
  misc_feature 1..40: note = Probe
  source 1..40: mol_type = other DNA
atggttagcactctggactctgaatccagcgatccgagtt

SEQ ID NO: 28902 - DNA, 23 bp, synthetic construct
  misc_feature 1..23: note = Probe
  source 1..23: mol_type = other DNA
atggttagcactctggactttga

SEQ ID NO: 28903 - DNA, 24 bp, synthetic construct
  misc_feature 1..24: note = Probe
  source 1..24: mol_type = other DNA
atggttagcactctggactttgaa

SEQ ID NO: 28904 - DNA, 25 bp, synthetic construct
  misc_feature 1..25: note = Probe
  source 1..25: mol_type = other DNA
atggttagcactctggactttgaat

SEQ ID NO: 28905 - DNA, 28 bp, synthetic construct
  misc_feature 1..28: note = Probe
  source 1..28: mol_type = other DNA
atggttagcactctggactttgaatcca

SEQ ID NO: 28906 - DNA, 36 bp, synthetic construct
  misc_feature 1..36: note = Probe
  source 1..36: mol_type = other DNA
atggttagcactctggactttgaatccagcgatccg

SEQ ID NO: 28907 - DNA, 39 bp, synthetic construct
  misc_feature 1..39: note = Probe
  source 1..39: mol_type = other DNA
atggttagcactctggactttgaatccagcgatccgagt

SEQ ID NO: 28908 - DNA, 40 bp, synthetic construct
  misc_feature 1..40: note = Probe
  source 1..40: mol_type = other DNA
atggttagcactctggactttgaatccagcgatccgagtt

SEQ ID NO: 28909 - DNA, 22 bp, synthetic construct
  misc_feature 1..22: note = Probe
  source 1..22: mol_type = other DNA
atggtttttcatatcattggtc

SEQ ID NO: 28910 - DNA, 23 bp, synthetic construct
  misc_feature 1..23: note = Probe
  source 1..23: mol_type = other DNA
atggtttttcatatcattggtcg

SEQ ID NO: 28911 - DNA, 30 bp, synthetic construct; identical to SEQ ID NO: 9405
  misc_feature 1..30: note = Probe
  source 1..30: mol_type = other DNA

SEQ ID NO: 28912 - DNA, 31 bp, synthetic construct
  misc_feature 1..31: note = Probe
  source 1..31: mol_type = other DNA
atggtttttcatatcattggtcgtggttgta

SEQ ID NO: 28913 - DNA, 32 bp, synthetic construct
  misc_feature 1..32: note = Probe
  source 1..32: mol_type = other DNA
atggtttttcatatcattggtcgtggttgtag

SEQ ID NO: 28914 - DNA, 33 bp, synthetic construct
  misc_feature 1..33: note = Probe
  source 1..33: mol_type = other DNA
atggtttttcatatcattggtcgtggttgtagt

SEQ ID NO: 28915 - DNA, 34 bp, synthetic construct
  misc_feature 1..34: note = Probe
  source 1..34: mol_type = other DNA
atggtttttcatatcattggtcgtggttgtagtc

SEQ ID NO: 28916 - DNA, 35 bp, synthetic construct
  misc_feature 1..35: note = Probe
  source 1..35: mol_type = other DNA
atggtttttcatatcattggtcgtggttgtagtcc

SEQ ID NO: 28917 - DNA, 44 bp, synthetic construct
  misc_feature 1..44: note = Probe
  source 1..44: mol_type = other DNA
atggtttttcatatcattggtcgtggttgtagtccgtgcgagaa

SEQ ID NO: 28918 - DNA, 45 bp, synthetic construct
  misc_feature 1..45: note = Probe
  source 1..45: mol_type = other DNA
atggtttttcatatcattggtcgtggttgtagtccgtgcgagaat

SEQ ID NO: 28919 - DNA, 46 bp, synthetic construct
  misc_feature 1..46: note = Probe
  source 1..46: mol_type = other DNA
atggtttttcatatcattggtcgtggttgtagtccgtgcgagaata

SEQ ID NO: 28920 - DNA, 15 bp, synthetic construct
  misc_feature 1..15: note = Probe
  source 1..15: mol_type = other DNA
atgtagcttacctcc

SEQ ID NO: 28921 - DNA, 16 bp, synthetic construct
  misc_feature 1..16: note = Probe
  source 1..16: mol_type = other DNA
atgtagcttacctcct

SEQ ID NO: 28922 - DNA, 26 bp, synthetic construct
  misc_feature 1..26: note = Probe
  source 1..26: mol_type = other DNA
atgtagcttacctcctcaaagcaata

SEQ ID NO: 28923 - DNA, 36 bp, synthetic construct
  misc_feature 1..36: note = Probe
  source 1..36: mol_type = other DNA
atgtaggctctatggcttagttggttaaagcgcctg

SEQ ID NO: 28924 - DNA, 27 bp, synthetic construct
  misc_feature 1..27: note = Probe
  source 1..27: mol_type = other DNA
atgtatgctttgtttctgttgagtgtg

SEQ ID NO: 28925 - DNA, 22 bp, synthetic construct
  misc_feature 1..22: note = Probe
  source 1..22: mol_type = other DNA
atgtcgttagtctaggctgtca

SEQ ID NO: 28926 - DNA, 24 bp, synthetic construct
  misc_feature 1..24: note = Probe
  source 1..24: mol_type = other DNA
atgtcgttagtctaggctgtcagc

SEQ ID NO: 28927 - DNA, 25 bp, synthetic construct
  misc_feature 1..25: note = Probe
  source 1..25: mol_type = other DNA
atgtcgttagtctaggctgtcagct

SEQ ID NO: 28928 - DNA, 30 bp, synthetic construct; identical to SEQ ID NO: 9409
  misc_feature 1..30: note = Probe
  source 1..30: mol_type = other DNA

SEQ ID NO: 28929 - DNA, 36 bp, synthetic construct
  misc_feature 1..36: note = Probe
  source 1..36: mol_type = other DNA
atgtctctgtggcgcaatcggctagcgcgtttggct

SEQ ID NO: 28930 - DNA, 33 bp, synthetic construct
  misc_feature 1..33: note = Probe
  source 1..33: mol_type = other DNA
atgtctgtagtcgtggccgagtggttaaggtga

SEQ ID NO: 28931 - DNA, 36 bp, synthetic construct
  misc_feature 1..36: note = Probe
  source 1..36: mol_type = other DNA
atgtcttccctggtggtctagtggttaggattcggc

SEQ ID NO: 28932 - DNA, 36 bp, synthetic construct
  misc_feature 1..36: note = Probe
  source 1..36: mol_type = other DNA
atgtgacgaggtggccgagtggttaaggcgatggac

SEQ ID NO: 28933 - DNA, 15 bp, synthetic construct
  misc_feature 1..15: note = Probe
  source 1..15: mol_type = other DNA
atgtggtggcttact

SEQ ID NO: 28934 - DNA, 16 bp, synthetic construct
  misc_feature 1..16: note = Probe
  source 1..16: mol_type = other DNA
atgtggtggcttactt

SEQ ID NO: 28935 - DNA, 17 bp, synthetic construct
  misc_feature 1..17: note = Probe
  source 1..17: mol_type = other DNA
atgtggtggcttacttt

SEQ ID NO: 28936 - DNA, 18 bp, synthetic construct
  misc_feature 1..18: note = Probe
  source 1..18: mol_type = other DNA
atgtggtggcttactttt

SEQ ID NO: 28937 - DNA, 19 bp, synthetic construct
  misc_feature 1..19: note = Probe
  source 1..19: mol_type = other DNA
atgtggtggcttacttttg

SEQ ID NO: 28938 - DNA, 36 bp, synthetic construct
  misc_feature 1..36: note = Probe
  source 1..36: mol_type = other DNA
atgtgtcaggatggccgagcggtctaaggcgctgcg

SEQ ID NO: 28939 - DNA, 15 bp, synthetic construct
  misc_feature 1..15: note = Probe
  source 1..15: mol_type = other DNA
atgtttagacgggct

SEQ ID NO: 28940 - DNA, 22 bp, synthetic construct
  misc_feature 1..22: note = Probe
  source 1..22: mol_type = other DNA
atgtttagacgggctcacatca

SEQ ID NO: 28941 - DNA, 23 bp, synthetic construct
  misc_feature 1..23: note = Probe
  source 1..23: mol_type = other DNA
atgtttagacgggctcacatcac

SEQ ID NO: 28942 - DNA, 26 bp, synthetic construct
  misc_feature 1..26: note = Probe
  source 1..26: mol_type = other DNA
atgtttagacgggctcacatcacccc

SEQ ID NO: 28943 - DNA, 27 bp, synthetic construct
  misc_feature 1..27: note = Probe
  source 1..27: mol_type = other DNA
atgtttagacgggctcacatcacccca

SEQ ID NO: 28944 - DNA, 29 bp, synthetic construct
  misc_feature 1..29: note = Probe
  source 1..29: mol_type = other DNA
atgtttagacgggctcacatcaccccata

SEQ ID NO: 28945 - DNA, 30 bp, synthetic construct; identical to SEQ ID NO: 419
  misc_feature 1..30: note = Probe
  source 1..30: mol_type = other DNA

SEQ ID NO: 28946 - DNA, 15 bp, synthetic construct
  misc_feature 1..15: note = Probe
  source 1..15: mol_type = other DNA
attaaagtggctgat

SEQ ID NO: 28947 - DNA, 16 bp, synthetic construct
  misc_feature 1..16: note = Probe
  source 1..16: mol_type = other DNA
attaaagtggctgatt

SEQ ID NO: 28948 - DNA, 19 bp, synthetic construct
  misc_feature 1..19: note = Probe
  source 1..19: mol_type = other DNA
attaaagtggctgatttgc

SEQ ID NO: 28949 - DNA, 26 bp, synthetic construct
  misc_feature 1..26: note = Probe
  source 1..26: mol_type = other DNA
attaaattatgataatcatatttacc

SEQ ID NO: 28950 - DNA, 32 bp, synthetic construct
  misc_feature 1..32: note = Probe
  source 1..32: mol_type = other DNA
attaaccttttaagttaaagattaagagaacc

SEQ ID NO: 28951 - DNA, 36 bp, synthetic construct
  misc_feature 1..36: note = Probe
  source 1..36: mol_type = other DNA
attaaccttttaagttaaagattaagagaaccaaca

SEQ ID NO: 28952 - DNA, 16 bp, synthetic construct
  misc_feature 1..16: note = Probe
  source 1..16: mol_type = other DNA
attaactagttttgac

SEQ ID NO: 28953 - DNA, 19 bp, synthetic construct
  misc_feature 1..19: note = Probe
  source 1..19: mol_type = other DNA
attaactagttttgacaac

SEQ ID NO: 28954 - DNA, 17 bp, synthetic construct
  misc_feature 1..17: note = Probe
  source 1..17: mol_type = other DNA
attaagagaaccaacac

SEQ ID NO: 28955 - DNA, 18 bp, synthetic construct
  misc_feature 1..18: note = Probe
  source 1..18: mol_type = other DNA
attaagagaaccaacacc

SEQ ID NO: 28956 - DNA, 19 bp, synthetic construct
  misc_feature 1..19: note = Probe
  source 1..19: mol_type = other DNA
attaagagaaccaacacct

SEQ ID NO: 28957 - DNA, 31 bp, synthetic construct
  misc_feature 1..31: note = Probe
  source 1..31: mol_type = other DNA
attaagagaaccaacacctctttacagtgaa

SEQ ID NO: 28958 - DNA, 15 bp, synthetic construct
  misc_feature 1..15: note = Probe
  source 1..15: mol_type = other DNA
attaatcccctggcc

SEQ ID NO: 28959 - DNA, 16 bp, synthetic construct
  misc_feature 1..16: note = Probe
  source 1..16: mol_type = other DNA
attaatcccctggccc

SEQ ID NO: 28960 - DNA, 17 bp, synthetic construct
  misc_feature 1..17: note = Probe
  source 1..17: mol_type = other DNA
attaatcccctggccca

SEQ ID NO: 28961 - DNA, 18 bp, synthetic construct
  misc_feature 1..18: note = Probe
  source 1..18: mol_type = other DNA
attaatcccctggcccaa

SEQ ID NO: 28962 - DNA, 19 bp, synthetic construct
  misc_feature 1..19: note = Probe
  source 1..19: mol_type = other DNA
attaatcccctggcccaac

SEQ ID NO: 28963 - DNA, 20 bp, synthetic construct
  misc_feature 1..20: note = Probe
  source 1..20: mol_type = other DNA
attaatcccctggcccaacc

SEQ ID NO: 28964 - DNA, 21 bp, synthetic construct
  misc_feature 1..21: note = Probe
  source 1..21: mol_type = other DNA
attaatcccctggcccaaccc

SEQ ID NO: 28965 - DNA, 22 bp, synthetic construct
  misc_feature 1..22: note = Probe
  source 1..22: mol_type = other DNA
attaatcccctggcccaacccg

SEQ ID NO: 28966 - DNA, 23 bp, synthetic construct
  misc_feature 1..23: note = Probe
  source 1..23: mol_type = other DNA
attaatcccctggcccaacccgt

SEQ ID NO: 28967 - DNA, 24 bp, synthetic construct
  misc_feature 1..24: note = Probe
  source 1..24: mol_type = other DNA
attaatcccctggcccaacccgtc

SEQ ID NO: 28968 - DNA, 25 bp, synthetic construct
  misc_feature 1..25: note = Probe
  source 1..25: mol_type = other DNA
attaatcccctggcccaacccgtca

SEQ ID NO: 28969 - DNA, 26 bp, synthetic construct
  misc_feature 1..26: note = Probe
  source 1..26: mol_type = other DNA
attaatcccctggcccaacccgtcat

SEQ ID NO: 28970 - DNA, 27 bp, synthetic construct
  misc_feature 1..27: note = Probe
  source 1..27: mol_type = other DNA
attaatcccctggcccaacccgtcatc

SEQ ID NO: 28971 - DNA, 28 bp, synthetic construct
  misc_feature 1..28: note = Probe
  source 1..28: mol_type = other DNA
attaatcccctggcccaacccgtcatct

SEQ ID NO: 28972 - DNA, 29 bp, synthetic construct
  misc_feature 1..29: note = Probe
  source 1..29: mol_type = other DNA
attaatcccctggcccaacccgtcatcta

SEQ ID NO: 28973 - DNA, 30 bp, synthetic construct; identical to SEQ ID NO: 3877
  misc_feature 1..30: note = Probe
  source 1..30: mol_type = other DNA

SEQ ID NO: 28974 - DNA, 15 bp, synthetic construct
  misc_feature 1..15: note = Probe
  source 1..15: mol_type = other DNA
attagaatcttagct

SEQ ID NO: 28975 - DNA, 16 bp, synthetic construct
  misc_feature 1..16: note = Probe
  source 1..16: mol_type = other DNA
attagaatcttagctt

SEQ ID NO: 28976 - DNA, 18 bp, synthetic construct
  misc_feature 1..18: note = Probe
  source 1..18: mol_type = other DNA
attagaatcttagctttg

SEQ ID NO: 28977 - DNA, 19 bp, synthetic construct
  misc_feature 1..19: note = Probe
  source 1..19: mol_type = other DNA
attagaatcttagctttgg

SEQ ID NO: 28978 - DNA, 24 bp, synthetic construct
  misc_feature 1..24: note = Probe
  source 1..24: mol_type = other DNA
attagaatcttagctttgggtgct

SEQ ID NO: 28979 - DNA, 43 bp, synthetic construct
  misc_feature 1..43: note = Probe
  source 1..43: mol_type = other DNA
attagaatcttagctttgggtgctaatggtggagttaaagact

SEQ ID NO: 28980 - DNA, 19 bp, synthetic construct
  misc_feature 1..19: note = Probe
  source 1..19: mol_type = other DNA
attagggtgcttagctgtt

SEQ ID NO: 28981 - DNA, 37 bp, synthetic construct
  misc_feature 1..37: note = Probe
  source 1..37: mol_type = other DNA
attagggtgcttagctgttaactaagtgtttgtgggt

SEQ ID NO: 28982 - DNA, 17 bp, synthetic construct
  misc_feature 1..17: note = Probe
  source 1..17: mol_type = other DNA
attcaaaggttccgggt

SEQ ID NO: 28983 - DNA, 43 bp, synthetic construct
  misc_feature 1..43: note = Probe
  source 1..43: mol_type = other DNA
attcaaaggttccgggttcgagtcccggcggagtcgtaacgct

SEQ ID NO: 28984 - DNA, 44 bp, synthetic construct
  misc_feature 1..44: note = Probe
  source 1..44: mol_type = other DNA
attcaaaggttccgggttcgagtcccggcggagtcgtaacgctt

SEQ ID NO: 28985 - DNA, 45 bp, synthetic construct
  misc_feature 1..45: note = Probe
  source 1..45: mol_type = other DNA
attcaaaggttccgggttcgagtcccggcggagtcgtaacgcttt

SEQ ID NO: 28986 - DNA, 46 bp, synthetic construct
  misc_feature 1..46: note = Probe
  source 1..46: mol_type = other DNA
attcaaaggttccgggttcgagtcccggcggagtcgtaacgctttt

SEQ ID NO: 28987 - DNA, 16 bp, synthetic construct
  misc_feature 1..16: note = Probe
  source 1..16: mol_type = other DNA
attcaaaggttgtggg

SEQ ID NO: 28988 - DNA, 38 bp, synthetic construct
  misc_feature 1..38: note = Probe
  source 1..38: mol_type = other DNA
attcaaaggttgtgggttcgagtcccaccagagtcgct

SEQ ID NO: 28989 - DNA, 36 bp, synthetic construct
  misc_feature 1..36: note = Probe
  source 1..36: mol_type = other DNA
attcccattcttgcgacccgggttcgattcccgggc

SEQ ID NO: 28990 - DNA, 16 bp, synthetic construct
  misc_feature 1..16: note = Probe
  source 1..16: mol_type = other DNA
attccccgacggggag

SEQ ID NO: 28991 - DNA, 19 bp, synthetic construct
  misc_feature 1..19: note = Probe
  source 1..19: mol_type = other DNA
attccccgacggggaggca

SEQ ID NO: 28992 - DNA, 18 bp, synthetic construct
  misc_feature 1..18: note = Probe
  source 1..18: mol_type = other DNA
attcccggccaacgcagc

SEQ ID NO: 28993 - DNA, 28 bp, synthetic construct
  misc_feature 1..28: note = Probe
  source 1..28: mol_type = other DNA
attcccggccaacgcagcgggcggacct

SEQ ID NO: 28994 - DNA, 27 bp, synthetic construct
  misc_feature 1..27: note = Probe
  source 1..27: mol_type = other DNA
attcccggccaatgcaacgatgacgtt

SEQ ID NO: 28995 - DNA, 28 bp, synthetic construct
  misc_feature 1..28: note = Probe
  source 1..28: mol_type = other DNA
attcccggccaatgcaacgatgacgttt

SEQ ID NO: 28996 - DNA, 29 bp, synthetic construct
  misc_feature 1..29: note = Probe
  source 1..29: mol_type = other DNA
attcccggccaatgcaacgatgacgtttt

SEQ ID NO: 28997 - DNA, 30 bp, synthetic construct
  misc_feature 1..30: note = Probe
  source 1..30: mol_type = other DNA
attcccggccaatgcaacgatgacgtttta

SEQ ID NO: 28998 - DNA, 17 bp, synthetic construct
  misc_feature 1..17: note = Probe
  source 1..17: mol_type = other DNA
attcccggccaatgcac

SEQ ID NO: 28999 - DNA, 19 bp, synthetic construct
  misc_feature 1..19: note = Probe
  source 1..19: mol_type = other DNA
attcccggcccatgcagca

SEQ ID NO: 29000 - DNA, 18 bp, synthetic construct
  misc_feature 1..18: note = Probe
  source 1..18: mol_type = other DNA
attcccggtcagggaacc

SEQ ID NO: 29001 - DNA, 17 bp, synthetic construct
  misc_feature 1..17: note = Probe
  source 1..17: mol_type = other DNA
attccggctcgaaggac

SEQ ID NO: 29002 - DNA, 18 bp, synthetic construct
  misc_feature 1..18: note = Probe
  source 1..18: mol_type = other DNA
attccggctcgaaggact

SEQ ID NO: 29003 - DNA, 23 bp, synthetic construct
  misc_feature 1..23: note = Probe
  source 1..23: mol_type = other DNA
attccggctcgaaggacttcgtc

SEQ ID NO: 29004 - DNA, 18 bp, synthetic construct
  misc_feature 1..18: note = Probe
  source 1..18: mol_type = other DNA
attccggctcgaaggagc

SEQ ID NO: 29005 - DNA, 18 bp, synthetic construct
  misc_feature 1..18: note = Probe
  source 1..18: mol_type = other DNA
attccttccttttttgtc

SEQ ID NO: 29006 - DNA, 32 bp, synthetic construct
  misc_feature 1..32: note = Probe
  source 1..32: mol_type = other DNA
attcgaagaagcagcttcaaacctgccggggc

SEQ ID NO: 29007 - DNA, 33 bp, synthetic construct; identical to SEQ ID NO: 3885
  misc_feature 1..33: note = Probe
  source 1..33: mol_type = other DNA

SEQ ID NO: 29008 - DNA, 34 bp, synthetic construct
  misc_feature 1..34: note = Probe
  source 1..34: mol_type = other DNA
attcgaagaagcagcttcaaacctgccggggctt

SEQ ID NO: 29009 - DNA, 35 bp, synthetic construct; identical to SEQ ID NO: 3886
  misc_feature 1..35: note = Probe
  source 1..35: mol_type = other DNA

SEQ ID NO: 29010 - DNA, 36 bp, synthetic construct; identical to SEQ ID NO: 3887
  misc_feature 1..36: note = Probe
  source 1..36: mol_type = other DNA

SEQ ID NO: 29011 - DNA, 16 bp, synthetic construct
  misc_feature 1..16: note = Probe
  source 1..16: mol_type = other DNA
attcggcgctctcacc

SEQ ID NO: 29012 - DNA, 18 bp, synthetic construct
  misc_feature 1..18: note = Probe
  source 1..18: mol_type = other DNA
attcggcgctctcaccgc

SEQ ID NO: 29013 - DNA, 19 bp, synthetic construct
  misc_feature 1..19: note = Probe
  source 1..19: mol_type = other DNA
attcggcgctctcaccgcc

SEQ ID NO: 29014 - DNA, 25 bp, synthetic construct
  misc_feature 1..25: note = Probe
  source 1..25: mol_type = other DNA
attcggcgctctcaccgccgcggcc

SEQ ID NO: 29015 - DNA, 27 bp, synthetic construct
  misc_feature 1..27: note = Probe
  source 1..27: mol_type = other DNA
attcggcgctctcaccgccgcggcccg

SEQ ID NO: 29016 - DNA, 28 bp, synthetic construct
  misc_feature 1..28: note = Probe
  source 1..28: mol_type = other DNA
attcggcgctctcaccgccgcggcccgg

SEQ ID NO: 29017 - DNA, 29 bp, synthetic construct
  misc_feature 1..29: note = Probe
  source 1..29: mol_type = other DNA
attcggcgctctcaccgccgcggcccggg

SEQ ID NO: 29018 - DNA, 32 bp, synthetic construct
  misc_feature 1..32: note = Probe
  source 1..32: mol_type = other DNA
attcggcgctctcaccgccgcggcccgggttc

SEQ ID NO: 29019 - DNA, 50 bp, synthetic construct
  misc_feature 1..50: note = Probe
  source 1..50: mol_type = other DNA
attcggcgctctcaccgccgcggcccgggttcgattcccggtcagggaaa

SEQ ID NO: 29020 - DNA, 50 bp, synthetic construct
  misc_feature 1..50: note = Probe
  source 1..50: mol_type = other DNA
attcggcgctctcaccgccgcggcccgggttcgattcccggtcagggaag

SEQ ID NO: 29021 - DNA, 50 bp, synthetic construct
  misc_feature 1..50: note = Probe
  source 1..50: mol_type = other DNA
attcggcgctctcaccgccgcggcccgggttcgattcccggtcagggaat

SEQ ID NO: 29022 - DNA, 26 bp, synthetic construct
  misc_feature 1..26: note = Probe
  source 1..26: mol_type = other DNA
attcggcgctttcaccgccgcggccc

SEQ ID NO: 29023 - DNA, 33 bp, synthetic construct
  misc_feature 1..33: note = Probe
  source 1..33: mol_type = other DNA
attctcagggatgggttcgattctcatagtcct

SEQ ID NO: 29024 - DNA, 36 bp, synthetic construct; identical to SEQ ID NO: 17538
  misc_feature 1..36: note = Probe
  source 1..36: mol_type = other DNA

SEQ ID NO: 29025 - DNA, 15 bp, synthetic construct
  misc_feature 1..15: note = Probe
  source 1..15: mol_type = other DNA
attctcgcctgccac

SEQ ID NO: 29026 - DNA, 16 bp, synthetic construct
  misc_feature 1..16: note = Probe
  source 1..16: mol_type = other DNA
attctcgcctgccacg

SEQ ID NO: 29027 - DNA, 17 bp, synthetic construct
  misc_feature 1..17: note = Probe
  source 1..17: mol_type = other DNA
attctcgcctgccacgc

SEQ ID NO: 29028 - DNA, 33 bp, synthetic construct; identical to SEQ ID NO: 17541
  misc_feature 1..33: note = Probe
  source 1..33: mol_type = other DNA

SEQ ID NO: 29029 - DNA, 34 bp, synthetic construct; identical to SEQ ID NO: 17542
  misc_feature 1..34: note = Probe
  source 1..34: mol_type = other DNA

SEQ ID NO: 29030 - DNA, 38 bp, synthetic construct; identical to SEQ ID NO: 3895
  misc_feature 1..38: note = Probe
  source 1..38: mol_type = other DNA

SEQ ID NO: 29031 - DNA, 39 bp, synthetic construct; identical to SEQ ID NO: 3896
  misc_feature 1..39: note = Probe
  source 1..39: mol_type = other DNA

SEQ ID NO: 29032 - DNA, 28 bp, synthetic construct
  misc_feature 1..28: note = Probe
  source 1..28: mol_type = other DNA
attgaaaacaaaatactcaaatgggcct

SEQ ID NO: 29033 - DNA, 36 bp, synthetic construct
  misc_feature 1..36: note = Probe
  source 1..36: mol_type = other DNA
attgaagccagttgattagggtgcttagctgttaac

SEQ ID NO: 29034 - DNA, 36 bp, synthetic construct
  misc_feature 1..36: note = Probe
  source 1..36: mol_type = other DNA
attgcaaattcgaagaagcagcttcaaacctgccgg

SEQ ID NO: 29035 - DNA, 36 bp, synthetic construct
  misc_feature 1..36: note = Probe
  source 1..36: mol_type = other DNA
attgcgaggttccatggtgtaatggttagcactctg

SEQ ID NO: 29036 - DNA, 15 bp, synthetic construct
  misc_feature 1..15: note = Probe
  source 1..15: mol_type = other DNA
attggtcgtggttgt

SEQ ID NO: 29037 - DNA, 16 bp, synthetic construct
  misc_feature 1..16: note = Probe
  source 1..16: mol_type = other DNA
attggtcgtggttgta

SEQ ID NO: 29038 - DNA, 17 bp, synthetic construct
  misc_feature 1..17: note = Probe
  source 1..17: mol_type = other DNA
attggtcgtggttgtag

SEQ ID NO: 29039 - DNA, 18 bp, synthetic construct
  misc_feature 1..18: note = Probe
  source 1..18: mol_type = other DNA
attggtcgtggttgtagt

SEQ ID NO: 29040 - DNA, 22 bp, synthetic construct
  misc_feature 1..22: note = Probe
  source 1..22: mol_type = other DNA
attggtcgtggttgtagtccgt

SEQ ID NO: 29041 - DNA, 32 bp, synthetic construct; identical to SEQ ID NO: 17555
  misc_feature 1..32: note = Probe
  source 1..32: mol_type = other DNA

SEQ ID NO: 29042 - DNA, 33 bp, synthetic construct; identical to SEQ ID NO: 3910
  misc_feature 1..33: note = Probe
  source 1..33: mol_type = other DNA

SEQ ID NO: 29043 - DNA, 36 bp, synthetic construct
  misc_feature 1..36: note = Probe
  source 1..36: mol_type = other DNA
attggtcgtggttgtagtccgtgcgagaataatgat

SEQ ID NO: 29044 - DNA, 15 bp, synthetic construct
  misc_feature 1..15: note = Probe
  source 1..15: mol_type = other DNA
attggtcttaggccc

SEQ ID NO: 29045 - DNA, 16 bp, synthetic construct
  misc_feature 1..16: note = Probe
  source 1..16: mol_type = other DNA
attggtcttaggcccc

SEQ ID NO: 29046 - DNA, 35 bp, synthetic construct
  misc_feature 1..35: note = Probe
  source 1..35: mol_type = other DNA
attggtcttaggccccaaaaattttggtgcaactc

SEQ ID NO: 29047 - DNA, 36 bp, synthetic construct
  misc_feature 1..36: note = Probe
  source 1..36: mol_type = other DNA
attggtcttaggccccaaaaattttggtgcaactcc

SEQ ID NO: 29048 - DNA, 26 bp, synthetic construct
  misc_feature 1..26: note = Probe
  source 1..26: mol_type = other DNA
attggtggttcagtggtagaattctc

SEQ ID NO: 29049 - DNA, 28 bp, synthetic construct
  misc_feature 1..28: note = Probe
  source 1..28: mol_type = other DNA
attggtggttcagtggtagaattctcgc

SEQ ID NO: 29050 - DNA, 29 bp, synthetic construct
  misc_feature 1..29: note = Probe
  source 1..29: mol_type = other DNA
attggtggttcagtggtagaattctcgcc

SEQ ID NO: 29051 - DNA, 30 bp, synthetic construct; identical to SEQ ID NO: 3916
  misc_feature 1..30: note = Probe
  source 1..30: mol_type = other DNA

SEQ ID NO: 29052 - DNA, 36 bp, synthetic construct
  misc_feature 1..36: note = Probe
  source 1..36: mol_type = other DNA
attggtggttcagtggtagaattctcgcctcccacg

SEQ ID NO: 29053 - DNA, 31 bp, synthetic construct; identical to SEQ ID NO: 3919
  misc_feature 1..31: note = Probe
  source 1..31: mol_type = other DNA

SEQ ID NO: 29054 - DNA, 32 bp, synthetic construct; identical to SEQ ID NO: 3920
  misc_feature 1..32: note = Probe
  source 1..32: mol_type = other DNA

SEQ ID NO: 29055 - DNA, 33 bp, synthetic construct; identical to SEQ ID NO: 3921
  misc_feature 1..33: note = Probe
  source 1..33: mol_type = other DNA

SEQ ID NO: 29056 - DNA, 34 bp, synthetic construct; identical to SEQ ID NO: 3922
  misc_feature 1..34: note = Probe
  source 1..34: mol_type = other DNA

SEQ ID NO: 29057 - DNA, 50 bp, synthetic construct
  misc_feature 1..50: note = Probe
  source 1..50: mol_type = other DNA
attggtggttcagtggtagaattctcgcctgccacgcgggaggcccgggt

SEQ ID NO: 29058 - DNA, 21 bp, synthetic construct
  misc_feature 1..21: note = Probe
  source 1..21: mol_type = other DNA
attgtacagacatttgcggac

SEQ ID NO: 29059 - DNA, 15 bp, synthetic construct
  misc_feature 1..15: note = Probe
  source 1..15: mol_type = other DNA
attgtgaatctgaca

SEQ ID NO: 29060 - DNA, 16 bp, synthetic construct
  misc_feature 1..16: note = Probe
  source 1..16: mol_type = other DNA
attgtgaatctgacaa

SEQ ID NO: 29061 - DNA, 17 bp, synthetic construct
  misc_feature 1..17: note = Probe
  source 1..17: mol_type = other DNA
attgtgaatctgacaac

SEQ ID NO: 29062 - DNA, 18 bp, synthetic construct
  misc_feature 1..18: note = Probe
  source 1..18: mol_type = other DNA
attgtgaatctgacaaca

SEQ ID NO: 29063 - DNA, 20 bp, synthetic construct
  misc_feature 1..20: note = Probe
  source 1..20: mol_type = other DNA
attgtgaatctgacaacaga

SEQ ID NO: 29064 - DNA, 23 bp, synthetic construct
  misc_feature 1..23: note = Probe
  source 1..23: mol_type = other DNA
attgtgaatctgacaacagaggc

SEQ ID NO: 29065 - DNA, 24 bp, synthetic construct
  misc_feature 1..24: note = Probe
  source 1..24: mol_type = other DNA
attgtgaatctgacaacagaggct

SEQ ID NO: 29066 - DNA, 25 bp, synthetic construct
  misc_feature 1..25: note = Probe
  source 1..25: mol_type = other DNA
attgtgaatctgacaacagaggctt

SEQ ID NO: 29067 - DNA, 26 bp, synthetic construct
  misc_feature 1..26: note = Probe
  source 1..26: mol_type = other DNA
attgtgaatctgacaacagaggctta

SEQ ID NO: 29068 - DNA, 29 bp, synthetic construct
  misc_feature 1..29: note = Probe
  source 1..29: mol_type = other DNA
attgtgaatctgacaacagaggcttacga

SEQ ID NO: 29069 - DNA, 34 bp, synthetic construct; identical to SEQ ID NO: 3926
  misc_feature 1..34: note = Probe
  source 1..34: mol_type = other DNA

SEQ ID NO: 29070 - DNA, 35 bp, synthetic construct; identical to SEQ ID NO: 3927
  misc_feature 1..35: note = Probe
  source 1..35: mol_type = other DNA

SEQ ID NO: 29071 - DNA, 42 bp, synthetic construct; identical to SEQ ID NO: 3929
  misc_feature 1..42: note = Probe
  source 1..42: mol_type = other DNA

SEQ ID NO: 29072 - DNA, 43 bp, synthetic construct; identical to SEQ ID NO: 3930
  misc_feature 1..43: note = Probe
  source 1..43: mol_type = other DNA

SEQ ID NO: 29073 - DNA, 44 bp, synthetic construct; identical to SEQ ID NO: 3931
  misc_feature 1..44: note = Probe
  source 1..44: mol_type = other DNA

SEQ ID NO: 29074 - DNA, 31 bp, synthetic construct
  misc_feature 1..31: note = Probe
  source 1..31: mol_type = other DNA
attgtgaggacaatggcacggcaaggggagt

SEQ ID NO: 29075 - DNA, 36 bp, synthetic construct
  misc_feature 1..36: note = Probe
  source 1..36: mol_type = other DNA
attgtgctttgcacgcgtgggttcgaatcccatcct

SEQ ID NO: 29076 - DNA, 43 bp, synthetic construct
  misc_feature 1..43: note = Probe
  source 1..43: mol_type = other DNA
attgtgctttgcacgcgtgggttcgaatcccatcctcgtcggc

SEQ ID NO: 29077 - DNA, 31 bp, synthetic construct
  misc_feature 1..31: note = Probe
  source 1..31: mol_type = other DNA
attgtgggaacaatggcacggcaaggggctc

SEQ ID NO: 29078 - DNA, 22 bp, synthetic construct
  misc_feature 1..22: note = Probe
  source 1..22: mol_type = other DNA
atttcaacttaacttgaccgct

SEQ ID NO: 29079 - DNA, 23 bp, synthetic construct
  misc_feature 1..23: note = Probe
  source 1..23: mol_type = other DNA
atttcaacttaacttgaccgctc

SEQ ID NO: 29080 - DNA, 24 bp, synthetic construct
  misc_feature 1..24: note = Probe
  source 1..24: mol_type = other DNA
atttcaacttaacttgaccgctct

SEQ ID NO: 29081 - DNA, 26 bp, synthetic construct
  misc_feature 1..26: note = Probe
  source 1..26: mol_type = other DNA
atttcaacttaacttgaccgctctga

SEQ ID NO: 29082 - DNA, 27 bp, synthetic construct
  misc_feature 1..27: note = Probe
  source 1..27: mol_type = other DNA
atttcaacttaacttgaccgctctgag

SEQ ID NO: 29083 - DNA, 28 bp, synthetic construct
  misc_feature 1..28: note = Probe
  source 1..28: mol_type = other DNA
atttcaacttaacttgaccgctctgagc

SEQ ID NO: 29084 - DNA, 36 bp, synthetic construct
  misc_feature 1..36: note = Probe
  source 1..36: mol_type = other DNA
atttcaacttaacttgaccgctctgagctaaaccta

SEQ ID NO: 29085 - DNA, 34 bp, synthetic construct
  misc_feature 1..34: note = Probe
  source 1..34: mol_type = other DNA
atttcataactttgtcaaagttaaattataggct

SEQ ID NO: 29086 - DNA, 17 bp, synthetic construct
  misc_feature 1..17: note = Probe
  source 1..17: mol_type = other DNA
atttcgactcattaaat

SEQ ID NO: 29087 - DNA, 35 bp, synthetic construct
  misc_feature 1..35: note = Probe
  source 1..35: mol_type = other DNA
atttcgactcattaaattatgataatcatatttac

SEQ ID NO: 29088 - DNA, 36 bp, synthetic construct; identical to SEQ ID NO: 17588
  misc_feature 1..36: note = Probe
  source 1..36: mol_type = other DNA

SEQ ID NO: 29089 - DNA, 26 bp, synthetic construct
  misc_feature 1..26: note = Probe
  source 1..26: mol_type = other DNA
atttctaggactatgagaatcgaacc

SEQ ID NO: 29090 - DNA, 27 bp, synthetic construct
  misc_feature 1..27: note = Probe
  source 1..27: mol_type = other DNA
atttctaggactatgagaatcgaaccc

SEQ ID NO: 29091 - DNA, 19 bp, synthetic construct
  misc_feature 1..19: note = Probe
  source 1..19: mol_type = other DNA
attttcatattgaattgca

SEQ ID NO: 29092 - DNA, 36 bp, synthetic construct
  misc_feature 1..36: note = Probe
  source 1..36: mol_type = other DNA
attttcatattgaattgcaaattcgaagaagcagct

SEQ ID NO: 29093 - DNA, 36 bp, synthetic construct
  misc_feature 1..36: note = Probe
  source 1..36: mol_type = other DNA
attttggattctcagggatgggttcgattctcatag

SEQ ID NO: 29094 - DNA, 40 bp, synthetic construct
  misc_feature 1..40: note = Probe
  source 1..40: mol_type = other DNA
attttggattctcagggatgggttcgattctcatagtcct

SEQ ID NO: 29095 - DNA, 45 bp, synthetic construct
  misc_feature 1..45: note = Probe
  source 1..45: mol_type = other DNA
attttggattctcagggatgggttcgattctcatagtcctagaaa

SEQ ID NO: 29096 - DNA, 15 bp, synthetic construct
  misc_feature 1..15: note = Probe
  source 1..15: mol_type = other DNA
attttggtgcaactc

SEQ ID NO: 29097 - DNA, 16 bp, synthetic construct
  misc_feature 1..16: note = Probe
  source 1..16: mol_type = other DNA
attttggtgcaactcc

SEQ ID NO: 29098 - DNA, 21 bp, synthetic construct
  misc_feature 1..21: note = Probe
  source 1..21: mol_type = other DNA
caaaaaggattagactgaacc

SEQ ID NO: 29099 - DNA, 19 bp, synthetic construct
  misc_feature 1..19: note = Probe
  source 1..19: mol_type = other DNA
caaaaattttggtgcaact

SEQ ID NO: 29100 - DNA, 20 bp, synthetic construct
  misc_feature 1..20: note = Probe
  source 1..20: mol_type = other DNA
caaaaattttggtgcaactc

SEQ ID NO: 29101 - DNA, 21 bp, synthetic construct
  misc_feature 1..21: note = Probe
  source 1..21: mol_type = other DNA
caaaaattttggtgcaactcc

SEQ ID NO: 29102 - DNA, 22 bp, synthetic construct
  misc_feature 1..22: note = Probe
  source 1..22: mol_type = other DNA
caaaaattttggtgcaactcca

SEQ ID NO: 29103 - DNA, 18 bp, synthetic construct
  misc_feature 1..18: note = Probe
  source 1..18: mol_type = other DNA
caaaacatcagattgtga

SEQ ID NO: 29104 - DNA, 21 bp, synthetic construct
  misc_feature 1..21: note = Probe
  source 1..21: mol_type = other DNA
caaaacatcagattgtgaatc

SEQ ID NO: 29105 - DNA, 22 bp, synthetic construct
  misc_feature 1..22: note = Probe
  source 1..22: mol_type = other DNA
caaaacatcagattgtgaatct

SEQ ID NO: 29106 - DNA, 35 bp, synthetic construct; identical to SEQ ID NO: 3952
  misc_feature 1..35: note = Probe
  source 1..35: mol_type = other DNA

SEQ ID NO: 29107 - DNA, 39 bp, synthetic construct; identical to SEQ ID NO: 429
  misc_feature 1..39: note = Probe
  source 1..39: mol_type = other DNA

SEQ ID NO: 29108 - DNA, 40 bp, synthetic construct; identical to SEQ ID NO: 430
  misc_feature 1..40: note = Probe
  source 1..40: mol_type = other DNA

SEQ ID NO: 29109 - DNA, 43 bp, synthetic construct; identical to SEQ ID NO: 433
  misc_feature 1..43: note = Probe
  source 1..43: mol_type = other DNA

SEQ ID NO: 29110 - DNA, 20 bp, synthetic construct
  misc_feature 1..20: note = Probe
  source 1..20: mol_type = other DNA
caaaacgaatgatttcgact

SEQ ID NO: 29111 - DNA, 21 bp, synthetic construct
  misc_feature 1..21: note = Probe
  source 1..21: mol_type = other DNA
caaaacgaatgatttcgactc

SEQ ID NO: 29112 - DNA, 36 bp, synthetic construct
  misc_feature 1..36: note = Probe
  source 1..36: mol_type = other DNA
caaaacgaatgatttcgactcattaaattatgataa

SEQ ID NO: 29113 - DNA, 36 bp, synthetic construct
  misc_feature 1..36: note = Probe
  source 1..36: mol_type = other DNA
caaaagaacctgggtagctcagtaggtagaacatca

SEQ ID NO: 29114 - DNA, 19 bp, synthetic construct
  misc_feature 1..19: note = Probe
  source 1..19: mol_type = other DNA
caaaatactcaaatgggcc

SEQ ID NO: 29115 - DNA, 15 bp, synthetic construct
  misc_feature 1..15: note = Probe
  source 1..15: mol_type = other DNA
caaacccactccacc

SEQ ID NO: 29116 - DNA, 16 bp, synthetic construct
  misc_feature 1..16: note = Probe
  source 1..16: mol_type = other DNA
caaacccactccacct

SEQ ID NO: 29117 - DNA, 33 bp, synthetic construct; identical to SEQ ID NO: 3961
  misc_feature 1..33: note = Probe
  source 1..33: mol_type = other DNA

SEQ ID NO: 29118 - DNA, 34 bp, synthetic construct; identical to SEQ ID NO: 17617
  misc_feature 1..34: note = Probe
  source 1..34: mol_type = other DNA

SEQ ID NO: 29119 - DNA, 35 bp, synthetic construct
  misc_feature 1..35: note = Probe
  source 1..35: mol_type = other DNA
caaagacaccccccacagtttatgtagcttacctc

SEQ ID NO: 29120 - DNA, 36 bp, synthetic construct; identical to SEQ ID NO: 3962
  misc_feature 1..36: note = Probe
  source 1..36: mol_type = other DNA

SEQ ID NO: 29121 - DNA, 37 bp, synthetic construct; identical to SEQ ID NO: 3963
  misc_feature 1..37: note = Probe
  source 1..37: mol_type = other DNA

SEQ ID NO: 29122 - DNA, 15 bp, synthetic construct
  misc_feature 1..15: note = Probe
  source 1..15: mol_type = other DNA
caaagcaatacactg

SEQ ID NO: 29123 - DNA, 32 bp, synthetic construct
  misc_feature 1..32: note = Probe
  source 1..32: mol_type = other DNA
caaagcaatacactgaaaatgtttagacgggc

SEQ ID NO: 29124 - DNA, 34 bp, synthetic construct
  misc_feature 1..34: note = Probe
  source 1..34: mol_type = other DNA
caaagcaatacactgaaaatgtttagacgggctc

SEQ ID NO: 29125 - DNA, 35 bp, synthetic construct; identical to SEQ ID NO: 438
  misc_feature 1..35: note = Probe
  source 1..35: mol_type = other DNA

SEQ ID NO: 29126 - DNA, 36 bp, synthetic construct; identical to SEQ ID NO: 17625
  misc_feature 1..36: note = Probe
  source 1..36: mol_type = other DNA

SEQ ID NO: 29127 - DNA, 18 bp, synthetic construct
  misc_feature 1..18: note = Probe
  source 1..18: mol_type = other DNA
caaagcacccaacttaca

SEQ ID NO: 29128 - DNA, 20 bp, synthetic construct
  misc_feature 1..20: note = Probe
  source 1..20: mol_type = other DNA
caaagcacccaacttacact

SEQ ID NO: 29129 - DNA, 24 bp, synthetic construct
  misc_feature 1..24: note = Probe
  source 1..24: mol_type = other DNA
caaagcacccaacttacacttagg

SEQ ID NO: 29130 - DNA, 25 bp, synthetic construct
  misc_feature 1..25: note = Probe
  source 1..25: mol_type = other DNA
caaagcacccaacttacacttagga

SEQ ID NO: 29131 - DNA, 27 bp, synthetic construct
  misc_feature 1..27: note = Probe
  source 1..27: mol_type = other DNA
caaagcacccaacttacacttaggaga

SEQ ID NO: 29132 - DNA, 33 bp, synthetic construct; identical to SEQ ID NO: 3982
  misc_feature 1..33: note = Probe
  source 1..33: mol_type = other DNA

SEQ ID NO: 29133 - DNA, 35 bp, synthetic construct; identical to SEQ ID NO: 3984
  misc_feature 1..35: note = Probe
  source 1..35: mol_type = other DNA

SEQ ID NO: 29134 - DNA, 50 bp, synthetic construct; identical to SEQ ID NO: 447
  misc_feature 1..50: note = Probe
  source 1..50: mol_type = other DNA

SEQ ID NO: 29135 - DNA, 36 bp, synthetic construct
  misc_feature 1..36: note = Probe
  source 1..36: mol_type = other DNA
caaaggttccgggttcgagtcccggcggagtcgtaa

SEQ ID NO: 29136 - DNA, 36 bp, synthetic construct
  misc_feature 1..36: note = Probe
  source 1..36: mol_type = other DNA
caaaggttgtgggttcgagtcccaccagagtcgctt

SEQ ID NO: 29137 - DNA, 36 bp, synthetic construct
  misc_feature 1..36: note = Probe
  source 1..36: mol_type = other DNA
caaagtggggtttccgtagtgtagtggttatcacgt

SEQ ID NO: 29138 - DNA, 16 bp, synthetic construct
  misc_feature 1..16: note = Probe
  source 1..16: mol_type = other DNA
caaatcccggacgagc

SEQ ID NO: 29139 - DNA, 17 bp, synthetic construct
  misc_feature 1..17: note = Probe
  source 1..17: mol_type = other DNA
caaatcccggacgagcc

SEQ ID NO: 29140 - DNA, 18 bp, synthetic construct
  misc_feature 1..18: note = Probe
  source 1..18: mol_type = other DNA
caaatcccggacgagccc

SEQ ID NO: 29141 - DNA, 19 bp, synthetic construct
  misc_feature 1..19: note = Probe
  source 1..19: mol_type = other DNA
caaatcccggacgagccca

SEQ ID NO: 29142 - DNA, 20 bp, synthetic construct
  misc_feature 1..20: note = Probe
  source 1..20: mol_type = other DNA
caaatcccggacgagcccac

SEQ ID NO: 29143 - DNA, 21 bp, synthetic construct
  misc_feature 1..21: note = Probe
  source 1..21: mol_type = other DNA
caaatcccggacgagcccaca

SEQ ID NO: 29144 - DNA, 23 bp, synthetic construct
  misc_feature 1..23: note = Probe
  source 1..23: mol_type = other DNA
caaatcccggacgagcccacttt

SEQ ID NO: 29145 - DNA, 24 bp, synthetic construct
  misc_feature 1..24: note = Probe
  source 1..24: mol_type = other DNA
caaatcccggacgagcccactttt

SEQ ID NO: 29146 - DNA, 25 bp, synthetic construct
  misc_feature 1..25: note = Probe
  source 1..25: mol_type = other DNA
caaatcccggacgagcccaggcttt

SEQ ID NO: 29147 - DNA, 20 bp, synthetic construct
  misc_feature 1..20: note = Probe
  source 1..20: mol_type = other DNA
caaatcccggacgagccccc

SEQ ID NO: 29148 - DNA, 21 bp, synthetic construct
  misc_feature 1..21: note = Probe
  source 1..21: mol_type = other DNA
caaatcccggacgagccccct

SEQ ID NO: 29149 - DNA, 19 bp, synthetic construct
  misc_feature 1..19: note = Probe
  source 1..19: mol_type = other DNA
caaatcccggacgagcccg

SEQ ID NO: 29150 - DNA, 19 bp, synthetic construct
  misc_feature 1..19: note = Probe
  source 1..19: mol_type = other DNA
caaatcccggacgagccct

SEQ ID NO: 29151 - DNA, 20 bp, synthetic construct
  misc_feature 1..20: note = Probe
  source 1..20: mol_type = other DNA
caaatcccggacgagccctc

SEQ ID NO: 29152 - DNA, 21 bp, synthetic construct
  misc_feature 1..21: note = Probe
  source 1..21: mol_type = other DNA
caaatcccggacgagccctca

SEQ ID NO: 29153 - DNA, 23 bp, synthetic construct
  misc_feature 1..23: note = Probe
  source 1..23: mol_type = other DNA
caaatcccggacgagccctcatt

SEQ ID NO: 29154 - DNA, 24 bp, synthetic construct
  misc_feature 1..24: note = Probe
  source 1..24: mol_type = other DNA
caaatcccggacgagccctcattt

SEQ ID NO: 29155 - DNA, 23 bp, synthetic construct
  misc_feature 1..23: note = Probe
  source 1..23: mol_type = other DNA
caaatcccggacgagccctgttt

SEQ ID NO: 29156 - DNA, 21 bp, synthetic construct
  misc_feature 1..21: note = Probe
  source 1..21: mol_type = other DNA
caaatctcggtggaacctgca

SEQ ID NO: 29157 - DNA, 36 bp, synthetic construct; identical to SEQ ID NO: 3992
  misc_feature 1..36: note = Probe
  source 1..36: mol_type = other DNA

SEQ ID NO: 29158 - DNA, 17 bp, synthetic construct
  misc_feature 1..17: note = Probe
  source 1..17: mol_type = other DNA
caacagaggcttacgac

SEQ ID NO: 29159 - DNA, 18 bp, synthetic construct
  misc_feature 1..18: note = Probe
  source 1..18: mol_type = other DNA
caacagaggcttacgacc

SEQ ID NO: 29160 - DNA, 18 bp, synthetic construct
  misc_feature 1..18: note = Probe
  source 1..18: mol_type = other DNA
caacatggctttctcaac

SEQ ID NO: 29161 - DNA, 16 bp, synthetic construct
  misc_feature 1..16: note = Probe
  source 1..16: mol_type = other DNA
caaccccatggcctcc

SEQ ID NO: 29162 - DNA, 15 bp, synthetic construct
  misc_feature 1..15: note = Probe
  source 1..15: mol_type = other DNA
caacccgtcatctac

SEQ ID NO: 29163 - DNA, 28 bp, synthetic construct
  misc_feature 1..28: note = Probe
  source 1..28: mol_type = other DNA
caaccgagcgtccaagctctttccattt

SEQ ID NO: 29164 - DNA, 29 bp, synthetic construct
  misc_feature 1..29: note = Probe
  source 1..29: mol_type = other DNA
caaccgagcgtccaagctctttccatttt

SEQ ID NO: 29165 - DNA, 24 bp, synthetic construct
  misc_feature 1..24: note = Probe
  source 1..24: mol_type = other DNA
caaccttcagctatagggtggaga

SEQ ID NO: 29166 - DNA, 36 bp, synthetic construct
  misc_feature 1..36: note = Probe
  source 1..36: mol_type = other DNA
caacgatggtttttcatatcattggtcgtggttgta

SEQ ID NO: 29167 - DNA, 39 bp, synthetic construct
  misc_feature 1..39: note = Probe
  source 1..39: mol_type = other DNA
caacgatggtttttcatatcattggtcgtggttgtagtc

SEQ ID NO: 29168 - DNA, 40 bp, synthetic construct
  misc_feature 1..40: note = Probe
  source 1..40: mol_type = other DNA
caacgatggtttttcatatcattggtcgtggttgtagtcc

SEQ ID NO: 29169 - DNA, 50 bp, synthetic construct; identical to SEQ ID NO: 4011
  misc_feature 1..50: note = Probe
  source 1..50: mol_type = other DNA

SEQ ID NO: 29170 - DNA, 22 bp, synthetic construct
  misc_feature 1..22: note = Probe
  source 1..22: mol_type = other DNA
caactaaatactaccgtatggc

SEQ ID NO: 29171 - DNA, 15 bp, synthetic construct
  misc_feature 1..15: note = Probe
  source 1..15: mol_type = other DNA
caacttaacttgacc

SEQ ID NO: 29172 - DNA, 16 bp, synthetic construct
  misc_feature 1..16: note = Probe
  source 1..16: mol_type = other DNA
caacttaacttgaccg

SEQ ID NO: 29173 - DNA, 18 bp, synthetic construct
  misc_feature 1..18: note = Probe
  source 1..18: mol_type = other DNA
caacttaacttgaccgct

SEQ ID NO: 29174 - DNA, 19 bp, synthetic construct
  misc_feature 1..19: note = Probe
  source 1..19: mol_type = other DNA
caacttaacttgaccgctc

SEQ ID NO: 29175 - DNA, 20 bp, synthetic construct
  misc_feature 1..20: note = Probe
  source 1..20: mol_type = other DNA
caacttaacttgaccgctct

SEQ ID NO: 29176 - DNA, 21 bp, synthetic construct
  misc_feature 1..21: note = Probe
  source 1..21: mol_type = other DNA
caacttaacttgaccgctctg

SEQ ID NO: 29177 - DNA, 22 bp, synthetic construct
  misc_feature 1..22: note = Probe
  source 1..22: mol_type = other DNA
caacttaacttgaccgctctga

SEQ ID NO: 29178 - DNA, 23 bp, synthetic construct
  misc_feature 1..23: note = Probe
  source 1..23: mol_type = other DNA
caacttaacttgaccgctctgag

SEQ ID NO: 29179 - DNA, 24 bp, synthetic construct
  misc_feature 1..24: note = Probe
  source 1..24: mol_type = other DNA
caacttaacttgaccgctctgagc

SEQ ID NO: 29180 - DNA, 30 bp, synthetic construct
  misc_feature 1..30: note = Probe
  source 1..30: mol_type = other DNA
caacttaacttgaccgctctgagctaaacc

SEQ ID NO: 29181 - DNA, 31 bp, synthetic construct
  misc_feature 1..31: note = Probe
  source 1..31: mol_type = other DNA
caacttaacttgaccgctctgagctaaacct

SEQ ID NO: 29182 - DNA, 36 bp, synthetic construct
  misc_feature 1..36: note = Probe
  source 1..36: mol_type = other DNA
caacttaacttgaccgctctgagctaaacctagccc

SEQ ID NO: 29183 - DNA, 17 bp, synthetic construct
  misc_feature 1..17: note = Probe
  source 1..17: mol_type = other DNA
caacttacacttaggag

SEQ ID NO: 29184 - DNA, 23 bp, synthetic construct
  misc_feature 1..23: note = Probe
  source 1..23: mol_type = other DNA
caacttacacttaggagatttca

SEQ ID NO: 29185 - DNA, 26 bp, synthetic construct
  misc_feature 1..26: note = Probe
  source 1..26: mol_type = other DNA
caacttacacttaggagatttcaact

SEQ ID NO: 29186 - DNA, 27 bp, synthetic construct
  misc_feature 1..27: note = Probe
  source 1..27: mol_type = other DNA
caacttacacttaggagatttcaactt

SEQ ID NO: 29187 - DNA, 31 bp, synthetic construct; identical to SEQ ID NO: 17688
  misc_feature 1..31: note = Probe
  source 1..31: mol_type = other DNA

SEQ ID NO: 29188 - DNA, 32 bp, synthetic construct; identical to SEQ ID NO: 17689
  misc_feature 1..32: note = Probe
  source 1..32: mol_type = other DNA

SEQ ID NO: 29189 - DNA, 34 bp, synthetic construct
  misc_feature 1..34: note = Probe
  source 1..34: mol_type = other DNA
caacttacacttaggagatttcaacttaacttga

SEQ ID NO: 29190 - DNA, 35 bp, synthetic construct; identical to SEQ ID NO: 4025
  misc_feature 1..35: note = Probe
  source 1..35: mol_type = other DNA

SEQ ID NO: 29191 - DNA, 36 bp, synthetic construct; identical to SEQ ID NO: 17692
  misc_feature 1..36: note = Probe
  source 1..36: mol_type = other DNA

SEQ ID NO: 29192 - DNA, 39 bp, synthetic construct; identical to SEQ ID NO: 4027
  misc_feature 1..39: note = Probe
  source 1..39: mol_type = other DNA

SEQ ID NO: 29193 - DNA, 40 bp, synthetic construct
  misc_feature 1..40: note = Probe
  source 1..40: mol_type = other DNA
caacttacacttaggagatttcaacttaacttgaccgctc

SEQ ID NO: 29194 - DNA, 41 bp, synthetic construct; identical to SEQ ID NO: 4028
  misc_feature 1..41: note = Probe
  source 1..41: mol_type = other DNA

SEQ ID NO: 29195 - DNA, 42 bp, synthetic construct; identical to SEQ ID NO: 17697
  misc_feature 1..42: note = Probe
  source 1..42: mol_type = other DNA

SEQ ID NO: 29196 - DNA, 43 bp, synthetic construct; identical to SEQ ID NO: 4029
  misc_feature 1..43: note = Probe
  source 1..43: mol_type = other DNA

SEQ ID NO: 29197 - DNA, 44 bp, synthetic construct; identical to SEQ ID NO: 4030
  misc_feature 1..44: note = Probe
  source 1..44: mol_type = other DNA

SEQ ID NO: 29198 - DNA, 45 bp, synthetic construct; identical to SEQ ID NO: 4031
  misc_feature 1..45: note = Probe
  source 1..45: mol_type = other DNA

SEQ ID NO: 29199 - DNA, 46 bp, synthetic construct; identical to SEQ ID NO: 4032
  misc_feature 1..46: note = Probe
  source 1..46: mol_type = other DNA

SEQ ID NO: 29200 - DNA, 15 bp, synthetic construct
  misc_feature 1..15: note = Probe
  source 1..15: mol_type = other DNA
caagaacagggtttg

SEQ ID NO: 29201 - DNA, 16 bp, synthetic construct
  misc_feature 1..16: note = Probe
  source 1..16: mol_type = other DNA
caagaacagggtttgt

SEQ ID NO: 29202 - DNA, 17 bp, synthetic construct
  misc_feature 1..17: note = Probe
  source 1..17: mol_type = other DNA
caagaacagggtttgtt

SEQ ID NO: 29203 - DNA, 18 bp, synthetic construct
  misc_feature 1..18: note = Probe
  source 1..18: mol_type = other DNA
caagaacagggtttgtta

SEQ ID NO: 29204 - DNA, 19 bp, synthetic construct
  misc_feature 1..19: note = Probe
  source 1..19: mol_type = other DNA
caagaacagggtttgttaa

SEQ ID NO: 29205 - DNA, 20 bp, synthetic construct
  misc_feature 1..20: note = Probe
  source 1..20: mol_type = other DNA
caagaacagggtttgttaag

SEQ ID NO: 29206 - DNA, 21 bp, synthetic construct
  misc_feature 1..21: note = Probe
  source 1..21: mol_type = other DNA
caagaacagggtttgttaaga

SEQ ID NO: 29207 - DNA, 15 bp, synthetic construct
  misc_feature 1..15: note = Probe
  source 1..15: mol_type = other DNA
caagaactgctaact

SEQ ID NO: 29208 - DNA, 16 bp, synthetic construct
  misc_feature 1..16: note = Probe
  source 1..16: mol_type = other DNA
caagaactgctaactc

SEQ ID NO: 29209 - DNA, 17 bp, synthetic construct
  misc_feature 1..17: note = Probe
  source 1..17: mol_type = other DNA
caagaactgctaactca

SEQ ID NO: 29210 - DNA, 19 bp, synthetic construct
  misc_feature 1..19: note = Probe
  source 1..19: mol_type = other DNA
caagaactgctaactcatg

SEQ ID NO: 29211 - DNA, 20 bp, synthetic construct
  misc_feature 1..20: note = Probe
  source 1..20: mol_type = other DNA
caagaactgctaactcatgc

SEQ ID NO: 29212 - DNA, 21 bp, synthetic construct
  misc_feature 1..21: note = Probe
  source 1..21: mol_type = other DNA
caagaactgctaactcatgcc

SEQ ID NO: 29213 - DNA, 22 bp, synthetic construct
  misc_feature 1..22: note = Probe
  source 1..22: mol_type = other DNA
caagaactgctaactcatgccc

SEQ ID NO: 29214 - DNA, 23 bp, synthetic construct
  misc_feature 1..23: note = Probe
  source 1..23: mol_type = other DNA
caagaactgctaactcatgcccc

SEQ ID NO: 29215 - DNA, 24 bp, synthetic construct
  misc_feature 1..24: note = Probe
  source 1..24: mol_type = other DNA
caagaactgctaactcatgccccc

SEQ ID NO: 29216 - DNA, 25 bp, synthetic construct
  misc_feature 1..25: note = Probe
  source 1..25: mol_type = other DNA
caagaactgctaactcatgccccca

SEQ ID NO: 29217 - DNA, 26 bp, synthetic construct
  misc_feature 1..26: note = Probe
  source 1..26: mol_type = other DNA
caagaactgctaactcatgcccccat

SEQ ID NO: 29218 - DNA, 27 bp, synthetic construct
  misc_feature 1..27: note = Probe
  source 1..27: mol_type = other DNA
caagaactgctaactcatgcccccatg

SEQ ID NO: 29219 - DNA, 28 bp, synthetic construct
  misc_feature 1..28: note = Probe
  source 1..28: mol_type = other DNA
caagaactgctaactcatgcccccatgt

SEQ ID NO: 29220 - DNA, 31 bp, synthetic construct; identical to SEQ ID NO: 4039
  misc_feature 1..31: note = Probe
  source 1..31: mol_type = other DNA

SEQ ID NO: 29221 - DNA, 32 bp, synthetic construct
  misc_feature 1..32: note = Probe
  source 1..32: mol_type = other DNA
caagaactgctaactcatgcccccatgtctaa

SEQ ID NO: 29222 - DNA, 35 bp, synthetic construct; identical to SEQ ID NO: 17717
  misc_feature 1..35: note = Probe
  source 1..35: mol_type = other DNA

SEQ ID NO: 29223 - DNA, 38 bp, synthetic construct
  misc_feature 1..38: note = Probe
  source 1..38: mol_type = other DNA
caagaactgctaactcatgcccccatgtctaacaacat

SEQ ID NO: 29224 - DNA, 39 bp, synthetic construct
  misc_feature 1..39: note = Probe
  source 1..39: mol_type = other DNA
caagaactgctaactcatgcccccatgtctaacaacatg

SEQ ID NO: 29225 - DNA, 40 bp, synthetic construct
  misc_feature 1..40: note = Probe
  source 1..40: mol_type = other DNA
caagaactgctaactcatgcccccatgtctaacaacatgg

SEQ ID NO: 29226 - DNA, 41 bp, synthetic construct; identical to SEQ ID NO: 4040
  misc_feature 1..41: note = Probe
  source 1..41: mol_type = other DNA

SEQ ID NO: 29227 - DNA, 42 bp, synthetic construct; identical to SEQ ID NO: 449
  misc_feature 1..42: note = Probe
  source 1..42: mol_type = other DNA

SEQ ID NO: 29228 - DNA, 45 bp, synthetic construct; identical to SEQ ID NO: 451
  misc_feature 1..45: note = Probe
  source 1..45: mol_type = other DNA

SEQ ID NO: 29229 - DNA, 46 bp, synthetic construct; identical to SEQ ID NO: 452
  misc_feature 1..46: note = Probe
  source 1..46: mol_type = other DNA

SEQ ID NO: 29230 - DNA, 50 bp, synthetic construct; identical to SEQ ID NO: 4044
  misc_feature 1..50: note = Probe
  source 1..50: mol_type = other DNA

SEQ ID NO: 29231 - DNA, 15 bp, synthetic construct
  misc_feature 1..15: note = Probe
  source 1..15: mol_type = other DNA
caagaggtccccggt

SEQ ID NO: 29232 - DNA, 18 bp, synthetic construct
  misc_feature 1..18: note = Probe
  source 1..18: mol_type = other DNA
caagcagttgacccgggt

SEQ ID NO: 29233 - DNA, 16 bp, synthetic construct
  misc_feature 1..16: note = Probe
  source 1..16: mol_type = other DNA
caagctctttccattt

SEQ ID NO: 29234 - DNA, 21 bp, synthetic construct
  misc_feature 1..21: note = Probe
  source 1..21: mol_type = other DNA
caaggcgatcacgtagatttt

SEQ ID NO: 29235 - DNA, 24 bp, synthetic construct
  misc_feature 1..24: note = Probe
  source 1..24: mol_type = other DNA
caaggcgatcacgtagattttgtt

SEQ ID NO: 29236 - DNA, 25 bp, synthetic construct
  misc_feature 1..25: note = Probe
  source 1..25: mol_type = other DNA
caaggcgatcacgtagattttgttt

SEQ ID NO: 29237 - DNA, 26 bp, synthetic construct
  misc_feature 1..26: note = Probe
  source 1..26: mol_type = other DNA
caaggcgatcacgtagattttgttta

SEQ ID NO: 29238 - DNA, 31 bp, synthetic construct
  misc_feature 1..31: note = Probe
  source 1..31: mol_type = other DNA
caaggtcgcgggttcgatccccgtacgggcc

SEQ ID NO: 29239 - DNA, 15 bp, synthetic construct
  misc_feature 1..15: note = Probe
  source 1..15: mol_type = other DNA
caagtaggtctacaa

SEQ ID NO: 29240 - DNA, 21 bp, synthetic construct
  misc_feature 1..21: note = Probe
  source 1..21: mol_type = other DNA
caagtccctgttcgggcggca

SEQ ID NO: 29241 - DNA, 28 bp, synthetic construct
  misc_feature 1..28: note = Probe
  source 1..28: mol_type = other DNA
caatacactgaaaatgtttagacgggct

SEQ ID NO: 29242 - DNA, 30 bp, synthetic construct
  misc_feature 1..30: note = Probe
  source 1..30: mol_type = other DNA
caatacactgaaaatgtttagacgggctca

SEQ ID NO: 29243 - DNA, 31 bp, synthetic construct
  misc_feature 1..31: note = Probe
  source 1..31: mol_type = other DNA
caatacactgaaaatgtttagacgggctcac

SEQ ID NO: 29244 - DNA, 32 bp, synthetic construct; identical to SEQ ID NO: 17733
  misc_feature 1..32: note = Probe
  source 1..32: mol_type = other DNA

SEQ ID NO: 29245 - DNA, 36 bp, synthetic construct
  misc_feature 1..36: note = Probe
  source 1..36: mol_type = other DNA
caatacactgaaaatgtttagacgggctcacatcac

SEQ ID NO: 29246 - DNA, 21 bp, synthetic construct
  misc_feature 1..21: note = Probe
  source 1..21: mol_type = other DNA
caatccccagcacctccacaa

SEQ ID NO: 29247 - DNA, 20 bp, synthetic construct
  misc_feature 1..20: note = Probe
  source 1..20: mol_type = other DNA
caatccccggcacctccacc

SEQ ID NO: 29248 - DNA, 21 bp, synthetic construct
  misc_feature 1..21: note = Probe
  source 1..21: mol_type = other DNA
caatgccgaggttgtgagttc

SEQ ID NO: 29249 - DNA, 16 bp, synthetic construct
  misc_feature 1..16: note = Probe
  source 1..16: mol_type = other DNA
caatggaggcgtgggt

SEQ ID NO: 29250 - DNA, 36 bp, synthetic construct
  misc_feature 1..36: note = Probe
  source 1..36: mol_type = other DNA
caatggaggcgtgggttcgaatcccacttctgacac

SEQ ID NO: 29251 - DNA, 21 bp, synthetic construct
  misc_feature 1..21: note = Probe
  source 1..21: mol_type = other DNA
caatggataacgcgtctgact

SEQ ID NO: 29252 - DNA, 36 bp, synthetic construct
  misc_feature 1..36: note = Probe
  source 1..36: mol_type = other DNA
caatggataacgcgtctgactacggatcagaagatt

SEQ ID NO: 29253 - DNA, 21 bp, synthetic construct
  misc_feature 1..21: note = Probe
  source 1..21: mol_type = other DNA
caatggcacggcaaggggctc

SEQ ID NO: 29254 - DNA, 18 bp, synthetic construct
  misc_feature 1..18: note = Probe
  source 1..18: mol_type = other DNA
caattaactagttttgac

SEQ ID NO: 29255 - DNA, 36 bp, synthetic construct; identical to SEQ ID NO: 4078
  misc_feature 1..36: note = Probe
  source 1..36: mol_type = other DNA

SEQ ID NO: 29256 - DNA, 50 bp, synthetic construct; identical to SEQ ID NO: 462
  misc_feature 1..50: note = Probe
  source 1..50: mol_type = other DNA

SEQ ID NO: 29257 - DNA, 16 bp, synthetic construct
  misc_feature 1..16: note = Probe
  source 1..16: mol_type = other DNA
cacaagaactgctaac

SEQ ID NO: 29258 - DNA, 17 bp, synthetic construct
  misc_feature 1..17: note = Probe
  source 1..17: mol_type = other DNA
cacaagaactgctaact

SEQ ID NO: 29259 - DNA, 18 bp, synthetic construct
  misc_feature 1..18: note = Probe
  source 1..18: mol_type = other DNA
cacaagaactgctaactc

SEQ ID NO: 29260 - DNA, 21 bp, synthetic construct
  misc_feature 1..21: note = Probe
  source 1..21: mol_type = other DNA
cacaagaactgctaactcatg

SEQ ID NO: 29261 - DNA, 22 bp, synthetic construct
  misc_feature 1..22: note = Probe
  source 1..22: mol_type = other DNA
cacaagaactgctaactcatgc

SEQ ID NO: 29262 - DNA, 24 bp, synthetic construct
  misc_feature 1..24: note = Probe
  source 1..24: mol_type = other DNA
cacaagaactgctaactcatgccc

SEQ ID NO: 29263 - DNA, 25 bp, synthetic construct
  misc_feature 1..25: note = Probe
  source 1..25: mol_type = other DNA
cacaagaactgctaactcatgcccc

SEQ ID NO: 29264 - DNA, 26 bp, synthetic construct
  misc_feature 1..26: note = Probe
  source 1..26: mol_type = other DNA
cacaagaactgctaactcatgccccc

SEQ ID NO: 29265 - DNA, 27 bp, synthetic construct
  misc_feature 1..27: note = Probe
  source 1..27: mol_type = other DNA
cacaagaactgctaactcatgccccca

SEQ ID NO: 29266 - DNA, 31 bp, synthetic construct; identical to SEQ ID NO: 4089
  misc_feature 1..31: note = Probe
  source 1..31: mol_type = other DNA

SEQ ID NO: 29267 - DNA, 39 bp, synthetic construct
  misc_feature 1..39: note = Probe
  source 1..39: mol_type = other DNA
cacaagaactgctaactcatgcccccatgtctaacaaca

SEQ ID NO: 29268 - DNA, 42 bp, synthetic construct
  misc_feature 1..42: note = Probe
  source 1..42: mol_type = other DNA
cacaagaactgctaactcatgcccccatgtctaacaacatgg

SEQ ID NO: 29269 - DNA, 44 bp, synthetic construct; identical to SEQ ID NO: 463
  misc_feature 1..44: note = Probe
  source 1..44: mol_type = other DNA

SEQ ID NO: 29270 - DNA, 50 bp, synthetic construct; identical to SEQ ID NO: 466
  misc_feature 1..50: note = Probe
  source 1..50: mol_type = other DNA

SEQ ID NO: 29271 - DNA, 15 bp, synthetic construct
  misc_feature 1..15: note = Probe
  source 1..15: mol_type = other DNA
cacacccacccaaga

SEQ ID NO: 29272 - DNA, 16 bp, synthetic construct
  misc_feature 1..16: note = Probe
  source 1..16: mol_type = other DNA
cacacccacccaagaa

SEQ ID NO: 29273 - DNA, 17 bp, synthetic construct
  misc_feature 1..17: note = Probe
  source 1..17: mol_type = other DNA
cacacccacccaagaac

SEQ ID NO: 29274 - DNA, 18 bp, synthetic construct
  misc_feature 1..18: note = Probe
  source 1..18: mol_type = other DNA
cacacccacccaagaaca

SEQ ID NO: 29275 - DNA, 25 bp, synthetic construct
  misc_feature 1..25: note = Probe
  source 1..25: mol_type = other DNA
cacacccacccaagaacagggtttg

SEQ ID NO: 29276 - DNA, 28 bp, synthetic construct
  misc_feature 1..28: note = Probe
  source 1..28: mol_type = other DNA
cacacccacccaagaacagggtttgtta

SEQ ID NO: 29277 - DNA, 20 bp, synthetic construct
  misc_feature 1..20: note = Probe
  source 1..20: mol_type = other DNA
cacacggggcacaataattt

SEQ ID NO: 29278 - DNA, 21 bp, synthetic construct
  misc_feature 1..21: note = Probe
  source 1..21: mol_type = other DNA
cacactactataaccacccta

SEQ ID NO: 29279 - DNA, 36 bp, synthetic construct
  misc_feature 1..36: note = Probe
  source 1..36: mol_type = other DNA
cacagtgtcaggatggccgagtggtctaaggcgcca

SEQ ID NO: 29280 - DNA, 20 bp, synthetic construct
  misc_feature 1..20: note = Probe
  source 1..20: mol_type = other DNA
cacagtttatgtagcttacc

SEQ ID NO: 29281 - DNA, 21 bp, synthetic construct
  misc_feature 1..21: note = Probe
  source 1..21: mol_type = other DNA
cacagtttatgtagcttacct

SEQ ID NO: 29282 - DNA, 22 bp, synthetic construct
  misc_feature 1..22: note = Probe
  source 1..22: mol_type = other DNA
cacagtttatgtagcttacctc

SEQ ID NO: 29283 - DNA, 23 bp, synthetic construct
  misc_feature 1..23: note = Probe
  source 1..23: mol_type = other DNA
cacagtttatgtagcttacctcc

SEQ ID NO: 29284 - DNA, 24 bp, synthetic construct
  misc_feature 1..24: note = Probe
  source 1..24: mol_type = other DNA
cacagtttatgtagcttacctcct

SEQ ID NO: 29285 - DNA, 25 bp, synthetic construct
  misc_feature 1..25: note = Probe
  source 1..25: mol_type = other DNA
cacagtttatgtagcttacctcctc

SEQ ID NO: 29286 - DNA, 26 bp, synthetic construct
  misc_feature 1..26: note = Probe
  source 1..26: mol_type = other DNA
cacatggtctagcggttaggattcct

SEQ ID NO: 29287 - DNA, 27 bp, synthetic construct
  misc_feature 1..27: note = Probe
  source 1..27: mol_type = other DNA
cacatggtctagcggttaggattcctg

SEQ ID NO: 29288 - DNA, 29 bp, synthetic construct
  misc_feature 1..29: note = Probe
  source 1..29: mol_type = other DNA
cacatggtctagcggttaggattcctggt

SEQ ID NO: 29289 - DNA, 31 bp, synthetic construct; identical to SEQ ID NO: 470
  misc_feature 1..31: note = Probe
  source 1..31: mol_type = other DNA

SEQ ID NO: 29290 - DNA, 32 bp, synthetic construct; identical to SEQ ID NO: 471
  misc_feature 1..32: note = Probe
  source 1..32: mol_type = other DNA

SEQ ID NO: 29291 - DNA, 33 bp, synthetic construct; identical to SEQ ID NO: 472
  misc_feature 1..33: note = Probe
  source 1..33: mol_type = other DNA

SEQ ID NO: 29292 - DNA, 36 bp, synthetic construct
  misc_feature 1..36: note = Probe
  source 1..36: mol_type = other DNA
cacccaacttacacttaggagatttcaacttaactt

SEQ ID NO: 29293 - DNA, 44 bp, synthetic construct
  misc_feature 1..44: note = Probe
  source 1..44: mol_type = other DNA
cacccaacttacacttaggagatttcaacttaacttgaccgctc

SEQ ID NO: 29294 - DNA, 45 bp, synthetic construct
  misc_feature 1..45: note = Probe
  source 1..45: mol_type = other DNA
cacccaacttacacttaggagatttcaacttaacttgaccgctct

SEQ ID NO: 29295 - DNA, 50 bp, synthetic construct; identical to SEQ ID NO: 4114
  misc_feature 1..50: note = Probe
  source 1..50: mol_type = other DNA

SEQ ID NO: 29296 - DNA, 19 bp, synthetic construct
  misc_feature 1..19: note = Probe
  source 1..19: mol_type = other DNA
cacccaagaacagggtttg

SEQ ID NO: 29297 - DNA, 20 bp, synthetic construct
  misc_feature 1..20: note = Probe
  source 1..20: mol_type = other DNA
cacccaagaacagggtttgt

SEQ ID NO: 29298 - DNA, 22 bp, synthetic construct
  misc_feature 1..22: note = Probe
  source 1..22: mol_type = other DNA
cacccaagaacagggtttgtta

SEQ ID NO: 29299 - DNA, 15 bp, synthetic construct
  misc_feature 1..15: note = Probe
  source 1..15: mol_type = other DNA
cacccacccaagaac

SEQ ID NO: 29300 - DNA, 16 bp, synthetic construct
  misc_feature 1..16: note = Probe
  source 1..16: mol_type = other DNA
cacccacccaagaaca

SEQ ID NO: 29301 - DNA, 23 bp, synthetic construct
  misc_feature 1..23: note = Probe
  source 1..23: mol_type = other DNA
cacccacccaagaacagggtttg

SEQ ID NO: 29302 - DNA, 15 bp, synthetic construct
  misc_feature 1..15: note = Probe
  source 1..15: mol_type = other DNA
cacccaggcggcccg

SEQ ID NO: 29303 - DNA, 33 bp, synthetic construct
  misc_feature 1..33: note = Probe
  source 1..33: mol_type = other DNA
cacccaggcggcccgggttcgactcccggtgtg

SEQ ID NO: 29304 - DNA, 39 bp, synthetic construct
  misc_feature 1..39: note = Probe
  source 1..39: mol_type = other DNA
cacccaggcggcccgggttcgactcccggtgtgggaacg

SEQ ID NO: 29305 - DNA, 40 bp, synthetic construct
  misc_feature 1..40: note = Probe
  source 1..40: mol_type = other DNA
cacccaggcggcccgggttcgactcccggtgtgggaacgc

SEQ ID NO: 29306 - DNA, 40 bp, synthetic construct
  misc_feature 1..40: note = Probe
  source 1..40: mol_type = other DNA
cacccaggcggcccgggttcgactcccggtgtgggaatga

SEQ ID NO: 29307 - DNA, 26 bp, synthetic construct
  misc_feature 1..26: note = Probe
  source 1..26: mol_type = other DNA
cacccagggacgcctctttgagcttt

SEQ ID NO: 29308 - DNA, 27 bp, synthetic construct
  misc_feature 1..27: note = Probe
  source 1..27: mol_type = other DNA
cacccagggacgcctctttgagctttt

SEQ ID NO: 29309 - DNA, 22 bp, synthetic construct
  misc_feature 1..22: note = Probe
  source 1..22: mol_type = other DNA
cacccagggacgctatgacctt

SEQ ID NO: 29310 - DNA, 23 bp, synthetic construct
  misc_feature 1..23: note = Probe
  source 1..23: mol_type = other DNA
cacccagggacgctatgaccttt

SEQ ID NO: 29311 - DNA, 25 bp, synthetic construct
  misc_feature 1..25: note = Probe
  source 1..25: mol_type = other DNA
cacccagggacgcttattggaactt

SEQ ID NO: 29312 - DNA, 26 bp, synthetic construct
  misc_feature 1..26: note = Probe
  source 1..26: mol_type = other DNA
cacccagggacgcttattggaacttt

SEQ ID NO: 29313 - DNA, 27 bp, synthetic construct
  misc_feature 1..27: note = Probe
  source 1..27: mol_type = other DNA
cacccagggacgcttattggaactttt

SEQ ID NO: 29314 - DNA, 25 bp, synthetic construct
  misc_feature 1..25: note = Probe
  source 1..25: mol_type = other DNA
cacccagggacgcttgtttgagctt

SEQ ID NO: 29315 - DNA, 26 bp, synthetic construct
  misc_feature 1..26: note = Probe
  source 1..26: mol_type = other DNA
cacccagggacgcttgtttgagcttt

SEQ ID NO: 29316 - DNA, 40 bp, synthetic construct
  misc_feature 1..40: note = Probe
  source 1..40: mol_type = other DNA
caccgccgcagcccgggttcgattcccggtcatggaacca

SEQ ID NO: 29317 - DNA, 15 bp, synthetic construct
  misc_feature 1..15: note = Probe
  source 1..15: mol_type = other DNA
caccgccgcggcccg

SEQ ID NO: 29318 - DNA, 17 bp, synthetic construct
  misc_feature 1..17: note = Probe
  source 1..17: mol_type = other DNA
caccgccgcggcccggg

SEQ ID NO: 29319 - DNA, 18 bp, synthetic construct
  misc_feature 1..18: note = Probe
  source 1..18: mol_type = other DNA
caccgccgcggcccgggt

SEQ ID NO: 29320 - DNA, 19 bp, synthetic construct
  misc_feature 1..19: note = Probe
  source 1..19: mol_type = other DNA
caccgccgcggcccgggtt

SEQ ID NO: 29321 - DNA, 20 bp, synthetic construct
  misc_feature 1..20: note = Probe
  source 1..20: mol_type = other DNA
caccgccgcggcccgggttc

SEQ ID NO: 29322 - DNA, 29 bp, synthetic construct
  misc_feature 1..29: note = Probe
  source 1..29: mol_type = other DNA
caccgccgcggcccgggttcgattcccgg

SEQ ID NO: 29323 - DNA, 36 bp, synthetic construct
  misc_feature 1..36: note = Probe
  source 1..36: mol_type = other DNA
caccgccgcggcccgggttcgattcccggccaggga

SEQ ID NO: 29324 - DNA, 31 bp, synthetic construct
  misc_feature 1..31: note = Probe
  source 1..31: mol_type = other DNA
caccgccgcggcccgggttcgattcccggtc

SEQ ID NO: 29325 - DNA, 33 bp, synthetic construct
  misc_feature 1..33: note = Probe
  source 1..33: mol_type = other DNA
caccgccgcggcccgggttcgattcccggtcag

SEQ ID NO: 29326 - DNA, 35 bp, synthetic construct
  misc_feature 1..35: note = Probe
  source 1..35: mol_type = other DNA
caccgccgcggcccgggttcgattcccggtcaggg

SEQ ID NO: 29327 - DNA, 37 bp, synthetic construct
  misc_feature 1..37: note = Probe
  source 1..37: mol_type = other DNA
caccgccgcggcccgggttcgattcccggtcagggaa

SEQ ID NO: 29328 - DNA, 38 bp, synthetic construct
  misc_feature 1..38: note = Probe
  source 1..38: mol_type = other DNA
caccgccgcggcccgggttcgattcccggtcagggaaa

SEQ ID NO: 29329 - DNA, 40 bp, synthetic construct
  misc_feature 1..40: note = Probe
  source 1..40: mol_type = other DNA
caccgccgcggcccgggttcgattcccggtcagggaaaga

SEQ ID NO: 29330 - DNA, 38 bp, synthetic construct
  misc_feature 1..38: note = Probe
  source 1..38: mol_type = other DNA
caccgccgcggcccgggttcgattcccggtcagggaag

SEQ ID NO: 29331 - DNA, 39 bp, synthetic construct
  misc_feature 1..39: note = Probe
  source 1..39: mol_type = other DNA
caccgccgcggcccgggttcgattcccggtcagggaagc

SEQ ID NO: 29332 - DNA, 40 bp, synthetic construct
  misc_feature 1..40: note = Probe
  source 1..40: mol_type = other DNA
caccgccgcggcccgggttcgattcccggtcagggaagcc

SEQ ID NO: 29333 - DNA, 38 bp, synthetic construct
  misc_feature 1..38: note = Probe
  source 1..38: mol_type = other DNA
caccgccgcggcccgggttcgattcccggtcagggaat

SEQ ID NO: 29334 - DNA, 40 bp, synthetic construct
  misc_feature 1..40: note = Probe
  source 1..40: mol_type = other DNA
caccgccgcggcccgggttcgattcccggtcagggaatga

SEQ ID NO: 29335 - DNA, 21 bp, synthetic construct
  misc_feature 1..21: note = Probe
  source 1..21: mol_type = other DNA
cacctcagaaggtctcacttt

SEQ ID NO: 29336 - DNA, 22 bp, synthetic construct
  misc_feature 1..22: note = Probe
  source 1..22: mol_type = other DNA
cacctcagaaggtctcactttt

SEQ ID NO: 29337 - DNA, 17 bp, synthetic construct
  misc_feature 1..17: note = Probe
  source 1..17: mol_type = other DNA
cacctctttacagtgaa

SEQ ID NO: 29338 - DNA, 18 bp, synthetic construct
  misc_feature 1..18: note = Probe
  source 1..18: mol_type = other DNA
cacctggagcaagaccct

SEQ ID NO: 29339 - DNA, 16 bp, synthetic construct
  misc_feature 1..16: note = Probe
  source 1..16: mol_type = other DNA
cacgcagaaggtcctg

SEQ ID NO: 29340 - DNA, 36 bp, synthetic construct
  misc_feature 1..36: note = Probe
  source 1..36: mol_type = other DNA
cacgcagaaggtcctgggttcgagccccagtggaac

SEQ ID NO: 29341 - DNA, 40 bp, synthetic construct; identical to SEQ ID NO: 4121
  misc_feature 1..40: note = Probe
  source 1..40: mol_type = other DNA

SEQ ID NO: 29342 - DNA, 19 bp, synthetic construct
  misc_feature 1..19: note = Probe
  source 1..19: mol_type = other DNA
cacgcgaaaggtccccggt

SEQ ID NO: 29343 - DNA, 36 bp, synthetic construct
  misc_feature 1..36: note = Probe
  source 1..36: mol_type = other DNA
cacgcgggagacccgggttcaattcccggccaatgc

SEQ ID NO: 29344 - DNA, 32 bp, synthetic construct; identical to SEQ ID NO: 481
  misc_feature 1..32: note = Probe
  source 1..32: mol_type = other DNA

SEQ ID NO: 29345 - DNA, 33 bp, synthetic construct; identical to SEQ ID NO: 482
  misc_feature 1..33: note = Probe
  source 1..33: mol_type = other DNA

SEQ ID NO: 29346 - DNA, 34 bp, synthetic construct; identical to SEQ ID NO: 483
  misc_feature 1..34: note = Probe
  source 1..34: mol_type = other DNA

SEQ ID NO: 29347 - DNA, 35 bp, synthetic construct; identical to SEQ ID NO: 484
  misc_feature 1..35: note = Probe
  source 1..35: mol_type = other DNA

SEQ ID NO: 29348 - DNA, 37 bp, synthetic construct; identical to SEQ ID NO: 486
  misc_feature 1..37: note = Probe
  source 1..37: mol_type = other DNA

SEQ ID NO: 29349 - DNA, 38 bp, synthetic construct; identical to SEQ ID NO: 4137
  misc_feature 1..38: note = Probe
  source 1..38: mol_type = other DNA

SEQ ID NO: 29350 - DNA, 39 bp, synthetic construct; identical to SEQ ID NO: 4144
  misc_feature 1..39: note = Probe
  source 1..39: mol_type = other DNA

SEQ ID NO: 29351 - DNA, 40 bp, synthetic construct; identical to SEQ ID NO: 4145
  misc_feature 1..40: note = Probe
  source 1..40: mol_type = other DNA

SEQ ID NO: 29352 - DNA, 38 bp, synthetic construct; identical to SEQ ID NO: 4149
  misc_feature 1..38: note = Probe
  source 1..38: mol_type = other DNA

SEQ ID NO: 29353 - DNA, 39 bp, synthetic construct; identical to SEQ ID NO: 4154
  misc_feature 1..39: note = Probe
  source 1..39: mol_type = other DNA

SEQ ID NO: 29354 - DNA, 40 bp, synthetic construct; identical to SEQ ID NO: 4155
  misc_feature 1..40: note = Probe
  source 1..40: mol_type = other DNA

SEQ ID NO: 29355 - DNA, 36 bp, synthetic construct
  misc_feature 1..36: note = Probe
  source 1..36: mol_type = other DNA
cacgcgggaggcccgggttcgattcccggccaatgc

SEQ ID NO: 29356 - DNA, 39 bp, synthetic construct
  misc_feature 1..39: note = Probe
  source 1..39: mol_type = other DNA
cacgcgggaggcccgggttcgattcccggccaatgcaac

SEQ ID NO: 29357 - DNA, 39 bp, synthetic construct
  misc_feature 1..39: note = Probe
  source 1..39: mol_type = other DNA
cacgcgggaggcccgggttcgattcccggccaatgcacg

SEQ ID NO: 29358 - DNA, 40 bp, synthetic construct
  misc_feature 1..40: note = Probe
  source 1..40: mol_type = other DNA
cacgcgggaggcccgggttcgattcccggccaatgcacga

SEQ ID NO: 29359 - DNA, 39 bp, synthetic construct
  misc_feature 1..39: note = Probe
  source 1..39: mol_type = other DNA
cacgcgggaggcccgggttcgattcccggccaatgcact

SEQ ID NO: 29360 - DNA, 39 bp, synthetic construct
  misc_feature 1..39: note = Probe
  source 1..39: mol_type = other DNA
cacgcgggaggcccgggttcgattcccggccaatgcagc

SEQ ID NO: 29361 - DNA, 40 bp, synthetic construct
  misc_feature 1..40: note = Probe
  source 1..40: mol_type = other DNA
cacgcgggaggcccgggttcgattcccggccaatgcagca

SEQ ID NO: 29362 - DNA, 36 bp, synthetic construct
  misc_feature 1..36: note = Probe
  source 1..36: mol_type = other DNA
cacgcgggaggcccgggttcgattcccggcccatgc

SEQ ID NO: 29363 - DNA, 40 bp, synthetic construct
  misc_feature 1..40: note = Probe
  source 1..40: mol_type = other DNA
cacgcgggaggcccgggttcgattcccggcccatgcagca

SEQ ID NO: 29364 - DNA, 36 bp, synthetic construct
  misc_feature 1..36: note = Probe
  source 1..36: mol_type = other DNA
cacggagaattttggattctcagggatgggttcgat

SEQ ID NO: 29365 - DNA, 15 bp, synthetic construct
  misc_feature 1..15: note = Probe
  source 1..15: mol_type = other DNA
cacggcaaggggagt

SEQ ID NO: 29366 - DNA, 15 bp, synthetic construct
  misc_feature 1..15: note = Probe
  source 1..15: mol_type = other DNA
cacggcaaggggctc

SEQ ID NO: 29367 - DNA, 36 bp, synthetic construct
  misc_feature 1..36: note = Probe
  source 1..36: mol_type = other DNA
cacggcattgtgaggacaatggcacggcaaggggag

SEQ ID NO: 29368 - DNA, 19 bp, synthetic construct
  misc_feature 1..19: note = Probe
  source 1..19: mol_type = other DNA
cacgtatgaggccccgggt

SEQ ID NO: 29369 - DNA, 17 bp, synthetic construct
  misc_feature 1..17: note = Probe
  source 1..17: mol_type = other DNA
cacgtctgctttacacg

SEQ ID NO: 29370 - DNA, 17 bp, synthetic construct
  misc_feature 1..17: note = Probe
  source 1..17: mol_type = other DNA
cactactataaccaccc

SEQ ID NO: 29371 - DNA, 19 bp, synthetic construct
  misc_feature 1..19: note = Probe
  source 1..19: mol_type = other DNA
cactactataaccacccta

SEQ ID NO: 29372 - DNA, 15 bp, synthetic construct
  misc_feature 1..15: note = Probe
  source 1..15: mol_type = other DNA
cactctggactctga

SEQ ID NO: 29373 - DNA, 16 bp, synthetic construct
  misc_feature 1..16: note = Probe
  source 1..16: mol_type = other DNA
cactctggactctgaa

SEQ ID NO: 29374 - DNA, 17 bp, synthetic construct
  misc_feature 1..17: note = Probe
  source 1..17: mol_type = other DNA
cactctggactctgaat

SEQ ID NO: 29375 - DNA, 18 bp, synthetic construct
  misc_feature 1..18: note = Probe
  source 1..18: mol_type = other DNA
cactctggactctgaatc

SEQ ID NO: 29376 - DNA, 19 bp, synthetic construct
  misc_feature 1..19: note = Probe
  source 1..19: mol_type = other DNA
cactctggactctgaatcc

SEQ ID NO: 29377 - DNA, 20 bp, synthetic construct
  misc_feature 1..20: note = Probe
  source 1..20: mol_type = other DNA
cactctggactctgaatcca

SEQ ID NO: 29378 - DNA, 31 bp, synthetic construct
  misc_feature 1..31: note = Probe
  source 1..31: mol_type = other DNA
cactctggactctgaatccagcgatccgagt

SEQ ID NO: 29379 - DNA, 32 bp, synthetic construct
  misc_feature 1..32: note = Probe
  source 1..32: mol_type = other DNA
cactctggactctgaatccagcgatccgagtt

SEQ ID NO: 29380 - DNA, 15 bp, synthetic construct
  misc_feature 1..15: note = Probe
  source 1..15: mol_type = other DNA
cactctggactttga

SEQ ID NO: 29381 - DNA, 16 bp, synthetic construct
  misc_feature 1..16: note = Probe
  source 1..16: mol_type = other DNA
cactctggactttgaa

SEQ ID NO: 29382 - DNA, 17 bp, synthetic construct
  misc_feature 1..17: note = Probe
  source 1..17: mol_type = other DNA
cactctggactttgaat

SEQ ID NO: 29383 - DNA, 18 bp, synthetic construct
  misc_feature 1..18: note = Probe
  source 1..18: mol_type = other DNA
cactctggactttgaatc

SEQ ID NO: 29384 - DNA, 19 bp, synthetic construct
  misc_feature 1..19: note = Probe
  source 1..19: mol_type = other DNA
cactctggactttgaatcc

SEQ ID NO: 29385 - DNA, 23 bp, synthetic construct
  misc_feature 1..23: note = Probe
  source 1..23: mol_type = other DNA
cactgaaaatgtttagacgggct

SEQ ID NO: 29386 - DNA, 25 bp, synthetic construct
  misc_feature 1..25: note = Probe
  source 1..25: mol_type = other DNA
cactgaaaatgtttagacgggctca

SEQ ID NO: 29387 - DNA, 26 bp, synthetic construct
  misc_feature 1..26: note = Probe
  source 1..26: mol_type = other DNA
cactgaaaatgtttagacgggctcac

SEQ ID NO: 29388 - DNA, 27 bp, synthetic construct
  misc_feature 1..27: note = Probe
  source 1..27: mol_type = other DNA
cactgaaaatgtttagacgggctcaca

SEQ ID NO: 29389 - DNA, 32 bp, synthetic construct
  misc_feature 1..32: note = Probe
  source 1..32: mol_type = other DNA
cactgaaaatgtttagacgggctcacatcacc

SEQ ID NO: 29390 - DNA, 33 bp, synthetic construct
  misc_feature 1..33: note = Probe
  source 1..33: mol_type = other DNA
cactgaaaatgtttagacgggctcacatcaccc

SEQ ID NO: 29391 - DNA, 36 bp, synthetic construct
  misc_feature 1..36: note = Probe
  source 1..36: mol_type = other DNA
cactgaaaatgtttagacgggctcacatcaccccat

SEQ ID NO: 29392 - DNA, 15 bp, synthetic construct
  misc_feature 1..15: note = Probe
  source 1..15: mol_type = other DNA
cactgtaaagctaac

SEQ ID NO: 29393 - DNA, 16 bp, synthetic construct
  misc_feature 1..16: note = Probe
  source 1..16: mol_type = other DNA
cactgtaaagctaact

SEQ ID NO: 29394 - DNA, 17 bp, synthetic construct
  misc_feature 1..17: note = Probe
  source 1..17: mol_type = other DNA
cactgtaaagctaactt

SEQ ID NO: 29395 - DNA, 18 bp, synthetic construct
  misc_feature 1..18: note = Probe
  source 1..18: mol_type = other DNA
cactgtaaagctaactta

SEQ ID NO: 29396 - DNA, 19 bp, synthetic construct
  misc_feature 1..19: note = Probe
  source 1..19: mol_type = other DNA
cactgtaaagctaacttag

SEQ ID NO: 29397 - DNA, 21 bp, synthetic construct
  misc_feature 1..21: note = Probe
  source 1..21: mol_type = other DNA
cactgtaaagctaacttagca

SEQ ID NO: 29398 - DNA, 23 bp, synthetic construct
  misc_feature 1..23: note = Probe
  source 1..23: mol_type = other DNA
cactgtaaagctaacttagcatt

SEQ ID NO: 29399 - DNA, 25 bp, synthetic construct
  misc_feature 1..25: note = Probe
  source 1..25: mol_type = other DNA
cactgtaaagctaacttagcattaa

SEQ ID NO: 29400 - DNA, 29 bp, synthetic construct
  misc_feature 1..29: note = Probe
  source 1..29: mol_type = other DNA
cactgtaaagctaacttagcattaacctt

SEQ ID NO: 29401 - DNA, 30 bp, synthetic construct; identical to SEQ ID NO: 493
  misc_feature 1..30: note = Probe
  source 1..30: mol_type = other DNA

SEQ ID NO: 29402 - DNA, 31 bp, synthetic construct; identical to SEQ ID NO: 494
  misc_feature 1..31: note = Probe
  source 1..31: mol_type = other DNA

SEQ ID NO: 29403 - DNA, 32 bp, synthetic construct; identical to SEQ ID NO: 495
  misc_feature 1..32: note = Probe
  source 1..32: mol_type = other DNA

SEQ ID NO: 29404 - DNA, 33 bp, synthetic construct; identical to SEQ ID NO: 4180
  misc_feature 1..33: note = Probe
  source 1..33: mol_type = other DNA

SEQ ID NO: 29405 - DNA, 34 bp, synthetic construct; identical to SEQ ID NO: 496
  misc_feature 1..34: note = Probe
  source 1..34: mol_type = other DNA

SEQ ID NO: 29406 - DNA, 35 bp, synthetic construct; identical to SEQ ID NO: 497
  misc_feature 1..35: note = Probe
  source 1..35: mol_type = other DNA

SEQ ID NO: 29407 - DNA, 37 bp, synthetic construct; identical to SEQ ID NO: 4181
  misc_feature 1..37: note = Probe
  source 1..37: mol_type = other DNA

SEQ ID NO: 29408 - DNA, 38 bp, synthetic construct; identical to SEQ ID NO: 17810
  misc_feature 1..38: note = Probe
  source 1..38: mol_type = other DNA

SEQ ID NO: 29409 - DNA, 42 bp, synthetic construct; identical to SEQ ID NO: 4183
  misc_feature 1..42: note = Probe
  source 1..42: mol_type = other DNA

SEQ ID NO: 29410 - DNA, 43 bp, synthetic construct; identical to SEQ ID NO: 501
  misc_feature 1..43: note = Probe
  source 1..43: mol_type = other DNA

SEQ ID NO: 29411 - DNA, 44 bp, synthetic construct; identical to SEQ ID NO: 4184
  misc_feature 1..44: note = Probe
  source 1..44: mol_type = other DNA

SEQ ID NO: 29412 - DNA, 45 bp, synthetic construct; identical to SEQ ID NO: 4185
  misc_feature 1..45: note = Probe
  source 1..45: mol_type = other DNA

SEQ ID NO: 29413 - DNA, 46 bp, synthetic construct
  misc_feature 1..46: note = Probe
  source 1..46: mol_type = other DNA
cactgtaaagctaacttagcattaaccttttaagttaaagattaag

SEQ ID NO: 29414 - DNA, 47 bp, synthetic construct
  misc_feature 1..47: note = Probe
  source 1..47: mol_type = other DNA
cactgtaaagctaacttagcattaaccttttaagttaaagattaaga

SEQ ID NO: 29415 - DNA, 19 bp, synthetic construct
  misc_feature 1..19: note = Probe
  source 1..19: mol_type = other DNA
cacttaggagatttcaact

SEQ ID NO: 29416 - DNA, 20 bp, synthetic construct
  misc_feature 1..20: note = Probe
  source 1..20: mol_type = other DNA
cacttaggagatttcaactt

SEQ ID NO: 29417 - DNA, 24 bp, synthetic construct
  misc_feature 1..24: note = Probe
  source 1..24: mol_type = other DNA
cacttaggagatttcaacttaact

SEQ ID NO: 29418 - DNA, 29 bp, synthetic construct
  misc_feature 1..29: note = Probe
  source 1..29: mol_type = other DNA
cacttaggagatttcaacttaacttgacc

SEQ ID NO: 29419 - DNA, 30 bp, synthetic construct; identical to SEQ ID NO: 4195
  misc_feature 1..30: note = Probe
  source 1..30: mol_type = other DNA

SEQ ID NO: 29420 - DNA, 32 bp, synthetic construct; identical to SEQ ID NO: 4197
  misc_feature 1..32: note = Probe
  source 1..32: mol_type = other DNA

SEQ ID NO: 29421 - DNA, 33 bp, synthetic construct; identical to SEQ ID NO: 4198
  misc_feature 1..33: note = Probe
  source 1..33: mol_type = other DNA

SEQ ID NO: 29422 - DNA, 34 bp, synthetic construct; identical to SEQ ID NO: 4199
  misc_feature 1..34: note = Probe
  source 1..34: mol_type = other DNA

SEQ ID NO: 29423 - DNA, 36 bp, synthetic construct; identical to SEQ ID NO: 4201
  misc_feature 1..36: note = Probe
  source 1..36: mol_type = other DNA

SEQ ID NO: 29424 - DNA, 38 bp, synthetic construct; identical to SEQ ID NO: 4203
  misc_feature 1..38: note = Probe
  source 1..38: mol_type = other DNA

SEQ ID NO: 29425 - DNA, 39 bp, synthetic construct; identical to SEQ ID NO: 4204
  misc_feature 1..39: note = Probe
  source 1..39: mol_type = other DNA

SEQ ID NO: 29426 - DNA, 20 bp, synthetic construct
  misc_feature 1..20: note = Probe
  source 1..20: mol_type = other DNA
cacttctgacacaactatct

SEQ ID NO: 29427 - DNA, 23 bp, synthetic construct
  misc_feature 1..23: note = Probe
  source 1..23: mol_type = other DNA
cacttctgacacagcctgatctt

SEQ ID NO: 29428 - DNA, 24 bp, synthetic construct
  misc_feature 1..24: note = Probe
  source 1..24: mol_type = other DNA
cacttctgacacagcctgatcttt

SEQ ID NO: 29429 - DNA, 20 bp, synthetic construct
  misc_feature 1..20: note = Probe
  source 1..20: mol_type = other DNA
cacttctgacacattcgttt

SEQ ID NO: 29430 - DNA, 26 bp, synthetic construct
  misc_feature 1..26: note = Probe
  source 1..26: mol_type = other DNA
cacttctgacagagctcaattacttt

SEQ ID NO: 29431 - DNA, 33 bp, synthetic construct; identical to SEQ ID NO: 4211
  misc_feature 1..33: note = Probe
  source 1..33: mol_type = other DNA

SEQ ID NO: 29432 - DNA, 36 bp, synthetic construct; identical to SEQ ID NO: 17827
  misc_feature 1..36: note = Probe
  source 1..36: mol_type = other DNA

SEQ ID NO: 29433 - DNA, 36 bp, synthetic construct; identical to SEQ ID NO: 17829
  misc_feature 1..36: note = Probe
  source 1..36: mol_type = other DNA

SEQ ID NO: 29434 - DNA, 15 bp, synthetic construct
  misc_feature 1..15: note = Probe
  source 1..15: mol_type = other DNA
cagaagattgagggt

SEQ ID NO: 29435 - DNA, 16 bp, synthetic construct
  misc_feature 1..16: note = Probe
  source 1..16: mol_type = other DNA
cagaagattgagggtt

SEQ ID NO: 29436 - DNA, 15 bp, synthetic construct
  misc_feature 1..15: note = Probe
  source 1..15: mol_type = other DNA
cagaagattgcaggt

SEQ ID NO: 29437 - DNA, 16 bp, synthetic construct
  misc_feature 1..16: note = Probe
  source 1..16: mol_type = other DNA
cagaagattgcaggtt

SEQ ID NO: 29438 - DNA, 15 bp, synthetic construct
  misc_feature 1..15: note = Probe
  source 1..15: mol_type = other DNA
cagaaggtctcactt

SEQ ID NO: 29439 - DNA, 16 bp, synthetic construct
  misc_feature 1..16: note = Probe
  source 1..16: mol_type = other DNA
cagaaggtctcacttt

SEQ ID NO: 29440 - DNA, 17 bp, synthetic construct
  misc_feature 1..17: note = Probe
  source 1..17: mol_type = other DNA
cagaaggtctcactttt

SEQ ID NO: 29441 - DNA, 16 bp, synthetic construct
  misc_feature 1..16: note = Probe
  source 1..16: mol_type = other DNA
cagaccaagagccttc

SEQ ID NO: 29442 - DNA, 20 bp, synthetic construct
  misc_feature 1..20: note = Probe
  source 1..20: mol_type = other DNA
cagaccaagagccttcaaag

SEQ ID NO: 29443 - DNA, 22 bp, synthetic construct
  misc_feature 1..22: note = Probe
  source 1..22: mol_type = other DNA
cagaccaagagccttcaaagcc

SEQ ID NO: 29444 - DNA, 36 bp, synthetic construct; identical to SEQ ID NO: 513
  misc_feature 1..36: note = Probe
  source 1..36: mol_type = other DNA

SEQ ID NO: 29445 - DNA, 27 bp, synthetic construct
  misc_feature 1..27: note = Probe
  source 1..27: mol_type = other DNA
cagagaaaaagtctttaactccaccat

SEQ ID NO: 29446 - DNA, 17 bp, synthetic construct
  misc_feature 1..17: note = Probe
  source 1..17: mol_type = other DNA
cagagaatagtttaaat

SEQ ID NO: 29447 - DNA, 18 bp, synthetic construct
  misc_feature 1..18: note = Probe
  source 1..18: mol_type = other DNA
cagagaatagtttaaatt

SEQ ID NO: 29448 - DNA, 19 bp, synthetic construct
  misc_feature 1..19: note = Probe
  source 1..19: mol_type = other DNA
cagagaatagtttaaatta

SEQ ID NO: 29449 - DNA, 20 bp, synthetic construct
  misc_feature 1..20: note = Probe
  source 1..20: mol_type = other DNA
cagagaatagtttaaattag

SEQ ID NO: 29450 - DNA, 21 bp, synthetic construct
  misc_feature 1..21: note = Probe
  source 1..21: mol_type = other DNA
cagagaatagtttaaattaga

SEQ ID NO: 29451 - DNA, 22 bp, synthetic construct
  misc_feature 1..22: note = Probe
  source 1..22: mol_type = other DNA
cagagaatagtttaaattagaa

SEQ ID NO: 29452 - DNA, 23 bp, synthetic construct
  misc_feature 1..23: note = Probe
  source 1..23: mol_type = other DNA
cagagaatagtttaaattagaat

SEQ ID NO: 29453 - DNA, 25 bp, synthetic construct
  misc_feature 1..25: note = Probe
  source 1..25: mol_type = other DNA
cagagaatagtttaaattagaatct

SEQ ID NO: 29454 - DNA, 26 bp, synthetic construct
  misc_feature 1..26: note = Probe
  source 1..26: mol_type = other DNA
cagagaatagtttaaattagaatctt

SEQ ID NO: 29455 - DNA, 27 bp, synthetic construct
  misc_feature 1..27: note = Probe
  source 1..27: mol_type = other DNA
cagagaatagtttaaattagaatctta

SEQ ID NO: 29456 - DNA, 29 bp, synthetic construct
  misc_feature 1..29: note = Probe
  source 1..29: mol_type = other DNA
cagagaatagtttaaattagaatcttagc

SEQ ID NO: 29457 - DNA, 31 bp, synthetic construct; identical to SEQ ID NO: 520
  misc_feature 1..31: note = Probe
  source 1..31: mol_type = other DNA

SEQ ID NO: 29458 - DNA, 32 bp, synthetic construct; identical to SEQ ID NO: 521
  misc_feature 1..32: note = Probe
  source 1..32: mol_type = other DNA

SEQ ID NO: 29459 - DNA, 33 bp, synthetic construct; identical to SEQ ID NO: 522
  misc_feature 1..33: note = Probe
  source 1..33: mol_type = other DNA

SEQ ID NO: 29460 - DNA, 34 bp, synthetic construct; identical to SEQ ID NO: 523
  misc_feature 1..34: note = Probe
  source 1..34: mol_type = other DNA

SEQ ID NO: 29461 - DNA, 35 bp, synthetic construct; identical to SEQ ID NO: 4232
  misc_feature 1..35: note = Probe
  source 1..35: mol_type = other DNA

SEQ ID NO: 29462 - DNA, 39 bp, synthetic construct; identical to SEQ ID NO: 4236
  misc_feature 1..39: note = Probe
  source 1..39: mol_type = other DNA

SEQ ID NO: 29463 - DNA, 44 bp, synthetic construct; identical to SEQ ID NO: 4237
  misc_feature 1..44: note = Probe
  source 1..44: mol_type = other DNA

SEQ ID NO: 29464 - DNA, 50 bp, synthetic construct; identical to SEQ ID NO: 526
  misc_feature 1..50: note = Probe
  source 1..50: mol_type = other DNA

SEQ ID NO: 29465 - DNA, 16 bp, synthetic construct
  misc_feature 1..16: note = Probe
  source 1..16: mol_type = other DNA
cagagcccggtaatcg

SEQ ID NO: 29466 - DNA, 32 bp, synthetic construct; identical to SEQ ID NO: 17870
  misc_feature 1..32: note = Probe
  source 1..32: mol_type = other DNA

SEQ ID NO: 29467 - DNA, 15 bp, synthetic construct
  misc_feature 1..15: note = Probe
  source 1..15: mol_type = other DNA
cagaggcttacgacc

SEQ ID NO: 29468 - DNA, 16 bp, synthetic construct
  misc_feature 1..16: note = Probe
  source 1..16: mol_type = other DNA
cagaggcttacgaccc

SEQ ID NO: 29469 - DNA, 27 bp, synthetic construct
  misc_feature 1..27: note = Probe
  source 1..27: mol_type = other DNA
cagaggcttacgaccccttatttaccg

SEQ ID NO: 29470 - DNA, 15 bp, synthetic construct
  misc_feature 1..15: note = Probe
  source 1..15: mol_type = other DNA
cagaggtcgatggat

SEQ ID NO: 29471 - DNA, 16 bp, synthetic construct
  misc_feature 1..16: note = Probe
  source 1..16: mol_type = other DNA
cagaggtcgatggatc

SEQ ID NO: 29472 - DNA, 32 bp, synthetic construct; identical to SEQ ID NO: 527
  misc_feature 1..32: note = Probe
  source 1..32: mol_type = other DNA

SEQ ID NO: 29473 - DNA, 33 bp, synthetic construct; identical to SEQ ID NO: 528
  misc_feature 1..33: note = Probe
  source 1..33: mol_type = other DNA

SEQ ID NO: 29474 - DNA, 20 bp, synthetic construct
  misc_feature 1..20: note = Probe
  source 1..20: mol_type = other DNA
cagagtggggttttgcagtc

SEQ ID NO: 29475 - DNA, 22 bp, synthetic construct
  misc_feature 1..22: note = Probe
  source 1..22: mol_type = other DNA
cagagtggggttttgcagtcct

SEQ ID NO: 29476 - DNA, 16 bp, synthetic construct
  misc_feature 1..16: note = Probe
  source 1..16: mol_type = other DNA
cagagtgtagcttaac

SEQ ID NO: 29477 - DNA, 17 bp, synthetic construct
  misc_feature 1..17: note = Probe
  source 1..17: mol_type = other DNA
cagagtgtagcttaaca

SEQ ID NO: 29478 - DNA, 18 bp, synthetic construct
  misc_feature 1..18: note = Probe
  source 1..18: mol_type = other DNA
cagagtgtagcttaacac

SEQ ID NO: 29479 - DNA, 19 bp, synthetic construct
  misc_feature 1..19: note = Probe
  source 1..19: mol_type = other DNA
cagagtgtagcttaacaca

SEQ ID NO: 29480 - DNA, 23 bp, synthetic construct
  misc_feature 1..23: note = Probe
  source 1..23: mol_type = other DNA
cagagtgtagcttaacacaaagc

SEQ ID NO: 29481 - DNA, 25 bp, synthetic construct
  misc_feature 1..25: note = Probe
  source 1..25: mol_type = other DNA
cagagtgtagcttaacacaaagcac

SEQ ID NO: 29482 - DNA, 26 bp, synthetic construct
  misc_feature 1..26: note = Probe
  source 1..26: mol_type = other DNA
cagagtgtagcttaacacaaagcacc

SEQ ID NO: 29483 - DNA, 27 bp, synthetic construct
  misc_feature 1..27: note = Probe
  source 1..27: mol_type = other DNA
cagagtgtagcttaacacaaagcaccc

SEQ ID NO: 29484 - DNA, 28 bp, synthetic construct
  misc_feature 1..28: note = Probe
  source 1..28: mol_type = other DNA
cagagtgtagcttaacacaaagcaccca

SEQ ID NO: 29485 - DNA, 29 bp, synthetic construct
  misc_feature 1..29: note = Probe
  source 1..29: mol_type = other DNA
cagagtgtagcttaacacaaagcacccaa

SEQ ID NO: 29486 - DNA, 30 bp, synthetic construct; identical to SEQ ID NO: 4262
  misc_feature 1..30: note = Probe
  source 1..30: mol_type = other DNA

SEQ ID NO: 29487 - DNA, 31 bp, synthetic construct; identical to SEQ ID NO: 4263
  misc_feature 1..31: note = Probe
  source 1..31: mol_type = other DNA

SEQ ID NO: 29488 - DNA, 32 bp, synthetic construct; identical to SEQ ID NO: 4264
  misc_feature 1..32: note = Probe
  source 1..32: mol_type = other DNA

SEQ ID NO: 29489 - DNA, 33 bp, synthetic construct; identical to SEQ ID NO: 4265
  misc_feature 1..33: note = Probe
  source 1..33: mol_type = other DNA

SEQ ID NO: 29490 - DNA, 34 bp, synthetic construct; identical to SEQ ID NO: 4266
  misc_feature 1..34: note = Probe
  source 1..34: mol_type = other DNA

SEQ ID NO: 29491 - DNA, 35 bp, synthetic construct; identical to SEQ ID NO: 4267
  misc_feature 1..35: note = Probe
  source 1..35: mol_type = other DNA

SEQ ID NO: 29492 - DNA, 36 bp, synthetic construct; identical to SEQ ID NO: 4268
  misc_feature 1..36: note = Probe
  source 1..36: mol_type = other DNA

SEQ ID NO: 29493 - DNA, 37 bp, synthetic construct; identical to SEQ ID NO: 4269
  misc_feature 1..37: note = Probe
  source 1..37: mol_type = other DNA

SEQ ID NO: 29494 - DNA, 38 bp, synthetic construct; identical to SEQ ID NO: 4270
  misc_feature 1..38: note = Probe
  source 1..38: mol_type = other DNA

SEQ ID NO: 29495 - DNA, 39 bp, synthetic construct; identical to SEQ ID NO: 4271
  misc_feature 1..39: note = Probe
  source 1..39: mol_type = other DNA

SEQ ID NO: 29496 - DNA, 40 bp, synthetic construct; identical to SEQ ID NO: 4272
  misc_feature 1..40: note = Probe
  source 1..40: mol_type = other DNA

SEQ ID NO: 29497 - DNA, 41 bp, synthetic construct; identical to SEQ ID NO: 4273
  misc_feature 1..41: note = Probe
  source 1..41: mol_type = other DNA

SEQ ID NO: 29498 - DNA, 42 bp, synthetic construct; identical to SEQ ID NO: 4274
  misc_feature 1..42: note = Probe
  source 1..42: mol_type = other DNA

SEQ ID NO: 29499 - DNA, 43 bp, synthetic construct; identical to SEQ ID NO: 4275
  misc_feature 1..43: note = Probe
  source 1..43: mol_type = other DNA

SEQ ID NO: 29500 - DNA, 44 bp, synthetic construct; identical to SEQ ID NO: 4276
  misc_feature 1..44: note = Probe
  source 1..44: mol_type = other DNA

SEQ ID NO: 29501 - DNA, 45 bp, synthetic construct; identical to SEQ ID NO: 4277
  misc_feature 1..45: note = Probe
  source 1..45: mol_type = other DNA

SEQ ID NO: 29502 - DNA, 46 bp, synthetic construct; identical to SEQ ID NO: 4278
  misc_feature 1..46: note = Probe
  source 1..46: mol_type = other DNA

SEQ ID NO: 29503 - DNA, 47 bp, synthetic construct
  misc_feature 1..47: note = Probe
  source 1..47: mol_type = other DNA
cagagtgtagcttaacacaaagcacccaacttacacttaggagattt

SEQ ID NO: 29504 - DNA, 50 bp, synthetic construct; identical to SEQ ID NO: 4281
  misc_feature 1..50: note = Probe
  source 1..50: mol_type = other DNA

SEQ ID NO: 29505 - DNA, 17 bp, synthetic construct
  misc_feature 1..17: note = Probe
  source 1..17: mol_type = other DNA
cagattgtgaatctgac

SEQ ID NO: 29506 - DNA, 18 bp, synthetic construct
  misc_feature 1..18: note = Probe
  source 1..18: mol_type = other DNA
cagattgtgaatctgaca

SEQ ID NO: 29507 - DNA, 20 bp, synthetic construct
  misc_feature 1..20: note = Probe
  source 1..20: mol_type = other DNA
cagattgtgaatctgacaac

SEQ ID NO: 29508 - DNA, 21 bp, synthetic construct
  misc_feature 1..21: note = Probe
  source 1..21: mol_type = other DNA
cagattgtgaatctgacaaca

SEQ ID NO: 29509 - DNA, 23 bp, synthetic construct
  misc_feature 1..23: note = Probe
  source 1..23: mol_type = other DNA
cagattgtgaatctgacaacaga

SEQ ID NO: 29510 - DNA, 25 bp, synthetic construct
  misc_feature 1..25: note = Probe
  source 1..25: mol_type = other DNA
cagattgtgaatctgacaacagagg

SEQ ID NO: 29511 - DNA, 26 bp, synthetic construct
  misc_feature 1..26: note = Probe
  source 1..26: mol_type = other DNA
cagattgtgaatctgacaacagaggc

SEQ ID NO: 29512 - DNA, 27 bp, synthetic construct
  misc_feature 1..27: note = Probe
  source 1..27: mol_type = other DNA
cagattgtgaatctgacaacagaggct

SEQ ID NO: 29513 - DNA, 28 bp, synthetic construct
  misc_feature 1..28: note = Probe
  source 1..28: mol_type = other DNA
cagattgtgaatctgacaacagaggctt

SEQ ID NO: 29514 - DNA, 29 bp, synthetic construct
  misc_feature 1..29: note = Probe
  source 1..29: mol_type = other DNA
cagattgtgaatctgacaacagaggctta

SEQ ID NO: 29515 - DNA, 32 bp, synthetic construct
  misc_feature 1..32: note = Probe
  source 1..32: mol_type = other DNA
cagattgtgaatctgacaacagaggcttacga

SEQ ID NO: 29516 - DNA, 34 bp, synthetic construct
  misc_feature 1..34: note = Probe
  source 1..34: mol_type = other DNA
cagattgtgaatctgacaacagaggcttacgacc

SEQ ID NO: 29517 - DNA, 35 bp, synthetic construct; identical to SEQ ID NO: 12886
  misc_feature 1..35: note = Probe
  source 1..35: mol_type = other DNA

SEQ ID NO: 29518 - DNA, 37 bp, synthetic construct
  misc_feature 1..37: note = Probe
  source 1..37: mol_type = other DNA
cagattgtgaatctgacaacagaggcttacgacccct

SEQ ID NO: 29519 - DNA, 38 bp, synthetic construct; identical to SEQ ID NO: 4282
  misc_feature 1..38: note = Probe
  source 1..38: mol_type = other DNA

SEQ ID NO: 29520 - DNA, 45 bp, synthetic construct
  misc_feature 1..45: note = Probe
  source 1..45: mol_type = other DNA
cagattgtgaatctgacaacagaggcttacgaccccttatttacc

SEQ ID NO: 29521 - DNA, 46 bp, synthetic construct
  misc_feature 1..46: note = Probe
  source 1..46: mol_type = other DNA
cagattgtgaatctgacaacagaggcttacgaccccttatttaccg

SEQ ID NO: 29522 - DNA, 47 bp, synthetic construct
  misc_feature 1..47: note = Probe
  source 1..47: mol_type = other DNA
cagattgtgaatctgacaacagaggcttacgaccccttatttaccga

SEQ ID NO: 29523 - DNA, 15 bp, synthetic construct
  misc_feature 1..15: note = Probe
  source 1..15: mol_type = other DNA
cagcaacctcggttc

SEQ ID NO: 29524 - DNA, 32 bp, synthetic construct
  misc_feature 1..32: note = Probe
  source 1..32: mol_type = other DNA
cagcaggtcccatggtgtaatggttagcactc

SEQ ID NO: 29525 - DNA, 18 bp, synthetic construct
  misc_feature 1..18: note = Probe
  source 1..18: mol_type = other DNA
cagcagtacatgcagagc

SEQ ID NO: 29526 - DNA, 15 bp, synthetic construct
  misc_feature 1..15: note = Probe
  source 1..15: mol_type = other DNA
cagcgatccgagttc

SEQ ID NO: 29527 - DNA, 21 bp, synthetic construct
  misc_feature 1..21: note = Probe
  source 1..21: mol_type = other DNA
cagcggaagcgtgctgggccc

SEQ ID NO: 29528 - DNA, 21 bp, synthetic construct
  misc_feature 1..21: note = Probe
  source 1..21: mol_type = other DNA
cagcggagccttcgatagctc

SEQ ID NO: 29529 - DNA, 36 bp, synthetic construct
  misc_feature 1..36: note = Probe
  source 1..36: mol_type = other DNA
cagcggagccttcgatagctcagttggtagagcgga

SEQ ID NO: 29530 - DNA, 21 bp, synthetic construct
  misc_feature 1..21: note = Probe
  source 1..21: mol_type = other DNA
cagctaaataagctatcgggc

SEQ ID NO: 29531 - DNA, 22 bp, synthetic construct
  misc_feature 1..22: note = Probe
  source 1..22: mol_type = other DNA
cagctaaataagctatcgggcc

SEQ ID NO: 29532 - DNA, 23 bp, synthetic construct
  misc_feature 1..23: note = Probe
  source 1..23: mol_type = other DNA
cagctaaataagctatcgggccc

SEQ ID NO: 29533 - DNA, 24 bp, synthetic construct
  misc_feature 1..24: note = Probe
  source 1..24: mol_type = other DNA
cagctaaataagctatcgggccca

SEQ ID NO: 29534 - DNA, 25 bp, synthetic construct
  misc_feature 1..25: note = Probe
  source 1..25: mol_type = other DNA
cagctaaataagctatcgggcccat

SEQ ID NO: 29535 - DNA, 26 bp, synthetic construct
  misc_feature 1..26: note = Probe
  source 1..26: mol_type = other DNA
cagctaaataagctatcgggcccata

SEQ ID NO: 29536 - DNA, 28 bp, synthetic construct
  misc_feature 1..28: note = Probe
  source 1..28: mol_type = other DNA
cagctaaataagctatcgggcccatacc

SEQ ID NO: 29537 - DNA, 36 bp, synthetic construct; identical to SEQ ID NO: 4312
  misc_feature 1..36: note = Probe
  source 1..36: mol_type = other DNA

SEQ ID NO: 29538 - DNA, 20 bp, synthetic construct
  misc_feature 1..20: note = Probe
  source 1..20: mol_type = other DNA
cagctaaggactgcaaaacc

SEQ ID NO: 29539 - DNA, 21 bp, synthetic construct
  misc_feature 1..21: note = Probe
  source 1..21: mol_type = other DNA
cagctaaggactgcaaaaccc

SEQ ID NO: 29540 - DNA, 22 bp, synthetic construct
  misc_feature 1..22: note = Probe
  source 1..22: mol_type = other DNA
cagctaaggactgcaaaacccc

SEQ ID NO: 29541 - DNA, 25 bp, synthetic construct
  misc_feature 1..25: note = Probe
  source 1..25: mol_type = other DNA
cagctaaggactgcaaaaccccact

SEQ ID NO: 29542 - DNA, 27 bp, synthetic construct
  misc_feature 1..27: note = Probe
  source 1..27: mol_type = other DNA
cagctaaggactgcaaaaccccactct

SEQ ID NO: 29543 - DNA, 30 bp, synthetic construct; identical to SEQ ID NO: 17948
  misc_feature 1..30: note = Probe
  source 1..30: mol_type = other DNA

SEQ ID NO: 29544 - DNA, 32 bp, synthetic construct
  misc_feature 1..32: note = Probe
  source 1..32: mol_type = other DNA
cagctagctcagtcggtagagcatgagactct

SEQ ID NO: 29545 - DNA, 17 bp, synthetic construct
  misc_feature 1..17: note = Probe
  source 1..17: mol_type = other DNA
cagctatagggtggaga

SEQ ID NO: 29546 - DNA, 15 bp, synthetic construct
  misc_feature 1..15: note = Probe
  source 1..15: mol_type = other DNA
cagctatccattggt

SEQ ID NO: 29547 - DNA, 18 bp, synthetic construct
  misc_feature 1..18: note = Probe
  source 1..18: mol_type = other DNA
cagctatccattggtctt

SEQ ID NO: 29548 - DNA, 19 bp, synthetic construct
  misc_feature 1..19: note = Probe
  source 1..19: mol_type = other DNA
cagctatccattggtctta

SEQ ID NO: 29549 - DNA, 24 bp, synthetic construct
  misc_feature 1..24: note = Probe
  source 1..24: mol_type = other DNA
cagctatccattggtcttaggccc

SEQ ID NO: 29550 - DNA, 25 bp, synthetic construct
  misc_feature 1..25: note = Probe
  source 1..25: mol_type = other DNA
cagctatccattggtcttaggcccc

SEQ ID NO: 29551 - DNA, 26 bp, synthetic construct
  misc_feature 1..26: note = Probe
  source 1..26: mol_type = other DNA
cagctatccattggtcttaggcccca

SEQ ID NO: 29552 - DNA, 27 bp, synthetic construct
  misc_feature 1..27: note = Probe
  source 1..27: mol_type = other DNA
cagctatccattggtcttaggccccaa

SEQ ID NO: 29553 - DNA, 28 bp, synthetic construct
  misc_feature 1..28: note = Probe
  source 1..28: mol_type = other DNA
cagctatccattggtcttaggccccaaa

SEQ ID NO: 29554 - DNA, 29 bp, synthetic construct
  misc_feature 1..29: note = Probe
  source 1..29: mol_type = other DNA
cagctatccattggtcttaggccccaaaa

SEQ ID NO: 29555 - DNA, 33 bp, synthetic construct
  misc_feature 1..33: note = Probe
  source 1..33: mol_type = other DNA
cagctatccattggtcttaggccccaaaaattt

SEQ ID NO: 29556 - DNA, 50 bp, synthetic construct
  misc_feature 1..50: note = Probe
  source 1..50: mol_type = other DNA
cagctatccattggtcttaggccccaaaaattttggtgcaactccaaata

SEQ ID NO: 29557 - DNA, 21 bp, synthetic construct
  misc_feature 1..21: note = Probe
  source 1..21: mol_type = other DNA
cagctggtagagcggaggact

SEQ ID NO: 29558 - DNA, 18 bp, synthetic construct
  misc_feature 1..18: note = Probe
  source 1..18: mol_type = other DNA
caggaacagggtttgtta

SEQ ID NO: 29559 - DNA, 34 bp, synthetic construct; identical to SEQ ID NO: 17965
  misc_feature 1..34: note = Probe
  source 1..34: mol_type = other DNA

SEQ ID NO: 29560 - DNA, 36 bp, synthetic construct
  misc_feature 1..36: note = Probe
  source 1..36: mol_type = other DNA
caggagatcctgggttcgaatcccagcggggccttg

SEQ ID NO: 29561 - DNA, 36 bp, synthetic construct
  misc_feature 1..36: note = Probe
  source 1..36: mol_type = other DNA
caggagatcctgggttcgaatcccagcggtgcctcc

SEQ ID NO: 29562 - DNA, 22 bp, synthetic construct
  misc_feature 1..22: note = Probe
  source 1..22: mol_type = other DNA
caggatggccgagcggtctaag

SEQ ID NO: 29563 - DNA, 23 bp, synthetic construct
  misc_feature 1..23: note = Probe
  source 1..23: mol_type = other DNA
caggatggccgagcggtctaagg

SEQ ID NO: 29564 - DNA, 24 bp, synthetic construct
  misc_feature 1..24: note = Probe
  source 1..24: mol_type = other DNA
caggatggccgagcggtctaaggc

SEQ ID NO: 29565 - DNA, 21 bp, synthetic construct
  misc_feature 1..21: note = Probe
  source 1..21: mol_type = other DNA
caggatggccgagtggttaag

SEQ ID NO: 29566 - DNA, 23 bp, synthetic construct
  misc_feature 1..23: note = Probe
  source 1..23: mol_type = other DNA
caggatggccgagtggttaaggc

SEQ ID NO: 29567 - DNA, 25 bp, synthetic construct
  misc_feature 1..25: note = Probe
  source 1..25: mol_type = other DNA
caggcggcccgggttcgactcccgg

SEQ ID NO: 29568 - DNA, 26 bp, synthetic construct
  misc_feature 1..26: note = Probe
  source 1..26: mol_type = other DNA
caggcggcccgggttcgactcccggt

SEQ ID NO: 29569 - DNA, 27 bp, synthetic construct
  misc_feature 1..27: note = Probe
  source 1..27: mol_type = other DNA
caggcggcccgggttcgactcccggtg

SEQ ID NO: 29570 - DNA, 33 bp, synthetic construct; identical to SEQ ID NO: 4339
  misc_feature 1..33: note = Probe
  source 1..33: mol_type = other DNA

SEQ ID NO: 29571 - DNA, 34 bp, synthetic construct; identical to SEQ ID NO: 533
  misc_feature 1..34: note = Probe
  source 1..34: mol_type = other DNA

SEQ ID NO: 29572 - DNA, 35 bp, synthetic construct; identical to SEQ ID NO: 17978
  misc_feature 1..35: note = Probe
  source 1..35: mol_type = other DNA

SEQ ID NO: 29573 - DNA, 18 bp, synthetic construct
  misc_feature 1..18: note = Probe
  source 1..18: mol_type = other DNA
cagggatgggttcgattc

SEQ ID NO: 29574 - DNA, 20 bp, synthetic construct
  misc_feature 1..20: note = Probe
  source 1..20: mol_type = other DNA
cagggatgggttcgattctc

SEQ ID NO: 29575 - DNA, 26 bp, synthetic construct
  misc_feature 1..26: note = Probe
  source 1..26: mol_type = other DNA
cagggatgggttcgattctcatagtc

SEQ ID NO: 29576 - DNA, 27 bp, synthetic construct
  misc_feature 1..27: note = Probe
  source 1..27: mol_type = other DNA
cagggatgggttcgattctcatagtcc

SEQ ID NO: 29577 - DNA, 28 bp, synthetic construct
  misc_feature 1..28: note = Probe
  source 1..28: mol_type = other DNA
cagggatgggttcgattctcatagtcct

SEQ ID NO: 29578 - DNA, 33 bp, synthetic construct
  misc_feature 1..33: note = Probe
  source 1..33: mol_type = other DNA
cagggattgtgggttcgagtcccacccggggta

SEQ ID NO: 29579 - DNA, 36 bp, synthetic construct
  misc_feature 1..36: note = Probe
  source 1..36: mol_type = other DNA
cagggcctggatagctcagttggtagaacatcagac

SEQ ID NO: 29580 - DNA, 29 bp, synthetic construct
  misc_feature 1..29: note = Probe
  source 1..29: mol_type = other DNA
caggggcccggatagctcagtcggtagag

SEQ ID NO: 29581 - DNA, 36 bp, synthetic construct
  misc_feature 1..36: note = Probe
  source 1..36: mol_type = other DNA
caggggcccggatagctcagtcggtagagcatcaga

SEQ ID NO: 29582 - DNA, 38 bp, synthetic construct
  misc_feature 1..38: note = Probe
  source 1..38: mol_type = other DNA
caggggcccggatagctcagtcggtagagcatcagact

SEQ ID NO: 29583 - DNA, 40 bp, synthetic construct
  misc_feature 1..40: note = Probe
  source 1..40: mol_type = other DNA
caggggcccggatagctcagtcggtagagcatcagacttt

SEQ ID NO: 29584 - DNA, 41 bp, synthetic construct
  misc_feature 1..41: note = Probe
  source 1..41: mol_type = other DNA
caggggcccggatagctcagtcggtagagcatcagactttt

SEQ ID NO: 29585 - DNA, 42 bp, synthetic construct
  misc_feature 1..42: note = Probe
  source 1..42: mol_type = other DNA
caggggcccggatagctcagtcggtagagcatcagactttta

SEQ ID NO: 29586 - DNA, 21 bp, synthetic construct
  misc_feature 1..21: note = Probe
  source 1..21: mol_type = other DNA
caggggttagagcactggtct

SEQ ID NO: 29587 - DNA, 15 bp, synthetic construct
  misc_feature 1..15: note = Probe
  source 1..15: mol_type = other DNA
caggggttaggcctc

SEQ ID NO: 29588 - DNA, 26 bp, synthetic construct
  misc_feature 1..26: note = Probe
  source 1..26: mol_type = other DNA
caggggttaggcctctttttaccagc

SEQ ID NO: 29589 - DNA, 33 bp, synthetic construct; identical to SEQ ID NO: 17996
  misc_feature 1..33: note = Probe
  source 1..33: mol_type = other DNA

SEQ ID NO: 29590 - DNA, 28 bp, synthetic construct
  misc_feature 1..28: note = Probe
  source 1..28: mol_type = other DNA
cagggttcaagtccctgttcgggcggca

SEQ ID NO: 29591 - DNA, 15 bp, synthetic construct
  misc_feature 1..15: note = Probe
  source 1..15: mol_type = other DNA
cagggtttgttaaga

SEQ ID NO: 29592 - DNA, 25 bp, synthetic construct
  misc_feature 1..25: note = Probe
  source 1..25: mol_type = other DNA
cagggtttgttaagatggcagagcc

SEQ ID NO: 29593 - DNA, 15 bp, synthetic construct
  misc_feature 1..15: note = Probe
  source 1..15: mol_type = other DNA
caggtcgcagtctcc

SEQ ID NO: 29594 - DNA, 16 bp, synthetic construct
  misc_feature 1..16: note = Probe
  source 1..16: mol_type = other DNA
caggtcgcagtctccc

SEQ ID NO: 29595 - DNA, 18 bp, synthetic construct
  misc_feature 1..18: note = Probe
  source 1..18: mol_type = other DNA
cagtcagaggttcaattc

SEQ ID NO: 29596 - DNA, 21 bp, synthetic construct
  misc_feature 1..21: note = Probe
  source 1..21: mol_type = other DNA
cagtcggctagagcgtggtgc

SEQ ID NO: 29597 - DNA, 15 bp, synthetic construct
  misc_feature 1..15: note = Probe
  source 1..15: mol_type = other DNA
cagtcggtagagcat

SEQ ID NO: 29598 - DNA, 17 bp, synthetic construct
  misc_feature 1..17: note = Probe
  source 1..17: mol_type = other DNA
cagtcggtagagcatca

SEQ ID NO: 29599 - DNA, 18 bp, synthetic construct
  misc_feature 1..18: note = Probe
  source 1..18: mol_type = other DNA
cagtcggtagagcatcag

SEQ ID NO: 29600 - DNA, 21 bp, synthetic construct
  misc_feature 1..21: note = Probe
  source 1..21: mol_type = other DNA
cagtcggtagagcatcagact

SEQ ID NO: 29601 - DNA, 23 bp, synthetic construct
  misc_feature 1..23: note = Probe
  source 1..23: mol_type = other DNA
cagtcggtagagcatcagacttt

SEQ ID NO: 29602 - DNA, 24 bp, synthetic construct
  misc_feature 1..24: note = Probe
  source 1..24: mol_type = other DNA
cagtcggtagagcatcagactttt

SEQ ID NO: 29603 - DNA, 30 bp, synthetic construct
  misc_feature 1..30: note = Probe
  source 1..30: mol_type = other DNA
cagtcggtagagcatcagacttttaatctg

SEQ ID NO: 29604 - DNA, 31 bp, synthetic construct
  misc_feature 1..31: note = Probe
  source 1..31: mol_type = other DNA
cagtcggtagagcatcagacttttaatctga

SEQ ID NO: 29605 - DNA, 16 bp, synthetic construct
  misc_feature 1..16: note = Probe
  source 1..16: mol_type = other DNA
cagtcggtagagcatg

SEQ ID NO: 29606 - DNA, 19 bp, synthetic construct
  misc_feature 1..19: note = Probe
  source 1..19: mol_type = other DNA
cagtcggtagagcatgaga

SEQ ID NO: 29607 - DNA, 20 bp, synthetic construct
  misc_feature 1..20: note = Probe
  source 1..20: mol_type = other DNA
cagtcggtagagcatgagac

SEQ ID NO: 29608 - DNA, 22 bp, synthetic construct
  misc_feature 1..22: note = Probe
  source 1..22: mol_type = other DNA
cagtcggtagagcatgagaccc

SEQ ID NO: 29609 - DNA, 21 bp, synthetic construct
  misc_feature 1..21: note = Probe
  source 1..21: mol_type = other DNA
cagtcggtagagcatgagact

SEQ ID NO: 29610 - DNA, 22 bp, synthetic construct
  misc_feature 1..22: note = Probe
  source 1..22: mol_type = other DNA
cagtcggtagagcatgagactc

SEQ ID NO: 29611 - DNA, 30 bp, synthetic construct
  misc_feature 1..30: note = Probe
  source 1..30: mol_type = other DNA
cagtcggtagagcatgagactcttaatctc

SEQ ID NO: 29612 - DNA, 31 bp, synthetic construct
  misc_feature 1..31: note = Probe
  source 1..31: mol_type = other DNA
cagtcggtagagcatgagactcttaatctca

SEQ ID NO: 29613 - DNA, 36 bp, synthetic construct
  misc_feature 1..36: note = Probe
  source 1..36: mol_type = other DNA
cagtcggtagagcatgagactcttaatctcagggtc

SEQ ID NO: 29614 - DNA, 18 bp, synthetic construct
  misc_feature 1..18: note = Probe
  source 1..18: mol_type = other DNA
cagtcggtagagcatggg

SEQ ID NO: 29615 - DNA, 19 bp, synthetic construct
  misc_feature 1..19: note = Probe
  source 1..19: mol_type = other DNA
cagtcggtagagcatggga

SEQ ID NO: 29616 - DNA, 23 bp, synthetic construct
  misc_feature 1..23: note = Probe
  source 1..23: mol_type = other DNA
cagtcggtagagcatgggactct

SEQ ID NO: 29617 - DNA, 28 bp, synthetic construct
  misc_feature 1..28: note = Probe
  source 1..28: mol_type = other DNA
cagtcggtagagcatgggactcttaatc

SEQ ID NO: 29618 - DNA, 31 bp, synthetic construct
  misc_feature 1..31: note = Probe
  source 1..31: mol_type = other DNA
cagtcggtagagcatgggactcttaatccca

SEQ ID NO: 29619 - DNA, 36 bp, synthetic construct
  misc_feature 1..36: note = Probe
  source 1..36: mol_type = other DNA
cagtcggtagagcatgggactcttaatcccagggtc

SEQ ID NO: 29620 - DNA, 21 bp, synthetic construct
  misc_feature 1..21: note = Probe
  source 1..21: mol_type = other DNA
cagtcggtagagctatcagac

SEQ ID NO: 29621 - DNA, 18 bp, synthetic construct
  misc_feature 1..18: note = Probe
  source 1..18: mol_type = other DNA
cagtggtagaattctcgc

SEQ ID NO: 29622 - DNA, 19 bp, synthetic construct
  misc_feature 1..19: note = Probe
  source 1..19: mol_type = other DNA
cagtggtagaattctcgcc

SEQ ID NO: 29623 - DNA, 20 bp, synthetic construct
  misc_feature 1..20: note = Probe
  source 1..20: mol_type = other DNA
cagtggtagaattctcgcct

SEQ ID NO: 29624 - DNA, 21 bp, synthetic construct
  misc_feature 1..21: note = Probe
  source 1..21: mol_type = other DNA
cagtggtagaattctcgcctc

SEQ ID NO: 29625 - DNA, 36 bp, synthetic construct
  misc_feature 1..36: note = Probe
  source 1..36: mol_type = other DNA
cagtggtagaattctcgcctcccacgcgggagaccc

SEQ ID NO: 29626 - DNA, 22 bp, synthetic construct
  misc_feature 1..22: note = Probe
  source 1..22: mol_type = other DNA
cagtggtagaattctcgcctgc

SEQ ID NO: 29627 - DNA, 23 bp, synthetic construct
  misc_feature 1..23: note = Probe
  source 1..23: mol_type = other DNA
cagtggtagaattctcgcctgcc

SEQ ID NO: 29628 - DNA, 25 bp, synthetic construct
  misc_feature 1..25: note = Probe
  source 1..25: mol_type = other DNA
cagtggtagaattctcgcctgccac

SEQ ID NO: 29629 - DNA, 31 bp, synthetic construct
  misc_feature 1..31: note = Probe
  source 1..31: mol_type = other DNA
cagtggtagaattctcgcctgccacgcggga

SEQ ID NO: 29630 - DNA, 36 bp, synthetic construct; identical to SEQ ID NO: 18033
  misc_feature 1..36: note = Probe
  source 1..36: mol_type = other DNA

SEQ ID NO: 29631 - DNA, 15 bp, synthetic construct
  misc_feature 1..15: note = Probe
  source 1..15: mol_type = other DNA
cagtggtagagcatt

SEQ ID NO: 29632 - DNA, 20 bp, synthetic construct
  misc_feature 1..20: note = Probe
  source 1..20: mol_type = other DNA
cagtggtagagcatttgact

SEQ ID NO: 29633 - DNA, 22 bp, synthetic construct
  misc_feature 1..22: note = Probe
  source 1..22: mol_type = other DNA
cagtggtagagcatttgactgc

SEQ ID NO: 29634 - DNA, 15 bp, synthetic construct
  misc_feature 1..15: note = Probe
  source 1..15: mol_type = other DNA
cagtggtagagcgca

SEQ ID NO: 29635 - DNA, 16 bp, synthetic construct
  misc_feature 1..16: note = Probe
  source 1..16: mol_type = other DNA
cagtgtcaggatggcc

SEQ ID NO: 29636 - DNA, 36 bp, synthetic construct
  misc_feature 1..36: note = Probe
  source 1..36: mol_type = other DNA
cagttctggctcgttggtctagtggtatgattctcg

SEQ ID NO: 29637 - DNA, 29 bp, synthetic construct
  misc_feature 1..29: note = Probe
  source 1..29: mol_type = other DNA
cagttgatgcagagtggggttttgcagtc

SEQ ID NO: 29638 - DNA, 30 bp, synthetic construct
  misc_feature 1..30: note = Probe
  source 1..30: mol_type = other DNA
cagttgatgcagagtggggttttgcagtcc

SEQ ID NO: 29639 - DNA, 31 bp, synthetic construct; identical to SEQ ID NO: 18035
  misc_feature 1..31: note = Probe
  source 1..31: mol_type = other DNA

SEQ ID NO: 29640 - DNA, 36 bp, synthetic construct; identical to SEQ ID NO: 4381
  misc_feature 1..36: note = Probe
  source 1..36: mol_type = other DNA

SEQ ID NO: 29641 - DNA, 22 bp, synthetic construct
  misc_feature 1..22: note = Probe
  source 1..22: mol_type = other DNA
cagttgattagggtgcttagct

SEQ ID NO: 29642 - DNA, 29 bp, synthetic construct
  misc_feature 1..29: note = Probe
  source 1..29: mol_type = other DNA
cagttgattagggtgcttagctgttaact

SEQ ID NO: 29643 - DNA, 45 bp, synthetic construct
  misc_feature 1..45: note = Probe
  source 1..45: mol_type = other DNA
cagttgattagggtgcttagctgttaactaagtgtttgtgggttt

SEQ ID NO: 29644 - DNA, 16 bp, synthetic construct
  misc_feature 1..16: note = Probe
  source 1..16: mol_type = other DNA
cagttggtagagcatc

SEQ ID NO: 29645 - DNA, 19 bp, synthetic construct
  misc_feature 1..19: note = Probe
  source 1..19: mol_type = other DNA
cagttggtagagcggagga

SEQ ID NO: 29646 - DNA, 24 bp, synthetic construct
  misc_feature 1..24: note = Probe
  source 1..24: mol_type = other DNA
cagttggtagagcggaggactgta

SEQ ID NO: 29647 - DNA, 21 bp, synthetic construct
  misc_feature 1..21: note = Probe
  source 1..21: mol_type = other DNA
cagttggttagagcgtggtgc

SEQ ID NO: 29648 - DNA, 18 bp, synthetic construct
  misc_feature 1..18: note = Probe
  source 1..18: mol_type = other DNA
cagtttatgtagcttacc

SEQ ID NO: 29649 - DNA, 19 bp, synthetic construct
  misc_feature 1..19: note = Probe
  source 1..19: mol_type = other DNA
cagtttatgtagcttacct

SEQ ID NO: 29650 - DNA, 21 bp, synthetic construct
  misc_feature 1..21: note = Probe
  source 1..21: mol_type = other DNA
cagtttatgtagcttacctcc

SEQ ID NO: 29651 - DNA, 22 bp, synthetic construct
  misc_feature 1..22: note = Probe
  source 1..22: mol_type = other DNA
cagtttatgtagcttacctcct

SEQ ID NO: 29652 - DNA, 28 bp, synthetic construct
  misc_feature 1..28: note = Probe
  source 1..28: mol_type = other DNA
cataaaacttaaaactttacagtcagag

SEQ ID NO: 29653 - DNA, 29 bp, synthetic construct
  misc_feature 1..29: note = Probe
  source 1..29: mol_type = other DNA
cataaaacttaaaactttacagtcagagg

SEQ ID NO: 29654 - DNA, 30 bp, synthetic construct
  misc_feature 1..30: note = Probe
  source 1..30: mol_type = other DNA
cataaaacttaaaactttacagtcagaggt

SEQ ID NO: 29655 - DNA, 31 bp, synthetic construct
  misc_feature 1..31: note = Probe
  source 1..31: mol_type = other DNA
cataaaacttaaaactttacagtcagaggtt

SEQ ID NO: 29656 - DNA, 32 bp, synthetic construct
  misc_feature 1..32: note = Probe
  source 1..32: mol_type = other DNA
cataaaacttaaaactttacagtcagaggttc

SEQ ID NO: 29657 - DNA, 36 bp, synthetic construct
  misc_feature 1..36: note = Probe
  source 1..36: mol_type = other DNA
cataaaacttaaaactttacagtcagaggttcaatt

SEQ ID NO: 29658 - DNA, 23 bp, synthetic construct
  misc_feature 1..23: note = Probe
  source 1..23: mol_type = other DNA
cataacccagaggtcgatggatc

SEQ ID NO: 29659 - DNA, 30 bp, synthetic construct
  misc_feature 1..30: note = Probe
  source 1..30: mol_type = other DNA
cataactttgtcaaagttaaattataggct

SEQ ID NO: 29660 - DNA, 17 bp, synthetic construct
  misc_feature 1..17: note = Probe
  source 1..17: mol_type = other DNA
cataatctgaaggtcct

SEQ ID NO: 29661 - DNA, 20 bp, synthetic construct
  misc_feature 1..20: note = Probe
  source 1..20: mol_type = other DNA
cataatctgaaggtcctgag

SEQ ID NO: 29662 - DNA, 21 bp, synthetic construct
  misc_feature 1..21: note = Probe
  source 1..21: mol_type = other DNA
cataatctgaaggtcctgagt

SEQ ID NO: 29663 - DNA, 22 bp, synthetic construct
  misc_feature 1..22: note = Probe
  source 1..22: mol_type = other DNA
cataatctgaaggtcctgagtt

SEQ ID NO: 29664 - DNA, 23 bp, synthetic construct
  misc_feature 1..23: note = Probe
  source 1..23: mol_type = other DNA
cataatctgaaggtcctgagttc

SEQ ID NO: 29665 - DNA, 36 bp, synthetic construct
  misc_feature 1..36: note = Probe
  source 1..36: mol_type = other DNA
cataatctgaaggtcctgagttcgaacctcagaggg

SEQ ID NO: 29666 - DNA, 43 bp, synthetic construct
  misc_feature 1..43: note = Probe
  source 1..43: mol_type = other DNA
cataatctgaaggtcctgagttcgaacctcagagggggcagct

SEQ ID NO: 29667 - DNA, 36 bp, synthetic construct
  misc_feature 1..36: note = Probe
  source 1..36: mol_type = other DNA
cataatctgaaggtcctgagttcgagcctcagagag

SEQ ID NO: 29668 - DNA, 21 bp, synthetic construct
  misc_feature 1..21: note = Probe
  source 1..21: mol_type = other DNA
cataatctgaaggtcgtgagt

SEQ ID NO: 29669 - DNA, 36 bp, synthetic construct
  misc_feature 1..36: note = Probe
  source 1..36: mol_type = other DNA
cataatctgaaggtcgtgagttcgagcctcacacgg

SEQ ID NO: 29670 - DNA, 36 bp, synthetic construct
  misc_feature 1..36: note = Probe
  source 1..36: mol_type = other DNA
cataatctgaaggtcgtgagttcgatcctcacacgg

SEQ ID NO: 29671 - DNA, 43 bp, synthetic construct; identical to SEQ ID NO: 4392
  misc_feature 1..43: note = Probe
  source 1..43: mol_type = other DNA

SEQ ID NO: 29672 - DNA, 18 bp, synthetic construct
  misc_feature 1..18: note = Probe
  source 1..18: mol_type = other DNA
catacccatggccaacct

SEQ ID NO: 29673 - DNA, 29 bp, synthetic construct
  misc_feature 1..29: note = Probe
  source 1..29: mol_type = other DNA
catacccatggccaacctcctactcctca

SEQ ID NO: 29674 - DNA, 25 bp, synthetic construct
  misc_feature 1..25: note = Probe
  source 1..25: mol_type = other DNA
catatcattggtcgtggttgtagtc

SEQ ID NO: 29675 - DNA, 26 bp, synthetic construct
  misc_feature 1..26: note = Probe
  source 1..26: mol_type = other DNA
catatcattggtcgtggttgtagtcc

SEQ ID NO: 29676 - DNA, 27 bp, synthetic construct
  misc_feature 1..27: note = Probe
  source 1..27: mol_type = other DNA
catatcattggtcgtggttgtagtccg

SEQ ID NO: 29677 - DNA, 29 bp, synthetic construct
  misc_feature 1..29: note = Probe
  source 1..29: mol_type = other DNA
catatcattggtcgtggttgtagtccgtg

SEQ ID NO: 29678 - DNA, 30 bp, synthetic construct; identical to SEQ ID NO: 9619
  misc_feature 1..30: note = Probe
  source 1..30: mol_type = other DNA

SEQ ID NO: 29679 - DNA, 31 bp, synthetic construct; identical to SEQ ID NO: 540
  misc_feature 1..31: note = Probe
  source 1..31: mol_type = other DNA

SEQ ID NO: 29680 - DNA, 33 bp, synthetic construct; identical to SEQ ID NO: 18059
  misc_feature 1..33: note = Probe
  source 1..33: mol_type = other DNA

SEQ ID NO: 29681 - DNA, 34 bp, synthetic construct
  misc_feature 1..34: note = Probe
  source 1..34: mol_type = other DNA
catatcattggtcgtggttgtagtccgtgcgaga

SEQ ID NO: 29682 - DNA, 35 bp, synthetic construct; identical to SEQ ID NO: 18060
  misc_feature 1..35: note = Probe
  source 1..35: mol_type = other DNA

SEQ ID NO: 29683 - DNA, 39 bp, synthetic construct; identical to SEQ ID NO: 4401
  misc_feature 1..39: note = Probe
  source 1..39: mol_type = other DNA

SEQ ID NO: 29684 - DNA, 30 bp, synthetic construct
  misc_feature 1..30: note = Probe
  source 1..30: mol_type = other DNA
catatggtctagcggttaggattcctggtt

SEQ ID NO: 29685 - DNA, 36 bp, synthetic construct
  misc_feature 1..36: note = Probe
  source 1..36: mol_type = other DNA
catattgaattgcaaattcgaagaagcagcttcaaa

SEQ ID NO: 29686 - DNA, 16 bp, synthetic construct
  misc_feature 1..16: note = Probe
  source 1..16: mol_type = other DNA
catcagattgtgaatc

SEQ ID NO: 29687 - DNA, 17 bp, synthetic construct
  misc_feature 1..17: note = Probe
  source 1..17: mol_type = other DNA
catcagattgtgaatct

SEQ ID NO: 29688 - DNA, 29 bp, synthetic construct
  misc_feature 1..29: note = Probe
  source 1..29: mol_type = other DNA
catcagattgtgaatctgacaacagaggc

SEQ ID NO: 29689 - DNA, 30 bp, synthetic construct
  misc_feature 1..30: note = Probe
  source 1..30: mol_type = other DNA
catcagattgtgaatctgacaacagaggct

SEQ ID NO: 29690 - DNA, 31 bp, synthetic construct
  misc_feature 1..31: note = Probe
  source 1..31: mol_type = other DNA
catcagattgtgaatctgacaacagaggctt

SEQ ID NO: 29691 - DNA, 37 bp, synthetic construct
  misc_feature 1..37: note = Probe
  source 1..37: mol_type = other DNA
catcagattgtgaatctgacaacagaggcttacgacc

SEQ ID NO: 29692 - DNA, 38 bp, synthetic construct
  misc_feature 1..38: note = Probe
  source 1..38: mol_type = other DNA
catcagattgtgaatctgacaacagaggcttacgaccc

SEQ ID NO: 29693 - DNA, 24 bp, synthetic construct
  misc_feature 1..24: note = Probe
  source 1..24: mol_type = other DNA
catcctctgctatagactcccttt

SEQ ID NO: 29694 - DNA, 21 bp, synthetic construct
  misc_feature 1..21: note = Probe
  source 1..21: mol_type = other DNA
catctggggtggcctgtgact

SEQ ID NO: 29695 - DNA, 16 bp, synthetic construct
  misc_feature 1..16: note = Probe
  source 1..16: mol_type = other DNA
catgagactcttaatc

SEQ ID NO: 29696 - DNA, 17 bp, synthetic construct
  misc_feature 1..17: note = Probe
  source 1..17: mol_type = other DNA
catgagactcttaatct

SEQ ID NO: 29697 - DNA, 25 bp, synthetic construct
  misc_feature 1..25: note = Probe
  source 1..25: mol_type = other DNA
catgcacactactataaccacccta

SEQ ID NO: 29698 - DNA, 19 bp, synthetic construct
  misc_feature 1..19: note = Probe
  source 1..19: mol_type = other DNA
catgcacgaggccccgggt

SEQ ID NO: 29699 - DNA, 19 bp, synthetic construct
  misc_feature 1..19: note = Probe
  source 1..19: mol_type = other DNA
catgcagcgcaagtaggtc

SEQ ID NO: 29700 - DNA, 20 bp, synthetic construct
  misc_feature 1..20: note = Probe
  source 1..20: mol_type = other DNA
catgcagcgcaagtaggtct

SEQ ID NO: 29701 - DNA, 24 bp, synthetic construct
  misc_feature 1..24: note = Probe
  source 1..24: mol_type = other DNA
catgcagcgcaagtaggtctacaa

SEQ ID NO: 29702 - DNA, 15 bp, synthetic construct
  misc_feature 1..15: note = Probe
  source 1..15: mol_type = other DNA
catgcccccatgtct

SEQ ID NO: 29703 - DNA, 18 bp, synthetic construct
  misc_feature 1..18: note = Probe
  source 1..18: mol_type = other DNA
catgcccccatgtctaac

SEQ ID NO: 29704 - DNA, 19 bp, synthetic construct
  misc_feature 1..19: note = Probe
  source 1..19: mol_type = other DNA
catgcccccatgtctaaca

SEQ ID NO: 29705 - DNA, 21 bp, synthetic construct
  misc_feature 1..21: note = Probe
  source 1..21: mol_type = other DNA
catgcccccatgtctaacaac

SEQ ID NO: 29706 - DNA, 22 bp, synthetic construct
  misc_feature 1..22: note = Probe
  source 1..22: mol_type = other DNA
catgcccccatgtctaacaaca

SEQ ID NO: 29707 - DNA, 27 bp, synthetic construct
  misc_feature 1..27: note = Probe
  source 1..27: mol_type = other DNA
catgcccccatgtctaacaacatggct

SEQ ID NO: 29708 - DNA, 31 bp, synthetic construct; identical to SEQ ID NO: 4434
  misc_feature 1..31: note = Probe
  source 1..31: mol_type = other DNA

SEQ ID NO: 29709 - DNA, 33 bp, synthetic construct; identical to SEQ ID NO: 4436
  misc_feature 1..33: note = Probe
  source 1..33: mol_type = other DNA

SEQ ID NO: 29710 - DNA, 35 bp, synthetic construct; identical to SEQ ID NO: 4438
  misc_feature 1..35: note = Probe
  source 1..35: mol_type = other DNA

SEQ ID NO: 29711 - DNA, 36 bp, synthetic construct; identical to SEQ ID NO: 4439
  misc_feature 1..36: note = Probe
  source 1..36: mol_type = other DNA

SEQ ID NO: 29712 - DNA, 15 bp, synthetic construct
  misc_feature 1..15: note = Probe
  source 1..15: mol_type = other DNA
catggaggcgtgggt

SEQ ID NO: 29713 - DNA, 21 bp, synthetic construct
  misc_feature 1..21: note = Probe
  source 1..21: mol_type = other DNA
catggccaacctcctactcct

SEQ ID NO: 29714 - DNA, 23 bp, synthetic construct
  misc_feature 1..23: note = Probe
  source 1..23: mol_type = other DNA
catggccaacctcctactcctca

SEQ ID NO: 29715 - DNA, 15 bp, synthetic construct
  misc_feature 1..15: note = Probe
  source 1..15: mol_type = other DNA
catgggactcttaat

SEQ ID NO: 29716 - DNA, 16 bp, synthetic construct
  misc_feature 1..16: note = Probe
  source 1..16: mol_type = other DNA
catgggactcttaatc

SEQ ID NO: 29717 - DNA, 17 bp, synthetic construct
  misc_feature 1..17: note = Probe
  source 1..17: mol_type = other DNA
catgggactcttaatcc

SEQ ID NO: 29718 - DNA, 17 bp, synthetic construct
  misc_feature 1..17: note = Probe
  source 1..17: mol_type = other DNA
catgggtggttcagtgg

SEQ ID NO: 29719 - DNA, 19 bp, synthetic construct
  misc_feature 1..19: note = Probe
  source 1..19: mol_type = other DNA
catgggtggttcagtggta

SEQ ID NO: 29720 - DNA, 20 bp, synthetic construct
  misc_feature 1..20: note = Probe
  source 1..20: mol_type = other DNA
catgggtggttcagtggtag

SEQ ID NO: 29721 - DNA, 30 bp, synthetic construct; identical to SEQ ID NO: 9630
  misc_feature 1..30: note = Probe
  source 1..30: mol_type = other DNA

SEQ ID NO: 29722 - DNA, 32 bp, synthetic construct; identical to SEQ ID NO: 4443
  misc_feature 1..32: note = Probe
  source 1..32: mol_type = other DNA

SEQ ID NO: 29723 - DNA, 34 bp, synthetic construct; identical to SEQ ID NO: 4444
  misc_feature 1..34: note = Probe
  source 1..34: mol_type = other DNA

SEQ ID NO: 29724 - DNA, 36 bp, synthetic construct
  misc_feature 1..36: note = Probe
  source 1..36: mol_type = other DNA
catgggtggttcagtggtagaattctcgcctgccac

SEQ ID NO: 29725 - DNA, 36 bp, synthetic construct
  misc_feature 1..36: note = Probe
  source 1..36: mol_type = other DNA
catggtctagcggttaggattcctggttttcaccca

SEQ ID NO: 29726 - DNA, 36 bp, synthetic construct
  misc_feature 1..36: note = Probe
  source 1..36: mol_type = other DNA
catggtgtaatggttagcactctggactctgaatcc

SEQ ID NO: 29727 - DNA, 47 bp, synthetic construct
  misc_feature 1..47: note = Probe
  source 1..47: mol_type = other DNA
catggtgtaatggttagcactctggactctgaatccagcgatccgag

SEQ ID NO: 29728 - DNA, 50 bp, synthetic construct
  misc_feature 1..50: note = Probe
  source 1..50: mol_type = other DNA
catggtgtaatggttagcactctggactctgaatccagcgatccgagttc

SEQ ID NO: 29729 - DNA, 19 bp, synthetic construct
  misc_feature 1..19: note = Probe
  source 1..19: mol_type = other DNA
catgtatgaggccccgggt

SEQ ID NO: 29730 - DNA, 27 bp, synthetic construct
  misc_feature 1..27: note = Probe
  source 1..27: mol_type = other DNA
cattaaattatgataatcatatttacc

SEQ ID NO: 29731 - DNA, 33 bp, synthetic construct
  misc_feature 1..33: note = Probe
  source 1..33: mol_type = other DNA
cattaaccttttaagttaaagattaagagaacc

SEQ ID NO: 29732 - DNA, 36 bp, synthetic construct
  misc_feature 1..36: note = Probe
  source 1..36: mol_type = other DNA
cattaaccttttaagttaaagattaagagaaccaac

SEQ ID NO: 29733 - DNA, 36 bp, synthetic construct
  misc_feature 1..36: note = Probe
  source 1..36: mol_type = other DNA
cattcttgcgacccgggttcgattcccgggcggcgc

SEQ ID NO: 29734 - DNA, 39 bp, synthetic construct; identical to SEQ ID NO: 4450
  misc_feature 1..39: note = Probe
  source 1..39: mol_type = other DNA

SEQ ID NO: 29735 - DNA, 16 bp, synthetic construct
  misc_feature 1..16: note = Probe
  source 1..16: mol_type = other DNA
cattggactgtaaatc

SEQ ID NO: 29736 - DNA, 37 bp, synthetic construct
  misc_feature 1..37: note = Probe
  source 1..37: mol_type = other DNA
cattggactgtaaatctaaagacaggggttaggcctc

SEQ ID NO: 29737 - DNA, 16 bp, synthetic construct
  misc_feature 1..16: note = Probe
  source 1..16: mol_type = other DNA
cattggtcgtggttgt

SEQ ID NO: 29738 - DNA, 17 bp, synthetic construct
  misc_feature 1..17: note = Probe
  source 1..17: mol_type = other DNA
cattggtcgtggttgta

SEQ ID NO: 29739 - DNA, 18 bp, synthetic construct
  misc_feature 1..18: note = Probe
  source 1..18: mol_type = other DNA
cattggtcgtggttgtag

SEQ ID NO: 29740 - DNA, 19 bp, synthetic construct
  misc_feature 1..19: note = Probe
  source 1..19: mol_type = other DNA
cattggtcgtggttgtagt

SEQ ID NO: 29741 - DNA, 22 bp, synthetic construct
  misc_feature 1..22: note = Probe
  source 1..22: mol_type = other DNA
cattggtcgtggttgtagtccg

SEQ ID NO: 29742 - DNA, 23 bp, synthetic construct
  misc_feature 1..23: note = Probe
  source 1..23: mol_type = other DNA
cattggtcgtggttgtagtccgt

SEQ ID NO: 29743 - DNA, 24 bp, synthetic construct
  misc_feature 1..24: note = Probe
  source 1..24: mol_type = other DNA
cattggtcgtggttgtagtccgtg

SEQ ID NO: 29744 - DNA, 25 bp, synthetic construct
  misc_feature 1..25: note = Probe
  source 1..25: mol_type = other DNA
cattggtcgtggttgtagtccgtgc

SEQ ID NO: 29745 - DNA, 27 bp, synthetic construct
  misc_feature 1..27: note = Probe
  source 1..27: mol_type = other DNA
cattggtcgtggttgtagtccgtgcga

SEQ ID NO: 29746 - DNA, 33 bp, synthetic construct; identical to SEQ ID NO: 4460
  misc_feature 1..33: note = Probe
  source 1..33: mol_type = other DNA

SEQ ID NO: 29747 - DNA, 36 bp, synthetic construct
  misc_feature 1..36: note = Probe
  source 1..36: mol_type = other DNA
cattggtcgtggttgtagtccgtgcgagaataatga

SEQ ID NO: 29748 - DNA, 15 bp, synthetic construct
  misc_feature 1..15: note = Probe
  source 1..15: mol_type = other DNA
cattggtcttaggcc

SEQ ID NO: 29749 - DNA, 28 bp, synthetic construct
  misc_feature 1..28: note = Probe
  source 1..28: mol_type = other DNA
cattggtcttaggccccaaaaattttgg

SEQ ID NO: 29750 - DNA, 31 bp, synthetic construct
  misc_feature 1..31: note = Probe
  source 1..31: mol_type = other DNA
cattggtcttaggccccaaaaattttggtgc

SEQ ID NO: 29751 - DNA, 32 bp, synthetic construct
  misc_feature 1..32: note = Probe
  source 1..32: mol_type = other DNA
cattggtcttaggccccaaaaattttggtgca

SEQ ID NO: 29752 - DNA, 36 bp, synthetic construct
  misc_feature 1..36: note = Probe
  source 1..36: mol_type = other DNA
cattggtcttaggccccaaaaattttggtgcaactc

SEQ ID NO: 29753 - DNA, 37 bp, synthetic construct
  misc_feature 1..37: note = Probe
  source 1..37: mol_type = other DNA
cattggtcttaggccccaaaaattttggtgcaactcc

SEQ ID NO: 29754 - DNA, 20 bp, synthetic construct
  misc_feature 1..20: note = Probe
  source 1..20: mol_type = other DNA
cattggtggttcagtggtag

SEQ ID NO: 29755 - DNA, 29 bp, synthetic construct
  misc_feature 1..29: note = Probe
  source 1..29: mol_type = other DNA
cattggtggttcagtggtagaattctcgc

SEQ ID NO: 29756 - DNA, 30 bp, synthetic construct; identical to SEQ ID NO: 4462
  misc_feature 1..30: note = Probe
  source 1..30: mol_type = other DNA

SEQ ID NO: 29757 - DNA, 31 bp, synthetic construct; identical to SEQ ID NO: 4463
  misc_feature 1..31: note = Probe
  source 1..31: mol_type = other DNA

SEQ ID NO: 29758 - DNA, 36 bp, synthetic construct
  misc_feature 1..36: note = Probe
  source 1..36: mol_type = other DNA
cattggtggttcagtggtagaattctcgcctcccac

SEQ ID NO: 29759 - DNA, 32 bp, synthetic construct; identical to SEQ ID NO: 4464
  misc_feature 1..32: note = Probe
  source 1..32: mol_type = other DNA

SEQ ID NO: 29760 - DNA, 34 bp, synthetic construct; identical to SEQ ID NO: 4466
  misc_feature 1..34: note = Probe
  source 1..34: mol_type = other DNA

SEQ ID NO: 29761 - DNA, 36 bp, synthetic construct
  misc_feature 1..36: note = Probe
  source 1..36: mol_type = other DNA
cattggtggttcagtggtagaattctcgcctgccac

SEQ ID NO: 29762 - DNA, 50 bp, synthetic construct; identical to SEQ ID NO: 18141
  misc_feature 1..50: note = Probe
  source 1..50: mol_type = other DNA

SEQ ID NO: 29763 - DNA, 36 bp, synthetic construct
  misc_feature 1..36: note = Probe
  source 1..36: mol_type = other DNA
cattgtgctttgcacgcgtgggttcgaatcccatcc

SEQ ID NO: 29764 - DNA, 44 bp, synthetic construct
  misc_feature 1..44: note = Probe
  source 1..44: mol_type = other DNA
cattgtgctttgcacgcgtgggttcgaatcccatcctcgtcggc

SEQ ID NO: 29765 - DNA, 45 bp, synthetic construct
  misc_feature 1..45: note = Probe
  source 1..45: mol_type = other DNA
cattgtgctttgcacgcgtgggttcgaatcccatcctcgtcggcc

SEQ ID NO: 29766 - DNA, 35 bp, synthetic construct
  misc_feature 1..35: note = Probe
  source 1..35: mol_type = other DNA
catttcataactttgtcaaagttaaattataggct

SEQ ID NO: 29767 - DNA, 36 bp, synthetic construct
  misc_feature 1..36: note = Probe
  source 1..36: mol_type = other DNA
catttcataactttgtcaaagttaaattataggcta

SEQ ID NO: 29768 - DNA, 29 bp, synthetic construct
  misc_feature 1..29: note = Probe
  source 1..29: mol_type = other DNA
catttgactgcagatcaagaggtccccgg

SEQ ID NO: 29769 - DNA, 31 bp, synthetic construct
  misc_feature 1..31: note = Probe
  source 1..31: mol_type = other DNA
catttgactgcagatcaagaggtccccggtt

SEQ ID NO: 29770 - DNA, 30 bp, synthetic construct
  misc_feature 1..30: note = Probe
  source 1..30: mol_type = other DNA
catttgactgcagatcaagaggtccctggt

SEQ ID NO: 29771 - DNA, 31 bp, synthetic construct
  misc_feature 1..31: note = Probe
  source 1..31: mol_type = other DNA
catttgactgcagatcaagaggtccctggtt

SEQ ID NO: 29772 - DNA, 21 bp, synthetic construct
  misc_feature 1..21: note = Probe
  source 1..21: mol_type = other DNA
ccaaaaattttggtgcaactc

SEQ ID NO: 29773 - DNA, 22 bp, synthetic construct
  misc_feature 1..22: note = Probe
  source 1..22: mol_type = other DNA
ccaaaaattttggtgcaactcc

SEQ ID NO: 29774 - DNA, 17 bp, synthetic construct
  misc_feature 1..17: note = Probe
  source 1..17: mol_type = other DNA
ccaaaacatcagattgt

SEQ ID NO: 29775 - DNA, 19 bp, synthetic construct
  misc_feature 1..19: note = Probe
  source 1..19: mol_type = other DNA
ccaaaacatcagattgtga

SEQ ID NO: 29776 - DNA, 22 bp, synthetic construct
  misc_feature 1..22: note = Probe
  source 1..22: mol_type = other DNA
ccaaaacatcagattgtgaatc

SEQ ID NO: 29777 - DNA, 23 bp, synthetic construct
  misc_feature 1..23: note = Probe
  source 1..23: mol_type = other DNA
ccaaaacatcagattgtgaatct

SEQ ID NO: 29778 - DNA, 36 bp, synthetic construct; identical to SEQ ID NO: 4479
  misc_feature 1..36: note = Probe
  source 1..36: mol_type = other DNA

SEQ ID NO: 29779 - DNA, 16 bp, synthetic construct
  misc_feature 1..16: note = Probe
  source 1..16: mol_type = other DNA
ccaaacccactccacc

SEQ ID NO: 29780 - DNA, 17 bp, synthetic construct
  misc_feature 1..17: note = Probe
  source 1..17: mol_type = other DNA
ccaaacccactccacct

SEQ ID NO: 29781 - DNA, 38 bp, synthetic construct; identical to SEQ ID NO: 18167
  misc_feature 1..38: note = Probe
  source 1..38: mol_type = other DNA

SEQ ID NO: 29782 - DNA, 16 bp, synthetic construct
  misc_feature 1..16: note = Probe
  source 1..16: mol_type = other DNA
ccaacccgtcatctac

SEQ ID NO: 29783 - DNA, 23 bp, synthetic construct
  misc_feature 1..23: note = Probe
  source 1..23: mol_type = other DNA
ccaactaaatactaccgtatggc

SEQ ID NO: 29784 - DNA, 18 bp, synthetic construct
  misc_feature 1..18: note = Probe
  source 1..18: mol_type = other DNA
ccaacttacacttaggag

SEQ ID NO: 29785 - DNA, 28 bp, synthetic construct
  misc_feature 1..28: note = Probe
  source 1..28: mol_type = other DNA
ccaacttacacttaggagatttcaactt

SEQ ID NO: 29786 - DNA, 35 bp, synthetic construct; identical to SEQ ID NO: 4500
  misc_feature 1..35: note = Probe
  source 1..35: mol_type = other DNA

SEQ ID NO: 29787 - DNA, 36 bp, synthetic construct; identical to SEQ ID NO: 4501
  misc_feature 1..36: note = Probe
  source 1..36: mol_type = other DNA

SEQ ID NO: 29788 - DNA, 43 bp, synthetic construct; identical to SEQ ID NO: 4504
  misc_feature 1..43: note = Probe
  source 1..43: mol_type = other DNA

SEQ ID NO: 29789 - DNA, 44 bp, synthetic construct; identical to SEQ ID NO: 4505
  misc_feature 1..44: note = Probe
  source 1..44: mol_type = other DNA

SEQ ID NO: 29790 - DNA, 45 bp, synthetic construct; identical to SEQ ID NO: 4506
  misc_feature 1..45: note = Probe
  source 1..45: mol_type = other DNA

SEQ ID NO: 29791 - DNA, 46 bp, synthetic construct; identical to SEQ ID NO: 4507
  misc_feature 1..46: note = Probe
  source 1..46: mol_type = other DNA

SEQ ID NO: 29792 - DNA, 47 bp, synthetic construct
  misc_feature 1..47: note = Probe
  source 1..47: mol_type = other DNA
ccaacttacacttaggagatttcaacttaacttgaccgctctgagct

SEQ ID NO: 29793 - DNA, 15 bp, synthetic construct
  misc_feature 1..15: note = Probe
  source 1..15: mol_type = other DNA
ccaagaacagggttt

SEQ ID NO: 29794 - DNA, 16 bp, synthetic construct
  misc_feature 1..16: note = Probe
  source 1..16: mol_type = other DNA
ccaagaacagggtttg

SEQ ID NO: 29795 - DNA, 17 bp, synthetic construct
  misc_feature 1..17: note = Probe
  source 1..17: mol_type = other DNA
ccaagaacagggtttgt

SEQ ID NO: 29796 - DNA, 18 bp, synthetic construct
  misc_feature 1..18: note = Probe
  source 1..18: mol_type = other DNA
ccaagaacagggtttgtt

SEQ ID NO: 29797 - DNA, 19 bp, synthetic construct
  misc_feature 1..19: note = Probe
  source 1..19: mol_type = other DNA
ccaagaacagggtttgtta

SEQ ID NO: 29798 - DNA, 20 bp, synthetic construct
  misc_feature 1..20: note = Probe
  source 1..20: mol_type = other DNA
ccaagaacagggtttgttaa

SEQ ID NO: 29799 - DNA, 21 bp, synthetic construct
  misc_feature 1..21: note = Probe
  source 1..21: mol_type = other DNA
ccaagaacagggtttgttaag

SEQ ID NO: 29800 - DNA, 22 bp, synthetic construct
  misc_feature 1..22: note = Probe
  source 1..22: mol_type = other DNA
ccaagaacagggtttgttaaga

SEQ ID NO: 29801 - DNA, 19 bp, synthetic construct
  misc_feature 1..19: note = Probe
  source 1..19: mol_type = other DNA
ccaagcagttgacccgggt

SEQ ID NO: 29802 - DNA, 17 bp, synthetic construct
  misc_feature 1..17: note = Probe
  source 1..17: mol_type = other DNA
ccaagctctttccattt

SEQ ID NO: 29803 - DNA, 18 bp, synthetic construct
  misc_feature 1..18: note = Probe
  source 1..18: mol_type = other DNA
ccaagctctttccatttt

SEQ ID NO: 29804 - DNA, 26 bp, synthetic construct
  misc_feature 1..26: note = Probe
  source 1..26: mol_type = other DNA
ccaaggcgatcacgtagattttgttt

SEQ ID NO: 29805 - DNA, 17 bp, synthetic construct
  misc_feature 1..17: note = Probe
  source 1..17: mol_type = other DNA
ccaatggaggcgtgggt

SEQ ID NO: 29806 - DNA, 36 bp, synthetic construct
  misc_feature 1..36: note = Probe
  source 1..36: mol_type = other DNA
ccaatggaggcgtgggttcgaatcccacttctgaca

SEQ ID NO: 29807 - DNA, 17 bp, synthetic construct
  misc_feature 1..17: note = Probe
  source 1..17: mol_type = other DNA
ccacacccacccaagaa

SEQ ID NO: 29808 - DNA, 18 bp, synthetic construct
  misc_feature 1..18: note = Probe
  source 1..18: mol_type = other DNA
ccacacccacccaagaac

SEQ ID NO: 29809 - DNA, 19 bp, synthetic construct
  misc_feature 1..19: note = Probe
  source 1..19: mol_type = other DNA
ccacacccacccaagaaca

SEQ ID NO: 29810 - DNA, 17 bp, synthetic construct
  misc_feature 1..17: note = Probe
  source 1..17: mol_type = other DNA
ccacagtttatgtagct

SEQ ID NO: 29811 - DNA, 21 bp, synthetic construct
  misc_feature 1..21: note = Probe
  source 1..21: mol_type = other DNA
ccacagtttatgtagcttacc

SEQ ID NO: 29812 - DNA, 22 bp, synthetic construct
  misc_feature 1..22: note = Probe
  source 1..22: mol_type = other DNA
ccacagtttatgtagcttacct

SEQ ID NO: 29813 - DNA, 24 bp, synthetic construct
  misc_feature 1..24: note = Probe
  source 1..24: mol_type = other DNA
ccacagtttatgtagcttacctcc

SEQ ID NO: 29814 - DNA, 25 bp, synthetic construct
  misc_feature 1..25: note = Probe
  source 1..25: mol_type = other DNA
ccacagtttatgtagcttacctcct

SEQ ID NO: 29815 - DNA, 27 bp, synthetic construct
  misc_feature 1..27: note = Probe
  source 1..27: mol_type = other DNA
ccacatggtctagcggttaggattcct

SEQ ID NO: 29816 - DNA, 32 bp, synthetic construct; identical to SEQ ID NO: 564
  misc_feature 1..32: note = Probe
  source 1..32: mol_type = other DNA

SEQ ID NO: 29817 - DNA, 33 bp, synthetic construct; identical to SEQ ID NO: 565
  misc_feature 1..33: note = Probe
  source 1..33: mol_type = other DNA

SEQ ID NO: 29818 - DNA, 34 bp, synthetic construct; identical to SEQ ID NO: 566
  misc_feature 1..34: note = Probe
  source 1..34: mol_type = other DNA

SEQ ID NO: 29819 - DNA, 36 bp, synthetic construct
  misc_feature 1..36: note = Probe
  source 1..36: mol_type = other DNA
ccacatggtctagcggttaggattcctggttttcac

SEQ ID NO: 29820 - DNA, 23 bp, synthetic construct
  misc_feature 1..23: note = Probe
  source 1..23: mol_type = other DNA
ccacccaagaacagggtttgtta

SEQ ID NO: 29821 - DNA, 15 bp, synthetic construct
  misc_feature 1..15: note = Probe
  source 1..15: mol_type = other DNA
ccacccagggacgcc

SEQ ID NO: 29822 - DNA, 23 bp, synthetic construct
  misc_feature 1..23: note = Probe
  source 1..23: mol_type = other DNA
ccacccagggacgctatgacctt

SEQ ID NO: 29823 - DNA, 36 bp, synthetic construct
  misc_feature 1..36: note = Probe
  source 1..36: mol_type = other DNA
ccacgcgggagacccgggttcaattcccggccaatg

SEQ ID NO: 29824 - DNA, 36 bp, synthetic construct
  misc_feature 1..36: note = Probe
  source 1..36: mol_type = other DNA
ccacgcgggaggcccgggttcgattcccggccaatg

SEQ ID NO: 29825 - DNA, 40 bp, synthetic construct
  misc_feature 1..40: note = Probe
  source 1..40: mol_type = other DNA
ccacgcgggaggcccgggttcgattcccggccaatgcaac

SEQ ID NO: 29826 - DNA, 40 bp, synthetic construct
  misc_feature 1..40: note = Probe
  source 1..40: mol_type = other DNA
ccacgcgggaggcccgggttcgattcccggccaatgcacg

SEQ ID NO: 29827 - DNA, 41 bp, synthetic construct; identical to SEQ ID NO: 4531
  misc_feature 1..41: note = Probe
  source 1..41: mol_type = other DNA

SEQ ID NO: 29828 - DNA, 40 bp, synthetic construct
  misc_feature 1..40: note = Probe
  source 1..40: mol_type = other DNA
ccacgcgggaggcccgggttcgattcccggccaatgcact

SEQ ID NO: 29829 - DNA, 40 bp, synthetic construct
  misc_feature 1..40: note = Probe
  source 1..40: mol_type = other DNA
ccacgcgggaggcccgggttcgattcccggccaatgcagc

SEQ ID NO: 29830 - DNA, 41 bp, synthetic construct; identical to SEQ ID NO: 4532
  misc_feature 1..41: note = Probe
  source 1..41: mol_type = other DNA

SEQ ID NO: 29831 - DNA, 36 bp, synthetic construct
  misc_feature 1..36: note = Probe
  source 1..36: mol_type = other DNA
ccacgcgggaggcccgggttcgattcccggcccatg

SEQ ID NO: 29832 - DNA, 28 bp, synthetic construct
  misc_feature 1..28: note = Probe
  source 1..28: mol_type = other DNA
ccactgtaaagctaacttagcattaacc

SEQ ID NO: 29833 - DNA, 29 bp, synthetic construct
  misc_feature 1..29: note = Probe
  source 1..29: mol_type = other DNA
ccactgtaaagctaacttagcattaacct

SEQ ID NO: 29834 - DNA, 36 bp, synthetic construct
  misc_feature 1..36: note = Probe
  source 1..36: mol_type = other DNA
ccactgtaaagctaacttagcattaaccttttaagt

SEQ ID NO: 29835 - DNA, 50 bp, synthetic construct; identical to SEQ ID NO: 18241
  misc_feature 1..50: note = Probe
  source 1..50: mol_type = other DNA

SEQ ID NO: 29836 - DNA, 21 bp, synthetic construct
  misc_feature 1..21: note = Probe
  source 1..21: mol_type = other DNA
ccacttctgacacattcgttt

SEQ ID NO: 29837 - DNA, 27 bp, synthetic construct
  misc_feature 1..27: note = Probe
  source 1..27: mol_type = other DNA
ccagagtgtagcttaacacaaagcacc

SEQ ID NO: 29838 - DNA, 28 bp, synthetic construct
  misc_feature 1..28: note = Probe
  source 1..28: mol_type = other DNA
ccagagtgtagcttaacacaaagcaccc

SEQ ID NO: 29839 - DNA, 15 bp, synthetic construct
  misc_feature 1..15: note = Probe
  source 1..15: mol_type = other DNA
ccagatcagaaggct

SEQ ID NO: 29840 - DNA, 23 bp, synthetic construct
  misc_feature 1..23: note = Probe
  source 1..23: mol_type = other DNA
ccagctagctcagtcggtagagc

SEQ ID NO: 29841 - DNA, 31 bp, synthetic construct; identical to SEQ ID NO: 18262
  misc_feature 1..31: note = Probe
  source 1..31: mol_type = other DNA

SEQ ID NO: 29842 - DNA, 32 bp, synthetic construct
  misc_feature 1..32: note = Probe
  source 1..32: mol_type = other DNA
ccagctagctcagtcggtagagcatgagactc

SEQ ID NO: 29843 - DNA, 36 bp, synthetic construct; identical to SEQ ID NO: 4559
  misc_feature 1..36: note = Probe
  source 1..36: mol_type = other DNA

SEQ ID NO: 29844 - DNA, 24 bp, synthetic construct
  misc_feature 1..24: note = Probe
  source 1..24: mol_type = other DNA
ccaggatggccgagtggttaaggc

SEQ ID NO: 29845 - DNA, 26 bp, synthetic construct
  misc_feature 1..26: note = Probe
  source 1..26: mol_type = other DNA
ccaggcggcccgggttcgactcccgg

SEQ ID NO: 29846 - DNA, 27 bp, synthetic construct
  misc_feature 1..27: note = Probe
  source 1..27: mol_type = other DNA
ccaggcggcccgggttcgactcccggt

SEQ ID NO: 29847 - DNA, 28 bp, synthetic construct
  misc_feature 1..28: note = Probe
  source 1..28: mol_type = other DNA
ccaggcggcccgggttcgactcccggtg

SEQ ID NO: 29848 - DNA, 33 bp, synthetic construct; identical to SEQ ID NO: 18272
  misc_feature 1..33: note = Probe
  source 1..33: mol_type = other DNA

SEQ ID NO: 29849 - DNA, 34 bp, synthetic construct; identical to SEQ ID NO: 4562
  misc_feature 1..34: note = Probe
  source 1..34: mol_type = other DNA

SEQ ID NO: 29850 - DNA, 35 bp, synthetic construct; identical to SEQ ID NO: 572
  misc_feature 1..35: note = Probe
  source 1..35: mol_type = other DNA

SEQ ID NO: 29851 - DNA, 36 bp, synthetic construct; identical to SEQ ID NO: 18273
  misc_feature 1..36: note = Probe
  source 1..36: mol_type = other DNA

SEQ ID NO: 29852 - DNA, 36 bp, synthetic construct
  misc_feature 1..36: note = Probe
  source 1..36: mol_type = other DNA
ccaggcggcccgggttcgactcccggtgtgggaatg

SEQ ID NO: 29853 - DNA, 15 bp, synthetic construct
  misc_feature 1..15: note = Probe
  source 1..15: mol_type = other DNA
ccagggattgtgggt

SEQ ID NO: 29854 - DNA, 36 bp, synthetic construct
  misc_feature 1..36: note = Probe
  source 1..36: mol_type = other DNA
ccagggattgtgggttcgagtcccatctggggtggc

SEQ ID NO: 29855 - DNA, 29 bp, synthetic construct
  misc_feature 1..29: note = Probe
  source 1..29: mol_type = other DNA
ccagggttcaagtccctgttcgggcggca

SEQ ID NO: 29856 - DNA, 36 bp, synthetic construct
  misc_feature 1..36: note = Probe
  source 1..36: mol_type = other DNA
ccaggtggcccgggttcgactcccggtatgggaaca

SEQ ID NO: 29857 - DNA, 36 bp, synthetic construct; identical to SEQ ID NO: 18287
  misc_feature 1..36: note = Probe
  source 1..36: mol_type = other DNA

SEQ ID NO: 29858 - DNA, 23 bp, synthetic construct
  misc_feature 1..23: note = Probe
  source 1..23: mol_type = other DNA
ccataacccagaggtcgatggat

SEQ ID NO: 29859 - DNA, 36 bp, synthetic construct; identical to SEQ ID NO: 18297
  misc_feature 1..36: note = Probe
  source 1..36: mol_type = other DNA

SEQ ID NO: 29860 - DNA, 31 bp, synthetic construct; identical to SEQ ID NO: 4582
  misc_feature 1..31: note = Probe
  source 1..31: mol_type = other DNA

SEQ ID NO: 29861 - DNA, 29 bp, synthetic construct
  misc_feature 1..29: note = Probe
  source 1..29: mol_type = other DNA
ccatgatcgtatagtggttagtactctgc

SEQ ID NO: 29862 - DNA, 30 bp, synthetic construct
  misc_feature 1..30: note = Probe
  source 1..30: mol_type = other DNA
ccatgatcgtatagtggttagtactctgcg

SEQ ID NO: 29863 - DNA, 36 bp, synthetic construct
  misc_feature 1..36: note = Probe
  source 1..36: mol_type = other DNA
ccatggtgtaatggttagcactctggactctgaatc

SEQ ID NO: 29864 - DNA, 50 bp, synthetic construct
  misc_feature 1..50: note = Probe
  source 1..50: mol_type = other DNA
ccatggtgtaatggttagcactctggactctgaatccagcgatccgagtt

SEQ ID NO: 29865 - DNA, 36 bp, synthetic construct
  misc_feature 1..36: note = Probe
  source 1..36: mol_type = other DNA
ccatggtgtaatggttagcactctggactttgaatc

SEQ ID NO: 29866 - DNA, 36 bp, synthetic construct
  misc_feature 1..36: note = Probe
  source 1..36: mol_type = other DNA
ccattcttgcgacccgggttcgattcccgggcggcg

SEQ ID NO: 29867 - DNA, 19 bp, synthetic construct
  misc_feature 1..19: note = Probe
  source 1..19: mol_type = other DNA
ccattggtcttaggcccca

SEQ ID NO: 29868 - DNA, 29 bp, synthetic construct
  misc_feature 1..29: note = Probe
  source 1..29: mol_type = other DNA
ccattggtcttaggccccaaaaattttgg

SEQ ID NO: 29869 - DNA, 36 bp, synthetic construct
  misc_feature 1..36: note = Probe
  source 1..36: mol_type = other DNA
ccattggtcttaggccccaaaaattttggtgcaact

SEQ ID NO: 29870 - DNA, 37 bp, synthetic construct
  misc_feature 1..37: note = Probe
  source 1..37: mol_type = other DNA
ccattggtcttaggccccaaaaattttggtgcaactc

SEQ ID NO: 29871 - DNA, 38 bp, synthetic construct
  misc_feature 1..38: note = Probe
  source 1..38: mol_type = other DNA
ccattggtcttaggccccaaaaattttggtgcaactcc

SEQ ID NO: 29872 - DNA, 50 bp, synthetic construct
  misc_feature 1..50: note = Probe
  source 1..50: mol_type = other DNA
ccattggtcttaggccccaaaaattttggtgcaactccaaataaaagtaa

SEQ ID NO: 29873 - DNA, 36 bp, synthetic construct
  misc_feature 1..36: note = Probe
  source 1..36: mol_type = other DNA
ccatttcataactttgtcaaagttaaattataggct

SEQ ID NO: 29874 - DNA, 18 bp, synthetic construct
  misc_feature 1..18: note = Probe
  source 1..18: mol_type = other DNA
cccaaacccactccacct

SEQ ID NO: 29875 - DNA, 17 bp, synthetic construct
  misc_feature 1..17: note = Probe
  source 1..17: mol_type = other DNA
cccaacccgtcatctac

SEQ ID NO: 29876 - DNA, 19 bp, synthetic construct
  misc_feature 1..19: note = Probe
  source 1..19: mol_type = other DNA
cccaacttacacttaggag

SEQ ID NO: 29877 - DNA, 29 bp, synthetic construct
  misc_feature 1..29: note = Probe
  source 1..29: mol_type = other DNA
cccaacttacacttaggagatttcaactt

SEQ ID NO: 29878 - DNA, 34 bp, synthetic construct
  misc_feature 1..34: note = Probe
  source 1..34: mol_type = other DNA
cccaacttacacttaggagatttcaacttaactt

SEQ ID NO: 29879 - DNA, 35 bp, synthetic construct
  misc_feature 1..35: note = Probe
  source 1..35: mol_type = other DNA
cccaacttacacttaggagatttcaacttaacttg

SEQ ID NO: 29880 - DNA, 36 bp, synthetic construct
  misc_feature 1..36: note = Probe
  source 1..36: mol_type = other DNA
cccaacttacacttaggagatttcaacttaacttga

SEQ ID NO: 29881 - DNA, 45 bp, synthetic construct; identical to SEQ ID NO: 4609
  misc_feature 1..45: note = Probe
  source 1..45: mol_type = other DNA

SEQ ID NO: 29882 - DNA, 46 bp, synthetic construct; identical to SEQ ID NO: 4610
  misc_feature 1..46: note = Probe
  source 1..46: mol_type = other DNA

SEQ ID NO: 29883 - DNA, 47 bp, synthetic construct
  misc_feature 1..47: note = Probe
  source 1..47: mol_type = other DNA
cccaacttacacttaggagatttcaacttaacttgaccgctctgagc

SEQ ID NO: 29884 - DNA, 17 bp, synthetic construct
  misc_feature 1..17: note = Probe
  source 1..17: mol_type = other DNA
cccaagaacagggtttg

SEQ ID NO: 29885 - DNA, 18 bp, synthetic construct
  misc_feature 1..18: note = Probe
  source 1..18: mol_type = other DNA
cccaagaacagggtttgt

SEQ ID NO: 29886 - DNA, 19 bp, synthetic construct
  misc_feature 1..19: note = Probe
  source 1..19: mol_type = other DNA
cccaagaacagggtttgtt

SEQ ID NO: 29887 - DNA, 20 bp, synthetic construct
  misc_feature 1..20: note = Probe
  source 1..20: mol_type = other DNA
cccaagaacagggtttgtta

SEQ ID NO: 29888 - DNA, 21 bp, synthetic construct
  misc_feature 1..21: note = Probe
  source 1..21: mol_type = other DNA
cccaagaacagggtttgttaa

SEQ ID NO: 29889 - DNA, 23 bp, synthetic construct
  misc_feature 1..23: note = Probe
  source 1..23: mol_type = other DNA
cccaagaacagggtttgttaaga

SEQ ID NO: 29890 - DNA, 18 bp, synthetic construct
  misc_feature 1..18: note = Probe
  source 1..18: mol_type = other DNA
cccacacccacccaagaa

SEQ ID NO: 29891 - DNA, 20 bp, synthetic construct
  misc_feature 1..20: note = Probe
  source 1..20: mol_type = other DNA
cccacacccacccaagaaca

SEQ ID NO: 29892 - DNA, 27 bp, synthetic construct
  misc_feature 1..27: note = Probe
  source 1..27: mol_type = other DNA
cccacacccacccaagaacagggtttg

SEQ ID NO: 29893 - DNA, 30 bp, synthetic construct; identical to SEQ ID NO: 4619
  misc_feature 1..30: note = Probe
  source 1..30: mol_type = other DNA

SEQ ID NO: 29894 - DNA, 18 bp, synthetic construct
  misc_feature 1..18: note = Probe
  source 1..18: mol_type = other DNA
cccacagtttatgtagct

SEQ ID NO: 29895 - DNA, 22 bp, synthetic construct
  misc_feature 1..22: note = Probe
  source 1..22: mol_type = other DNA
cccacagtttatgtagcttacc

SEQ ID NO: 29896 - DNA, 23 bp, synthetic construct
  misc_feature 1..23: note = Probe
  source 1..23: mol_type = other DNA
cccacagtttatgtagcttacct

SEQ ID NO: 29897 - DNA, 25 bp, synthetic construct
  misc_feature 1..25: note = Probe
  source 1..25: mol_type = other DNA
cccacagtttatgtagcttacctcc

SEQ ID NO: 29898 - DNA, 26 bp, synthetic construct
  misc_feature 1..26: note = Probe
  source 1..26: mol_type = other DNA
cccacagtttatgtagcttacctcct

SEQ ID NO: 29899 - DNA, 29 bp, synthetic construct
  misc_feature 1..29: note = Probe
  source 1..29: mol_type = other DNA
cccacatggtctagcggttaggattcctg

SEQ ID NO: 29900 - DNA, 21 bp, synthetic construct
  misc_feature 1..21: note = Probe
  source 1..21: mol_type = other DNA
cccacccaagaacagggtttg

SEQ ID NO: 29901 - DNA, 24 bp, synthetic construct
  misc_feature 1..24: note = Probe
  source 1..24: mol_type = other DNA
cccacccaagaacagggtttgtta

SEQ ID NO: 29902 - DNA, 16 bp, synthetic construct
  misc_feature 1..16: note = Probe
  source 1..16: mol_type = other DNA
cccacccagggacgcc

SEQ ID NO: 29903 - DNA, 26 bp, synthetic construct
  misc_feature 1..26: note = Probe
  source 1..26: mol_type = other DNA
cccacttctgacacagcctgatcttt

SEQ ID NO: 29904 - DNA, 22 bp, synthetic construct
  misc_feature 1..22: note = Probe
  source 1..22: mol_type = other DNA
cccacttctgacacattcgttt

SEQ ID NO: 29905 - DNA, 22 bp, synthetic construct
  misc_feature 1..22: note = Probe
  source 1..22: mol_type = other DNA
cccagaggcgtcgctgatcttt

SEQ ID NO: 29906 - DNA, 17 bp, synthetic construct
  misc_feature 1..17: note = Probe
  source 1..17: mol_type = other DNA
cccagaggtcgatggat

SEQ ID NO: 29907 - DNA, 18 bp, synthetic construct
  misc_feature 1..18: note = Probe
  source 1..18: mol_type = other DNA
cccagaggtcgatggatc

SEQ ID NO: 29908 - DNA, 37 bp, synthetic construct; identical to SEQ ID NO: 4631
  misc_feature 1..37: note = Probe
  source 1..37: mol_type = other DNA

SEQ ID NO: 29909 - DNA, 38 bp, synthetic construct; identical to SEQ ID NO: 4632
  misc_feature 1..38: note = Probe
  source 1..38: mol_type = other DNA

SEQ ID NO: 29910 - DNA, 38 bp, synthetic construct
  misc_feature 1..38: note = Probe
  source 1..38: mol_type = other DNA
cccaggcggcccgggttcgactcccggtgtgggaatga

SEQ ID NO: 29911 - DNA, 24 bp, synthetic construct
  misc_feature 1..24: note = Probe
  source 1..24: mol_type = other DNA
cccagggacgcctctttgagcttt

SEQ ID NO: 29912 - DNA, 24 bp, synthetic construct
  misc_feature 1..24: note = Probe
  source 1..24: mol_type = other DNA
cccagggacgcttgtttgagcttt

SEQ ID NO: 29913 - DNA, 15 bp, synthetic construct
  misc_feature 1..15: note = Probe
  source 1..15: mol_type = other DNA
cccataccccgaaaa

SEQ ID NO: 29914 - DNA, 36 bp, synthetic construct; identical to SEQ ID NO: 18411
  misc_feature 1..36: note = Probe
  source 1..36: mol_type = other DNA

SEQ ID NO: 29915 - DNA, 32 bp, synthetic construct; identical to SEQ ID NO: 590
  misc_feature 1..32: note = Probe
  source 1..32: mol_type = other DNA

SEQ ID NO: 29916 - DNA, 25 bp, synthetic construct
  misc_feature 1..25: note = Probe
  source 1..25: mol_type = other DNA
cccatggccaacctcctactcctca

SEQ ID NO: 29917 - DNA, 36 bp, synthetic construct
  misc_feature 1..36: note = Probe
  source 1..36: mol_type = other DNA
cccatggtgtaatggttagcactctggactttgaat

SEQ ID NO: 29918 - DNA, 15 bp, synthetic construct
  misc_feature 1..15: note = Probe
  source 1..15: mol_type = other DNA
cccatgtctaacaac

SEQ ID NO: 29919 - DNA, 36 bp, synthetic construct; identical to SEQ ID NO: 4652
  misc_feature 1..36: note = Probe
  source 1..36: mol_type = other DNA

SEQ ID NO: 29920 - DNA, 29 bp, synthetic construct
  misc_feature 1..29: note = Probe
  source 1..29: mol_type = other DNA
ccccaaaaattttggtgcaactccaaata

SEQ ID NO: 29921 - DNA, 36 bp, synthetic construct; identical to SEQ ID NO: 18442
  misc_feature 1..36: note = Probe
  source 1..36: mol_type = other DNA

SEQ ID NO: 29922 - DNA, 38 bp, synthetic construct; identical to SEQ ID NO: 4673
  misc_feature 1..38: note = Probe
  source 1..38: mol_type = other DNA

SEQ ID NO: 29923 - DNA, 39 bp, synthetic construct
  misc_feature 1..39: note = Probe
  source 1..39: mol_type = other DNA
ccccaaaaattttggtgcaactccaaataaaagtaataa

SEQ ID NO: 29924 - DNA, 18 bp, synthetic construct
  misc_feature 1..18: note = Probe
  source 1..18: mol_type = other DNA
ccccaaacccactccacc

SEQ ID NO: 29925 - DNA, 19 bp, synthetic construct
  misc_feature 1..19: note = Probe
  source 1..19: mol_type = other DNA
ccccaaacccactccacct

SEQ ID NO: 29926 - DNA, 23 bp, synthetic construct
  misc_feature 1..23: note = Probe
  source 1..23: mol_type = other DNA
ccccacagtttatgtagcttacc

SEQ ID NO: 29927 - DNA, 27 bp, synthetic construct
  misc_feature 1..27: note = Probe
  source 1..27: mol_type = other DNA
ccccacagtttatgtagcttacctcct

SEQ ID NO: 29928 - DNA, 15 bp, synthetic construct
  misc_feature 1..15: note = Probe
  source 1..15: mol_type = other DNA
ccccacgttgggcgc

SEQ ID NO: 29929 - DNA, 36 bp, synthetic construct
  misc_feature 1..36: note = Probe
  source 1..36: mol_type = other DNA
ccccatggtgtaatggttagcactctggactttgaa

SEQ ID NO: 29930 - DNA, 16 bp, synthetic construct
  misc_feature 1..16: note = Probe
  source 1..16: mol_type = other DNA
ccccatgtctaacaac

SEQ ID NO: 29931 - DNA, 30 bp, synthetic construct; identical to SEQ ID NO: 4683
  misc_feature 1..30: note = Probe
  source 1..30: mol_type = other DNA

SEQ ID NO: 29932 - DNA, 18 bp, synthetic construct
  misc_feature 1..18: note = Probe
  source 1..18: mol_type = other DNA
cccccatgtctaacaaca

SEQ ID NO: 29933 - DNA, 21 bp, synthetic construct
  misc_feature 1..21: note = Probe
  source 1..21: mol_type = other DNA
cccccatgtctaacaacatgg

SEQ ID NO: 29934 - DNA, 31 bp, synthetic construct; identical to SEQ ID NO: 4695
  misc_feature 1..31: note = Probe
  source 1..31: mol_type = other DNA

SEQ ID NO: 29935 - DNA, 34 bp, synthetic construct
  misc_feature 1..34: note = Probe
  source 1..34: mol_type = other DNA
ccccgcgcaggttcgaatcctgccgactacggca

SEQ ID NO: 29936 - DNA, 34 bp, synthetic construct
  misc_feature 1..34: note = Probe
  source 1..34: mol_type = other DNA
ccccgcgcaggttcgaatcctgccgactacgtca

SEQ ID NO: 29937 - DNA, 15 bp, synthetic construct
  misc_feature 1..15: note = Probe
  source 1..15: mol_type = other DNA
ccccggcacctccac

SEQ ID NO: 29938 - DNA, 16 bp, synthetic construct
  misc_feature 1..16: note = Probe
  source 1..16: mol_type = other DNA
ccccggcacctccacc

SEQ ID NO: 29939 - DNA, 36 bp, synthetic construct
  misc_feature 1..36: note = Probe
  source 1..36: mol_type = other DNA
ccccgggttcgatccccggcatctccattgtagttt

SEQ ID NO: 29940 - DNA, 26 bp, synthetic construct
  misc_feature 1..26: note = Probe
  source 1..26: mol_type = other DNA
ccccgtacgggccaggattgaaactt

SEQ ID NO: 29941 - DNA, 27 bp, synthetic construct
  misc_feature 1..27: note = Probe
  source 1..27: mol_type = other DNA
ccccgtacgggccaggattgaaacttt

SEQ ID NO: 29942 - DNA, 28 bp, synthetic construct
  misc_feature 1..28: note = Probe
  source 1..28: mol_type = other DNA
ccccgtacgggccaggattgaaactttt

SEQ ID NO: 29943 - DNA, 16 bp, synthetic construct
  misc_feature 1..16: note = Probe
  source 1..16: mol_type = other DNA
ccccgtctgtcacgcg

SEQ ID NO: 29944 - DNA, 24 bp, synthetic construct
  misc_feature 1..24: note = Probe
  source 1..24: mol_type = other DNA
cccctggcccaacccgtcatctac

SEQ ID NO: 29945 - DNA, 33 bp, synthetic construct; identical to SEQ ID NO: 4723
  misc_feature 1..33: note = Probe
  source 1..33: mol_type = other DNA

SEQ ID NO: 29946 - DNA, 34 bp, synthetic construct; identical to SEQ ID NO: 4724
  misc_feature 1..34: note = Probe
  source 1..34: mol_type = other DNA

SEQ ID NO: 29947 - DNA, 36 bp, synthetic construct; identical to SEQ ID NO: 4726
  misc_feature 1..36: note = Probe
  source 1..36: mol_type = other DNA

SEQ ID NO: 29948 - DNA, 18 bp, synthetic construct
  misc_feature 1..18: note = Probe
  source 1..18: mol_type = other DNA
cccgaaaatgttggttat

SEQ ID NO: 29949 - DNA, 20 bp, synthetic construct
  misc_feature 1..20: note = Probe
  source 1..20: mol_type = other DNA
cccgaaaatgttggttatac

SEQ ID NO: 29950 - DNA, 21 bp, synthetic construct
  misc_feature 1..21: note = Probe
  source 1..21: mol_type = other DNA
cccgaaaatgttggttatacc

SEQ ID NO: 29951 - DNA, 22 bp, synthetic construct
  misc_feature 1..22: note = Probe
  source 1..22: mol_type = other DNA
cccgaaaatgttggttataccc

SEQ ID NO: 29952 - DNA, 24 bp, synthetic construct
  misc_feature 1..24: note = Probe
  source 1..24: mol_type = other DNA
cccgaaaatgttggttataccctt

SEQ ID NO: 29953 - DNA, 25 bp, synthetic construct
  misc_feature 1..25: note = Probe
  source 1..25: mol_type = other DNA
cccgaaaatgttggttatacccttc

SEQ ID NO: 29954 - DNA, 26 bp, synthetic construct
  misc_feature 1..26: note = Probe
  source 1..26: mol_type = other DNA
cccgaaaatgttggttatacccttcc

SEQ ID NO: 29955 - DNA, 27 bp, synthetic construct
  misc_feature 1..27: note = Probe
  source 1..27: mol_type = other DNA
cccgaaaatgttggttatacccttccc

SEQ ID NO: 29956 - DNA, 30 bp, synthetic construct; identical to SEQ ID NO: 611
  misc_feature 1..30: note = Probe
  source 1..30: mol_type = other DNA

SEQ ID NO: 29957 - DNA, 32 bp, synthetic construct; identical to SEQ ID NO: 613
  misc_feature 1..32: note = Probe
  source 1..32: mol_type = other DNA

SEQ ID NO: 29958 - DNA, 34 bp, synthetic construct; identical to SEQ ID NO: 4734
  misc_feature 1..34: note = Probe
  source 1..34: mol_type = other DNA

SEQ ID NO: 29959 - DNA, 16 bp, synthetic construct
  misc_feature 1..16: note = Probe
  source 1..16: mol_type = other DNA
cccggacgagcccact

SEQ ID NO: 29960 - DNA, 20 bp, synthetic construct
  misc_feature 1..20: note = Probe
  source 1..20: mol_type = other DNA
cccggacgagcccaggcttt

SEQ ID NO: 29961 - DNA, 15 bp, synthetic construct
  misc_feature 1..15: note = Probe
  source 1..15: mol_type = other DNA
cccggacgagccccc

SEQ ID NO: 29962 - DNA, 16 bp, synthetic construct
  misc_feature 1..16: note = Probe
  source 1..16: mol_type = other DNA
cccggacgagccccct

SEQ ID NO: 29963 - DNA, 15 bp, synthetic construct
  misc_feature 1..15: note = Probe
  source 1..15: mol_type = other DNA
cccggacgagcccct

SEQ ID NO: 29964 - DNA, 15 bp, synthetic construct
  misc_feature 1..15: note = Probe
  source 1..15: mol_type = other DNA
cccggacgagccctc

SEQ ID NO: 29965 - DNA, 16 bp, synthetic construct
  misc_feature 1..16: note = Probe
  source 1..16: mol_type = other DNA
cccggacgagccctca

SEQ ID NO: 29966 - DNA, 17 bp, synthetic construct
  misc_feature 1..17: note = Probe
  source 1..17: mol_type = other DNA
cccggacgagccctcat

SEQ ID NO: 29967 - DNA, 18 bp, synthetic construct
  misc_feature 1..18: note = Probe
  source 1..18: mol_type = other DNA
cccggacgagccctcatt

SEQ ID NO: 29968 - DNA, 19 bp, synthetic construct
  misc_feature 1..19: note = Probe
  source 1..19: mol_type = other DNA
cccggacgagccctcattt

SEQ ID NO: 29969 - DNA, 20 bp, synthetic construct
  misc_feature 1..20: note = Probe
  source 1..20: mol_type = other DNA
cccggacgagccctcatttt

SEQ ID NO: 29970 - DNA, 21 bp, synthetic construct
  misc_feature 1..21: note = Probe
  source 1..21: mol_type = other DNA
cccggacgagccctcattttc

SEQ ID NO: 29971 - DNA, 22 bp, synthetic construct
  misc_feature 1..22: note = Probe
  source 1..22: mol_type = other DNA
cccggacgagccctcgctcttt

SEQ ID NO: 29972 - DNA, 17 bp, synthetic construct
  misc_feature 1..17: note = Probe
  source 1..17: mol_type = other DNA
cccggacgagccctgtt

SEQ ID NO: 29973 - DNA, 18 bp, synthetic construct
  misc_feature 1..18: note = Probe
  source 1..18: mol_type = other DNA
cccggacgagccctgttt

SEQ ID NO: 29974 - DNA, 19 bp, synthetic construct
  misc_feature 1..19: note = Probe
  source 1..19: mol_type = other DNA
cccggacgagccctgtttt

SEQ ID NO: 29975 - DNA, 15 bp, synthetic construct
  misc_feature 1..15: note = Probe
  source 1..15: mol_type = other DNA
cccggatagctcagt

SEQ ID NO: 29976 - DNA, 18 bp, synthetic construct
  misc_feature 1..18: note = Probe
  source 1..18: mol_type = other DNA
cccggatagctcagtcgg

SEQ ID NO: 29977 - DNA, 22 bp, synthetic construct
  misc_feature 1..22: note = Probe
  source 1..22: mol_type = other DNA
cccggatagctcagtcggtaga

SEQ ID NO: 29978 - DNA, 23 bp, synthetic construct
  misc_feature 1..23: note = Probe
  source 1..23: mol_type = other DNA
cccggatagctcagtcggtagag

SEQ ID NO: 29979 - DNA, 31 bp, synthetic construct; identical to SEQ ID NO: 616
  misc_feature 1..31: note = Probe
  source 1..31: mol_type = other DNA

SEQ ID NO: 29980 - DNA, 32 bp, synthetic construct; identical to SEQ ID NO: 617
  misc_feature 1..32: note = Probe
  source 1..32: mol_type = other DNA

SEQ ID NO: 29981 - DNA, 33 bp, synthetic construct; identical to SEQ ID NO: 618
  misc_feature 1..33: note = Probe
  source 1..33: mol_type = other DNA

SEQ ID NO: 29982 - DNA, 34 bp, synthetic construct; identical to SEQ ID NO: 619
  misc_feature 1..34: note = Probe
  source 1..34: mol_type = other DNA

SEQ ID NO: 29983 - DNA, 35 bp, synthetic construct; identical to SEQ ID NO: 620
  misc_feature 1..35: note = Probe
  source 1..35: mol_type = other DNA

SEQ ID NO: 29984 - DNA, 36 bp, synthetic construct; identical to SEQ ID NO: 12964
  misc_feature 1..36: note = Probe
  source 1..36: mol_type = other DNA

SEQ ID NO: 29985 - DNA, 15 bp, synthetic construct
  misc_feature 1..15: note = Probe
  source 1..15: mol_type = other DNA
cccggcacctccacc

SEQ ID NO: 29986 - DNA, 16 bp, synthetic construct
  misc_feature 1..16: note = Probe
  source 1..16: mol_type = other DNA
cccggcacctccacca

SEQ ID NO: 29987 - DNA, 27 bp, synthetic construct
  misc_feature 1..27: note = Probe
  source 1..27: mol_type = other DNA
cccggccaacgcatgcggtaccacttt

SEQ ID NO: 29988 - DNA, 24 bp, synthetic construct
  misc_feature 1..24: note = Probe
  source 1..24: mol_type = other DNA
cccggccaatgcaacgatgacgtt

SEQ ID NO: 29989 - DNA, 25 bp, synthetic construct
  misc_feature 1..25: note = Probe
  source 1..25: mol_type = other DNA
cccggccaatgcaacgatgacgttt

SEQ ID NO: 29990 - DNA, 26 bp, synthetic construct
  misc_feature 1..26: note = Probe
  source 1..26: mol_type = other DNA
cccggccaatgcaacgatgacgtttt

SEQ ID NO: 29991 - DNA, 27 bp, synthetic construct
  misc_feature 1..27: note = Probe
  source 1..27: mol_type = other DNA
cccggccaatgcaacgatgacgtttta

SEQ ID NO: 29992 - DNA, 25 bp, synthetic construct
  misc_feature 1..25: note = Probe
  source 1..25: mol_type = other DNA
cccggccaatgcacgagtacagttt

SEQ ID NO: 29993 - DNA, 26 bp, synthetic construct
  misc_feature 1..26: note = Probe
  source 1..26: mol_type = other DNA
cccggccaatgcacgagtacagtttt

SEQ ID NO: 29994 - DNA, 16 bp, synthetic construct
  misc_feature 1..16: note = Probe
  source 1..16: mol_type = other DNA
cccggcggcgggagaa

SEQ ID NO: 29995 - DNA, 17 bp, synthetic construct
  misc_feature 1..17: note = Probe
  source 1..17: mol_type = other DNA
cccggctagctcagtcg

SEQ ID NO: 29996 - DNA, 27 bp, synthetic construct
  misc_feature 1..27: note = Probe
  source 1..27: mol_type = other DNA
cccggctagctcagtcggtagagcatg

SEQ ID NO: 29997 - DNA, 29 bp, synthetic construct
  misc_feature 1..29: note = Probe
  source 1..29: mol_type = other DNA
cccggctagctcagtcggtagagcatgag

SEQ ID NO: 29998 - DNA, 31 bp, synthetic construct; identical to SEQ ID NO: 621
  misc_feature 1..31: note = Probe
  source 1..31: mol_type = other DNA

SEQ ID NO: 29999 - DNA, 34 bp, synthetic construct; identical to SEQ ID NO: 624
  misc_feature 1..34: note = Probe
  source 1..34: mol_type = other DNA

SEQ ID NO: 30000 - DNA, 36 bp, synthetic construct; identical to SEQ ID NO: 18557
  misc_feature 1..36: note = Probe
  source 1..36: mol_type = other DNA

SEQ ID NO: 30001 - DNA, 31 bp, synthetic construct; identical to SEQ ID NO: 626
  misc_feature 1..31: note = Probe
  source 1..31: mol_type = other DNA

SEQ ID NO: 30002 - DNA, 32 bp, synthetic construct; identical to SEQ ID NO: 627
  misc_feature 1..32: note = Probe
  source 1..32: mol_type = other DNA

SEQ ID NO: 30003 - DNA, 33 bp, synthetic construct; identical to SEQ ID NO: 628
  misc_feature 1..33: note = Probe
  source 1..33: mol_type = other DNA

SEQ ID NO: 30004 - DNA, 34 bp, synthetic construct; identical to SEQ ID NO: 629
  misc_feature 1..34: note = Probe
  source 1..34: mol_type = other DNA

SEQ ID NO: 30005 - DNA, 36 bp, synthetic construct; identical to SEQ ID NO: 18560
  misc_feature 1..36: note = Probe
  source 1..36: mol_type = other DNA

SEQ ID NO: 30006 - DNA, 23 bp, synthetic construct
  misc_feature 1..23: note = Probe
  source 1..23: mol_type = other DNA
cccgggcggaaacaggtcagctg

SEQ ID NO: 30007 - DNA, 20 bp, synthetic construct
  misc_feature 1..20: note = Probe
  source 1..20: mol_type = other DNA
cccgggcggcgcacttagtt

SEQ ID NO: 30008 - DNA, 21 bp, synthetic construct
  misc_feature 1..21: note = Probe
  source 1..21: mol_type = other DNA
cccgggcggcgcacttagttt

SEQ ID NO: 30009 - DNA, 22 bp, synthetic construct
  misc_feature 1..22: note = Probe
  source 1..22: mol_type = other DNA
cccgggcggcgcacttagtttt

SEQ ID NO: 30010 - DNA, 23 bp, synthetic construct
  misc_feature 1..23: note = Probe
  source 1..23: mol_type = other DNA
cccgggcggcgcacttagttttt

SEQ ID NO: 30011 - DNA, 15 bp, synthetic construct
  misc_feature 1..15: note = Probe
  source 1..15: mol_type = other DNA
cccgggtttcggcac

SEQ ID NO: 30012 - DNA, 16 bp, synthetic construct
  misc_feature 1..16: note = Probe
  source 1..16: mol_type = other DNA
cccgggtttcggcact

SEQ ID NO: 30013 - DNA, 17 bp, synthetic construct
  misc_feature 1..17: note = Probe
  source 1..17: mol_type = other DNA
cccgggtttcggcactt

SEQ ID NO: 30014 - DNA, 15 bp, synthetic construct
  misc_feature 1..15: note = Probe
  source 1..15: mol_type = other DNA
cccgggtttcggcag

SEQ ID NO: 30015 - DNA, 19 bp, synthetic construct
  misc_feature 1..19: note = Probe
  source 1..19: mol_type = other DNA
cccggtaatcgcataaaac

SEQ ID NO: 30016 - DNA, 22 bp, synthetic construct
  misc_feature 1..22: note = Probe
  source 1..22: mol_type = other DNA
cccggtaatcgcataaaactta

SEQ ID NO: 30017 - DNA, 28 bp, synthetic construct
  misc_feature 1..28: note = Probe
  source 1..28: mol_type = other DNA
cccggtaatcgcataaaacttaaaactt

SEQ ID NO: 30018 - DNA, 32 bp, synthetic construct; identical to SEQ ID NO: 18572
  misc_feature 1..32: note = Probe
  source 1..32: mol_type = other DNA

SEQ ID NO: 30019 - DNA, 36 bp, synthetic construct; identical to SEQ ID NO: 4758
  misc_feature 1..36: note = Probe
  source 1..36: mol_type = other DNA

SEQ ID NO: 30020 - DNA, 15 bp, synthetic construct
  misc_feature 1..15: note = Probe
  source 1..15: mol_type = other DNA
cccggtcagggaacc

SEQ ID NO: 30021 - DNA, 16 bp, synthetic construct
  misc_feature 1..16: note = Probe
  source 1..16: mol_type = other DNA
cccggtcagggaacca

SEQ ID NO: 30022 - DNA, 24 bp, synthetic construct
  misc_feature 1..24: note = Probe
  source 1..24: mol_type = other DNA
cccgtacgggccaggattgaaact

SEQ ID NO: 30023 - DNA, 25 bp, synthetic construct
  misc_feature 1..25: note = Probe
  source 1..25: mol_type = other DNA
cccgtacgggccaggattgaaactt

SEQ ID NO: 30024 - DNA, 26 bp, synthetic construct
  misc_feature 1..26: note = Probe
  source 1..26: mol_type = other DNA
cccgtacgggccaggattgaaacttt

SEQ ID NO: 30025 - DNA, 27 bp, synthetic construct
  misc_feature 1..27: note = Probe
  source 1..27: mol_type = other DNA
cccgtacgggccaggattgaaactttt

SEQ ID NO: 30026 - DNA, 30 bp, synthetic construct
  misc_feature 1..30: note = Probe
  source 1..30: mol_type = other DNA
ccctcagtaagttgcaatacttaatttctg

SEQ ID NO: 30027 - DNA, 23 bp, synthetic construct
  misc_feature 1..23: note = Probe
  source 1..23: mol_type = other DNA
ccctggcccaacccgtcatctac

SEQ ID NO: 30028 - DNA, 32 bp, synthetic construct; identical to SEQ ID NO: 634
  misc_feature 1..32: note = Probe
  source 1..32: mol_type = other DNA

SEQ ID NO: 30029 - DNA, 33 bp, synthetic construct; identical to SEQ ID NO: 4764
  misc_feature 1..33: note = Probe
  source 1..33: mol_type = other DNA

SEQ ID NO: 30030 - DNA, 31 bp, synthetic construct; identical to SEQ ID NO: 638
  misc_feature 1..31: note = Probe
  source 1..31: mol_type = other DNA

SEQ ID NO: 30031 - DNA, 34 bp, synthetic construct; identical to SEQ ID NO: 641
  misc_feature 1..34: note = Probe
  source 1..34: mol_type = other DNA

SEQ ID NO: 30032 - DNA, 36 bp, synthetic construct; identical to SEQ ID NO: 643
  misc_feature 1..36: note = Probe
  source 1..36: mol_type = other DNA

SEQ ID NO: 30033 - DNA, 38 bp, synthetic construct; identical to SEQ ID NO: 12998
  misc_feature 1..38: note = Probe
  source 1..38: mol_type = other DNA

SEQ ID NO: 30034 - DNA, 16 bp, synthetic construct
  misc_feature 1..16: note = Probe
  source 1..16: mol_type = other DNA
ccctgttcgggcggca

SEQ ID NO: 30035 - DNA, 31 bp, synthetic construct
  misc_feature 1..31: note = Probe
  source 1..31: mol_type = other DNA
cccttatttctaggactatgagaatcgaacc

SEQ ID NO: 30036 - DNA, 32 bp, synthetic construct
  misc_feature 1..32: note = Probe
  source 1..32: mol_type = other DNA
cccttatttctaggactatgagaatcgaaccc

SEQ ID NO: 30037 - DNA, 36 bp, synthetic construct
  misc_feature 1..36: note = Probe
  source 1..36: mol_type = other DNA
cccttatttctaggactatgagaatcgaacccatcc

SEQ ID NO: 30038 - DNA, 18 bp, synthetic construct
  misc_feature 1..18: note = Probe
  source 1..18: mol_type = other DNA
cccttcgtggtcgttgcc

SEQ ID NO: 30039 - DNA, 19 bp, synthetic construct
  misc_feature 1..19: note = Probe
  source 1..19: mol_type = other DNA
ccgaaaatgttggttatac

SEQ ID NO: 30040 - DNA, 20 bp, synthetic construct
  misc_feature 1..20: note = Probe
  source 1..20: mol_type = other DNA
ccgaaaatgttggttatacc

SEQ ID NO: 30041 - DNA, 21 bp, synthetic construct
  misc_feature 1..21: note = Probe
  source 1..21: mol_type = other DNA
ccgaaaatgttggttataccc

SEQ ID NO: 30042 - DNA, 36 bp, synthetic construct; identical to SEQ ID NO: 18606
  misc_feature 1..36: note = Probe
  source 1..36: mol_type = other DNA

SEQ ID NO: 30043 - DNA, 37 bp, synthetic construct; identical to SEQ ID NO: 4785
  misc_feature 1..37: note = Probe
  source 1..37: mol_type = other DNA

SEQ ID NO: 30044 - DNA, 38 bp, synthetic construct; identical to SEQ ID NO: 18607
  misc_feature 1..38: note = Probe
  source 1..38: mol_type = other DNA

SEQ ID NO: 30045 - DNA, 38 bp, synthetic construct
  misc_feature 1..38: note = Probe
  source 1..38: mol_type = other DNA
ccgaaaggttggtggttcgagcccacccagggacgcta

SEQ ID NO: 30046 - DNA, 22 bp, synthetic construct
  misc_feature 1..22: note = Probe
  source 1..22: mol_type = other DNA
ccgaaatagctcagttgggaga

SEQ ID NO: 30047 - DNA, 15 bp, synthetic construct
  misc_feature 1..15: note = Probe
  source 1..15: mol_type = other DNA
ccgaagatcacgggt

SEQ ID NO: 30048 - DNA, 15 bp, synthetic construct
  misc_feature 1..15: note = Probe
  source 1..15: mol_type = other DNA
ccgaagatcgcgggt

SEQ ID NO: 30049 - DNA, 16 bp, synthetic construct
  misc_feature 1..16: note = Probe
  source 1..16: mol_type = other DNA
ccgagcggtctaaggc

SEQ ID NO: 30050 - DNA, 18 bp, synthetic construct
  misc_feature 1..18: note = Probe
  source 1..18: mol_type = other DNA
ccgagcggtctaaggcgc

SEQ ID NO: 30051 - DNA, 25 bp, synthetic construct
  misc_feature 1..25: note = Probe
  source 1..25: mol_type = other DNA
ccgaggtgattttcatattgaattg

SEQ ID NO: 30052 - DNA, 16 bp, synthetic construct
  misc_feature 1..16: note = Probe
  source 1..16: mol_type = other DNA
ccgaggttgtgagttc

SEQ ID NO: 30053 - DNA, 23 bp, synthetic construct
  misc_feature 1..23: note = Probe
  source 1..23: mol_type = other DNA
ccgagtggttaaggcgatggact

SEQ ID NO: 30054 - DNA, 26 bp, synthetic construct
  misc_feature 1..26: note = Probe
  source 1..26: mol_type = other DNA
ccgagtggttaaggcgatggactgct

SEQ ID NO: 30055 - DNA, 18 bp, synthetic construct
  misc_feature 1..18: note = Probe
  source 1..18: mol_type = other DNA
ccgcagcaacctcggttc

SEQ ID NO: 30056 - DNA, 19 bp, synthetic construct
  misc_feature 1..19: note = Probe
  source 1..19: mol_type = other DNA
ccgcagcaacctcggttcg

SEQ ID NO: 30057 - DNA, 36 bp, synthetic construct; identical to SEQ ID NO: 18620
  misc_feature 1..36: note = Probe
  source 1..36: mol_type = other DNA

SEQ ID NO: 30058 - DNA, 36 bp, synthetic construct; identical to SEQ ID NO: 18622
  misc_feature 1..36: note = Probe
  source 1..36: mol_type = other DNA

SEQ ID NO: 30059 - DNA, 38 bp, synthetic construct
  misc_feature 1..38: note = Probe
  source 1..38: mol_type = other DNA
ccgcagcaacctcggttcgaatccgagtcacggcagga

SEQ ID NO: 30060 - DNA, 38 bp, synthetic construct
  misc_feature 1..38: note = Probe
  source 1..38: mol_type = other DNA
ccgcagcaacctcggttcgaatccgagtcacggcagta

SEQ ID NO: 30061 - DNA, 36 bp, synthetic construct; identical to SEQ ID NO: 18625
  misc_feature 1..36: note = Probe
  source 1..36: mol_type = other DNA

SEQ ID NO: 30062 - DNA, 36 bp, synthetic construct
  misc_feature 1..36: note = Probe
  source 1..36: mol_type = other DNA
ccgcccggctagctcagtcggtagagcatgagactc

SEQ ID NO: 30063 - DNA, 38 bp, synthetic construct; identical to SEQ ID NO: 18630
  misc_feature 1..38: note = Probe
  source 1..38: mol_type = other DNA

SEQ ID NO: 30064 - DNA, 15 bp, synthetic construct
  misc_feature 1..15: note = Probe
  source 1..15: mol_type = other DNA
ccgccgcggcccggg

SEQ ID NO: 30065 - DNA, 16 bp, synthetic construct
  misc_feature 1..16: note = Probe
  source 1..16: mol_type = other DNA
ccgccgcggcccgggt

SEQ ID NO: 30066 - DNA, 17 bp, synthetic construct
  misc_feature 1..17: note = Probe
  source 1..17: mol_type = other DNA
ccgccgcggcccgggtt

SEQ ID NO: 30067 - DNA, 29 bp, synthetic construct
  misc_feature 1..29: note = Probe
  source 1..29: mol_type = other DNA
ccgccgcggcccgggttcgattcccggtc

SEQ ID NO: 30068 - DNA, 31 bp, synthetic construct; identical to SEQ ID NO: 18633
  misc_feature 1..31: note = Probe
  source 1..31: mol_type = other DNA

SEQ ID NO: 30069 - DNA, 33 bp, synthetic construct; identical to SEQ ID NO: 13006
  misc_feature 1..33: note = Probe
  source 1..33: mol_type = other DNA

SEQ ID NO: 30070 - DNA, 35 bp, synthetic construct; identical to SEQ ID NO: 13008
  misc_feature 1..35: note = Probe
  source 1..35: mol_type = other DNA

SEQ ID NO: 30071 - DNA, 36 bp, synthetic construct; identical to SEQ ID NO: 4797
  misc_feature 1..36: note = Probe
  source 1..36: mol_type = other DNA

SEQ ID NO: 30072 - DNA, 38 bp, synthetic construct; identical to SEQ ID NO: 18636
  misc_feature 1..38: note = Probe
  source 1..38: mol_type = other DNA

SEQ ID NO: 30073 - DNA, 36 bp, synthetic construct; identical to SEQ ID NO: 4798
  misc_feature 1..36: note = Probe
  source 1..36: mol_type = other DNA

SEQ ID NO: 30074 - DNA, 37 bp, synthetic construct; identical to SEQ ID NO: 4799
  misc_feature 1..37: note = Probe
  source 1..37: mol_type = other DNA

SEQ ID NO: 30075 - DNA, 38 bp, synthetic construct; identical to SEQ ID NO: 18639
  misc_feature 1..38: note = Probe
  source 1..38: mol_type = other DNA

SEQ ID NO: 30076 - DNA, 36 bp, synthetic construct; identical to SEQ ID NO: 4800
  misc_feature 1..36: note = Probe
  source 1..36: mol_type = other DNA

SEQ ID NO: 30077 - DNA, 38 bp, synthetic construct; identical to SEQ ID NO: 18645
  misc_feature 1..38: note = Probe
  source 1..38: mol_type = other DNA

SEQ ID NO: 30078 - DNA, 24 bp, synthetic construct
  misc_feature 1..24: note = Probe
  source 1..24: mol_type = other DNA
ccgcctgtcacgcgggagaccggg

SEQ ID NO: 30079 - DNA, 26 bp, synthetic construct
  misc_feature 1..26: note = Probe
  source 1..26: mol_type = other DNA
ccgcctgtcacgcgggagaccggggt

SEQ ID NO: 30080 - DNA, 31 bp, synthetic construct
  misc_feature 1..31: note = Probe
  source 1..31: mol_type = other DNA
ccgcctgtcacgcgggagaccggggttcgat

SEQ ID NO: 30081 - DNA, 32 bp, synthetic construct; identical to SEQ ID NO: 18653
  misc_feature 1..32: note = Probe
  source 1..32: mol_type = other DNA

SEQ ID NO: 30082 - DNA, 33 bp, synthetic construct; identical to SEQ ID NO: 18654
  misc_feature 1..33: note = Probe
  source 1..33: mol_type = other DNA

SEQ ID NO: 30083 - DNA, 36 bp, synthetic construct
  misc_feature 1..36: note = Probe
  source 1..36: mol_type = other DNA
ccgcctgtcacgcgggagaccggggttcgattcccc

SEQ ID NO: 30084 - DNA, 20 bp, synthetic construct
  misc_feature 1..20: note = Probe
  source 1..20: mol_type = other DNA
ccgcgcaggttcgaatcctg

SEQ ID NO: 30085 - DNA, 28 bp, synthetic construct
  misc_feature 1..28: note = Probe
  source 1..28: mol_type = other DNA
ccgcgtggcctaatggataaggcgtctg

SEQ ID NO: 30086 - DNA, 29 bp, synthetic construct
  misc_feature 1..29: note = Probe
  source 1..29: mol_type = other DNA
ccgcgtggcctaatggataaggcgtctga

SEQ ID NO: 30087 - DNA, 31 bp, synthetic construct; identical to SEQ ID NO: 658
  misc_feature 1..31: note = Probe
  source 1..31: mol_type = other DNA

SEQ ID NO: 30088 - DNA, 21 bp, synthetic construct
  misc_feature 1..21: note = Probe
  source 1..21: mol_type = other DNA
ccggacgagccctcgctcttt

SEQ ID NO: 30089 - DNA, 15 bp, synthetic construct
  misc_feature 1..15: note = Probe
  source 1..15: mol_type = other DNA
ccggagatgaaaacc

SEQ ID NO: 30090 - DNA, 25 bp, synthetic construct
  misc_feature 1..25: note = Probe
  source 1..25: mol_type = other DNA
ccggagatgaaaacctttttccaag

SEQ ID NO: 30091 - DNA, 29 bp, synthetic construct
  misc_feature 1..29: note = Probe
  source 1..29: mol_type = other DNA
ccggagatgaaaacctttttccaaggaca

SEQ ID NO: 30092 - DNA, 15 bp, synthetic construct
  misc_feature 1..15: note = Probe
  source 1..15: mol_type = other DNA
ccggatagctcagtc

SEQ ID NO: 30093 - DNA, 17 bp, synthetic construct
  misc_feature 1..17: note = Probe
  source 1..17: mol_type = other DNA
ccggatagctcagtcgg

SEQ ID NO: 30094 - DNA, 20 bp, synthetic construct
  misc_feature 1..20: note = Probe
  source 1..20: mol_type = other DNA
ccggatagctcagtcggtag

SEQ ID NO: 30095 - DNA, 21 bp, synthetic construct
  misc_feature 1..21: note = Probe
  source 1..21: mol_type = other DNA
ccggatagctcagtcggtaga

SEQ ID NO: 30096 - DNA, 24 bp, synthetic construct
  misc_feature 1..24: note = Probe
  source 1..24: mol_type = other DNA
ccggatagctcagtcggtagagca

SEQ ID NO: 30097 - DNA, 25 bp, synthetic construct
  misc_feature 1..25: note = Probe
  source 1..25: mol_type = other DNA
ccggatagctcagtcggtagagcat

SEQ ID NO: 30098 - DNA, 27 bp, synthetic construct
  misc_feature 1..27: note = Probe
  source 1..27: mol_type = other DNA
ccggatagctcagtcggtagagcatca

SEQ ID NO: 30099 - DNA, 28 bp, synthetic construct
  misc_feature 1..28: note = Probe
  source 1..28: mol_type = other DNA
ccggatagctcagtcggtagagcatcag

SEQ ID NO: 30100 - DNA, 29 bp, synthetic construct
  misc_feature 1..29: note = Probe
  source 1..29: mol_type = other DNA
ccggatagctcagtcggtagagcatcaga

SEQ ID NO: 30101 - DNA, 33 bp, synthetic construct; identical to SEQ ID NO: 671
  misc_feature 1..33: note = Probe
  source 1..33: mol_type = other DNA

SEQ ID NO: 30102 - DNA, 36 bp, synthetic construct; identical to SEQ ID NO: 18694
  misc_feature 1..36: note = Probe
  source 1..36: mol_type = other DNA

SEQ ID NO: 30103 - DNA, 17 bp, synthetic construct
  misc_feature 1..17: note = Probe
  source 1..17: mol_type = other DNA
ccggatcagaagattga

SEQ ID NO: 30104 - DNA, 19 bp, synthetic construct
  misc_feature 1..19: note = Probe
  source 1..19: mol_type = other DNA
ccggatcagaagattgagg

SEQ ID NO: 30105 - DNA, 22 bp, synthetic construct
  misc_feature 1..22: note = Probe
  source 1..22: mol_type = other DNA
ccggatcagaagattgagggtt

SEQ ID NO: 30106 - DNA, 18 bp, synthetic construct
  misc_feature 1..18: note = Probe
  source 1..18: mol_type = other DNA
ccggatggaggcgtgggt

SEQ ID NO: 30107 - DNA, 15 bp, synthetic construct
  misc_feature 1..15: note = Probe
  source 1..15: mol_type = other DNA
ccggcacctccacca

SEQ ID NO: 30108 - DNA, 28 bp, synthetic construct
  misc_feature 1..28: note = Probe
  source 1..28: mol_type = other DNA
ccggccaacgcagtgtcagtttttctct

SEQ ID NO: 30109 - DNA, 26 bp, synthetic construct
  misc_feature 1..26: note = Probe
  source 1..26: mol_type = other DNA
ccggccaacgcatgcggtaccacttt

SEQ ID NO: 30110 - DNA, 22 bp, synthetic construct
  misc_feature 1..22: note = Probe
  source 1..22: mol_type = other DNA
ccggccaatgcaacgatgacgt

SEQ ID NO: 30111 - DNA, 15 bp, synthetic construct
  misc_feature 1..15: note = Probe
  source 1..15: mol_type = other DNA
ccggcggcgggagaa

SEQ ID NO: 30112 - DNA, 16 bp, synthetic construct
  misc_feature 1..16: note = Probe
  source 1..16: mol_type = other DNA
ccggcggcgggagaag

SEQ ID NO: 30113 - DNA, 17 bp, synthetic construct
  misc_feature 1..17: note = Probe
  source 1..17: mol_type = other DNA
ccggcggcgggagaagt

SEQ ID NO: 30114 - DNA, 18 bp, synthetic construct
  misc_feature 1..18: note = Probe
  source 1..18: mol_type = other DNA
ccggcggcgggagaagta

SEQ ID NO: 30115 - DNA, 15 bp, synthetic construct
  misc_feature 1..15: note = Probe
  source 1..15: mol_type = other DNA
ccggctagctcagtc

SEQ ID NO: 30116 - DNA, 16 bp, synthetic construct
  misc_feature 1..16: note = Probe
  source 1..16: mol_type = other DNA
ccggctagctcagtcg

SEQ ID NO: 30117 - DNA, 22 bp, synthetic construct
  misc_feature 1..22: note = Probe
  source 1..22: mol_type = other DNA
ccggctagctcagtcggtagag

SEQ ID NO: 30118 - DNA, 27 bp, synthetic construct
  misc_feature 1..27: note = Probe
  source 1..27: mol_type = other DNA
ccggctagctcagtcggtagagcatga

SEQ ID NO: 30119 - DNA, 29 bp, synthetic construct
  misc_feature 1..29: note = Probe
  source 1..29: mol_type = other DNA
ccggctagctcagtcggtagagcatgaga

SEQ ID NO: 30120 - DNA, 31 bp, synthetic construct; identical to SEQ ID NO: 13043
  misc_feature 1..31: note = Probe
  source 1..31: mol_type = other DNA

SEQ ID NO: 30121 - DNA, 32 bp, synthetic construct; identical to SEQ ID NO: 18710
  misc_feature 1..32: note = Probe
  source 1..32: mol_type = other DNA

SEQ ID NO: 30122 - DNA, 33 bp, synthetic construct
  misc_feature 1..33: note = Probe
  source 1..33: mol_type = other DNA
ccggctagctcagtcggtagagcatgagaccct

SEQ ID NO: 30123 - DNA, 40 bp, synthetic construct
  misc_feature 1..40: note = Probe
  source 1..40: mol_type = other DNA
ccggctagctcagtcggtagagcatgagactcttaatctc

SEQ ID NO: 30124 - DNA, 34 bp, synthetic construct; identical to SEQ ID NO: 684
  misc_feature 1..34: note = Probe
  source 1..34: mol_type = other DNA

SEQ ID NO: 30125 - DNA, 40 bp, synthetic construct
  misc_feature 1..40: note = Probe
  source 1..40: mol_type = other DNA
ccggctagctcagtcggtagagcatgggactcttaatccc

SEQ ID NO: 30126 - DNA, 15 bp, synthetic construct
  misc_feature 1..15: note = Probe
  source 1..15: mol_type = other DNA
ccggctcgaaggact

SEQ ID NO: 30127 - DNA, 25 bp, synthetic construct
  misc_feature 1..25: note = Probe
  source 1..25: mol_type = other DNA
ccgggcggaaacaagactgtgtttt

SEQ ID NO: 30128 - DNA, 26 bp, synthetic construct
  misc_feature 1..26: note = Probe
  source 1..26: mol_type = other DNA
ccgggcggaaacaagactgtgttttc

SEQ ID NO: 30129 - DNA, 15 bp, synthetic construct
  misc_feature 1..15: note = Probe
  source 1..15: mol_type = other DNA
ccgggcggaaacacc

SEQ ID NO: 30130 - DNA, 16 bp, synthetic construct
  misc_feature 1..16: note = Probe
  source 1..16: mol_type = other DNA
ccgggcggaaacacct

SEQ ID NO: 30131 - DNA, 26 bp, synthetic construct
  misc_feature 1..26: note = Probe
  source 1..26: mol_type = other DNA
ccgggcggaaacaggtcagctgtttt

SEQ ID NO: 30132 - DNA, 36 bp, synthetic construct
  misc_feature 1..36: note = Probe
  source 1..36: mol_type = other DNA
ccgggctcgattcccgcccaacgcatcgggcggacc

SEQ ID NO: 30133 - DNA, 28 bp, synthetic construct
  misc_feature 1..28: note = Probe
  source 1..28: mol_type = other DNA
ccggggttcgattccccgacggggagac

SEQ ID NO: 30134 - DNA, 28 bp, synthetic construct
  misc_feature 1..28: note = Probe
  source 1..28: mol_type = other DNA
ccggggttcgattccccgacggggaggc

SEQ ID NO: 30135 - DNA, 29 bp, synthetic construct
  misc_feature 1..29: note = Probe
  source 1..29: mol_type = other DNA
ccggggttcgattccccgacggggaggca

SEQ ID NO: 30136 - DNA, 18 bp, synthetic construct
  misc_feature 1..18: note = Probe
  source 1..18: mol_type = other DNA
ccggtaatcgcataaaac

SEQ ID NO: 30137 - DNA, 26 bp, synthetic construct
  misc_feature 1..26: note = Probe
  source 1..26: mol_type = other DNA
ccggtaatcgcataaaacttaaaact

SEQ ID NO: 30138 - DNA, 27 bp, synthetic construct
  misc_feature 1..27: note = Probe
  source 1..27: mol_type = other DNA
ccggtaatcgcataaaacttaaaactt

SEQ ID NO: 30139 - DNA, 28 bp, synthetic construct
  misc_feature 1..28: note = Probe
  source 1..28: mol_type = other DNA
ccggtaatcgcataaaacttaaaacttt

SEQ ID NO: 30140 - DNA, 31 bp, synthetic construct
  misc_feature 1..31: note = Probe
  source 1..31: mol_type = other DNA
ccggtaatcgcataaaacttaaaactttaca

SEQ ID NO: 30141 - DNA, 36 bp, synthetic construct
  misc_feature 1..36: note = Probe
  source 1..36: mol_type = other DNA
ccggtaatcgcataaaacttaaaactttacagtcag

SEQ ID NO: 30142 - DNA, 15 bp, synthetic construct
  misc_feature 1..15: note = Probe
  source 1..15: mol_type = other DNA
ccggtcagggaacca

SEQ ID NO: 30143 - DNA, 23 bp, synthetic construct
  misc_feature 1..23: note = Probe
  source 1..23: mol_type = other DNA
ccgtacgggccaggattgaaact

SEQ ID NO: 30144 - DNA, 24 bp, synthetic construct
  misc_feature 1..24: note = Probe
  source 1..24: mol_type = other DNA
ccgtacgggccaggattgaaactt

SEQ ID NO: 30145 - DNA, 25 bp, synthetic construct
  misc_feature 1..25: note = Probe
  source 1..25: mol_type = other DNA
ccgtacgggccaggattgaaacttt

SEQ ID NO: 30146 - DNA, 28 bp, synthetic construct
  misc_feature 1..28: note = Probe
  source 1..28: mol_type = other DNA
ccgtagtgtagcggttatcacattcgcc

SEQ ID NO: 30147 - DNA, 29 bp, synthetic construct
  misc_feature 1..29: note = Probe
  source 1..29: mol_type = other DNA
ccgtagtgtagcggttatcacattcgcct

SEQ ID NO: 30148 - DNA, 19 bp, synthetic construct
  misc_feature 1..19: note = Probe
  source 1..19: mol_type = other DNA
ccgtagtgtagtggttatc

SEQ ID NO: 30149 - DNA, 28 bp, synthetic construct
  misc_feature 1..28: note = Probe
  source 1..28: mol_type = other DNA
ccgtagtgtagtggttatcacgttcgcc

SEQ ID NO: 30150 - DNA, 29 bp, synthetic construct
  misc_feature 1..29: note = Probe
  source 1..29: mol_type = other DNA
ccgtagtgtagtggttatcacgttcgcct

SEQ ID NO: 30151 - DNA, 30 bp, synthetic construct; identical to SEQ ID NO: 4843
  misc_feature 1..30: note = Probe
  source 1..30: mol_type = other DNA

SEQ ID NO: 30152 - DNA, 32 bp, synthetic construct; identical to SEQ ID NO: 4845
  misc_feature 1..32: note = Probe
  source 1..32: mol_type = other DNA

SEQ ID NO: 30153 - DNA, 36 bp, synthetic construct; identical to SEQ ID NO: 18750
  misc_feature 1..36: note = Probe
  source 1..36: mol_type = other DNA

SEQ ID NO: 30154 - DNA, 36 bp, synthetic construct
  misc_feature 1..36: note = Probe
  source 1..36: mol_type = other DNA
ccgtgagcccggatagctcagtcggtagagcatcag

SEQ ID NO: 30155 - DNA, 15 bp, synthetic construct
  misc_feature 1..15: note = Probe
  source 1..15: mol_type = other DNA
ccgtgatcgtatagt

SEQ ID NO: 30156 - DNA, 20 bp, synthetic construct
  misc_feature 1..20: note = Probe
  source 1..20: mol_type = other DNA
ccgtgatcgtatagtggtta

SEQ ID NO: 30157 - DNA, 23 bp, synthetic construct
  misc_feature 1..23: note = Probe
  source 1..23: mol_type = other DNA
ccgtgatcgtatagtggttagta

SEQ ID NO: 30158 - DNA, 24 bp, synthetic construct
  misc_feature 1..24: note = Probe
  source 1..24: mol_type = other DNA
ccgtgatcgtatagtggttagtac

SEQ ID NO: 30159 - DNA, 25 bp, synthetic construct
  misc_feature 1..25: note = Probe
  source 1..25: mol_type = other DNA
ccgtgatcgtatagtggttagtact

SEQ ID NO: 30160 - DNA, 26 bp, synthetic construct
  misc_feature 1..26: note = Probe
  source 1..26: mol_type = other DNA
ccgtgatcgtatagtggttagtactc

SEQ ID NO: 30161 - DNA, 27 bp, synthetic construct
  misc_feature 1..27: note = Probe
  source 1..27: mol_type = other DNA
ccgtgatcgtatagtggttagtactct

SEQ ID NO: 30162 - DNA, 28 bp, synthetic construct
  misc_feature 1..28: note = Probe
  source 1..28: mol_type = other DNA
ccgtgatcgtatagtggttagtactctg

SEQ ID NO: 30163 - DNA, 31 bp, synthetic construct; identical to SEQ ID NO: 687
  misc_feature 1..31: note = Probe
  source 1..31: mol_type = other DNA

SEQ ID NO: 30164 - DNA, 35 bp, synthetic construct; identical to SEQ ID NO: 690
  misc_feature 1..35: note = Probe
  source 1..35: mol_type = other DNA

SEQ ID NO: 30165 - DNA, 36 bp, synthetic construct; identical to SEQ ID NO: 18760
  misc_feature 1..36: note = Probe
  source 1..36: mol_type = other DNA

SEQ ID NO: 30166 - DNA, 43 bp, synthetic construct
  misc_feature 1..43: note = Probe
  source 1..43: mol_type = other DNA
ccgtgatcgtatagtggttagtactctgcgttgtggccgcagc

SEQ ID NO: 30167 - DNA, 47 bp, synthetic construct
  misc_feature 1..47: note = Probe
  source 1..47: mol_type = other DNA
ccgtgatcgtatagtggttagtactctgcgttgtggccgcagcaacc

SEQ ID NO: 30168 - DNA, 50 bp, synthetic construct
  misc_feature 1..50: note = Probe
  source 1..50: mol_type = other DNA
ccgtgatcgtatagtggttagtactctgcgttgtggccgcagcaacctcg

SEQ ID NO: 30169 - DNA, 28 bp, synthetic construct
  misc_feature 1..28: note = Probe
  source 1..28: mol_type = other DNA
ccgtggtgtagtggttatcacattcgcc

SEQ ID NO: 30170 - DNA, 36 bp, synthetic construct
  misc_feature 1..36: note = Probe
  source 1..36: mol_type = other DNA
ccgtgtccttcgatagctcagttggtagagcggagg

SEQ ID NO: 30171 - DNA, 30 bp, synthetic construct; identical to SEQ ID NO: 4854
  misc_feature 1..30: note = Probe
  source 1..30: mol_type = other DNA

SEQ ID NO: 30172 - DNA, 36 bp, synthetic construct
  misc_feature 1..36: note = Probe
  source 1..36: mol_type = other DNA
cctaagccagggattgtgggttcgagtcccacccgg

SEQ ID NO: 30173 - DNA, 33 bp, synthetic construct
  misc_feature 1..33: note = Probe
  source 1..33: mol_type = other DNA
cctaagccagggattgtgggttcgagtcccatc

SEQ ID NO: 30174 - DNA, 42 bp, synthetic construct
  misc_feature 1..42: note = Probe
  source 1..42: mol_type = other DNA
cctaagccagggattgtgggttcgagtcccatctggggtggc

SEQ ID NO: 30175 - DNA, 18 bp, synthetic construct
  misc_feature 1..18: note = Probe
  source 1..18: mol_type = other DNA
cctagccccaaacccact

SEQ ID NO: 30176 - DNA, 21 bp, synthetic construct
  misc_feature 1..21: note = Probe
  source 1..21: mol_type = other DNA
cctagccccaaacccactcca

SEQ ID NO: 30177 - DNA, 23 bp, synthetic construct
  misc_feature 1..23: note = Probe
  source 1..23: mol_type = other DNA
cctagccccaaacccactccacc

SEQ ID NO: 30178 - DNA, 24 bp, synthetic construct
  misc_feature 1..24: note = Probe
  source 1..24: mol_type = other DNA
cctagccccaaacccactccacct

SEQ ID NO: 30179 - DNA, 18 bp, synthetic construct
  misc_feature 1..18: note = Probe
  source 1..18: mol_type = other DNA
cctagcctttctattagc

SEQ ID NO: 30180 - DNA, 18 bp, synthetic construct
  misc_feature 1..18: note = Probe
  source 1..18: mol_type = other DNA
cctcaaagcaatacactg

SEQ ID NO: 30181 - DNA, 36 bp, synthetic construct
  misc_feature 1..36: note = Probe
  source 1..36: mol_type = other DNA
cctcaaagcaatacactgaaaatgtttagacgggct

SEQ ID NO: 30182 - DNA, 22 bp, synthetic construct
  misc_feature 1..22: note = Probe
  source 1..22: mol_type = other DNA
cctcacctggagcatgttttct

SEQ ID NO: 30183 - DNA, 18 bp, synthetic construct
  misc_feature 1..18: note = Probe
  source 1..18: mol_type = other DNA
cctcagaaggtctcactt

SEQ ID NO: 30184 - DNA, 19 bp, synthetic construct
  misc_feature 1..19: note = Probe
  source 1..19: mol_type = other DNA
cctcagaaggtctcacttt

SEQ ID NO: 30185 - DNA, 20 bp, synthetic construct
  misc_feature 1..20: note = Probe
  source 1..20: mol_type = other DNA
cctcagaaggtctcactttt

SEQ ID NO: 30186 - DNA, 16 bp, synthetic construct
  misc_feature 1..16: note = Probe
  source 1..16: mol_type = other DNA
cctcgcagcttcgctg

SEQ ID NO: 30187 - DNA, 15 bp, synthetic construct
  misc_feature 1..15: note = Probe
  source 1..15: mol_type = other DNA
cctcgctggggcctc

SEQ ID NO: 30188 - DNA, 16 bp, synthetic construct
  misc_feature 1..16: note = Probe
  source 1..16: mol_type = other DNA
cctcgctggggcctcc

SEQ ID NO: 30189 - DNA, 17 bp, synthetic construct
  misc_feature 1..17: note = Probe
  source 1..17: mol_type = other DNA
cctcgtggctactgttt

SEQ ID NO: 30190 - DNA, 21 bp, synthetic construct
  misc_feature 1..21: note = Probe
  source 1..21: mol_type = other DNA
cctgctcacagcgtcactagt

SEQ ID NO: 30191 - DNA, 22 bp, synthetic construct
  misc_feature 1..22: note = Probe
  source 1..22: mol_type = other DNA
cctgctcacagcgtcactagtt

SEQ ID NO: 30192 - DNA, 23 bp, synthetic construct
  misc_feature 1..23: note = Probe
  source 1..23: mol_type = other DNA
cctgctcacagcgtcactagttt

SEQ ID NO: 30193 - DNA, 24 bp, synthetic construct
  misc_feature 1..24: note = Probe
  source 1..24: mol_type = other DNA
cctgctcacagcgtcactagtttt

SEQ ID NO: 30194 - DNA, 15 bp, synthetic construct
  misc_feature 1..15: note = Probe
  source 1..15: mol_type = other DNA
cctggagcaagaccc

SEQ ID NO: 30195 - DNA, 16 bp, synthetic construct
  misc_feature 1..16: note = Probe
  source 1..16: mol_type = other DNA
cctggagcaagaccct

SEQ ID NO: 30196 - DNA, 17 bp, synthetic construct
  misc_feature 1..17: note = Probe
  source 1..17: mol_type = other DNA
cctggagcaagaccctt

SEQ ID NO: 30197 - DNA, 18 bp, synthetic construct
  misc_feature 1..18: note = Probe
  source 1..18: mol_type = other DNA
cctggagcaagacccttt

SEQ ID NO: 30198 - DNA, 19 bp, synthetic construct
  misc_feature 1..19: note = Probe
  source 1..19: mol_type = other DNA
cctggagcaagaccctttt

SEQ ID NO: 30199 - DNA, 22 bp, synthetic construct
  misc_feature 1..22: note = Probe
  source 1..22: mol_type = other DNA
cctggcccaacccgtcatctac

SEQ ID NO: 30200 - DNA, 18 bp, synthetic construct
  misc_feature 1..18: note = Probe
  source 1..18: mol_type = other DNA
cctggctggctcgttcga

SEQ ID NO: 30201 - DNA, 31 bp, synthetic construct; identical to SEQ ID NO: 4873
  misc_feature 1..31: note = Probe
  source 1..31: mol_type = other DNA

SEQ ID NO: 30202 - DNA, 34 bp, synthetic construct; identical to SEQ ID NO: 697
  misc_feature 1..34: note = Probe
  source 1..34: mol_type = other DNA

SEQ ID NO: 30203 - DNA, 26 bp, synthetic construct
  misc_feature 1..26: note = Probe
  source 1..26: mol_type = other DNA
cctggtggtctagtggttaggattcg

SEQ ID NO: 30204 - DNA, 28 bp, synthetic construct
  misc_feature 1..28: note = Probe
  source 1..28: mol_type = other DNA
cctggtggtctagtggttaggattcggc

SEQ ID NO: 30205 - DNA, 29 bp, synthetic construct
  misc_feature 1..29: note = Probe
  source 1..29: mol_type = other DNA
cctggtggtctagtggttaggattcggcg

SEQ ID NO: 30206 - DNA, 30 bp, synthetic construct; identical to SEQ ID NO: 699
  misc_feature 1..30: note = Probe
  source 1..30: mol_type = other DNA

SEQ ID NO: 30207 - DNA, 34 bp, synthetic construct; identical to SEQ ID NO: 703
  misc_feature 1..34: note = Probe
  source 1..34: mol_type = other DNA

SEQ ID NO: 30208 - DNA, 36 bp, synthetic construct; identical to SEQ ID NO: 4877
  misc_feature 1..36: note = Probe
  source 1..36: mol_type = other DNA

SEQ ID NO: 30209 - DNA, 36 bp, synthetic construct
  misc_feature 1..36: note = Probe
  source 1..36: mol_type = other DNA
cctggttttcacccaggcggcccgggttcgactccc

SEQ ID NO: 30210 - DNA, 15 bp, synthetic construct
  misc_feature 1..15: note = Probe
  source 1..15: mol_type = other DNA
cctgtcacgcgggag

SEQ ID NO: 30211 - DNA, 16 bp, synthetic construct
  misc_feature 1..16: note = Probe
  source 1..16: mol_type = other DNA
cctgtcacgcgggaga

SEQ ID NO: 30212 - DNA, 22 bp, synthetic construct
  misc_feature 1..22: note = Probe
  source 1..22: mol_type = other DNA
cctgtcacgcgggagaccgggg

SEQ ID NO: 30213 - DNA, 24 bp, synthetic construct
  misc_feature 1..24: note = Probe
  source 1..24: mol_type = other DNA
cctgtcacgcgggagaccggggtt

SEQ ID NO: 30214 - DNA, 36 bp, synthetic construct; identical to SEQ ID NO: 18828
  misc_feature 1..36: note = Probe
  source 1..36: mol_type = other DNA

SEQ ID NO: 30215 - DNA, 45 bp, synthetic construct; identical to SEQ ID NO: 4886
  misc_feature 1..45: note = Probe
  source 1..45: mol_type = other DNA

SEQ ID NO: 30216 - DNA, 15 bp, synthetic construct
  misc_feature 1..15: note = Probe
  source 1..15: mol_type = other DNA
cctgttggcttactt

SEQ ID NO: 30217 - DNA, 16 bp, synthetic construct
  misc_feature 1..16: note = Probe
  source 1..16: mol_type = other DNA
cctgttggcttacttt

SEQ ID NO: 30218 - DNA, 17 bp, synthetic construct
  misc_feature 1..17: note = Probe
  source 1..17: mol_type = other DNA
cctgttggcttactttt

SEQ ID NO: 30219 - DNA, 18 bp, synthetic construct
  misc_feature 1..18: note = Probe
  source 1..18: mol_type = other DNA
cctgttggcttactttta

SEQ ID NO: 30220 - DNA, 29 bp, synthetic construct
  misc_feature 1..29: note = Probe
  source 1..29: mol_type = other DNA
ccttatttctaggactatgagaatcgaac

SEQ ID NO: 30221 - DNA, 30 bp, synthetic construct
  misc_feature 1..30: note = Probe
  source 1..30: mol_type = other DNA
ccttatttctaggactatgagaatcgaacc

SEQ ID NO: 30222 - DNA, 31 bp, synthetic construct
  misc_feature 1..31: note = Probe
  source 1..31: mol_type = other DNA
ccttatttctaggactatgagaatcgaaccc

SEQ ID NO: 30223 - DNA, 36 bp, synthetic construct
  misc_feature 1..36: note = Probe
  source 1..36: mol_type = other DNA
ccttatttctaggactatgagaatcgaacccatccc

SEQ ID NO: 30224 - DNA, 36 bp, synthetic construct
  misc_feature 1..36: note = Probe
  source 1..36: mol_type = other DNA
ccttcaaagccctcagtaagttgcaatacttaattt

SEQ ID NO: 30225 - DNA, 20 bp, synthetic construct
  misc_feature 1..20: note = Probe
  source 1..20: mol_type = other DNA
ccttcagctatagggtggag

SEQ ID NO: 30226 - DNA, 21 bp, synthetic construct
  misc_feature 1..21: note = Probe
  source 1..21: mol_type = other DNA
ccttcagctatagggtggaga

SEQ ID NO: 30227 - DNA, 17 bp, synthetic construct
  misc_feature 1..17: note = Probe
  source 1..17: mol_type = other DNA
ccttccaagcagttgac

SEQ ID NO: 30228 - DNA, 18 bp, synthetic construct
  misc_feature 1..18: note = Probe
  source 1..18: mol_type = other DNA
ccttccaagcagttgacc

SEQ ID NO: 30229 - DNA, 20 bp, synthetic construct
  misc_feature 1..20: note = Probe
  source 1..20: mol_type = other DNA
ccttccaagcagttgacccg

SEQ ID NO: 30230 - DNA, 21 bp, synthetic construct
  misc_feature 1..21: note = Probe
  source 1..21: mol_type = other DNA
ccttccaagcagttgacccgg

SEQ ID NO: 30231 - DNA, 23 bp, synthetic construct
  misc_feature 1..23: note = Probe
  source 1..23: mol_type = other DNA
ccttccaagcagttgacccgggc

SEQ ID NO: 30232 - DNA, 25 bp, synthetic construct
  misc_feature 1..25: note = Probe
  source 1..25: mol_type = other DNA
ccttccaagcagttgacccgggttc

SEQ ID NO: 30233 - DNA, 29 bp, synthetic construct
  misc_feature 1..29: note = Probe
  source 1..29: mol_type = other DNA
ccttccttcgttggctctgcctgccaact

SEQ ID NO: 30234 - DNA, 15 bp, synthetic construct
  misc_feature 1..15: note = Probe
  source 1..15: mol_type = other DNA
ccttcgatagctcag

SEQ ID NO: 30235 - DNA, 16 bp, synthetic construct
  misc_feature 1..16: note = Probe
  source 1..16: mol_type = other DNA
ccttcgatagctcagc

SEQ ID NO: 30236 - DNA, 25 bp, synthetic construct
  misc_feature 1..25: note = Probe
  source 1..25: mol_type = other DNA
ccttcgatagctcagctggtagagc

SEQ ID NO: 30237 - DNA, 25 bp, synthetic construct
  misc_feature 1..25: note = Probe
  source 1..25: mol_type = other DNA
ccttcgatagctcagttggtagagc

SEQ ID NO: 30238 - DNA, 25 bp, synthetic construct
  misc_feature 1..25: note = Probe
  source 1..25: mol_type = other DNA
ccttcgttggctctgcctgccaact

SEQ ID NO: 30239 - DNA, 32 bp, synthetic construct; identical to SEQ ID NO: 18862
  misc_feature 1..32: note = Probe
  source 1..32: mol_type = other DNA

SEQ ID NO: 30240 - DNA, 25 bp, synthetic construct
  misc_feature 1..25: note = Probe
  source 1..25: mol_type = other DNA
ccttggaaaaaggttttcatctccg

SEQ ID NO: 30241 - DNA, 27 bp, synthetic construct
  misc_feature 1..27: note = Probe
  source 1..27: mol_type = other DNA
ccttttaagttaaagattaagagaacc

SEQ ID NO: 30242 - DNA, 32 bp, synthetic construct
  misc_feature 1..32: note = Probe
  source 1..32: mol_type = other DNA
ccttttaagttaaagattaagagaaccaacac

SEQ ID NO: 30243 - DNA, 33 bp, synthetic construct
  misc_feature 1..33: note = Probe
  source 1..33: mol_type = other DNA
ccttttaagttaaagattaagagaaccaacacc

SEQ ID NO: 30244 - DNA, 34 bp, synthetic construct
  misc_feature 1..34: note = Probe
  source 1..34: mol_type = other DNA
ccttttaagttaaagattaagagaaccaacacct

SEQ ID NO: 30245 - DNA, 36 bp, synthetic construct
  misc_feature 1..36: note = Probe
  source 1..36: mol_type = other DNA
ccttttaagttaaagattaagagaaccaacacctct

SEQ ID NO: 30246 - DNA, 18 bp, synthetic construct
  misc_feature 1..18: note = Probe
  source 1..18: mol_type = other DNA
ccttttcgagatactgtt

SEQ ID NO: 30247 - DNA, 19 bp, synthetic construct
  misc_feature 1..19: note = Probe
  source 1..19: mol_type = other DNA
ccttttcgagatactgttt

SEQ ID NO: 30248 - DNA, 20 bp, synthetic construct
  misc_feature 1..20: note = Probe
  source 1..20: mol_type = other DNA
ccttttcgagatactgtttt

SEQ ID NO: 30249 - DNA, 21 bp, synthetic construct
  misc_feature 1..21: note = Probe
  source 1..21: mol_type = other DNA
ccttttcgagatactgttttt

SEQ ID NO: 30250 - DNA, 17 bp, synthetic construct
  misc_feature 1..17: note = Probe
  source 1..17: mol_type = other DNA
ccttttttcccggcggc

SEQ ID NO: 30251 - DNA, 24 bp, synthetic construct
  misc_feature 1..24: note = Probe
  source 1..24: mol_type = other DNA
ccttttttcccggcggcgggagaa

SEQ ID NO: 30252 - DNA, 16 bp, synthetic construct
  misc_feature 1..16: note = Probe
  source 1..16: mol_type = other DNA
cgaaaatgttggttat

SEQ ID NO: 30253 - DNA, 17 bp, synthetic construct
  misc_feature 1..17: note = Probe
  source 1..17: mol_type = other DNA
cgaaaatgttggttata

SEQ ID NO: 30254 - DNA, 18 bp, synthetic construct
  misc_feature 1..18: note = Probe
  source 1..18: mol_type = other DNA
cgaaaatgttggttatac

SEQ ID NO: 30255 - DNA, 19 bp, synthetic construct
  misc_feature 1..19: note = Probe
  source 1..19: mol_type = other DNA
cgaaaatgttggttatacc

SEQ ID NO: 30256 - DNA, 20 bp, synthetic construct
  misc_feature 1..20: note = Probe
  source 1..20: mol_type = other DNA
cgaaaatgttggttataccc

SEQ ID NO: 30257 - DNA, 23 bp, synthetic construct
  misc_feature 1..23: note = Probe
  source 1..23: mol_type = other DNA
cgaaaatgttggttatacccttc

SEQ ID NO: 30258 - DNA, 28 bp, synthetic construct
  misc_feature 1..28: note = Probe
  source 1..28: mol_type = other DNA
cgaaaccatcctctgctagggagcgttt

SEQ ID NO: 30259 - DNA, 30 bp, synthetic construct
  misc_feature 1..30: note = Probe
  source 1..30: mol_type = other DNA
cgaaaccatcctctgctatagactcccttt

SEQ ID NO: 30260 - DNA, 21 bp, synthetic construct
  misc_feature 1..21: note = Probe
  source 1..21: mol_type = other DNA
cgaaaccgggcggaaacacct

SEQ ID NO: 30261 - DNA, 15 bp, synthetic construct
  misc_feature 1..15: note = Probe
  source 1..15: mol_type = other DNA
cgaaaggtccccggt

SEQ ID NO: 30262 - DNA, 36 bp, synthetic construct; identical to SEQ ID NO: 18883
  misc_feature 1..36: note = Probe
  source 1..36: mol_type = other DNA

SEQ ID NO: 30263 - DNA, 37 bp, synthetic construct; identical to SEQ ID NO: 4923
  misc_feature 1..37: note = Probe
  source 1..37: mol_type = other DNA

SEQ ID NO: 30264 - DNA, 37 bp, synthetic construct
  misc_feature 1..37: note = Probe
  source 1..37: mol_type = other DNA
cgaaaggttggtggttcgagcccacccagggacgcta

SEQ ID NO: 30265 - DNA, 17 bp, synthetic construct
  misc_feature 1..17: note = Probe
  source 1..17: mol_type = other DNA
cgaacccatccctgaga

SEQ ID NO: 30266 - DNA, 19 bp, synthetic construct
  misc_feature 1..19: note = Probe
  source 1..19: mol_type = other DNA
cgaaccccgtccgtgcctg

SEQ ID NO: 30267 - DNA, 20 bp, synthetic construct
  misc_feature 1..20: note = Probe
  source 1..20: mol_type = other DNA
cgaaccccgtccgtgcctga

SEQ ID NO: 30268 - DNA, 29 bp, synthetic construct
  misc_feature 1..29: note = Probe
  source 1..29: mol_type = other DNA
cgaagaagcagcttcaaacctgccggggc

SEQ ID NO: 30269 - DNA, 30 bp, synthetic construct; identical to SEQ ID NO: 4930
  misc_feature 1..30: note = Probe
  source 1..30: mol_type = other DNA

SEQ ID NO: 30270 - DNA, 31 bp, synthetic construct; identical to SEQ ID NO: 4931
  misc_feature 1..31: note = Probe
  source 1..31: mol_type = other DNA

SEQ ID NO: 30271 - DNA, 32 bp, synthetic construct; identical to SEQ ID NO: 4932
  misc_feature 1..32: note = Probe
  source 1..32: mol_type = other DNA

SEQ ID NO: 30272 - DNA, 33 bp, synthetic construct; identical to SEQ ID NO: 4933
  misc_feature 1..33: note = Probe
  source 1..33: mol_type = other DNA

SEQ ID NO: 30273 - DNA, 20 bp, synthetic construct
  misc_feature 1..20: note = Probe
  source 1..20: mol_type = other DNA
cgaatcacgtcggggtcaaa

SEQ ID NO: 30274 - DNA, 21 bp, synthetic construct
  misc_feature 1..21: note = Probe
  source 1..21: mol_type = other DNA
cgaatcccacttctgacacaa

SEQ ID NO: 30275 - DNA, 19 bp, synthetic construct
  misc_feature 1..19: note = Probe
  source 1..19: mol_type = other DNA
cgaatcccagcggggcctg

SEQ ID NO: 30276 - DNA, 18 bp, synthetic construct
  misc_feature 1..18: note = Probe
  source 1..18: mol_type = other DNA
cgaatcccagtagagcct

SEQ ID NO: 30277 - DNA, 19 bp, synthetic construct
  misc_feature 1..19: note = Probe
  source 1..19: mol_type = other DNA
cgaatcccagtagagcctt

SEQ ID NO: 30278 - DNA, 20 bp, synthetic construct
  misc_feature 1..20: note = Probe
  source 1..20: mol_type = other DNA
cgaatcccatcctcgtcgat

SEQ ID NO: 30279 - DNA, 19 bp, synthetic construct
  misc_feature 1..19: note = Probe
  source 1..19: mol_type = other DNA
cgaatcccatcctcgtcgg

SEQ ID NO: 30280 - DNA, 20 bp, synthetic construct
  misc_feature 1..20: note = Probe
  source 1..20: mol_type = other DNA
cgaatcccatcctcgtcggc

SEQ ID NO: 30281 - DNA, 20 bp, synthetic construct
  misc_feature 1..20: note = Probe
  source 1..20: mol_type = other DNA
cgaatccggctcgaaggacg

SEQ ID NO: 30282 - DNA, 21 bp, synthetic construct
  misc_feature 1..21: note = Probe
  source 1..21: mol_type = other DNA
cgaatcctgccgactacggca

SEQ ID NO: 30283 - DNA, 21 bp, synthetic construct
  misc_feature 1..21: note = Probe
  source 1..21: mol_type = other DNA
cgaatcctgccgactacgtca

SEQ ID NO: 30284 - DNA, 15 bp, synthetic construct
  misc_feature 1..15: note = Probe
  source 1..15: mol_type = other DNA
cgaatgatttcgact

SEQ ID NO: 30285 - DNA, 16 bp, synthetic construct
  misc_feature 1..16: note = Probe
  source 1..16: mol_type = other DNA
cgaatgatttcgactc

SEQ ID NO: 30286 - DNA, 17 bp, synthetic construct
  misc_feature 1..17: note = Probe
  source 1..17: mol_type = other DNA
cgaatgatttcgactca

SEQ ID NO: 30287 - DNA, 36 bp, synthetic construct
  misc_feature 1..36: note = Probe
  source 1..36: mol_type = other DNA
cgaatgatttcgactcattaaattatgataatcata

SEQ ID NO: 30288 - DNA, 31 bp, synthetic construct
  misc_feature 1..31: note = Probe
  source 1..31: mol_type = other DNA
cgactcattaaattatgataatcatatttac

SEQ ID NO: 30289 - DNA, 32 bp, synthetic construct; identical to SEQ ID NO: 4942
  misc_feature 1..32: note = Probe
  source 1..32: mol_type = other DNA

SEQ ID NO: 30290 - DNA, 20 bp, synthetic construct
  misc_feature 1..20: note = Probe
  source 1..20: mol_type = other DNA
cgactcctggctggctcgcg

SEQ ID NO: 30291 - DNA, 21 bp, synthetic construct
  misc_feature 1..21: note = Probe
  source 1..21: mol_type = other DNA
cgactcctggctggctcgcga

SEQ ID NO: 30292 - DNA, 20 bp, synthetic construct
  misc_feature 1..20: note = Probe
  source 1..20: mol_type = other DNA
cgactcctggctggctcgct

SEQ ID NO: 30293 - DNA, 21 bp, synthetic construct
  misc_feature 1..21: note = Probe
  source 1..21: mol_type = other DNA
cgagaaagctcacaagaactg

SEQ ID NO: 30294 - DNA, 23 bp, synthetic construct
  misc_feature 1..23: note = Probe
  source 1..23: mol_type = other DNA
cgagaaagctcacaagaactgct

SEQ ID NO: 30295 - DNA, 27 bp, synthetic construct
  misc_feature 1..27: note = Probe
  source 1..27: mol_type = other DNA
cgagaaagctcacaagaactgctaact

SEQ ID NO: 30296 - DNA, 28 bp, synthetic construct
  misc_feature 1..28: note = Probe
  source 1..28: mol_type = other DNA
cgagaggggctgtgctcgcaaggtttct

SEQ ID NO: 30297 - DNA, 29 bp, synthetic construct
  misc_feature 1..29: note = Probe
  source 1..29: mol_type = other DNA
cgagaggggctgtgctcgcaaggtttctt

SEQ ID NO: 30298 - DNA, 20 bp, synthetic construct
  misc_feature 1..20: note = Probe
  source 1..20: mol_type = other DNA
cgagccccagtggaaccacg

SEQ ID NO: 30299 - DNA, 15 bp, synthetic construct
  misc_feature 1..15: note = Probe
  source 1..15: mol_type = other DNA
cgagcggtctaaggc

SEQ ID NO: 30300 - DNA, 31 bp, synthetic construct; identical to SEQ ID NO: 18966
  misc_feature 1..31: note = Probe
  source 1..31: mol_type = other DNA

SEQ ID NO: 30301 - DNA, 36 bp, synthetic construct
  misc_feature 1..36: note = Probe
  source 1..36: mol_type = other DNA
cgaggtggccgagtggttaaggcgatggactgctaa

SEQ ID NO: 30302 - DNA, 30 bp, synthetic construct; identical to SEQ ID NO: 18972
  misc_feature 1..30: note = Probe
  source 1..30: mol_type = other DNA

SEQ ID NO: 30303 - DNA, 26 bp, synthetic construct
  misc_feature 1..26: note = Probe
  source 1..26: mol_type = other DNA
cgagtcccggcggagtcgtaacgctt

SEQ ID NO: 30304 - DNA, 20 bp, synthetic construct
  misc_feature 1..20: note = Probe
  source 1..20: mol_type = other DNA
cgagtcccttcgtggtcgtc

SEQ ID NO: 30305 - DNA, 25 bp, synthetic construct
  misc_feature 1..25: note = Probe
  source 1..25: mol_type = other DNA
cgagtggttaaggcgatggactgct

SEQ ID NO: 30306 - DNA, 29 bp, synthetic construct
  misc_feature 1..29: note = Probe
  source 1..29: mol_type = other DNA
cgatagctcagttggtagagcggaggact

SEQ ID NO: 30307 - DNA, 25 bp, synthetic construct
  misc_feature 1..25: note = Probe
  source 1..25: mol_type = other DNA
cgatccccagcatctccagtgtttt

SEQ ID NO: 30308 - DNA, 19 bp, synthetic construct
  misc_feature 1..19: note = Probe
  source 1..19: mol_type = other DNA
cgatcccgggtttcggcac

SEQ ID NO: 30309 - DNA, 19 bp, synthetic construct
  misc_feature 1..19: note = Probe
  source 1..19: mol_type = other DNA
cgatcccgggtttcggcag

SEQ ID NO: 30310 - DNA, 20 bp, synthetic construct
  misc_feature 1..20: note = Probe
  source 1..20: mol_type = other DNA
cgatcccgggtttcggcagc

SEQ ID NO: 30311 - DNA, 37 bp, synthetic construct
  misc_feature 1..37: note = Probe
  source 1..37: mol_type = other DNA
cgatggtttttcatatcattggtcgtggttgtagtcc

SEQ ID NO: 30312 - DNA, 50 bp, synthetic construct
  misc_feature 1..50: note = Probe
  source 1..50: mol_type = other DNA
cgatggtttttcatatcattggtcgtggttgtagtccgtgcgagaataat

SEQ ID NO: 30313 - DNA, 21 bp, synthetic construct
  misc_feature 1..21: note = Probe
  source 1..21: mol_type = other DNA
cgattccccgacggggaggca

SEQ ID NO: 30314 - DNA, 29 bp, synthetic construct
  misc_feature 1..29: note = Probe
  source 1..29: mol_type = other DNA
cgattcccggccaatgcaacgatgacgtt

SEQ ID NO: 30315 - DNA, 30 bp, synthetic construct
  misc_feature 1..30: note = Probe
  source 1..30: mol_type = other DNA
cgattcccggccaatgcaacgatgacgttt

SEQ ID NO: 30316 - DNA, 31 bp, synthetic construct
  misc_feature 1..31: note = Probe
  source 1..31: mol_type = other DNA
cgattcccggccaatgcaacgatgacgtttt

SEQ ID NO: 30317 - DNA, 21 bp, synthetic construct
  misc_feature 1..21: note = Probe
  source 1..21: mol_type = other DNA
cgattcccggccaatgcacga

SEQ ID NO: 30318 - DNA, 21 bp, synthetic construct
  misc_feature 1..21: note = Probe
  source 1..21: mol_type = other DNA
cgattcccggccaatgcagca

SEQ ID NO: 30319 - DNA, 21 bp, synthetic construct
  misc_feature 1..21: note = Probe
  source 1..21: mol_type = other DNA
cgattcccggcccatgcagca

SEQ ID NO: 30320 - DNA, 19 bp, synthetic construct
  misc_feature 1..19: note = Probe
  source 1..19: mol_type = other DNA
cgattcccgggcggcgcac

SEQ ID NO: 30321 - DNA, 20 bp, synthetic construct
  misc_feature 1..20: note = Probe
  source 1..20: mol_type = other DNA
cgattcccgggcggcgcact

SEQ ID NO: 30322 - DNA, 15 bp, synthetic construct
  misc_feature 1..15: note = Probe
  source 1..15: mol_type = other DNA
cgattcccggtcagg

SEQ ID NO: 30323 - DNA, 20 bp, synthetic construct
  misc_feature 1..20: note = Probe
  source 1..20: mol_type = other DNA
cgattccggctcgaaggact

SEQ ID NO: 30324 - DNA, 20 bp, synthetic construct
  misc_feature 1..20: note = Probe
  source 1..20: mol_type = other DNA
cgattccggctcgaaggagc

SEQ ID NO: 30325 - DNA, 36 bp, synthetic construct; identical to SEQ ID NO: 13097
  misc_feature 1..36: note = Probe
  source 1..36: mol_type = other DNA

SEQ ID NO: 30326 - DNA, 38 bp, synthetic construct; identical to SEQ ID NO: 4966
  misc_feature 1..38: note = Probe
  source 1..38: mol_type = other DNA

SEQ ID NO: 30327 - DNA, 15 bp, synthetic construct
  misc_feature 1..15: note = Probe
  source 1..15: mol_type = other DNA
cgcagcaacctcggt

SEQ ID NO: 30328 - DNA, 22 bp, synthetic construct
  misc_feature 1..22: note = Probe
  source 1..22: mol_type = other DNA
cgcagcggaagcgtgctgggcc

SEQ ID NO: 30329 - DNA, 23 bp, synthetic construct
  misc_feature 1..23: note = Probe
  source 1..23: mol_type = other DNA
cgcagcggaagcgtgctgggccc

SEQ ID NO: 30330 - DNA, 22 bp, synthetic construct
  misc_feature 1..22: note = Probe
  source 1..22: mol_type = other DNA
cgcagcggagccttcgatagct

SEQ ID NO: 30331 - DNA, 23 bp, synthetic construct
  misc_feature 1..23: note = Probe
  source 1..23: mol_type = other DNA
cgcagcggagccttcgatagctc

SEQ ID NO: 30332 - DNA, 17 bp, synthetic construct
  misc_feature 1..17: note = Probe
  source 1..17: mol_type = other DNA
cgcaggttcgaatcctg

SEQ ID NO: 30333 - DNA, 18 bp, synthetic construct
  misc_feature 1..18: note = Probe
  source 1..18: mol_type = other DNA
cgcataaaacttaaaact

SEQ ID NO: 30334 - DNA, 30 bp, synthetic construct
  misc_feature 1..30: note = Probe
  source 1..30: mol_type = other DNA
cgcataaaacttaaaactttacagtcagag

SEQ ID NO: 30335 - DNA, 32 bp, synthetic construct
  misc_feature 1..32: note = Probe
  source 1..32: mol_type = other DNA
cgcataaaacttaaaactttacagtcagaggt

SEQ ID NO: 30336 - DNA, 33 bp, synthetic construct; identical to SEQ ID NO: 716
  misc_feature 1..33: note = Probe
  source 1..33: mol_type = other DNA

SEQ ID NO: 30337 - DNA, 36 bp, synthetic construct
  misc_feature 1..36: note = Probe
  source 1..36: mol_type = other DNA
cgcataaaacttaaaactttacagtcagaggttcaa

SEQ ID NO: 30338 - DNA, 33 bp, synthetic construct; identical to SEQ ID NO: 4982
  misc_feature 1..33: note = Probe
  source 1..33: mol_type = other DNA

SEQ ID NO: 30339 - DNA, 36 bp, synthetic construct
  misc_feature 1..36: note = Probe
  source 1..36: mol_type = other DNA
cgcattggtggttcagtggtagaattctcgcctgcc

SEQ ID NO: 30340 - DNA, 36 bp, synthetic construct; identical to SEQ ID NO: 19057
  misc_feature 1..36: note = Probe
  source 1..36: mol_type = other DNA

SEQ ID NO: 30341 - DNA, 34 bp, synthetic construct
  misc_feature 1..34: note = Probe
  source 1..34: mol_type = other DNA
cgcccggctagctcagtcggtagagcatgagact

SEQ ID NO: 30342 - DNA, 35 bp, synthetic construct
  misc_feature 1..35: note = Probe
  source 1..35: mol_type = other DNA
cgcccggctagctcagtcggtagagcatgagactc

SEQ ID NO: 30343 - DNA, 36 bp, synthetic construct
  misc_feature 1..36: note = Probe
  source 1..36: mol_type = other DNA
cgcccggctagctcagtcggtagagcatgagactct

SEQ ID NO: 30344 - DNA, 34 bp, synthetic construct; identical to SEQ ID NO: 721
  misc_feature 1..34: note = Probe
  source 1..34: mol_type = other DNA

SEQ ID NO: 30345 - DNA, 36 bp, synthetic construct
  misc_feature 1..36: note = Probe
  source 1..36: mol_type = other DNA
cgcccggctagctcagtcggtagagcatgggactct

SEQ ID NO: 30346 - DNA, 16 bp, synthetic construct
  misc_feature 1..16: note = Probe
  source 1..16: mol_type = other DNA
cgccgcggcccgggtt

SEQ ID NO: 30347 - DNA, 27 bp, synthetic construct
  misc_feature 1..27: note = Probe
  source 1..27: mol_type = other DNA
cgccgcggcccgggttcgattcccggt

SEQ ID NO: 30348 - DNA, 28 bp, synthetic construct
  misc_feature 1..28: note = Probe
  source 1..28: mol_type = other DNA
cgccgcggcccgggttcgattcccggtc

SEQ ID NO: 30349 - DNA, 29 bp, synthetic construct
  misc_feature 1..29: note = Probe
  source 1..29: mol_type = other DNA
cgccgcggcccgggttcgattcccggtca

SEQ ID NO: 30350 - DNA, 30 bp, synthetic construct; identical to SEQ ID NO: 9788
  misc_feature 1..30: note = Probe
  source 1..30: mol_type = other DNA

SEQ ID NO: 30351 - DNA, 32 bp, synthetic construct
  misc_feature 1..32: note = Probe
  source 1..32: mol_type = other DNA
cgccgcggcccgggttcgattcccggtcaggg

SEQ ID NO: 30352 - DNA, 33 bp, synthetic construct; identical to SEQ ID NO: 13103
  misc_feature 1..33: note = Probe
  source 1..33: mol_type = other DNA

SEQ ID NO: 30353 - DNA, 34 bp, synthetic construct; identical to SEQ ID NO: 19062
  misc_feature 1..34: note = Probe
  source 1..34: mol_type = other DNA

SEQ ID NO: 30354 - DNA, 35 bp, synthetic construct; identical to SEQ ID NO: 4985
  misc_feature 1..35: note = Probe
  source 1..35: mol_type = other DNA

SEQ ID NO: 30355 - DNA, 35 bp, synthetic construct; identical to SEQ ID NO: 4986
  misc_feature 1..35: note = Probe
  source 1..35: mol_type = other DNA

SEQ ID NO: 30356 - DNA, 36 bp, synthetic construct
  misc_feature 1..36: note = Probe
  source 1..36: mol_type = other DNA
cgccgcggcccgggttcgattcccggtcagggaagc

SEQ ID NO: 30357 - DNA, 36 bp, synthetic construct
  misc_feature 1..36: note = Probe
  source 1..36: mol_type = other DNA
cgccgcggcccgggttcgattcccggtcagggaagt

SEQ ID NO: 30358 - DNA, 35 bp, synthetic construct; identical to SEQ ID NO: 4989
  misc_feature 1..35: note = Probe
  source 1..35: mol_type = other DNA

SEQ ID NO: 30359 - DNA, 36 bp, synthetic construct
  misc_feature 1..36: note = Probe
  source 1..36: mol_type = other DNA
cgccgcggcccgggttcgattcccggtcagggaatg

SEQ ID NO: 30360 - DNA, 36 bp, synthetic construct
  misc_feature 1..36: note = Probe
  source 1..36: mol_type = other DNA
cgccgcggcccgggttcgattcccggtcagggaatt

SEQ ID NO: 30361 - DNA, 34 bp, synthetic construct; identical to SEQ ID NO: 724
  misc_feature 1..34: note = Probe
  source 1..34: mol_type = other DNA

SEQ ID NO: 30362 - DNA, 36 bp, synthetic construct
  misc_feature 1..36: note = Probe
  source 1..36: mol_type = other DNA
cgccgctggtgtagtggtatcatgcaagattcccat

SEQ ID NO: 30363 - DNA, 15 bp, synthetic construct
  misc_feature 1..15: note = Probe
  source 1..15: mol_type = other DNA
cgccgtgatcgtata

SEQ ID NO: 30364 - DNA, 22 bp, synthetic construct
  misc_feature 1..22: note = Probe
  source 1..22: mol_type = other DNA
cgccgtgatcgtatagtggtta

SEQ ID NO: 30365 - DNA, 27 bp, synthetic construct
  misc_feature 1..27: note = Probe
  source 1..27: mol_type = other DNA
cgccgtgatcgtatagtggttagtact

SEQ ID NO: 30366 - DNA, 28 bp, synthetic construct
  misc_feature 1..28: note = Probe
  source 1..28: mol_type = other DNA
cgccgtgatcgtatagtggttagtactc

SEQ ID NO: 30367 - DNA, 29 bp, synthetic construct
  misc_feature 1..29: note = Probe
  source 1..29: mol_type = other DNA
cgccgtgatcgtatagtggttagtactct

SEQ ID NO: 30368 - DNA, 30 bp, synthetic construct; identical to SEQ ID NO: 9798
  misc_feature 1..30: note = Probe
  source 1..30: mol_type = other DNA

SEQ ID NO: 30369 - DNA, 31 bp, synthetic construct; identical to SEQ ID NO: 19077
  misc_feature 1..31: note = Probe
  source 1..31: mol_type = other DNA

SEQ ID NO: 30370 - DNA, 32 bp, synthetic construct; identical to SEQ ID NO: 4998
  misc_feature 1..32: note = Probe
  source 1..32: mol_type = other DNA

SEQ ID NO: 30371 - DNA, 33 bp, synthetic construct; identical to SEQ ID NO: 4999
  misc_feature 1..33: note = Probe
  source 1..33: mol_type = other DNA

SEQ ID NO: 30372 - DNA, 34 bp, synthetic construct; identical to SEQ ID NO: 5000
  misc_feature 1..34: note = Probe
  source 1..34: mol_type = other DNA

SEQ ID NO: 30373 - DNA, 35 bp, synthetic construct; identical to SEQ ID NO: 5001
  misc_feature 1..35: note = Probe
  source 1..35: mol_type = other DNA

SEQ ID NO: 30374 - DNA, 36 bp, synthetic construct; identical to SEQ ID NO: 5002
  misc_feature 1..36: note = Probe
  source 1..36: mol_type = other DNA

SEQ ID NO: 30375 - DNA, 37 bp, synthetic construct; identical to SEQ ID NO: 5003
  misc_feature 1..37: note = Probe
  source 1..37: mol_type = other DNA

SEQ ID NO: 30376 - DNA, 38 bp, synthetic construct; identical to SEQ ID NO: 5004
  misc_feature 1..38: note = Probe
  source 1..38: mol_type = other DNA

SEQ ID NO: 30377 - DNA, 40 bp, synthetic construct; identical to SEQ ID NO: 19086
  misc_feature 1..40: note = Probe
  source 1..40: mol_type = other DNA

SEQ ID NO: 30378 - DNA, 50 bp, synthetic construct
  misc_feature 1..50: note = Probe
  source 1..50: mol_type = other DNA
cgccgtgatcgtatagtggttagtactctgcgttgtggccgcagcaacct

SEQ ID NO: 30379 - DNA, 25 bp, synthetic construct
  misc_feature 1..25: note = Probe
  source 1..25: mol_type = other DNA
cgcctgccacgcgggaggcccgggt

SEQ ID NO: 30380 - DNA, 36 bp, synthetic construct
  misc_feature 1..36: note = Probe
  source 1..36: mol_type = other DNA
cgcctgccacgcgggaggcccgggttcgattcccgg

SEQ ID NO: 30381 - DNA, 15 bp, synthetic construct
  misc_feature 1..15: note = Probe
  source 1..15: mol_type = other DNA
cgcctgtcacgcggg

SEQ ID NO: 30382 - DNA, 36 bp, synthetic construct
  misc_feature 1..36: note = Probe
  source 1..36: mol_type = other DNA
cgcctgtcacgcgggagaccggggttcaattccccg

SEQ ID NO: 30383 - DNA, 47 bp, synthetic construct
  misc_feature 1..47: note = Probe
  source 1..47: mol_type = other DNA
cgcctgtcacgcgggagaccggggttcgattccccgacggggaggca

SEQ ID NO: 30384 - DNA, 26 bp, synthetic construct
  misc_feature 1..26: note = Probe
  source 1..26: mol_type = other DNA
cgccttttttcccggcggcgggagaa

SEQ ID NO: 30385 - DNA, 17 bp, synthetic construct
  misc_feature 1..17: note = Probe
  source 1..17: mol_type = other DNA
cgcgaaaggtccccggt

SEQ ID NO: 30386 - DNA, 33 bp, synthetic construct
  misc_feature 1..33: note = Probe
  source 1..33: mol_type = other DNA
cgcgcattggtggttcagtggtagaattctcgc

SEQ ID NO: 30387 - DNA, 34 bp, synthetic construct
  misc_feature 1..34: note = Probe
  source 1..34: mol_type = other DNA
cgcgcattggtggttcagtggtagaattctcgcc

SEQ ID NO: 30388 - DNA, 35 bp, synthetic construct
  misc_feature 1..35: note = Probe
  source 1..35: mol_type = other DNA
cgcgcattggtggttcagtggtagaattctcgcct

SEQ ID NO: 30389 - DNA, 36 bp, synthetic construct
  misc_feature 1..36: note = Probe
  source 1..36: mol_type = other DNA
cgcgcattggtggttcagtggtagaattctcgcctg

SEQ ID NO: 30390 - DNA, 36 bp, synthetic construct; identical to SEQ ID NO: 5025
  misc_feature 1..36: note = Probe
  source 1..36: mol_type = other DNA

SEQ ID NO: 30391 - DNA, 32 bp, synthetic construct; identical to SEQ ID NO: 732
  misc_feature 1..32: note = Probe
  source 1..32: mol_type = other DNA

SEQ ID NO: 30392 - DNA, 33 bp, synthetic construct; identical to SEQ ID NO: 733
  misc_feature 1..33: note = Probe
  source 1..33: mol_type = other DNA

SEQ ID NO: 30393 - DNA, 34 bp, synthetic construct; identical to SEQ ID NO: 734
  misc_feature 1..34: note = Probe
  source 1..34: mol_type = other DNA

SEQ ID NO: 30394 - DNA, 35 bp, synthetic construct; identical to SEQ ID NO: 735
  misc_feature 1..35: note = Probe
  source 1..35: mol_type = other DNA

SEQ ID NO: 30395 - DNA, 36 bp, synthetic construct; identical to SEQ ID NO: 5028
  misc_feature 1..36: note = Probe
  source 1..36: mol_type = other DNA

SEQ ID NO: 30396 - DNA, 37 bp, synthetic construct; identical to SEQ ID NO: 5031
  misc_feature 1..37: note = Probe
  source 1..37: mol_type = other DNA

SEQ ID NO: 30397 - DNA, 36 bp, synthetic construct; identical to SEQ ID NO: 5034
  misc_feature 1..36: note = Probe
  source 1..36: mol_type = other DNA

SEQ ID NO: 30398 - DNA, 37 bp, synthetic construct; identical to SEQ ID NO: 5036
  misc_feature 1..37: note = Probe
  source 1..37: mol_type = other DNA

SEQ ID NO: 30399 - DNA, 38 bp, synthetic construct; identical to SEQ ID NO: 5037
  misc_feature 1..38: note = Probe
  source 1..38: mol_type = other DNA

SEQ ID NO: 30400 - DNA, 16 bp, synthetic construct
  misc_feature 1..16: note = Probe
  source 1..16: mol_type = other DNA
cgcgggaggcccgggt

SEQ ID NO: 30401 - DNA, 33 bp, synthetic construct; identical to SEQ ID NO: 19171
  misc_feature 1..33: note = Probe
  source 1..33: mol_type = other DNA

SEQ ID NO: 30402 - DNA, 37 bp, synthetic construct; identical to SEQ ID NO: 19174
  misc_feature 1..37: note = Probe
  source 1..37: mol_type = other DNA

SEQ ID NO: 30403 - DNA, 37 bp, synthetic construct; identical to SEQ ID NO: 5041
  misc_feature 1..37: note = Probe
  source 1..37: mol_type = other DNA

SEQ ID NO: 30404 - DNA, 38 bp, synthetic construct; identical to SEQ ID NO: 19179
  misc_feature 1..38: note = Probe
  source 1..38: mol_type = other DNA

SEQ ID NO: 30405 - DNA, 37 bp, synthetic construct; identical to SEQ ID NO: 5042
  misc_feature 1..37: note = Probe
  source 1..37: mol_type = other DNA

SEQ ID NO: 30406 - DNA, 37 bp, synthetic construct
  misc_feature 1..37: note = Probe
  source 1..37: mol_type = other DNA
cgcgggaggcccgggttcgattcccggccaatgcagc

SEQ ID NO: 30407 - DNA, 38 bp, synthetic construct; identical to SEQ ID NO: 5043
  misc_feature 1..38: note = Probe
  source 1..38: mol_type = other DNA

SEQ ID NO: 30408 - DNA, 33 bp, synthetic construct; identical to SEQ ID NO: 19184
  misc_feature 1..33: note = Probe
  source 1..33: mol_type = other DNA

SEQ ID NO: 30409 - DNA, 25 bp, synthetic construct
  misc_feature 1..25: note = Probe
  source 1..25: mol_type = other DNA
cgcgggttcgatccccgtacgggcc

SEQ ID NO: 30410 - DNA, 36 bp, synthetic construct
  misc_feature 1..36: note = Probe
  source 1..36: mol_type = other DNA
cgcgggttcgatccccgtacgggccaactttgtttt

SEQ ID NO: 30411 - DNA, 36 bp, synthetic construct
  misc_feature 1..36: note = Probe
  source 1..36: mol_type = other DNA
cgcgggttcgatccccgtacgggccaggattgaaac

SEQ ID NO: 30412 - DNA, 16 bp, synthetic construct
  misc_feature 1..16: note = Probe
  source 1..16: mol_type = other DNA
cgcgtctgactacgga

SEQ ID NO: 30413 - DNA, 18 bp, synthetic construct
  misc_feature 1..18: note = Probe
  source 1..18: mol_type = other DNA
cgcgtctgactacggatc

SEQ ID NO: 30414 - DNA, 36 bp, synthetic construct
  misc_feature 1..36: note = Probe
  source 1..36: mol_type = other DNA
cgcgtctgactacggatcagaagattccaggttcga

SEQ ID NO: 30415 - DNA, 36 bp, synthetic construct
  misc_feature 1..36: note = Probe
  source 1..36: mol_type = other DNA
cgcgtctgactacggatcagaagattctaggttcga

SEQ ID NO: 30416 - DNA, 36 bp, synthetic construct
  misc_feature 1..36: note = Probe
  source 1..36: mol_type = other DNA
cgctcccttcgatagctcagctggtagagcggagga

SEQ ID NO: 30417 - DNA, 20 bp, synthetic construct
  misc_feature 1..20: note = Probe
  source 1..20: mol_type = other DNA
cgctctcaccgccgcggccc

SEQ ID NO: 30418 - DNA, 46 bp, synthetic construct
  misc_feature 1..46: note = Probe
  source 1..46: mol_type = other DNA
cgctctcaccgccgcggcccgggttcgattcccggtcagggaaaga

SEQ ID NO: 30419 - DNA, 46 bp, synthetic construct; identical to SEQ ID NO: 19193
  misc_feature 1..46: note = Probe
  source 1..46: mol_type = other DNA

SEQ ID NO: 30420 - DNA, 46 bp, synthetic construct
  misc_feature 1..46: note = Probe
  source 1..46: mol_type = other DNA
cgctctcaccgccgcggcccgggttcgattcccggtcagggaatga

SEQ ID NO: 30421 - DNA, 17 bp, synthetic construct
  misc_feature 1..17: note = Probe
  source 1..17: mol_type = other DNA
cgctctgagctaaacct

SEQ ID NO: 30422 - DNA, 19 bp, synthetic construct
  misc_feature 1..19: note = Probe
  source 1..19: mol_type = other DNA
cggaaacaagactgtgttt

SEQ ID NO: 30423 - DNA, 20 bp, synthetic construct
  misc_feature 1..20: note = Probe
  source 1..20: mol_type = other DNA
cggaaacaagactgtgtttt

SEQ ID NO: 30424 - DNA, 15 bp, synthetic construct
  misc_feature 1..15: note = Probe
  source 1..15: mol_type = other DNA
cggaagcgtgctggg

SEQ ID NO: 30425 - DNA, 17 bp, synthetic construct
  misc_feature 1..17: note = Probe
  source 1..17: mol_type = other DNA
cggaagcgtgctgggcc

SEQ ID NO: 30426 - DNA, 25 bp, synthetic construct
  misc_feature 1..25: note = Probe
  source 1..25: mol_type = other DNA
cggagaattttggattctcagggat

SEQ ID NO: 30427 - DNA, 32 bp, synthetic construct
  misc_feature 1..32: note = Probe
  source 1..32: mol_type = other DNA
cggagaattttggattctcagggatgggttcg

SEQ ID NO: 30428 - DNA, 36 bp, synthetic construct
  misc_feature 1..36: note = Probe
  source 1..36: mol_type = other DNA
cggagaattttggattctcagggatgggttcgattc

SEQ ID NO: 30429 - DNA, 38 bp, synthetic construct
  misc_feature 1..38: note = Probe
  source 1..38: mol_type = other DNA
cggagaattttggattctcagggatgggttcgattctc

SEQ ID NO: 30430 - DNA, 15 bp, synthetic construct
  misc_feature 1..15: note = Probe
  source 1..15: mol_type = other DNA
cggagatgaaaacct

SEQ ID NO: 30431 - DNA, 24 bp, synthetic construct
  misc_feature 1..24: note = Probe
  source 1..24: mol_type = other DNA
cggagatgaaaacctttttccaag

SEQ ID NO: 30432 - DNA, 25 bp, synthetic construct
  misc_feature 1..25: note = Probe
  source 1..25: mol_type = other DNA
cggagatgaaaacctttttccaagg

SEQ ID NO: 30433 - DNA, 29 bp, synthetic construct
  misc_feature 1..29: note = Probe
  source 1..29: mol_type = other DNA
cggagatgaaaacctttttccaaggacaa

SEQ ID NO: 30434 - DNA, 18 bp, synthetic construct
  misc_feature 1..18: note = Probe
  source 1..18: mol_type = other DNA
cggagccttcgatagctc

SEQ ID NO: 30435 - DNA, 30 bp, synthetic construct
  misc_feature 1..30: note = Probe
  source 1..30: mol_type = other DNA
cggagccttcgatagctcagttggtagagc

SEQ ID NO: 30436 - DNA, 20 bp, synthetic construct
  misc_feature 1..20: note = Probe
  source 1..20: mol_type = other DNA
cggagctggggattgtgggt

SEQ ID NO: 30437 - DNA, 15 bp, synthetic construct
  misc_feature 1..15: note = Probe
  source 1..15: mol_type = other DNA
cggatagctcagtcg

SEQ ID NO: 30438 - DNA, 16 bp, synthetic construct
  misc_feature 1..16: note = Probe
  source 1..16: mol_type = other DNA
cggatagctcagtcgg

SEQ ID NO: 30439 - DNA, 19 bp, synthetic construct
  misc_feature 1..19: note = Probe
  source 1..19: mol_type = other DNA
cggatagctcagtcggtag

SEQ ID NO: 30440 - DNA, 20 bp, synthetic construct
  misc_feature 1..20: note = Probe
  source 1..20: mol_type = other DNA
cggatagctcagtcggtaga

SEQ ID NO: 30441 - DNA, 21 bp, synthetic construct
  misc_feature 1..21: note = Probe
  source 1..21: mol_type = other DNA
cggatagctcagtcggtagag

SEQ ID NO: 30442 - DNA, 24 bp, synthetic construct
  misc_feature 1..24: note = Probe
  source 1..24: mol_type = other DNA
cggatagctcagtcggtagagcat

SEQ ID NO: 30443 - DNA, 27 bp, synthetic construct
  misc_feature 1..27: note = Probe
  source 1..27: mol_type = other DNA
cggatagctcagtcggtagagcatcag

SEQ ID NO: 30444 - DNA, 28 bp, synthetic construct
  misc_feature 1..28: note = Probe
  source 1..28: mol_type = other DNA
cggatagctcagtcggtagagcatcaga

SEQ ID NO: 30445 - DNA, 34 bp, synthetic construct; identical to SEQ ID NO: 13180
  misc_feature 1..34: note = Probe
  source 1..34: mol_type = other DNA

SEQ ID NO: 30446 - DNA, 36 bp, synthetic construct
  misc_feature 1..36: note = Probe
  source 1..36: mol_type = other DNA
cggatagctcagtcggtagagcatcagacttttaat

SEQ ID NO: 30447 - DNA, 21 bp, synthetic construct
  misc_feature 1..21: note = Probe
  source 1..21: mol_type = other DNA
cggatcagaagattgagggtt

SEQ ID NO: 30448 - DNA, 21 bp, synthetic construct
  misc_feature 1..21: note = Probe
  source 1..21: mol_type = other DNA
cggatcagaagattgcaggtt

SEQ ID NO: 30449 - DNA, 17 bp, synthetic construct
  misc_feature 1..17: note = Probe
  source 1..17: mol_type = other DNA
cggatggaggcgtgggt

SEQ ID NO: 30450 - DNA, 35 bp, synthetic construct
  misc_feature 1..35: note = Probe
  source 1..35: mol_type = other DNA
cggcattgtgaggacaatggcacggcaaggggagt

SEQ ID NO: 30451 - DNA, 22 bp, synthetic construct
  misc_feature 1..22: note = Probe
  source 1..22: mol_type = other DNA
cggcgctctcaccgccgcggcc

SEQ ID NO: 30452 - DNA, 23 bp, synthetic construct
  misc_feature 1..23: note = Probe
  source 1..23: mol_type = other DNA
cggcgctctcaccgccgcggccc

SEQ ID NO: 30453 - DNA, 15 bp, synthetic construct
  misc_feature 1..15: note = Probe
  source 1..15: mol_type = other DNA
cggcggcgggagaag

SEQ ID NO: 30454 - DNA, 17 bp, synthetic construct
  misc_feature 1..17: note = Probe
  source 1..17: mol_type = other DNA
cggcggcgggagaagta

SEQ ID NO: 30455 - DNA, 19 bp, synthetic construct
  misc_feature 1..19: note = Probe
  source 1..19: mol_type = other DNA
cggctagctcagtcggtag

SEQ ID NO: 30456 - DNA, 22 bp, synthetic construct
  misc_feature 1..22: note = Probe
  source 1..22: mol_type = other DNA
cggctagctcagtcggtagagc

SEQ ID NO: 30457 - DNA, 23 bp, synthetic construct
  misc_feature 1..23: note = Probe
  source 1..23: mol_type = other DNA
cggctagctcagtcggtagagca

SEQ ID NO: 30458 - DNA, 26 bp, synthetic construct
  misc_feature 1..26: note = Probe
  source 1..26: mol_type = other DNA
cggctagctcagtcggtagagcatga

SEQ ID NO: 30459 - DNA, 27 bp, synthetic construct
  misc_feature 1..27: note = Probe
  source 1..27: mol_type = other DNA
cggctagctcagtcggtagagcatgag

SEQ ID NO: 30460 - DNA, 30 bp, synthetic construct; identical to SEQ ID NO: 13189
  misc_feature 1..30: note = Probe
  source 1..30: mol_type = other DNA

SEQ ID NO: 30461 - DNA, 31 bp, synthetic construct; identical to SEQ ID NO: 13190
  misc_feature 1..31: note = Probe
  source 1..31: mol_type = other DNA

SEQ ID NO: 30462 - DNA, 32 bp, synthetic construct
  misc_feature 1..32: note = Probe
  source 1..32: mol_type = other DNA
cggctagctcagtcggtagagcatgagaccct

SEQ ID NO: 30463 - DNA, 33 bp, synthetic construct; identical to SEQ ID NO: 774
  misc_feature 1..33: note = Probe
  source 1..33: mol_type = other DNA

SEQ ID NO: 30464 - DNA, 26 bp, synthetic construct
  misc_feature 1..26: note = Probe
  source 1..26: mol_type = other DNA
cggctagctcagtcggtagagcatgg

SEQ ID NO: 30465 - DNA, 39 bp, synthetic construct; identical to SEQ ID NO: 19247
  misc_feature 1..39: note = Probe
  source 1..39: mol_type = other DNA

SEQ ID NO: 30466 - DNA, 21 bp, synthetic construct
  misc_feature 1..21: note = Probe
  source 1..21: mol_type = other DNA
cggctcgaaggacgaaagttt

SEQ ID NO: 30467 - DNA, 22 bp, synthetic construct
  misc_feature 1..22: note = Probe
  source 1..22: mol_type = other DNA
cggctcgaaggacgaaagtttt

SEQ ID NO: 30468 - DNA, 19 bp, synthetic construct
  misc_feature 1..19: note = Probe
  source 1..19: mol_type = other DNA
cggctcgaaggacttcgtc

SEQ ID NO: 30469 - DNA, 28 bp, synthetic construct
  misc_feature 1..28: note = Probe
  source 1..28: mol_type = other DNA
cggctcgaaggacttcgtctgtaatttt

SEQ ID NO: 30470 - DNA, 27 bp, synthetic construct
  misc_feature 1..27: note = Probe
  source 1..27: mol_type = other DNA
cggctcgaaggagacaagtgcggtttt

SEQ ID NO: 30471 - DNA, 28 bp, synthetic construct
  misc_feature 1..28: note = Probe
  source 1..28: mol_type = other DNA
cggctcgaaggagacaagtgcggttttt

SEQ ID NO: 30472 - DNA, 18 bp, synthetic construct
  misc_feature 1..18: note = Probe
  source 1..18: mol_type = other DNA
cggctgtaggaatacttt

SEQ ID NO: 30473 - DNA, 19 bp, synthetic construct
  misc_feature 1..19: note = Probe
  source 1..19: mol_type = other DNA
cggctgtaggaatactttt

SEQ ID NO: 30474 - DNA, 30 bp, synthetic construct
  misc_feature 1..30: note = Probe
  source 1..30: mol_type = other DNA
cggctgtaggaatacttttcccaagcaaaa

SEQ ID NO: 30475 - DNA, 19 bp, synthetic construct
  misc_feature 1..19: note = Probe
  source 1..19: mol_type = other DNA
cggctgttaaccgaaaggt

SEQ ID NO: 30476 - DNA, 21 bp, synthetic construct
  misc_feature 1..21: note = Probe
  source 1..21: mol_type = other DNA
cggctgttaaccgaaaggttg

SEQ ID NO: 30477 - DNA, 22 bp, synthetic construct
  misc_feature 1..22: note = Probe
  source 1..22: mol_type = other DNA
cggctgttaaccgaaaggttgg

SEQ ID NO: 30478 - DNA, 23 bp, synthetic construct
  misc_feature 1..23: note = Probe
  source 1..23: mol_type = other DNA
cggctgttaaccgaaaggttggt

SEQ ID NO: 30479 - DNA, 24 bp, synthetic construct
  misc_feature 1..24: note = Probe
  source 1..24: mol_type = other DNA
cggctgttaaccgaaaggttggtg

SEQ ID NO: 30480 - DNA, 27 bp, synthetic construct
  misc_feature 1..27: note = Probe
  source 1..27: mol_type = other DNA
cggctgttaaccgaaaggttggtggtt

SEQ ID NO: 30481 - DNA, 50 bp, synthetic construct
  misc_feature 1..50: note = Probe
  source 1..50: mol_type = other DNA
cggctgttaaccgaaaggttggtggttcgagcccacccagggacgctatg

SEQ ID NO: 30482 - DNA, 25 bp, synthetic construct
  misc_feature 1..25: note = Probe
  source 1..25: mol_type = other DNA
cggctgttaactgaaaggttggtgg

SEQ ID NO: 30483 - DNA, 26 bp, synthetic construct
  misc_feature 1..26: note = Probe
  source 1..26: mol_type = other DNA
cggctgttaactgaaaggttggtggt

SEQ ID NO: 30484 - DNA, 27 bp, synthetic construct
  misc_feature 1..27: note = Probe
  source 1..27: mol_type = other DNA
cggctgttaactgaaaggttggtggtt

SEQ ID NO: 30485 - DNA, 36 bp, synthetic construct
  misc_feature 1..36: note = Probe
  source 1..36: mol_type = other DNA
cggctgttaactgaaaggttggtggttcgagcccac

SEQ ID NO: 30486 - DNA, 18 bp, synthetic construct
  misc_feature 1..18: note = Probe
  source 1..18: mol_type = other DNA
cggcttagcctgtggctc

SEQ ID NO: 30487 - DNA, 21 bp, synthetic construct
  misc_feature 1..21: note = Probe
  source 1..21: mol_type = other DNA
cggcttagcctgtggctcgcc

SEQ ID NO: 30488 - DNA, 36 bp, synthetic construct
  misc_feature 1..36: note = Probe
  source 1..36: mol_type = other DNA
cgggacgaggtggccgagtggttaaggcgatggact

SEQ ID NO: 30489 - DNA, 31 bp, synthetic construct; identical to SEQ ID NO: 787
  misc_feature 1..31: note = Probe
  source 1..31: mol_type = other DNA

SEQ ID NO: 30490 - DNA, 33 bp, synthetic construct; identical to SEQ ID NO: 789
  misc_feature 1..33: note = Probe
  source 1..33: mol_type = other DNA

SEQ ID NO: 30491 - DNA, 34 bp, synthetic construct; identical to SEQ ID NO: 5079
  misc_feature 1..34: note = Probe
  source 1..34: mol_type = other DNA

SEQ ID NO: 30492 - DNA, 35 bp, synthetic construct; identical to SEQ ID NO: 5081
  misc_feature 1..35: note = Probe
  source 1..35: mol_type = other DNA

SEQ ID NO: 30493 - DNA, 34 bp, synthetic construct; identical to SEQ ID NO: 5082
  misc_feature 1..34: note = Probe
  source 1..34: mol_type = other DNA

SEQ ID NO: 30494 - DNA, 35 bp, synthetic construct; identical to SEQ ID NO: 5083
  misc_feature 1..35: note = Probe
  source 1..35: mol_type = other DNA

SEQ ID NO: 30495 - DNA, 36 bp, synthetic construct; identical to SEQ ID NO: 5084
  misc_feature 1..36: note = Probe
  source 1..36: mol_type = other DNA

SEQ ID NO: 30496 - DNA, 18 bp, synthetic construct
  misc_feature 1..18: note = Probe
  source 1..18: mol_type = other DNA
cgggagcccggatagctc

SEQ ID NO: 30497 - DNA, 36 bp, synthetic construct; identical to SEQ ID NO: 19271
  misc_feature 1..36: note = Probe
  source 1..36: mol_type = other DNA

SEQ ID NO: 30498 - DNA, 39 bp, synthetic construct; identical to SEQ ID NO: 19273
  misc_feature 1..39: note = Probe
  source 1..39: mol_type = other DNA

SEQ ID NO: 30499 - DNA, 40 bp, synthetic construct
  misc_feature 1..40: note = Probe
  source 1..40: mol_type = other DNA
cgggagcccggatagctcagtcggtagagcatcagacttt

SEQ ID NO: 30500 - DNA, 41 bp, synthetic construct; identical to SEQ ID NO: 19274
  misc_feature 1..41: note = Probe
  source 1..41: mol_type = other DNA

SEQ ID NO: 30501 - DNA, 26 bp, synthetic construct
  misc_feature 1..26: note = Probe
  source 1..26: mol_type = other DNA
cgggagcgcccggatagctcagtcgg

SEQ ID NO: 30502 - DNA, 27 bp, synthetic construct
  misc_feature 1..27: note = Probe
  source 1..27: mol_type = other DNA
cgggagcgcccggatagctcagtcggt

SEQ ID NO: 30503 - DNA, 28 bp, synthetic construct
  misc_feature 1..28: note = Probe
  source 1..28: mol_type = other DNA
cgggagcgcccggatagctcagtcggta

SEQ ID NO: 30504 - DNA, 29 bp, synthetic construct
  misc_feature 1..29: note = Probe
  source 1..29: mol_type = other DNA
cgggagcgcccggatagctcagtcggtag

SEQ ID NO: 30505 - DNA, 30 bp, synthetic construct
  misc_feature 1..30: note = Probe
  source 1..30: mol_type = other DNA
cgggagcgcccggatagctcagtcggtaga

SEQ ID NO: 30506 - DNA, 31 bp, synthetic construct; identical to SEQ ID NO: 19275
  misc_feature 1..31: note = Probe
  source 1..31: mol_type = other DNA

SEQ ID NO: 30507 - DNA, 32 bp, synthetic construct
  misc_feature 1..32: note = Probe
  source 1..32: mol_type = other DNA
cgggagcgcccggatagctcagtcggtagagc

SEQ ID NO: 30508 - DNA, 33 bp, synthetic construct; identical to SEQ ID NO: 19276
  misc_feature 1..33: note = Probe
  source 1..33: mol_type = other DNA

SEQ ID NO: 30509 - DNA, 34 bp, synthetic construct
  misc_feature 1..34: note = Probe
  source 1..34: mol_type = other DNA
cgggagcgcccggatagctcagtcggtagagcat

SEQ ID NO: 30510 - DNA, 35 bp, synthetic construct
  misc_feature 1..35: note = Probe
  source 1..35: mol_type = other DNA
cgggagcgcccggatagctcagtcggtagagcatc

SEQ ID NO: 30511 - DNA, 36 bp, synthetic construct
  misc_feature 1..36: note = Probe
  source 1..36: mol_type = other DNA
cgggagcgcccggatagctcagtcggtagagcatca

SEQ ID NO: 30512 - DNA, 40 bp, synthetic construct; identical to SEQ ID NO: 19278
  misc_feature 1..40: note = Probe
  source 1..40: mol_type = other DNA

SEQ ID NO: 30513 - DNA, 41 bp, synthetic construct; identical to SEQ ID NO: 19279
  misc_feature 1..41: note = Probe
  source 1..41: mol_type = other DNA

SEQ ID NO: 30514 - DNA, 42 bp, synthetic construct; identical to SEQ ID NO: 19280
  misc_feature 1..42: note = Probe
  source 1..42: mol_type = other DNA

SEQ ID NO: 30515 - DNA, 43 bp, synthetic construct; identical to SEQ ID NO: 19281
  misc_feature 1..43: note = Probe
  source 1..43: mol_type = other DNA

SEQ ID NO: 30516 - DNA, 44 bp, synthetic construct; identical to SEQ ID NO: 19282
  misc_feature 1..44: note = Probe
  source 1..44: mol_type = other DNA

SEQ ID NO: 30517 - DNA, 45 bp, synthetic construct
  misc_feature 1..45: note = Probe
  source 1..45: mol_type = other DNA
cgggagcgcccggatagctcagtcggtagagcatcagacttttaa

SEQ ID NO: 30518 - DNA, 15 bp, synthetic construct
  misc_feature 1..15: note = Probe
  source 1..15: mol_type = other DNA
cgggaggcccgggtt

SEQ ID NO: 30519 - DNA, 27 bp, synthetic construct
  misc_feature 1..27: note = Probe
  source 1..27: mol_type = other DNA
cgggaggcccgggttcgattcccggcc

SEQ ID NO: 30520 - DNA, 31 bp, synthetic construct
  misc_feature 1..31: note = Probe
  source 1..31: mol_type = other DNA
cgggaggcccgggttcgattcccggccaatg

SEQ ID NO: 30521 - DNA, 18 bp, synthetic construct
  misc_feature 1..18: note = Probe
  source 1..18: mol_type = other DNA
cgggccaggattgaaact

SEQ ID NO: 30522 - DNA, 20 bp, synthetic construct
  misc_feature 1..20: note = Probe
  source 1..20: mol_type = other DNA
cgggccaggattgaaacttt

SEQ ID NO: 30523 - DNA, 21 bp, synthetic construct
  misc_feature 1..21: note = Probe
  source 1..21: mol_type = other DNA
cgggccaggattgaaactttt

SEQ ID NO: 30524 - DNA, 36 bp, synthetic construct
  misc_feature 1..36: note = Probe
  source 1..36: mol_type = other DNA
cgggcccataccccgaaaatgttggttatacccttc

SEQ ID NO: 30525 - DNA, 36 bp, synthetic construct
  misc_feature 1..36: note = Probe
  source 1..36: mol_type = other DNA
cgggcgcccggctagctcagtcggtagagcatgaga

SEQ ID NO: 30526 - DNA, 23 bp, synthetic construct
  misc_feature 1..23: note = Probe
  source 1..23: mol_type = other DNA
cgggcggaaacaagactgtgttt

SEQ ID NO: 30527 - DNA, 25 bp, synthetic construct
  misc_feature 1..25: note = Probe
  source 1..25: mol_type = other DNA
cgggcggaaacaggtcagctgtttt

SEQ ID NO: 30528 - DNA, 18 bp, synthetic construct
  misc_feature 1..18: note = Probe
  source 1..18: mol_type = other DNA
cgggcgggagtggtggct

SEQ ID NO: 30529 - DNA, 15 bp, synthetic construct
  misc_feature 1..15: note = Probe
  source 1..15: mol_type = other DNA
cgggctcacatcacc

SEQ ID NO: 30530 - DNA, 36 bp, synthetic construct
  misc_feature 1..36: note = Probe
  source 1..36: mol_type = other DNA
cgggctcgattcccgcccaacgcatcgggcggacct

SEQ ID NO: 30531 - DNA, 22 bp, synthetic construct
  misc_feature 1..22: note = Probe
  source 1..22: mol_type = other DNA
cggggacgcttgctctagcttt

SEQ ID NO: 30532 - DNA, 17 bp, synthetic construct
  misc_feature 1..17: note = Probe
  source 1..17: mol_type = other DNA
cgggtccccggtagctc

SEQ ID NO: 30533 - DNA, 17 bp, synthetic construct
  misc_feature 1..17: note = Probe
  source 1..17: mol_type = other DNA
cgggtgcgagaggtccc

SEQ ID NO: 30534 - DNA, 21 bp, synthetic construct
  misc_feature 1..21: note = Probe
  source 1..21: mol_type = other DNA
cgggtgcgagaggtcccgggt

SEQ ID NO: 30535 - DNA, 22 bp, synthetic construct
  misc_feature 1..22: note = Probe
  source 1..22: mol_type = other DNA
cgggtgcgagaggtcccgggtt

SEQ ID NO: 30536 - DNA, 15 bp, synthetic construct
  misc_feature 1..15: note = Probe
  source 1..15: mol_type = other DNA
cgggtgctcttattt

SEQ ID NO: 30537 - DNA, 16 bp, synthetic construct
  misc_feature 1..16: note = Probe
  source 1..16: mol_type = other DNA
cgggtgctcttatttt

SEQ ID NO: 30538 - DNA, 25 bp, synthetic construct
  misc_feature 1..25: note = Probe
  source 1..25: mol_type = other DNA
cgggttcaattcccggtcagggaac

SEQ ID NO: 30539 - DNA, 27 bp, synthetic construct
  misc_feature 1..27: note = Probe
  source 1..27: mol_type = other DNA
cgggttcaattcccggtcagggaacca

SEQ ID NO: 30540 - DNA, 25 bp, synthetic construct
  misc_feature 1..25: note = Probe
  source 1..25: mol_type = other DNA
cgggttcgaaccccgtccgtgcctg

SEQ ID NO: 30541 - DNA, 25 bp, synthetic construct
  misc_feature 1..25: note = Probe
  source 1..25: mol_type = other DNA
cgggttcgactcccggtgtgggaac

SEQ ID NO: 30542 - DNA, 22 bp, synthetic construct
  misc_feature 1..22: note = Probe
  source 1..22: mol_type = other DNA
cgggttcgatccccgtacgggc

SEQ ID NO: 30543 - DNA, 23 bp, synthetic construct
  misc_feature 1..23: note = Probe
  source 1..23: mol_type = other DNA
cgggttcgatccccgtacgggcc

SEQ ID NO: 30544 - DNA, 21 bp, synthetic construct
  misc_feature 1..21: note = Probe
  source 1..21: mol_type = other DNA
cgggttcgattcccgggcggc

SEQ ID NO: 30545 - DNA, 22 bp, synthetic construct
  misc_feature 1..22: note = Probe
  source 1..22: mol_type = other DNA
cgggttcgattcccgggcggcg

SEQ ID NO: 30546 - DNA, 25 bp, synthetic construct
  misc_feature 1..25: note = Probe
  source 1..25: mol_type = other DNA
cgggttcgattcccggtcagggaaa

SEQ ID NO: 30547 - DNA, 25 bp, synthetic construct
  misc_feature 1..25: note = Probe
  source 1..25: mol_type = other DNA
cgggttcgattcccggtcagggaag

SEQ ID NO: 30548 - DNA, 26 bp, synthetic construct
  misc_feature 1..26: note = Probe
  source 1..26: mol_type = other DNA
cgggttcgattcccggtcagggaagc

SEQ ID NO: 30549 - DNA, 25 bp, synthetic construct
  misc_feature 1..25: note = Probe
  source 1..25: mol_type = other DNA
cgggttcgattcccggtcagggaat

SEQ ID NO: 30550 - DNA, 25 bp, synthetic construct
  misc_feature 1..25: note = Probe
  source 1..25: mol_type = other DNA
cgggttcgattcccggtcatggaac

SEQ ID NO: 30551 - DNA, 27 bp, synthetic construct
  misc_feature 1..27: note = Probe
  source 1..27: mol_type = other DNA
cgggttcgattcccggtcatggaacca

SEQ ID NO: 30552 - DNA, 17 bp, synthetic construct
  misc_feature 1..17: note = Probe
  source 1..17: mol_type = other DNA
cggtaatcgcataaaac

SEQ ID NO: 30553 - DNA, 18 bp, synthetic construct
  misc_feature 1..18: note = Probe
  source 1..18: mol_type = other DNA
cggtaatcgcataaaact

SEQ ID NO: 30554 - DNA, 21 bp, synthetic construct
  misc_feature 1..21: note = Probe
  source 1..21: mol_type = other DNA
cggtaatcgcataaaacttaa

SEQ ID NO: 30555 - DNA, 22 bp, synthetic construct
  misc_feature 1..22: note = Probe
  source 1..22: mol_type = other DNA
cggtaatcgcataaaacttaaa

SEQ ID NO: 30556 - DNA, 23 bp, synthetic construct
  misc_feature 1..23: note = Probe
  source 1..23: mol_type = other DNA
cggtaatcgcataaaacttaaaa

SEQ ID NO: 30557 - DNA, 24 bp, synthetic construct
  misc_feature 1..24: note = Probe
  source 1..24: mol_type = other DNA
cggtaatcgcataaaacttaaaac

SEQ ID NO: 30558 - DNA, 28 bp, synthetic construct
  misc_feature 1..28: note = Probe
  source 1..28: mol_type = other DNA
cggtaatcgcataaaacttaaaacttta

SEQ ID NO: 30559 - DNA, 29 bp, synthetic construct
  misc_feature 1..29: note = Probe
  source 1..29: mol_type = other DNA
cggtaatcgcataaaacttaaaactttac

SEQ ID NO: 30560 - DNA, 31 bp, synthetic construct
  misc_feature 1..31: note = Probe
  source 1..31: mol_type = other DNA
cggtaatcgcataaaacttaaaactttacag

SEQ ID NO: 30561 - DNA, 33 bp, synthetic construct; identical to SEQ ID NO: 19324
  misc_feature 1..33: note = Probe
  source 1..33: mol_type = other DNA

SEQ ID NO: 30562 - DNA, 41 bp, synthetic construct; identical to SEQ ID NO: 19327
  misc_feature 1..41: note = Probe
  source 1..41: mol_type = other DNA

SEQ ID NO: 30563 - DNA, 50 bp, synthetic construct; identical to SEQ ID NO: 791
  misc_feature 1..50: note = Probe
  source 1..50: mol_type = other DNA

SEQ ID NO: 30564 - DNA, 15 bp, synthetic construct
  misc_feature 1..15: note = Probe
  source 1..15: mol_type = other DNA
cggtagagcatcaga

SEQ ID NO: 30565 - DNA, 17 bp, synthetic construct
  misc_feature 1..17: note = Probe
  source 1..17: mol_type = other DNA
cggtagagcatcagact

SEQ ID NO: 30566 - DNA, 18 bp, synthetic construct
  misc_feature 1..18: note = Probe
  source 1..18: mol_type = other DNA
cggtagagcatcagactt

SEQ ID NO: 30567 - DNA, 19 bp, synthetic construct
  misc_feature 1..19: note = Probe
  source 1..19: mol_type = other DNA
cggtagagcatcagacttt

SEQ ID NO: 30568 - DNA, 20 bp, synthetic construct
  misc_feature 1..20: note = Probe
  source 1..20: mol_type = other DNA
cggtagagcatcagactttt

SEQ ID NO: 30569 - DNA, 15 bp, synthetic construct
  misc_feature 1..15: note = Probe
  source 1..15: mol_type = other DNA
cggtagagcatgaga

SEQ ID NO: 30570 - DNA, 16 bp, synthetic construct
  misc_feature 1..16: note = Probe
  source 1..16: mol_type = other DNA
cggtagagcatgagac

SEQ ID NO: 30571 - DNA, 18 bp, synthetic construct
  misc_feature 1..18: note = Probe
  source 1..18: mol_type = other DNA
cggtagagcatgagaccc

SEQ ID NO: 30572 - DNA, 17 bp, synthetic construct
  misc_feature 1..17: note = Probe
  source 1..17: mol_type = other DNA
cggtagagcatgagact

SEQ ID NO: 30573 - DNA, 18 bp, synthetic construct
  misc_feature 1..18: note = Probe
  source 1..18: mol_type = other DNA
cggtagagcatgagactc

SEQ ID NO: 30574 - DNA, 15 bp, synthetic construct
  misc_feature 1..15: note = Probe
  source 1..15: mol_type = other DNA
cggtagagcatggga

SEQ ID NO: 30575 - DNA, 16 bp, synthetic construct
  misc_feature 1..16: note = Probe
  source 1..16: mol_type = other DNA
cggtagagcatgggac

SEQ ID NO: 30576 - DNA, 17 bp, synthetic construct
  misc_feature 1..17: note = Probe
  source 1..17: mol_type = other DNA
cggtagagcatgggact

SEQ ID NO: 30577 - DNA, 25 bp, synthetic construct
  misc_feature 1..25: note = Probe
  source 1..25: mol_type = other DNA
cggtagagcatgggactcttaatcc

SEQ ID NO: 30578 - DNA, 26 bp, synthetic construct
  misc_feature 1..26: note = Probe
  source 1..26: mol_type = other DNA
cggtagagcatgggactcttaatccc

SEQ ID NO: 30579 - DNA, 15 bp, synthetic construct
  misc_feature 1..15: note = Probe
  source 1..15: mol_type = other DNA
cggtagagcgcgtgc

SEQ ID NO: 30580 - DNA, 20 bp, synthetic construct
  misc_feature 1..20: note = Probe
  source 1..20: mol_type = other DNA
cggtagagcgcgtgcttagc

SEQ ID NO: 30581 - DNA, 15 bp, synthetic construct
  misc_feature 1..15: note = Probe
  source 1..15: mol_type = other DNA
cggtagcgcgtctga

SEQ ID NO: 30582 - DNA, 16 bp, synthetic construct
  misc_feature 1..16: note = Probe
  source 1..16: mol_type = other DNA
cggtagcgcgtctgac

SEQ ID NO: 30583 - DNA, 17 bp, synthetic construct
  misc_feature 1..17: note = Probe
  source 1..17: mol_type = other DNA
cggtagcgcgtctgact

SEQ ID NO: 30584 - DNA, 19 bp, synthetic construct
  misc_feature 1..19: note = Probe
  source 1..19: mol_type = other DNA
cggtagcgcgtctgactcc

SEQ ID NO: 30585 - DNA, 22 bp, synthetic construct
  misc_feature 1..22: note = Probe
  source 1..22: mol_type = other DNA
cggtcagggaaagagtaacatc

SEQ ID NO: 30586 - DNA, 15 bp, synthetic construct
  misc_feature 1..15: note = Probe
  source 1..15: mol_type = other DNA
cggtctaaggcgctg

SEQ ID NO: 30587 - DNA, 17 bp, synthetic construct
  misc_feature 1..17: note = Probe
  source 1..17: mol_type = other DNA
cggtctaaggcgctgcg

SEQ ID NO: 30588 - DNA, 17 bp, synthetic construct
  misc_feature 1..17: note = Probe
  source 1..17: mol_type = other DNA
cggtctaaggcgctgga

SEQ ID NO: 30589 - DNA, 22 bp, synthetic construct
  misc_feature 1..22: note = Probe
  source 1..22: mol_type = other DNA
cggtggaacctgcattggtttt

SEQ ID NO: 30590 - DNA, 36 bp, synthetic construct
  misc_feature 1..36: note = Probe
  source 1..36: mol_type = other DNA
cggtggaacctgctcgaagatatatgtatatatcct

SEQ ID NO: 30591 - DNA, 18 bp, synthetic construct
  misc_feature 1..18: note = Probe
  source 1..18: mol_type = other DNA
cggtgggacctcacgaga

SEQ ID NO: 30592 - DNA, 20 bp, synthetic construct
  misc_feature 1..20: note = Probe
  source 1..20: mol_type = other DNA
cggtgggacctcacgagact

SEQ ID NO: 30593 - DNA, 21 bp, synthetic construct
  misc_feature 1..21: note = Probe
  source 1..21: mol_type = other DNA
cggtgggacctcacgagactt

SEQ ID NO: 30594 - DNA, 23 bp, synthetic construct
  misc_feature 1..23: note = Probe
  source 1..23: mol_type = other DNA
cggtgggacctcacgagactttt

SEQ ID NO: 30595 - DNA, 24 bp, synthetic construct
  misc_feature 1..24: note = Probe
  source 1..24: mol_type = other DNA
cggttagcgcgttcggctgttaac

SEQ ID NO: 30596 - DNA, 17 bp, synthetic construct
  misc_feature 1..17: note = Probe
  source 1..17: mol_type = other DNA
cggttagctcagtcggc

SEQ ID NO: 30597 - DNA, 30 bp, synthetic construct
  misc_feature 1..30: note = Probe
  source 1..30: mol_type = other DNA
cggttagctcagtcggctagagcgtggtgc

SEQ ID NO: 30598 - DNA, 16 bp, synthetic construct
  misc_feature 1..16: note = Probe
  source 1..16: mol_type = other DNA
cggttatcacgtctgc

SEQ ID NO: 30599 - DNA, 17 bp, synthetic construct
  misc_feature 1..17: note = Probe
  source 1..17: mol_type = other DNA
cggttatcacgtctgct

SEQ ID NO: 30600 - DNA, 24 bp, synthetic construct
  misc_feature 1..24: note = Probe
  source 1..24: mol_type = other DNA
cggttatcacgtctgctttacacg

SEQ ID NO: 30601 - DNA, 36 bp, synthetic construct
  misc_feature 1..36: note = Probe
  source 1..36: mol_type = other DNA
cgtaaacaggagatcctgggttcgaatcccagcggg

SEQ ID NO: 30602 - DNA, 39 bp, synthetic construct
  misc_feature 1..39: note = Probe
  source 1..39: mol_type = other DNA
cgtaaacaggagatcctgggttcgaatcccagcggggcc

SEQ ID NO: 30603 - DNA, 40 bp, synthetic construct
  misc_feature 1..40: note = Probe
  source 1..40: mol_type = other DNA
cgtaaacaggagatcctgggttcgaatcccagcggggcct

SEQ ID NO: 30604 - DNA, 15 bp, synthetic construct
  misc_feature 1..15: note = Probe
  source 1..15: mol_type = other DNA
cgtaaggcggctgtt

SEQ ID NO: 30605 - DNA, 16 bp, synthetic construct
  misc_feature 1..16: note = Probe
  source 1..16: mol_type = other DNA
cgtaaggcggctgttt

SEQ ID NO: 30606 - DNA, 17 bp, synthetic construct
  misc_feature 1..17: note = Probe
  source 1..17: mol_type = other DNA
cgtaaggcggctgtttt

SEQ ID NO: 30607 - DNA, 18 bp, synthetic construct
  misc_feature 1..18: note = Probe
  source 1..18: mol_type = other DNA
cgtaaggcggctgttttt

SEQ ID NO: 30608 - DNA, 22 bp, synthetic construct
  misc_feature 1..22: note = Probe
  source 1..22: mol_type = other DNA
cgtacgggccaggattgaaact

SEQ ID NO: 30609 - DNA, 23 bp, synthetic construct
  misc_feature 1..23: note = Probe
  source 1..23: mol_type = other DNA
cgtacgggccaggattgaaactt

SEQ ID NO: 30610 - DNA, 24 bp, synthetic construct
  misc_feature 1..24: note = Probe
  source 1..24: mol_type = other DNA
cgtacgggccaggattgaaacttt

SEQ ID NO: 30611 - DNA, 25 bp, synthetic construct
  misc_feature 1..25: note = Probe
  source 1..25: mol_type = other DNA
cgtacgggccaggattgaaactttt

SEQ ID NO: 30612 - DNA, 16 bp, synthetic construct
  misc_feature 1..16: note = Probe
  source 1..16: mol_type = other DNA
cgtagtcgtggccgag

SEQ ID NO: 30613 - DNA, 27 bp, synthetic construct
  misc_feature 1..27: note = Probe
  source 1..27: mol_type = other DNA
cgtagtgtagtggtcatcacgttcgcc

SEQ ID NO: 30614 - DNA, 18 bp, synthetic construct
  misc_feature 1..18: note = Probe
  source 1..18: mol_type = other DNA
cgtagtgtagtggttatc

SEQ ID NO: 30615 - DNA, 27 bp, synthetic construct
  misc_feature 1..27: note = Probe
  source 1..27: mol_type = other DNA
cgtagtgtagtggttatcacgttcgcc

SEQ ID NO: 30616 - DNA, 28 bp, synthetic construct
  misc_feature 1..28: note = Probe
  source 1..28: mol_type = other DNA
cgtagtgtagtggttatcacgttcgcct

SEQ ID NO: 30617 - DNA, 22 bp, synthetic construct
  misc_feature 1..22: note = Probe
  source 1..22: mol_type = other DNA
cgtatagtggttagtactctgc

SEQ ID NO: 30618 - DNA, 25 bp, synthetic construct
  misc_feature 1..25: note = Probe
  source 1..25: mol_type = other DNA
cgtatagtggttagtactctgcgtt

SEQ ID NO: 30619 - DNA, 36 bp, synthetic construct
  misc_feature 1..36: note = Probe
  source 1..36: mol_type = other DNA
cgtatagtggttagtactctgcgttgtggccgcagc

SEQ ID NO: 30620 - DNA, 41 bp, synthetic construct
  misc_feature 1..41: note = Probe
  source 1..41: mol_type = other DNA
cgtatagtggttagtactctgcgttgtggccgcagcaacct

SEQ ID NO: 30621 - DNA, 16 bp, synthetic construct
  misc_feature 1..16: note = Probe
  source 1..16: mol_type = other DNA
cgtatgaggccccggg

SEQ ID NO: 30622 - DNA, 17 bp, synthetic construct
  misc_feature 1..17: note = Probe
  source 1..17: mol_type = other DNA
cgtatgaggccccgggt

SEQ ID NO: 30623 - DNA, 18 bp, synthetic construct
  misc_feature 1..18: note = Probe
  source 1..18: mol_type = other DNA
cgtatgaggccccgggtt

SEQ ID NO: 30624 - DNA, 19 bp, synthetic construct
  misc_feature 1..19: note = Probe
  source 1..19: mol_type = other DNA
cgtatgaggccccgggttc

SEQ ID NO: 30625 - DNA, 36 bp, synthetic construct
  misc_feature 1..36: note = Probe
  source 1..36: mol_type = other DNA
cgtcggctcgttggtctaggggtatgattctcgctt

SEQ ID NO: 30626 - DNA, 36 bp, synthetic construct
  misc_feature 1..36: note = Probe
  source 1..36: mol_type = other DNA
cgtgagcccggatagctcagtcggtagagcatcaga

SEQ ID NO: 30627 - DNA, 40 bp, synthetic construct
  misc_feature 1..40: note = Probe
  source 1..40: mol_type = other DNA
cgtgagcccggatagctcagtcggtagagcatcagacttt

SEQ ID NO: 30628 - DNA, 23 bp, synthetic construct
  misc_feature 1..23: note = Probe
  source 1..23: mol_type = other DNA
cgtgatcgtatagtggttagtac

SEQ ID NO: 30629 - DNA, 24 bp, synthetic construct
  misc_feature 1..24: note = Probe
  source 1..24: mol_type = other DNA
cgtgatcgtatagtggttagtact

SEQ ID NO: 30630 - DNA, 25 bp, synthetic construct
  misc_feature 1..25: note = Probe
  source 1..25: mol_type = other DNA
cgtgatcgtatagtggttagtactc

SEQ ID NO: 30631 - DNA, 26 bp, synthetic construct
  misc_feature 1..26: note = Probe
  source 1..26: mol_type = other DNA
cgtgatcgtatagtggttagtactct

SEQ ID NO: 30632 - DNA, 32 bp, synthetic construct; identical to SEQ ID NO: 794
  misc_feature 1..32: note = Probe
  source 1..32: mol_type = other DNA

SEQ ID NO: 30633 - DNA, 36 bp, synthetic construct; identical to SEQ ID NO: 19367
  misc_feature 1..36: note = Probe
  source 1..36: mol_type = other DNA

SEQ ID NO: 30634 - DNA, 28 bp, synthetic construct
  misc_feature 1..28: note = Probe
  source 1..28: mol_type = other DNA
cgtggccgagtggttaaggcgatggact

SEQ ID NO: 30635 - DNA, 19 bp, synthetic construct
  misc_feature 1..19: note = Probe
  source 1..19: mol_type = other DNA
cgtggcgtcccggtagctc

SEQ ID NO: 30636 - DNA, 25 bp, synthetic construct
  misc_feature 1..25: note = Probe
  source 1..25: mol_type = other DNA
cgtgggttcgagccccacgttgggc

SEQ ID NO: 30637 - DNA, 27 bp, synthetic construct
  misc_feature 1..27: note = Probe
  source 1..27: mol_type = other DNA
cgtgggttcgagccccacgttgggcgc

SEQ ID NO: 30638 - DNA, 36 bp, synthetic construct
  misc_feature 1..36: note = Probe
  source 1..36: mol_type = other DNA
cgtgggttcgagccccacgttgggcgcgggttgtaa

SEQ ID NO: 30639 - DNA, 15 bp, synthetic construct
  misc_feature 1..15: note = Probe
  source 1..15: mol_type = other DNA
cgtggttgtagtccg

SEQ ID NO: 30640 - DNA, 19 bp, synthetic construct
  misc_feature 1..19: note = Probe
  source 1..19: mol_type = other DNA
cgtggttgtagtccgtgcg

SEQ ID NO: 30641 - DNA, 21 bp, synthetic construct
  misc_feature 1..21: note = Probe
  source 1..21: mol_type = other DNA
cgtggttgtagtccgtgcgag

SEQ ID NO: 30642 - DNA, 22 bp, synthetic construct
  misc_feature 1..22: note = Probe
  source 1..22: mol_type = other DNA
cgtggttgtagtccgtgcgaga

SEQ ID NO: 30643 - DNA, 26 bp, synthetic construct
  misc_feature 1..26: note = Probe
  source 1..26: mol_type = other DNA
cgtggttgtagtccgtgcgagaataa

SEQ ID NO: 30644 - DNA, 36 bp, synthetic construct
  misc_feature 1..36: note = Probe
  source 1..36: mol_type = other DNA
cgtggttgtagtccgtgcgagaataatgatgtatgc

SEQ ID NO: 30645 - DNA, 36 bp, synthetic construct
  misc_feature 1..36: note = Probe
  source 1..36: mol_type = other DNA
cgtgtccttcgatagctcagttggtagagcggagga

SEQ ID NO: 30646 - DNA, 28 bp, synthetic construct
  misc_feature 1..28: note = Probe
  source 1..28: mol_type = other DNA
cgttaacttccaattaactagttttgac

SEQ ID NO: 30647 - DNA, 26 bp, synthetic construct
  misc_feature 1..26: note = Probe
  source 1..26: mol_type = other DNA
cgttagtctaggctgtcagctcttcc

SEQ ID NO: 30648 - DNA, 16 bp, synthetic construct
  misc_feature 1..16: note = Probe
  source 1..16: mol_type = other DNA
cgttcaggtcgcagtc

SEQ ID NO: 30649 - DNA, 17 bp, synthetic construct
  misc_feature 1..17: note = Probe
  source 1..17: mol_type = other DNA
cgttcaggtcgcagtct

SEQ ID NO: 30650 - DNA, 18 bp, synthetic construct
  misc_feature 1..18: note = Probe
  source 1..18: mol_type = other DNA
cgttcaggtcgcagtctc

SEQ ID NO: 30651 - DNA, 19 bp, synthetic construct
  misc_feature 1..19: note = Probe
  source 1..19: mol_type = other DNA
cgttcaggtcgcagtctcc

SEQ ID NO: 30652 - DNA, 20 bp, synthetic construct
  misc_feature 1..20: note = Probe
  source 1..20: mol_type = other DNA
cgttcaggtcgcagtctccc

SEQ ID NO: 30653 - DNA, 15 bp, synthetic construct
  misc_feature 1..15: note = Probe
  source 1..15: mol_type = other DNA
cgttggtctaggggt

SEQ ID NO: 30654 - DNA, 16 bp, synthetic construct
  misc_feature 1..16: note = Probe
  source 1..16: mol_type = other DNA
cgttggtctaggggta

SEQ ID NO: 30655 - DNA, 17 bp, synthetic construct
  misc_feature 1..17: note = Probe
  source 1..17: mol_type = other DNA
cgttggtctaggggtat

SEQ ID NO: 30656 - DNA, 19 bp, synthetic construct
  misc_feature 1..19: note = Probe
  source 1..19: mol_type = other DNA
cgttggtctaggggtatga

SEQ ID NO: 30657 - DNA, 24 bp, synthetic construct
  misc_feature 1..24: note = Probe
  source 1..24: mol_type = other DNA
cgttggtctaggggtatgattctc

SEQ ID NO: 30658 - DNA, 27 bp, synthetic construct
  misc_feature 1..27: note = Probe
  source 1..27: mol_type = other DNA
cgttggtctaggggtatgattctcgct

SEQ ID NO: 30659 - DNA, 36 bp, synthetic construct
  misc_feature 1..36: note = Probe
  source 1..36: mol_type = other DNA
cgttggtggtatagtggtaagcatagctgccttcca

SEQ ID NO: 30660 - DNA, 36 bp, synthetic construct
  misc_feature 1..36: note = Probe
  source 1..36: mol_type = other DNA
cgttggtggtatagtggtgagcatagctgccttcca

SEQ ID NO: 30661 - DNA, 50 bp, synthetic construct; identical to SEQ ID NO: 19395
  misc_feature 1..50: note = Probe
  source 1..50: mol_type = other DNA

SEQ ID NO: 30662 - DNA, 19 bp, synthetic construct
  misc_feature 1..19: note = Probe
  source 1..19: mol_type = other DNA
ctaaacctagccccaaacc

SEQ ID NO: 30663 - DNA, 28 bp, synthetic construct
  misc_feature 1..28: note = Probe
  source 1..28: mol_type = other DNA
ctaaacctagccccaaacccactccacc

SEQ ID NO: 30664 - DNA, 29 bp, synthetic construct
  misc_feature 1..29: note = Probe
  source 1..29: mol_type = other DNA
ctaaacctagccccaaacccactccacct

SEQ ID NO: 30665 - DNA, 15 bp, synthetic construct
  misc_feature 1..15: note = Probe
  source 1..15: mol_type = other DNA
ctaaagacaggggtt

SEQ ID NO: 30666 - DNA, 16 bp, synthetic construct
  misc_feature 1..16: note = Probe
  source 1..16: mol_type = other DNA
ctaaagacaggggtta

SEQ ID NO: 30667 - DNA, 17 bp, synthetic construct
  misc_feature 1..17: note = Probe
  source 1..17: mol_type = other DNA
ctaaagacaggggttag

SEQ ID NO: 30668 - DNA, 18 bp, synthetic construct
  misc_feature 1..18: note = Probe
  source 1..18: mol_type = other DNA
ctaaagacaggggttagg

SEQ ID NO: 30669 - DNA, 19 bp, synthetic construct
  misc_feature 1..19: note = Probe
  source 1..19: mol_type = other DNA
ctaaagacaggggttaggc

SEQ ID NO: 30670 - DNA, 20 bp, synthetic construct
  misc_feature 1..20: note = Probe
  source 1..20: mol_type = other DNA
ctaaagacaggggttaggcc

SEQ ID NO: 30671 - DNA, 21 bp, synthetic construct
  misc_feature 1..21: note = Probe
  source 1..21: mol_type = other DNA
ctaaagacaggggttaggcct

SEQ ID NO: 30672 - DNA, 22 bp, synthetic construct
  misc_feature 1..22: note = Probe
  source 1..22: mol_type = other DNA
ctaaagacaggggttaggcctc

SEQ ID NO: 30673 - DNA, 23 bp, synthetic construct
  misc_feature 1..23: note = Probe
  source 1..23: mol_type = other DNA
ctaaagacaggggttaggcctct

SEQ ID NO: 30674 - DNA, 24 bp, synthetic construct
  misc_feature 1..24: note = Probe
  source 1..24: mol_type = other DNA
ctaaagacaggggttaggcctctt

SEQ ID NO: 30675 - DNA, 25 bp, synthetic construct
  misc_feature 1..25: note = Probe
  source 1..25: mol_type = other DNA
ctaaagacaggggttaggcctcttt

SEQ ID NO: 30676 - DNA, 26 bp, synthetic construct
  misc_feature 1..26: note = Probe
  source 1..26: mol_type = other DNA
ctaaagacaggggttaggcctctttt

SEQ ID NO: 30677 - DNA, 27 bp, synthetic construct
  misc_feature 1..27: note = Probe
  source 1..27: mol_type = other DNA
ctaaagacaggggttaggcctcttttt

SEQ ID NO: 30678 - DNA, 28 bp, synthetic construct
  misc_feature 1..28: note = Probe
  source 1..28: mol_type = other DNA
ctaaagacaggggttaggcctcttttta

SEQ ID NO: 30679 - DNA, 29 bp, synthetic construct
  misc_feature 1..29: note = Probe
  source 1..29: mol_type = other DNA
ctaaagacaggggttaggcctctttttac

SEQ ID NO: 30680 - DNA, 30 bp, synthetic construct; identical to SEQ ID NO: 5141
  misc_feature 1..30: note = Probe
  source 1..30: mol_type = other DNA

SEQ ID NO: 30681 - DNA, 31 bp, synthetic construct; identical to SEQ ID NO: 5142
  misc_feature 1..31: note = Probe
  source 1..31: mol_type = other DNA

SEQ ID NO: 30682 - DNA, 32 bp, synthetic construct; identical to SEQ ID NO: 5143
  misc_feature 1..32: note = Probe
  source 1..32: mol_type = other DNA

SEQ ID NO: 30683 - DNA, 33 bp, synthetic construct; identical to SEQ ID NO: 5144
  misc_feature 1..33: note = Probe
  source 1..33: mol_type = other DNA

SEQ ID NO: 30684 - DNA, 34 bp, synthetic construct; identical to SEQ ID NO: 5145
  misc_feature 1..34: note = Probe
  source 1..34: mol_type = other DNA

SEQ ID NO: 30685 - DNA, 15 bp, synthetic construct
  misc_feature 1..15: note = Probe
  source 1..15: mol_type = other DNA
ctaaaggtccctggt

SEQ ID NO: 30686 - DNA, 16 bp, synthetic construct
  misc_feature 1..16: note = Probe
  source 1..16: mol_type = other DNA
ctaaaggtccctggtt

SEQ ID NO: 30687 - DNA, 18 bp, synthetic construct
  misc_feature 1..18: note = Probe
  source 1..18: mol_type = other DNA
ctaaataagctatcgggc

SEQ ID NO: 30688 - DNA, 19 bp, synthetic construct
  misc_feature 1..19: note = Probe
  source 1..19: mol_type = other DNA
ctaaataagctatcgggcc

SEQ ID NO: 30689 - DNA, 20 bp, synthetic construct
  misc_feature 1..20: note = Probe
  source 1..20: mol_type = other DNA
ctaaataagctatcgggccc

SEQ ID NO: 30690 - DNA, 21 bp, synthetic construct
  misc_feature 1..21: note = Probe
  source 1..21: mol_type = other DNA
ctaaataagctatcgggccca

SEQ ID NO: 30691 - DNA, 22 bp, synthetic construct
  misc_feature 1..22: note = Probe
  source 1..22: mol_type = other DNA
ctaaataagctatcgggcccat

SEQ ID NO: 30692 - DNA, 25 bp, synthetic construct
  misc_feature 1..25: note = Probe
  source 1..25: mol_type = other DNA
ctaaataagctatcgggcccatacc

SEQ ID NO: 30693 - DNA, 36 bp, synthetic construct
  misc_feature 1..36: note = Probe
  source 1..36: mol_type = other DNA
ctaaataagctatcgggcccataccccgaaaatgtt

SEQ ID NO: 30694 - DNA, 19 bp, synthetic construct
  misc_feature 1..19: note = Probe
  source 1..19: mol_type = other DNA
ctaaatactaccgtatggc

SEQ ID NO: 30695 - DNA, 15 bp, synthetic construct
  misc_feature 1..15: note = Probe
  source 1..15: mol_type = other DNA
ctaacaacatggctt

SEQ ID NO: 30696 - DNA, 19 bp, synthetic construct
  misc_feature 1..19: note = Probe
  source 1..19: mol_type = other DNA
ctaacaacatggctttctc

SEQ ID NO: 30697 - DNA, 22 bp, synthetic construct
  misc_feature 1..22: note = Probe
  source 1..22: mol_type = other DNA
ctaacaacatggctttctcaac

SEQ ID NO: 30698 - DNA, 23 bp, synthetic construct
  misc_feature 1..23: note = Probe
  source 1..23: mol_type = other DNA
ctaacacgcgaaaggtccccggt

SEQ ID NO: 30699 - DNA, 15 bp, synthetic construct
  misc_feature 1..15: note = Probe
  source 1..15: mol_type = other DNA
ctaactcatgccccc

SEQ ID NO: 30700 - DNA, 20 bp, synthetic construct
  misc_feature 1..20: note = Probe
  source 1..20: mol_type = other DNA
ctaactcatgcccccatgtc

SEQ ID NO: 30701 - DNA, 21 bp, synthetic construct
  misc_feature 1..21: note = Probe
  source 1..21: mol_type = other DNA
ctaactcatgcccccatgtct

SEQ ID NO: 30702 - DNA, 24 bp, synthetic construct
  misc_feature 1..24: note = Probe
  source 1..24: mol_type = other DNA
ctaactcatgcccccatgtctaac

SEQ ID NO: 30703 - DNA, 25 bp, synthetic construct
  misc_feature 1..25: note = Probe
  source 1..25: mol_type = other DNA
ctaactcatgcccccatgtctaaca

SEQ ID NO: 30704 - DNA, 28 bp, synthetic construct
  misc_feature 1..28: note = Probe
  source 1..28: mol_type = other DNA
ctaactcatgcccccatgtctaacaaca

SEQ ID NO: 30705 - DNA, 33 bp, synthetic construct; identical to SEQ ID NO: 5158
  misc_feature 1..33: note = Probe
  source 1..33: mol_type = other DNA

SEQ ID NO: 30706 - DNA, 36 bp, synthetic construct; identical to SEQ ID NO: 5161
  misc_feature 1..36: note = Probe
  source 1..36: mol_type = other DNA

SEQ ID NO: 30707 - DNA, 41 bp, synthetic construct; identical to SEQ ID NO: 5166
  misc_feature 1..41: note = Probe
  source 1..41: mol_type = other DNA

SEQ ID NO: 30708 - DNA, 42 bp, synthetic construct; identical to SEQ ID NO: 5167
  misc_feature 1..42: note = Probe
  source 1..42: mol_type = other DNA

SEQ ID NO: 30709 - DNA, 36 bp, synthetic construct
  misc_feature 1..36: note = Probe
  source 1..36: mol_type = other DNA
ctaacttagcattaaccttttaagttaaagattaag

SEQ ID NO: 30710 - DNA, 19 bp, synthetic construct
  misc_feature 1..19: note = Probe
  source 1..19: mol_type = other DNA
ctaagccagggattgtggg

SEQ ID NO: 30711 - DNA, 21 bp, synthetic construct
  misc_feature 1..21: note = Probe
  source 1..21: mol_type = other DNA
ctaagccagggattgtgggtt

SEQ ID NO: 30712 - DNA, 36 bp, synthetic construct
  misc_feature 1..36: note = Probe
  source 1..36: mol_type = other DNA
ctaagccagggattgtgggttcgagtcccacctggg

SEQ ID NO: 30713 - DNA, 36 bp, synthetic construct
  misc_feature 1..36: note = Probe
  source 1..36: mol_type = other DNA
ctaagccagggattgtgggttcgagtcccatctggg

SEQ ID NO: 30714 - DNA, 41 bp, synthetic construct
  misc_feature 1..41: note = Probe
  source 1..41: mol_type = other DNA
ctaagccagggattgtgggttcgagtcccatctggggtggc

SEQ ID NO: 30715 - DNA, 42 bp, synthetic construct
  misc_feature 1..42: note = Probe
  source 1..42: mol_type = other DNA
ctaagccagggattgtgggttcgagtcccatctggggtggcc

SEQ ID NO: 30716 - DNA, 17 bp, synthetic construct
  misc_feature 1..17: note = Probe
  source 1..17: mol_type = other DNA
ctaaggactgcaaaacc

SEQ ID NO: 30717 - DNA, 18 bp, synthetic construct
  misc_feature 1..18: note = Probe
  source 1..18: mol_type = other DNA
ctaaggactgcaaaaccc

SEQ ID NO: 30718 - DNA, 19 bp, synthetic construct
  misc_feature 1..19: note = Probe
  source 1..19: mol_type = other DNA
ctaaggactgcaaaacccc

SEQ ID NO: 30719 - DNA, 24 bp, synthetic construct
  misc_feature 1..24: note = Probe
  source 1..24: mol_type = other DNA
ctaaggactgcaaaaccccactct

SEQ ID NO: 30720 - DNA, 18 bp, synthetic construct
  misc_feature 1..18: note = Probe
  source 1..18: mol_type = other DNA
ctaagtgtttgtgggttt

SEQ ID NO: 30721 - DNA, 23 bp, synthetic construct
  misc_feature 1..23: note = Probe
  source 1..23: mol_type = other DNA
ctaagtgtttgtgggtttaagtc

SEQ ID NO: 30722 - DNA, 36 bp, synthetic construct; identical to SEQ ID NO: 19446
  misc_feature 1..36: note = Probe
  source 1..36: mol_type = other DNA

SEQ ID NO: 30723 - DNA, 36 bp, synthetic construct
  misc_feature 1..36: note = Probe
  source 1..36: mol_type = other DNA
ctaatccattgtgctttgcacgcgtgggttcgaatc

SEQ ID NO: 30724 - DNA, 50 bp, synthetic construct
  misc_feature 1..50: note = Probe
  source 1..50: mol_type = other DNA
ctaatccattgtgctttgcacgcgtgggttcgaatcccatcctcgtcggc

SEQ ID NO: 30725 - DNA, 16 bp, synthetic construct
  misc_feature 1..16: note = Probe
  source 1..16: mol_type = other DNA
ctaatggataaggcac

SEQ ID NO: 30726 - DNA, 17 bp, synthetic construct
  misc_feature 1..17: note = Probe
  source 1..17: mol_type = other DNA
ctaatggataaggcact

SEQ ID NO: 30727 - DNA, 18 bp, synthetic construct
  misc_feature 1..18: note = Probe
  source 1..18: mol_type = other DNA
ctaatggataaggcactg

SEQ ID NO: 30728 - DNA, 19 bp, synthetic construct
  misc_feature 1..19: note = Probe
  source 1..19: mol_type = other DNA
ctaatggataaggcactgg

SEQ ID NO: 30729 - DNA, 15 bp, synthetic construct
  misc_feature 1..15: note = Probe
  source 1..15: mol_type = other DNA
ctaatggtggagtta

SEQ ID NO: 30730 - DNA, 20 bp, synthetic construct
  misc_feature 1..20: note = Probe
  source 1..20: mol_type = other DNA
ctaatggtggagttaaagac

SEQ ID NO: 30731 - DNA, 32 bp, synthetic construct
  misc_feature 1..32: note = Probe
  source 1..32: mol_type = other DNA
ctaatggtggagttaaagactttttctctgat

SEQ ID NO: 30732 - DNA, 17 bp, synthetic construct
  misc_feature 1..17: note = Probe
  source 1..17: mol_type = other DNA
ctaccccctctagagcc

SEQ ID NO: 30733 - DNA, 36 bp, synthetic construct
  misc_feature 1..36: note = Probe
  source 1..36: mol_type = other DNA
ctacgggagcccggatagctcagtcggtagagcatc

SEQ ID NO: 30734 - DNA, 17 bp, synthetic construct
  misc_feature 1..17: note = Probe
  source 1..17: mol_type = other DNA
ctactataaccacccta

SEQ ID NO: 30735 - DNA, 22 bp, synthetic construct
  misc_feature 1..22: note = Probe
  source 1..22: mol_type = other DNA
ctagccccaaacccactccacc

SEQ ID NO: 30736 - DNA, 23 bp, synthetic construct
  misc_feature 1..23: note = Probe
  source 1..23: mol_type = other DNA
ctagccccaaacccactccacct

SEQ ID NO: 30737 - DNA, 17 bp, synthetic construct
  misc_feature 1..17: note = Probe
  source 1..17: mol_type = other DNA
ctagcctttctattagc

SEQ ID NO: 30738 - DNA, 18 bp, synthetic construct
  misc_feature 1..18: note = Probe
  source 1..18: mol_type = other DNA
ctagctcagtcggtagag

SEQ ID NO: 30739 - DNA, 26 bp, synthetic construct
  misc_feature 1..26: note = Probe
  source 1..26: mol_type = other DNA
ctagctcagtcggtagagcatgagac

SEQ ID NO: 30740 - DNA, 27 bp, synthetic construct
  misc_feature 1..27: note = Probe
  source 1..27: mol_type = other DNA
ctagctcagtcggtagagcatgagact

SEQ ID NO: 30741 - DNA, 29 bp, synthetic construct
  misc_feature 1..29: note = Probe
  source 1..29: mol_type = other DNA
ctagctcagtcggtagagcatgggactct

SEQ ID NO: 30742 - DNA, 22 bp, synthetic construct
  misc_feature 1..22: note = Probe
  source 1..22: mol_type = other DNA
ctaggactatgagaatcgaacc

SEQ ID NO: 30743 - DNA, 23 bp, synthetic construct
  misc_feature 1..23: note = Probe
  source 1..23: mol_type = other DNA
ctaggactatgagaatcgaaccc

SEQ ID NO: 30744 - DNA, 17 bp, synthetic construct
  misc_feature 1..17: note = Probe
  source 1..17: mol_type = other DNA
ctaggggtatgattctc

SEQ ID NO: 30745 - DNA, 20 bp, synthetic construct
  misc_feature 1..20: note = Probe
  source 1..20: mol_type = other DNA
ctaggggtatgattctcgct

SEQ ID NO: 30746 - DNA, 21 bp, synthetic construct
  misc_feature 1..21: note = Probe
  source 1..21: mol_type = other DNA
ctaggggtatgattctcgctt

SEQ ID NO: 30747 - DNA, 23 bp, synthetic construct
  misc_feature 1..23: note = Probe
  source 1..23: mol_type = other DNA
ctagtaaacaggagatcctgggt

SEQ ID NO: 30748 - DNA, 38 bp, synthetic construct; identical to SEQ ID NO: 13244
  misc_feature 1..38: note = Probe
  source 1..38: mol_type = other DNA

SEQ ID NO: 30749 - DNA, 36 bp, synthetic construct
  misc_feature 1..36: note = Probe
  source 1..36: mol_type = other DNA
ctataagcattggtggttcagtggtagaattctcgc

SEQ ID NO: 30750 - DNA, 37 bp, synthetic construct
  misc_feature 1..37: note = Probe
  source 1..37: mol_type = other DNA
ctataagcattggtggttcagtggtagaattctcgcc

SEQ ID NO: 30751 - DNA, 38 bp, synthetic construct
  misc_feature 1..38: note = Probe
  source 1..38: mol_type = other DNA
ctataagcattggtggttcagtggtagaattctcgcct

SEQ ID NO: 30752 - DNA, 16 bp, synthetic construct
  misc_feature 1..16: note = Probe
  source 1..16: mol_type = other DNA
ctatagcaccccctct

SEQ ID NO: 30753 - DNA, 19 bp, synthetic construct
  misc_feature 1..19: note = Probe
  source 1..19: mol_type = other DNA
ctatagcaccccctctacc

SEQ ID NO: 30754 - DNA, 20 bp, synthetic construct
  misc_feature 1..20: note = Probe
  source 1..20: mol_type = other DNA
ctatagcaccccctctaccc

SEQ ID NO: 30755 - DNA, 21 bp, synthetic construct
  misc_feature 1..21: note = Probe
  source 1..21: mol_type = other DNA
ctatagcaccccctctacccc

SEQ ID NO: 30756 - DNA, 22 bp, synthetic construct
  misc_feature 1..22: note = Probe
  source 1..22: mol_type = other DNA
ctatagcaccccctctaccccc

SEQ ID NO: 30757 - DNA, 23 bp, synthetic construct
  misc_feature 1..23: note = Probe
  source 1..23: mol_type = other DNA
ctatagcaccccctctaccccct

SEQ ID NO: 30758 - DNA, 25 bp, synthetic construct
  misc_feature 1..25: note = Probe
  source 1..25: mol_type = other DNA
ctatagcaccccctctaccccctct

SEQ ID NO: 30759 - DNA, 26 bp, synthetic construct
  misc_feature 1..26: note = Probe
  source 1..26: mol_type = other DNA
ctatagcaccccctctaccccctcta

SEQ ID NO: 30760 - DNA, 28 bp, synthetic construct
  misc_feature 1..28: note = Probe
  source 1..28: mol_type = other DNA
ctatagcaccccctctaccccctctaga

SEQ ID NO: 30761 - DNA, 31 bp, synthetic construct
  misc_feature 1..31: note = Probe
  source 1..31: mol_type = other DNA
ctatagcaccccctctaccccctctagagcc

SEQ ID NO: 30762 - DNA, 15 bp, synthetic construct
  misc_feature 1..15: note = Probe
  source 1..15: mol_type = other DNA
ctatccattggtctt

SEQ ID NO: 30763 - DNA, 16 bp, synthetic construct
  misc_feature 1..16: note = Probe
  source 1..16: mol_type = other DNA
ctatccattggtctta

SEQ ID NO: 30764 - DNA, 17 bp, synthetic construct
  misc_feature 1..17: note = Probe
  source 1..17: mol_type = other DNA
ctatccattggtcttag

SEQ ID NO: 30765 - DNA, 20 bp, synthetic construct
  misc_feature 1..20: note = Probe
  source 1..20: mol_type = other DNA
ctatccattggtcttaggcc

SEQ ID NO: 30766 - DNA, 23 bp, synthetic construct
  misc_feature 1..23: note = Probe
  source 1..23: mol_type = other DNA
ctatccattggtcttaggcccca

SEQ ID NO: 30767 - DNA, 36 bp, synthetic construct
  misc_feature 1..36: note = Probe
  source 1..36: mol_type = other DNA
ctatccattggtcttaggccccaaaaattttggtgc

SEQ ID NO: 30768 - DNA, 15 bp, synthetic construct
  misc_feature 1..15: note = Probe
  source 1..15: mol_type = other DNA
ctatcgggcccatac

SEQ ID NO: 30769 - DNA, 16 bp, synthetic construct
  misc_feature 1..16: note = Probe
  source 1..16: mol_type = other DNA
ctatcgggcccatacc

SEQ ID NO: 30770 - DNA, 17 bp, synthetic construct
  misc_feature 1..17: note = Probe
  source 1..17: mol_type = other DNA
ctatcgggcccataccc

SEQ ID NO: 30771 - DNA, 31 bp, synthetic construct
  misc_feature 1..31: note = Probe
  source 1..31: mol_type = other DNA
ctatcgggcccataccccgaaaatgttggtt

SEQ ID NO: 30772 - DNA, 17 bp, synthetic construct
  misc_feature 1..17: note = Probe
  source 1..17: mol_type = other DNA
ctatctccccttttata

SEQ ID NO: 30773 - DNA, 18 bp, synthetic construct
  misc_feature 1..18: note = Probe
  source 1..18: mol_type = other DNA
ctatctccccttttatac

SEQ ID NO: 30774 - DNA, 19 bp, synthetic construct
  misc_feature 1..19: note = Probe
  source 1..19: mol_type = other DNA
ctatctccccttttatact

SEQ ID NO: 30775 - DNA, 23 bp, synthetic construct
  misc_feature 1..23: note = Probe
  source 1..23: mol_type = other DNA
ctatctccccttttatactaata

SEQ ID NO: 30776 - DNA, 15 bp, synthetic construct
  misc_feature 1..15: note = Probe
  source 1..15: mol_type = other DNA
ctatgagaatcgaac

SEQ ID NO: 30777 - DNA, 16 bp, synthetic construct
  misc_feature 1..16: note = Probe
  source 1..16: mol_type = other DNA
ctatgagaatcgaacc

SEQ ID NO: 30778 - DNA, 17 bp, synthetic construct
  misc_feature 1..17: note = Probe
  source 1..17: mol_type = other DNA
ctatgagaatcgaaccc

SEQ ID NO: 30779 - DNA, 25 bp, synthetic construct
  misc_feature 1..25: note = Probe
  source 1..25: mol_type = other DNA
ctatgagaatcgaacccatccctga

SEQ ID NO: 30780 - DNA, 26 bp, synthetic construct
  misc_feature 1..26: note = Probe
  source 1..26: mol_type = other DNA
ctatgagaatcgaacccatccctgag

SEQ ID NO: 30781 - DNA, 27 bp, synthetic construct
  misc_feature 1..27: note = Probe
  source 1..27: mol_type = other DNA
ctatgagaatcgaacccatccctgaga

SEQ ID NO: 30782 - DNA, 35 bp, synthetic construct
  misc_feature 1..35: note = Probe
  source 1..35: mol_type = other DNA
ctcaaagcaatacactgaaaatgtttagacgggct

SEQ ID NO: 30783 - DNA, 36 bp, synthetic construct
  misc_feature 1..36: note = Probe
  source 1..36: mol_type = other DNA
ctcaaagcaatacactgaaaatgtttagacgggctc

SEQ ID NO: 30784 - DNA, 15 bp, synthetic construct
  misc_feature 1..15: note = Probe
  source 1..15: mol_type = other DNA
ctcacaagaactgct

SEQ ID NO: 30785 - DNA, 20 bp, synthetic construct
  misc_feature 1..20: note = Probe
  source 1..20: mol_type = other DNA
ctcacaagaactgctaactc

SEQ ID NO: 30786 - DNA, 21 bp, synthetic construct
  misc_feature 1..21: note = Probe
  source 1..21: mol_type = other DNA
ctcacaagaactgctaactca

SEQ ID NO: 30787 - DNA, 23 bp, synthetic construct
  misc_feature 1..23: note = Probe
  source 1..23: mol_type = other DNA
ctcacaagaactgctaactcatg

SEQ ID NO: 30788 - DNA, 25 bp, synthetic construct
  misc_feature 1..25: note = Probe
  source 1..25: mol_type = other DNA
ctcacaagaactgctaactcatgcc

SEQ ID NO: 30789 - DNA, 26 bp, synthetic construct
  misc_feature 1..26: note = Probe
  source 1..26: mol_type = other DNA
ctcacaagaactgctaactcatgccc

SEQ ID NO: 30790 - DNA, 28 bp, synthetic construct
  misc_feature 1..28: note = Probe
  source 1..28: mol_type = other DNA
ctcacaagaactgctaactcatgccccc

SEQ ID NO: 30791 - DNA, 33 bp, synthetic construct
  misc_feature 1..33: note = Probe
  source 1..33: mol_type = other DNA
ctcacaagaactgctaactcatgcccccatgtc

SEQ ID NO: 30792 - DNA, 38 bp, synthetic construct
  misc_feature 1..38: note = Probe
  source 1..38: mol_type = other DNA
ctcacaagaactgctaactcatgcccccatgtctaaca

SEQ ID NO: 30793 - DNA, 23 bp, synthetic construct
  misc_feature 1..23: note = Probe
  source 1..23: mol_type = other DNA
ctcacacgcgaaaggtccccggt

SEQ ID NO: 30794 - DNA, 22 bp, synthetic construct
  misc_feature 1..22: note = Probe
  source 1..22: mol_type = other DNA
ctcaccgccgcagcccgggttt

SEQ ID NO: 30795 - DNA, 15 bp, synthetic construct
  misc_feature 1..15: note = Probe
  source 1..15: mol_type = other DNA
ctcaccgccgcggcc

SEQ ID NO: 30796 - DNA, 16 bp, synthetic construct
  misc_feature 1..16: note = Probe
  source 1..16: mol_type = other DNA
ctcaccgccgcggccc

SEQ ID NO: 30797 - DNA, 17 bp, synthetic construct
  misc_feature 1..17: note = Probe
  source 1..17: mol_type = other DNA
ctcaccgccgcggcccg

SEQ ID NO: 30798 - DNA, 20 bp, synthetic construct
  misc_feature 1..20: note = Probe
  source 1..20: mol_type = other DNA
ctcaccgccgcggcccgggt

SEQ ID NO: 30799 - DNA, 21 bp, synthetic construct
  misc_feature 1..21: note = Probe
  source 1..21: mol_type = other DNA
ctcaccgccgcggcccgggtt

SEQ ID NO: 30800 - DNA, 22 bp, synthetic construct
  misc_feature 1..22: note = Probe
  source 1..22: mol_type = other DNA
ctcaccgccgcggcccgggttc

SEQ ID NO: 30801 - DNA, 40 bp, synthetic construct
  misc_feature 1..40: note = Probe
  source 1..40: mol_type = other DNA
ctcaccgccgcggcccgggttcgattcccggtcagggaaa

SEQ ID NO: 30802 - DNA, 42 bp, synthetic construct; identical to SEQ ID NO: 19506
  misc_feature 1..42: note = Probe
  source 1..42: mol_type = other DNA

SEQ ID NO: 30803 - DNA, 40 bp, synthetic construct
  misc_feature 1..40: note = Probe
  source 1..40: mol_type = other DNA
ctcaccgccgcggcccgggttcgattcccggtcagggaag

SEQ ID NO: 30804 - DNA, 41 bp, synthetic construct
  misc_feature 1..41: note = Probe
  source 1..41: mol_type = other DNA
ctcaccgccgcggcccgggttcgattcccggtcagggaagc

SEQ ID NO: 30805 - DNA, 42 bp, synthetic construct; identical to SEQ ID NO: 19507
  misc_feature 1..42: note = Probe
  source 1..42: mol_type = other DNA

SEQ ID NO: 30806 - DNA, 40 bp, synthetic construct
  misc_feature 1..40: note = Probe
  source 1..40: mol_type = other DNA
ctcaccgccgcggcccgggttcgattcccggtcagggaat

SEQ ID NO: 30807 - DNA, 42 bp, synthetic construct; identical to SEQ ID NO: 19509
  misc_feature 1..42: note = Probe
  source 1..42: mol_type = other DNA

SEQ ID NO: 30808 - DNA, 18 bp, synthetic construct
  misc_feature 1..18: note = Probe
  source 1..18: mol_type = other DNA
ctcacctggagcatgttt

SEQ ID NO: 30809 - DNA, 19 bp, synthetic construct
  misc_feature 1..19: note = Probe
  source 1..19: mol_type = other DNA
ctcacctggagcatgtttt

SEQ ID NO: 30810 - DNA, 20 bp, synthetic construct
  misc_feature 1..20: note = Probe
  source 1..20: mol_type = other DNA
ctcacctggagcatgttttc

SEQ ID NO: 30811 - DNA, 21 bp, synthetic construct
  misc_feature 1..21: note = Probe
  source 1..21: mol_type = other DNA
ctcacctggagcatgttttct

SEQ ID NO: 30812 - DNA, 22 bp, synthetic construct
  misc_feature 1..22: note = Probe
  source 1..22: mol_type = other DNA
ctcacctggagcatgttttctt

SEQ ID NO: 30813 - DNA, 17 bp, synthetic construct
  misc_feature 1..17: note = Probe
  source 1..17: mol_type = other DNA
ctcagaaggtctcactt

SEQ ID NO: 30814 - DNA, 18 bp, synthetic construct
  misc_feature 1..18: note = Probe
  source 1..18: mol_type = other DNA
ctcagaaggtctcacttt

SEQ ID NO: 30815 - DNA, 19 bp, synthetic construct
  misc_feature 1..19: note = Probe
  source 1..19: mol_type = other DNA
ctcagaaggtctcactttt

SEQ ID NO: 30816 - DNA, 22 bp, synthetic construct
  misc_feature 1..22: note = Probe
  source 1..22: mol_type = other DNA
ctcagggatgggttcgattctc

SEQ ID NO: 30817 - DNA, 29 bp, synthetic construct
  misc_feature 1..29: note = Probe
  source 1..29: mol_type = other DNA
ctcagggatgggttcgattctcatagtcc

SEQ ID NO: 30818 - DNA, 30 bp, synthetic construct; identical to SEQ ID NO: 13248
  misc_feature 1..30: note = Probe
  source 1..30: mol_type = other DNA

SEQ ID NO: 30819 - DNA, 23 bp, synthetic construct
  misc_feature 1..23: note = Probe
  source 1..23: mol_type = other DNA
ctcaggggttagagcactggtct

SEQ ID NO: 30820 - DNA, 19 bp, synthetic construct
  misc_feature 1..19: note = Probe
  source 1..19: mol_type = other DNA
ctcagtaagttgcaatact

SEQ ID NO: 30821 - DNA, 28 bp, synthetic construct
  misc_feature 1..28: note = Probe
  source 1..28: mol_type = other DNA
ctcagtaagttgcaatacttaatttctg

SEQ ID NO: 30822 - DNA, 23 bp, synthetic construct
  misc_feature 1..23: note = Probe
  source 1..23: mol_type = other DNA
ctcagtcggctagagcgtggtgc

SEQ ID NO: 30823 - DNA, 15 bp, synthetic construct
  misc_feature 1..15: note = Probe
  source 1..15: mol_type = other DNA
ctcagtcggtagagc

SEQ ID NO: 30824 - DNA, 18 bp, synthetic construct
  misc_feature 1..18: note = Probe
  source 1..18: mol_type = other DNA
ctcagtcggtagagcatc

SEQ ID NO: 30825 - DNA, 23 bp, synthetic construct
  misc_feature 1..23: note = Probe
  source 1..23: mol_type = other DNA
ctcagtcggtagagcatgagact

SEQ ID NO: 30826 - DNA, 25 bp, synthetic construct
  misc_feature 1..25: note = Probe
  source 1..25: mol_type = other DNA
ctcagtcggtagagcatgagactct

SEQ ID NO: 30827 - DNA, 22 bp, synthetic construct
  misc_feature 1..22: note = Probe
  source 1..22: mol_type = other DNA
ctcagtcggtagagcatgggac

SEQ ID NO: 30828 - DNA, 25 bp, synthetic construct
  misc_feature 1..25: note = Probe
  source 1..25: mol_type = other DNA
ctcagtcggtagagcatgggactct

SEQ ID NO: 30829 - DNA, 32 bp, synthetic construct
  misc_feature 1..32: note = Probe
  source 1..32: mol_type = other DNA
ctcagtcggtagagcatgggactcttaatccc

SEQ ID NO: 30830 - DNA, 23 bp, synthetic construct
  misc_feature 1..23: note = Probe
  source 1..23: mol_type = other DNA
ctcataatctgaaggtcctgagt

SEQ ID NO: 30831 - DNA, 21 bp, synthetic construct
  misc_feature 1..21: note = Probe
  source 1..21: mol_type = other DNA
ctcatgcccccatgtctaaca

SEQ ID NO: 30832 - DNA, 24 bp, synthetic construct
  misc_feature 1..24: note = Probe
  source 1..24: mol_type = other DNA
ctcatgcccccatgtctaacaaca

SEQ ID NO: 30833 - DNA, 36 bp, synthetic construct; identical to SEQ ID NO: 5242
  misc_feature 1..36: note = Probe
  source 1..36: mol_type = other DNA

SEQ ID NO: 30834 - DNA, 38 bp, synthetic construct; identical to SEQ ID NO: 5244
  misc_feature 1..38: note = Probe
  source 1..38: mol_type = other DNA

SEQ ID NO: 30835 - DNA, 17 bp, synthetic construct
  misc_feature 1..17: note = Probe
  source 1..17: mol_type = other DNA
ctccagatcagaaggct

SEQ ID NO: 30836 - DNA, 22 bp, synthetic construct
  misc_feature 1..22: note = Probe
  source 1..22: mol_type = other DNA
ctccagatcagaaggctgcgtg

SEQ ID NO: 30837 - DNA, 15 bp, synthetic construct
  misc_feature 1..15: note = Probe
  source 1..15: mol_type = other DNA
ctcccgccttttttc

SEQ ID NO: 30838 - DNA, 16 bp, synthetic construct
  misc_feature 1..16: note = Probe
  source 1..16: mol_type = other DNA
ctcccgccttttttcc

SEQ ID NO: 30839 - DNA, 17 bp, synthetic construct
  misc_feature 1..17: note = Probe
  source 1..17: mol_type = other DNA
ctcccgccttttttccc

SEQ ID NO: 30840 - DNA, 18 bp, synthetic construct
  misc_feature 1..18: note = Probe
  source 1..18: mol_type = other DNA
ctcccgccttttttcccg

SEQ ID NO: 30841 - DNA, 19 bp, synthetic construct
  misc_feature 1..19: note = Probe
  source 1..19: mol_type = other DNA
ctcccgccttttttcccgg

SEQ ID NO: 30842 - DNA, 20 bp, synthetic construct
  misc_feature 1..20: note = Probe
  source 1..20: mol_type = other DNA
ctcccgccttttttcccggc

SEQ ID NO: 30843 - DNA, 21 bp, synthetic construct
  misc_feature 1..21: note = Probe
  source 1..21: mol_type = other DNA
ctcccgccttttttcccggcg

SEQ ID NO: 30844 - DNA, 25 bp, synthetic construct
  misc_feature 1..25: note = Probe
  source 1..25: mol_type = other DNA
ctcccgccttttttcccggcggcgg

SEQ ID NO: 30845 - DNA, 26 bp, synthetic construct
  misc_feature 1..26: note = Probe
  source 1..26: mol_type = other DNA
ctcccgccttttttcccggcggcggg

SEQ ID NO: 30846 - DNA, 28 bp, synthetic construct
  misc_feature 1..28: note = Probe
  source 1..28: mol_type = other DNA
ctcccgccttttttcccggcggcgggag

SEQ ID NO: 30847 - DNA, 30 bp, synthetic construct; identical to SEQ ID NO: 5265
  misc_feature 1..30: note = Probe
  source 1..30: mol_type = other DNA

SEQ ID NO: 30848 - DNA, 17 bp, synthetic construct
  misc_feature 1..17: note = Probe
  source 1..17: mol_type = other DNA
ctcccggtatgggaaca

SEQ ID NO: 30849 - DNA, 17 bp, synthetic construct
  misc_feature 1..17: note = Probe
  source 1..17: mol_type = other DNA
ctcccggtatgggaacg

SEQ ID NO: 30850 - DNA, 16 bp, synthetic construct
  misc_feature 1..16: note = Probe
  source 1..16: mol_type = other DNA
ctcccggtgtgggaac

SEQ ID NO: 30851 - DNA, 17 bp, synthetic construct
  misc_feature 1..17: note = Probe
  source 1..17: mol_type = other DNA
ctcccggtgtgggaacg

SEQ ID NO: 30852 - DNA, 34 bp, synthetic construct; identical to SEQ ID NO: 5267
  misc_feature 1..34: note = Probe
  source 1..34: mol_type = other DNA

SEQ ID NO: 30853 - DNA, 35 bp, synthetic construct
  misc_feature 1..35: note = Probe
  source 1..35: mol_type = other DNA
ctccctggtggtctagtggttaggattcggcgctc

SEQ ID NO: 30854 - DNA, 36 bp, synthetic construct
  misc_feature 1..36: note = Probe
  source 1..36: mol_type = other DNA
ctccctggtggtctagtggttaggattcggcgctct

SEQ ID NO: 30855 - DNA, 19 bp, synthetic construct
  misc_feature 1..19: note = Probe
  source 1..19: mol_type = other DNA
ctccgaggtgattttcata

SEQ ID NO: 30856 - DNA, 15 bp, synthetic construct
  misc_feature 1..15: note = Probe
  source 1..15: mol_type = other DNA
ctccgtgccacctat

SEQ ID NO: 30857 - DNA, 16 bp, synthetic construct
  misc_feature 1..16: note = Probe
  source 1..16: mol_type = other DNA
ctccgtgccacctatc

SEQ ID NO: 30858 - DNA, 17 bp, synthetic construct
  misc_feature 1..17: note = Probe
  source 1..17: mol_type = other DNA
ctccgtgccacctatca

SEQ ID NO: 30859 - DNA, 19 bp, synthetic construct
  misc_feature 1..19: note = Probe
  source 1..19: mol_type = other DNA
ctccgtgccacctatcaca

SEQ ID NO: 30860 - DNA, 20 bp, synthetic construct
  misc_feature 1..20: note = Probe
  source 1..20: mol_type = other DNA
ctccgtgccacctatcacac

SEQ ID NO: 30861 - DNA, 21 bp, synthetic construct
  misc_feature 1..21: note = Probe
  source 1..21: mol_type = other DNA
ctccgtgccacctatcacacc

SEQ ID NO: 30862 - DNA, 22 bp, synthetic construct
  misc_feature 1..22: note = Probe
  source 1..22: mol_type = other DNA
ctccgtgccacctatcacaccc

SEQ ID NO: 30863 - DNA, 23 bp, synthetic construct
  misc_feature 1..23: note = Probe
  source 1..23: mol_type = other DNA
ctccgtgccacctatcacacccc

SEQ ID NO: 30864 - DNA, 24 bp, synthetic construct
  misc_feature 1..24: note = Probe
  source 1..24: mol_type = other DNA
ctccgtgccacctatcacacccca

SEQ ID NO: 30865 - DNA, 25 bp, synthetic construct
  misc_feature 1..25: note = Probe
  source 1..25: mol_type = other DNA
ctccgtgccacctatcacaccccat

SEQ ID NO: 30866 - DNA, 26 bp, synthetic construct
  misc_feature 1..26: note = Probe
  source 1..26: mol_type = other DNA
ctccgtgccacctatcacaccccatc

SEQ ID NO: 30867 - DNA, 27 bp, synthetic construct
  misc_feature 1..27: note = Probe
  source 1..27: mol_type = other DNA
ctccgtgccacctatcacaccccatcc

SEQ ID NO: 30868 - DNA, 28 bp, synthetic construct
  misc_feature 1..28: note = Probe
  source 1..28: mol_type = other DNA
ctccgtgccacctatcacaccccatcct

SEQ ID NO: 30869 - DNA, 29 bp, synthetic construct
  misc_feature 1..29: note = Probe
  source 1..29: mol_type = other DNA
ctccgtgccacctatcacaccccatccta

SEQ ID NO: 30870 - DNA, 30 bp, synthetic construct
  misc_feature 1..30: note = Probe
  source 1..30: mol_type = other DNA
ctccgtgccacctatcacaccccatcctaa

SEQ ID NO: 30871 - DNA, 31 bp, synthetic construct
  misc_feature 1..31: note = Probe
  source 1..31: mol_type = other DNA
ctccgtgccacctatcacaccccatcctaaa

SEQ ID NO: 30872 - DNA, 32 bp, synthetic construct
  misc_feature 1..32: note = Probe
  source 1..32: mol_type = other DNA
ctccgtgccacctatcacaccccatcctaaag

SEQ ID NO: 30873 - DNA, 15 bp, synthetic construct
  misc_feature 1..15: note = Probe
  source 1..15: mol_type = other DNA
ctcctggctggctcg

SEQ ID NO: 30874 - DNA, 16 bp, synthetic construct
  misc_feature 1..16: note = Probe
  source 1..16: mol_type = other DNA
ctcctggctggctcgc

SEQ ID NO: 30875 - DNA, 18 bp, synthetic construct
  misc_feature 1..18: note = Probe
  source 1..18: mol_type = other DNA
ctcctggctggctcgcga

SEQ ID NO: 30876 - DNA, 18 bp, synthetic construct
  misc_feature 1..18: note = Probe
  source 1..18: mol_type = other DNA
ctcctggctggctcgctt

SEQ ID NO: 30877 - DNA, 20 bp, synthetic construct
  misc_feature 1..20: note = Probe
  source 1..20: mol_type = other DNA
ctcctggctggctcgttcga

SEQ ID NO: 30878 - DNA, 21 bp, synthetic construct
  misc_feature 1..21: note = Probe
  source 1..21: mol_type = other DNA
ctcctggctggctcgttcgac

SEQ ID NO: 30879 - DNA, 22 bp, synthetic construct
  misc_feature 1..22: note = Probe
  source 1..22: mol_type = other DNA
ctcctggctggctcgttcgact

SEQ ID NO: 30880 - DNA, 20 bp, synthetic construct
  misc_feature 1..20: note = Probe
  source 1..20: mol_type = other DNA
ctcgaagatatatgtatata

SEQ ID NO: 30881 - DNA, 15 bp, synthetic construct
  misc_feature 1..15: note = Probe
  source 1..15: mol_type = other DNA
ctcgcagcttcgctg

SEQ ID NO: 30882 - DNA, 16 bp, synthetic construct
  misc_feature 1..16: note = Probe
  source 1..16: mol_type = other DNA
ctcgcgatgtctgttt

SEQ ID NO: 30883 - DNA, 15 bp, synthetic construct
  misc_feature 1..15: note = Probe
  source 1..15: mol_type = other DNA
ctcgctggggcctcc

SEQ ID NO: 30884 - DNA, 23 bp, synthetic construct
  misc_feature 1..23: note = Probe
  source 1..23: mol_type = other DNA
ctcggctttccctgctaactggg

SEQ ID NO: 30885 - DNA, 24 bp, synthetic construct
  misc_feature 1..24: note = Probe
  source 1..24: mol_type = other DNA
ctcggctttccctgctaactgggc

SEQ ID NO: 30886 - DNA, 25 bp, synthetic construct
  misc_feature 1..25: note = Probe
  source 1..25: mol_type = other DNA
ctcggctttccctgctaactgggct

SEQ ID NO: 30887 - DNA, 26 bp, synthetic construct
  misc_feature 1..26: note = Probe
  source 1..26: mol_type = other DNA
ctcggctttccctgctaactgggctt

SEQ ID NO: 30888 - DNA, 27 bp, synthetic construct
  misc_feature 1..27: note = Probe
  source 1..27: mol_type = other DNA
ctcggctttccctgctaactgggcttt

SEQ ID NO: 30889 - DNA, 28 bp, synthetic construct
  misc_feature 1..28: note = Probe
  source 1..28: mol_type = other DNA
ctcggctttccctgctaactgggctttt

SEQ ID NO: 30890 - DNA, 29 bp, synthetic construct
  misc_feature 1..29: note = Probe
  source 1..29: mol_type = other DNA
ctcggctttccctgctaactgggcttttt

SEQ ID NO: 30891 - DNA, 30 bp, synthetic construct; identical to SEQ ID NO: 19581
  misc_feature 1..30: note = Probe
  source 1..30: mol_type = other DNA

SEQ ID NO: 30892 - DNA, 24 bp, synthetic construct
  misc_feature 1..24: note = Probe
  source 1..24: mol_type = other DNA
ctcggtggaacctgcattggtttt

SEQ ID NO: 30893 - DNA, 28 bp, synthetic construct
  misc_feature 1..28: note = Probe
  source 1..28: mol_type = other DNA
ctcggtggaaccttgaagcttttctttt

SEQ ID NO: 30894 - DNA, 23 bp, synthetic construct
  misc_feature 1..23: note = Probe
  source 1..23: mol_type = other DNA
ctcgtaaacaggagatcctgggt

SEQ ID NO: 30895 - DNA, 16 bp, synthetic construct
  misc_feature 1..16: note = Probe
  source 1..16: mol_type = other DNA
ctcgtcggccctgttt

SEQ ID NO: 30896 - DNA, 18 bp, synthetic construct
  misc_feature 1..18: note = Probe
  source 1..18: mol_type = other DNA
ctcgtcggccctgtttta

SEQ ID NO: 30897 - DNA, 31 bp, synthetic construct; identical to SEQ ID NO: 13259
  misc_feature 1..31: note = Probe
  source 1..31: mol_type = other DNA

SEQ ID NO: 30898 - DNA, 33 bp, synthetic construct; identical to SEQ ID NO: 819
  misc_feature 1..33: note = Probe
  source 1..33: mol_type = other DNA

SEQ ID NO: 30899 - DNA, 34 bp, synthetic construct; identical to SEQ ID NO: 820
  misc_feature 1..34: note = Probe
  source 1..34: mol_type = other DNA

SEQ ID NO: 30900 - DNA, 29 bp, synthetic construct
  misc_feature 1..29: note = Probe
  source 1..29: mol_type = other DNA
ctcgttggtctaggggtatgattctcgct

SEQ ID NO: 30901 - DNA, 19 bp, synthetic construct
  misc_feature 1..19: note = Probe
  source 1..19: mol_type = other DNA
ctctaccccctctagagcc

SEQ ID NO: 30902 - DNA, 36 bp, synthetic construct
  misc_feature 1..36: note = Probe
  source 1..36: mol_type = other DNA
ctctagagcccactgtaaagctaacttagcattaac

SEQ ID NO: 30903 - DNA, 16 bp, synthetic construct
  misc_feature 1..16: note = Probe
  source 1..16: mol_type = other DNA
ctctcaccgccgcggc

SEQ ID NO: 30904 - DNA, 17 bp, synthetic construct
  misc_feature 1..17: note = Probe
  source 1..17: mol_type = other DNA
ctctcaccgccgcggcc

SEQ ID NO: 30905 - DNA, 19 bp, synthetic construct
  misc_feature 1..19: note = Probe
  source 1..19: mol_type = other DNA
ctctcaccgccgcggcccg

SEQ ID NO: 30906 - DNA, 22 bp, synthetic construct
  misc_feature 1..22: note = Probe
  source 1..22: mol_type = other DNA
ctctcaccgccgcggcccgggt

SEQ ID NO: 30907 - DNA, 36 bp, synthetic construct
  misc_feature 1..36: note = Probe
  source 1..36: mol_type = other DNA
ctctcaccgccgcggcccgggttcgattcccggtca

SEQ ID NO: 30908 - DNA, 44 bp, synthetic construct
  misc_feature 1..44: note = Probe
  source 1..44: mol_type = other DNA
ctctcaccgccgcggcccgggttcgattcccggtcagggaaaga

SEQ ID NO: 30909 - DNA, 44 bp, synthetic construct; identical to SEQ ID NO: 19591
  misc_feature 1..44: note = Probe
  source 1..44: mol_type = other DNA

SEQ ID NO: 30910 - DNA, 44 bp, synthetic construct
  misc_feature 1..44: note = Probe
  source 1..44: mol_type = other DNA
ctctcaccgccgcggcccgggttcgattcccggtcagggaatga

SEQ ID NO: 30911 - DNA, 15 bp, synthetic construct
  misc_feature 1..15: note = Probe
  source 1..15: mol_type = other DNA
ctctgaatccagcga

SEQ ID NO: 30912 - DNA, 18 bp, synthetic construct
  misc_feature 1..18: note = Probe
  source 1..18: mol_type = other DNA
ctctgaatccagcgatcc

SEQ ID NO: 30913 - DNA, 20 bp, synthetic construct
  misc_feature 1..20: note = Probe
  source 1..20: mol_type = other DNA
ctctgaatccagcgatccga

SEQ ID NO: 30914 - DNA, 21 bp, synthetic construct
  misc_feature 1..21: note = Probe
  source 1..21: mol_type = other DNA
ctctgaatccagcgatccgag

SEQ ID NO: 30915 - DNA, 22 bp, synthetic construct
  misc_feature 1..22: note = Probe
  source 1..22: mol_type = other DNA
ctctgaatccagcgatccgagt

SEQ ID NO: 30916 - DNA, 23 bp, synthetic construct
  misc_feature 1..23: note = Probe
  source 1..23: mol_type = other DNA
ctctgaatccagcgatccgagtt

SEQ ID NO: 30917 - DNA, 33 bp, synthetic construct
  misc_feature 1..33: note = Probe
  source 1..33: mol_type = other DNA
ctctgaatccagcgatccgagttcaaatctcgg

SEQ ID NO: 30918 - DNA, 33 bp, synthetic construct
  misc_feature 1..33: note = Probe
  source 1..33: mol_type = other DNA
ctctgaatccagcgatccgagttcgagtctcgg

SEQ ID NO: 30919 - DNA, 15 bp, synthetic construct
  misc_feature 1..15: note = Probe
  source 1..15: mol_type = other DNA
ctctgcgttgtggcc

SEQ ID NO: 30920 - DNA, 20 bp, synthetic construct
  misc_feature 1..20: note = Probe
  source 1..20: mol_type = other DNA
ctctgctatagactcccttt

SEQ ID NO: 30921 - DNA, 15 bp, synthetic construct
  misc_feature 1..15: note = Probe
  source 1..15: mol_type = other DNA
ctctggactctgaat

SEQ ID NO: 30922 - DNA, 16 bp, synthetic construct
  misc_feature 1..16: note = Probe
  source 1..16: mol_type = other DNA
ctctggactctgaatc

SEQ ID NO: 30923 - DNA, 17 bp, synthetic construct
  misc_feature 1..17: note = Probe
  source 1..17: mol_type = other DNA
ctctggactctgaatcc

SEQ ID NO: 30924 - DNA, 31 bp, synthetic construct
  misc_feature 1..31: note = Probe
  source 1..31: mol_type = other DNA
ctctggactctgaatccagcgatccgagttc

SEQ ID NO: 30925 - DNA, 16 bp, synthetic construct
  misc_feature 1..16: note = Probe
  source 1..16: mol_type = other DNA
ctctggactttgaatc

SEQ ID NO: 30926 - DNA, 17 bp, synthetic construct
  misc_feature 1..17: note = Probe
  source 1..17: mol_type = other DNA
ctctggactttgaatcc

SEQ ID NO: 30927 - DNA, 20 bp, synthetic construct
  misc_feature 1..20: note = Probe
  source 1..20: mol_type = other DNA
ctgaaaatgtttagacgggc

SEQ ID NO: 30928 - DNA, 23 bp, synthetic construct
  misc_feature 1..23: note = Probe
  source 1..23: mol_type = other DNA
ctgaaaatgtttagacgggctca

SEQ ID NO: 30929 - DNA, 24 bp, synthetic construct
  misc_feature 1..24: note = Probe
  source 1..24: mol_type = other DNA
ctgaaaatgtttagacgggctcac

SEQ ID NO: 30930 - DNA, 25 bp, synthetic construct
  misc_feature 1..25: note = Probe
  source 1..25: mol_type = other DNA
ctgaaaatgtttagacgggctcaca

SEQ ID NO: 30931 - DNA, 27 bp, synthetic construct
  misc_feature 1..27: note = Probe
  source 1..27: mol_type = other DNA
ctgaaaatgtttagacgggctcacatc

SEQ ID NO: 30932 - DNA, 30 bp, synthetic construct
  misc_feature 1..30: note = Probe
  source 1..30: mol_type = other DNA
ctgaaaatgtttagacgggctcacatcacc

SEQ ID NO: 30933 - DNA, 31 bp, synthetic construct
  misc_feature 1..31: note = Probe
  source 1..31: mol_type = other DNA
ctgaaaatgtttagacgggctcacatcaccc

SEQ ID NO: 30934 - DNA, 36 bp, synthetic construct
  misc_feature 1..36: note = Probe
  source 1..36: mol_type = other DNA
ctgaaaatgtttagacgggctcacatcaccccataa

SEQ ID NO: 30935 - DNA, 15 bp, synthetic construct
  misc_feature 1..15: note = Probe
  source 1..15: mol_type = other DNA
ctgaaggtcctgagt

SEQ ID NO: 30936 - DNA, 36 bp, synthetic construct
  misc_feature 1..36: note = Probe
  source 1..36: mol_type = other DNA
ctgaaggtcctgagttcgaacctcagagggggcagc

SEQ ID NO: 30937 - DNA, 15 bp, synthetic construct
  misc_feature 1..15: note = Probe
  source 1..15: mol_type = other DNA
ctgaaggtcgtgagt

SEQ ID NO: 30938 - DNA, 16 bp, synthetic construct
  misc_feature 1..16: note = Probe
  source 1..16: mol_type = other DNA
ctgaatccagcgatcc

SEQ ID NO: 30939 - DNA, 17 bp, synthetic construct
  misc_feature 1..17: note = Probe
  source 1..17: mol_type = other DNA
ctgaatccagcgatccg

SEQ ID NO: 30940 - DNA, 18 bp, synthetic construct
  misc_feature 1..18: note = Probe
  source 1..18: mol_type = other DNA
ctgaatccagcgatccga

SEQ ID NO: 30941 - DNA, 31 bp, synthetic construct
  misc_feature 1..31: note = Probe
  source 1..31: mol_type = other DNA
ctgaatccagcgatccgagttcaaatctcgg

SEQ ID NO: 30942 - DNA, 15 bp, synthetic construct
  misc_feature 1..15: note = Probe
  source 1..15: mol_type = other DNA
ctgacaacagaggct

SEQ ID NO: 30943 - DNA, 20 bp, synthetic construct
  misc_feature 1..20: note = Probe
  source 1..20: mol_type = other DNA
ctgactagtctggtgttatt

SEQ ID NO: 30944 - DNA, 21 bp, synthetic construct
  misc_feature 1..21: note = Probe
  source 1..21: mol_type = other DNA
ctgactagtctggtgttattt

SEQ ID NO: 30945 - DNA, 27 bp, synthetic construct
  misc_feature 1..27: note = Probe
  source 1..27: mol_type = other DNA
ctgacttcggatcagaagattgagggt

SEQ ID NO: 30946 - DNA, 36 bp, synthetic construct
  misc_feature 1..36: note = Probe
  source 1..36: mol_type = other DNA
ctgagggtccagggttcaagtccctgttcgggcggc

SEQ ID NO: 30947 - DNA, 37 bp, synthetic construct; identical to SEQ ID NO: 5304
  misc_feature 1..37: note = Probe
  source 1..37: mol_type = other DNA

SEQ ID NO: 30948 - DNA, 36 bp, synthetic construct
  misc_feature 1..36: note = Probe
  source 1..36: mol_type = other DNA
ctgagggtccagggttcaagtccctgttcgggcgtc

SEQ ID NO: 30949 - DNA, 18 bp, synthetic construct
  misc_feature 1..18: note = Probe
  source 1..18: mol_type = other DNA
ctgagtgaagcattggac

SEQ ID NO: 30950 - DNA, 19 bp, synthetic construct
  misc_feature 1..19: note = Probe
  source 1..19: mol_type = other DNA
ctgagtgaagcattggact

SEQ ID NO: 30951 - DNA, 21 bp, synthetic construct
  misc_feature 1..21: note = Probe
  source 1..21: mol_type = other DNA
ctgagtgaagcattggactgt

SEQ ID NO: 30952 - DNA, 22 bp, synthetic construct
  misc_feature 1..22: note = Probe
  source 1..22: mol_type = other DNA
ctgagtgaagcattggactgta

SEQ ID NO: 30953 - DNA, 23 bp, synthetic construct
  misc_feature 1..23: note = Probe
  source 1..23: mol_type = other DNA
ctgagtgaagcattggactgtaa

SEQ ID NO: 30954 - DNA, 24 bp, synthetic construct
  misc_feature 1..24: note = Probe
  source 1..24: mol_type = other DNA
ctgagtgaagcattggactgtaaa

SEQ ID NO: 30955 - DNA, 25 bp, synthetic construct
  misc_feature 1..25: note = Probe
  source 1..25: mol_type = other DNA
ctgagtgaagcattggactgtaaat

SEQ ID NO: 30956 - DNA, 27 bp, synthetic construct
  misc_feature 1..27: note = Probe
  source 1..27: mol_type = other DNA
ctgagtgaagcattggactgtaaatct

SEQ ID NO: 30957 - DNA, 36 bp, synthetic construct
  misc_feature 1..36: note = Probe
  source 1..36: mol_type = other DNA
ctgagtgaagcattggactgtaaatctaaagacagg

SEQ ID NO: 30958 - DNA, 22 bp, synthetic construct
  misc_feature 1..22: note = Probe
  source 1..22: mol_type = other DNA
ctgccacgcgggaggcccgggt

SEQ ID NO: 30959 - DNA, 36 bp, synthetic construct
  misc_feature 1..36: note = Probe
  source 1..36: mol_type = other DNA
ctgcccggctagctcagtcggtagagcatgggactc

SEQ ID NO: 30960 - DNA, 15 bp, synthetic construct
  misc_feature 1..15: note = Probe
  source 1..15: mol_type = other DNA
ctgctaactcatgcc

SEQ ID NO: 30961 - DNA, 16 bp, synthetic construct
  misc_feature 1..16: note = Probe
  source 1..16: mol_type = other DNA
ctgctaactcatgccc

SEQ ID NO: 30962 - DNA, 17 bp, synthetic construct
  misc_feature 1..17: note = Probe
  source 1..17: mol_type = other DNA
ctgctaactcatgcccc

SEQ ID NO: 30963 - DNA, 18 bp, synthetic construct
  misc_feature 1..18: note = Probe
  source 1..18: mol_type = other DNA
ctgctaactcatgccccc

SEQ ID NO: 30964 - DNA, 19 bp, synthetic construct
  misc_feature 1..19: note = Probe
  source 1..19: mol_type = other DNA
ctgctaactcatgccccca

SEQ ID NO: 30965 - DNA, 23 bp, synthetic construct
  misc_feature 1..23: note = Probe
  source 1..23: mol_type = other DNA
ctgctaactcatgcccccatgtc

SEQ ID NO: 30966 - DNA, 24 bp, synthetic construct
  misc_feature 1..24: note = Probe
  source 1..24: mol_type = other DNA
ctgctaactcatgcccccatgtct

SEQ ID NO: 30967 - DNA, 27 bp, synthetic construct
  misc_feature 1..27: note = Probe
  source 1..27: mol_type = other DNA
ctgctaactcatgcccccatgtctaac

SEQ ID NO: 30968 - DNA, 28 bp, synthetic construct
  misc_feature 1..28: note = Probe
  source 1..28: mol_type = other DNA
ctgctaactcatgcccccatgtctaaca

SEQ ID NO: 30969 - DNA, 30 bp, synthetic construct
  misc_feature 1..30: note = Probe
  source 1..30: mol_type = other DNA
ctgctaactcatgcccccatgtctaacaac

SEQ ID NO: 30970 - DNA, 31 bp, synthetic construct; identical to SEQ ID NO: 5313
  misc_feature 1..31: note = Probe
  source 1..31: mol_type = other DNA

SEQ ID NO: 30971 - DNA, 33 bp, synthetic construct
  misc_feature 1..33: note = Probe
  source 1..33: mol_type = other DNA
ctgctaactcatgcccccatgtctaacaacatg

SEQ ID NO: 30972 - DNA, 36 bp, synthetic construct; identical to SEQ ID NO: 5314
  misc_feature 1..36: note = Probe
  source 1..36: mol_type = other DNA

SEQ ID NO: 30973 - DNA, 45 bp, synthetic construct; identical to SEQ ID NO: 5323
  misc_feature 1..45: note = Probe
  source 1..45: mol_type = other DNA

SEQ ID NO: 30974 - DNA, 15 bp, synthetic construct
  misc_feature 1..15: note = Probe
  source 1..15: mol_type = other DNA
ctgctatcggagttt

SEQ ID NO: 30975 - DNA, 16 bp, synthetic construct
  misc_feature 1..16: note = Probe
  source 1..16: mol_type = other DNA
ctgctatcggagtttt

SEQ ID NO: 30976 - DNA, 17 bp, synthetic construct
  misc_feature 1..17: note = Probe
  source 1..17: mol_type = other DNA
ctgctatcggagttttt

SEQ ID NO: 30977 - DNA, 18 bp, synthetic construct
  misc_feature 1..18: note = Probe
  source 1..18: mol_type = other DNA
ctgctatcggagtttttt

SEQ ID NO: 30978 - DNA, 19 bp, synthetic construct
  misc_feature 1..19: note = Probe
  source 1..19: mol_type = other DNA
ctggaaagtgcacttggac

SEQ ID NO: 30979 - DNA, 20 bp, synthetic construct
  misc_feature 1..20: note = Probe
  source 1..20: mol_type = other DNA
ctggaaagtgcacttggacg

SEQ ID NO: 30980 - DNA, 21 bp, synthetic construct
  misc_feature 1..21: note = Probe
  source 1..21: mol_type = other DNA
ctggaaagtgcacttggacga

SEQ ID NO: 30981 - DNA, 22 bp, synthetic construct
  misc_feature 1..22: note = Probe
  source 1..22: mol_type = other DNA
ctggaaagtgcacttggacgaa

SEQ ID NO: 30982 - DNA, 23 bp, synthetic construct
  misc_feature 1..23: note = Probe
  source 1..23: mol_type = other DNA
ctggaaagtgcacttggacgaac

SEQ ID NO: 30983 - DNA, 24 bp, synthetic construct
  misc_feature 1..24: note = Probe
  source 1..24: mol_type = other DNA
ctggaaagtgcacttggacgaacc

SEQ ID NO: 30984 - DNA, 25 bp, synthetic construct
  misc_feature 1..25: note = Probe
  source 1..25: mol_type = other DNA
ctggaaagtgcacttggacgaacca

SEQ ID NO: 30985 - DNA, 15 bp, synthetic construct
  misc_feature 1..15: note = Probe
  source 1..15: mol_type = other DNA
ctggactctgaatcc

SEQ ID NO: 30986 - DNA, 26 bp, synthetic construct
  misc_feature 1..26: note = Probe
  source 1..26: mol_type = other DNA
ctggactctgaatccagcgatccgag

SEQ ID NO: 30987 - DNA, 29 bp, synthetic construct
  misc_feature 1..29: note = Probe
  source 1..29: mol_type = other DNA
ctggactctgaatccagcgatccgagttc

SEQ ID NO: 30988 - DNA, 15 bp, synthetic construct
  misc_feature 1..15: note = Probe
  source 1..15: mol_type = other DNA
ctggactttgaatcc

SEQ ID NO: 30989 - DNA, 15 bp, synthetic construct
  misc_feature 1..15: note = Probe
  source 1..15: mol_type = other DNA
ctggagcaagaccct

SEQ ID NO: 30990 - DNA, 16 bp, synthetic construct
  misc_feature 1..16: note = Probe
  source 1..16: mol_type = other DNA
ctggagcaagaccctt

SEQ ID NO: 30991 - DNA, 17 bp, synthetic construct
  misc_feature 1..17: note = Probe
  source 1..17: mol_type = other DNA
ctggagcaagacccttt

SEQ ID NO: 30992 - DNA, 18 bp, synthetic construct
  misc_feature 1..18: note = Probe
  source 1..18: mol_type = other DNA
ctggagcaagaccctttt

SEQ ID NO: 30993 - DNA, 21 bp, synthetic construct
  misc_feature 1..21: note = Probe
  source 1..21: mol_type = other DNA
ctggcccaacccgtcatctac

SEQ ID NO: 30994 - DNA, 20 bp, synthetic construct
  misc_feature 1..20: note = Probe
  source 1..20: mol_type = other DNA
ctggctcgcgatgtctgttt

SEQ ID NO: 30995 - DNA, 15 bp, synthetic construct
  misc_feature 1..15: note = Probe
  source 1..15: mol_type = other DNA
ctggggattgtgggt

SEQ ID NO: 30996 - DNA, 29 bp, synthetic construct
  misc_feature 1..29: note = Probe
  source 1..29: mol_type = other DNA
ctggtggtctagtggttaggattcggcgc

SEQ ID NO: 30997 - DNA, 31 bp, synthetic construct; identical to SEQ ID NO: 840
  misc_feature 1..31: note = Probe
  source 1..31: mol_type = other DNA

SEQ ID NO: 30998 - DNA, 32 bp, synthetic construct; identical to SEQ ID NO: 841
  misc_feature 1..32: note = Probe
  source 1..32: mol_type = other DNA

SEQ ID NO: 30999 - DNA, 33 bp, synthetic construct; identical to SEQ ID NO: 842
  misc_feature 1..33: note = Probe
  source 1..33: mol_type = other DNA

SEQ ID NO: 31000 - DNA, 36 bp, synthetic construct; identical to SEQ ID NO: 19658
  misc_feature 1..36: note = Probe
  source 1..36: mol_type = other DNA

SEQ ID NO: 31001 - DNA, 36 bp, synthetic construct
  misc_feature 1..36: note = Probe
  source 1..36: mol_type = other DNA
ctggtgtagtggtatcatgcaagattcccattcttg

SEQ ID NO: 31002 - DNA, 36 bp, synthetic construct
  misc_feature 1..36: note = Probe
  source 1..36: mol_type = other DNA
ctgtaaagctaacttagcattaaccttttaagttaa

SEQ ID NO: 31003 - DNA, 50 bp, synthetic construct; identical to SEQ ID NO: 844
  misc_feature 1..50: note = Probe
  source 1..50: mol_type = other DNA

SEQ ID NO: 31004 - DNA, 28 bp, synthetic construct
  misc_feature 1..28: note = Probe
  source 1..28: mol_type = other DNA
ctgtagtgtagtggttatcacgttcgcc

SEQ ID NO: 31005 - DNA, 29 bp, synthetic construct
  misc_feature 1..29: note = Probe
  source 1..29: mol_type = other DNA
ctgtagtgtagtggttatcacgttcgcct

SEQ ID NO: 31006 - DNA, 15 bp, synthetic construct
  misc_feature 1..15: note = Probe
  source 1..15: mol_type = other DNA
ctgtcacgcgggaga

SEQ ID NO: 31007 - DNA, 16 bp, synthetic construct
  misc_feature 1..16: note = Probe
  source 1..16: mol_type = other DNA
ctgtcacgcgggagac

SEQ ID NO: 31008 - DNA, 17 bp, synthetic construct
  misc_feature 1..17: note = Probe
  source 1..17: mol_type = other DNA
ctgtcacgcgggagacc

SEQ ID NO: 31009 - DNA, 18 bp, synthetic construct
  misc_feature 1..18: note = Probe
  source 1..18: mol_type = other DNA
ctgtcacgcgggagaccg

SEQ ID NO: 31010 - DNA, 19 bp, synthetic construct
  misc_feature 1..19: note = Probe
  source 1..19: mol_type = other DNA
ctgtcacgcgggagaccgg

SEQ ID NO: 31011 - DNA, 20 bp, synthetic construct
  misc_feature 1..20: note = Probe
  source 1..20: mol_type = other DNA
ctgtcacgcgggagaccggg

SEQ ID NO: 31012 - DNA, 24 bp, synthetic construct
  misc_feature 1..24: note = Probe
  source 1..24: mol_type = other DNA
ctgtcacgcgggagaccggggttc

SEQ ID NO: 31013 - DNA, 36 bp, synthetic construct; identical to SEQ ID NO: 19676
  misc_feature 1..36: note = Probe
  source 1..36: mol_type = other DNA

SEQ ID NO: 31014 - DNA, 22 bp, synthetic construct
  misc_feature 1..22: note = Probe
  source 1..22: mol_type = other DNA
ctgtgctccggagttacctcgt

SEQ ID NO: 31015 - DNA, 23 bp, synthetic construct
  misc_feature 1..23: note = Probe
  source 1..23: mol_type = other DNA
ctgtgctccggagttacctcgtt

SEQ ID NO: 31016 - DNA, 24 bp, synthetic construct
  misc_feature 1..24: note = Probe
  source 1..24: mol_type = other DNA
ctgtgctccggagttacctcgttt

SEQ ID NO: 31017 - DNA, 25 bp, synthetic construct
  misc_feature 1..25: note = Probe
  source 1..25: mol_type = other DNA
ctgtgctccggagttacctcgtttt

SEQ ID NO: 31018 - DNA, 17 bp, synthetic construct
  misc_feature 1..17: note = Probe
  source 1..17: mol_type = other DNA
ctgtgtccctagtagct

SEQ ID NO: 31019 - DNA, 18 bp, synthetic construct
  misc_feature 1..18: note = Probe
  source 1..18: mol_type = other DNA
ctgtgtccctagtagctc

SEQ ID NO: 31020 - DNA, 23 bp, synthetic construct
  misc_feature 1..23: note = Probe
  source 1..23: mol_type = other DNA
ctgttaaccgaaaggttggtggt

SEQ ID NO: 31021 - DNA, 36 bp, synthetic construct
  misc_feature 1..36: note = Probe
  source 1..36: mol_type = other DNA
ctgttaactaagtgtttgtgggtttaagtcccattg

SEQ ID NO: 31022 - DNA, 36 bp, synthetic construct
  misc_feature 1..36: note = Probe
  source 1..36: mol_type = other DNA
cttaaaactttacagtcagaggttcaattcctcttc

SEQ ID NO: 31023 - DNA, 16 bp, synthetic construct
  misc_feature 1..16: note = Probe
  source 1..16: mol_type = other DNA
cttaacacaaagcacc

SEQ ID NO: 31024 - DNA, 17 bp, synthetic construct
  misc_feature 1..17: note = Probe
  source 1..17: mol_type = other DNA
cttaacacaaagcaccc

SEQ ID NO: 31025 - DNA, 18 bp, synthetic construct
  misc_feature 1..18: note = Probe
  source 1..18: mol_type = other DNA
cttaacacaaagcaccca

SEQ ID NO: 31026 - DNA, 19 bp, synthetic construct
  misc_feature 1..19: note = Probe
  source 1..19: mol_type = other DNA
cttaacacaaagcacccaa

SEQ ID NO: 31027 - DNA, 25 bp, synthetic construct
  misc_feature 1..25: note = Probe
  source 1..25: mol_type = other DNA
cttaacacaaagcacccaacttaca

SEQ ID NO: 31028 - DNA, 26 bp, synthetic construct
  misc_feature 1..26: note = Probe
  source 1..26: mol_type = other DNA
cttaacacaaagcacccaacttacac

SEQ ID NO: 31029 - DNA, 27 bp, synthetic construct
  misc_feature 1..27: note = Probe
  source 1..27: mol_type = other DNA
cttaacacaaagcacccaacttacact

SEQ ID NO: 31030 - DNA, 28 bp, synthetic construct
  misc_feature 1..28: note = Probe
  source 1..28: mol_type = other DNA
cttaacacaaagcacccaacttacactt

SEQ ID NO: 31031 - DNA, 29 bp, synthetic construct
  misc_feature 1..29: note = Probe
  source 1..29: mol_type = other DNA
cttaacacaaagcacccaacttacactta

SEQ ID NO: 31032 - DNA, 30 bp, synthetic construct
  misc_feature 1..30: note = Probe
  source 1..30: mol_type = other DNA
cttaacacaaagcacccaacttacacttag

SEQ ID NO: 31033 - DNA, 32 bp, synthetic construct
  misc_feature 1..32: note = Probe
  source 1..32: mol_type = other DNA
cttaacacaaagcacccaacttacacttagga

SEQ ID NO: 31034 - DNA, 36 bp, synthetic construct
  misc_feature 1..36: note = Probe
  source 1..36: mol_type = other DNA
cttaacacaaagcacccaacttacacttaggagatt

SEQ ID NO: 31035 - DNA, 16 bp, synthetic construct
  misc_feature 1..16: note = Probe
  source 1..16: mol_type = other DNA
cttaacttgaccgctc

SEQ ID NO: 31036 - DNA, 17 bp, synthetic construct
  misc_feature 1..17: note = Probe
  source 1..17: mol_type = other DNA
cttaacttgaccgctct

SEQ ID NO: 31037 - DNA, 18 bp, synthetic construct
  misc_feature 1..18: note = Probe
  source 1..18: mol_type = other DNA
cttaacttgaccgctctg

SEQ ID NO: 31038 - DNA, 19 bp, synthetic construct
  misc_feature 1..19: note = Probe
  source 1..19: mol_type = other DNA
cttaacttgaccgctctga

SEQ ID NO: 31039 - DNA, 20 bp, synthetic construct
  misc_feature 1..20: note = Probe
  source 1..20: mol_type = other DNA
cttaacttgaccgctctgag

SEQ ID NO: 31040 - DNA, 21 bp, synthetic construct
  misc_feature 1..21: note = Probe
  source 1..21: mol_type = other DNA
cttaacttgaccgctctgagc

SEQ ID NO: 31041 - DNA, 36 bp, synthetic construct
  misc_feature 1..36: note = Probe
  source 1..36: mol_type = other DNA
cttaacttgaccgctctgagctaaacctagccccaa

SEQ ID NO: 31042 - DNA, 36 bp, synthetic construct
  misc_feature 1..36: note = Probe
  source 1..36: mol_type = other DNA
cttaatctcagggtcgtgggttcgagccccacgttg

SEQ ID NO: 31043 - DNA, 42 bp, synthetic construct
  misc_feature 1..42: note = Probe
  source 1..42: mol_type = other DNA
cttaatctcagggtcgtgggttcgagccccacgttgggcgac

SEQ ID NO: 31044 - DNA, 42 bp, synthetic construct
  misc_feature 1..42: note = Probe
  source 1..42: mol_type = other DNA
cttaatctcagggtcgtgggttcgagccccacgttgggcgct

SEQ ID NO: 31045 - DNA, 42 bp, synthetic construct
  misc_feature 1..42: note = Probe
  source 1..42: mol_type = other DNA
cttaatctcagggtcgtgggttcgagccccacgttgggcggc

SEQ ID NO: 31046 - DNA, 43 bp, synthetic construct
  misc_feature 1..43: note = Probe
  source 1..43: mol_type = other DNA
cttaatctcagggtcgtgggttcgagccccacgttgggcggca

SEQ ID NO: 31047 - DNA, 19 bp, synthetic construct
  misc_feature 1..19: note = Probe
  source 1..19: mol_type = other DNA
cttaattaaagtggctgat

SEQ ID NO: 31048 - DNA, 28 bp, synthetic construct
  misc_feature 1..28: note = Probe
  source 1..28: mol_type = other DNA
cttacacttaggagatttcaacttaact

SEQ ID NO: 31049 - DNA, 33 bp, synthetic construct
  misc_feature 1..33: note = Probe
  source 1..33: mol_type = other DNA
cttacacttaggagatttcaacttaacttgacc

SEQ ID NO: 31050 - DNA, 36 bp, synthetic construct; identical to SEQ ID NO: 5368
  misc_feature 1..36: note = Probe
  source 1..36: mol_type = other DNA

SEQ ID NO: 31051 - DNA, 42 bp, synthetic construct; identical to SEQ ID NO: 5371
  misc_feature 1..42: note = Probe
  source 1..42: mol_type = other DNA

SEQ ID NO: 31052 - DNA, 43 bp, synthetic construct; identical to SEQ ID NO: 5372
  misc_feature 1..43: note = Probe
  source 1..43: mol_type = other DNA

SEQ ID NO: 31053 - DNA, 20 bp, synthetic construct
  misc_feature 1..20: note = Probe
  source 1..20: mol_type = other DNA
cttacgaccccttatttacc

SEQ ID NO: 31054 - DNA, 24 bp, synthetic construct
  misc_feature 1..24: note = Probe
  source 1..24: mol_type = other DNA
cttactgcttcctgtgttcgggtc

SEQ ID NO: 31055 - DNA, 38 bp, synthetic construct; identical to SEQ ID NO: 19725
  misc_feature 1..38: note = Probe
  source 1..38: mol_type = other DNA

SEQ ID NO: 31056 - DNA, 18 bp, synthetic construct
  misc_feature 1..18: note = Probe
  source 1..18: mol_type = other DNA
cttagcctgtggctcgcc

SEQ ID NO: 31057 - DNA, 36 bp, synthetic construct
  misc_feature 1..36: note = Probe
  source 1..36: mol_type = other DNA
cttagctgttaactaagtgtttgtgggtttaagtcc

SEQ ID NO: 31058 - DNA, 36 bp, synthetic construct
  misc_feature 1..36: note = Probe
  source 1..36: mol_type = other DNA
cttagctttgggtgctaatggtggagttaaagactt

SEQ ID NO: 31059 - DNA, 16 bp, synthetic construct
  misc_feature 1..16: note = Probe
  source 1..16: mol_type = other DNA
cttaggagatttcaac

SEQ ID NO: 31060 - DNA, 17 bp, synthetic construct
  misc_feature 1..17: note = Probe
  source 1..17: mol_type = other DNA
cttaggagatttcaact

SEQ ID NO: 31061 - DNA, 18 bp, synthetic construct
  misc_feature 1..18: note = Probe
  source 1..18: mol_type = other DNA
cttaggagatttcaactt

SEQ ID NO: 31062 - DNA, 22 bp, synthetic construct
  misc_feature 1..22: note = Probe
  source 1..22: mol_type = other DNA
cttaggagatttcaacttaact

SEQ ID NO: 31063 - DNA, 23 bp, synthetic construct
  misc_feature 1..23: note = Probe
  source 1..23: mol_type = other DNA
cttaggagatttcaacttaactt

SEQ ID NO: 31064 - DNA, 24 bp, synthetic construct
  misc_feature 1..24: note = Probe
  source 1..24: mol_type = other DNA
cttaggagatttcaacttaacttg

SEQ ID NO: 31065 - DNA, 26 bp, synthetic construct
  misc_feature 1..26: note = Probe
  source 1..26: mol_type = other DNA
cttaggagatttcaacttaacttgac

SEQ ID NO: 31066 - DNA, 27 bp, synthetic construct
  misc_feature 1..27: note = Probe
  source 1..27: mol_type = other DNA
cttaggagatttcaacttaacttgacc

SEQ ID NO: 31067 - DNA, 28 bp, synthetic construct
  misc_feature 1..28: note = Probe
  source 1..28: mol_type = other DNA
cttaggagatttcaacttaacttgaccg

SEQ ID NO: 31068 - DNA, 29 bp, synthetic construct
  misc_feature 1..29: note = Probe
  source 1..29: mol_type = other DNA
cttaggagatttcaacttaacttgaccgc

SEQ ID NO: 31069 - DNA, 30 bp, synthetic construct; identical to SEQ ID NO: 5384
  misc_feature 1..30: note = Probe
  source 1..30: mol_type = other DNA

SEQ ID NO: 31070 - DNA, 31 bp, synthetic construct; identical to SEQ ID NO: 5385
  misc_feature 1..31: note = Probe
  source 1..31: mol_type = other DNA

SEQ ID NO: 31071 - DNA, 32 bp, synthetic construct; identical to SEQ ID NO: 5386
  misc_feature 1..32: note = Probe
  source 1..32: mol_type = other DNA

SEQ ID NO: 31072 - DNA, 33 bp, synthetic construct; identical to SEQ ID NO: 5387
  misc_feature 1..33: note = Probe
  source 1..33: mol_type = other DNA

SEQ ID NO: 31073 - DNA, 35 bp, synthetic construct; identical to SEQ ID NO: 5389
  misc_feature 1..35: note = Probe
  source 1..35: mol_type = other DNA

SEQ ID NO: 31074 - DNA, 36 bp, synthetic construct; identical to SEQ ID NO: 5390
  misc_feature 1..36: note = Probe
  source 1..36: mol_type = other DNA

SEQ ID NO: 31075 - DNA, 37 bp, synthetic construct; identical to SEQ ID NO: 5391
  misc_feature 1..37: note = Probe
  source 1..37: mol_type = other DNA

SEQ ID NO: 31076 - DNA, 36 bp, synthetic construct
  misc_feature 1..36: note = Probe
  source 1..36: mol_type = other DNA
cttaggccccaaaaattttggtgcaactccaaataa

SEQ ID NO: 31077 - DNA, 23 bp, synthetic construct
  misc_feature 1..23: note = Probe
  source 1..23: mol_type = other DNA
cttagttggttaaagcgcctgtc

SEQ ID NO: 31078 - DNA, 24 bp, synthetic construct
  misc_feature 1..24: note = Probe
  source 1..24: mol_type = other DNA
cttagttggttaaagcgcctgtct

SEQ ID NO: 31079 - DNA, 25 bp, synthetic construct
  misc_feature 1..25: note = Probe
  source 1..25: mol_type = other DNA
cttatttctaggactatgagaatcg

SEQ ID NO: 31080 - DNA, 28 bp, synthetic construct
  misc_feature 1..28: note = Probe
  source 1..28: mol_type = other DNA
cttatttctaggactatgagaatcgaac

SEQ ID NO: 31081 - DNA, 29 bp, synthetic construct
  misc_feature 1..29: note = Probe
  source 1..29: mol_type = other DNA
cttatttctaggactatgagaatcgaacc

SEQ ID NO: 31082 - DNA, 30 bp, synthetic construct
  misc_feature 1..30: note = Probe
  source 1..30: mol_type = other DNA
cttatttctaggactatgagaatcgaaccc

SEQ ID NO: 31083 - DNA, 31 bp, synthetic construct
  misc_feature 1..31: note = Probe
  source 1..31: mol_type = other DNA
cttatttctaggactatgagaatcgaaccca

SEQ ID NO: 31084 - DNA, 33 bp, synthetic construct
  misc_feature 1..33: note = Probe
  source 1..33: mol_type = other DNA
cttatttctaggactatgagaatcgaacccatc

SEQ ID NO: 31085 - DNA, 34 bp, synthetic construct
  misc_feature 1..34: note = Probe
  source 1..34: mol_type = other DNA
cttatttctaggactatgagaatcgaacccatcc

SEQ ID NO: 31086 - DNA, 36 bp, synthetic construct
  misc_feature 1..36: note = Probe
  source 1..36: mol_type = other DNA
cttatttctaggactatgagaatcgaacccatccct

SEQ ID NO: 31087 - DNA, 19 bp, synthetic construct
  misc_feature 1..19: note = Probe
  source 1..19: mol_type = other DNA
cttcaaacctgccggggct

SEQ ID NO: 31088 - DNA, 36 bp, synthetic construct
  misc_feature 1..36: note = Probe
  source 1..36: mol_type = other DNA
cttcaaagccctcagtaagttgcaatacttaatttc

SEQ ID NO: 31089 - DNA, 20 bp, synthetic construct
  misc_feature 1..20: note = Probe
  source 1..20: mol_type = other DNA
cttcagctatagggtggaga

SEQ ID NO: 31090 - DNA, 36 bp, synthetic construct
  misc_feature 1..36: note = Probe
  source 1..36: mol_type = other DNA
cttcaggggcccggatagctcagtcggtagagcatc

SEQ ID NO: 31091 - DNA, 16 bp, synthetic construct
  misc_feature 1..16: note = Probe
  source 1..16: mol_type = other DNA
cttccaagcagttgac

SEQ ID NO: 31092 - DNA, 17 bp, synthetic construct
  misc_feature 1..17: note = Probe
  source 1..17: mol_type = other DNA
cttccaagcagttgacc

SEQ ID NO: 31093 - DNA, 20 bp, synthetic construct
  misc_feature 1..20: note = Probe
  source 1..20: mol_type = other DNA
cttccaagcagttgacccgg

SEQ ID NO: 31094 - DNA, 22 bp, synthetic construct
  misc_feature 1..22: note = Probe
  source 1..22: mol_type = other DNA
cttccaagcagttgacccgggc

SEQ ID NO: 31095 - DNA, 24 bp, synthetic construct
  misc_feature 1..24: note = Probe
  source 1..24: mol_type = other DNA
cttccaagcagttgacccgggttc

SEQ ID NO: 31096 - DNA, 36 bp, synthetic construct
  misc_feature 1..36: note = Probe
  source 1..36: mol_type = other DNA
cttccaattaactagttttgacaacattcaaaaaag

SEQ ID NO: 31097 - DNA, 36 bp, synthetic construct
  misc_feature 1..36: note = Probe
  source 1..36: mol_type = other DNA
cttccctggtggtctagtggttaggattcggcgctc

SEQ ID NO: 31098 - DNA, 23 bp, synthetic construct
  misc_feature 1..23: note = Probe
  source 1..23: mol_type = other DNA
cttcggatcagaagattgagggt

SEQ ID NO: 31099 - DNA, 20 bp, synthetic construct
  misc_feature 1..20: note = Probe
  source 1..20: mol_type = other DNA
cttcgggtgcgagaggtccc

SEQ ID NO: 31100 - DNA, 24 bp, synthetic construct
  misc_feature 1..24: note = Probe
  source 1..24: mol_type = other DNA
cttcgggtgcgagaggtcccgggt

SEQ ID NO: 31101 - DNA, 24 bp, synthetic construct
  misc_feature 1..24: note = Probe
  source 1..24: mol_type = other DNA
cttcgttggctctgcctgccaact

SEQ ID NO: 31102 - DNA, 31 bp, synthetic construct
  misc_feature 1..31: note = Probe
  source 1..31: mol_type = other DNA
cttctgtagtgtagtggttatcacgttcgcc

SEQ ID NO: 31103 - DNA, 32 bp, synthetic construct
  misc_feature 1..32: note = Probe
  source 1..32: mol_type = other DNA
cttctgtagtgtagtggttatcacgttcgcct

SEQ ID NO: 31104 - DNA, 36 bp, synthetic construct
  misc_feature 1..36: note = Probe
  source 1..36: mol_type = other DNA
cttctgtagtgtagtggttatcacgttcgcctcaca

SEQ ID NO: 31105 - DNA, 23 bp, synthetic construct
  misc_feature 1..23: note = Probe
  source 1..23: mol_type = other DNA
cttgaccgctctgagctaaacct

SEQ ID NO: 31106 - DNA, 36 bp, synthetic construct
  misc_feature 1..36: note = Probe
  source 1..36: mol_type = other DNA
cttggacgaaccagagtgtagcttaacacaaagcac

SEQ ID NO: 31107 - DNA, 22 bp, synthetic construct
  misc_feature 1..22: note = Probe
  source 1..22: mol_type = other DNA
cttggcttcctcgtgttgagga

SEQ ID NO: 31108 - DNA, 23 bp, synthetic construct
  misc_feature 1..23: note = Probe
  source 1..23: mol_type = other DNA
cttgtaaacaggagatcctgggt

SEQ ID NO: 31109 - DNA, 23 bp, synthetic construct
  misc_feature 1..23: note = Probe
  source 1..23: mol_type = other DNA
cttgtaaaccaggggtcgcgagt

SEQ ID NO: 31110 - DNA, 22 bp, synthetic construct
  misc_feature 1..22: note = Probe
  source 1..22: mol_type = other DNA
cttgtaaaccggagatgaaaac

SEQ ID NO: 31111 - DNA, 23 bp, synthetic construct
  misc_feature 1..23: note = Probe
  source 1..23: mol_type = other DNA
cttgtaaaccggagatgaaaacc

SEQ ID NO: 31112 - DNA, 24 bp, synthetic construct
  misc_feature 1..24: note = Probe
  source 1..24: mol_type = other DNA
cttgtaaaccggagatgaaaacct

SEQ ID NO: 31113 - DNA, 36 bp, synthetic construct
  misc_feature 1..36: note = Probe
  source 1..36: mol_type = other DNA
cttgtaaaccggagatgaaaacctttttccaaggac

SEQ ID NO: 31114 - DNA, 15 bp, synthetic construct
  misc_feature 1..15: note = Probe
  source 1..15: mol_type = other DNA
cttgttcgagctttt

SEQ ID NO: 31115 - DNA, 15 bp, synthetic construct
  misc_feature 1..15: note = Probe
  source 1..15: mol_type = other DNA
ctttaactccaccat

SEQ ID NO: 31116 - DNA, 16 bp, synthetic construct
  misc_feature 1..16: note = Probe
  source 1..16: mol_type = other DNA
ctttacagtcagaggt

SEQ ID NO: 31117 - DNA, 17 bp, synthetic construct
  misc_feature 1..17: note = Probe
  source 1..17: mol_type = other DNA
ctttacagtcagaggtt

SEQ ID NO: 31118 - DNA, 18 bp, synthetic construct
  misc_feature 1..18: note = Probe
  source 1..18: mol_type = other DNA
ctttacagtcagaggttc

SEQ ID NO: 31119 - DNA, 24 bp, synthetic construct
  misc_feature 1..24: note = Probe
  source 1..24: mol_type = other DNA
ctttacagtcagaggttcaattcc

SEQ ID NO: 31120 - DNA, 29 bp, synthetic construct
  misc_feature 1..29: note = Probe
  source 1..29: mol_type = other DNA
ctttacagtcagaggttcaattcctcttc

SEQ ID NO: 31121 - DNA, 15 bp, synthetic construct
  misc_feature 1..15: note = Probe
  source 1..15: mol_type = other DNA
ctttcaccgccgcgg

SEQ ID NO: 31122 - DNA, 16 bp, synthetic construct
  misc_feature 1..16: note = Probe
  source 1..16: mol_type = other DNA
ctttcaccgccgcggc

SEQ ID NO: 31123 - DNA, 17 bp, synthetic construct
  misc_feature 1..17: note = Probe
  source 1..17: mol_type = other DNA
ctttcaccgccgcggcc

SEQ ID NO: 31124 - DNA, 18 bp, synthetic construct
  misc_feature 1..18: note = Probe
  source 1..18: mol_type = other DNA
ctttcaccgccgcggccc

SEQ ID NO: 31125 - DNA, 19 bp, synthetic construct
  misc_feature 1..19: note = Probe
  source 1..19: mol_type = other DNA
ctttcaccgccgcggcccg

SEQ ID NO: 31126 - DNA, 36 bp, synthetic construct
  misc_feature 1..36: note = Probe
  source 1..36: mol_type = other DNA
ctttcaccgccgcggcccgggttcgattcccggtca

SEQ ID NO: 31127 - DNA, 24 bp, synthetic construct
  misc_feature 1..24: note = Probe
  source 1..24: mol_type = other DNA
ctttgaatccagcaatccgagttc

SEQ ID NO: 31128 - DNA, 15 bp, synthetic construct
  misc_feature 1..15: note = Probe
  source 1..15: mol_type = other DNA
ctttgaatccagcga

SEQ ID NO: 31129 - DNA, 16 bp, synthetic construct
  misc_feature 1..16: note = Probe
  source 1..16: mol_type = other DNA
ctttgaatccagcgat

SEQ ID NO: 31130 - DNA, 18 bp, synthetic construct
  misc_feature 1..18: note = Probe
  source 1..18: mol_type = other DNA
ctttgaatccagcgatcc

SEQ ID NO: 31131 - DNA, 19 bp, synthetic construct
  misc_feature 1..19: note = Probe
  source 1..19: mol_type = other DNA
ctttgaatccagcgatccg

SEQ ID NO: 31132 - DNA, 20 bp, synthetic construct
  misc_feature 1..20: note = Probe
  source 1..20: mol_type = other DNA
ctttgaatccagcgatccga

SEQ ID NO: 31133 - DNA, 24 bp, synthetic construct
  misc_feature 1..24: note = Probe
  source 1..24: mol_type = other DNA
ctttgaatccagcgatccgagttc

SEQ ID NO: 31134 - DNA, 27 bp, synthetic construct
  misc_feature 1..27: note = Probe
  source 1..27: mol_type = other DNA
ctttgatagagtaaataataggagctt

SEQ ID NO: 31135 - DNA, 33 bp, synthetic construct
  misc_feature 1..33: note = Probe
  source 1..33: mol_type = other DNA
ctttgatagagtaaataataggagcttaaaccc

SEQ ID NO: 31136 - DNA, 24 bp, synthetic construct
  misc_feature 1..24: note = Probe
  source 1..24: mol_type = other DNA
ctttgcacgtatgaggccccgggt

SEQ ID NO: 31137 - DNA, 25 bp, synthetic construct
  misc_feature 1..25: note = Probe
  source 1..25: mol_type = other DNA
ctttgcacgtatgaggccccgggtt

SEQ ID NO: 31138 - DNA, 26 bp, synthetic construct
  misc_feature 1..26: note = Probe
  source 1..26: mol_type = other DNA
ctttgcacgtatgaggccccgggttc

SEQ ID NO: 31139 - DNA, 24 bp, synthetic construct
  misc_feature 1..24: note = Probe
  source 1..24: mol_type = other DNA
ctttgcatgtatgaggccccgggt

SEQ ID NO: 31140 - DNA, 20 bp, synthetic construct
  misc_feature 1..20: note = Probe
  source 1..20: mol_type = other DNA
ctttgggtgcgagaggtccc

SEQ ID NO: 31141 - DNA, 23 bp, synthetic construct
  misc_feature 1..23: note = Probe
  source 1..23: mol_type = other DNA
ctttgggtgctaatggtggagtt

SEQ ID NO: 31142 - DNA, 24 bp, synthetic construct
  misc_feature 1..24: note = Probe
  source 1..24: mol_type = other DNA
ctttgggtgctaatggtggagtta

SEQ ID NO: 31143 - DNA, 42 bp, synthetic construct
  misc_feature 1..42: note = Probe
  source 1..42: mol_type = other DNA
ctttgggtgctaatggtggagttaaagactttttctctgatt

SEQ ID NO: 31144 - DNA, 25 bp, synthetic construct
  misc_feature 1..25: note = Probe
  source 1..25: mol_type = other DNA
ctttgtcaaagttaaattataggct

SEQ ID NO: 31145 - DNA, 27 bp, synthetic construct
  misc_feature 1..27: note = Probe
  source 1..27: mol_type = other DNA
ctttgtcaaagttaaattataggctaa

SEQ ID NO: 31146 - DNA, 36 bp, synthetic construct
  misc_feature 1..36: note = Probe
  source 1..36: mol_type = other DNA
ctttgtcaaagttaaattataggctaaatcctatat

SEQ ID NO: 31147 - DNA, 29 bp, synthetic construct
  misc_feature 1..29: note = Probe
  source 1..29: mol_type = other DNA
cttttaaaggataacagctatccattggt

SEQ ID NO: 31148 - DNA, 30 bp, synthetic construct
  misc_feature 1..30: note = Probe
  source 1..30: mol_type = other DNA
cttttaaaggataacagctatccattggtc

SEQ ID NO: 31149 - DNA, 31 bp, synthetic construct
  misc_feature 1..31: note = Probe
  source 1..31: mol_type = other DNA
cttttaaaggataacagctatccattggtct

SEQ ID NO: 31150 - DNA, 25 bp, synthetic construct
  misc_feature 1..25: note = Probe
  source 1..25: mol_type = other DNA
cttttaagttaaagattaagagaac

SEQ ID NO: 31151 - DNA, 26 bp, synthetic construct
  misc_feature 1..26: note = Probe
  source 1..26: mol_type = other DNA
cttttaagttaaagattaagagaacc

SEQ ID NO: 31152 - DNA, 27 bp, synthetic construct
  misc_feature 1..27: note = Probe
  source 1..27: mol_type = other DNA
cttttaagttaaagattaagagaacca

SEQ ID NO: 31153 - DNA, 31 bp, synthetic construct
  misc_feature 1..31: note = Probe
  source 1..31: mol_type = other DNA
cttttaagttaaagattaagagaaccaacac

SEQ ID NO: 31154 - DNA, 32 bp, synthetic construct
  misc_feature 1..32: note = Probe
  source 1..32: mol_type = other DNA
cttttaagttaaagattaagagaaccaacacc

SEQ ID NO: 31155 - DNA, 33 bp, synthetic construct
  misc_feature 1..33: note = Probe
  source 1..33: mol_type = other DNA
cttttaagttaaagattaagagaaccaacacct

SEQ ID NO: 31156 - DNA, 34 bp, synthetic construct
  misc_feature 1..34: note = Probe
  source 1..34: mol_type = other DNA
cttttaagttaaagattaagagaaccaacacctc

SEQ ID NO: 31157 - DNA, 36 bp, synthetic construct
  misc_feature 1..36: note = Probe
  source 1..36: mol_type = other DNA
cttttaagttaaagattaagagaaccaacacctctt

SEQ ID NO: 31158 - DNA, 45 bp, synthetic construct
  misc_feature 1..45: note = Probe
  source 1..45: mol_type = other DNA
cttttaagttaaagattaagagaaccaacacctctttacagtgaa

SEQ ID NO: 31159 - DNA, 46 bp, synthetic construct
  misc_feature 1..46: note = Probe
  source 1..46: mol_type = other DNA
cttttaagttaaagattaagagaaccaacacctctttacagtgaaa

SEQ ID NO: 31160 - DNA, 18 bp, synthetic construct
  misc_feature 1..18: note = Probe
  source 1..18: mol_type = other DNA
cttttaatctgagggtcc

SEQ ID NO: 31161 - DNA, 19 bp, synthetic construct
  misc_feature 1..19: note = Probe
  source 1..19: mol_type = other DNA
cttttaatctgagggtcca

SEQ ID NO: 31162 - DNA, 30 bp, synthetic construct; identical to SEQ ID NO: 19779
  misc_feature 1..30: note = Probe
  source 1..30: mol_type = other DNA

SEQ ID NO: 31163 - DNA, 18 bp, synthetic construct
  misc_feature 1..18: note = Probe
  source 1..18: mol_type = other DNA
cttttcgagatactgttt

SEQ ID NO: 31164 - DNA, 15 bp, synthetic construct
  misc_feature 1..15: note = Probe
  source 1..15: mol_type = other DNA
ctttttccaaggaca

SEQ ID NO: 31165 - DNA, 16 bp, synthetic construct
  misc_feature 1..16: note = Probe
  source 1..16: mol_type = other DNA
cttttttcccggcggc

SEQ ID NO: 31166 - DNA, 23 bp, synthetic construct
  misc_feature 1..23: note = Probe
  source 1..23: mol_type = other DNA
cttttttcccggcggcgggagaa

SEQ ID NO: 31167 - DNA, 24 bp, synthetic construct
  misc_feature 1..24: note = Probe
  source 1..24: mol_type = other DNA
cttttttcccggcggcgggagaag

SEQ ID NO: 31168 - DNA, 15 bp, synthetic construct
  misc_feature 1..15: note = Probe
  source 1..15: mol_type = other DNA
gaaaaagtcatggag

SEQ ID NO: 31169 - DNA, 16 bp, synthetic construct
  misc_feature 1..16: note = Probe
  source 1..16: mol_type = other DNA
gaaaaagtcatggagg

SEQ ID NO: 31170 - DNA, 17 bp, synthetic construct
  misc_feature 1..17: note = Probe
  source 1..17: mol_type = other DNA
gaaaaagtcatggaggc

SEQ ID NO: 31171 - DNA, 20 bp, synthetic construct
  misc_feature 1..20: note = Probe
  source 1..20: mol_type = other DNA
gaaaaagtcatggaggccat

SEQ ID NO: 31172 - DNA, 23 bp, synthetic construct
  misc_feature 1..23: note = Probe
  source 1..23: mol_type = other DNA
gaaaaagtcatggaggccatggg

SEQ ID NO: 31173 - DNA, 24 bp, synthetic construct
  misc_feature 1..24: note = Probe
  source 1..24: mol_type = other DNA
gaaaaagtcatggaggccatgggg

SEQ ID NO: 31174 - DNA, 29 bp, synthetic construct
  misc_feature 1..29: note = Probe
  source 1..29: mol_type = other DNA
gaaaaagtcatggaggccatggggttggc

SEQ ID NO: 31175 - DNA, 30 bp, synthetic construct; identical to SEQ ID NO: 10057
  misc_feature 1..30: note = Probe
  source 1..30: mol_type = other DNA

SEQ ID NO: 31176 - DNA, 31 bp, synthetic construct; identical to SEQ ID NO: 5416
  misc_feature 1..31: note = Probe
  source 1..31: mol_type = other DNA

SEQ ID NO: 31177 - DNA, 32 bp, synthetic construct; identical to SEQ ID NO: 5417
  misc_feature 1..32: note = Probe
  source 1..32: mol_type = other DNA

SEQ ID NO: 31178 - DNA, 33 bp, synthetic construct; identical to SEQ ID NO: 5418
  misc_feature 1..33: note = Probe
  source 1..33: mol_type = other DNA

SEQ ID NO: 31179 - DNA, 37 bp, synthetic construct
  misc_feature 1..37: note = Probe
  source 1..37: mol_type = other DNA
gaaaaagtcatggaggccatggggttggcttgaaacc

SEQ ID NO: 31180 - DNA, 50 bp, synthetic construct; identical to SEQ ID NO: 5419
  misc_feature 1..50: note = Probe
  source 1..50: mol_type = other DNA

SEQ ID NO: 31181 - DNA, 23 bp, synthetic construct
  misc_feature 1..23: note = Probe
  source 1..23: mol_type = other DNA
gaaaaagtctttaactccaccat

SEQ ID NO: 31182 - DNA, 18 bp, synthetic construct
  misc_feature 1..18: note = Probe
  source 1..18: mol_type = other DNA
gaaaatgttggttatacc

SEQ ID NO: 31183 - DNA, 19 bp, synthetic construct
  misc_feature 1..19: note = Probe
  source 1..19: mol_type = other DNA
gaaaatgttggttataccc

SEQ ID NO: 31184 - DNA, 26 bp, synthetic construct
  misc_feature 1..26: note = Probe
  source 1..26: mol_type = other DNA
gaaaatgtttagacgggctcacatca

SEQ ID NO: 31185 - DNA, 27 bp, synthetic construct
  misc_feature 1..27: note = Probe
  source 1..27: mol_type = other DNA
gaaaatgtttagacgggctcacatcac

SEQ ID NO: 31186 - DNA, 30 bp, synthetic construct; identical to SEQ ID NO: 861
  misc_feature 1..30: note = Probe
  source 1..30: mol_type = other DNA

SEQ ID NO: 31187 - DNA, 31 bp, synthetic construct; identical to SEQ ID NO: 862
  misc_feature 1..31: note = Probe
  source 1..31: mol_type = other DNA

SEQ ID NO: 31188 - DNA, 33 bp, synthetic construct; identical to SEQ ID NO: 864
  misc_feature 1..33: note = Probe
  source 1..33: mol_type = other DNA

SEQ ID NO: 31189 - DNA, 34 bp, synthetic construct
  misc_feature 1..34: note = Probe
  source 1..34: mol_type = other DNA
gaaaatgtttagacgggctcacatcaccccataa

SEQ ID NO: 31190 - DNA, 35 bp, synthetic construct
  misc_feature 1..35: note = Probe
  source 1..35: mol_type = other DNA
gaaaatgtttagacgggctcacatcaccccataaa

SEQ ID NO: 31191 - DNA, 36 bp, synthetic construct
  misc_feature 1..36: note = Probe
  source 1..36: mol_type = other DNA
gaaaatgtttagacgggctcacatcaccccataaac

SEQ ID NO: 31192 - DNA, 20 bp, synthetic construct
  misc_feature 1..20: note = Probe
  source 1..20: mol_type = other DNA
gaaaccgggcggaaacacct

SEQ ID NO: 31193 - DNA, 29 bp, synthetic construct
  misc_feature 1..29: note = Probe
  source 1..29: mol_type = other DNA
gaaagaacagagaatagtttaaattagaa

SEQ ID NO: 31194 - DNA, 36 bp, synthetic construct
  misc_feature 1..36: note = Probe
  source 1..36: mol_type = other DNA
gaaagaacagagaatagtttaaattagaatcttagc

SEQ ID NO: 31195 - DNA, 19 bp, synthetic construct
  misc_feature 1..19: note = Probe
  source 1..19: mol_type = other DNA
gaaagcatgctccagtggc

SEQ ID NO: 31196 - DNA, 20 bp, synthetic construct
  misc_feature 1..20: note = Probe
  source 1..20: mol_type = other DNA
gaaagcatgctccagtggcg

SEQ ID NO: 31197 - DNA, 21 bp, synthetic construct
  misc_feature 1..21: note = Probe
  source 1..21: mol_type = other DNA
gaaagcatgctccagtggcgc

SEQ ID NO: 31198 - DNA, 17 bp, synthetic construct
  misc_feature 1..17: note = Probe
  source 1..17: mol_type = other DNA
gaaagctcacaagaact

SEQ ID NO: 31199 - DNA, 18 bp, synthetic construct
  misc_feature 1..18: note = Probe
  source 1..18: mol_type = other DNA
gaaagctcacaagaactg

SEQ ID NO: 31200 - DNA, 19 bp, synthetic construct
  misc_feature 1..19: note = Probe
  source 1..19: mol_type = other DNA
gaaagctcacaagaactgc

SEQ ID NO: 31201 - DNA, 25 bp, synthetic construct
  misc_feature 1..25: note = Probe
  source 1..25: mol_type = other DNA
gaaagctcacaagaactgctaactc

SEQ ID NO: 31202 - DNA, 28 bp, synthetic construct
  misc_feature 1..28: note = Probe
  source 1..28: mol_type = other DNA
gaaagctcacaagaactgctaactcatg

SEQ ID NO: 31203 - DNA, 30 bp, synthetic construct
  misc_feature 1..30: note = Probe
  source 1..30: mol_type = other DNA
gaaagctcacaagaactgctaactcatgcc

SEQ ID NO: 31204 - DNA, 31 bp, synthetic construct; identical to SEQ ID NO: 876
  misc_feature 1..31: note = Probe
  source 1..31: mol_type = other DNA

SEQ ID NO: 31205 - DNA, 36 bp, synthetic construct
  misc_feature 1..36: note = Probe
  source 1..36: mol_type = other DNA
gaaagggagggggatgtagctcagtggtagagcgca

SEQ ID NO: 31206 - DNA, 16 bp, synthetic construct
  misc_feature 1..16: note = Probe
  source 1..16: mol_type = other DNA
gaaagtgcacttggac

SEQ ID NO: 31207 - DNA, 17 bp, synthetic construct
  misc_feature 1..17: note = Probe
  source 1..17: mol_type = other DNA
gaaagtgcacttggacg

SEQ ID NO: 31208 - DNA, 21 bp, synthetic construct
  misc_feature 1..21: note = Probe
  source 1..21: mol_type = other DNA
gaaagtgcacttggacgaacc

SEQ ID NO: 31209 - DNA, 34 bp, synthetic construct; identical to SEQ ID NO: 19838
  misc_feature 1..34: note = Probe
  source 1..34: mol_type = other DNA

SEQ ID NO: 31210 - DNA, 35 bp, synthetic construct
  misc_feature 1..35: note = Probe
  source 1..35: mol_type = other DNA
gaaatacaacgatggtttttcatatcattggtcgt

SEQ ID NO: 31211 - DNA, 36 bp, synthetic construct; identical to SEQ ID NO: 19839
  misc_feature 1..36: note = Probe
  source 1..36: mol_type = other DNA

SEQ ID NO: 31212 - DNA, 45 bp, synthetic construct; identical to SEQ ID NO: 19841
  misc_feature 1..45: note = Probe
  source 1..45: mol_type = other DNA

SEQ ID NO: 31213 - DNA, 46 bp, synthetic construct
  misc_feature 1..46: note = Probe
  source 1..46: mol_type = other DNA
gaaatacaacgatggtttttcatatcattggtcgtggttgtagtcc

SEQ ID NO: 31214 - DNA, 47 bp, synthetic construct
  misc_feature 1..47: note = Probe
  source 1..47: mol_type = other DNA
gaaatacaacgatggtttttcatatcattggtcgtggttgtagtccg

SEQ ID NO: 31215 - DNA, 50 bp, synthetic construct; identical to SEQ ID NO: 5440
  misc_feature 1..50: note = Probe
  source 1..50: mol_type = other DNA

SEQ ID NO: 31216 - DNA, 17 bp, synthetic construct
  misc_feature 1..17: note = Probe
  source 1..17: mol_type = other DNA
gaacacagtacggcttg

SEQ ID NO: 31217 - DNA, 15 bp, synthetic construct
  misc_feature 1..15: note = Probe
  source 1..15: mol_type = other DNA
gaacagggtttgtta

SEQ ID NO: 31218 - DNA, 24 bp, synthetic construct
  misc_feature 1..24: note = Probe
  source 1..24: mol_type = other DNA
gaaccaacacctctttacagtgaa

SEQ ID NO: 31219 - DNA, 36 bp, synthetic construct
  misc_feature 1..36: note = Probe
  source 1..36: mol_type = other DNA
gaacctgggtagctcagtaggtagaacatcagactt

SEQ ID NO: 31220 - DNA, 16 bp, synthetic construct
  misc_feature 1..16: note = Probe
  source 1..16: mol_type = other DNA
gaactgctaactcatg

SEQ ID NO: 31221 - DNA, 17 bp, synthetic construct
  misc_feature 1..17: note = Probe
  source 1..17: mol_type = other DNA
gaactgctaactcatgc

SEQ ID NO: 31222 - DNA, 18 bp, synthetic construct
  misc_feature 1..18: note = Probe
  source 1..18: mol_type = other DNA
gaactgctaactcatgcc

SEQ ID NO: 31223 - DNA, 19 bp, synthetic construct
  misc_feature 1..19: note = Probe
  source 1..19: mol_type = other DNA
gaactgctaactcatgccc

SEQ ID NO: 31224 - DNA, 20 bp, synthetic construct
  misc_feature 1..20: note = Probe
  source 1..20: mol_type = other DNA
gaactgctaactcatgcccc

SEQ ID NO: 31225 - DNA, 21 bp, synthetic construct
  misc_feature 1..21: note = Probe
  source 1..21: mol_type = other DNA
gaactgctaactcatgccccc

SEQ ID NO: 31226 - DNA, 22 bp, synthetic construct
  misc_feature 1..22: note = Probe
  source 1..22: mol_type = other DNA
gaactgctaactcatgccccca

SEQ ID NO: 31227 - DNA, 26 bp, synthetic construct
  misc_feature 1..26: note = Probe
  source 1..26: mol_type = other DNA
gaactgctaactcatgcccccatgtc

SEQ ID NO: 31228 - DNA, 27 bp, synthetic construct
  misc_feature 1..27: note = Probe
  source 1..27: mol_type = other DNA
gaactgctaactcatgcccccatgtct

SEQ ID NO: 31229 - DNA, 29 bp, synthetic construct
  misc_feature 1..29: note = Probe
  source 1..29: mol_type = other DNA
gaactgctaactcatgcccccatgtctaa

SEQ ID NO: 31230 - DNA, 30 bp, synthetic construct; identical to SEQ ID NO: 19861
  misc_feature 1..30: note = Probe
  source 1..30: mol_type = other DNA

SEQ ID NO: 31231 - DNA, 31 bp, synthetic construct; identical to SEQ ID NO: 19862
  misc_feature 1..31: note = Probe
  source 1..31: mol_type = other DNA

SEQ ID NO: 31232 - DNA, 33 bp, synthetic construct
  misc_feature 1..33: note = Probe
  source 1..33: mol_type = other DNA
gaactgctaactcatgcccccatgtctaacaac

SEQ ID NO: 31233 - DNA, 34 bp, synthetic construct; identical to SEQ ID NO: 19863
  misc_feature 1..34: note = Probe
  source 1..34: mol_type = other DNA

SEQ ID NO: 31234 - DNA, 35 bp, synthetic construct
  misc_feature 1..35: note = Probe
  source 1..35: mol_type = other DNA
gaactgctaactcatgcccccatgtctaacaacat

SEQ ID NO: 31235 - DNA, 36 bp, synthetic construct
  misc_feature 1..36: note = Probe
  source 1..36: mol_type = other DNA
gaactgctaactcatgcccccatgtctaacaacatg

SEQ ID NO: 31236 - DNA, 37 bp, synthetic construct
  misc_feature 1..37: note = Probe
  source 1..37: mol_type = other DNA
gaactgctaactcatgcccccatgtctaacaacatgg

SEQ ID NO: 31237 - DNA, 38 bp, synthetic construct
  misc_feature 1..38: note = Probe
  source 1..38: mol_type = other DNA
gaactgctaactcatgcccccatgtctaacaacatggc

SEQ ID NO: 31238 - DNA, 39 bp, synthetic construct; identical to SEQ ID NO: 5463
  misc_feature 1..39: note = Probe
  source 1..39: mol_type = other DNA

SEQ ID NO: 31239 - DNA, 47 bp, synthetic construct
  misc_feature 1..47: note = Probe
  source 1..47: mol_type = other DNA
gaactgctaactcatgcccccatgtctaacaacatggctttctcaac

SEQ ID NO: 31240 - DNA, 28 bp, synthetic construct
  misc_feature 1..28: note = Probe
  source 1..28: mol_type = other DNA
gaagaagcagcttcaaacctgccggggc

SEQ ID NO: 31241 - DNA, 29 bp, synthetic construct
  misc_feature 1..29: note = Probe
  source 1..29: mol_type = other DNA
gaagaagcagcttcaaacctgccggggct

SEQ ID NO: 31242 - DNA, 30 bp, synthetic construct; identical to SEQ ID NO: 5478
  misc_feature 1..30: note = Probe
  source 1..30: mol_type = other DNA

SEQ ID NO: 31243 - DNA, 31 bp, synthetic construct; identical to SEQ ID NO: 5479
  misc_feature 1..31: note = Probe
  source 1..31: mol_type = other DNA

SEQ ID NO: 31244 - DNA, 32 bp, synthetic construct; identical to SEQ ID NO: 5480
  misc_feature 1..32: note = Probe
  source 1..32: mol_type = other DNA

SEQ ID NO: 31245 - DNA, 24 bp, synthetic construct
  misc_feature 1..24: note = Probe
  source 1..24: mol_type = other DNA
gaagagcccggatagctcagtcgg

SEQ ID NO: 31246 - DNA, 25 bp, synthetic construct
  misc_feature 1..25: note = Probe
  source 1..25: mol_type = other DNA
gaagagcccggatagctcagtcggt

SEQ ID NO: 31247 - DNA, 26 bp, synthetic construct
  misc_feature 1..26: note = Probe
  source 1..26: mol_type = other DNA
gaagagcccggatagctcagtcggta

SEQ ID NO: 31248 - DNA, 27 bp, synthetic construct
  misc_feature 1..27: note = Probe
  source 1..27: mol_type = other DNA
gaagagcccggatagctcagtcggtag

SEQ ID NO: 31249 - DNA, 28 bp, synthetic construct
  misc_feature 1..28: note = Probe
  source 1..28: mol_type = other DNA
gaagagcccggatagctcagtcggtaga

SEQ ID NO: 31250 - DNA, 29 bp, synthetic construct
  misc_feature 1..29: note = Probe
  source 1..29: mol_type = other DNA
gaagagcccggatagctcagtcggtagag

SEQ ID NO: 31251 - DNA, 30 bp, synthetic construct; identical to SEQ ID NO: 19886
  misc_feature 1..30: note = Probe
  source 1..30: mol_type = other DNA

SEQ ID NO: 31252 - DNA, 31 bp, synthetic construct; identical to SEQ ID NO: 19887
  misc_feature 1..31: note = Probe
  source 1..31: mol_type = other DNA

SEQ ID NO: 31253 - DNA, 32 bp, synthetic construct; identical to SEQ ID NO: 19888
  misc_feature 1..32: note = Probe
  source 1..32: mol_type = other DNA

SEQ ID NO: 31254 - DNA, 33 bp, synthetic construct
  misc_feature 1..33: note = Probe
  source 1..33: mol_type = other DNA
gaagagcccggatagctcagtcggtagagcatc

SEQ ID NO: 31255 - DNA, 34 bp, synthetic construct; identical to SEQ ID NO: 19889
  misc_feature 1..34: note = Probe
  source 1..34: mol_type = other DNA

SEQ ID NO: 31256 - DNA, 35 bp, synthetic construct
  misc_feature 1..35: note = Probe
  source 1..35: mol_type = other DNA
gaagagcccggatagctcagtcggtagagcatcag

SEQ ID NO: 31257 - DNA, 36 bp, synthetic construct; identical to SEQ ID NO: 19890
  misc_feature 1..36: note = Probe
  source 1..36: mol_type = other DNA

SEQ ID NO: 31258 - DNA, 37 bp, synthetic construct; identical to SEQ ID NO: 19891
  misc_feature 1..37: note = Probe
  source 1..37: mol_type = other DNA

SEQ ID NO: 31259 - DNA, 38 bp, synthetic construct; identical to SEQ ID NO: 19892
  misc_feature 1..38: note = Probe
  source 1..38: mol_type = other DNA

SEQ ID NO: 31260 - DNA, 39 bp, synthetic construct; identical to SEQ ID NO: 19893
  misc_feature 1..39: note = Probe
  source 1..39: mol_type = other DNA

SEQ ID NO: 31261 - DNA, 40 bp, synthetic construct; identical to SEQ ID NO: 19894
  misc_feature 1..40: note = Probe
  source 1..40: mol_type = other DNA

SEQ ID NO: 31262 - DNA, 41 bp, synthetic construct; identical to SEQ ID NO: 19895
  misc_feature 1..41: note = Probe
  source 1..41: mol_type = other DNA

SEQ ID NO: 31263 - DNA, 42 bp, synthetic construct; identical to SEQ ID NO: 19896
  misc_feature 1..42: note = Probe
  source 1..42: mol_type = other DNA

SEQ ID NO: 31264 - DNA, 43 bp, synthetic construct
  misc_feature 1..43: note = Probe
  source 1..43: mol_type = other DNA
gaagagcccggatagctcagtcggtagagcatcagacttttaa

SEQ ID NO: 31265 - DNA, 44 bp, synthetic construct; identical to SEQ ID NO: 19897
  misc_feature 1..44: note = Probe
  source 1..44: mol_type = other DNA

SEQ ID NO: 31266 - DNA, 31 bp, synthetic construct; identical to SEQ ID NO: 884
  misc_feature 1..31: note = Probe
  source 1..31: mol_type = other DNA

SEQ ID NO: 31267 - DNA, 34 bp, synthetic construct; identical to SEQ ID NO: 19911
  misc_feature 1..34: note = Probe
  source 1..34: mol_type = other DNA

SEQ ID NO: 31268 - DNA, 25 bp, synthetic construct
  misc_feature 1..25: note = Probe
  source 1..25: mol_type = other DNA
gaagcagcttcaaacctgccggggc

SEQ ID NO: 31269 - DNA, 26 bp, synthetic construct
  misc_feature 1..26: note = Probe
  source 1..26: mol_type = other DNA
gaagcagcttcaaacctgccggggct

SEQ ID NO: 31270 - DNA, 27 bp, synthetic construct
  misc_feature 1..27: note = Probe
  source 1..27: mol_type = other DNA
gaagcagcttcaaacctgccggggctt

SEQ ID NO: 31271 - DNA, 29 bp, synthetic construct
  misc_feature 1..29: note = Probe
  source 1..29: mol_type = other DNA
gaagcagcttcaaacctgccggggcttct

SEQ ID NO: 31272 - DNA, 15 bp, synthetic construct
  misc_feature 1..15: note = Probe
  source 1..15: mol_type = other DNA
gaagcattggactgt

SEQ ID NO: 31273 - DNA, 16 bp, synthetic construct
  misc_feature 1..16: note = Probe
  source 1..16: mol_type = other DNA
gaagcattggactgta

SEQ ID NO: 31274 - DNA, 17 bp, synthetic construct
  misc_feature 1..17: note = Probe
  source 1..17: mol_type = other DNA
gaagcattggactgtaa

SEQ ID NO: 31275 - DNA, 18 bp, synthetic construct
  misc_feature 1..18: note = Probe
  source 1..18: mol_type = other DNA
gaagcattggactgtaaa

SEQ ID NO: 31276 - DNA, 20 bp, synthetic construct
  misc_feature 1..20: note = Probe
  source 1..20: mol_type = other DNA
gaagcattggactgtaaatc

SEQ ID NO: 31277 - DNA, 36 bp, synthetic construct
  misc_feature 1..36: note = Probe
  source 1..36: mol_type = other DNA
gaagcattggactgtaaatctaaagacaggggttag

SEQ ID NO: 31278 - DNA, 36 bp, synthetic construct; identical to SEQ ID NO: 19919
  misc_feature 1..36: note = Probe
  source 1..36: mol_type = other DNA

SEQ ID NO: 31279 - DNA, 33 bp, synthetic construct
  misc_feature 1..33: note = Probe
  source 1..33: mol_type = other DNA
gaagccttccttcgttggctctgcctgccaact

SEQ ID NO: 31280 - DNA, 15 bp, synthetic construct
  misc_feature 1..15: note = Probe
  source 1..15: mol_type = other DNA
gaagcgggtgctctt

SEQ ID NO: 31281 - DNA, 16 bp, synthetic construct
  misc_feature 1..16: note = Probe
  source 1..16: mol_type = other DNA
gaagcgggtgctctta

SEQ ID NO: 31282 - DNA, 17 bp, synthetic construct
  misc_feature 1..17: note = Probe
  source 1..17: mol_type = other DNA
gaagcgggtgctcttat

SEQ ID NO: 31283 - DNA, 18 bp, synthetic construct
  misc_feature 1..18: note = Probe
  source 1..18: mol_type = other DNA
gaagcgggtgctcttatt

SEQ ID NO: 31284 - DNA, 19 bp, synthetic construct
  misc_feature 1..19: note = Probe
  source 1..19: mol_type = other DNA
gaagcgggtgctcttattt

SEQ ID NO: 31285 - DNA, 20 bp, synthetic construct
  misc_feature 1..20: note = Probe
  source 1..20: mol_type = other DNA
gaagcgggtgctcttatttt

SEQ ID NO: 31286 - DNA, 21 bp, synthetic construct
  misc_feature 1..21: note = Probe
  source 1..21: mol_type = other DNA
gaagcgggtgctcttattttt

SEQ ID NO: 31287 - DNA, 22 bp, synthetic construct
  misc_feature 1..22: note = Probe
  source 1..22: mol_type = other DNA
gaagcgggtgctcttatttttt

SEQ ID NO: 31288 - DNA, 23 bp, synthetic construct
  misc_feature 1..23: note = Probe
  source 1..23: mol_type = other DNA
gaagcgggtgctcttattttttc

SEQ ID NO: 31289 - DNA, 32 bp, synthetic construct; identical to SEQ ID NO: 19946
  misc_feature 1..32: note = Probe
  source 1..32: mol_type = other DNA

SEQ ID NO: 31290 - DNA, 29 bp, synthetic construct
  misc_feature 1..29: note = Probe
  source 1..29: mol_type = other DNA
gaagtcgcattttgtgaaccctgggtttt

SEQ ID NO: 31291 - DNA, 20 bp, synthetic construct
  misc_feature 1..20: note = Probe
  source 1..20: mol_type = other DNA
gaatccagcgatccgagttc

SEQ ID NO: 31292 - DNA, 36 bp, synthetic construct
  misc_feature 1..36: note = Probe
  source 1..36: mol_type = other DNA
gaatcccatcctcgtcggctaaggaagtcctgtgct

SEQ ID NO: 31293 - DNA, 21 bp, synthetic construct
  misc_feature 1..21: note = Probe
  source 1..21: mol_type = other DNA
gaatcgaacccatccctgaga

SEQ ID NO: 31294 - DNA, 36 bp, synthetic construct
  misc_feature 1..36: note = Probe
  source 1..36: mol_type = other DNA
gaatctgacaacagaggcttacgaccccttatttac

SEQ ID NO: 31295 - DNA, 50 bp, synthetic construct; identical to SEQ ID NO: 5541
  misc_feature 1..50: note = Probe
  source 1..50: mol_type = other DNA

SEQ ID NO: 31296 - DNA, 15 bp, synthetic construct
  misc_feature 1..15: note = Probe
  source 1..15: mol_type = other DNA
gaatgatttcgactc

SEQ ID NO: 31297 - DNA, 16 bp, synthetic construct
  misc_feature 1..16: note = Probe
  source 1..16: mol_type = other DNA
gaatgatttcgactca

SEQ ID NO: 31298 - DNA, 36 bp, synthetic construct
  misc_feature 1..36: note = Probe
  source 1..36: mol_type = other DNA
gaatgatttcgactcattaaattatgataatcatat

SEQ ID NO: 31299 - DNA, 15 bp, synthetic construct
  misc_feature 1..15: note = Probe
  source 1..15: mol_type = other DNA
gaattctcgcctgcc

SEQ ID NO: 31300 - DNA, 17 bp, synthetic construct
  misc_feature 1..17: note = Probe
  source 1..17: mol_type = other DNA
gaattctcgcctgccac

SEQ ID NO: 31301 - DNA, 18 bp, synthetic construct
  misc_feature 1..18: note = Probe
  source 1..18: mol_type = other DNA
gaattctcgcctgccacg

SEQ ID NO: 31302 - DNA, 36 bp, synthetic construct
  misc_feature 1..36: note = Probe
  source 1..36: mol_type = other DNA
gaattgcaaattcgaagaagcagcttcaaacctgcc

SEQ ID NO: 31303 - DNA, 19 bp, synthetic construct
  misc_feature 1..19: note = Probe
  source 1..19: mol_type = other DNA
gacaacagaggcttacgac

SEQ ID NO: 31304 - DNA, 20 bp, synthetic construct
  misc_feature 1..20: note = Probe
  source 1..20: mol_type = other DNA
gacaacagaggcttacgacc

SEQ ID NO: 31305 - DNA, 21 bp, synthetic construct
  misc_feature 1..21: note = Probe
  source 1..21: mol_type = other DNA
gacaacagaggcttacgaccc

SEQ ID NO: 31306 - DNA, 15 bp, synthetic construct
  misc_feature 1..15: note = Probe
  source 1..15: mol_type = other DNA
gacaagtgcggtttt

SEQ ID NO: 31307 - DNA, 16 bp, synthetic construct
  misc_feature 1..16: note = Probe
  source 1..16: mol_type = other DNA
gacaagtgcggttttt

SEQ ID NO: 31308 - DNA, 17 bp, synthetic construct
  misc_feature 1..17: note = Probe
  source 1..17: mol_type = other DNA
gacaagtgcggtttttt

SEQ ID NO: 31309 - DNA, 36 bp, synthetic construct
  misc_feature 1..36: note = Probe
  source 1..36: mol_type = other DNA
gacaccgaagtctctgtggcgcaatcggttagcgcg

SEQ ID NO: 31310 - DNA, 36 bp, synthetic construct
  misc_feature 1..36: note = Probe
  source 1..36: mol_type = other DNA
gacagccggctcgttggtctaggggtatgattctcg

SEQ ID NO: 31311 - DNA, 15 bp, synthetic construct
  misc_feature 1..15: note = Probe
  source 1..15: mol_type = other DNA
gacaggggttaggcc

SEQ ID NO: 31312 - DNA, 16 bp, synthetic construct
  misc_feature 1..16: note = Probe
  source 1..16: mol_type = other DNA
gacaggggttaggcct

SEQ ID NO: 31313 - DNA, 28 bp, synthetic construct
  misc_feature 1..28: note = Probe
  source 1..28: mol_type = other DNA
gacaggggttaggcctctttttaccagc

SEQ ID NO: 31314 - DNA, 36 bp, synthetic construct; identical to SEQ ID NO: 20034
  misc_feature 1..36: note = Probe
  source 1..36: mol_type = other DNA

SEQ ID NO: 31315 - DNA, 25 bp, synthetic construct
  misc_feature 1..25: note = Probe
  source 1..25: mol_type = other DNA
gacagtagcattggtggttcagtgg

SEQ ID NO: 31316 - DNA, 36 bp, synthetic construct; identical to SEQ ID NO: 20046
  misc_feature 1..36: note = Probe
  source 1..36: mol_type = other DNA

SEQ ID NO: 31317 - DNA, 37 bp, synthetic construct; identical to SEQ ID NO: 20047
  misc_feature 1..37: note = Probe
  source 1..37: mol_type = other DNA

SEQ ID NO: 31318 - DNA, 38 bp, synthetic construct; identical to SEQ ID NO: 20048
  misc_feature 1..38: note = Probe
  source 1..38: mol_type = other DNA

SEQ ID NO: 31319 - DNA, 39 bp, synthetic construct; identical to SEQ ID NO: 20049
  misc_feature 1..39: note = Probe
  source 1..39: mol_type = other DNA

SEQ ID NO: 31320 - DNA, 40 bp, synthetic construct; identical to SEQ ID NO: 20050
  misc_feature 1..40: note = Probe
  source 1..40: mol_type = other DNA

SEQ ID NO: 31321 - DNA, 36 bp, synthetic construct
  misc_feature 1..36: note = Probe
  source 1..36: mol_type = other DNA
gacatccttcgatagctcagctggtagagcggagga

SEQ ID NO: 31322 - DNA, 19 bp, synthetic construct
  misc_feature 1..19: note = Probe
  source 1..19: mol_type = other DNA
gaccacgtggcctaatgga

SEQ ID NO: 31323 - DNA, 19 bp, synthetic construct
  misc_feature 1..19: note = Probe
  source 1..19: mol_type = other DNA
gacccagtggcctaatgga

SEQ ID NO: 31324 - DNA, 23 bp, synthetic construct
  misc_feature 1..23: note = Probe
  source 1..23: mol_type = other DNA
gacccagtggcctaatggataag

SEQ ID NO: 31325 - DNA, 33 bp, synthetic construct; identical to SEQ ID NO: 906
  misc_feature 1..33: note = Probe
  source 1..33: mol_type = other DNA

SEQ ID NO: 31326 - DNA, 35 bp, synthetic construct; identical to SEQ ID NO: 908
  misc_feature 1..35: note = Probe
  source 1..35: mol_type = other DNA

SEQ ID NO: 31327 - DNA, 36 bp, synthetic construct; identical to SEQ ID NO: 909
  misc_feature 1..36: note = Probe
  source 1..36: mol_type = other DNA

SEQ ID NO: 31328 - DNA, 16 bp, synthetic construct
  misc_feature 1..16: note = Probe
  source 1..16: mol_type = other DNA
gaccccttatttaccg

SEQ ID NO: 31329 - DNA, 33 bp, synthetic construct
  misc_feature 1..33: note = Probe
  source 1..33: mol_type = other DNA
gaccgcgtggcctaatggataaggcgtctgact

SEQ ID NO: 31330 - DNA, 36 bp, synthetic construct
  misc_feature 1..36: note = Probe
  source 1..36: mol_type = other DNA
gaccgcgtggcctaatggataaggcgtctgacttcg

SEQ ID NO: 31331 - DNA, 20 bp, synthetic construct
  misc_feature 1..20: note = Probe
  source 1..20: mol_type = other DNA
gaccgctctgagctaaacct

SEQ ID NO: 31332 - DNA, 31 bp, synthetic construct; identical to SEQ ID NO: 5580
  misc_feature 1..31: note = Probe
  source 1..31: mol_type = other DNA

SEQ ID NO: 31333 - DNA, 17 bp, synthetic construct
  misc_feature 1..17: note = Probe
  source 1..17: mol_type = other DNA
gacctcgtggcgcaacg

SEQ ID NO: 31334 - DNA, 18 bp, synthetic construct
  misc_feature 1..18: note = Probe
  source 1..18: mol_type = other DNA
gacctcgtggcgcaacgg

SEQ ID NO: 31335 - DNA, 32 bp, synthetic construct
  misc_feature 1..32: note = Probe
  source 1..32: mol_type = other DNA
gacctcgtggcgcaacggtagcgcgtctgact

SEQ ID NO: 31336 - DNA, 34 bp, synthetic construct
  misc_feature 1..34: note = Probe
  source 1..34: mol_type = other DNA
gacctcgtggcgcaacggtagcgcgtctgactcc

SEQ ID NO: 31337 - DNA, 36 bp, synthetic construct
  misc_feature 1..36: note = Probe
  source 1..36: mol_type = other DNA
gacctcgtggcgcaacggtagcgcgtctgactccag

SEQ ID NO: 31338 - DNA, 15 bp, synthetic construct
  misc_feature 1..15: note = Probe
  source 1..15: mol_type = other DNA
gacgaggtggccgag

SEQ ID NO: 31339 - DNA, 16 bp, synthetic construct
  misc_feature 1..16: note = Probe
  source 1..16: mol_type = other DNA
gacgaggtggccgagt

SEQ ID NO: 31340 - DNA, 18 bp, synthetic construct
  misc_feature 1..18: note = Probe
  source 1..18: mol_type = other DNA
gacgaggtggccgagtgg

SEQ ID NO: 31341 - DNA, 32 bp, synthetic construct
  misc_feature 1..32: note = Probe
  source 1..32: mol_type = other DNA
gacgaggtggccgagtggttaaggcgatggac

SEQ ID NO: 31342 - DNA, 36 bp, synthetic construct
  misc_feature 1..36: note = Probe
  source 1..36: mol_type = other DNA
gacgaggtggccgagtggttaaggcgatggactgct

SEQ ID NO: 31343 - DNA, 36 bp, synthetic construct
  misc_feature 1..36: note = Probe
  source 1..36: mol_type = other DNA
gacggctcgttggtctaggggtatgattctcgctta

SEQ ID NO: 31344 - DNA, 36 bp, synthetic construct
  misc_feature 1..36: note = Probe
  source 1..36: mol_type = other DNA
gacgggccagtggcgcaatggataacgcgtctgact

SEQ ID NO: 31345 - DNA, 36 bp, synthetic construct
  misc_feature 1..36: note = Probe
  source 1..36: mol_type = other DNA
gacgggccgcgtggcctaatggataaggcgtctgac

SEQ ID NO: 31346 - DNA, 15 bp, synthetic construct
  misc_feature 1..15: note = Probe
  source 1..15: mol_type = other DNA
gacgggctcacatca

SEQ ID NO: 31347 - DNA, 17 bp, synthetic construct
  misc_feature 1..17: note = Probe
  source 1..17: mol_type = other DNA
gacgggctcacatcacc

SEQ ID NO: 31348 - DNA, 18 bp, synthetic construct
  misc_feature 1..18: note = Probe
  source 1..18: mol_type = other DNA
gacgggctcacatcaccc

SEQ ID NO: 31349 - DNA, 15 bp, synthetic construct
  misc_feature 1..15: note = Probe
  source 1..15: mol_type = other DNA
gactacaaaaaggat

SEQ ID NO: 31350 - DNA, 16 bp, synthetic construct
  misc_feature 1..16: note = Probe
  source 1..16: mol_type = other DNA
gactacaaaaaggatt

SEQ ID NO: 31351 - DNA, 17 bp, synthetic construct
  misc_feature 1..17: note = Probe
  source 1..17: mol_type = other DNA
gactacaaaaaggatta

SEQ ID NO: 31352 - DNA, 18 bp, synthetic construct
  misc_feature 1..18: note = Probe
  source 1..18: mol_type = other DNA
gactacaaaaaggattag

SEQ ID NO: 31353 - DNA, 19 bp, synthetic construct
  misc_feature 1..19: note = Probe
  source 1..19: mol_type = other DNA
gactacaaaaaggattaga

SEQ ID NO: 31354 - DNA, 21 bp, synthetic construct
  misc_feature 1..21: note = Probe
  source 1..21: mol_type = other DNA
gactacaaaaaggattagact

SEQ ID NO: 31355 - DNA, 22 bp, synthetic construct
  misc_feature 1..22: note = Probe
  source 1..22: mol_type = other DNA
gactacaaaaaggattagactg

SEQ ID NO: 31356 - DNA, 23 bp, synthetic construct
  misc_feature 1..23: note = Probe
  source 1..23: mol_type = other DNA
gactacaaaaaggattagactga

SEQ ID NO: 31357 - DNA, 24 bp, synthetic construct
  misc_feature 1..24: note = Probe
  source 1..24: mol_type = other DNA
gactacaaaaaggattagactgaa

SEQ ID NO: 31358 - DNA, 25 bp, synthetic construct
  misc_feature 1..25: note = Probe
  source 1..25: mol_type = other DNA
gactacaaaaaggattagactgaac

SEQ ID NO: 31359 - DNA, 26 bp, synthetic construct
  misc_feature 1..26: note = Probe
  source 1..26: mol_type = other DNA
gactacaaaaaggattagactgaacc

SEQ ID NO: 31360 - DNA, 27 bp, synthetic construct
  misc_feature 1..27: note = Probe
  source 1..27: mol_type = other DNA
gactacaaaaaggattagactgaaccg

SEQ ID NO: 31361 - DNA, 29 bp, synthetic construct
  misc_feature 1..29: note = Probe
  source 1..29: mol_type = other DNA
gactacaaaaaggattagactgaaccgaa

SEQ ID NO: 31362 - DNA, 30 bp, synthetic construct
  misc_feature 1..30: note = Probe
  source 1..30: mol_type = other DNA
gactacaaaaaggattagactgaaccgaat

SEQ ID NO: 31363 - DNA, 31 bp, synthetic construct
  misc_feature 1..31: note = Probe
  source 1..31: mol_type = other DNA
gactacaaaaaggattagactgaaccgaatt

SEQ ID NO: 31364 - DNA, 19 bp, synthetic construct
  misc_feature 1..19: note = Probe
  source 1..19: mol_type = other DNA
gactagtctggtgttattt

SEQ ID NO: 31365 - DNA, 17 bp, synthetic construct
  misc_feature 1..17: note = Probe
  source 1..17: mol_type = other DNA
gactatgagaatcgaac

SEQ ID NO: 31366 - DNA, 18 bp, synthetic construct
  misc_feature 1..18: note = Probe
  source 1..18: mol_type = other DNA
gactatgagaatcgaacc

SEQ ID NO: 31367 - DNA, 19 bp, synthetic construct
  misc_feature 1..19: note = Probe
  source 1..19: mol_type = other DNA
gactatgagaatcgaaccc

SEQ ID NO: 31368 - DNA, 20 bp, synthetic construct
  misc_feature 1..20: note = Probe
  source 1..20: mol_type = other DNA
gactatgagaatcgaaccca

SEQ ID NO: 31369 - DNA, 21 bp, synthetic construct
  misc_feature 1..21: note = Probe
  source 1..21: mol_type = other DNA
gactatgagaatcgaacccat

SEQ ID NO: 31370 - DNA, 22 bp, synthetic construct
  misc_feature 1..22: note = Probe
  source 1..22: mol_type = other DNA
gactatgagaatcgaacccatc

SEQ ID NO: 31371 - DNA, 23 bp, synthetic construct
  misc_feature 1..23: note = Probe
  source 1..23: mol_type = other DNA
gactatgagaatcgaacccatcc

SEQ ID NO: 31372 - DNA, 24 bp, synthetic construct
  misc_feature 1..24: note = Probe
  source 1..24: mol_type = other DNA
gactatgagaatcgaacccatccc

SEQ ID NO: 31373 - DNA, 25 bp, synthetic construct
  misc_feature 1..25: note = Probe
  source 1..25: mol_type = other DNA
gactatgagaatcgaacccatccct

SEQ ID NO: 31374 - DNA, 26 bp, synthetic construct
  misc_feature 1..26: note = Probe
  source 1..26: mol_type = other DNA
gactatgagaatcgaacccatccctg

SEQ ID NO: 31375 - DNA, 27 bp, synthetic construct
  misc_feature 1..27: note = Probe
  source 1..27: mol_type = other DNA
gactatgagaatcgaacccatccctga

SEQ ID NO: 31376 - DNA, 28 bp, synthetic construct
  misc_feature 1..28: note = Probe
  source 1..28: mol_type = other DNA
gactatgagaatcgaacccatccctgag

SEQ ID NO: 31377 - DNA, 29 bp, synthetic construct
  misc_feature 1..29: note = Probe
  source 1..29: mol_type = other DNA
gactatgagaatcgaacccatccctgaga

SEQ ID NO: 31378 - DNA, 33 bp, synthetic construct
  misc_feature 1..33: note = Probe
  source 1..33: mol_type = other DNA
gactcggtctctgtggcgcaatcggttagcgcg

SEQ ID NO: 31379 - DNA, 36 bp, synthetic construct; identical to SEQ ID NO: 20138
  misc_feature 1..36: note = Probe
  source 1..36: mol_type = other DNA

SEQ ID NO: 31380 - DNA, 16 bp, synthetic construct
  misc_feature 1..16: note = Probe
  source 1..16: mol_type = other DNA
gactggacctttcttt

SEQ ID NO: 31381 - DNA, 17 bp, synthetic construct
  misc_feature 1..17: note = Probe
  source 1..17: mol_type = other DNA
gactggacctttctttt

SEQ ID NO: 31382 - DNA, 25 bp, synthetic construct
  misc_feature 1..25: note = Probe
  source 1..25: mol_type = other DNA
gagaaaaagtctttaactccaccat

SEQ ID NO: 31383 - DNA, 15 bp, synthetic construct
  misc_feature 1..15: note = Probe
  source 1..15: mol_type = other DNA
gagaaagctcacaag

SEQ ID NO: 31384 - DNA, 16 bp, synthetic construct
  misc_feature 1..16: note = Probe
  source 1..16: mol_type = other DNA
gagaaagctcacaaga

SEQ ID NO: 31385 - DNA, 17 bp, synthetic construct
  misc_feature 1..17: note = Probe
  source 1..17: mol_type = other DNA
gagaaagctcacaagaa

SEQ ID NO: 31386 - DNA, 30 bp, synthetic construct; identical to SEQ ID NO: 932
  misc_feature 1..30: note = Probe
  source 1..30: mol_type = other DNA

SEQ ID NO: 31387 - DNA, 34 bp, synthetic construct; identical to SEQ ID NO: 936
  misc_feature 1..34: note = Probe
  source 1..34: mol_type = other DNA

SEQ ID NO: 31388 - DNA, 35 bp, synthetic construct; identical to SEQ ID NO: 937
  misc_feature 1..35: note = Probe
  source 1..35: mol_type = other DNA

SEQ ID NO: 31389 - DNA, 38 bp, synthetic construct; identical to SEQ ID NO: 940
  misc_feature 1..38: note = Probe
  source 1..38: mol_type = other DNA

SEQ ID NO: 31390 - DNA, 40 bp, synthetic construct; identical to SEQ ID NO: 942
  misc_feature 1..40: note = Probe
  source 1..40: mol_type = other DNA

SEQ ID NO: 31391 - DNA, 41 bp, synthetic construct; identical to SEQ ID NO: 943
  misc_feature 1..41: note = Probe
  source 1..41: mol_type = other DNA

SEQ ID NO: 31392 - DNA, 42 bp, synthetic construct; identical to SEQ ID NO: 944
  misc_feature 1..42: note = Probe
  source 1..42: mol_type = other DNA

SEQ ID NO: 31393 - DNA, 43 bp, synthetic construct; identical to SEQ ID NO: 945
  misc_feature 1..43: note = Probe
  source 1..43: mol_type = other DNA

SEQ ID NO: 31394 - DNA, 44 bp, synthetic construct; identical to SEQ ID NO: 946
  misc_feature 1..44: note = Probe
  source 1..44: mol_type = other DNA

SEQ ID NO: 31395 - DNA, 45 bp, synthetic construct; identical to SEQ ID NO: 947
  misc_feature 1..45: note = Probe
  source 1..45: mol_type = other DNA

SEQ ID NO: 31396 - DNA, 46 bp, synthetic construct; identical to SEQ ID NO: 948
  misc_feature 1..46: note = Probe
  source 1..46: mol_type = other DNA

SEQ ID NO: 31397 - DNA, 47 bp, synthetic construct
  misc_feature 1..47: note = Probe
  source 1..47: mol_type = other DNA
gagaaagctcacaagaactgctaactcatgcccccatgtctaacaac

SEQ ID NO: 31398 - DNA, 50 bp, synthetic construct; identical to SEQ ID NO: 950
  misc_feature 1..50: note = Probe
  source 1..50: mol_type = other DNA

SEQ ID NO: 31399 - DNA, 31 bp, synthetic construct; identical to SEQ ID NO: 951
  misc_feature 1..31: note = Probe
  source 1..31: mol_type = other DNA

SEQ ID NO: 31400 - DNA, 23 bp, synthetic construct
  misc_feature 1..23: note = Probe
  source 1..23: mol_type = other DNA
gagaatcgaacccatccctgaga

SEQ ID NO: 31401 - DNA, 25 bp, synthetic construct
  misc_feature 1..25: note = Probe
  source 1..25: mol_type = other DNA
gagacccgaggtagggctttggctg

SEQ ID NO: 31402 - DNA, 27 bp, synthetic construct
  misc_feature 1..27: note = Probe
  source 1..27: mol_type = other DNA
gagacccgaggtagggctttggctgtg

SEQ ID NO: 31403 - DNA, 28 bp, synthetic construct
  misc_feature 1..28: note = Probe
  source 1..28: mol_type = other DNA
gagacccgaggtagggctttggctgtgg

SEQ ID NO: 31404 - DNA, 30 bp, synthetic construct; identical to SEQ ID NO: 20156
  misc_feature 1..30: note = Probe
  source 1..30: mol_type = other DNA

SEQ ID NO: 31405 - DNA, 33 bp, synthetic construct; identical to SEQ ID NO: 5626
  misc_feature 1..33: note = Probe
  source 1..33: mol_type = other DNA

SEQ ID NO: 31406 - DNA, 25 bp, synthetic construct
  misc_feature 1..25: note = Probe
  source 1..25: mol_type = other DNA
gagagaggcactggtggttcagtgg

SEQ ID NO: 31407 - DNA, 38 bp, synthetic construct
  misc_feature 1..38: note = Probe
  source 1..38: mol_type = other DNA
gagagaggcactggtggttcagtggtagaattctcgcc

SEQ ID NO: 31408 - DNA, 39 bp, synthetic construct
  misc_feature 1..39: note = Probe
  source 1..39: mol_type = other DNA
gagagaggcactggtggttcagtggtagaattctcgcct

SEQ ID NO: 31409 - DNA, 29 bp, synthetic construct
  misc_feature 1..29: note = Probe
  source 1..29: mol_type = other DNA
gagagcctggatagctcagtcggtagagc

SEQ ID NO: 31410 - DNA, 30 bp, synthetic construct
  misc_feature 1..30: note = Probe
  source 1..30: mol_type = other DNA
gagagcctggatagctcagtcggtagagca

SEQ ID NO: 31411 - DNA, 31 bp, synthetic construct
  misc_feature 1..31: note = Probe
  source 1..31: mol_type = other DNA
gagagcctggatagctcagtcggtagagcat

SEQ ID NO: 31412 - DNA, 32 bp, synthetic construct
  misc_feature 1..32: note = Probe
  source 1..32: mol_type = other DNA
gagagcctggatagctcagtcggtagagcatc

SEQ ID NO: 31413 - DNA, 33 bp, synthetic construct
  misc_feature 1..33: note = Probe
  source 1..33: mol_type = other DNA
gagagcctggatagctcagtcggtagagcatca

SEQ ID NO: 31414 - DNA, 34 bp, synthetic construct
  misc_feature 1..34: note = Probe
  source 1..34: mol_type = other DNA
gagagcctggatagctcagtcggtagagcatcag

SEQ ID NO: 31415 - DNA, 35 bp, synthetic construct
  misc_feature 1..35: note = Probe
  source 1..35: mol_type = other DNA
gagagcctggatagctcagtcggtagagcatcaga

SEQ ID NO: 31416 - DNA, 36 bp, synthetic construct
  misc_feature 1..36: note = Probe
  source 1..36: mol_type = other DNA
gagagcctggatagctcagtcggtagagcatcagac

SEQ ID NO: 31417 - DNA, 37 bp, synthetic construct
  misc_feature 1..37: note = Probe
  source 1..37: mol_type = other DNA
gagagcctggatagctcagtcggtagagcatcagact

SEQ ID NO: 31418 - DNA, 39 bp, synthetic construct
  misc_feature 1..39: note = Probe
  source 1..39: mol_type = other DNA
gagagcctggatagctcagtcggtagagcatcagacttt

SEQ ID NO: 31419 - DNA, 16 bp, synthetic construct
  misc_feature 1..16: note = Probe
  source 1..16: mol_type = other DNA
gagagcgctcggtttt

SEQ ID NO: 31420 - DNA, 17 bp, synthetic construct
  misc_feature 1..17: note = Probe
  source 1..17: mol_type = other DNA
gagagcgctcggttttt

SEQ ID NO: 31421 - DNA, 18 bp, synthetic construct
  misc_feature 1..18: note = Probe
  source 1..18: mol_type = other DNA
gagagcgctcggtttttt

SEQ ID NO: 31422 - DNA, 19 bp, synthetic construct
  misc_feature 1..19: note = Probe
  source 1..19: mol_type = other DNA
gagagcgctcggttttttg

SEQ ID NO: 31423 - DNA, 36 bp, synthetic construct; identical to SEQ ID NO: 20181
  misc_feature 1..36: note = Probe
  source 1..36: mol_type = other DNA

SEQ ID NO: 31424 - DNA, 23 bp, synthetic construct
  misc_feature 1..23: note = Probe
  source 1..23: mol_type = other DNA
gagaggcactggtggttcagtgg

SEQ ID NO: 31425 - DNA, 30 bp, synthetic construct; identical to SEQ ID NO: 20184
  misc_feature 1..30: note = Probe
  source 1..30: mol_type = other DNA

SEQ ID NO: 31426 - DNA, 31 bp, synthetic construct
  misc_feature 1..31: note = Probe
  source 1..31: mol_type = other DNA
gagaggcactggtggttcagtggtagaattc

SEQ ID NO: 31427 - DNA, 32 bp, synthetic construct; identical to SEQ ID NO: 20185
  misc_feature 1..32: note = Probe
  source 1..32: mol_type = other DNA

SEQ ID NO: 31428 - DNA, 36 bp, synthetic construct
  misc_feature 1..36: note = Probe
  source 1..36: mol_type = other DNA
gagaggcactggtggttcagtggtagaattctcgcc

SEQ ID NO: 31429 - DNA, 37 bp, synthetic construct
  misc_feature 1..37: note = Probe
  source 1..37: mol_type = other DNA
gagaggcactggtggttcagtggtagaattctcgcct

SEQ ID NO: 31430 - DNA, 38 bp, synthetic construct
  misc_feature 1..38: note = Probe
  source 1..38: mol_type = other DNA
gagaggcactggtggttcagtggtagaattctcgcctc

SEQ ID NO: 31431 - DNA, 36 bp, synthetic construct
  misc_feature 1..36: note = Probe
  source 1..36: mol_type = other DNA
gagaggcgttggtggtttagtggtagaattctcgcc

SEQ ID NO: 31432 - DNA, 28 bp, synthetic construct
  misc_feature 1..28: note = Probe
  source 1..28: mol_type = other DNA
gagaggggctgtgctcgcaaggtttctt

SEQ ID NO: 31433 - DNA, 15 bp, synthetic construct
  misc_feature 1..15: note = Probe
  source 1..15: mol_type = other DNA
gagaggtcccgggtt

SEQ ID NO: 31434 - DNA, 36 bp, synthetic construct
  misc_feature 1..36: note = Probe
  source 1..36: mol_type = other DNA
gagagtgccaggatagttcaggtggtagagcatcag

SEQ ID NO: 31435 - DNA, 25 bp, synthetic construct
  misc_feature 1..25: note = Probe
  source 1..25: mol_type = other DNA
gagatgaaaacctttttccaaggac

SEQ ID NO: 31436 - DNA, 26 bp, synthetic construct
  misc_feature 1..26: note = Probe
  source 1..26: mol_type = other DNA
gagatgaaaacctttttccaaggaca

SEQ ID NO: 31437 - DNA, 17 bp, synthetic construct
  misc_feature 1..17: note = Probe
  source 1..17: mol_type = other DNA
gagatgttacctagcgt

SEQ ID NO: 31438 - DNA, 19 bp, synthetic construct
  misc_feature 1..19: note = Probe
  source 1..19: mol_type = other DNA
gagatgttacctagcgttt

SEQ ID NO: 31439 - DNA, 29 bp, synthetic construct
  misc_feature 1..29: note = Probe
  source 1..29: mol_type = other DNA
gagatgttacctagcgttttgtgagccag

SEQ ID NO: 31440 - DNA, 25 bp, synthetic construct
  misc_feature 1..25: note = Probe
  source 1..25: mol_type = other DNA
gagatttcaacttaacttgaccgct

SEQ ID NO: 31441 - DNA, 27 bp, synthetic construct
  misc_feature 1..27: note = Probe
  source 1..27: mol_type = other DNA
gagatttcaacttaacttgaccgctct

SEQ ID NO: 31442 - DNA, 28 bp, synthetic construct
  misc_feature 1..28: note = Probe
  source 1..28: mol_type = other DNA
gagatttcaacttaacttgaccgctctg

SEQ ID NO: 31443 - DNA, 29 bp, synthetic construct
  misc_feature 1..29: note = Probe
  source 1..29: mol_type = other DNA
gagatttcaacttaacttgaccgctctga

SEQ ID NO: 31444 - DNA, 30 bp, synthetic construct; identical to SEQ ID NO: 5641
  misc_feature 1..30: note = Probe
  source 1..30: mol_type = other DNA

SEQ ID NO: 31445 - DNA, 31 bp, synthetic construct; identical to SEQ ID NO: 5642
  misc_feature 1..31: note = Probe
  source 1..31: mol_type = other DNA

SEQ ID NO: 31446 - DNA, 36 bp, synthetic construct
  misc_feature 1..36: note = Probe
  source 1..36: mol_type = other DNA
gagatttcaacttaacttgaccgctctgagctaaac

SEQ ID NO: 31447 - DNA, 36 bp, synthetic construct
  misc_feature 1..36: note = Probe
  source 1..36: mol_type = other DNA
gagcaactagacagccggctcgttggtctaggggta

SEQ ID NO: 31448 - DNA, 36 bp, synthetic construct; identical to SEQ ID NO: 20226
  misc_feature 1..36: note = Probe
  source 1..36: mol_type = other DNA

SEQ ID NO: 31449 - DNA, 15 bp, synthetic construct
  misc_feature 1..15: note = Probe
  source 1..15: mol_type = other DNA
gagcccggatagctc

SEQ ID NO: 31450 - DNA, 36 bp, synthetic construct; identical to SEQ ID NO: 20244
  misc_feature 1..36: note = Probe
  source 1..36: mol_type = other DNA

SEQ ID NO: 31451 - DNA, 18 bp, synthetic construct
  misc_feature 1..18: note = Probe
  source 1..18: mol_type = other DNA
gagcccggtaatcgcata

SEQ ID NO: 31452 - DNA, 25 bp, synthetic construct
  misc_feature 1..25: note = Probe
  source 1..25: mol_type = other DNA
gagcccggtaatcgcataaaactta

SEQ ID NO: 31453 - DNA, 29 bp, synthetic construct
  misc_feature 1..29: note = Probe
  source 1..29: mol_type = other DNA
gagcccggtaatcgcataaaacttaaaac

SEQ ID NO: 31454 - DNA, 31 bp, synthetic construct; identical to SEQ ID NO: 961
  misc_feature 1..31: note = Probe
  source 1..31: mol_type = other DNA

SEQ ID NO: 31455 - DNA, 36 bp, synthetic construct
  misc_feature 1..36: note = Probe
  source 1..36: mol_type = other DNA
gagcccggtaatcgcataaaacttaaaactttacag

SEQ ID NO: 31456 - DNA, 24 bp, synthetic construct
  misc_feature 1..24: note = Probe
  source 1..24: mol_type = other DNA
gagcctcacctggagcaagaccct

SEQ ID NO: 31457 - DNA, 30 bp, synthetic construct
  misc_feature 1..30: note = Probe
  source 1..30: mol_type = other DNA
gagcctggatagctcagtcggtagagcatc

SEQ ID NO: 31458 - DNA, 36 bp, synthetic construct
  misc_feature 1..36: note = Probe
  source 1..36: mol_type = other DNA
gagcctggatagctcagtcggtagagcatcagactt

SEQ ID NO: 31459 - DNA, 20 bp, synthetic construct
  misc_feature 1..20: note = Probe
  source 1..20: mol_type = other DNA
gagcgacggctcgttggtct

SEQ ID NO: 31460 - DNA, 36 bp, synthetic construct; identical to SEQ ID NO: 20274
  misc_feature 1..36: note = Probe
  source 1..36: mol_type = other DNA

SEQ ID NO: 31461 - DNA, 36 bp, synthetic construct
  misc_feature 1..36: note = Probe
  source 1..36: mol_type = other DNA
gagcgcccggatagctcagtcggtagagcatcagac

SEQ ID NO: 31462 - DNA, 36 bp, synthetic construct
  misc_feature 1..36: note = Probe
  source 1..36: mol_type = other DNA
gagcgttagactgaagatctaaaggtccctggttcg

SEQ ID NO: 31463 - DNA, 26 bp, synthetic construct
  misc_feature 1..26: note = Probe
  source 1..26: mol_type = other DNA
gaggacaatggcacggcaaggggagt

SEQ ID NO: 31464 - DNA, 35 bp, synthetic construct
  misc_feature 1..35: note = Probe
  source 1..35: mol_type = other DNA
gaggcactggtggttcagtggtagaattctcgcct

SEQ ID NO: 31465 - DNA, 36 bp, synthetic construct
  misc_feature 1..36: note = Probe
  source 1..36: mol_type = other DNA
gaggcactggtggttcagtggtagaattctcgcctc

SEQ ID NO: 31466 - DNA, 33 bp, synthetic construct
  misc_feature 1..33: note = Probe
  source 1..33: mol_type = other DNA
gaggcattggtggttcagtggtagaattctcgc

SEQ ID NO: 31467 - DNA, 34 bp, synthetic construct
  misc_feature 1..34: note = Probe
  source 1..34: mol_type = other DNA
gaggcattggtggttcagtggtagaattctcgcc

SEQ ID NO: 31468 - DNA, 35 bp, synthetic construct
  misc_feature 1..35: note = Probe
  source 1..35: mol_type = other DNA
gaggcattggtggttcagtggtagaattctcgcct

SEQ ID NO: 31469 - DNA, 36 bp, synthetic construct
  misc_feature 1..36: note = Probe
  source 1..36: mol_type = other DNA
gaggcattggtggttcagtggtagaattctcgcctc

SEQ ID NO: 31470 - DNA, 36 bp, synthetic construct
  misc_feature 1..36: note = Probe
  source 1..36: mol_type = other DNA
gaggcattggtggttcagtggtagaattctcgcctg

SEQ ID NO: 31471 - DNA, 15 bp, synthetic construct
  misc_feature 1..15: note = Probe
  source 1..15: mol_type = other DNA
gaggcttaaactttt

SEQ ID NO: 31472 - DNA, 24 bp, synthetic construct
  misc_feature 1..24: note = Probe
  source 1..24: mol_type = other DNA
gaggcttacgaccccttatttacc

SEQ ID NO: 31473 - DNA, 25 bp, synthetic construct
  misc_feature 1..25: note = Probe
  source 1..25: mol_type = other DNA
gaggcttacgaccccttatttaccg

SEQ ID NO: 31474 - DNA, 33 bp, synthetic construct
  misc_feature 1..33: note = Probe
  source 1..33: mol_type = other DNA
gagggaggttccatggtgtaatggttagcactc

SEQ ID NO: 31475 - DNA, 17 bp, synthetic construct
  misc_feature 1..17: note = Probe
  source 1..17: mol_type = other DNA
gagggccagtggcgcaa

SEQ ID NO: 31476 - DNA, 36 bp, synthetic construct
  misc_feature 1..36: note = Probe
  source 1..36: mol_type = other DNA
gagggctgtctgcagacgaggtggccgagtggttaa

SEQ ID NO: 31477 - DNA, 26 bp, synthetic construct
  misc_feature 1..26: note = Probe
  source 1..26: mol_type = other DNA
gaggggctgtgctcgcaaggtttctt

SEQ ID NO: 31478 - DNA, 36 bp, synthetic construct
  misc_feature 1..36: note = Probe
  source 1..36: mol_type = other DNA
gagggtccagggttcaagtccctgttcaggcgaact

SEQ ID NO: 31479 - DNA, 31 bp, synthetic construct
  misc_feature 1..31: note = Probe
  source 1..31: mol_type = other DNA
gagggtccagggttcaagtccctgttcgggc

SEQ ID NO: 31480 - DNA, 33 bp, synthetic construct; identical to SEQ ID NO: 5670
  misc_feature 1..33: note = Probe
  source 1..33: mol_type = other DNA

SEQ ID NO: 31481 - DNA, 36 bp, synthetic construct
  misc_feature 1..36: note = Probe
  source 1..36: mol_type = other DNA
gagggtccagggttcaagtccctgttcgggcggcat

SEQ ID NO: 31482 - DNA, 37 bp, synthetic construct
  misc_feature 1..37: note = Probe
  source 1..37: mol_type = other DNA
gagggtccagggttcaagtccctgttcgggcggcatg

SEQ ID NO: 31483 - DNA, 36 bp, synthetic construct
  misc_feature 1..36: note = Probe
  source 1..36: mol_type = other DNA
gagggtccagggttcaagtccctgttcgggcgggag

SEQ ID NO: 31484 - DNA, 36 bp, synthetic construct
  misc_feature 1..36: note = Probe
  source 1..36: mol_type = other DNA
gagggtccagggttcaagtccctgttcgggcggtat

SEQ ID NO: 31485 - DNA, 39 bp, synthetic construct
  misc_feature 1..39: note = Probe
  source 1..39: mol_type = other DNA
gagggtccagggttcaagtccctgttcgggcggtatctt

SEQ ID NO: 31486 - DNA, 40 bp, synthetic construct; identical to SEQ ID NO: 20312
  misc_feature 1..40: note = Probe
  source 1..40: mol_type = other DNA

SEQ ID NO: 31487 - DNA, 41 bp, synthetic construct; identical to SEQ ID NO: 20313
  misc_feature 1..41: note = Probe
  source 1..41: mol_type = other DNA

SEQ ID NO: 31488 - DNA, 33 bp, synthetic construct; identical to SEQ ID NO: 5671
  misc_feature 1..33: note = Probe
  source 1..33: mol_type = other DNA

SEQ ID NO: 31489 - DNA, 36 bp, synthetic construct
  misc_feature 1..36: note = Probe
  source 1..36: mol_type = other DNA
gagggtccagggttcaagtccctgttcgggcgtctt

SEQ ID NO: 31490 - DNA, 36 bp, synthetic construct
  misc_feature 1..36: note = Probe
  source 1..36: mol_type = other DNA
gagggtccagggttcaagtccctgttcgggcgtttg

SEQ ID NO: 31491 - DNA, 41 bp, synthetic construct
  misc_feature 1..41: note = Probe
  source 1..41: mol_type = other DNA
gagggtccagggttcaagtccctgttcgggcgtttgtagtt

SEQ ID NO: 31492 - DNA, 42 bp, synthetic construct
  misc_feature 1..42: note = Probe
  source 1..42: mol_type = other DNA
gagggtccagggttcaagtccctgttcgggcgtttgtagttt

SEQ ID NO: 31493 - DNA, 43 bp, synthetic construct
  misc_feature 1..43: note = Probe
  source 1..43: mol_type = other DNA
gagggtccagggttcaagtccctgttcgggcgtttgtagtttt

SEQ ID NO: 31494 - DNA, 36 bp, synthetic construct
  misc_feature 1..36: note = Probe
  source 1..36: mol_type = other DNA
gagggtccggggttcaagtccctgttcgggcggatg

SEQ ID NO: 31495 - DNA, 39 bp, synthetic construct
  misc_feature 1..39: note = Probe
  source 1..39: mol_type = other DNA
gagggtccggggttcaagtccctgttcgggcggatgctg

SEQ ID NO: 31496 - DNA, 41 bp, synthetic construct
  misc_feature 1..41: note = Probe
  source 1..41: mol_type = other DNA
gagggtccggggttcaagtccctgttcgggcggatgctgtt

SEQ ID NO: 31497 - DNA, 42 bp, synthetic construct
  misc_feature 1..42: note = Probe
  source 1..42: mol_type = other DNA
gagggtccggggttcaagtccctgttcgggcggatgctgttt

SEQ ID NO: 31498 - DNA, 43 bp, synthetic construct
  misc_feature 1..43: note = Probe
  source 1..43: mol_type = other DNA
gagggtccggggttcaagtccctgttcgggcggatgctgtttt

SEQ ID NO: 31499 - DNA, 36 bp, synthetic construct
  misc_feature 1..36: note = Probe
  source 1..36: mol_type = other DNA
gagggtctagggttcaagtccctgtccaggcgttga

SEQ ID NO: 31500 - DNA, 45 bp, synthetic construct
  misc_feature 1..45: note = Probe
  source 1..45: mol_type = other DNA
gagggtctagggttcaagtccctgtccaggcgttgagtgtagttt

SEQ ID NO: 31501 - DNA, 28 bp, synthetic construct
  misc_feature 1..28: note = Probe
  source 1..28: mol_type = other DNA
gagggttctcaccttctctctccgattt

SEQ ID NO: 31502 - DNA, 29 bp, synthetic construct
  misc_feature 1..29: note = Probe
  source 1..29: mol_type = other DNA
gagggttctcaccttctctctccgatttt

SEQ ID NO: 31503 - DNA, 18 bp, synthetic construct
  misc_feature 1..18: note = Probe
  source 1..18: mol_type = other DNA
gaggtagggctttggctg

SEQ ID NO: 31504 - DNA, 24 bp, synthetic construct
  misc_feature 1..24: note = Probe
  source 1..24: mol_type = other DNA
gaggtcctgtgtccctagtagctc

SEQ ID NO: 31505 - DNA, 15 bp, synthetic construct
  misc_feature 1..15: note = Probe
  source 1..15: mol_type = other DNA
gaggtcgatggatct

SEQ ID NO: 31506 - DNA, 36 bp, synthetic construct
  misc_feature 1..36: note = Probe
  source 1..36: mol_type = other DNA
gaggttccatggtgtaatggtgagcactctggactc

SEQ ID NO: 31507 - DNA, 15 bp, synthetic construct
  misc_feature 1..15: note = Probe
  source 1..15: mol_type = other DNA
gaggtttttctgttt

SEQ ID NO: 31508 - DNA, 17 bp, synthetic construct
  misc_feature 1..17: note = Probe
  source 1..17: mol_type = other DNA
gagtaaataataggagc

SEQ ID NO: 31509 - DNA, 19 bp, synthetic construct
  misc_feature 1..19: note = Probe
  source 1..19: mol_type = other DNA
gagtaaataataggagctt

SEQ ID NO: 31510 - DNA, 20 bp, synthetic construct
  misc_feature 1..20: note = Probe
  source 1..20: mol_type = other DNA
gagtaaataataggagctta

SEQ ID NO: 31511 - DNA, 25 bp, synthetic construct
  misc_feature 1..25: note = Probe
  source 1..25: mol_type = other DNA
gagtaaataataggagcttaaaccc

SEQ ID NO: 31512 - DNA, 15 bp, synthetic construct
  misc_feature 1..15: note = Probe
  source 1..15: mol_type = other DNA
gagtgaagcattgga

SEQ ID NO: 31513 - DNA, 16 bp, synthetic construct
  misc_feature 1..16: note = Probe
  source 1..16: mol_type = other DNA
gagtgaagcattggac

SEQ ID NO: 31514 - DNA, 17 bp, synthetic construct
  misc_feature 1..17: note = Probe
  source 1..17: mol_type = other DNA
gagtgaagcattggact

SEQ ID NO: 31515 - DNA, 18 bp, synthetic construct
  misc_feature 1..18: note = Probe
  source 1..18: mol_type = other DNA
gagtgaagcattggactg

SEQ ID NO: 31516 - DNA, 19 bp, synthetic construct
  misc_feature 1..19: note = Probe
  source 1..19: mol_type = other DNA
gagtgaagcattggactgt

SEQ ID NO: 31517 - DNA, 20 bp, synthetic construct
  misc_feature 1..20: note = Probe
  source 1..20: mol_type = other DNA
gagtgaagcattggactgta

SEQ ID NO: 31518 - DNA, 21 bp, synthetic construct
  misc_feature 1..21: note = Probe
  source 1..21: mol_type = other DNA
gagtgaagcattggactgtaa

SEQ ID NO: 31519 - DNA, 22 bp, synthetic construct
  misc_feature 1..22: note = Probe
  source 1..22: mol_type = other DNA
gagtgaagcattggactgtaaa

SEQ ID NO: 31520 - DNA, 23 bp, synthetic construct
  misc_feature 1..23: note = Probe
  source 1..23: mol_type = other DNA
gagtgaagcattggactgtaaat

SEQ ID NO: 31521 - DNA, 24 bp, synthetic construct
  misc_feature 1..24: note = Probe
  source 1..24: mol_type = other DNA
gagtgaagcattggactgtaaatc

SEQ ID NO: 31522 - DNA, 25 bp, synthetic construct
  misc_feature 1..25: note = Probe
  source 1..25: mol_type = other DNA
gagtgaagcattggactgtaaatct

SEQ ID NO: 31523 - DNA, 26 bp, synthetic construct
  misc_feature 1..26: note = Probe
  source 1..26: mol_type = other DNA
gagtgaagcattggactgtaaatcta

SEQ ID NO: 31524 - DNA, 27 bp, synthetic construct
  misc_feature 1..27: note = Probe
  source 1..27: mol_type = other DNA
gagtgaagcattggactgtaaatctaa

SEQ ID NO: 31525 - DNA, 28 bp, synthetic construct
  misc_feature 1..28: note = Probe
  source 1..28: mol_type = other DNA
gagtgaagcattggactgtaaatctaaa

SEQ ID NO: 31526 - DNA, 29 bp, synthetic construct
  misc_feature 1..29: note = Probe
  source 1..29: mol_type = other DNA
gagtgaagcattggactgtaaatctaaag

SEQ ID NO: 31527 - DNA, 30 bp, synthetic construct
  misc_feature 1..30: note = Probe
  source 1..30: mol_type = other DNA
gagtgaagcattggactgtaaatctaaaga

SEQ ID NO: 31528 - DNA, 32 bp, synthetic construct
  misc_feature 1..32: note = Probe
  source 1..32: mol_type = other DNA
gagtgaagcattggactgtaaatctaaagaca

SEQ ID NO: 31529 - DNA, 36 bp, synthetic construct
  misc_feature 1..36: note = Probe
  source 1..36: mol_type = other DNA
gagtgaagcattggactgtaaatctaaagacagggg

SEQ ID NO: 31530 - DNA, 44 bp, synthetic construct
  misc_feature 1..44: note = Probe
  source 1..44: mol_type = other DNA
gagtgaagcattggactgtaaatctaaagacaggggttaggcct

SEQ ID NO: 31531 - DNA, 45 bp, synthetic construct
  misc_feature 1..45: note = Probe
  source 1..45: mol_type = other DNA
gagtgaagcattggactgtaaatctaaagacaggggttaggcctc

SEQ ID NO: 31532 - DNA, 36 bp, synthetic construct
  misc_feature 1..36: note = Probe
  source 1..36: mol_type = other DNA
gagtgccaggatagttcaggtggtagagcatcagac

SEQ ID NO: 31533 - DNA, 27 bp, synthetic construct
  misc_feature 1..27: note = Probe
  source 1..27: mol_type = other DNA
gagtggcgcagcggaagcgtgctgggc

SEQ ID NO: 31534 - DNA, 29 bp, synthetic construct
  misc_feature 1..29: note = Probe
  source 1..29: mol_type = other DNA
gagtggcgcagcggaagcgtgctgggccc

SEQ ID NO: 31535 - DNA, 36 bp, synthetic construct
  misc_feature 1..36: note = Probe
  source 1..36: mol_type = other DNA
gagtggcgcagcggaagcgtgctgggcccataaccc

SEQ ID NO: 31536 - DNA, 25 bp, synthetic construct
  misc_feature 1..25: note = Probe
  source 1..25: mol_type = other DNA
gagtgtagcttaacacaaagcaccc

SEQ ID NO: 31537 - DNA, 15 bp, synthetic construct
  misc_feature 1..15: note = Probe
  source 1..15: mol_type = other DNA
gagtgtcaggatggc

SEQ ID NO: 31538 - DNA, 16 bp, synthetic construct
  misc_feature 1..16: note = Probe
  source 1..16: mol_type = other DNA
gagtgtcaggatggcc

SEQ ID NO: 31539 - DNA, 17 bp, synthetic construct
  misc_feature 1..17: note = Probe
  source 1..17: mol_type = other DNA
gagtgtcaggatggccg

SEQ ID NO: 31540 - DNA, 24 bp, synthetic construct
  misc_feature 1..24: note = Probe
  source 1..24: mol_type = other DNA
gagtgtcaggatggccgagtggtc

SEQ ID NO: 31541 - DNA, 25 bp, synthetic construct
  misc_feature 1..25: note = Probe
  source 1..25: mol_type = other DNA
gagtgtcaggatggccgagtggtct

SEQ ID NO: 31542 - DNA, 26 bp, synthetic construct
  misc_feature 1..26: note = Probe
  source 1..26: mol_type = other DNA
gagtgtcaggatggccgagtggtcta

SEQ ID NO: 31543 - DNA, 28 bp, synthetic construct
  misc_feature 1..28: note = Probe
  source 1..28: mol_type = other DNA
gagtgtcaggatggccgagtggtctaag

SEQ ID NO: 31544 - DNA, 29 bp, synthetic construct
  misc_feature 1..29: note = Probe
  source 1..29: mol_type = other DNA
gagtgtcaggatggccgagtggtctaagg

SEQ ID NO: 31545 - DNA, 30 bp, synthetic construct
  misc_feature 1..30: note = Probe
  source 1..30: mol_type = other DNA
gagtgtcaggatggccgagtggtctaaggc

SEQ ID NO: 31546 - DNA, 36 bp, synthetic construct; identical to SEQ ID NO: 20368
  misc_feature 1..36: note = Probe
  source 1..36: mol_type = other DNA

SEQ ID NO: 31547 - DNA, 23 bp, synthetic construct
  misc_feature 1..23: note = Probe
  source 1..23: mol_type = other DNA
gagttaaagactttttctctgat

SEQ ID NO: 31548 - DNA, 21 bp, synthetic construct
  misc_feature 1..21: note = Probe
  source 1..21: mol_type = other DNA
gagttagcggggagtgatata

SEQ ID NO: 31549 - DNA, 22 bp, synthetic construct
  misc_feature 1..22: note = Probe
  source 1..22: mol_type = other DNA
gagttagcggggagtgatatat

SEQ ID NO: 31550 - DNA, 23 bp, synthetic construct
  misc_feature 1..23: note = Probe
  source 1..23: mol_type = other DNA
gagttagcggggagtgatatatt

SEQ ID NO: 31551 - DNA, 24 bp, synthetic construct
  misc_feature 1..24: note = Probe
  source 1..24: mol_type = other DNA
gagttagcggggagtgatatatta

SEQ ID NO: 31552 - DNA, 25 bp, synthetic construct
  misc_feature 1..25: note = Probe
  source 1..25: mol_type = other DNA
gagttagcggggagtgatatattat

SEQ ID NO: 31553 - DNA, 26 bp, synthetic construct
  misc_feature 1..26: note = Probe
  source 1..26: mol_type = other DNA
gagttagcggggagtgatatattatt

SEQ ID NO: 31554 - DNA, 27 bp, synthetic construct
  misc_feature 1..27: note = Probe
  source 1..27: mol_type = other DNA
gagttagcggggagtgatatattattg

SEQ ID NO: 31555 - DNA, 24 bp, synthetic construct
  misc_feature 1..24: note = Probe
  source 1..24: mol_type = other DNA
gataaaagagttactttgatagag

SEQ ID NO: 31556 - DNA, 36 bp, synthetic construct
  misc_feature 1..36: note = Probe
  source 1..36: mol_type = other DNA
gataaaagagttactttgatagagtaaataatagga

SEQ ID NO: 31557 - DNA, 39 bp, synthetic construct
  misc_feature 1..39: note = Probe
  source 1..39: mol_type = other DNA
gataaaagagttactttgatagagtaaataataggagct

SEQ ID NO: 31558 - DNA, 40 bp, synthetic construct
  misc_feature 1..40: note = Probe
  source 1..40: mol_type = other DNA
gataaaagagttactttgatagagtaaataataggagctt

SEQ ID NO: 31559 - DNA, 20 bp, synthetic construct
  misc_feature 1..20: note = Probe
  source 1..20: mol_type = other DNA
gataacagctatccattggt

SEQ ID NO: 31560 - DNA, 23 bp, synthetic construct
  misc_feature 1..23: note = Probe
  source 1..23: mol_type = other DNA
gataacagctatccattggtctt

SEQ ID NO: 31561 - DNA, 24 bp, synthetic construct
  misc_feature 1..24: note = Probe
  source 1..24: mol_type = other DNA
gataacagctatccattggtctta

SEQ ID NO: 31562 - DNA, 28 bp, synthetic construct
  misc_feature 1..28: note = Probe
  source 1..28: mol_type = other DNA
gataacagctatccattggtcttaggcc

SEQ ID NO: 31563 - DNA, 29 bp, synthetic construct
  misc_feature 1..29: note = Probe
  source 1..29: mol_type = other DNA
gataacagctatccattggtcttaggccc

SEQ ID NO: 31564 - DNA, 30 bp, synthetic construct
  misc_feature 1..30: note = Probe
  source 1..30: mol_type = other DNA
gataacagctatccattggtcttaggcccc

SEQ ID NO: 31565 - DNA, 31 bp, synthetic construct; identical to SEQ ID NO: 20382
  misc_feature 1..31: note = Probe
  source 1..31: mol_type = other DNA

SEQ ID NO: 31566 - DNA, 36 bp, synthetic construct
  misc_feature 1..36: note = Probe
  source 1..36: mol_type = other DNA
gataacagctatccattggtcttaggccccaaaaat

SEQ ID NO: 31567 - DNA, 21 bp, synthetic construct
  misc_feature 1..21: note = Probe
  source 1..21: mol_type = other DNA
gatagagtaaataataggagc

SEQ ID NO: 31568 - DNA, 23 bp, synthetic construct
  misc_feature 1..23: note = Probe
  source 1..23: mol_type = other DNA
gatagagtaaataataggagctt

SEQ ID NO: 31569 - DNA, 28 bp, synthetic construct
  misc_feature 1..28: note = Probe
  source 1..28: mol_type = other DNA
gatagagtaaataataggagcttaaacc

SEQ ID NO: 31570 - DNA, 30 bp, synthetic construct
  misc_feature 1..30: note = Probe
  source 1..30: mol_type = other DNA
gatagagtaaataataggagcttaaacccc

SEQ ID NO: 31571 - DNA, 36 bp, synthetic construct
  misc_feature 1..36: note = Probe
  source 1..36: mol_type = other DNA
gatagctcagctggtagagcggaggactgtagcctg

SEQ ID NO: 31572 - DNA, 36 bp, synthetic construct
  misc_feature 1..36: note = Probe
  source 1..36: mol_type = other DNA
gatagctcagctggtagagcggaggactgtagtact

SEQ ID NO: 31573 - DNA, 19 bp, synthetic construct
  misc_feature 1..19: note = Probe
  source 1..19: mol_type = other DNA
gatagctcagtcggtagag

SEQ ID NO: 31574 - DNA, 21 bp, synthetic construct
  misc_feature 1..21: note = Probe
  source 1..21: mol_type = other DNA
gatagctcagtcggtagagca

SEQ ID NO: 31575 - DNA, 27 bp, synthetic construct
  misc_feature 1..27: note = Probe
  source 1..27: mol_type = other DNA
gatagctcagtcggtagagcatcagac

SEQ ID NO: 31576 - DNA, 28 bp, synthetic construct
  misc_feature 1..28: note = Probe
  source 1..28: mol_type = other DNA
gatagctcagtcggtagagcatcagact

SEQ ID NO: 31577 - DNA, 29 bp, synthetic construct
  misc_feature 1..29: note = Probe
  source 1..29: mol_type = other DNA
gatagctcagtcggtagagcatcagactt

SEQ ID NO: 31578 - DNA, 32 bp, synthetic construct; identical to SEQ ID NO: 20398
  misc_feature 1..32: note = Probe
  source 1..32: mol_type = other DNA

SEQ ID NO: 31579 - DNA, 27 bp, synthetic construct
  misc_feature 1..27: note = Probe
  source 1..27: mol_type = other DNA
gatagctcagttggtagagcggaggac

SEQ ID NO: 31580 - DNA, 36 bp, synthetic construct
  misc_feature 1..36: note = Probe
  source 1..36: mol_type = other DNA
gataggtggcacggagaattttggattctcagggat

SEQ ID NO: 31581 - DNA, 20 bp, synthetic construct
  misc_feature 1..20: note = Probe
  source 1..20: mol_type = other DNA
gatatccaaccttcagctat

SEQ ID NO: 31582 - DNA, 26 bp, synthetic construct
  misc_feature 1..26: note = Probe
  source 1..26: mol_type = other DNA
gatatccaaccttcagctatagggtg

SEQ ID NO: 31583 - DNA, 27 bp, synthetic construct
  misc_feature 1..27: note = Probe
  source 1..27: mol_type = other DNA
gatatccaaccttcagctatagggtgg

SEQ ID NO: 31584 - DNA, 30 bp, synthetic construct; identical to SEQ ID NO: 20401
  misc_feature 1..30: note = Probe
  source 1..30: mol_type = other DNA

SEQ ID NO: 31585 - DNA, 36 bp, synthetic construct
  misc_feature 1..36: note = Probe
  source 1..36: mol_type = other DNA
gatcagaagattctaggttcgactcctggctggctc

SEQ ID NO: 31586 - DNA, 39 bp, synthetic construct
  misc_feature 1..39: note = Probe
  source 1..39: mol_type = other DNA
gatcagaagattctaggttcgactcctggctggctcgcg

SEQ ID NO: 31587 - DNA, 40 bp, synthetic construct
  misc_feature 1..40: note = Probe
  source 1..40: mol_type = other DNA
gatcagaagattctaggttcgactcctggctggctcgcga

SEQ ID NO: 31588 - DNA, 39 bp, synthetic construct
  misc_feature 1..39: note = Probe
  source 1..39: mol_type = other DNA
gatcagaagattctaggttcgactcctggctggctcgct

SEQ ID NO: 31589 - DNA, 36 bp, synthetic construct
  misc_feature 1..36: note = Probe
  source 1..36: mol_type = other DNA
gatcagaaggttgcgtgttcaagtcacgtcggggtc

SEQ ID NO: 31590 - DNA, 24 bp, synthetic construct
  misc_feature 1..24: note = Probe
  source 1..24: mol_type = other DNA
gatccccagcatctccagtgtttt

SEQ ID NO: 31591 - DNA, 28 bp, synthetic construct
  misc_feature 1..28: note = Probe
  source 1..28: mol_type = other DNA
gatccccagtacctccaggccgtgtttt

SEQ ID NO: 31592 - DNA, 18 bp, synthetic construct
  misc_feature 1..18: note = Probe
  source 1..18: mol_type = other DNA
gatcccgggtttcggcac

SEQ ID NO: 31593 - DNA, 36 bp, synthetic construct
  misc_feature 1..36: note = Probe
  source 1..36: mol_type = other DNA
gatcgggaggtagcgtggccgagtggtctaaggcgc

SEQ ID NO: 31594 - DNA, 23 bp, synthetic construct
  misc_feature 1..23: note = Probe
  source 1..23: mol_type = other DNA
gatgaaaacctttttccaaggac

SEQ ID NO: 31595 - DNA, 25 bp, synthetic construct
  misc_feature 1..25: note = Probe
  source 1..25: mol_type = other DNA
gatgaaaacctttttccaaggacaa

SEQ ID NO: 31596 - DNA, 36 bp, synthetic construct
  misc_feature 1..36: note = Probe
  source 1..36: mol_type = other DNA
gatggcagagcccggtaatcgcataaaacttaaaac

SEQ ID NO: 31597 - DNA, 27 bp, synthetic construct
  misc_feature 1..27: note = Probe
  source 1..27: mol_type = other DNA
gatggggtgtgataggtggcacggaga

SEQ ID NO: 31598 - DNA, 33 bp, synthetic construct; identical to SEQ ID NO: 5734
  misc_feature 1..33: note = Probe
  source 1..33: mol_type = other DNA

SEQ ID NO: 31599 - DNA, 23 bp, synthetic construct
  misc_feature 1..23: note = Probe
  source 1..23: mol_type = other DNA
gatggtttttcatatcattggtc

SEQ ID NO: 31600 - DNA, 31 bp, synthetic construct
  misc_feature 1..31: note = Probe
  source 1..31: mol_type = other DNA
gatggtttttcatatcattggtcgtggttgt

SEQ ID NO: 31601 - DNA, 32 bp, synthetic construct
  misc_feature 1..32: note = Probe
  source 1..32: mol_type = other DNA
gatggtttttcatatcattggtcgtggttgta

SEQ ID NO: 31602 - DNA, 33 bp, synthetic construct
  misc_feature 1..33: note = Probe
  source 1..33: mol_type = other DNA
gatggtttttcatatcattggtcgtggttgtag

SEQ ID NO: 31603 - DNA, 35 bp, synthetic construct
  misc_feature 1..35: note = Probe
  source 1..35: mol_type = other DNA
gatggtttttcatatcattggtcgtggttgtagtc

SEQ ID NO: 31604 - DNA, 45 bp, synthetic construct
  misc_feature 1..45: note = Probe
  source 1..45: mol_type = other DNA
gatggtttttcatatcattggtcgtggttgtagtccgtgcgagaa

SEQ ID NO: 31605 - DNA, 19 bp, synthetic construct
  misc_feature 1..19: note = Probe
  source 1..19: mol_type = other DNA
gattaagagaaccaacacc

SEQ ID NO: 31606 - DNA, 20 bp, synthetic construct
  misc_feature 1..20: note = Probe
  source 1..20: mol_type = other DNA
gattaagagaaccaacacct

SEQ ID NO: 31607 - DNA, 32 bp, synthetic construct; identical to SEQ ID NO: 5737
  misc_feature 1..32: note = Probe
  source 1..32: mol_type = other DNA

SEQ ID NO: 31608 - DNA, 17 bp, synthetic construct
  misc_feature 1..17: note = Probe
  source 1..17: mol_type = other DNA
gattagggtgcttagct

SEQ ID NO: 31609 - DNA, 19 bp, synthetic construct
  misc_feature 1..19: note = Probe
  source 1..19: mol_type = other DNA
gattagggtgcttagctgt

SEQ ID NO: 31610 - DNA, 20 bp, synthetic construct
  misc_feature 1..20: note = Probe
  source 1..20: mol_type = other DNA
gattagggtgcttagctgtt

SEQ ID NO: 31611 - DNA, 23 bp, synthetic construct
  misc_feature 1..23: note = Probe
  source 1..23: mol_type = other DNA
gattagggtgcttagctgttaac

SEQ ID NO: 31612 - DNA, 25 bp, synthetic construct
  misc_feature 1..25: note = Probe
  source 1..25: mol_type = other DNA
gattagggtgcttagctgttaacta

SEQ ID NO: 31613 - DNA, 33 bp, synthetic construct
  misc_feature 1..33: note = Probe
  source 1..33: mol_type = other DNA
gattagggtgcttagctgttaactaagtgtttg

SEQ ID NO: 31614 - DNA, 20 bp, synthetic construct
  misc_feature 1..20: note = Probe
  source 1..20: mol_type = other DNA
gattccccgacggggaggca

SEQ ID NO: 31615 - DNA, 28 bp, synthetic construct
  misc_feature 1..28: note = Probe
  source 1..28: mol_type = other DNA
gattcccggccaatgcaacgatgacgtt

SEQ ID NO: 31616 - DNA, 29 bp, synthetic construct
  misc_feature 1..29: note = Probe
  source 1..29: mol_type = other DNA
gattcccggccaatgcaacgatgacgttt

SEQ ID NO: 31617 - DNA, 18 bp, synthetic construct
  misc_feature 1..18: note = Probe
  source 1..18: mol_type = other DNA
gattccggctcgaaggac

SEQ ID NO: 31618 - DNA, 19 bp, synthetic construct
  misc_feature 1..19: note = Probe
  source 1..19: mol_type = other DNA
gattccggctcgaaggact

SEQ ID NO: 31619 - DNA, 19 bp, synthetic construct
  misc_feature 1..19: note = Probe
  source 1..19: mol_type = other DNA
gattccggctcgaaggagc

SEQ ID NO: 31620 - DNA, 17 bp, synthetic construct
  misc_feature 1..17: note = Probe
  source 1..17: mol_type = other DNA
gattcggcgctctcacc

SEQ ID NO: 31621 - DNA, 28 bp, synthetic construct
  misc_feature 1..28: note = Probe
  source 1..28: mol_type = other DNA
gattcggcgctctcaccgccgcggcccg

SEQ ID NO: 31622 - DNA, 30 bp, synthetic construct
  misc_feature 1..30: note = Probe
  source 1..30: mol_type = other DNA
gattcggcgctctcaccgccgcggcccggg

SEQ ID NO: 31623 - DNA, 32 bp, synthetic construct
  misc_feature 1..32: note = Probe
  source 1..32: mol_type = other DNA
gattcggcgctctcaccgccgcggcccgggtt

SEQ ID NO: 31624 - DNA, 36 bp, synthetic construct
  misc_feature 1..36: note = Probe
  source 1..36: mol_type = other DNA
gattcggcgctctcaccgccgcggcccgggttcgat

SEQ ID NO: 31625 - DNA, 27 bp, synthetic construct
  misc_feature 1..27: note = Probe
  source 1..27: mol_type = other DNA
gattcggcgctttcaccgccgcggccc

SEQ ID NO: 31626 - DNA, 34 bp, synthetic construct
  misc_feature 1..34: note = Probe
  source 1..34: mol_type = other DNA
gattctcagggatgggttcgattctcatagtcct

SEQ ID NO: 31627 - DNA, 36 bp, synthetic construct
  misc_feature 1..36: note = Probe
  source 1..36: mol_type = other DNA
gattctcagggatgggttcgattctcatagtcctag

SEQ ID NO: 31628 - DNA, 29 bp, synthetic construct
  misc_feature 1..29: note = Probe
  source 1..29: mol_type = other DNA
gattgaaacttttcgaaagtacgattact

SEQ ID NO: 31629 - DNA, 36 bp, synthetic construct
  misc_feature 1..36: note = Probe
  source 1..36: mol_type = other DNA
gattgaagccagttgattagggtgcttagctgttaa

SEQ ID NO: 31630 - DNA, 15 bp, synthetic construct
  misc_feature 1..15: note = Probe
  source 1..15: mol_type = other DNA
gattgtgaatctgac

SEQ ID NO: 31631 - DNA, 16 bp, synthetic construct
  misc_feature 1..16: note = Probe
  source 1..16: mol_type = other DNA
gattgtgaatctgaca

SEQ ID NO: 31632 - DNA, 18 bp, synthetic construct
  misc_feature 1..18: note = Probe
  source 1..18: mol_type = other DNA
gattgtgaatctgacaac

SEQ ID NO: 31633 - DNA, 19 bp, synthetic construct
  misc_feature 1..19: note = Probe
  source 1..19: mol_type = other DNA
gattgtgaatctgacaaca

SEQ ID NO: 31634 - DNA, 21 bp, synthetic construct
  misc_feature 1..21: note = Probe
  source 1..21: mol_type = other DNA
gattgtgaatctgacaacaga

SEQ ID NO: 31635 - DNA, 25 bp, synthetic construct
  misc_feature 1..25: note = Probe
  source 1..25: mol_type = other DNA
gattgtgaatctgacaacagaggct

SEQ ID NO: 31636 - DNA, 26 bp, synthetic construct
  misc_feature 1..26: note = Probe
  source 1..26: mol_type = other DNA
gattgtgaatctgacaacagaggctt

SEQ ID NO: 31637 - DNA, 29 bp, synthetic construct
  misc_feature 1..29: note = Probe
  source 1..29: mol_type = other DNA
gattgtgaatctgacaacagaggcttacg

SEQ ID NO: 31638 - DNA, 34 bp, synthetic construct; identical to SEQ ID NO: 983
  misc_feature 1..34: note = Probe
  source 1..34: mol_type = other DNA

SEQ ID NO: 31639 - DNA, 35 bp, synthetic construct; identical to SEQ ID NO: 5752
  misc_feature 1..35: note = Probe
  source 1..35: mol_type = other DNA

SEQ ID NO: 31640 - DNA, 43 bp, synthetic construct; identical to SEQ ID NO: 988
  misc_feature 1..43: note = Probe
  source 1..43: mol_type = other DNA

SEQ ID NO: 31641 - DNA, 44 bp, synthetic construct; identical to SEQ ID NO: 5755
  misc_feature 1..44: note = Probe
  source 1..44: mol_type = other DNA

SEQ ID NO: 31642 - DNA, 45 bp, synthetic construct; identical to SEQ ID NO: 5756
  misc_feature 1..45: note = Probe
  source 1..45: mol_type = other DNA

SEQ ID NO: 31643 - DNA, 23 bp, synthetic construct
  misc_feature 1..23: note = Probe
  source 1..23: mol_type = other DNA
gatttcaacttaacttgaccgct

SEQ ID NO: 31644 - DNA, 24 bp, synthetic construct
  misc_feature 1..24: note = Probe
  source 1..24: mol_type = other DNA
gatttcaacttaacttgaccgctc

SEQ ID NO: 31645 - DNA, 25 bp, synthetic construct
  misc_feature 1..25: note = Probe
  source 1..25: mol_type = other DNA
gatttcaacttaacttgaccgctct

SEQ ID NO: 31646 - DNA, 27 bp, synthetic construct
  misc_feature 1..27: note = Probe
  source 1..27: mol_type = other DNA
gatttcaacttaacttgaccgctctga

SEQ ID NO: 31647 - DNA, 28 bp, synthetic construct
  misc_feature 1..28: note = Probe
  source 1..28: mol_type = other DNA
gatttcaacttaacttgaccgctctgag

SEQ ID NO: 31648 - DNA, 29 bp, synthetic construct
  misc_feature 1..29: note = Probe
  source 1..29: mol_type = other DNA
gatttcaacttaacttgaccgctctgagc

SEQ ID NO: 31649 - DNA, 36 bp, synthetic construct
  misc_feature 1..36: note = Probe
  source 1..36: mol_type = other DNA
gatttcaacttaacttgaccgctctgagctaaacct

SEQ ID NO: 31650 - DNA, 18 bp, synthetic construct
  misc_feature 1..18: note = Probe
  source 1..18: mol_type = other DNA
gatttcgactcattaaat

SEQ ID NO: 31651 - DNA, 36 bp, synthetic construct
  misc_feature 1..36: note = Probe
  source 1..36: mol_type = other DNA
gatttcgactcattaaattatgataatcatatttac

SEQ ID NO: 31652 - DNA, 21 bp, synthetic construct
  misc_feature 1..21: note = Probe
  source 1..21: mol_type = other DNA
gatttctgtaccttacacatt

SEQ ID NO: 31653 - DNA, 22 bp, synthetic construct
  misc_feature 1..22: note = Probe
  source 1..22: mol_type = other DNA
gatttctgtaccttacacattt

SEQ ID NO: 31654 - DNA, 23 bp, synthetic construct
  misc_feature 1..23: note = Probe
  source 1..23: mol_type = other DNA
gatttctgtaccttacacatttt

SEQ ID NO: 31655 - DNA, 15 bp, synthetic construct
  misc_feature 1..15: note = Probe
  source 1..15: mol_type = other DNA
gcaaaaccccactct

SEQ ID NO: 31656 - DNA, 36 bp, synthetic construct
  misc_feature 1..36: note = Probe
  source 1..36: mol_type = other DNA
gcaaattcgaagaagcagcttcaaacctgccggggc

SEQ ID NO: 31657 - DNA, 15 bp, synthetic construct
  misc_feature 1..15: note = Probe
  source 1..15: mol_type = other DNA
gcaactggtcgtttt

SEQ ID NO: 31658 - DNA, 16 bp, synthetic construct
  misc_feature 1..16: note = Probe
  source 1..16: mol_type = other DNA
gcaactggtcgtttta

SEQ ID NO: 31659 - DNA, 17 bp, synthetic construct
  misc_feature 1..17: note = Probe
  source 1..17: mol_type = other DNA
gcaactggtcgttttag

SEQ ID NO: 31660 - DNA, 18 bp, synthetic construct
  misc_feature 1..18: note = Probe
  source 1..18: mol_type = other DNA
gcaactggtcgttttagt

SEQ ID NO: 31661 - DNA, 24 bp, synthetic construct
  misc_feature 1..24: note = Probe
  source 1..24: mol_type = other DNA
gcaagccgggccctgaagccgcct

SEQ ID NO: 31662 - DNA, 29 bp, synthetic construct
  misc_feature 1..29: note = Probe
  source 1..29: mol_type = other DNA
gcaatacactgaaaatgtttagacgggct

SEQ ID NO: 31663 - DNA, 31 bp, synthetic construct; identical to SEQ ID NO: 5789
  misc_feature 1..31: note = Probe
  source 1..31: mol_type = other DNA

SEQ ID NO: 31664 - DNA, 33 bp, synthetic construct; identical to SEQ ID NO: 989
  misc_feature 1..33: note = Probe
  source 1..33: mol_type = other DNA

SEQ ID NO: 31665 - DNA, 36 bp, synthetic construct
  misc_feature 1..36: note = Probe
  source 1..36: mol_type = other DNA
gcaatacactgaaaatgtttagacgggctcacatca

SEQ ID NO: 31666 - DNA, 18 bp, synthetic construct
  misc_feature 1..18: note = Probe
  source 1..18: mol_type = other DNA
gcaatggatagcgcattg

SEQ ID NO: 31667 - DNA, 30 bp, synthetic construct; identical to SEQ ID NO: 10262
  misc_feature 1..30: note = Probe
  source 1..30: mol_type = other DNA

SEQ ID NO: 31668 - DNA, 31 bp, synthetic construct; identical to SEQ ID NO: 5794
  misc_feature 1..31: note = Probe
  source 1..31: mol_type = other DNA

SEQ ID NO: 31669 - DNA, 33 bp, synthetic construct; identical to SEQ ID NO: 20499
  misc_feature 1..33: note = Probe
  source 1..33: mol_type = other DNA

SEQ ID NO: 31670 - DNA, 36 bp, synthetic construct
  misc_feature 1..36: note = Probe
  source 1..36: mol_type = other DNA
gcacacgtgggttcgaatcccatcctcgtcggctgc

SEQ ID NO: 31671 - DNA, 22 bp, synthetic construct
  misc_feature 1..22: note = Probe
  source 1..22: mol_type = other DNA
gcacactactataaccacccta

SEQ ID NO: 31672 - DNA, 36 bp, synthetic construct
  misc_feature 1..36: note = Probe
  source 1..36: mol_type = other DNA
gcacatgtaggctctatggcttagttggttaaagcg

SEQ ID NO: 31673 - DNA, 36 bp, synthetic construct
  misc_feature 1..36: note = Probe
  source 1..36: mol_type = other DNA
gcaccaggatggccgagtggttaaggcgttggactt

SEQ ID NO: 31674 - DNA, 36 bp, synthetic construct; identical to SEQ ID NO: 20519
  misc_feature 1..36: note = Probe
  source 1..36: mol_type = other DNA

SEQ ID NO: 31675 - DNA, 50 bp, synthetic construct; identical to SEQ ID NO: 5820
  misc_feature 1..50: note = Probe
  source 1..50: mol_type = other DNA

SEQ ID NO: 31676 - DNA, 36 bp, synthetic construct
  misc_feature 1..36: note = Probe
  source 1..36: mol_type = other DNA
gcacccttcgatagctcagctggtagagcggaggac

SEQ ID NO: 31677 - DNA, 16 bp, synthetic construct
  misc_feature 1..16: note = Probe
  source 1..16: mol_type = other DNA
gcacgaggccccgggt

SEQ ID NO: 31678 - DNA, 36 bp, synthetic construct; identical to SEQ ID NO: 20529
  misc_feature 1..36: note = Probe
  source 1..36: mol_type = other DNA

SEQ ID NO: 31679 - DNA, 36 bp, synthetic construct; identical to SEQ ID NO: 20532
  misc_feature 1..36: note = Probe
  source 1..36: mol_type = other DNA

SEQ ID NO: 31680 - DNA, 15 bp, synthetic construct
  misc_feature 1..15: note = Probe
  source 1..15: mol_type = other DNA
gcacgccctcccatt

SEQ ID NO: 31681 - DNA, 16 bp, synthetic construct
  misc_feature 1..16: note = Probe
  source 1..16: mol_type = other DNA
gcacgccctcccattt

SEQ ID NO: 31682 - DNA, 17 bp, synthetic construct
  misc_feature 1..17: note = Probe
  source 1..17: mol_type = other DNA
gcacgccctcccatttt

SEQ ID NO: 31683 - DNA, 16 bp, synthetic construct
  misc_feature 1..16: note = Probe
  source 1..16: mol_type = other DNA
gcacggcaaggggagt

SEQ ID NO: 31684 - DNA, 16 bp, synthetic construct
  misc_feature 1..16: note = Probe
  source 1..16: mol_type = other DNA
gcacggcaaggggctc

SEQ ID NO: 31685 - DNA, 16 bp, synthetic construct
  misc_feature 1..16: note = Probe
  source 1..16: mol_type = other DNA
gcactctggactctga

SEQ ID NO: 31686 - DNA, 17 bp, synthetic construct
  misc_feature 1..17: note = Probe
  source 1..17: mol_type = other DNA
gcactctggactctgaa

SEQ ID NO: 31687 - DNA, 18 bp, synthetic construct
  misc_feature 1..18: note = Probe
  source 1..18: mol_type = other DNA
gcactctggactctgaat

SEQ ID NO: 31688 - DNA, 19 bp, synthetic construct
  misc_feature 1..19: note = Probe
  source 1..19: mol_type = other DNA
gcactctggactctgaatc

SEQ ID NO: 31689 - DNA, 20 bp, synthetic construct
  misc_feature 1..20: note = Probe
  source 1..20: mol_type = other DNA
gcactctggactctgaatcc

SEQ ID NO: 31690 - DNA, 21 bp, synthetic construct
  misc_feature 1..21: note = Probe
  source 1..21: mol_type = other DNA
gcactctggactctgaatcca

SEQ ID NO: 31691 - DNA, 23 bp, synthetic construct
  misc_feature 1..23: note = Probe
  source 1..23: mol_type = other DNA
gcactctggactctgaatccagc

SEQ ID NO: 31692 - DNA, 34 bp, synthetic construct
  misc_feature 1..34: note = Probe
  source 1..34: mol_type = other DNA
gcactctggactctgaatccagcgatccgagttc

SEQ ID NO: 31693 - DNA, 17 bp, synthetic construct
  misc_feature 1..17: note = Probe
  source 1..17: mol_type = other DNA
gcactctggactttgaa

SEQ ID NO: 31694 - DNA, 18 bp, synthetic construct
  misc_feature 1..18: note = Probe
  source 1..18: mol_type = other DNA
gcactctggactttgaat

SEQ ID NO: 31695 - DNA, 19 bp, synthetic construct
  misc_feature 1..19: note = Probe
  source 1..19: mol_type = other DNA
gcactctggactttgaatc

SEQ ID NO: 31696 - DNA, 20 bp, synthetic construct
  misc_feature 1..20: note = Probe
  source 1..20: mol_type = other DNA
gcactctggactttgaatcc

SEQ ID NO: 31697 - DNA, 30 bp, synthetic construct; identical to SEQ ID NO: 8615
  misc_feature 1..30: note = Probe
  source 1..30: mol_type = other DNA

SEQ ID NO: 31698 - DNA, 31 bp, synthetic construct; identical to SEQ ID NO: 5827
  misc_feature 1..31: note = Probe
  source 1..31: mol_type = other DNA

SEQ ID NO: 31699 - DNA, 33 bp, synthetic construct; identical to SEQ ID NO: 5828
  misc_feature 1..33: note = Probe
  source 1..33: mol_type = other DNA

SEQ ID NO: 31700 - DNA, 34 bp, synthetic construct; identical to SEQ ID NO: 5829
  misc_feature 1..34: note = Probe
  source 1..34: mol_type = other DNA

SEQ ID NO: 31701 - DNA, 35 bp, synthetic construct; identical to SEQ ID NO: 20565
  misc_feature 1..35: note = Probe
  source 1..35: mol_type = other DNA

SEQ ID NO: 31702 - DNA, 36 bp, synthetic construct
  misc_feature 1..36: note = Probe
  source 1..36: mol_type = other DNA
gcactggtggttcagtggtagaattctcgcctccca

SEQ ID NO: 31703 - DNA, 36 bp, synthetic construct; identical to SEQ ID NO: 993
  misc_feature 1..36: note = Probe
  source 1..36: mol_type = other DNA

SEQ ID NO: 31704 - DNA, 37 bp, synthetic construct; identical to SEQ ID NO: 5830
  misc_feature 1..37: note = Probe
  source 1..37: mol_type = other DNA

SEQ ID NO: 31705 - DNA, 36 bp, synthetic construct
  misc_feature 1..36: note = Probe
  source 1..36: mol_type = other DNA
gcagacgaggtggccgagtggttaaggcgatggact

SEQ ID NO: 31706 - DNA, 33 bp, synthetic construct; identical to SEQ ID NO: 20574
  misc_feature 1..33: note = Probe
  source 1..33: mol_type = other DNA

SEQ ID NO: 31707 - DNA, 36 bp, synthetic construct
  misc_feature 1..36: note = Probe
  source 1..36: mol_type = other DNA
gcagaggcattggtggttcagtggtagaattctcgc

SEQ ID NO: 31708 - DNA, 38 bp, synthetic construct
  misc_feature 1..38: note = Probe
  source 1..38: mol_type = other DNA
gcagaggcattggtggttcagtggtagaattctcgcct

SEQ ID NO: 31709 - DNA, 30 bp, synthetic construct; identical to SEQ ID NO: 8617
  misc_feature 1..30: note = Probe
  source 1..30: mol_type = other DNA

SEQ ID NO: 31710 - DNA, 15 bp, synthetic construct
  misc_feature 1..15: note = Probe
  source 1..15: mol_type = other DNA
gcagccgtgcttttt

SEQ ID NO: 31711 - DNA, 15 bp, synthetic construct
  misc_feature 1..15: note = Probe
  source 1..15: mol_type = other DNA
gcagcgatggccgag

SEQ ID NO: 31712 - DNA, 18 bp, synthetic construct
  misc_feature 1..18: note = Probe
  source 1..18: mol_type = other DNA
gcagcgatggccgagtgg

SEQ ID NO: 31713 - DNA, 22 bp, synthetic construct
  misc_feature 1..22: note = Probe
  source 1..22: mol_type = other DNA
gcagcggaagcgtgctgggccc

SEQ ID NO: 31714 - DNA, 36 bp, synthetic construct
  misc_feature 1..36: note = Probe
  source 1..36: mol_type = other DNA
gcagcggagccttcgatagctcagttggtagagcgg

SEQ ID NO: 31715 - DNA, 45 bp, synthetic construct; identical to SEQ ID NO: 20602
  misc_feature 1..45: note = Probe
  source 1..45: mol_type = other DNA

SEQ ID NO: 31716 - DNA, 36 bp, synthetic construct
  misc_feature 1..36: note = Probe
  source 1..36: mol_type = other DNA
gcagctgggtagcgtggccgagcggtctaaggcgct

SEQ ID NO: 31717 - DNA, 36 bp, synthetic construct
  misc_feature 1..36: note = Probe
  source 1..36: mol_type = other DNA
gcagggagcccggatagctcagtcggtagagcatca

SEQ ID NO: 31718 - DNA, 36 bp, synthetic construct
  misc_feature 1..36: note = Probe
  source 1..36: mol_type = other DNA
gcagggccagtggcgcaatggataacgcgtctgact

SEQ ID NO: 31719 - DNA, 36 bp, synthetic construct
  misc_feature 1..36: note = Probe
  source 1..36: mol_type = other DNA
gcagggccgcgtggcctaatggataaggcgtctgat

SEQ ID NO: 31720 - DNA, 36 bp, synthetic construct
  misc_feature 1..36: note = Probe
  source 1..36: mol_type = other DNA
gcaggtttccgtagtgtagtggttatcacgttcgcc

SEQ ID NO: 31721 - DNA, 33 bp, synthetic construct; identical to SEQ ID NO: 5847
  misc_feature 1..33: note = Probe
  source 1..33: mol_type = other DNA

SEQ ID NO: 31722 - DNA, 31 bp, synthetic construct; identical to SEQ ID NO: 5857
  misc_feature 1..31: note = Probe
  source 1..31: mol_type = other DNA

SEQ ID NO: 31723 - DNA, 32 bp, synthetic construct; identical to SEQ ID NO: 5858
  misc_feature 1..32: note = Probe
  source 1..32: mol_type = other DNA

SEQ ID NO: 31724 - DNA, 33 bp, synthetic construct; identical to SEQ ID NO: 5859
  misc_feature 1..33: note = Probe
  source 1..33: mol_type = other DNA

SEQ ID NO: 31725 - DNA, 36 bp, synthetic construct
  misc_feature 1..36: note = Probe
  source 1..36: mol_type = other DNA
gcataggtggttcagtggtagaattcttgcctgcca

SEQ ID NO: 31726 - DNA, 27 bp, synthetic construct
  misc_feature 1..27: note = Probe
  source 1..27: mol_type = other DNA
gcatctccaaggcgatcacgtagattt

SEQ ID NO: 31727 - DNA, 28 bp, synthetic construct
  misc_feature 1..28: note = Probe
  source 1..28: mol_type = other DNA
gcatctccaaggcgatcacgtagatttt

SEQ ID NO: 31728 - DNA, 20 bp, synthetic construct
  misc_feature 1..20: note = Probe
  source 1..20: mol_type = other DNA
gcatgcacgaggccccgggt

SEQ ID NO: 31729 - DNA, 17 bp, synthetic construct
  misc_feature 1..17: note = Probe
  source 1..17: mol_type = other DNA
gcatgggactcttaatc

SEQ ID NO: 31730 - DNA, 18 bp, synthetic construct
  misc_feature 1..18: note = Probe
  source 1..18: mol_type = other DNA
gcatgggactcttaatcc

SEQ ID NO: 31731 - DNA, 15 bp, synthetic construct
  misc_feature 1..15: note = Probe
  source 1..15: mol_type = other DNA
gcatgggtggttcag

SEQ ID NO: 31732 - DNA, 16 bp, synthetic construct
  misc_feature 1..16: note = Probe
  source 1..16: mol_type = other DNA
gcatgggtggttcagt

SEQ ID NO: 31733 - DNA, 18 bp, synthetic construct
  misc_feature 1..18: note = Probe
  source 1..18: mol_type = other DNA
gcatgggtggttcagtgg

SEQ ID NO: 31734 - DNA, 19 bp, synthetic construct
  misc_feature 1..19: note = Probe
  source 1..19: mol_type = other DNA
gcatgggtggttcagtggt

SEQ ID NO: 31735 - DNA, 20 bp, synthetic construct
  misc_feature 1..20: note = Probe
  source 1..20: mol_type = other DNA
gcatgggtggttcagtggta

SEQ ID NO: 31736 - DNA, 21 bp, synthetic construct
  misc_feature 1..21: note = Probe
  source 1..21: mol_type = other DNA
gcatgggtggttcagtggtag

SEQ ID NO: 31737 - DNA, 22 bp, synthetic construct
  misc_feature 1..22: note = Probe
  source 1..22: mol_type = other DNA
gcatgggtggttcagtggtaga

SEQ ID NO: 31738 - DNA, 23 bp, synthetic construct
  misc_feature 1..23: note = Probe
  source 1..23: mol_type = other DNA
gcatgggtggttcagtggtagaa

SEQ ID NO: 31739 - DNA, 24 bp, synthetic construct
  misc_feature 1..24: note = Probe
  source 1..24: mol_type = other DNA
gcatgggtggttcagtggtagaat

SEQ ID NO: 31740 - DNA, 25 bp, synthetic construct
  misc_feature 1..25: note = Probe
  source 1..25: mol_type = other DNA
gcatgggtggttcagtggtagaatt

SEQ ID NO: 31741 - DNA, 26 bp, synthetic construct
  misc_feature 1..26: note = Probe
  source 1..26: mol_type = other DNA
gcatgggtggttcagtggtagaattc

SEQ ID NO: 31742 - DNA, 27 bp, synthetic construct
  misc_feature 1..27: note = Probe
  source 1..27: mol_type = other DNA
gcatgggtggttcagtggtagaattct

SEQ ID NO: 31743 - DNA, 38 bp, synthetic construct; identical to SEQ ID NO: 1009
  misc_feature 1..38: note = Probe
  source 1..38: mol_type = other DNA

SEQ ID NO: 31744 - DNA, 43 bp, synthetic construct; identical to SEQ ID NO: 5873
  misc_feature 1..43: note = Probe
  source 1..43: mol_type = other DNA

SEQ ID NO: 31745 - DNA, 50 bp, synthetic construct; identical to SEQ ID NO: 1010
  misc_feature 1..50: note = Probe
  source 1..50: mol_type = other DNA

SEQ ID NO: 31746 - DNA, 34 bp, synthetic construct; identical to SEQ ID NO: 1011
  misc_feature 1..34: note = Probe
  source 1..34: mol_type = other DNA

SEQ ID NO: 31747 - DNA, 36 bp, synthetic construct; identical to SEQ ID NO: 20661
  misc_feature 1..36: note = Probe
  source 1..36: mol_type = other DNA

SEQ ID NO: 31748 - DNA, 41 bp, synthetic construct
  misc_feature 1..41: note = Probe
  source 1..41: mol_type = other DNA
gcattaaccttttaagttaaagattaagagaaccaacacct

SEQ ID NO: 31749 - DNA, 15 bp, synthetic construct
  misc_feature 1..15: note = Probe
  source 1..15: mol_type = other DNA
gcattggactgtaaa

SEQ ID NO: 31750 - DNA, 17 bp, synthetic construct
  misc_feature 1..17: note = Probe
  source 1..17: mol_type = other DNA
gcattggactgtaaatc

SEQ ID NO: 31751 - DNA, 18 bp, synthetic construct
  misc_feature 1..18: note = Probe
  source 1..18: mol_type = other DNA
gcattggactgtaaatct

SEQ ID NO: 31752 - DNA, 19 bp, synthetic construct
  misc_feature 1..19: note = Probe
  source 1..19: mol_type = other DNA
gcattggactgtaaatcta

SEQ ID NO: 31753 - DNA, 20 bp, synthetic construct
  misc_feature 1..20: note = Probe
  source 1..20: mol_type = other DNA
gcattggactgtaaatctaa

SEQ ID NO: 31754 - DNA, 37 bp, synthetic construct
  misc_feature 1..37: note = Probe
  source 1..37: mol_type = other DNA
gcattggactgtaaatctaaagacaggggttaggcct

SEQ ID NO: 31755 - DNA, 38 bp, synthetic construct
  misc_feature 1..38: note = Probe
  source 1..38: mol_type = other DNA
gcattggactgtaaatctaaagacaggggttaggcctc

SEQ ID NO: 31756 - DNA, 50 bp, synthetic construct; identical to SEQ ID NO: 5882
  misc_feature 1..50: note = Probe
  source 1..50: mol_type = other DNA

SEQ ID NO: 31757 - DNA, 30 bp, synthetic construct; identical to SEQ ID NO: 10328
  misc_feature 1..30: note = Probe
  source 1..30: mol_type = other DNA

SEQ ID NO: 31758 - DNA, 31 bp, synthetic construct; identical to SEQ ID NO: 5884
  misc_feature 1..31: note = Probe
  source 1..31: mol_type = other DNA

SEQ ID NO: 31759 - DNA, 33 bp, synthetic construct; identical to SEQ ID NO: 5885
  misc_feature 1..33: note = Probe
  source 1..33: mol_type = other DNA

SEQ ID NO: 31760 - DNA, 36 bp, synthetic construct
  misc_feature 1..36: note = Probe
  source 1..36: mol_type = other DNA
gcattggtggttcaatggtagaattctcgcctccca

SEQ ID NO: 31761 - DNA, 15 bp, synthetic construct
  misc_feature 1..15: note = Probe
  source 1..15: mol_type = other DNA
gcattggtggttcag

SEQ ID NO: 31762 - DNA, 16 bp, synthetic construct
  misc_feature 1..16: note = Probe
  source 1..16: mol_type = other DNA
gcattggtggttcagt

SEQ ID NO: 31763 - DNA, 17 bp, synthetic construct
  misc_feature 1..17: note = Probe
  source 1..17: mol_type = other DNA
gcattggtggttcagtg

SEQ ID NO: 31764 - DNA, 18 bp, synthetic construct
  misc_feature 1..18: note = Probe
  source 1..18: mol_type = other DNA
gcattggtggttcagtgg

SEQ ID NO: 31765 - DNA, 19 bp, synthetic construct
  misc_feature 1..19: note = Probe
  source 1..19: mol_type = other DNA
gcattggtggttcagtggt

SEQ ID NO: 31766 - DNA, 20 bp, synthetic construct
  misc_feature 1..20: note = Probe
  source 1..20: mol_type = other DNA
gcattggtggttcagtggta

SEQ ID NO: 31767 - DNA, 21 bp, synthetic construct
  misc_feature 1..21: note = Probe
  source 1..21: mol_type = other DNA
gcattggtggttcagtggtag

SEQ ID NO: 31768 - DNA, 22 bp, synthetic construct
  misc_feature 1..22: note = Probe
  source 1..22: mol_type = other DNA
gcattggtggttcagtggtaga

SEQ ID NO: 31769 - DNA, 23 bp, synthetic construct
  misc_feature 1..23: note = Probe
  source 1..23: mol_type = other DNA
gcattggtggttcagtggtagaa

SEQ ID NO: 31770 - DNA, 24 bp, synthetic construct
  misc_feature 1..24: note = Probe
  source 1..24: mol_type = other DNA
gcattggtggttcagtggtagaat

SEQ ID NO: 31771 - DNA, 25 bp, synthetic construct
  misc_feature 1..25: note = Probe
  source 1..25: mol_type = other DNA
gcattggtggttcagtggtagaatt

SEQ ID NO: 31772 - DNA, 26 bp, synthetic construct
  misc_feature 1..26: note = Probe
  source 1..26: mol_type = other DNA
gcattggtggttcagtggtagaattc

SEQ ID NO: 31773 - DNA, 27 bp, synthetic construct
  misc_feature 1..27: note = Probe
  source 1..27: mol_type = other DNA
gcattggtggttcagtggtagaattct

SEQ ID NO: 31774 - DNA, 28 bp, synthetic construct
  misc_feature 1..28: note = Probe
  source 1..28: mol_type = other DNA
gcattggtggttcagtggtagaattctc

SEQ ID NO: 31775 - DNA, 29 bp, synthetic construct
  misc_feature 1..29: note = Probe
  source 1..29: mol_type = other DNA
gcattggtggttcagtggtagaattctcg

SEQ ID NO: 31776 - DNA, 30 bp, synthetic construct; identical to SEQ ID NO: 5900
  misc_feature 1..30: note = Probe
  source 1..30: mol_type = other DNA

SEQ ID NO: 31777 - DNA, 31 bp, synthetic construct; identical to SEQ ID NO: 5901
  misc_feature 1..31: note = Probe
  source 1..31: mol_type = other DNA

SEQ ID NO: 31778 - DNA, 32 bp, synthetic construct; identical to SEQ ID NO: 5902
  misc_feature 1..32: note = Probe
  source 1..32: mol_type = other DNA

SEQ ID NO: 31779 - DNA, 33 bp, synthetic construct; identical to SEQ ID NO: 5903
  misc_feature 1..33: note = Probe
  source 1..33: mol_type = other DNA

SEQ ID NO: 31780 - DNA, 34 bp, synthetic construct; identical to SEQ ID NO: 5904
  misc_feature 1..34: note = Probe
  source 1..34: mol_type = other DNA

SEQ ID NO: 31781 - DNA, 35 bp, synthetic construct; identical to SEQ ID NO: 5905
  misc_feature 1..35: note = Probe
  source 1..35: mol_type = other DNA

SEQ ID NO: 31782 - DNA, 36 bp, synthetic construct; identical to SEQ ID NO: 5906
  misc_feature 1..36: note = Probe
  source 1..36: mol_type = other DNA

SEQ ID NO: 31783 - DNA, 33 bp, synthetic construct; identical to SEQ ID NO: 5908
  misc_feature 1..33: note = Probe
  source 1..33: mol_type = other DNA

SEQ ID NO: 31784 - DNA, 34 bp, synthetic construct; identical to SEQ ID NO: 5909
  misc_feature 1..34: note = Probe
  source 1..34: mol_type = other DNA

SEQ ID NO: 31785 - DNA, 35 bp, synthetic construct; identical to SEQ ID NO: 5910
  misc_feature 1..35: note = Probe
  source 1..35: mol_type = other DNA

SEQ ID NO: 31786 - DNA, 36 bp, synthetic construct; identical to SEQ ID NO: 5911
  misc_feature 1..36: note = Probe
  source 1..36: mol_type = other DNA

SEQ ID NO: 31787 - DNA, 37 bp, synthetic construct; identical to SEQ ID NO: 5912
  misc_feature 1..37: note = Probe
  source 1..37: mol_type = other DNA

SEQ ID NO: 31788 - DNA, 39 bp, synthetic construct; identical to SEQ ID NO: 1015
  misc_feature 1..39: note = Probe
  source 1..39: mol_type = other DNA

SEQ ID NO: 31789 - DNA, 40 bp, synthetic construct; identical to SEQ ID NO: 1016
  misc_feature 1..40: note = Probe
  source 1..40: mol_type = other DNA

SEQ ID NO: 31790 - DNA, 41 bp, synthetic construct; identical to SEQ ID NO: 1017
  misc_feature 1..41: note = Probe
  source 1..41: mol_type = other DNA

SEQ ID NO: 31791 - DNA, 42 bp, synthetic construct; identical to SEQ ID NO: 5913
  misc_feature 1..42: note = Probe
  source 1..42: mol_type = other DNA

SEQ ID NO: 31792 - DNA, 43 bp, synthetic construct; identical to SEQ ID NO: 5914
  misc_feature 1..43: note = Probe
  source 1..43: mol_type = other DNA

SEQ ID NO: 31793 - DNA, 44 bp, synthetic construct; identical to SEQ ID NO: 1018
  misc_feature 1..44: note = Probe
  source 1..44: mol_type = other DNA

SEQ ID NO: 31794 - DNA, 47 bp, synthetic construct; identical to SEQ ID NO: 5917
  misc_feature 1..47: note = Probe
  source 1..47: mol_type = other DNA

SEQ ID NO: 31795 - DNA, 48 bp, synthetic construct; identical to SEQ ID NO: 5918
  misc_feature 1..48: note = Probe
  source 1..48: mol_type = other DNA

SEQ ID NO: 31796 - DNA, 33 bp, synthetic construct
  misc_feature 1..33: note = Probe
  source 1..33: mol_type = other DNA
gcattgtgaggacaatggcacggcaaggggagt

SEQ ID NO: 31797 - DNA, 15 bp, synthetic construct
  misc_feature 1..15: note = Probe
  source 1..15: mol_type = other DNA
gccaaggtcgcgggt

SEQ ID NO: 31798 - DNA, 36 bp, synthetic construct
  misc_feature 1..36: note = Probe
  source 1..36: mol_type = other DNA
gccacgcgggaggcccgggttcgattcccggccaat

SEQ ID NO: 31799 - DNA, 36 bp, synthetic construct
  misc_feature 1..36: note = Probe
  source 1..36: mol_type = other DNA
gccagggattgtgggttcgagtcccatctggggtgg

SEQ ID NO: 31800 - DNA, 38 bp, synthetic construct; identical to SEQ ID NO: 5932
  misc_feature 1..38: note = Probe
  source 1..38: mol_type = other DNA

SEQ ID NO: 31801 - DNA, 27 bp, synthetic construct
  misc_feature 1..27: note = Probe
  source 1..27: mol_type = other DNA
gccatcggtgcatgggtggttcagtgg

SEQ ID NO: 31802 - DNA, 28 bp, synthetic construct
  misc_feature 1..28: note = Probe
  source 1..28: mol_type = other DNA
gccatgatcgtatagtggttagtactct

SEQ ID NO: 31803 - DNA, 29 bp, synthetic construct
  misc_feature 1..29: note = Probe
  source 1..29: mol_type = other DNA
gccatgatcgtatagtggttagtactctg

SEQ ID NO: 31804 - DNA, 30 bp, synthetic construct; identical to SEQ ID NO: 10348
  misc_feature 1..30: note = Probe
  source 1..30: mol_type = other DNA

SEQ ID NO: 31805 - DNA, 31 bp, synthetic construct
  misc_feature 1..31: note = Probe
  source 1..31: mol_type = other DNA
gccatgatcgtatagtggttagtactctgcg

SEQ ID NO: 31806 - DNA, 32 bp, synthetic construct
  misc_feature 1..32: note = Probe
  source 1..32: mol_type = other DNA
gccatgatcgtatagtggttagtactctgcgc

SEQ ID NO: 31807 - DNA, 17 bp, synthetic construct
  misc_feature 1..17: note = Probe
  source 1..17: mol_type = other DNA
gcccacccagggacgcc

SEQ ID NO: 31808 - DNA, 33 bp, synthetic construct; identical to SEQ ID NO: 5938
  misc_feature 1..33: note = Probe
  source 1..33: mol_type = other DNA

SEQ ID NO: 31809 - DNA, 36 bp, synthetic construct; identical to SEQ ID NO: 5940
  misc_feature 1..36: note = Probe
  source 1..36: mol_type = other DNA

SEQ ID NO: 31810 - DNA, 36 bp, synthetic construct
  misc_feature 1..36: note = Probe
  source 1..36: mol_type = other DNA
gcccataccccgaaaatgttggttatacccttcccg

SEQ ID NO: 31811 - DNA, 19 bp, synthetic construct
  misc_feature 1..19: note = Probe
  source 1..19: mol_type = other DNA
gccccaaacccactccacc

SEQ ID NO: 31812 - DNA, 20 bp, synthetic construct
  misc_feature 1..20: note = Probe
  source 1..20: mol_type = other DNA
gccccaaacccactccacct

SEQ ID NO: 31813 - DNA, 19 bp, synthetic construct
  misc_feature 1..19: note = Probe
  source 1..19: mol_type = other DNA
gccccagtggcctaatgga

SEQ ID NO: 31814 - DNA, 15 bp, synthetic construct
  misc_feature 1..15: note = Probe
  source 1..15: mol_type = other DNA
gcccccatgtctaac

SEQ ID NO: 31815 - DNA, 16 bp, synthetic construct
  misc_feature 1..16: note = Probe
  source 1..16: mol_type = other DNA
gcccccatgtctaaca

SEQ ID NO: 31816 - DNA, 17 bp, synthetic construct
  misc_feature 1..17: note = Probe
  source 1..17: mol_type = other DNA
gcccccatgtctaacaa

SEQ ID NO: 31817 - DNA, 18 bp, synthetic construct
  misc_feature 1..18: note = Probe
  source 1..18: mol_type = other DNA
gcccccatgtctaacaac

SEQ ID NO: 31818 - DNA, 19 bp, synthetic construct
  misc_feature 1..19: note = Probe
  source 1..19: mol_type = other DNA
gcccccatgtctaacaaca

SEQ ID NO: 31819 - DNA, 20 bp, synthetic construct
  misc_feature 1..20: note = Probe
  source 1..20: mol_type = other DNA
gcccccatgtctaacaacat

SEQ ID NO: 31820 - DNA, 21 bp, synthetic construct
  misc_feature 1..21: note = Probe
  source 1..21: mol_type = other DNA
gcccccatgtctaacaacatg

SEQ ID NO: 31821 - DNA, 22 bp, synthetic construct
  misc_feature 1..22: note = Probe
  source 1..22: mol_type = other DNA
gcccccatgtctaacaacatgg

SEQ ID NO: 31822 - DNA, 23 bp, synthetic construct
  misc_feature 1..23: note = Probe
  source 1..23: mol_type = other DNA
gcccccatgtctaacaacatggc

SEQ ID NO: 31823 - DNA, 24 bp, synthetic construct
  misc_feature 1..24: note = Probe
  source 1..24: mol_type = other DNA
gcccccatgtctaacaacatggct

SEQ ID NO: 31824 - DNA, 25 bp, synthetic construct
  misc_feature 1..25: note = Probe
  source 1..25: mol_type = other DNA
gcccccatgtctaacaacatggctt

SEQ ID NO: 31825 - DNA, 26 bp, synthetic construct
  misc_feature 1..26: note = Probe
  source 1..26: mol_type = other DNA
gcccccatgtctaacaacatggcttt

SEQ ID NO: 31826 - DNA, 27 bp, synthetic construct
  misc_feature 1..27: note = Probe
  source 1..27: mol_type = other DNA
gcccccatgtctaacaacatggctttc

SEQ ID NO: 31827 - DNA, 28 bp, synthetic construct
  misc_feature 1..28: note = Probe
  source 1..28: mol_type = other DNA
gcccccatgtctaacaacatggctttct

SEQ ID NO: 31828 - DNA, 29 bp, synthetic construct
  misc_feature 1..29: note = Probe
  source 1..29: mol_type = other DNA
gcccccatgtctaacaacatggctttctc

SEQ ID NO: 31829 - DNA, 30 bp, synthetic construct; identical to SEQ ID NO: 5966
  misc_feature 1..30: note = Probe
  source 1..30: mol_type = other DNA

SEQ ID NO: 31830 - DNA, 31 bp, synthetic construct; identical to SEQ ID NO: 5967
  misc_feature 1..31: note = Probe
  source 1..31: mol_type = other DNA

SEQ ID NO: 31831 - DNA, 32 bp, synthetic construct; identical to SEQ ID NO: 5968
  misc_feature 1..32: note = Probe
  source 1..32: mol_type = other DNA

SEQ ID NO: 31832 - DNA, 33 bp, synthetic construct; identical to SEQ ID NO: 5969
  misc_feature 1..33: note = Probe
  source 1..33: mol_type = other DNA

SEQ ID NO: 31833 - DNA, 34 bp, synthetic construct; identical to SEQ ID NO: 5970
  misc_feature 1..34: note = Probe
  source 1..34: mol_type = other DNA

SEQ ID NO: 31834 - DNA, 36 bp, synthetic construct
  misc_feature 1..36: note = Probe
  source 1..36: mol_type = other DNA
gccccgggttcgatccccggcatctccaaggcgatc

SEQ ID NO: 31835 - DNA, 15 bp, synthetic construct
  misc_feature 1..15: note = Probe
  source 1..15: mol_type = other DNA
gcccgcatcctccac

SEQ ID NO: 31836 - DNA, 36 bp, synthetic construct
  misc_feature 1..36: note = Probe
  source 1..36: mol_type = other DNA
gcccgctcccttcgatagctcagctggtagagcgga

SEQ ID NO: 31837 - DNA, 15 bp, synthetic construct
  misc_feature 1..15: note = Probe
  source 1..15: mol_type = other DNA
gcccggatagctcag

SEQ ID NO: 31838 - DNA, 17 bp, synthetic construct
  misc_feature 1..17: note = Probe
  source 1..17: mol_type = other DNA
gcccggatagctcagtc

SEQ ID NO: 31839 - DNA, 18 bp, synthetic construct
  misc_feature 1..18: note = Probe
  source 1..18: mol_type = other DNA
gcccggatagctcagtcg

SEQ ID NO: 31840 - DNA, 21 bp, synthetic construct
  misc_feature 1..21: note = Probe
  source 1..21: mol_type = other DNA
gcccggatagctcagtcggta

SEQ ID NO: 31841 - DNA, 22 bp, synthetic construct
  misc_feature 1..22: note = Probe
  source 1..22: mol_type = other DNA
gcccggatagctcagtcggtag

SEQ ID NO: 31842 - DNA, 23 bp, synthetic construct
  misc_feature 1..23: note = Probe
  source 1..23: mol_type = other DNA
gcccggatagctcagtcggtaga

SEQ ID NO: 31843 - DNA, 24 bp, synthetic construct
  misc_feature 1..24: note = Probe
  source 1..24: mol_type = other DNA
gcccggatagctcagtcggtagag

SEQ ID NO: 31844 - DNA, 26 bp, synthetic construct
  misc_feature 1..26: note = Probe
  source 1..26: mol_type = other DNA
gcccggatagctcagtcggtagagca

SEQ ID NO: 31845 - DNA, 28 bp, synthetic construct
  misc_feature 1..28: note = Probe
  source 1..28: mol_type = other DNA
gcccggatagctcagtcggtagagcatc

SEQ ID NO: 31846 - DNA, 31 bp, synthetic construct; identical to SEQ ID NO: 1039
  misc_feature 1..31: note = Probe
  source 1..31: mol_type = other DNA

SEQ ID NO: 31847 - DNA, 34 bp, synthetic construct; identical to SEQ ID NO: 1042
  misc_feature 1..34: note = Probe
  source 1..34: mol_type = other DNA

SEQ ID NO: 31848 - DNA, 35 bp, synthetic construct; identical to SEQ ID NO: 1043
  misc_feature 1..35: note = Probe
  source 1..35: mol_type = other DNA

SEQ ID NO: 31849 - DNA, 15 bp, synthetic construct
  misc_feature 1..15: note = Probe
  source 1..15: mol_type = other DNA
gcccggctagctcag

SEQ ID NO: 31850 - DNA, 17 bp, synthetic construct
  misc_feature 1..17: note = Probe
  source 1..17: mol_type = other DNA
gcccggctagctcagtc

SEQ ID NO: 31851 - DNA, 18 bp, synthetic construct
  misc_feature 1..18: note = Probe
  source 1..18: mol_type = other DNA
gcccggctagctcagtcg

SEQ ID NO: 31852 - DNA, 32 bp, synthetic construct; identical to SEQ ID NO: 5994
  misc_feature 1..32: note = Probe
  source 1..32: mol_type = other DNA

SEQ ID NO: 31853 - DNA, 33 bp, synthetic construct; identical to SEQ ID NO: 1051
  misc_feature 1..33: note = Probe
  source 1..33: mol_type = other DNA

SEQ ID NO: 31854 - DNA, 36 bp, synthetic construct; identical to SEQ ID NO: 5996
  misc_feature 1..36: note = Probe
  source 1..36: mol_type = other DNA

SEQ ID NO: 31855 - DNA, 19 bp, synthetic construct
  misc_feature 1..19: note = Probe
  source 1..19: mol_type = other DNA
gcccggctagctcagtcgg

SEQ ID NO: 31856 - DNA, 22 bp, synthetic construct
  misc_feature 1..22: note = Probe
  source 1..22: mol_type = other DNA
gcccggctagctcagtcggtag

SEQ ID NO: 31857 - DNA, 23 bp, synthetic construct
  misc_feature 1..23: note = Probe
  source 1..23: mol_type = other DNA
gcccggctagctcagtcggtaga

SEQ ID NO: 31858 - DNA, 24 bp, synthetic construct
  misc_feature 1..24: note = Probe
  source 1..24: mol_type = other DNA
gcccggctagctcagtcggtagag

SEQ ID NO: 31859 - DNA, 25 bp, synthetic construct
  misc_feature 1..25: note = Probe
  source 1..25: mol_type = other DNA
gcccggctagctcagtcggtagagc

SEQ ID NO: 31860 - DNA, 26 bp, synthetic construct
  misc_feature 1..26: note = Probe
  source 1..26: mol_type = other DNA
gcccggctagctcagtcggtagagca

SEQ ID NO: 31861 - DNA, 27 bp, synthetic construct
  misc_feature 1..27: note = Probe
  source 1..27: mol_type = other DNA
gcccggctagctcagtcggtagagcat

SEQ ID NO: 31862 - DNA, 29 bp, synthetic construct
  misc_feature 1..29: note = Probe
  source 1..29: mol_type = other DNA
gcccggctagctcagtcggtagagcatga

SEQ ID NO: 31863 - DNA, 31 bp, synthetic construct; identical to SEQ ID NO: 1063
  misc_feature 1..31: note = Probe
  source 1..31: mol_type = other DNA

SEQ ID NO: 31864 - DNA, 33 bp, synthetic construct; identical to SEQ ID NO: 1065
  misc_feature 1..33: note = Probe
  source 1..33: mol_type = other DNA

SEQ ID NO: 31865 - DNA, 34 bp, synthetic construct; identical to SEQ ID NO: 1066
  misc_feature 1..34: note = Probe
  source 1..34: mol_type = other DNA

SEQ ID NO: 31866 - DNA, 40 bp, synthetic construct; identical to SEQ ID NO: 1076
  misc_feature 1..40: note = Probe
  source 1..40: mol_type = other DNA

SEQ ID NO: 31867 - DNA, 50 bp, synthetic construct; identical to SEQ ID NO: 1078
  misc_feature 1..50: note = Probe
  source 1..50: mol_type = other DNA

SEQ ID NO: 31868 - DNA, 31 bp, synthetic construct; identical to SEQ ID NO: 1081
  misc_feature 1..31: note = Probe
  source 1..31: mol_type = other DNA

SEQ ID NO: 31869 - DNA, 39 bp, synthetic construct; identical to SEQ ID NO: 6001
  misc_feature 1..39: note = Probe
  source 1..39: mol_type = other DNA

SEQ ID NO: 31870 - DNA, 40 bp, synthetic construct; identical to SEQ ID NO: 1088
  misc_feature 1..40: note = Probe
  source 1..40: mol_type = other DNA

SEQ ID NO: 31871 - DNA, 42 bp, synthetic construct; identical to SEQ ID NO: 1089
  misc_feature 1..42: note = Probe
  source 1..42: mol_type = other DNA

SEQ ID NO: 31872 - DNA, 50 bp, synthetic construct; identical to SEQ ID NO: 1091
  misc_feature 1..50: note = Probe
  source 1..50: mol_type = other DNA

SEQ ID NO: 31873 - DNA, 50 bp, synthetic construct; identical to SEQ ID NO: 6007
  misc_feature 1..50: note = Probe
  source 1..50: mol_type = other DNA

SEQ ID NO: 31874 - DNA, 31 bp, synthetic construct
  misc_feature 1..31: note = Probe
  source 1..31: mol_type = other DNA
gcccgtctctgtggcgcaatcggttagcgcg

SEQ ID NO: 31875 - DNA, 36 bp, synthetic construct
  misc_feature 1..36: note = Probe
  source 1..36: mol_type = other DNA
gcccgtctctgtggcgcaatcggttagcgcgttcgg

SEQ ID NO: 31876 - DNA, 19 bp, synthetic construct
  misc_feature 1..19: note = Probe
  source 1..19: mol_type = other DNA
gcccgtttctgtagcgcga

SEQ ID NO: 31877 - DNA, 21 bp, synthetic construct
  misc_feature 1..21: note = Probe
  source 1..21: mol_type = other DNA
gcccgtttctgtagcgcgatc

SEQ ID NO: 31878 - DNA, 29 bp, synthetic construct
  misc_feature 1..29: note = Probe
  source 1..29: mol_type = other DNA
gcccgtttctgtagcgcgatcggttagcg

SEQ ID NO: 31879 - DNA, 36 bp, synthetic construct
  misc_feature 1..36: note = Probe
  source 1..36: mol_type = other DNA
gcccgtttctgtagcgcgatcggttagcgccttcgg

SEQ ID NO: 31880 - DNA, 41 bp, synthetic construct
  misc_feature 1..41: note = Probe
  source 1..41: mol_type = other DNA
gcccgtttctgtagcgcgatcggttagcgccttcggctgtt

SEQ ID NO: 31881 - DNA, 29 bp, synthetic construct
  misc_feature 1..29: note = Probe
  source 1..29: mol_type = other DNA
gccgaaattttagactggcgttcagtcga

SEQ ID NO: 31882 - DNA, 36 bp, synthetic construct
  misc_feature 1..36: note = Probe
  source 1..36: mol_type = other DNA
gccgcagcaacctcggttcgaatccgagtcacggca

SEQ ID NO: 31883 - DNA, 39 bp, synthetic construct
  misc_feature 1..39: note = Probe
  source 1..39: mol_type = other DNA
gccgcagcaacctcggttcgaatccgagtcacggcagga

SEQ ID NO: 31884 - DNA, 39 bp, synthetic construct
  misc_feature 1..39: note = Probe
  source 1..39: mol_type = other DNA
gccgcagcaacctcggttcgaatccgagtcacggcagta

SEQ ID NO: 31885 - DNA, 35 bp, synthetic construct
  misc_feature 1..35: note = Probe
  source 1..35: mol_type = other DNA
gccgcgcattggtggttcagtggtagaattctcgc

SEQ ID NO: 31886 - DNA, 36 bp, synthetic construct
  misc_feature 1..36: note = Probe
  source 1..36: mol_type = other DNA
gccgcgcattggtggttcagtggtagaattctcgcc

SEQ ID NO: 31887 - DNA, 32 bp, synthetic construct; identical to SEQ ID NO: 1102
  misc_feature 1..32: note = Probe
  source 1..32: mol_type = other DNA

SEQ ID NO: 31888 - DNA, 36 bp, synthetic construct
  misc_feature 1..36: note = Probe
  source 1..36: mol_type = other DNA
gccggctcgttggtctaggggtatgattctcgcttt

SEQ ID NO: 31889 - DNA, 16 bp, synthetic construct
  misc_feature 1..16: note = Probe
  source 1..16: mol_type = other DNA
gccgggtactttcgta

SEQ ID NO: 31890 - DNA, 18 bp, synthetic construct
  misc_feature 1..18: note = Probe
  source 1..18: mol_type = other DNA
gccgggtactttcgtatt

SEQ ID NO: 31891 - DNA, 19 bp, synthetic construct
  misc_feature 1..19: note = Probe
  source 1..19: mol_type = other DNA
gccgggtactttcgtattt

SEQ ID NO: 31892 - DNA, 20 bp, synthetic construct
  misc_feature 1..20: note = Probe
  source 1..20: mol_type = other DNA
gccgggtactttcgtatttt

SEQ ID NO: 31893 - DNA, 21 bp, synthetic construct
  misc_feature 1..21: note = Probe
  source 1..21: mol_type = other DNA
gccgggtactttcgtattttt

SEQ ID NO: 31894 - DNA, 22 bp, synthetic construct
  misc_feature 1..22: note = Probe
  source 1..22: mol_type = other DNA
gccgggtactttcgtattttta

SEQ ID NO: 31895 - DNA, 16 bp, synthetic construct
  misc_feature 1..16: note = Probe
  source 1..16: mol_type = other DNA
gccggtagtcgactcg

SEQ ID NO: 31896 - DNA, 17 bp, synthetic construct
  misc_feature 1..17: note = Probe
  source 1..17: mol_type = other DNA
gccggtagtcgactcgg

SEQ ID NO: 31897 - DNA, 33 bp, synthetic construct; identical to SEQ ID NO: 20890
  misc_feature 1..33: note = Probe
  source 1..33: mol_type = other DNA

SEQ ID NO: 31898 - DNA, 36 bp, synthetic construct
  misc_feature 1..36: note = Probe
  source 1..36: mol_type = other DNA
gccgtcgtcctcgttagtatagtggtgagtatcccc

SEQ ID NO: 31899 - DNA, 36 bp, synthetic construct
  misc_feature 1..36: note = Probe
  source 1..36: mol_type = other DNA
gccgtctcccacatggtctagcggttaggattcctg

SEQ ID NO: 31900 - DNA, 15 bp, synthetic construct
  misc_feature 1..15: note = Probe
  source 1..15: mol_type = other DNA
gccgtgatcgtatag

SEQ ID NO: 31901 - DNA, 16 bp, synthetic construct
  misc_feature 1..16: note = Probe
  source 1..16: mol_type = other DNA
gccgtgatcgtatagt

SEQ ID NO: 31902 - DNA, 21 bp, synthetic construct
  misc_feature 1..21: note = Probe
  source 1..21: mol_type = other DNA
gccgtgatcgtatagtggtta

SEQ ID NO: 31903 - DNA, 23 bp, synthetic construct
  misc_feature 1..23: note = Probe
  source 1..23: mol_type = other DNA
gccgtgatcgtatagtggttagt

SEQ ID NO: 31904 - DNA, 24 bp, synthetic construct
  misc_feature 1..24: note = Probe
  source 1..24: mol_type = other DNA
gccgtgatcgtatagtggttagta

SEQ ID NO: 31905 - DNA, 25 bp, synthetic construct
  misc_feature 1..25: note = Probe
  source 1..25: mol_type = other DNA
gccgtgatcgtatagtggttagtac

SEQ ID NO: 31906 - DNA, 26 bp, synthetic construct
  misc_feature 1..26: note = Probe
  source 1..26: mol_type = other DNA
gccgtgatcgtatagtggttagtact

SEQ ID NO: 31907 - DNA, 27 bp, synthetic construct
  misc_feature 1..27: note = Probe
  source 1..27: mol_type = other DNA
gccgtgatcgtatagtggttagtactc

SEQ ID NO: 31908 - DNA, 28 bp, synthetic construct
  misc_feature 1..28: note = Probe
  source 1..28: mol_type = other DNA
gccgtgatcgtatagtggttagtactct

SEQ ID NO: 31909 - DNA, 29 bp, synthetic construct
  misc_feature 1..29: note = Probe
  source 1..29: mol_type = other DNA
gccgtgatcgtatagtggttagtactctg

SEQ ID NO: 31910 - DNA, 35 bp, synthetic construct; identical to SEQ ID NO: 1110
  misc_feature 1..35: note = Probe
  source 1..35: mol_type = other DNA

SEQ ID NO: 31911 - DNA, 37 bp, synthetic construct; identical to SEQ ID NO: 6039
  misc_feature 1..37: note = Probe
  source 1..37: mol_type = other DNA

SEQ ID NO: 31912 - DNA, 39 bp, synthetic construct; identical to SEQ ID NO: 13591
  misc_feature 1..39: note = Probe
  source 1..39: mol_type = other DNA

SEQ ID NO: 31913 - DNA, 50 bp, synthetic construct; identical to SEQ ID NO: 6040
  misc_feature 1..50: note = Probe
  source 1..50: mol_type = other DNA

SEQ ID NO: 31914 - DNA, 15 bp, synthetic construct
  misc_feature 1..15: note = Probe
  source 1..15: mol_type = other DNA
gcctcgttagcgcag

SEQ ID NO: 31915 - DNA, 19 bp, synthetic construct
  misc_feature 1..19: note = Probe
  source 1..19: mol_type = other DNA
gcctcgttagcgcagtagg

SEQ ID NO: 31916 - DNA, 36 bp, synthetic construct
  misc_feature 1..36: note = Probe
  source 1..36: mol_type = other DNA
gcctctccctggtggtctagtggttaggattcggcg

SEQ ID NO: 31917 - DNA, 19 bp, synthetic construct
  misc_feature 1..19: note = Probe
  source 1..19: mol_type = other DNA
gcctggatagctcagtcgg

SEQ ID NO: 31918 - DNA, 32 bp, synthetic construct; identical to SEQ ID NO: 1116
  misc_feature 1..32: note = Probe
  source 1..32: mol_type = other DNA

SEQ ID NO: 31919 - DNA, 33 bp, synthetic construct; identical to SEQ ID NO: 1117
  misc_feature 1..33: note = Probe
  source 1..33: mol_type = other DNA

SEQ ID NO: 31920 - DNA, 33 bp, synthetic construct; identical to SEQ ID NO: 1128
  misc_feature 1..33: note = Probe
  source 1..33: mol_type = other DNA

SEQ ID NO: 31921 - DNA, 36 bp, synthetic construct; identical to SEQ ID NO: 13618
  misc_feature 1..36: note = Probe
  source 1..36: mol_type = other DNA

SEQ ID NO: 31922 - DNA, 22 bp, synthetic construct
  misc_feature 1..22: note = Probe
  source 1..22: mol_type = other DNA
gcctgtccttgtagtataaact

SEQ ID NO: 31923 - DNA, 15 bp, synthetic construct
  misc_feature 1..15: note = Probe
  source 1..15: mol_type = other DNA
gcctgtgacttttgt

SEQ ID NO: 31924 - DNA, 36 bp, synthetic construct
  misc_feature 1..36: note = Probe
  source 1..36: mol_type = other DNA
gccttcaaagccctcagtaagttgcaatacttaatt

SEQ ID NO: 31925 - DNA, 16 bp, synthetic construct
  misc_feature 1..16: note = Probe
  source 1..16: mol_type = other DNA
gccttccttcgttggc

SEQ ID NO: 31926 - DNA, 22 bp, synthetic construct
  misc_feature 1..22: note = Probe
  source 1..22: mol_type = other DNA
gccttccttcgttggctctgcc

SEQ ID NO: 31927 - DNA, 23 bp, synthetic construct
  misc_feature 1..23: note = Probe
  source 1..23: mol_type = other DNA
gccttccttcgttggctctgcct

SEQ ID NO: 31928 - DNA, 24 bp, synthetic construct
  misc_feature 1..24: note = Probe
  source 1..24: mol_type = other DNA
gccttccttcgttggctctgcctg

SEQ ID NO: 31929 - DNA, 26 bp, synthetic construct
  misc_feature 1..26: note = Probe
  source 1..26: mol_type = other DNA
gccttccttcgttggctctgcctgcc

SEQ ID NO: 31930 - DNA, 30 bp, synthetic construct; identical to SEQ ID NO: 20987
  misc_feature 1..30: note = Probe
  source 1..30: mol_type = other DNA

SEQ ID NO: 31931 - DNA, 30 bp, synthetic construct; identical to SEQ ID NO: 10435
  misc_feature 1..30: note = Probe
  source 1..30: mol_type = other DNA

SEQ ID NO: 31932 - DNA, 31 bp, synthetic construct
  misc_feature 1..31: note = Probe
  source 1..31: mol_type = other DNA
gccttggtggtgcagtggtagaattctcgcc

SEQ ID NO: 31933 - DNA, 32 bp, synthetic construct; identical to SEQ ID NO: 6071
  misc_feature 1..32: note = Probe
  source 1..32: mol_type = other DNA

SEQ ID NO: 31934 - DNA, 36 bp, synthetic construct
  misc_feature 1..36: note = Probe
  source 1..36: mol_type = other DNA
gccttggtggtgcagtggtagaattctcgcctccca

SEQ ID NO: 31935 - DNA, 25 bp, synthetic construct
  misc_feature 1..25: note = Probe
  source 1..25: mol_type = other DNA
gccttttttcccggcggcgggagaa

SEQ ID NO: 31936 - DNA, 16 bp, synthetic construct
  misc_feature 1..16: note = Probe
  source 1..16: mol_type = other DNA
gcgagaggtagcggga

SEQ ID NO: 31937 - DNA, 16 bp, synthetic construct
  misc_feature 1..16: note = Probe
  source 1..16: mol_type = other DNA
gcgagaggtcccgggt

SEQ ID NO: 31938 - DNA, 34 bp, synthetic construct; identical to SEQ ID NO: 21014
  misc_feature 1..34: note = Probe
  source 1..34: mol_type = other DNA

SEQ ID NO: 31939 - DNA, 36 bp, synthetic construct
  misc_feature 1..36: note = Probe
  source 1..36: mol_type = other DNA
gcgaggcattggtggttcagtggtagaattctcgcc

SEQ ID NO: 31940 - DNA, 37 bp, synthetic construct
  misc_feature 1..37: note = Probe
  source 1..37: mol_type = other DNA
gcgaggcattggtggttcagtggtagaattctcgcct

SEQ ID NO: 31941 - DNA, 28 bp, synthetic construct
  misc_feature 1..28: note = Probe
  source 1..28: mol_type = other DNA
gcgatccgagttcaaatctcggtgggac

SEQ ID NO: 31942 - DNA, 18 bp, synthetic construct
  misc_feature 1..18: note = Probe
  source 1..18: mol_type = other DNA
gcgcaagtaggtctacaa

SEQ ID NO: 31943 - DNA, 36 bp, synthetic construct; identical to SEQ ID NO: 21023
  misc_feature 1..36: note = Probe
  source 1..36: mol_type = other DNA

SEQ ID NO: 31944 - DNA, 32 bp, synthetic construct
  misc_feature 1..32: note = Probe
  source 1..32: mol_type = other DNA
gcgcattggtggttcagtggtagaattctcgc

SEQ ID NO: 31945 - DNA, 33 bp, synthetic construct; identical to SEQ ID NO: 21025
  misc_feature 1..33: note = Probe
  source 1..33: mol_type = other DNA

SEQ ID NO: 31946 - DNA, 34 bp, synthetic construct
  misc_feature 1..34: note = Probe
  source 1..34: mol_type = other DNA
gcgcattggtggttcagtggtagaattctcgcct

SEQ ID NO: 31947 - DNA, 36 bp, synthetic construct
  misc_feature 1..36: note = Probe
  source 1..36: mol_type = other DNA
gcgcattggtggttcagtggtagaattctcgcctgc

SEQ ID NO: 31948 - DNA, 15 bp, synthetic construct
  misc_feature 1..15: note = Probe
  source 1..15: mol_type = other DNA
gcgcccggatagctc

SEQ ID NO: 31949 - DNA, 36 bp, synthetic construct
  misc_feature 1..36: note = Probe
  source 1..36: mol_type = other DNA
gcgcccttcgatagctcagctggtagagcggaggac

SEQ ID NO: 31950 - DNA, 27 bp, synthetic construct
  misc_feature 1..27: note = Probe
  source 1..27: mol_type = other DNA
gcgccgctggtgtagtggtatcatgca

SEQ ID NO: 31951 - DNA, 29 bp, synthetic construct
  misc_feature 1..29: note = Probe
  source 1..29: mol_type = other DNA
gcgccgctggtgtagtggtatcatgcaag

SEQ ID NO: 31952 - DNA, 30 bp, synthetic construct; identical to SEQ ID NO: 1149
  misc_feature 1..30: note = Probe
  source 1..30: mol_type = other DNA

SEQ ID NO: 31953 - DNA, 34 bp, synthetic construct; identical to SEQ ID NO: 1153
  misc_feature 1..34: note = Probe
  source 1..34: mol_type = other DNA

SEQ ID NO: 31954 - DNA, 36 bp, synthetic construct
  misc_feature 1..36: note = Probe
  source 1..36: mol_type = other DNA
gcgcgttcggctgttaaccgaaaggttggtggttcg

SEQ ID NO: 31955 - DNA, 36 bp, synthetic construct
  misc_feature 1..36: note = Probe
  source 1..36: mol_type = other DNA
gcgcgtttggctgttaactaaaaggttggtggttcg

SEQ ID NO: 31956 - DNA, 21 bp, synthetic construct
  misc_feature 1..21: note = Probe
  source 1..21: mol_type = other DNA
gcgctctcaccgccgcggccc

SEQ ID NO: 31957 - DNA, 47 bp, synthetic construct
  misc_feature 1..47: note = Probe
  source 1..47: mol_type = other DNA
gcgctctcaccgccgcggcccgggttcgattcccggtcagggaaaga

SEQ ID NO: 31958 - DNA, 47 bp, synthetic construct
  misc_feature 1..47: note = Probe
  source 1..47: mol_type = other DNA
gcgctctcaccgccgcggcccgggttcgattcccggtcagggaagcc

SEQ ID NO: 31959 - DNA, 47 bp, synthetic construct
  misc_feature 1..47: note = Probe
  source 1..47: mol_type = other DNA
gcgctctcaccgccgcggcccgggttcgattcccggtcagggaatga

SEQ ID NO: 31960 - DNA, 19 bp, synthetic construct
  misc_feature 1..19: note = Probe
  source 1..19: mol_type = other DNA
gcggaagcgtgctgggccc

SEQ ID NO: 31961 - DNA, 36 bp, synthetic construct
  misc_feature 1..36: note = Probe
  source 1..36: mol_type = other DNA
gcggagccttcgatagctcagttggtagagcggagg

SEQ ID NO: 31962 - DNA, 36 bp, synthetic construct
  misc_feature 1..36: note = Probe
  source 1..36: mol_type = other DNA
gcggctgtgatggccgagtggttaaggcgttggact

SEQ ID NO: 31963 - DNA, 18 bp, synthetic construct
  misc_feature 1..18: note = Probe
  source 1..18: mol_type = other DNA
gcggcttagcctgtggct

SEQ ID NO: 31964 - DNA, 19 bp, synthetic construct
  misc_feature 1..19: note = Probe
  source 1..19: mol_type = other DNA
gcggcttagcctgtggctc

SEQ ID NO: 31965 - DNA, 20 bp, synthetic construct
  misc_feature 1..20: note = Probe
  source 1..20: mol_type = other DNA
gcggcttagcctgtggctcg

SEQ ID NO: 31966 - DNA, 36 bp, synthetic construct
  misc_feature 1..36: note = Probe
  source 1..36: mol_type = other DNA
gcggcttagcctgtggctcgccgtgatcgtatagtg

SEQ ID NO: 31967 - DNA, 15 bp, synthetic construct
  misc_feature 1..15: note = Probe
  source 1..15: mol_type = other DNA
gcgggagaccggggt

SEQ ID NO: 31968 - DNA, 32 bp, synthetic construct; identical to SEQ ID NO: 6106
  misc_feature 1..32: note = Probe
  source 1..32: mol_type = other DNA

SEQ ID NO: 31969 - DNA, 36 bp, synthetic construct; identical to SEQ ID NO: 21073
  misc_feature 1..36: note = Probe
  source 1..36: mol_type = other DNA

SEQ ID NO: 31970 - DNA, 25 bp, synthetic construct
  misc_feature 1..25: note = Probe
  source 1..25: mol_type = other DNA
gcgggagaccggggttcgattcccc

SEQ ID NO: 31971 - DNA, 26 bp, synthetic construct
  misc_feature 1..26: note = Probe
  source 1..26: mol_type = other DNA
gcgggagaccggggttcgattcccca

SEQ ID NO: 31972 - DNA, 32 bp, synthetic construct
  misc_feature 1..32: note = Probe
  source 1..32: mol_type = other DNA
gcgggagaccggggttcgattccccaacgggg

SEQ ID NO: 31973 - DNA, 26 bp, synthetic construct
  misc_feature 1..26: note = Probe
  source 1..26: mol_type = other DNA
gcgggagaccggggttcgattccccg

SEQ ID NO: 31974 - DNA, 29 bp, synthetic construct
  misc_feature 1..29: note = Probe
  source 1..29: mol_type = other DNA
gcgggagaccggggttcgattccccgacg

SEQ ID NO: 31975 - DNA, 30 bp, synthetic construct; identical to SEQ ID NO: 1169
  misc_feature 1..30: note = Probe
  source 1..30: mol_type = other DNA

SEQ ID NO: 31976 - DNA, 31 bp, synthetic construct; identical to SEQ ID NO: 1170
  misc_feature 1..31: note = Probe
  source 1..31: mol_type = other DNA

SEQ ID NO: 31977 - DNA, 32 bp, synthetic construct; identical to SEQ ID NO: 1171
  misc_feature 1..32: note = Probe
  source 1..32: mol_type = other DNA

SEQ ID NO: 31978 - DNA, 34 bp, synthetic construct; identical to SEQ ID NO: 1173
  misc_feature 1..34: note = Probe
  source 1..34: mol_type = other DNA

SEQ ID NO: 31979 - DNA, 35 bp, synthetic construct; identical to SEQ ID NO: 6112
  misc_feature 1..35: note = Probe
  source 1..35: mol_type = other DNA

SEQ ID NO: 31980 - DNA, 36 bp, synthetic construct; identical to SEQ ID NO: 6115
  misc_feature 1..36: note = Probe
  source 1..36: mol_type = other DNA

SEQ ID NO: 31981 - DNA, 36 bp, synthetic construct; identical to SEQ ID NO: 21086
  misc_feature 1..36: note = Probe
  source 1..36: mol_type = other DNA

SEQ ID NO: 31982 - DNA, 35 bp, synthetic construct; identical to SEQ ID NO: 6118
  misc_feature 1..35: note = Probe
  source 1..35: mol_type = other DNA

SEQ ID NO: 31983 - DNA, 36 bp, synthetic construct; identical to SEQ ID NO: 6120
  misc_feature 1..36: note = Probe
  source 1..36: mol_type = other DNA

SEQ ID NO: 31984 - DNA, 37 bp, synthetic construct; identical to SEQ ID NO: 6121
  misc_feature 1..37: note = Probe
  source 1..37: mol_type = other DNA

SEQ ID NO: 31985 - DNA, 15 bp, synthetic construct
  misc_feature 1..15: note = Probe
  source 1..15: mol_type = other DNA
gcgggaggcccgggt

SEQ ID NO: 31986 - DNA, 16 bp, synthetic construct
  misc_feature 1..16: note = Probe
  source 1..16: mol_type = other DNA
gcgggaggcccgggtt

SEQ ID NO: 31987 - DNA, 32 bp, synthetic construct; identical to SEQ ID NO: 21098
  misc_feature 1..32: note = Probe
  source 1..32: mol_type = other DNA

SEQ ID NO: 31988 - DNA, 15 bp, synthetic construct
  misc_feature 1..15: note = Probe
  source 1..15: mol_type = other DNA
gcgggcggacctttt

SEQ ID NO: 31989 - DNA, 16 bp, synthetic construct
  misc_feature 1..16: note = Probe
  source 1..16: mol_type = other DNA
gcgggcggaccttttg

SEQ ID NO: 31990 - DNA, 15 bp, synthetic construct
  misc_feature 1..15: note = Probe
  source 1..15: mol_type = other DNA
gcgggtgctcttatt

SEQ ID NO: 31991 - DNA, 16 bp, synthetic construct
  misc_feature 1..16: note = Probe
  source 1..16: mol_type = other DNA
gcgggtgctcttattt

SEQ ID NO: 31992 - DNA, 17 bp, synthetic construct
  misc_feature 1..17: note = Probe
  source 1..17: mol_type = other DNA
gcgggtgctcttatttt

SEQ ID NO: 31993 - DNA, 22 bp, synthetic construct
  misc_feature 1..22: note = Probe
  source 1..22: mol_type = other DNA
gcggtcggccggttagctcagt

SEQ ID NO: 31994 - DNA, 24 bp, synthetic construct
  misc_feature 1..24: note = Probe
  source 1..24: mol_type = other DNA
gcgttcgattcccggtcagggaac

SEQ ID NO: 31995 - DNA, 15 bp, synthetic construct
  misc_feature 1..15: note = Probe
  source 1..15: mol_type = other DNA
gcgttggtggtatag

SEQ ID NO: 31996 - DNA, 28 bp, synthetic construct
  misc_feature 1..28: note = Probe
  source 1..28: mol_type = other DNA
gcgttggtggtatagtggtaagcatagc

SEQ ID NO: 31997 - DNA, 30 bp, synthetic construct; identical to SEQ ID NO: 1183
  misc_feature 1..30: note = Probe
  source 1..30: mol_type = other DNA

SEQ ID NO: 31998 - DNA, 31 bp, synthetic construct; identical to SEQ ID NO: 1184
  misc_feature 1..31: note = Probe
  source 1..31: mol_type = other DNA

SEQ ID NO: 31999 - DNA, 33 bp, synthetic construct; identical to SEQ ID NO: 1186
  misc_feature 1..33: note = Probe
  source 1..33: mol_type = other DNA

SEQ ID NO: 32000 - DNA, 50 bp, synthetic construct; identical to SEQ ID NO: 1192
  misc_feature 1..50: note = Probe
  source 1..50: mol_type = other DNA

SEQ ID NO: 32001 - DNA, 28 bp, synthetic construct
  misc_feature 1..28: note = Probe
  source 1..28: mol_type = other DNA
gcgttggtggtatagtggtgagcatagc

SEQ ID NO: 32002 - DNA, 29 bp, synthetic construct
  misc_feature 1..29: note = Probe
  source 1..29: mol_type = other DNA
gcgttggtggtatagtggtgagcatagct

SEQ ID NO: 32003 - DNA, 30 bp, synthetic construct; identical to SEQ ID NO: 6150
  misc_feature 1..30: note = Probe
  source 1..30: mol_type = other DNA

SEQ ID NO: 32004 - DNA, 31 bp, synthetic construct; identical to SEQ ID NO: 6151
  misc_feature 1..31: note = Probe
  source 1..31: mol_type = other DNA

SEQ ID NO: 32005 - DNA, 32 bp, synthetic construct; identical to SEQ ID NO: 6152
  misc_feature 1..32: note = Probe
  source 1..32: mol_type = other DNA

SEQ ID NO: 32006 - DNA, 33 bp, synthetic construct; identical to SEQ ID NO: 6153
  misc_feature 1..33: note = Probe
  source 1..33: mol_type = other DNA

SEQ ID NO: 32007 - DNA, 34 bp, synthetic construct; identical to SEQ ID NO: 6154
  misc_feature 1..34: note = Probe
  source 1..34: mol_type = other DNA

SEQ ID NO: 32008 - DNA, 35 bp, synthetic construct; identical to SEQ ID NO: 6155
  misc_feature 1..35: note = Probe
  source 1..35: mol_type = other DNA

SEQ ID NO: 32009 - DNA, 36 bp, synthetic construct; identical to SEQ ID NO: 6156
  misc_feature 1..36: note = Probe
  source 1..36: mol_type = other DNA

SEQ ID NO: 32010 - DNA, 28 bp, synthetic construct
  misc_feature 1..28: note = Probe
  source 1..28: mol_type = other DNA
gcgttggtggtatagtggttagcatagc

SEQ ID NO: 32011 - DNA, 29 bp, synthetic construct
  misc_feature 1..29: note = Probe
  source 1..29: mol_type = other DNA
gcgttggtggtatagtggttagcatagct

SEQ ID NO: 32012 - DNA, 30 bp, synthetic construct; identical to SEQ ID NO: 6172
  misc_feature 1..30: note = Probe
  source 1..30: mol_type = other DNA

SEQ ID NO: 32013 - DNA, 31 bp, synthetic construct; identical to SEQ ID NO: 6173
  misc_feature 1..31: note = Probe
  source 1..31: mol_type = other DNA

SEQ ID NO: 32014 - DNA, 32 bp, synthetic construct; identical to SEQ ID NO: 6174
  misc_feature 1..32: note = Probe
  source 1..32: mol_type = other DNA

SEQ ID NO: 32015 - DNA, 33 bp, synthetic construct; identical to SEQ ID NO: 6175
  misc_feature 1..33: note = Probe
  source 1..33: mol_type = other DNA

SEQ ID NO: 32016 - DNA, 36 bp, synthetic construct; identical to SEQ ID NO: 6178
  misc_feature 1..36: note = Probe
  source 1..36: mol_type = other DNA

SEQ ID NO: 32017 - DNA, 50 bp, synthetic construct; identical to SEQ ID NO: 1197
  misc_feature 1..50: note = Probe
  source 1..50: mol_type = other DNA

SEQ ID NO: 32018 - DNA, 30 bp, synthetic construct; identical to SEQ ID NO: 10512
  misc_feature 1..30: note = Probe
  source 1..30: mol_type = other DNA

SEQ ID NO: 32019 - DNA, 31 bp, synthetic construct; identical to SEQ ID NO: 6187
  misc_feature 1..31: note = Probe
  source 1..31: mol_type = other DNA

SEQ ID NO: 32020 - DNA, 32 bp, synthetic construct; identical to SEQ ID NO: 6188
  misc_feature 1..32: note = Probe
  source 1..32: mol_type = other DNA

SEQ ID NO: 32021 - DNA, 33 bp, synthetic construct; identical to SEQ ID NO: 21178
  misc_feature 1..33: note = Probe
  source 1..33: mol_type = other DNA

SEQ ID NO: 32022 - DNA, 36 bp, synthetic construct
  misc_feature 1..36: note = Probe
  source 1..36: mol_type = other DNA
gcgttggtggtttagtggtagaattctcgcctccca

SEQ ID NO: 32023 - DNA, 15 bp, synthetic construct
  misc_feature 1..15: note = Probe
  source 1..15: mol_type = other DNA
gctaaacctagcccc

SEQ ID NO: 32024 - DNA, 16 bp, synthetic construct
  misc_feature 1..16: note = Probe
  source 1..16: mol_type = other DNA
gctaaacctagcccca

SEQ ID NO: 32025 - DNA, 18 bp, synthetic construct
  misc_feature 1..18: note = Probe
  source 1..18: mol_type = other DNA
gctaaacctagccccaaa

SEQ ID NO: 32026 - DNA, 19 bp, synthetic construct
  misc_feature 1..19: note = Probe
  source 1..19: mol_type = other DNA
gctaaacctagccccaaac

SEQ ID NO: 32027 - DNA, 20 bp, synthetic construct
  misc_feature 1..20: note = Probe
  source 1..20: mol_type = other DNA
gctaaacctagccccaaacc

SEQ ID NO: 32028 - DNA, 21 bp, synthetic construct
  misc_feature 1..21: note = Probe
  source 1..21: mol_type = other DNA
gctaaacctagccccaaaccc

SEQ ID NO: 32029 - DNA, 22 bp, synthetic construct
  misc_feature 1..22: note = Probe
  source 1..22: mol_type = other DNA
gctaaacctagccccaaaccca

SEQ ID NO: 32030 - DNA, 23 bp, synthetic construct
  misc_feature 1..23: note = Probe
  source 1..23: mol_type = other DNA
gctaaacctagccccaaacccac

SEQ ID NO: 32031 - DNA, 24 bp, synthetic construct
  misc_feature 1..24: note = Probe
  source 1..24: mol_type = other DNA
gctaaacctagccccaaacccact

SEQ ID NO: 32032 - DNA, 25 bp, synthetic construct
  misc_feature 1..25: note = Probe
  source 1..25: mol_type = other DNA
gctaaacctagccccaaacccactc

SEQ ID NO: 32033 - DNA, 26 bp, synthetic construct
  misc_feature 1..26: note = Probe
  source 1..26: mol_type = other DNA
gctaaacctagccccaaacccactcc

SEQ ID NO: 32034 - DNA, 27 bp, synthetic construct
  misc_feature 1..27: note = Probe
  source 1..27: mol_type = other DNA
gctaaacctagccccaaacccactcca

SEQ ID NO: 32035 - DNA, 28 bp, synthetic construct
  misc_feature 1..28: note = Probe
  source 1..28: mol_type = other DNA
gctaaacctagccccaaacccactccac

SEQ ID NO: 32036 - DNA, 29 bp, synthetic construct
  misc_feature 1..29: note = Probe
  source 1..29: mol_type = other DNA
gctaaacctagccccaaacccactccacc

SEQ ID NO: 32037 - DNA, 30 bp, synthetic construct; identical to SEQ ID NO: 6203
  misc_feature 1..30: note = Probe
  source 1..30: mol_type = other DNA

SEQ ID NO: 32038 - DNA, 19 bp, synthetic construct
  misc_feature 1..19: note = Probe
  source 1..19: mol_type = other DNA
gctaaataagctatcgggc

SEQ ID NO: 32039 - DNA, 20 bp, synthetic construct
  misc_feature 1..20: note = Probe
  source 1..20: mol_type = other DNA
gctaaataagctatcgggcc

SEQ ID NO: 32040 - DNA, 21 bp, synthetic construct
  misc_feature 1..21: note = Probe
  source 1..21: mol_type = other DNA
gctaaataagctatcgggccc

SEQ ID NO: 32041 - DNA, 22 bp, synthetic construct
  misc_feature 1..22: note = Probe
  source 1..22: mol_type = other DNA
gctaaataagctatcgggccca

SEQ ID NO: 32042 - DNA, 23 bp, synthetic construct
  misc_feature 1..23: note = Probe
  source 1..23: mol_type = other DNA
gctaaataagctatcgggcccat

SEQ ID NO: 32043 - DNA, 26 bp, synthetic construct
  misc_feature 1..26: note = Probe
  source 1..26: mol_type = other DNA
gctaaataagctatcgggcccatacc

SEQ ID NO: 32044 - DNA, 16 bp, synthetic construct
  misc_feature 1..16: note = Probe
  source 1..16: mol_type = other DNA
gctaactcatgccccc

SEQ ID NO: 32045 - DNA, 21 bp, synthetic construct
  misc_feature 1..21: note = Probe
  source 1..21: mol_type = other DNA
gctaactcatgcccccatgtc

SEQ ID NO: 32046 - DNA, 22 bp, synthetic construct
  misc_feature 1..22: note = Probe
  source 1..22: mol_type = other DNA
gctaactcatgcccccatgtct

SEQ ID NO: 32047 - DNA, 25 bp, synthetic construct
  misc_feature 1..25: note = Probe
  source 1..25: mol_type = other DNA
gctaactcatgcccccatgtctaac

SEQ ID NO: 32048 - DNA, 26 bp, synthetic construct
  misc_feature 1..26: note = Probe
  source 1..26: mol_type = other DNA
gctaactcatgcccccatgtctaaca

SEQ ID NO: 32049 - DNA, 29 bp, synthetic construct
  misc_feature 1..29: note = Probe
  source 1..29: mol_type = other DNA
gctaactcatgcccccatgtctaacaaca

SEQ ID NO: 32050 - DNA, 36 bp, synthetic construct; identical to SEQ ID NO: 6219
  misc_feature 1..36: note = Probe
  source 1..36: mol_type = other DNA

SEQ ID NO: 32051 - DNA, 42 bp, synthetic construct; identical to SEQ ID NO: 6225
  misc_feature 1..42: note = Probe
  source 1..42: mol_type = other DNA

SEQ ID NO: 32052 - DNA, 43 bp, synthetic construct; identical to SEQ ID NO: 6226
  misc_feature 1..43: note = Probe
  source 1..43: mol_type = other DNA

SEQ ID NO: 32053 - DNA, 24 bp, synthetic construct
  misc_feature 1..24: note = Probe
  source 1..24: mol_type = other DNA
gctaaggaagtcctgtgctcagtt

SEQ ID NO: 32054 - DNA, 25 bp, synthetic construct
  misc_feature 1..25: note = Probe
  source 1..25: mol_type = other DNA
gctaaggaagtcctgtgctcagttt

SEQ ID NO: 32055 - DNA, 26 bp, synthetic construct
  misc_feature 1..26: note = Probe
  source 1..26: mol_type = other DNA
gctaaggaagtcctgtgctcagtttt

SEQ ID NO: 32056 - DNA, 27 bp, synthetic construct
  misc_feature 1..27: note = Probe
  source 1..27: mol_type = other DNA
gctaaggaagtcctgtgctcagttttg

SEQ ID NO: 32057 - DNA, 18 bp, synthetic construct
  misc_feature 1..18: note = Probe
  source 1..18: mol_type = other DNA
gctaaggactgcaaaacc

SEQ ID NO: 32058 - DNA, 19 bp, synthetic construct
  misc_feature 1..19: note = Probe
  source 1..19: mol_type = other DNA
gctaaggactgcaaaaccc

SEQ ID NO: 32059 - DNA, 20 bp, synthetic construct
  misc_feature 1..20: note = Probe
  source 1..20: mol_type = other DNA
gctaaggactgcaaaacccc

SEQ ID NO: 32060 - DNA, 23 bp, synthetic construct
  misc_feature 1..23: note = Probe
  source 1..23: mol_type = other DNA
gctaaggactgcaaaaccccact

SEQ ID NO: 32061 - DNA, 25 bp, synthetic construct
  misc_feature 1..25: note = Probe
  source 1..25: mol_type = other DNA
gctaaggactgcaaaaccccactct

SEQ ID NO: 32062 - DNA, 50 bp, synthetic construct
  misc_feature 1..50: note = Probe
  source 1..50: mol_type = other DNA
gctaatccattgtgctctgcacgcgtgggttcgaatcccatcctcgtcgc

SEQ ID NO: 32063 - DNA, 15 bp, synthetic construct
  misc_feature 1..15: note = Probe
  source 1..15: mol_type = other DNA
gctaatggtggagtt

SEQ ID NO: 32064 - DNA, 16 bp, synthetic construct
  misc_feature 1..16: note = Probe
  source 1..16: mol_type = other DNA
gctaatggtggagtta

SEQ ID NO: 32065 - DNA, 17 bp, synthetic construct
  misc_feature 1..17: note = Probe
  source 1..17: mol_type = other DNA
gctaatggtggagttaa

SEQ ID NO: 32066 - DNA, 21 bp, synthetic construct
  misc_feature 1..21: note = Probe
  source 1..21: mol_type = other DNA
gctaatggtggagttaaagac

SEQ ID NO: 32067 - DNA, 33 bp, synthetic construct; identical to SEQ ID NO: 6232
  misc_feature 1..33: note = Probe
  source 1..33: mol_type = other DNA

SEQ ID NO: 32068 - DNA, 19 bp, synthetic construct
  misc_feature 1..19: note = Probe
  source 1..19: mol_type = other DNA
gctagctcagtcggtagag

SEQ ID NO: 32069 - DNA, 29 bp, synthetic construct
  misc_feature 1..29: note = Probe
  source 1..29: mol_type = other DNA
gctagctcagtcggtagagcatgagaccc

SEQ ID NO: 32070 - DNA, 28 bp, synthetic construct
  misc_feature 1..28: note = Probe
  source 1..28: mol_type = other DNA
gctagctcagtcggtagagcatgagact

SEQ ID NO: 32071 - DNA, 29 bp, synthetic construct
  misc_feature 1..29: note = Probe
  source 1..29: mol_type = other DNA
gctagctcagtcggtagagcatgagactc

SEQ ID NO: 32072 - DNA, 36 bp, synthetic construct
  misc_feature 1..36: note = Probe
  source 1..36: mol_type = other DNA
gctagctcagtcggtagagcatgagactcttaatct

SEQ ID NO: 32073 - DNA, 30 bp, synthetic construct; identical to SEQ ID NO: 21246
  misc_feature 1..30: note = Probe
  source 1..30: mol_type = other DNA

SEQ ID NO: 32074 - DNA, 25 bp, synthetic construct
  misc_feature 1..25: note = Probe
  source 1..25: mol_type = other DNA
gctataagcattggtggttcagtgg

SEQ ID NO: 32075 - DNA, 15 bp, synthetic construct
  misc_feature 1..15: note = Probe
  source 1..15: mol_type = other DNA
gctatagggtggaga

SEQ ID NO: 32076 - DNA, 15 bp, synthetic construct
  misc_feature 1..15: note = Probe
  source 1..15: mol_type = other DNA
gctatccattggtct

SEQ ID NO: 32077 - DNA, 16 bp, synthetic construct
  misc_feature 1..16: note = Probe
  source 1..16: mol_type = other DNA
gctatccattggtctt

SEQ ID NO: 32078 - DNA, 17 bp, synthetic construct
  misc_feature 1..17: note = Probe
  source 1..17: mol_type = other DNA
gctatccattggtctta

SEQ ID NO: 32079 - DNA, 21 bp, synthetic construct
  misc_feature 1..21: note = Probe
  source 1..21: mol_type = other DNA
gctatccattggtcttaggcc

SEQ ID NO: 32080 - DNA, 23 bp, synthetic construct
  misc_feature 1..23: note = Probe
  source 1..23: mol_type = other DNA
gctatccattggtcttaggcccc

SEQ ID NO: 32081 - DNA, 36 bp, synthetic construct
  misc_feature 1..36: note = Probe
  source 1..36: mol_type = other DNA
gctatccattggtcttaggccccaaaaattttggtg

SEQ ID NO: 32082 - DNA, 15 bp, synthetic construct
  misc_feature 1..15: note = Probe
  source 1..15: mol_type = other DNA
gctatcggagttttt

SEQ ID NO: 32083 - DNA, 15 bp, synthetic construct
  misc_feature 1..15: note = Probe
  source 1..15: mol_type = other DNA
gctatcgggcccata

SEQ ID NO: 32084 - DNA, 16 bp, synthetic construct
  misc_feature 1..16: note = Probe
  source 1..16: mol_type = other DNA
gctatcgggcccatac

SEQ ID NO: 32085 - DNA, 17 bp, synthetic construct
  misc_feature 1..17: note = Probe
  source 1..17: mol_type = other DNA
gctatcgggcccatacc

SEQ ID NO: 32086 - DNA, 18 bp, synthetic construct
  misc_feature 1..18: note = Probe
  source 1..18: mol_type = other DNA
gctatcgggcccataccc

SEQ ID NO: 32087 - DNA, 19 bp, synthetic construct
  misc_feature 1..19: note = Probe
  source 1..19: mol_type = other DNA
gctatcgggcccatacccc

SEQ ID NO: 32088 - DNA, 32 bp, synthetic construct; identical to SEQ ID NO: 21263
  misc_feature 1..32: note = Probe
  source 1..32: mol_type = other DNA

SEQ ID NO: 32089 - DNA, 36 bp, synthetic construct
  misc_feature 1..36: note = Probe
  source 1..36: mol_type = other DNA
gctatcgggcccataccccgaaaatgttggttatac

SEQ ID NO: 32090 - DNA, 16 bp, synthetic construct
  misc_feature 1..16: note = Probe
  source 1..16: mol_type = other DNA
gctcacaagaactgct

SEQ ID NO: 32091 - DNA, 19 bp, synthetic construct
  misc_feature 1..19: note = Probe
  source 1..19: mol_type = other DNA
gctcacaagaactgctaac

SEQ ID NO: 32092 - DNA, 21 bp, synthetic construct
  misc_feature 1..21: note = Probe
  source 1..21: mol_type = other DNA
gctcacaagaactgctaactc

SEQ ID NO: 32093 - DNA, 22 bp, synthetic construct
  misc_feature 1..22: note = Probe
  source 1..22: mol_type = other DNA
gctcacaagaactgctaactca

SEQ ID NO: 32094 - DNA, 24 bp, synthetic construct
  misc_feature 1..24: note = Probe
  source 1..24: mol_type = other DNA
gctcacaagaactgctaactcatg

SEQ ID NO: 32095 - DNA, 26 bp, synthetic construct
  misc_feature 1..26: note = Probe
  source 1..26: mol_type = other DNA
gctcacaagaactgctaactcatgcc

SEQ ID NO: 32096 - DNA, 15 bp, synthetic construct
  misc_feature 1..15: note = Probe
  source 1..15: mol_type = other DNA
gctcagtcggtagag

SEQ ID NO: 32097 - DNA, 24 bp, synthetic construct
  misc_feature 1..24: note = Probe
  source 1..24: mol_type = other DNA
gctcagtcggtagagcatcagact

SEQ ID NO: 32098 - DNA, 26 bp, synthetic construct
  misc_feature 1..26: note = Probe
  source 1..26: mol_type = other DNA
gctcagtcggtagagcatcagacttt

SEQ ID NO: 32099 - DNA, 27 bp, synthetic construct
  misc_feature 1..27: note = Probe
  source 1..27: mol_type = other DNA
gctcagtcggtagagcatcagactttt

SEQ ID NO: 32100 - DNA, 24 bp, synthetic construct
  misc_feature 1..24: note = Probe
  source 1..24: mol_type = other DNA
gctcagtcggtagagcatgagact

SEQ ID NO: 32101 - DNA, 31 bp, synthetic construct
  misc_feature 1..31: note = Probe
  source 1..31: mol_type = other DNA
gctcagtcggtagagcatgggactcttaatc

SEQ ID NO: 32102 - DNA, 32 bp, synthetic construct
  misc_feature 1..32: note = Probe
  source 1..32: mol_type = other DNA
gctcagtcggtagagcatgggactcttaatcc

SEQ ID NO: 32103 - DNA, 36 bp, synthetic construct
  misc_feature 1..36: note = Probe
  source 1..36: mol_type = other DNA
gctcccttcgatagctcagctggtagagcggaggac

SEQ ID NO: 32104 - DNA, 50 bp, synthetic construct
  misc_feature 1..50: note = Probe
  source 1..50: mol_type = other DNA
gctcccttcgatagctcagctggtagagcggaggactgtaggcgcgcgcc

SEQ ID NO: 32105 - DNA, 28 bp, synthetic construct
  misc_feature 1..28: note = Probe
  source 1..28: mol_type = other DNA
gctccgaggtgattttcatattgaattg

SEQ ID NO: 32106 - DNA, 30 bp, synthetic construct; identical to SEQ ID NO: 1206
  misc_feature 1..30: note = Probe
  source 1..30: mol_type = other DNA

SEQ ID NO: 32107 - DNA, 36 bp, synthetic construct
  misc_feature 1..36: note = Probe
  source 1..36: mol_type = other DNA
gctccgaggtgattttcatattgaattgcaaattcg

SEQ ID NO: 32108 - DNA, 30 bp, synthetic construct
  misc_feature 1..30: note = Probe
  source 1..30: mol_type = other DNA
gctcgaagatatatgtatatatcctcttcc

SEQ ID NO: 32109 - DNA, 23 bp, synthetic construct
  misc_feature 1..23: note = Probe
  source 1..23: mol_type = other DNA
gctcgaaggacttcgtctgtaat

SEQ ID NO: 32110 - DNA, 30 bp, synthetic construct; identical to SEQ ID NO: 21297
  misc_feature 1..30: note = Probe
  source 1..30: mol_type = other DNA

SEQ ID NO: 32111 - DNA, 17 bp, synthetic construct
  misc_feature 1..17: note = Probe
  source 1..17: mol_type = other DNA
gctctcaccgccgcggc

SEQ ID NO: 32112 - DNA, 19 bp, synthetic construct
  misc_feature 1..19: note = Probe
  source 1..19: mol_type = other DNA
gctctcaccgccgcggccc

SEQ ID NO: 32113 - DNA, 23 bp, synthetic construct
  misc_feature 1..23: note = Probe
  source 1..23: mol_type = other DNA
gctctcaccgccgcggcccgggt

SEQ ID NO: 32114 - DNA, 36 bp, synthetic construct
  misc_feature 1..36: note = Probe
  source 1..36: mol_type = other DNA
gctctcaccgccgcggcccgggttcgattcccggtc

SEQ ID NO: 32115 - DNA, 29 bp, synthetic construct
  misc_feature 1..29: note = Probe
  source 1..29: mol_type = other DNA
gctctccttttatgagctggtcgcgggaa

SEQ ID NO: 32116 - DNA, 19 bp, synthetic construct
  misc_feature 1..19: note = Probe
  source 1..19: mol_type = other DNA
gctgagtgaagcattggac

SEQ ID NO: 32117 - DNA, 20 bp, synthetic construct
  misc_feature 1..20: note = Probe
  source 1..20: mol_type = other DNA
gctgagtgaagcattggact

SEQ ID NO: 32118 - DNA, 22 bp, synthetic construct
  misc_feature 1..22: note = Probe
  source 1..22: mol_type = other DNA
gctgagtgaagcattggactgt

SEQ ID NO: 32119 - DNA, 23 bp, synthetic construct
  misc_feature 1..23: note = Probe
  source 1..23: mol_type = other DNA
gctgagtgaagcattggactgta

SEQ ID NO: 32120 - DNA, 24 bp, synthetic construct
  misc_feature 1..24: note = Probe
  source 1..24: mol_type = other DNA
gctgagtgaagcattggactgtaa

SEQ ID NO: 32121 - DNA, 25 bp, synthetic construct
  misc_feature 1..25: note = Probe
  source 1..25: mol_type = other DNA
gctgagtgaagcattggactgtaaa

SEQ ID NO: 32122 - DNA, 26 bp, synthetic construct
  misc_feature 1..26: note = Probe
  source 1..26: mol_type = other DNA
gctgagtgaagcattggactgtaaat

SEQ ID NO: 32123 - DNA, 27 bp, synthetic construct
  misc_feature 1..27: note = Probe
  source 1..27: mol_type = other DNA
gctgagtgaagcattggactgtaaatc

SEQ ID NO: 32124 - DNA, 28 bp, synthetic construct
  misc_feature 1..28: note = Probe
  source 1..28: mol_type = other DNA
gctgagtgaagcattggactgtaaatct

SEQ ID NO: 32125 - DNA, 36 bp, synthetic construct
  misc_feature 1..36: note = Probe
  source 1..36: mol_type = other DNA
gctgagtgaagcattggactgtaaatctaaagacag

SEQ ID NO: 32126 - DNA, 36 bp, synthetic construct; identical to SEQ ID NO: 21307
  misc_feature 1..36: note = Probe
  source 1..36: mol_type = other DNA

SEQ ID NO: 32127 - DNA, 36 bp, synthetic construct
  misc_feature 1..36: note = Probe
  source 1..36: mol_type = other DNA
gctgttaactaagtgtttgtgggtttaagtcccatt

SEQ ID NO: 32128 - DNA, 30 bp, synthetic construct; identical to SEQ ID NO: 6308
  misc_feature 1..30: note = Probe
  source 1..30: mol_type = other DNA

SEQ ID NO: 32129 - DNA, 16 bp, synthetic construct
  misc_feature 1..16: note = Probe
  source 1..16: mol_type = other DNA
gcttagcctgtggctc

SEQ ID NO: 32130 - DNA, 25 bp, synthetic construct
  misc_feature 1..25: note = Probe
  source 1..25: mol_type = other DNA
gcttagttggttaaagcgcctgtct

SEQ ID NO: 32131 - DNA, 36 bp, synthetic construct
  misc_feature 1..36: note = Probe
  source 1..36: mol_type = other DNA
gcttccttcgatagctcagctggtagagcggaggac

SEQ ID NO: 32132 - DNA, 33 bp, synthetic construct; identical to SEQ ID NO: 6322
  misc_feature 1..33: note = Probe
  source 1..33: mol_type = other DNA

SEQ ID NO: 32133 - DNA, 36 bp, synthetic construct
  misc_feature 1..36: note = Probe
  source 1..36: mol_type = other DNA
gcttctgtaatgtagtggttatcacattcgcctcac

SEQ ID NO: 32134 - DNA, 15 bp, synthetic construct
  misc_feature 1..15: note = Probe
  source 1..15: mol_type = other DNA
gcttctgtagtgtag

SEQ ID NO: 32135 - DNA, 30 bp, synthetic construct; identical to SEQ ID NO: 8646
  misc_feature 1..30: note = Probe
  source 1..30: mol_type = other DNA

SEQ ID NO: 32136 - DNA, 31 bp, synthetic construct; identical to SEQ ID NO: 1213
  misc_feature 1..31: note = Probe
  source 1..31: mol_type = other DNA

SEQ ID NO: 32137 - DNA, 35 bp, synthetic construct; identical to SEQ ID NO: 1217
  misc_feature 1..35: note = Probe
  source 1..35: mol_type = other DNA

SEQ ID NO: 32138 - DNA, 37 bp, synthetic construct; identical to SEQ ID NO: 6324
  misc_feature 1..37: note = Probe
  source 1..37: mol_type = other DNA

SEQ ID NO: 32139 - DNA, 50 bp, synthetic construct; identical to SEQ ID NO: 1219
  misc_feature 1..50: note = Probe
  source 1..50: mol_type = other DNA

SEQ ID NO: 32140 - DNA, 22 bp, synthetic construct
  misc_feature 1..22: note = Probe
  source 1..22: mol_type = other DNA
gcttgttgtgattcctccattt

SEQ ID NO: 32141 - DNA, 23 bp, synthetic construct
  misc_feature 1..23: note = Probe
  source 1..23: mol_type = other DNA
gcttgttgtgattcctccatttt

SEQ ID NO: 32142 - DNA, 19 bp, synthetic construct
  misc_feature 1..19: note = Probe
  source 1..19: mol_type = other DNA
gctttcaccgccgcggccc

SEQ ID NO: 32143 - DNA, 21 bp, synthetic construct
  misc_feature 1..21: note = Probe
  source 1..21: mol_type = other DNA
gctttgcacgtatgaggcccc

SEQ ID NO: 32144 - DNA, 23 bp, synthetic construct
  misc_feature 1..23: note = Probe
  source 1..23: mol_type = other DNA
gctttgcacgtatgaggccccgg

SEQ ID NO: 32145 - DNA, 27 bp, synthetic construct
  misc_feature 1..27: note = Probe
  source 1..27: mol_type = other DNA
gctttgcacgtatgaggccccgggttc

SEQ ID NO: 32146 - DNA, 15 bp, synthetic construct
  misc_feature 1..15: note = Probe
  source 1..15: mol_type = other DNA
gctttggggggttcg

SEQ ID NO: 32147 - DNA, 16 bp, synthetic construct
  misc_feature 1..16: note = Probe
  source 1..16: mol_type = other DNA
gctttggggggttcga

SEQ ID NO: 32148 - DNA, 18 bp, synthetic construct
  misc_feature 1..18: note = Probe
  source 1..18: mol_type = other DNA
gctttggggggttcgatt

SEQ ID NO: 32149 - DNA, 19 bp, synthetic construct
  misc_feature 1..19: note = Probe
  source 1..19: mol_type = other DNA
gctttggggggttcgattc

SEQ ID NO: 32150 - DNA, 20 bp, synthetic construct
  misc_feature 1..20: note = Probe
  source 1..20: mol_type = other DNA
gctttggggggttcgattcc

SEQ ID NO: 32151 - DNA, 21 bp, synthetic construct
  misc_feature 1..21: note = Probe
  source 1..21: mol_type = other DNA
gctttggggggttcgattcct

SEQ ID NO: 32152 - DNA, 42 bp, synthetic construct
  misc_feature 1..42: note = Probe
  source 1..42: mol_type = other DNA
gctttgggtgctaatggtggagttaaagactttttctctgat

SEQ ID NO: 32153 - DNA, 43 bp, synthetic construct; identical to SEQ ID NO: 6331
  misc_feature 1..43: note = Probe
  source 1..43: mol_type = other DNA

SEQ ID NO: 32154 - DNA, 17 bp, synthetic construct
  misc_feature 1..17: note = Probe
  source 1..17: mol_type = other DNA
ggaaagtgcacttggac

SEQ ID NO: 32155 - DNA, 18 bp, synthetic construct
  misc_feature 1..18: note = Probe
  source 1..18: mol_type = other DNA
ggaaagtgcacttggacg

SEQ ID NO: 32156 - DNA, 21 bp, synthetic construct
  misc_feature 1..21: note = Probe
  source 1..21: mol_type = other DNA
ggaaagtgcacttggacgaac

SEQ ID NO: 32157 - DNA, 22 bp, synthetic construct
  misc_feature 1..22: note = Probe
  source 1..22: mol_type = other DNA
ggaaagtgcacttggacgaacc

SEQ ID NO: 32158 - DNA, 15 bp, synthetic construct
  misc_feature 1..15: note = Probe
  source 1..15: mol_type = other DNA
ggaagcgtgctgggc

SEQ ID NO: 32159 - DNA, 17 bp, synthetic construct
  misc_feature 1..17: note = Probe
  source 1..17: mol_type = other DNA
ggaagcgtgctgggccc

SEQ ID NO: 32160 - DNA, 28 bp, synthetic construct
  misc_feature 1..28: note = Probe
  source 1..28: mol_type = other DNA
ggaagtcaggatggccgagcggtctaag

SEQ ID NO: 32161 - DNA, 15 bp, synthetic construct
  misc_feature 1..15: note = Probe
  source 1..15: mol_type = other DNA
ggaatgtcagctttt

SEQ ID NO: 32162 - DNA, 15 bp, synthetic construct
  misc_feature 1..15: note = Probe
  source 1..15: mol_type = other DNA
ggactatgagaatcg

SEQ ID NO: 32163 - DNA, 17 bp, synthetic construct
  misc_feature 1..17: note = Probe
  source 1..17: mol_type = other DNA
ggactatgagaatcgaa

SEQ ID NO: 32164 - DNA, 18 bp, synthetic construct
  misc_feature 1..18: note = Probe
  source 1..18: mol_type = other DNA
ggactatgagaatcgaac

SEQ ID NO: 32165 - DNA, 19 bp, synthetic construct
  misc_feature 1..19: note = Probe
  source 1..19: mol_type = other DNA
ggactatgagaatcgaacc

SEQ ID NO: 32166 - DNA, 20 bp, synthetic construct
  misc_feature 1..20: note = Probe
  source 1..20: mol_type = other DNA
ggactatgagaatcgaaccc

SEQ ID NO: 32167 - DNA, 21 bp, synthetic construct
  misc_feature 1..21: note = Probe
  source 1..21: mol_type = other DNA
ggactatgagaatcgaaccca

SEQ ID NO: 32168 - DNA, 22 bp, synthetic construct
  misc_feature 1..22: note = Probe
  source 1..22: mol_type = other DNA
ggactatgagaatcgaacccat

SEQ ID NO: 32169 - DNA, 23 bp, synthetic construct
  misc_feature 1..23: note = Probe
  source 1..23: mol_type = other DNA
ggactatgagaatcgaacccatc

SEQ ID NO: 32170 - DNA, 24 bp, synthetic construct
  misc_feature 1..24: note = Probe
  source 1..24: mol_type = other DNA
ggactatgagaatcgaacccatcc

SEQ ID NO: 32171 - DNA, 25 bp, synthetic construct
  misc_feature 1..25: note = Probe
  source 1..25: mol_type = other DNA
ggactatgagaatcgaacccatccc

SEQ ID NO: 32172 - DNA, 26 bp, synthetic construct
  misc_feature 1..26: note = Probe
  source 1..26: mol_type = other DNA
ggactatgagaatcgaacccatccct

SEQ ID NO: 32173 - DNA, 27 bp, synthetic construct
  misc_feature 1..27: note = Probe
  source 1..27: mol_type = other DNA
ggactatgagaatcgaacccatccctg

SEQ ID NO: 32174 - DNA, 28 bp, synthetic construct
  misc_feature 1..28: note = Probe
  source 1..28: mol_type = other DNA
ggactatgagaatcgaacccatccctga

SEQ ID NO: 32175 - DNA, 29 bp, synthetic construct
  misc_feature 1..29: note = Probe
  source 1..29: mol_type = other DNA
ggactatgagaatcgaacccatccctgag

SEQ ID NO: 32176 - DNA, 30 bp, synthetic construct; identical to SEQ ID NO: 6337
  misc_feature 1..30: note = Probe
  source 1..30: mol_type = other DNA

SEQ ID NO: 32177 - DNA, 24 bp, synthetic construct
  misc_feature 1..24: note = Probe
  source 1..24: mol_type = other DNA
ggactctgaatccagcgatccgag

SEQ ID NO: 32178 - DNA, 25 bp, synthetic construct
  misc_feature 1..25: note = Probe
  source 1..25: mol_type = other DNA
ggactctgaatccagcgatccgagt

SEQ ID NO: 32179 - DNA, 36 bp, synthetic construct
  misc_feature 1..36: note = Probe
  source 1..36: mol_type = other DNA
ggagaggcactggtggttcagtggtagaattctcgc

SEQ ID NO: 32180 - DNA, 38 bp, synthetic construct
  misc_feature 1..38: note = Probe
  source 1..38: mol_type = other DNA
ggagaggcactggtggttcagtggtagaattctcgcct

SEQ ID NO: 32181 - DNA, 27 bp, synthetic construct
  misc_feature 1..27: note = Probe
  source 1..27: mol_type = other DNA
ggagatgaaaacctttttccaaggaca

SEQ ID NO: 32182 - DNA, 28 bp, synthetic construct
  misc_feature 1..28: note = Probe
  source 1..28: mol_type = other DNA
ggagatgaaaacctttttccaaggacaa

SEQ ID NO: 32183 - DNA, 26 bp, synthetic construct
  misc_feature 1..26: note = Probe
  source 1..26: mol_type = other DNA
ggagatttcaacttaacttgaccgct

SEQ ID NO: 32184 - DNA, 27 bp, synthetic construct
  misc_feature 1..27: note = Probe
  source 1..27: mol_type = other DNA
ggagatttcaacttaacttgaccgctc

SEQ ID NO: 32185 - DNA, 31 bp, synthetic construct; identical to SEQ ID NO: 6373
  misc_feature 1..31: note = Probe
  source 1..31: mol_type = other DNA

SEQ ID NO: 32186 - DNA, 32 bp, synthetic construct; identical to SEQ ID NO: 6374
  misc_feature 1..32: note = Probe
  source 1..32: mol_type = other DNA

SEQ ID NO: 32187 - DNA, 36 bp, synthetic construct
  misc_feature 1..36: note = Probe
  source 1..36: mol_type = other DNA
ggagatttcaacttaacttgaccgctctgagctaaa

SEQ ID NO: 32188 - DNA, 16 bp, synthetic construct
  misc_feature 1..16: note = Probe
  source 1..16: mol_type = other DNA
ggagcccggatagctc

SEQ ID NO: 32189 - DNA, 31 bp, synthetic construct
  misc_feature 1..31: note = Probe
  source 1..31: mol_type = other DNA
ggagcccggatagctcagtcggtagagcatc

SEQ ID NO: 32190 - DNA, 36 bp, synthetic construct
  misc_feature 1..36: note = Probe
  source 1..36: mol_type = other DNA
ggagcccggatagctcagtcggtagagcatcagact

SEQ ID NO: 32191 - DNA, 38 bp, synthetic construct
  misc_feature 1..38: note = Probe
  source 1..38: mol_type = other DNA
ggagcccggatagctcagtcggtagagcatcagacttt

SEQ ID NO: 32192 - DNA, 39 bp, synthetic construct; identical to SEQ ID NO: 21433
  misc_feature 1..39: note = Probe
  source 1..39: mol_type = other DNA

SEQ ID NO: 32193 - DNA, 26 bp, synthetic construct
  misc_feature 1..26: note = Probe
  source 1..26: mol_type = other DNA
ggagcgcccggatagctcagtcggta

SEQ ID NO: 32194 - DNA, 27 bp, synthetic construct
  misc_feature 1..27: note = Probe
  source 1..27: mol_type = other DNA
ggagcgcccggatagctcagtcggtag

SEQ ID NO: 32195 - DNA, 28 bp, synthetic construct
  misc_feature 1..28: note = Probe
  source 1..28: mol_type = other DNA
ggagcgcccggatagctcagtcggtaga

SEQ ID NO: 32196 - DNA, 29 bp, synthetic construct
  misc_feature 1..29: note = Probe
  source 1..29: mol_type = other DNA
ggagcgcccggatagctcagtcggtagag

SEQ ID NO: 32197 - DNA, 33 bp, synthetic construct
  misc_feature 1..33: note = Probe
  source 1..33: mol_type = other DNA
ggagcgcccggatagctcagtcggtagagcatc

SEQ ID NO: 32198 - DNA, 36 bp, synthetic construct; identical to SEQ ID NO: 21436
  misc_feature 1..36: note = Probe
  source 1..36: mol_type = other DNA

SEQ ID NO: 32199 - DNA, 40 bp, synthetic construct; identical to SEQ ID NO: 21439
  misc_feature 1..40: note = Probe
  source 1..40: mol_type = other DNA

SEQ ID NO: 32200 - DNA, 41 bp, synthetic construct; identical to SEQ ID NO: 21440
  misc_feature 1..41: note = Probe
  source 1..41: mol_type = other DNA

SEQ ID NO: 32201 - DNA, 36 bp, synthetic construct
  misc_feature 1..36: note = Probe
  source 1..36: mol_type = other DNA
ggagctccagtggcgcaatcggttagcgcgcggtac

SEQ ID NO: 32202 - DNA, 21 bp, synthetic construct
  misc_feature 1..21: note = Probe
  source 1..21: mol_type = other DNA
ggataacagctatccattggt

SEQ ID NO: 32203 - DNA, 23 bp, synthetic construct
  misc_feature 1..23: note = Probe
  source 1..23: mol_type = other DNA
ggataacagctatccattggtct

SEQ ID NO: 32204 - DNA, 24 bp, synthetic construct
  misc_feature 1..24: note = Probe
  source 1..24: mol_type = other DNA
ggataacagctatccattggtctt

SEQ ID NO: 32205 - DNA, 26 bp, synthetic construct
  misc_feature 1..26: note = Probe
  source 1..26: mol_type = other DNA
ggataacagctatccattggtcttag

SEQ ID NO: 32206 - DNA, 30 bp, synthetic construct
  misc_feature 1..30: note = Probe
  source 1..30: mol_type = other DNA
ggataacagctatccattggtcttaggccc

SEQ ID NO: 32207 - DNA, 31 bp, synthetic construct
  misc_feature 1..31: note = Probe
  source 1..31: mol_type = other DNA
ggataacagctatccattggtcttaggcccc

SEQ ID NO: 32208 - DNA, 17 bp, synthetic construct
  misc_feature 1..17: note = Probe
  source 1..17: mol_type = other DNA
ggataacgcgtctgact

SEQ ID NO: 32209 - DNA, 15 bp, synthetic construct
  misc_feature 1..15: note = Probe
  source 1..15: mol_type = other DNA
ggataaggcactggc

SEQ ID NO: 32210 - DNA, 15 bp, synthetic construct
  misc_feature 1..15: note = Probe
  source 1..15: mol_type = other DNA
ggataaggcattggc

SEQ ID NO: 32211 - DNA, 15 bp, synthetic construct
  misc_feature 1..15: note = Probe
  source 1..15: mol_type = other DNA
ggataaggcgtctga

SEQ ID NO: 32212 - DNA, 17 bp, synthetic construct
  misc_feature 1..17: note = Probe
  source 1..17: mol_type = other DNA
ggataaggcgtctgact

SEQ ID NO: 32213 - DNA, 15 bp, synthetic construct
  misc_feature 1..15: note = Probe
  source 1..15: mol_type = other DNA
ggatagcgcattgga

SEQ ID NO: 32214 - DNA, 16 bp, synthetic construct
  misc_feature 1..16: note = Probe
  source 1..16: mol_type = other DNA
ggatagcgcattggac

SEQ ID NO: 32215 - DNA, 18 bp, synthetic construct
  misc_feature 1..18: note = Probe
  source 1..18: mol_type = other DNA
ggatagctcagtcggtag

SEQ ID NO: 32216 - DNA, 19 bp, synthetic construct
  misc_feature 1..19: note = Probe
  source 1..19: mol_type = other DNA
ggatagctcagtcggtaga

SEQ ID NO: 32217 - DNA, 20 bp, synthetic construct
  misc_feature 1..20: note = Probe
  source 1..20: mol_type = other DNA
ggatagctcagtcggtagag

SEQ ID NO: 32218 - DNA, 21 bp, synthetic construct
  misc_feature 1..21: note = Probe
  source 1..21: mol_type = other DNA
ggatagctcagtcggtagagc

SEQ ID NO: 32219 - DNA, 22 bp, synthetic construct
  misc_feature 1..22: note = Probe
  source 1..22: mol_type = other DNA
ggatagctcagtcggtagagca

SEQ ID NO: 32220 - DNA, 28 bp, synthetic construct
  misc_feature 1..28: note = Probe
  source 1..28: mol_type = other DNA
ggatagctcagtcggtagagcatcagac

SEQ ID NO: 32221 - DNA, 29 bp, synthetic construct
  misc_feature 1..29: note = Probe
  source 1..29: mol_type = other DNA
ggatagctcagtcggtagagcatcagact

SEQ ID NO: 32222 - DNA, 30 bp, synthetic construct; identical to SEQ ID NO: 6383
  misc_feature 1..30: note = Probe
  source 1..30: mol_type = other DNA

SEQ ID NO: 32223 - DNA, 33 bp, synthetic construct; identical to SEQ ID NO: 21472
  misc_feature 1..33: note = Probe
  source 1..33: mol_type = other DNA

SEQ ID NO: 32224 - DNA, 36 bp, synthetic construct
  misc_feature 1..36: note = Probe
  source 1..36: mol_type = other DNA
ggatcagaagattctaggttcgactcctggctggct

SEQ ID NO: 32225 - DNA, 40 bp, synthetic construct
  misc_feature 1..40: note = Probe
  source 1..40: mol_type = other DNA
ggatcagaagattctaggttcgactcctggctggctcgcg

SEQ ID NO: 32226 - DNA, 41 bp, synthetic construct
  misc_feature 1..41: note = Probe
  source 1..41: mol_type = other DNA
ggatcagaagattctaggttcgactcctggctggctcgcga

SEQ ID NO: 32227 - DNA, 40 bp, synthetic construct
  misc_feature 1..40: note = Probe
  source 1..40: mol_type = other DNA
ggatcagaagattctaggttcgactcctggctggctcgct

SEQ ID NO: 32228 - DNA, 19 bp, synthetic construct
  misc_feature 1..19: note = Probe
  source 1..19: mol_type = other DNA
ggatcagaagattgagggt

SEQ ID NO: 32229 - DNA, 20 bp, synthetic construct
  misc_feature 1..20: note = Probe
  source 1..20: mol_type = other DNA
ggatcagaagattgagggtt

SEQ ID NO: 32230 - DNA, 34 bp, synthetic construct; identical to SEQ ID NO: 1254
  misc_feature 1..34: note = Probe
  source 1..34: mol_type = other DNA

SEQ ID NO: 32231 - DNA, 18 bp, synthetic construct
  misc_feature 1..18: note = Probe
  source 1..18: mol_type = other DNA
ggattcggcgctctcacc

SEQ ID NO: 32232 - DNA, 27 bp, synthetic construct
  misc_feature 1..27: note = Probe
  source 1..27: mol_type = other DNA
ggattcggcgctctcaccgccgcggcc

SEQ ID NO: 32233 - DNA, 32 bp, synthetic construct; identical to SEQ ID NO: 21493
  misc_feature 1..32: note = Probe
  source 1..32: mol_type = other DNA

SEQ ID NO: 32234 - DNA, 28 bp, synthetic construct
  misc_feature 1..28: note = Probe
  source 1..28: mol_type = other DNA
ggcacatgcagcgcaagtaggtctacaa

SEQ ID NO: 32235 - DNA, 18 bp, synthetic construct
  misc_feature 1..18: note = Probe
  source 1..18: mol_type = other DNA
ggcagagcccggtaatcg

SEQ ID NO: 32236 - DNA, 34 bp, synthetic construct
  misc_feature 1..34: note = Probe
  source 1..34: mol_type = other DNA
ggcagagcccggtaatcgcataaaacttaaaact

SEQ ID NO: 32237 - DNA, 36 bp, synthetic construct
  misc_feature 1..36: note = Probe
  source 1..36: mol_type = other DNA
ggcagagcccggtaatcgcataaaacttaaaacttt

SEQ ID NO: 32238 - DNA, 36 bp, synthetic construct; identical to SEQ ID NO: 21505
  misc_feature 1..36: note = Probe
  source 1..36: mol_type = other DNA

SEQ ID NO: 32239 - DNA, 31 bp, synthetic construct
  misc_feature 1..31: note = Probe
  source 1..31: mol_type = other DNA
ggcattggtggttcagtggtagaattctcgc

SEQ ID NO: 32240 - DNA, 32 bp, synthetic construct
  misc_feature 1..32: note = Probe
  source 1..32: mol_type = other DNA
ggcattggtggttcagtggtagaattctcgcc

SEQ ID NO: 32241 - DNA, 33 bp, synthetic construct; identical to SEQ ID NO: 6396
  misc_feature 1..33: note = Probe
  source 1..33: mol_type = other DNA

SEQ ID NO: 32242 - DNA, 34 bp, synthetic construct; identical to SEQ ID NO: 21510
  misc_feature 1..34: note = Probe
  source 1..34: mol_type = other DNA

SEQ ID NO: 32243 - DNA, 36 bp, synthetic construct; identical to SEQ ID NO: 21511
  misc_feature 1..36: note = Probe
  source 1..36: mol_type = other DNA

SEQ ID NO: 32244 - DNA, 18 bp, synthetic construct
  misc_feature 1..18: note = Probe
  source 1..18: mol_type = other DNA
ggccaggattgaaacttt

SEQ ID NO: 32245 - DNA, 25 bp, synthetic construct
  misc_feature 1..25: note = Probe
  source 1..25: mol_type = other DNA
ggcccataccccgaaaatgttggtt

SEQ ID NO: 32246 - DNA, 36 bp, synthetic construct; identical to SEQ ID NO: 6417
  misc_feature 1..36: note = Probe
  source 1..36: mol_type = other DNA

SEQ ID NO: 32247 - DNA, 36 bp, synthetic construct
  misc_feature 1..36: note = Probe
  source 1..36: mol_type = other DNA
ggccccaaaaattttggtgcaactccaaataaaagt

SEQ ID NO: 32248 - DNA, 36 bp, synthetic construct; identical to SEQ ID NO: 1260
  misc_feature 1..36: note = Probe
  source 1..36: mol_type = other DNA

SEQ ID NO: 32249 - DNA, 32 bp, synthetic construct; identical to SEQ ID NO: 1262
  misc_feature 1..32: note = Probe
  source 1..32: mol_type = other DNA

SEQ ID NO: 32250 - DNA, 33 bp, synthetic construct; identical to SEQ ID NO: 1263
  misc_feature 1..33: note = Probe
  source 1..33: mol_type = other DNA

SEQ ID NO: 32251 - DNA, 50 bp, synthetic construct; identical to SEQ ID NO: 6427
  misc_feature 1..50: note = Probe
  source 1..50: mol_type = other DNA

SEQ ID NO: 32252 - DNA, 36 bp, synthetic construct
  misc_feature 1..36: note = Probe
  source 1..36: mol_type = other DNA
ggcccgccgtgatcgtatagtggttagtactctgcg

SEQ ID NO: 32253 - DNA, 26 bp, synthetic construct
  misc_feature 1..26: note = Probe
  source 1..26: mol_type = other DNA
ggccgcccggctagctcagtcggtag

SEQ ID NO: 32254 - DNA, 27 bp, synthetic construct
  misc_feature 1..27: note = Probe
  source 1..27: mol_type = other DNA
ggccgcccggctagctcagtcggtaga

SEQ ID NO: 32255 - DNA, 28 bp, synthetic construct
  misc_feature 1..28: note = Probe
  source 1..28: mol_type = other DNA
ggccgcccggctagctcagtcggtagag

SEQ ID NO: 32256 - DNA, 36 bp, synthetic construct
  misc_feature 1..36: note = Probe
  source 1..36: mol_type = other DNA
ggccgcccggctagctcagtcggtagagcatgagac

SEQ ID NO: 32257 - DNA, 19 bp, synthetic construct
  misc_feature 1..19: note = Probe
  source 1..19: mol_type = other DNA
ggccgcgtggcctaatgga

SEQ ID NO: 32258 - DNA, 30 bp, synthetic construct; identical to SEQ ID NO: 8656
  misc_feature 1..30: note = Probe
  source 1..30: mol_type = other DNA

SEQ ID NO: 32259 - DNA, 15 bp, synthetic construct
  misc_feature 1..15: note = Probe
  source 1..15: mol_type = other DNA
ggccggttagctcag

SEQ ID NO: 32260 - DNA, 20 bp, synthetic construct
  misc_feature 1..20: note = Probe
  source 1..20: mol_type = other DNA
ggccggttagctcagtcggc

SEQ ID NO: 32261 - DNA, 18 bp, synthetic construct
  misc_feature 1..18: note = Probe
  source 1..18: mol_type = other DNA
ggcctcgtggcgcaacgg

SEQ ID NO: 32262 - DNA, 15 bp, synthetic construct
  misc_feature 1..15: note = Probe
  source 1..15: mol_type = other DNA
ggcgatcacgtagat

SEQ ID NO: 32263 - DNA, 16 bp, synthetic construct
  misc_feature 1..16: note = Probe
  source 1..16: mol_type = other DNA
ggcgatcacgtagatt

SEQ ID NO: 32264 - DNA, 17 bp, synthetic construct
  misc_feature 1..17: note = Probe
  source 1..17: mol_type = other DNA
ggcgatcacgtagattt

SEQ ID NO: 32265 - DNA, 18 bp, synthetic construct
  misc_feature 1..18: note = Probe
  source 1..18: mol_type = other DNA
ggcgatcacgtagatttt

SEQ ID NO: 32266 - DNA, 19 bp, synthetic construct
  misc_feature 1..19: note = Probe
  source 1..19: mol_type = other DNA
ggcgatcacgtagattttg

SEQ ID NO: 32267 - DNA, 22 bp, synthetic construct
  misc_feature 1..22: note = Probe
  source 1..22: mol_type = other DNA
ggcgctctcaccgccgcggccc

SEQ ID NO: 32268 - DNA, 36 bp, synthetic construct
  misc_feature 1..36: note = Probe
  source 1..36: mol_type = other DNA
ggcggctcgttggtctaggggtatgattctcgcttt

SEQ ID NO: 32269 - DNA, 15 bp, synthetic construct
  misc_feature 1..15: note = Probe
  source 1..15: mol_type = other DNA
ggctagctcagtcgg

SEQ ID NO: 32270 - DNA, 19 bp, synthetic construct
  misc_feature 1..19: note = Probe
  source 1..19: mol_type = other DNA
ggctagctcagtcggtaga

SEQ ID NO: 32271 - DNA, 30 bp, synthetic construct; identical to SEQ ID NO: 1285
  misc_feature 1..30: note = Probe
  source 1..30: mol_type = other DNA

SEQ ID NO: 32272 - DNA, 31 bp, synthetic construct; identical to SEQ ID NO: 1286
  misc_feature 1..31: note = Probe
  source 1..31: mol_type = other DNA

SEQ ID NO: 32273 - DNA, 36 bp, synthetic construct
  misc_feature 1..36: note = Probe
  source 1..36: mol_type = other DNA
ggctagctcagtcggtagagcatgagactcttaatc

SEQ ID NO: 32274 - DNA, 32 bp, synthetic construct; identical to SEQ ID NO: 1294
  misc_feature 1..32: note = Probe
  source 1..32: mol_type = other DNA

SEQ ID NO: 32275 - DNA, 36 bp, synthetic construct
  misc_feature 1..36: note = Probe
  source 1..36: mol_type = other DNA
ggctagctcagtcggtagagcatgggactcttaatc

SEQ ID NO: 32276 - DNA, 27 bp, synthetic construct
  misc_feature 1..27: note = Probe
  source 1..27: mol_type = other DNA
ggctccagtctcttcgggggcgtgggt

SEQ ID NO: 32277 - DNA, 33 bp, synthetic construct; identical to SEQ ID NO: 6484
  misc_feature 1..33: note = Probe
  source 1..33: mol_type = other DNA

SEQ ID NO: 32278 - DNA, 18 bp, synthetic construct
  misc_feature 1..18: note = Probe
  source 1..18: mol_type = other DNA
ggctccgtggcgcaatgg

SEQ ID NO: 32279 - DNA, 32 bp, synthetic construct; identical to SEQ ID NO: 1304
  misc_feature 1..32: note = Probe
  source 1..32: mol_type = other DNA

SEQ ID NO: 32280 - DNA, 33 bp, synthetic construct; identical to SEQ ID NO: 6492
  misc_feature 1..33: note = Probe
  source 1..33: mol_type = other DNA

SEQ ID NO: 32281 - DNA, 36 bp, synthetic construct
  misc_feature 1..36: note = Probe
  source 1..36: mol_type = other DNA
ggctccgtggcgcaatggatagcgcattggacttct

SEQ ID NO: 32282 - DNA, 50 bp, synthetic construct
  misc_feature 1..50: note = Probe
  source 1..50: mol_type = other DNA
ggctccgtggcgcaatggatagcgcattggacttctagaggctgaaggca

SEQ ID NO: 32283 - DNA, 18 bp, synthetic construct
  misc_feature 1..18: note = Probe
  source 1..18: mol_type = other DNA
ggctcgaaggacttcgtc

SEQ ID NO: 32284 - DNA, 21 bp, synthetic construct
  misc_feature 1..21: note = Probe
  source 1..21: mol_type = other DNA
ggctcgaaggacttcgtctgt

SEQ ID NO: 32285 - DNA, 22 bp, synthetic construct
  misc_feature 1..22: note = Probe
  source 1..22: mol_type = other DNA
ggctcgaaggacttcgtctgta

SEQ ID NO: 32286 - DNA, 23 bp, synthetic construct
  misc_feature 1..23: note = Probe
  source 1..23: mol_type = other DNA
ggctcgaaggacttcgtctgtaa

SEQ ID NO: 32287 - DNA, 24 bp, synthetic construct
  misc_feature 1..24: note = Probe
  source 1..24: mol_type = other DNA
ggctcgaaggacttcgtctgtaat

SEQ ID NO: 32288 - DNA, 25 bp, synthetic construct
  misc_feature 1..25: note = Probe
  source 1..25: mol_type = other DNA
ggctcgaaggacttcgtctgtaatt

SEQ ID NO: 32289 - DNA, 27 bp, synthetic construct
  misc_feature 1..27: note = Probe
  source 1..27: mol_type = other DNA
ggctcgaaggacttcgtctgtaatttt

SEQ ID NO: 32290 - DNA, 15 bp, synthetic construct
  misc_feature 1..15: note = Probe
  source 1..15: mol_type = other DNA
ggctcgttggtctag

SEQ ID NO: 32291 - DNA, 18 bp, synthetic construct
  misc_feature 1..18: note = Probe
  source 1..18: mol_type = other DNA
ggctcgttggtctagggg

SEQ ID NO: 32292 - DNA, 20 bp, synthetic construct
  misc_feature 1..20: note = Probe
  source 1..20: mol_type = other DNA
ggctcgttggtctaggggta

SEQ ID NO: 32293 - DNA, 24 bp, synthetic construct
  misc_feature 1..24: note = Probe
  source 1..24: mol_type = other DNA
ggctcgttggtctaggggtatgat

SEQ ID NO: 32294 - DNA, 26 bp, synthetic construct
  misc_feature 1..26: note = Probe
  source 1..26: mol_type = other DNA
ggctcgttggtctaggggtatgattc

SEQ ID NO: 32295 - DNA, 27 bp, synthetic construct
  misc_feature 1..27: note = Probe
  source 1..27: mol_type = other DNA
ggctcgttggtctaggggtatgattct

SEQ ID NO: 32296 - DNA, 28 bp, synthetic construct
  misc_feature 1..28: note = Probe
  source 1..28: mol_type = other DNA
ggctcgttggtctaggggtatgattctc

SEQ ID NO: 32297 - DNA, 29 bp, synthetic construct
  misc_feature 1..29: note = Probe
  source 1..29: mol_type = other DNA
ggctcgttggtctaggggtatgattctcg

SEQ ID NO: 32298 - DNA, 30 bp, synthetic construct; identical to SEQ ID NO: 6496
  misc_feature 1..30: note = Probe
  source 1..30: mol_type = other DNA

SEQ ID NO: 32299 - DNA, 31 bp, synthetic construct; identical to SEQ ID NO: 6497
  misc_feature 1..31: note = Probe
  source 1..31: mol_type = other DNA

SEQ ID NO: 32300 - DNA, 32 bp, synthetic construct; identical to SEQ ID NO: 6498
  misc_feature 1..32: note = Probe
  source 1..32: mol_type = other DNA

SEQ ID NO: 32301 - DNA, 33 bp, synthetic construct; identical to SEQ ID NO: 6499
  misc_feature 1..33: note = Probe
  source 1..33: mol_type = other DNA

SEQ ID NO: 32302 - DNA, 36 bp, synthetic construct
  misc_feature 1..36: note = Probe
  source 1..36: mol_type = other DNA
ggctcgttggtctaggggtatgattctcgcttaggg

SEQ ID NO: 32303 - DNA, 50 bp, synthetic construct
  misc_feature 1..50: note = Probe
  source 1..50: mol_type = other DNA
ggctcgttggtctaggggtatgattctcgcttagggtgcgagaggtcccg

SEQ ID NO: 32304 - DNA, 33 bp, synthetic construct; identical to SEQ ID NO: 1306
  misc_feature 1..33: note = Probe
  source 1..33: mol_type = other DNA

SEQ ID NO: 32305 - DNA, 36 bp, synthetic construct
  misc_feature 1..36: note = Probe
  source 1..36: mol_type = other DNA
ggctcgttggtctaggggtatgattctcgcttcggg

SEQ ID NO: 32306 - DNA, 50 bp, synthetic construct
  misc_feature 1..50: note = Probe
  source 1..50: mol_type = other DNA
ggctcgttggtctaggggtatgattctcgcttcgggtgcgagaggtcccg

SEQ ID NO: 32307 - DNA, 33 bp, synthetic construct; identical to SEQ ID NO: 1307
  misc_feature 1..33: note = Probe
  source 1..33: mol_type = other DNA

SEQ ID NO: 32308 - DNA, 34 bp, synthetic construct
  misc_feature 1..34: note = Probe
  source 1..34: mol_type = other DNA
ggctcgttggtctaggggtatgattctcgctttg

SEQ ID NO: 32309 - DNA, 36 bp, synthetic construct
  misc_feature 1..36: note = Probe
  source 1..36: mol_type = other DNA
ggctcgttggtctaggggtatgattctcgctttggg

SEQ ID NO: 32310 - DNA, 50 bp, synthetic construct
  misc_feature 1..50: note = Probe
  source 1..50: mol_type = other DNA
ggctcgttggtctaggggtatgattctcgctttgggtgcgagaggtcccg

SEQ ID NO: 32311 - DNA, 30 bp, synthetic construct; identical to SEQ ID NO: 8665
  misc_feature 1..30: note = Probe
  source 1..30: mol_type = other DNA

SEQ ID NO: 32312 - DNA, 32 bp, synthetic construct; identical to SEQ ID NO: 1308
  misc_feature 1..32: note = Probe
  source 1..32: mol_type = other DNA

SEQ ID NO: 32313 - DNA, 34 bp, synthetic construct; identical to SEQ ID NO: 21662
  misc_feature 1..34: note = Probe
  source 1..34: mol_type = other DNA

SEQ ID NO: 32314 - DNA, 36 bp, synthetic construct
  misc_feature 1..36: note = Probe
  source 1..36: mol_type = other DNA
ggctcgttggtctaggggtatgattctcggtttggg

SEQ ID NO: 32315 - DNA, 28 bp, synthetic construct
  misc_feature 1..28: note = Probe
  source 1..28: mol_type = other DNA
ggctcgttggtctagtggtatgattctc

SEQ ID NO: 32316 - DNA, 31 bp, synthetic construct
  misc_feature 1..31: note = Probe
  source 1..31: mol_type = other DNA
ggctcgttggtctagtggtatgattctcgct

SEQ ID NO: 32317 - DNA, 19 bp, synthetic construct
  misc_feature 1..19: note = Probe
  source 1..19: mol_type = other DNA
ggctctgtggcgcaatgga

SEQ ID NO: 32318 - DNA, 27 bp, synthetic construct
  misc_feature 1..27: note = Probe
  source 1..27: mol_type = other DNA
ggctctgtggcgcaatggatagcgcat

SEQ ID NO: 32319 - DNA, 33 bp, synthetic construct
  misc_feature 1..33: note = Probe
  source 1..33: mol_type = other DNA
ggctctgtggcgcaatggatagcgcattggact

SEQ ID NO: 32320 - DNA, 20 bp, synthetic construct
  misc_feature 1..20: note = Probe
  source 1..20: mol_type = other DNA
ggctgagtgaagcattggac

SEQ ID NO: 32321 - DNA, 21 bp, synthetic construct
  misc_feature 1..21: note = Probe
  source 1..21: mol_type = other DNA
ggctgagtgaagcattggact

SEQ ID NO: 32322 - DNA, 23 bp, synthetic construct
  misc_feature 1..23: note = Probe
  source 1..23: mol_type = other DNA
ggctgagtgaagcattggactgt

SEQ ID NO: 32323 - DNA, 24 bp, synthetic construct
  misc_feature 1..24: note = Probe
  source 1..24: mol_type = other DNA
ggctgagtgaagcattggactgta

SEQ ID NO: 32324 - DNA, 25 bp, synthetic construct
  misc_feature 1..25: note = Probe
  source 1..25: mol_type = other DNA
ggctgagtgaagcattggactgtaa

SEQ ID NO: 32325 - DNA, 26 bp, synthetic construct
  misc_feature 1..26: note = Probe
  source 1..26: mol_type = other DNA
ggctgagtgaagcattggactgtaaa

SEQ ID NO: 32326 - DNA, 28 bp, synthetic construct
  misc_feature 1..28: note = Probe
  source 1..28: mol_type = other DNA
ggctgagtgaagcattggactgtaaatc

SEQ ID NO: 32327 - DNA, 36 bp, synthetic construct
  misc_feature 1..36: note = Probe
  source 1..36: mol_type = other DNA
ggctgagtgaagcattggactgtaaatctaaagaca

SEQ ID NO: 32328 - DNA, 36 bp, synthetic construct
  misc_feature 1..36: note = Probe
  source 1..36: mol_type = other DNA
ggctgccgaaatagctcagttgggagagcgttagac

SEQ ID NO: 32329 - DNA, 18 bp, synthetic construct
  misc_feature 1..18: note = Probe
  source 1..18: mol_type = other DNA
ggctgggggatgtagctc

SEQ ID NO: 32330 - DNA, 36 bp, synthetic construct
  misc_feature 1..36: note = Probe
  source 1..36: mol_type = other DNA
ggctgggggatgtagctcagtggtagagcgcgcgct

SEQ ID NO: 32331 - DNA, 16 bp, synthetic construct
  misc_feature 1..16: note = Probe
  source 1..16: mol_type = other DNA
ggctgtaggaatactt

SEQ ID NO: 32332 - DNA, 17 bp, synthetic construct
  misc_feature 1..17: note = Probe
  source 1..17: mol_type = other DNA
ggctgtaggaatacttt

SEQ ID NO: 32333 - DNA, 18 bp, synthetic construct
  misc_feature 1..18: note = Probe
  source 1..18: mol_type = other DNA
ggctgtaggaatactttt

SEQ ID NO: 32334 - DNA, 19 bp, synthetic construct
  misc_feature 1..19: note = Probe
  source 1..19: mol_type = other DNA
ggctgtaggaatacttttc

SEQ ID NO: 32335 - DNA, 17 bp, synthetic construct
  misc_feature 1..17: note = Probe
  source 1..17: mol_type = other DNA
ggcttagcctgtggctc

SEQ ID NO: 32336 - DNA, 34 bp, synthetic construct
  misc_feature 1..34: note = Probe
  source 1..34: mol_type = other DNA
ggcttctgtagtgtagtggttatcacgttcgcct

SEQ ID NO: 32337 - DNA, 36 bp, synthetic construct; identical to SEQ ID NO: 21679
  misc_feature 1..36: note = Probe
  source 1..36: mol_type = other DNA

SEQ ID NO: 32338 - DNA, 36 bp, synthetic construct
  misc_feature 1..36: note = Probe
  source 1..36: mol_type = other DNA
gggacgaggtggccgagtggttaaggcgatggactg

SEQ ID NO: 32339 - DNA, 31 bp, synthetic construct; identical to SEQ ID NO: 1316
  misc_feature 1..31: note = Probe
  source 1..31: mol_type = other DNA

SEQ ID NO: 32340 - DNA, 35 bp, synthetic construct; identical to SEQ ID NO: 6520
  misc_feature 1..35: note = Probe
  source 1..35: mol_type = other DNA

SEQ ID NO: 32341 - DNA, 25 bp, synthetic construct
  misc_feature 1..25: note = Probe
  source 1..25: mol_type = other DNA
gggagaggcactggtggttcagtgg

SEQ ID NO: 32342 - DNA, 17 bp, synthetic construct
  misc_feature 1..17: note = Probe
  source 1..17: mol_type = other DNA
gggagcccggatagctc

SEQ ID NO: 32343 - DNA, 23 bp, synthetic construct
  misc_feature 1..23: note = Probe
  source 1..23: mol_type = other DNA
gggagcccggatagctcagtcgg

SEQ ID NO: 32344 - DNA, 24 bp, synthetic construct
  misc_feature 1..24: note = Probe
  source 1..24: mol_type = other DNA
gggagcccggatagctcagtcggt

SEQ ID NO: 32345 - DNA, 25 bp, synthetic construct
  misc_feature 1..25: note = Probe
  source 1..25: mol_type = other DNA
gggagcccggatagctcagtcggta

SEQ ID NO: 32346 - DNA, 26 bp, synthetic construct
  misc_feature 1..26: note = Probe
  source 1..26: mol_type = other DNA
gggagcccggatagctcagtcggtag

SEQ ID NO: 32347 - DNA, 27 bp, synthetic construct
  misc_feature 1..27: note = Probe
  source 1..27: mol_type = other DNA
gggagcccggatagctcagtcggtaga

SEQ ID NO: 32348 - DNA, 28 bp, synthetic construct
  misc_feature 1..28: note = Probe
  source 1..28: mol_type = other DNA
gggagcccggatagctcagtcggtagag

SEQ ID NO: 32349 - DNA, 29 bp, synthetic construct
  misc_feature 1..29: note = Probe
  source 1..29: mol_type = other DNA
gggagcccggatagctcagtcggtagagc

SEQ ID NO: 32350 - DNA, 30 bp, synthetic construct; identical to SEQ ID NO: 21718
  misc_feature 1..30: note = Probe
  source 1..30: mol_type = other DNA

SEQ ID NO: 32351 - DNA, 31 bp, synthetic construct
  misc_feature 1..31: note = Probe
  source 1..31: mol_type = other DNA
gggagcccggatagctcagtcggtagagcat

SEQ ID NO: 32352 - DNA, 32 bp, synthetic construct
  misc_feature 1..32: note = Probe
  source 1..32: mol_type = other DNA
gggagcccggatagctcagtcggtagagcatc

SEQ ID NO: 32353 - DNA, 33 bp, synthetic construct; identical to SEQ ID NO: 21719
  misc_feature 1..33: note = Probe
  source 1..33: mol_type = other DNA

SEQ ID NO: 32354 - DNA, 34 bp, synthetic construct; identical to SEQ ID NO: 21720
  misc_feature 1..34: note = Probe
  source 1..34: mol_type = other DNA

SEQ ID NO: 32355 - DNA, 35 bp, synthetic construct; identical to SEQ ID NO: 21721
  misc_feature 1..35: note = Probe
  source 1..35: mol_type = other DNA

SEQ ID NO: 32356 - DNA, 36 bp, synthetic construct; identical to SEQ ID NO: 21722
  misc_feature 1..36: note = Probe
  source 1..36: mol_type = other DNA

SEQ ID NO: 32357 - DNA, 37 bp, synthetic construct; identical to SEQ ID NO: 21723
  misc_feature 1..37: note = Probe
  source 1..37: mol_type = other DNA

SEQ ID NO: 32358 - DNA, 38 bp, synthetic construct; identical to SEQ ID NO: 21724
  misc_feature 1..38: note = Probe
  source 1..38: mol_type = other DNA

SEQ ID NO: 32359 - DNA, 39 bp, synthetic construct; identical to SEQ ID NO: 21725
  misc_feature 1..39: note = Probe
  source 1..39: mol_type = other DNA

SEQ ID NO: 32360 - DNA, 40 bp, synthetic construct; identical to SEQ ID NO: 21726
  misc_feature 1..40: note = Probe
  source 1..40: mol_type = other DNA

SEQ ID NO: 32361 - DNA, 41 bp, synthetic construct; identical to SEQ ID NO: 21727
  misc_feature 1..41: note = Probe
  source 1..41: mol_type = other DNA

SEQ ID NO: 32362 - DNA, 42 bp, synthetic construct; identical to SEQ ID NO: 21728
  misc_feature 1..42: note = Probe
  source 1..42: mol_type = other DNA

SEQ ID NO: 32363 - DNA, 43 bp, synthetic construct
  misc_feature 1..43: note = Probe
  source 1..43: mol_type = other DNA
gggagcccggatagctcagtcggtagagcatcagacttttaat

SEQ ID NO: 32364 - DNA, 44 bp, synthetic construct
  misc_feature 1..44: note = Probe
  source 1..44: mol_type = other DNA
gggagcccggatagctcagtcggtagagcatcagacttttaatc

SEQ ID NO: 32365 - DNA, 25 bp, synthetic construct
  misc_feature 1..25: note = Probe
  source 1..25: mol_type = other DNA
gggagcgcccggatagctcagtcgg

SEQ ID NO: 32366 - DNA, 26 bp, synthetic construct
  misc_feature 1..26: note = Probe
  source 1..26: mol_type = other DNA
gggagcgcccggatagctcagtcggt

SEQ ID NO: 32367 - DNA, 27 bp, synthetic construct
  misc_feature 1..27: note = Probe
  source 1..27: mol_type = other DNA
gggagcgcccggatagctcagtcggta

SEQ ID NO: 32368 - DNA, 28 bp, synthetic construct
  misc_feature 1..28: note = Probe
  source 1..28: mol_type = other DNA
gggagcgcccggatagctcagtcggtag

SEQ ID NO: 32369 - DNA, 29 bp, synthetic construct
  misc_feature 1..29: note = Probe
  source 1..29: mol_type = other DNA
gggagcgcccggatagctcagtcggtaga

SEQ ID NO: 32370 - DNA, 30 bp, synthetic construct; identical to SEQ ID NO: 21733
  misc_feature 1..30: note = Probe
  source 1..30: mol_type = other DNA

SEQ ID NO: 32371 - DNA, 31 bp, synthetic construct; identical to SEQ ID NO: 21734
  misc_feature 1..31: note = Probe
  source 1..31: mol_type = other DNA

SEQ ID NO: 32372 - DNA, 32 bp, synthetic construct; identical to SEQ ID NO: 21735
  misc_feature 1..32: note = Probe
  source 1..32: mol_type = other DNA

SEQ ID NO: 32373 - DNA, 33 bp, synthetic construct; identical to SEQ ID NO: 21736
  misc_feature 1..33: note = Probe
  source 1..33: mol_type = other DNA

SEQ ID NO: 32374 - DNA, 34 bp, synthetic construct
  misc_feature 1..34: note = Probe
  source 1..34: mol_type = other DNA
gggagcgcccggatagctcagtcggtagagcatc

SEQ ID NO: 32375 - DNA, 35 bp, synthetic construct; identical to SEQ ID NO: 21737
  misc_feature 1..35: note = Probe
  source 1..35: mol_type = other DNA

SEQ ID NO: 32376 - DNA, 36 bp, synthetic construct; identical to SEQ ID NO: 21738
  misc_feature 1..36: note = Probe
  source 1..36: mol_type = other DNA

SEQ ID NO: 32377 - DNA, 37 bp, synthetic construct; identical to SEQ ID NO: 21739
  misc_feature 1..37: note = Probe
  source 1..37: mol_type = other DNA

SEQ ID NO: 32378 - DNA, 38 bp, synthetic construct; identical to SEQ ID NO: 21740
  misc_feature 1..38: note = Probe
  source 1..38: mol_type = other DNA

SEQ ID NO: 32379 - DNA, 39 bp, synthetic construct; identical to SEQ ID NO: 6522
  misc_feature 1..39: note = Probe
  source 1..39: mol_type = other DNA

SEQ ID NO: 32380 - DNA, 40 bp, synthetic construct; identical to SEQ ID NO: 21742
  misc_feature 1..40: note = Probe
  source 1..40: mol_type = other DNA

SEQ ID NO: 32381 - DNA, 41 bp, synthetic construct; identical to SEQ ID NO: 21743
  misc_feature 1..41: note = Probe
  source 1..41: mol_type = other DNA

SEQ ID NO: 32382 - DNA, 42 bp, synthetic construct; identical to SEQ ID NO: 21744
  misc_feature 1..42: note = Probe
  source 1..42: mol_type = other DNA

SEQ ID NO: 32383 - DNA, 43 bp, synthetic construct; identical to SEQ ID NO: 21745
  misc_feature 1..43: note = Probe
  source 1..43: mol_type = other DNA

SEQ ID NO: 32384 - DNA, 44 bp, synthetic construct; identical to SEQ ID NO: 21746
  misc_feature 1..44: note = Probe
  source 1..44: mol_type = other DNA

SEQ ID NO: 32385 - DNA, 45 bp, synthetic construct; identical to SEQ ID NO: 21747
  misc_feature 1..45: note = Probe
  source 1..45: mol_type = other DNA

SEQ ID NO: 32386 - DNA, 46 bp, synthetic construct
  misc_feature 1..46: note = Probe
  source 1..46: mol_type = other DNA
gggagcgcccggatagctcagtcggtagagcatcagacttttaatc

SEQ ID NO: 32387 - DNA, 32 bp, synthetic construct
  misc_feature 1..32: note = Probe
  source 1..32: mol_type = other DNA
gggaggtagcgtggccgagtggtctaaggcgc

SEQ ID NO: 32388 - DNA, 18 bp, synthetic construct
  misc_feature 1..18: note = Probe
  source 1..18: mol_type = other DNA
gggccaggattgaaactt

SEQ ID NO: 32389 - DNA, 19 bp, synthetic construct
  misc_feature 1..19: note = Probe
  source 1..19: mol_type = other DNA
gggccaggattgaaacttt

SEQ ID NO: 32390 - DNA, 19 bp, synthetic construct
  misc_feature 1..19: note = Probe
  source 1..19: mol_type = other DNA
gggccagtggcgcaatgga

SEQ ID NO: 32391 - DNA, 20 bp, synthetic construct
  misc_feature 1..20: note = Probe
  source 1..20: mol_type = other DNA
gggccagtggcgcaatggat

SEQ ID NO: 32392 - DNA, 33 bp, synthetic construct
  misc_feature 1..33: note = Probe
  source 1..33: mol_type = other DNA
gggccagtggcgcaatggataacgcgtctgact

SEQ ID NO: 32393 - DNA, 26 bp, synthetic construct
  misc_feature 1..26: note = Probe
  source 1..26: mol_type = other DNA
gggcccataccccgaaaatgttggtt

SEQ ID NO: 32394 - DNA, 27 bp, synthetic construct
  misc_feature 1..27: note = Probe
  source 1..27: mol_type = other DNA
gggcccataccccgaaaatgttggtta

SEQ ID NO: 32395 - DNA, 28 bp, synthetic construct
  misc_feature 1..28: note = Probe
  source 1..28: mol_type = other DNA
gggcccataccccgaaaatgttggttat

SEQ ID NO: 32396 - DNA, 31 bp, synthetic construct; identical to SEQ ID NO: 6549
  misc_feature 1..31: note = Probe
  source 1..31: mol_type = other DNA

SEQ ID NO: 32397 - DNA, 32 bp, synthetic construct; identical to SEQ ID NO: 6550
  misc_feature 1..32: note = Probe
  source 1..32: mol_type = other DNA

SEQ ID NO: 32398 - DNA, 15 bp, synthetic construct
  misc_feature 1..15: note = Probe
  source 1..15: mol_type = other DNA
gggcccggatagctc

SEQ ID NO: 32399 - DNA, 36 bp, synthetic construct
  misc_feature 1..36: note = Probe
  source 1..36: mol_type = other DNA
gggcgcccggctagctcagtcggtagagcatgagac

SEQ ID NO: 32400 - DNA, 36 bp, synthetic construct
  misc_feature 1..36: note = Probe
  source 1..36: mol_type = other DNA
ggggacagcagagtggcgcagcggaagcgtgctggg

SEQ ID NO: 32401 - DNA, 36 bp, synthetic construct; identical to SEQ ID NO: 21839
  misc_feature 1..36: note = Probe
  source 1..36: mol_type = other DNA

SEQ ID NO: 32402 - DNA, 26 bp, synthetic construct
  misc_feature 1..26: note = Probe
  source 1..26: mol_type = other DNA
ggggagaggcactggtggttcagtgg

SEQ ID NO: 32403 - DNA, 39 bp, synthetic construct
  misc_feature 1..39: note = Probe
  source 1..39: mol_type = other DNA
ggggagaggcactggtggttcagtggtagaattctcgcc

SEQ ID NO: 32404 - DNA, 15 bp, synthetic construct
  misc_feature 1..15: note = Probe
  source 1..15: mol_type = other DNA
ggggatgtagctcag

SEQ ID NO: 32405 - DNA, 16 bp, synthetic construct
  misc_feature 1..16: note = Probe
  source 1..16: mol_type = other DNA
ggggatgtagctcagt

SEQ ID NO: 32406 - DNA, 20 bp, synthetic construct
  misc_feature 1..20: note = Probe
  source 1..20: mol_type = other DNA
ggggatgtagctcagtggta

SEQ ID NO: 32407 - DNA, 21 bp, synthetic construct
  misc_feature 1..21: note = Probe
  source 1..21: mol_type = other DNA
ggggatgtagctcagtggtag

SEQ ID NO: 32408 - DNA, 24 bp, synthetic construct
  misc_feature 1..24: note = Probe
  source 1..24: mol_type = other DNA
ggggatgtagctcagtggtagagc

SEQ ID NO: 32409 - DNA, 30 bp, synthetic construct; identical to SEQ ID NO: 1335
  misc_feature 1..30: note = Probe
  source 1..30: mol_type = other DNA

SEQ ID NO: 32410 - DNA, 50 bp, synthetic construct
  misc_feature 1..50: note = Probe
  source 1..50: mol_type = other DNA
ggggatgtagctcagtggtagagcgcatgctttgcacgtatgaggccccg

SEQ ID NO: 32411 - DNA, 36 bp, synthetic construct; identical to SEQ ID NO: 21867
  misc_feature 1..36: note = Probe
  source 1..36: mol_type = other DNA

SEQ ID NO: 32412 - DNA, 15 bp, synthetic construct
  misc_feature 1..15: note = Probe
  source 1..15: mol_type = other DNA
gggggattagctcaa

SEQ ID NO: 32413 - DNA, 16 bp, synthetic construct
  misc_feature 1..16: note = Probe
  source 1..16: mol_type = other DNA
gggggattagctcaaa

SEQ ID NO: 32414 - DNA, 23 bp, synthetic construct
  misc_feature 1..23: note = Probe
  source 1..23: mol_type = other DNA
gggggattagctcaaatggtaga

SEQ ID NO: 32415 - DNA, 32 bp, synthetic construct; identical to SEQ ID NO: 6576
  misc_feature 1..32: note = Probe
  source 1..32: mol_type = other DNA

SEQ ID NO: 32416 - DNA, 33 bp, synthetic construct; identical to SEQ ID NO: 6577
  misc_feature 1..33: note = Probe
  source 1..33: mol_type = other DNA

SEQ ID NO: 32417 - DNA, 36 bp, synthetic construct
  misc_feature 1..36: note = Probe
  source 1..36: mol_type = other DNA
gggggattagctcaaatggtagagcgctcgcttagc

SEQ ID NO: 32418 - DNA, 15 bp, synthetic construct
  misc_feature 1..15: note = Probe
  source 1..15: mol_type = other DNA
gggggtatagctcag

SEQ ID NO: 32419 - DNA, 30 bp, synthetic construct
  misc_feature 1..30: note = Probe
  source 1..30: mol_type = other DNA
gggggtatagctcagcggtagagcgcgtgc

SEQ ID NO: 32420 - DNA, 17 bp, synthetic construct
  misc_feature 1..17: note = Probe
  source 1..17: mol_type = other DNA
gggggtatagctcaggg

SEQ ID NO: 32421 - DNA, 18 bp, synthetic construct
  misc_feature 1..18: note = Probe
  source 1..18: mol_type = other DNA
gggggtatagctcagtgg

SEQ ID NO: 32422 - DNA, 24 bp, synthetic construct
  misc_feature 1..24: note = Probe
  source 1..24: mol_type = other DNA
gggggtatagctcagtggtagagc

SEQ ID NO: 32423 - DNA, 32 bp, synthetic construct; identical to SEQ ID NO: 6600
  misc_feature 1..32: note = Probe
  source 1..32: mol_type = other DNA

SEQ ID NO: 32424 - DNA, 33 bp, synthetic construct; identical to SEQ ID NO: 6601
  misc_feature 1..33: note = Probe
  source 1..33: mol_type = other DNA

SEQ ID NO: 32425 - DNA, 34 bp, synthetic construct; identical to SEQ ID NO: 6602
  misc_feature 1..34: note = Probe
  source 1..34: mol_type = other DNA

SEQ ID NO: 32426 - DNA, 35 bp, synthetic construct; identical to SEQ ID NO: 6603
  misc_feature 1..35: note = Probe
  source 1..35: mol_type = other DNA

SEQ ID NO: 32427 - DNA, 36 bp, synthetic construct; identical to SEQ ID NO: 13864
  misc_feature 1..36: note = Probe
  source 1..36: mol_type = other DNA

SEQ ID NO: 32428 - DNA, 15 bp, synthetic construct
  misc_feature 1..15: note = Probe
  source 1..15: mol_type = other DNA
gggggtgtagctcag

SEQ ID NO: 32429 - DNA, 16 bp, synthetic construct
  misc_feature 1..16: note = Probe
  source 1..16: mol_type = other DNA
gggggtgtagctcagt

SEQ ID NO: 32430 - DNA, 18 bp, synthetic construct
  misc_feature 1..18: note = Probe
  source 1..18: mol_type = other DNA
gggggtgtagctcagtgg

SEQ ID NO: 32431 - DNA, 19 bp, synthetic construct
  misc_feature 1..19: note = Probe
  source 1..19: mol_type = other DNA
gggggtgtagctcagtggt

SEQ ID NO: 32432 - DNA, 20 bp, synthetic construct
  misc_feature 1..20: note = Probe
  source 1..20: mol_type = other DNA
gggggtgtagctcagtggta

SEQ ID NO: 32433 - DNA, 21 bp, synthetic construct
  misc_feature 1..21: note = Probe
  source 1..21: mol_type = other DNA
gggggtgtagctcagtggtag

SEQ ID NO: 32434 - DNA, 22 bp, synthetic construct
  misc_feature 1..22: note = Probe
  source 1..22: mol_type = other DNA
gggggtgtagctcagtggtaga

SEQ ID NO: 32435 - DNA, 23 bp, synthetic construct
  misc_feature 1..23: note = Probe
  source 1..23: mol_type = other DNA
gggggtgtagctcagtggtagag

SEQ ID NO: 32436 - DNA, 24 bp, synthetic construct
  misc_feature 1..24: note = Probe
  source 1..24: mol_type = other DNA
gggggtgtagctcagtggtagagc

SEQ ID NO: 32437 - DNA, 36 bp, synthetic construct
  misc_feature 1..36: note = Probe
  source 1..36: mol_type = other DNA
gggggtgtagctcagtggtagagcacatgctttgca

SEQ ID NO: 32438 - DNA, 32 bp, synthetic construct; identical to SEQ ID NO: 1365
  misc_feature 1..32: note = Probe
  source 1..32: mol_type = other DNA

SEQ ID NO: 32439 - DNA, 36 bp, synthetic construct
  misc_feature 1..36: note = Probe
  source 1..36: mol_type = other DNA
gggggtgtagctcagtggtagagcatttgactgcag

SEQ ID NO: 32440 - DNA, 27 bp, synthetic construct
  misc_feature 1..27: note = Probe
  source 1..27: mol_type = other DNA
gggggtgtagctcagtggtagagcgcg

SEQ ID NO: 32441 - DNA, 28 bp, synthetic construct
  misc_feature 1..28: note = Probe
  source 1..28: mol_type = other DNA
gggggtgtagctcagtggtagagcgcgt

SEQ ID NO: 32442 - DNA, 29 bp, synthetic construct
  misc_feature 1..29: note = Probe
  source 1..29: mol_type = other DNA
gggggtgtagctcagtggtagagcgcgtg

SEQ ID NO: 32443 - DNA, 31 bp, synthetic construct; identical to SEQ ID NO: 1368
  misc_feature 1..31: note = Probe
  source 1..31: mol_type = other DNA

SEQ ID NO: 32444 - DNA, 33 bp, synthetic construct; identical to SEQ ID NO: 6616
  misc_feature 1..33: note = Probe
  source 1..33: mol_type = other DNA

SEQ ID NO: 32445 - DNA, 33 bp, synthetic construct; identical to SEQ ID NO: 6617
  misc_feature 1..33: note = Probe
  source 1..33: mol_type = other DNA

SEQ ID NO: 32446 - DNA, 16 bp, synthetic construct
  misc_feature 1..16: note = Probe
  source 1..16: mol_type = other DNA
ggggtatagctcaggg

SEQ ID NO: 32447 - DNA, 16 bp, synthetic construct
  misc_feature 1..16: note = Probe
  source 1..16: mol_type = other DNA
ggggtatgattctcgc

SEQ ID NO: 32448 - DNA, 17 bp, synthetic construct
  misc_feature 1..17: note = Probe
  source 1..17: mol_type = other DNA
ggggtatgattctcgct

SEQ ID NO: 32449 - DNA, 19 bp, synthetic construct
  misc_feature 1..19: note = Probe
  source 1..19: mol_type = other DNA
ggggtatgattctcgctta

SEQ ID NO: 32450 - DNA, 19 bp, synthetic construct
  misc_feature 1..19: note = Probe
  source 1..19: mol_type = other DNA
ggggtatgattctcgcttc

SEQ ID NO: 32451 - DNA, 19 bp, synthetic construct
  misc_feature 1..19: note = Probe
  source 1..19: mol_type = other DNA
ggggtatgattctcgcttt

SEQ ID NO: 32452 - DNA, 24 bp, synthetic construct
  misc_feature 1..24: note = Probe
  source 1..24: mol_type = other DNA
ggggttaggcctctttttaccagc

SEQ ID NO: 32453 - DNA, 25 bp, synthetic construct
  misc_feature 1..25: note = Probe
  source 1..25: mol_type = other DNA
ggggttcgattccccgacggggaga

SEQ ID NO: 32454 - DNA, 26 bp, synthetic construct
  misc_feature 1..26: note = Probe
  source 1..26: mol_type = other DNA
ggggttcgattccccgacggggagac

SEQ ID NO: 32455 - DNA, 25 bp, synthetic construct
  misc_feature 1..25: note = Probe
  source 1..25: mol_type = other DNA
ggggttcgattccccgacggggagg

SEQ ID NO: 32456 - DNA, 26 bp, synthetic construct
  misc_feature 1..26: note = Probe
  source 1..26: mol_type = other DNA
ggggttcgattccccgacggggaggc

SEQ ID NO: 32457 - DNA, 27 bp, synthetic construct
  misc_feature 1..27: note = Probe
  source 1..27: mol_type = other DNA
ggggttcgattccccgacggggaggca

SEQ ID NO: 32458 - DNA, 20 bp, synthetic construct
  misc_feature 1..20: note = Probe
  source 1..20: mol_type = other DNA
gggtagctcagtcggtagag

SEQ ID NO: 32459 - DNA, 28 bp, synthetic construct
  misc_feature 1..28: note = Probe
  source 1..28: mol_type = other DNA
gggtatagctcagcggtagagcgcgtgc

SEQ ID NO: 32460 - DNA, 15 bp, synthetic construct
  misc_feature 1..15: note = Probe
  source 1..15: mol_type = other DNA
gggtatagctcaggg

SEQ ID NO: 32461 - DNA, 16 bp, synthetic construct
  misc_feature 1..16: note = Probe
  source 1..16: mol_type = other DNA
gggtatagctcagggg

SEQ ID NO: 32462 - DNA, 32 bp, synthetic construct; identical to SEQ ID NO: 6645
  misc_feature 1..32: note = Probe
  source 1..32: mol_type = other DNA

SEQ ID NO: 32463 - DNA, 15 bp, synthetic construct
  misc_feature 1..15: note = Probe
  source 1..15: mol_type = other DNA
gggtatgattctcgc

SEQ ID NO: 32464 - DNA, 16 bp, synthetic construct
  misc_feature 1..16: note = Probe
  source 1..16: mol_type = other DNA
gggtatgattctcgct

SEQ ID NO: 32465 - DNA, 17 bp, synthetic construct
  misc_feature 1..17: note = Probe
  source 1..17: mol_type = other DNA
gggtatgattctcgctt

SEQ ID NO: 32466 - DNA, 18 bp, synthetic construct
  misc_feature 1..18: note = Probe
  source 1..18: mol_type = other DNA
gggtatgattctcgctta

SEQ ID NO: 32467 - DNA, 18 bp, synthetic construct
  misc_feature 1..18: note = Probe
  source 1..18: mol_type = other DNA
gggtatgattctcgcttc

SEQ ID NO: 32468 - DNA, 18 bp, synthetic construct
  misc_feature 1..18: note = Probe
  source 1..18: mol_type = other DNA
gggtatgattctcgcttt

SEQ ID NO: 32469 - DNA, 19 bp, synthetic construct
  misc_feature 1..19: note = Probe
  source 1..19: mol_type = other DNA
gggtatgattctcgctttg

SEQ ID NO: 32470 - DNA, 15 bp, synthetic construct
  misc_feature 1..15: note = Probe
  source 1..15: mol_type = other DNA
gggtatgattctcgg

SEQ ID NO: 32471 - DNA, 15 bp, synthetic construct
  misc_feature 1..15: note = Probe
  source 1..15: mol_type = other DNA
gggtccccggtagct

SEQ ID NO: 32472 - DNA, 16 bp, synthetic construct
  misc_feature 1..16: note = Probe
  source 1..16: mol_type = other DNA
gggtccccggtagctc

SEQ ID NO: 32473 - DNA, 36 bp, synthetic construct
  misc_feature 1..36: note = Probe
  source 1..36: mol_type = other DNA
gggtccccggtagctcgccgtgatcgtatagtggtt

SEQ ID NO: 32474 - DNA, 36 bp, synthetic construct
  misc_feature 1..36: note = Probe
  source 1..36: mol_type = other DNA
gggtgagcccggctagctcagtcggtagagcatgag

SEQ ID NO: 32475 - DNA, 20 bp, synthetic construct
  misc_feature 1..20: note = Probe
  source 1..20: mol_type = other DNA
gggtgcgagaggtcccgggt

SEQ ID NO: 32476 - DNA, 21 bp, synthetic construct
  misc_feature 1..21: note = Probe
  source 1..21: mol_type = other DNA
gggtgcgagaggtcccgggtt

SEQ ID NO: 32477 - DNA, 36 bp, synthetic construct
  misc_feature 1..36: note = Probe
  source 1..36: mol_type = other DNA
gggtgctaatggtggagttaaagactttttctctga

SEQ ID NO: 32478 - DNA, 23 bp, synthetic construct
  misc_feature 1..23: note = Probe
  source 1..23: mol_type = other DNA
gggtggctctgtggcgcaatgga

SEQ ID NO: 32479 - DNA, 31 bp, synthetic construct
  misc_feature 1..31: note = Probe
  source 1..31: mol_type = other DNA
gggtggctctgtggcgcaatggatagcgcat

SEQ ID NO: 32480 - DNA, 36 bp, synthetic construct
  misc_feature 1..36: note = Probe
  source 1..36: mol_type = other DNA
gggtggctctgtggcgcaatggatagcgcattggac

SEQ ID NO: 32481 - DNA, 15 bp, synthetic construct
  misc_feature 1..15: note = Probe
  source 1..15: mol_type = other DNA
gggtggttgcgtttt

SEQ ID NO: 32482 - DNA, 29 bp, synthetic construct
  misc_feature 1..29: note = Probe
  source 1..29: mol_type = other DNA
gggtgtgataggtggcacggagaattttg

SEQ ID NO: 32483 - DNA, 23 bp, synthetic construct
  misc_feature 1..23: note = Probe
  source 1..23: mol_type = other DNA
gggttaggcctctttttaccagc

SEQ ID NO: 32484 - DNA, 24 bp, synthetic construct
  misc_feature 1..24: note = Probe
  source 1..24: mol_type = other DNA
gggttcaattcccggtcagggaac

SEQ ID NO: 32485 - DNA, 25 bp, synthetic construct
  misc_feature 1..25: note = Probe
  source 1..25: mol_type = other DNA
gggttcaattcccggtcagggaacc

SEQ ID NO: 32486 - DNA, 26 bp, synthetic construct
  misc_feature 1..26: note = Probe
  source 1..26: mol_type = other DNA
gggttcaattcccggtcagggaacca

SEQ ID NO: 32487 - DNA, 36 bp, synthetic construct
  misc_feature 1..36: note = Probe
  source 1..36: mol_type = other DNA
gggttccatggtgtaatggttagcactctggactct

SEQ ID NO: 32488 - DNA, 50 bp, synthetic construct
  misc_feature 1..50: note = Probe
  source 1..50: mol_type = other DNA
gggttccatggtgtaatggttagcactctggactctgaatccagcgatcc

SEQ ID NO: 32489 - DNA, 23 bp, synthetic construct
  misc_feature 1..23: note = Probe
  source 1..23: mol_type = other DNA
gggttcgactcccggtgtgggaa

SEQ ID NO: 32490 - DNA, 24 bp, synthetic construct
  misc_feature 1..24: note = Probe
  source 1..24: mol_type = other DNA
gggttcgactcccggtgtgggaac

SEQ ID NO: 32491 - DNA, 36 bp, synthetic construct
  misc_feature 1..36: note = Probe
  source 1..36: mol_type = other DNA
gggttcgagccccacgttgggcggcaactggtcgtt

SEQ ID NO: 32492 - DNA, 24 bp, synthetic construct
  misc_feature 1..24: note = Probe
  source 1..24: mol_type = other DNA
gggttcgattccccgacggggaga

SEQ ID NO: 32493 - DNA, 25 bp, synthetic construct
  misc_feature 1..25: note = Probe
  source 1..25: mol_type = other DNA
gggttcgattccccgacggggagac

SEQ ID NO: 32494 - DNA, 24 bp, synthetic construct
  misc_feature 1..24: note = Probe
  source 1..24: mol_type = other DNA
gggttcgattccccgacggggagg

SEQ ID NO: 32495 - DNA, 25 bp, synthetic construct
  misc_feature 1..25: note = Probe
  source 1..25: mol_type = other DNA
gggttcgattccccgacggggaggc

SEQ ID NO: 32496 - DNA, 26 bp, synthetic construct
  misc_feature 1..26: note = Probe
  source 1..26: mol_type = other DNA
gggttcgattccccgacggggaggca

SEQ ID NO: 32497 - DNA, 21 bp, synthetic construct
  misc_feature 1..21: note = Probe
  source 1..21: mol_type = other DNA
gggttcgattcccggtcaggg

SEQ ID NO: 32498 - DNA, 23 bp, synthetic construct
  misc_feature 1..23: note = Probe
  source 1..23: mol_type = other DNA
gggttcgattcccggtcagggaa

SEQ ID NO: 32499 - DNA, 24 bp, synthetic construct
  misc_feature 1..24: note = Probe
  source 1..24: mol_type = other DNA
gggttcgattcccggtcagggaaa

SEQ ID NO: 32500 - DNA, 24 bp, synthetic construct
  misc_feature 1..24: note = Probe
  source 1..24: mol_type = other DNA
gggttcgattcccggtcagggaag

SEQ ID NO: 32501 - DNA, 25 bp, synthetic construct
  misc_feature 1..25: note = Probe
  source 1..25: mol_type = other DNA
gggttcgattcccggtcagggaagc

SEQ ID NO: 32502 - DNA, 24 bp, synthetic construct
  misc_feature 1..24: note = Probe
  source 1..24: mol_type = other DNA
gggttcgattcccggtcagggaat

SEQ ID NO: 32503 - DNA, 24 bp, synthetic construct
  misc_feature 1..24: note = Probe
  source 1..24: mol_type = other DNA
gggttcgattcccggtcatggaac

SEQ ID NO: 32504 - DNA, 25 bp, synthetic construct
  misc_feature 1..25: note = Probe
  source 1..25: mol_type = other DNA
gggttcgattcccggtcatggaacc

SEQ ID NO: 32505 - DNA, 26 bp, synthetic construct
  misc_feature 1..26: note = Probe
  source 1..26: mol_type = other DNA
gggttcgattcccggtcatggaacca

SEQ ID NO: 32506 - DNA, 15 bp, synthetic construct
  misc_feature 1..15: note = Probe
  source 1..15: mol_type = other DNA
gggttgctgtctttt

SEQ ID NO: 32507 - DNA, 36 bp, synthetic construct
  misc_feature 1..36: note = Probe
  source 1..36: mol_type = other DNA
gggtttgttaagatggcagagcccggtaatcgcata

SEQ ID NO: 32508 - DNA, 17 bp, synthetic construct
  misc_feature 1..17: note = Probe
  source 1..17: mol_type = other DNA
ggtaaaatggctgagtg

SEQ ID NO: 32509 - DNA, 19 bp, synthetic construct
  misc_feature 1..19: note = Probe
  source 1..19: mol_type = other DNA
ggtaaaatggctgagtgaa

SEQ ID NO: 32510 - DNA, 20 bp, synthetic construct
  misc_feature 1..20: note = Probe
  source 1..20: mol_type = other DNA
ggtaaaatggctgagtgaag

SEQ ID NO: 32511 - DNA, 21 bp, synthetic construct
  misc_feature 1..21: note = Probe
  source 1..21: mol_type = other DNA
ggtaaaatggctgagtgaagc

SEQ ID NO: 32512 - DNA, 23 bp, synthetic construct
  misc_feature 1..23: note = Probe
  source 1..23: mol_type = other DNA
ggtaaaatggctgagtgaagcat

SEQ ID NO: 32513 - DNA, 25 bp, synthetic construct
  misc_feature 1..25: note = Probe
  source 1..25: mol_type = other DNA
ggtaaaatggctgagtgaagcattg

SEQ ID NO: 32514 - DNA, 28 bp, synthetic construct
  misc_feature 1..28: note = Probe
  source 1..28: mol_type = other DNA
ggtaaaatggctgagtgaagcattggac

SEQ ID NO: 32515 - DNA, 29 bp, synthetic construct
  misc_feature 1..29: note = Probe
  source 1..29: mol_type = other DNA
ggtaaaatggctgagtgaagcattggact

SEQ ID NO: 32516 - DNA, 30 bp, synthetic construct; identical to SEQ ID NO: 6688
  misc_feature 1..30: note = Probe
  source 1..30: mol_type = other DNA

SEQ ID NO: 32517 - DNA, 31 bp, synthetic construct; identical to SEQ ID NO: 6689
  misc_feature 1..31: note = Probe
  source 1..31: mol_type = other DNA

SEQ ID NO: 32518 - DNA, 32 bp, synthetic construct; identical to SEQ ID NO: 6690
  misc_feature 1..32: note = Probe
  source 1..32: mol_type = other DNA

SEQ ID NO: 32519 - DNA, 33 bp, synthetic construct; identical to SEQ ID NO: 6691
  misc_feature 1..33: note = Probe
  source 1..33: mol_type = other DNA

SEQ ID NO: 32520 - DNA, 34 bp, synthetic construct; identical to SEQ ID NO: 6692
  misc_feature 1..34: note = Probe
  source 1..34: mol_type = other DNA

SEQ ID NO: 32521 - DNA, 35 bp, synthetic construct; identical to SEQ ID NO: 6693
  misc_feature 1..35: note = Probe
  source 1..35: mol_type = other DNA

SEQ ID NO: 32522 - DNA, 36 bp, synthetic construct; identical to SEQ ID NO: 6694
  misc_feature 1..36: note = Probe
  source 1..36: mol_type = other DNA

SEQ ID NO: 32523 - DNA, 37 bp, synthetic construct; identical to SEQ ID NO: 6695
  misc_feature 1..37: note = Probe
  source 1..37: mol_type = other DNA

SEQ ID NO: 32524 - DNA, 38 bp, synthetic construct; identical to SEQ ID NO: 6696
  misc_feature 1..38: note = Probe
  source 1..38: mol_type = other DNA

SEQ ID NO: 32525 - DNA, 50 bp, synthetic construct
  misc_feature 1..50: note = Probe
  source 1..50: mol_type = other DNA
ggtaaaatggctgagtgaagcattggactgtaaatctaaagacaggggtt

SEQ ID NO: 32526 - DNA, 36 bp, synthetic construct
  misc_feature 1..36: note = Probe
  source 1..36: mol_type = other DNA
ggtaagcactctggactctgaatccagcgatccgag

SEQ ID NO: 32527 - DNA, 19 bp, synthetic construct
  misc_feature 1..19: note = Probe
  source 1..19: mol_type = other DNA
ggtaatcgcataaaactta

SEQ ID NO: 32528 - DNA, 26 bp, synthetic construct
  misc_feature 1..26: note = Probe
  source 1..26: mol_type = other DNA
ggtaatcgcataaaacttaaaacttt

SEQ ID NO: 32529 - DNA, 29 bp, synthetic construct
  misc_feature 1..29: note = Probe
  source 1..29: mol_type = other DNA
ggtaatcgcataaaacttaaaactttaca

SEQ ID NO: 32530 - DNA, 30 bp, synthetic construct
  misc_feature 1..30: note = Probe
  source 1..30: mol_type = other DNA
ggtaatcgcataaaacttaaaactttacag

SEQ ID NO: 32531 - DNA, 36 bp, synthetic construct
  misc_feature 1..36: note = Probe
  source 1..36: mol_type = other DNA
ggtaatcgcataaaacttaaaactttacagtcagag

SEQ ID NO: 32532 - DNA, 15 bp, synthetic construct
  misc_feature 1..15: note = Probe
  source 1..15: mol_type = other DNA
ggtagaattctcgcc

SEQ ID NO: 32533 - DNA, 16 bp, synthetic construct
  misc_feature 1..16: note = Probe
  source 1..16: mol_type = other DNA
ggtagaattctcgcct

SEQ ID NO: 32534 - DNA, 18 bp, synthetic construct
  misc_feature 1..18: note = Probe
  source 1..18: mol_type = other DNA
ggtagaattctcgcctcc

SEQ ID NO: 32535 - DNA, 36 bp, synthetic construct
  misc_feature 1..36: note = Probe
  source 1..36: mol_type = other DNA
ggtagaattctcgcctcccacgcgggagacccgggt

SEQ ID NO: 32536 - DNA, 17 bp, synthetic construct
  misc_feature 1..17: note = Probe
  source 1..17: mol_type = other DNA
ggtagaattctcgcctg

SEQ ID NO: 32537 - DNA, 18 bp, synthetic construct
  misc_feature 1..18: note = Probe
  source 1..18: mol_type = other DNA
ggtagaattctcgcctgc

SEQ ID NO: 32538 - DNA, 19 bp, synthetic construct
  misc_feature 1..19: note = Probe
  source 1..19: mol_type = other DNA
ggtagaattctcgcctgcc

SEQ ID NO: 32539 - DNA, 27 bp, synthetic construct
  misc_feature 1..27: note = Probe
  source 1..27: mol_type = other DNA
ggtagaattctcgcctgccacgcggga

SEQ ID NO: 32540 - DNA, 32 bp, synthetic construct; identical to SEQ ID NO: 6703
  misc_feature 1..32: note = Probe
  source 1..32: mol_type = other DNA

SEQ ID NO: 32541 - DNA, 37 bp, synthetic construct; identical to SEQ ID NO: 22066
  misc_feature 1..37: note = Probe
  source 1..37: mol_type = other DNA

SEQ ID NO: 32542 - DNA, 15 bp, synthetic construct
  misc_feature 1..15: note = Probe
  source 1..15: mol_type = other DNA
ggtagagcatcagac

SEQ ID NO: 32543 - DNA, 16 bp, synthetic construct
  misc_feature 1..16: note = Probe
  source 1..16: mol_type = other DNA
ggtagagcatcagact

SEQ ID NO: 32544 - DNA, 15 bp, synthetic construct
  misc_feature 1..15: note = Probe
  source 1..15: mol_type = other DNA
ggtagagcatgagac

SEQ ID NO: 32545 - DNA, 17 bp, synthetic construct
  misc_feature 1..17: note = Probe
  source 1..17: mol_type = other DNA
ggtagagcatgagaccc

SEQ ID NO: 32546 - DNA, 16 bp, synthetic construct
  misc_feature 1..16: note = Probe
  source 1..16: mol_type = other DNA
ggtagagcatgagact

SEQ ID NO: 32547 - DNA, 17 bp, synthetic construct
  misc_feature 1..17: note = Probe
  source 1..17: mol_type = other DNA
ggtagagcatgagactc

SEQ ID NO: 32548 - DNA, 15 bp, synthetic construct
  misc_feature 1..15: note = Probe
  source 1..15: mol_type = other DNA
ggtagagcatgggac

SEQ ID NO: 32549 - DNA, 16 bp, synthetic construct
  misc_feature 1..16: note = Probe
  source 1..16: mol_type = other DNA
ggtagagcatgggact

SEQ ID NO: 32550 - DNA, 24 bp, synthetic construct
  misc_feature 1..24: note = Probe
  source 1..24: mol_type = other DNA
ggtagagcatgggactcttaatcc

SEQ ID NO: 32551 - DNA, 25 bp, synthetic construct
  misc_feature 1..25: note = Probe
  source 1..25: mol_type = other DNA
ggtagagcatgggactcttaatccc

SEQ ID NO: 32552 - DNA, 16 bp, synthetic construct
  misc_feature 1..16: note = Probe
  source 1..16: mol_type = other DNA
ggtagagcatttgact

SEQ ID NO: 32553 - DNA, 18 bp, synthetic construct
  misc_feature 1..18: note = Probe
  source 1..18: mol_type = other DNA
ggtagagcatttgactgc

SEQ ID NO: 32554 - DNA, 15 bp, synthetic construct
  misc_feature 1..15: note = Probe
  source 1..15: mol_type = other DNA
ggtagagcggaggac

SEQ ID NO: 32555 - DNA, 16 bp, synthetic construct
  misc_feature 1..16: note = Probe
  source 1..16: mol_type = other DNA
ggtagcgcgtctgact

SEQ ID NO: 32556 - DNA, 15 bp, synthetic construct
  misc_feature 1..15: note = Probe
  source 1..15: mol_type = other DNA
ggtagcgtggccgag

SEQ ID NO: 32557 - DNA, 18 bp, synthetic construct
  misc_feature 1..18: note = Probe
  source 1..18: mol_type = other DNA
ggtagcgtggccgagcgg

SEQ ID NO: 32558 - DNA, 20 bp, synthetic construct
  misc_feature 1..20: note = Probe
  source 1..20: mol_type = other DNA
ggtagcgtggccgagcggtc

SEQ ID NO: 32559 - DNA, 22 bp, synthetic construct
  misc_feature 1..22: note = Probe
  source 1..22: mol_type = other DNA
ggtagcgtggccgagcggtcta

SEQ ID NO: 32560 - DNA, 26 bp, synthetic construct
  misc_feature 1..26: note = Probe
  source 1..26: mol_type = other DNA
ggtagcgtggccgagcggtctaaggc

SEQ ID NO: 32561 - DNA, 34 bp, synthetic construct; identical to SEQ ID NO: 22077
  misc_feature 1..34: note = Probe
  source 1..34: mol_type = other DNA

SEQ ID NO: 32562 - DNA, 36 bp, synthetic construct; identical to SEQ ID NO: 6709
  misc_feature 1..36: note = Probe
  source 1..36: mol_type = other DNA

SEQ ID NO: 32563 - DNA, 21 bp, synthetic construct
  misc_feature 1..21: note = Probe
  source 1..21: mol_type = other DNA
ggtagcgtggccgagtggtct

SEQ ID NO: 32564 - DNA, 16 bp, synthetic construct
  misc_feature 1..16: note = Probe
  source 1..16: mol_type = other DNA
ggtagtgtggccgagc

SEQ ID NO: 32565 - DNA, 20 bp, synthetic construct
  misc_feature 1..20: note = Probe
  source 1..20: mol_type = other DNA
ggtagtgtggccgagcggtc

SEQ ID NO: 32566 - DNA, 21 bp, synthetic construct
  misc_feature 1..21: note = Probe
  source 1..21: mol_type = other DNA
ggtagtgtggccgagcggtct

SEQ ID NO: 32567 - DNA, 36 bp, synthetic construct
  misc_feature 1..36: note = Probe
  source 1..36: mol_type = other DNA
ggtagtgtggccgagcggtctaaggcgctggattta

SEQ ID NO: 32568 - DNA, 35 bp, synthetic construct
  misc_feature 1..35: note = Probe
  source 1..35: mol_type = other DNA
ggtatatagtttaaacaaaacgaatgatttcgact

SEQ ID NO: 32569 - DNA, 36 bp, synthetic construct
  misc_feature 1..36: note = Probe
  source 1..36: mol_type = other DNA
ggtatatagtttaaacaaaacgaatgatttcgactc

SEQ ID NO: 32570 - DNA, 15 bp, synthetic construct
  misc_feature 1..15: note = Probe
  source 1..15: mol_type = other DNA
ggtatgattctcgct

SEQ ID NO: 32571 - DNA, 16 bp, synthetic construct
  misc_feature 1..16: note = Probe
  source 1..16: mol_type = other DNA
ggtatgattctcgctt

SEQ ID NO: 32572 - DNA, 36 bp, synthetic construct
  misc_feature 1..36: note = Probe
  source 1..36: mol_type = other DNA
ggtatgattctcgcttagggtgcgagaggtcccggg

SEQ ID NO: 32573 - DNA, 37 bp, synthetic construct; identical to SEQ ID NO: 22109
  misc_feature 1..37: note = Probe
  source 1..37: mol_type = other DNA

SEQ ID NO: 32574 - DNA, 17 bp, synthetic construct
  misc_feature 1..17: note = Probe
  source 1..17: mol_type = other DNA
ggtatgattctcgcttc

SEQ ID NO: 32575 - DNA, 36 bp, synthetic construct
  misc_feature 1..36: note = Probe
  source 1..36: mol_type = other DNA
ggtatgattctcgcttcgggtgcgagaggtcccggg

SEQ ID NO: 32576 - DNA, 37 bp, synthetic construct; identical to SEQ ID NO: 22112
  misc_feature 1..37: note = Probe
  source 1..37: mol_type = other DNA

SEQ ID NO: 32577 - DNA, 19 bp, synthetic construct
  misc_feature 1..19: note = Probe
  source 1..19: mol_type = other DNA
ggtatgattctcgctttgg

SEQ ID NO: 32578 - DNA, 36 bp, synthetic construct; identical to SEQ ID NO: 22116
  misc_feature 1..36: note = Probe
  source 1..36: mol_type = other DNA

SEQ ID NO: 32579 - DNA, 37 bp, synthetic construct; identical to SEQ ID NO: 22117
  misc_feature 1..37: note = Probe
  source 1..37: mol_type = other DNA

SEQ ID NO: 32580 - DNA, 15 bp, synthetic construct
  misc_feature 1..15: note = Probe
  source 1..15: mol_type = other DNA
ggtatgattctcggt

SEQ ID NO: 32581 - DNA, 24 bp, synthetic construct
  misc_feature 1..24: note = Probe
  source 1..24: mol_type = other DNA
ggtcagctaaataagctatcgggc

SEQ ID NO: 32582 - DNA, 25 bp, synthetic construct
  misc_feature 1..25: note = Probe
  source 1..25: mol_type = other DNA
ggtcagctaaataagctatcgggcc

SEQ ID NO: 32583 - DNA, 26 bp, synthetic construct
  misc_feature 1..26: note = Probe
  source 1..26: mol_type = other DNA
ggtcagctaaataagctatcgggccc

SEQ ID NO: 32584 - DNA, 27 bp, synthetic construct
  misc_feature 1..27: note = Probe
  source 1..27: mol_type = other DNA
ggtcagctaaataagctatcgggccca

SEQ ID NO: 32585 - DNA, 36 bp, synthetic construct
  misc_feature 1..36: note = Probe
  source 1..36: mol_type = other DNA
ggtcagctaaataagctatcgggcccataccccgaa

SEQ ID NO: 32586 - DNA, 29 bp, synthetic construct
  misc_feature 1..29: note = Probe
  source 1..29: mol_type = other DNA
ggtcccatggtgtaatggttagcactctg

SEQ ID NO: 32587 - DNA, 31 bp, synthetic construct; identical to SEQ ID NO: 22145
  misc_feature 1..31: note = Probe
  source 1..31: mol_type = other DNA

SEQ ID NO: 32588 - DNA, 33 bp, synthetic construct; identical to SEQ ID NO: 1415
  misc_feature 1..33: note = Probe
  source 1..33: mol_type = other DNA

SEQ ID NO: 32589 - DNA, 50 bp, synthetic construct
  misc_feature 1..50: note = Probe
  source 1..50: mol_type = other DNA
ggtcccatggtgtaatggttagcactctggactttgaatccagcaatccg

SEQ ID NO: 32590 - DNA, 50 bp, synthetic construct; identical to SEQ ID NO: 1417
  misc_feature 1..50: note = Probe
  source 1..50: mol_type = other DNA

SEQ ID NO: 32591 - DNA, 36 bp, synthetic construct
  misc_feature 1..36: note = Probe
  source 1..36: mol_type = other DNA
ggtcccatggtgtaatggttagcactctgggctttg

SEQ ID NO: 32592 - DNA, 15 bp, synthetic construct
  misc_feature 1..15: note = Probe
  source 1..15: mol_type = other DNA
ggtccctgggctgtc

SEQ ID NO: 32593 - DNA, 21 bp, synthetic construct
  misc_feature 1..21: note = Probe
  source 1..21: mol_type = other DNA
ggtcctagcctttctattagc

SEQ ID NO: 32594 - DNA, 36 bp, synthetic construct
  misc_feature 1..36: note = Probe
  source 1..36: mol_type = other DNA
ggtcgctggttcgaatccggctcggaggacggtagt

SEQ ID NO: 32595 - DNA, 31 bp, synthetic construct; identical to SEQ ID NO: 22170
  misc_feature 1..31: note = Probe
  source 1..31: mol_type = other DNA

SEQ ID NO: 32596 - DNA, 20 bp, synthetic construct
  misc_feature 1..20: note = Probe
  source 1..20: mol_type = other DNA
ggtcggccggttagctcagt

SEQ ID NO: 32597 - DNA, 28 bp, synthetic construct
  misc_feature 1..28: note = Probe
  source 1..28: mol_type = other DNA
ggtcgtgggttcgagccccacgttgggc

SEQ ID NO: 32598 - DNA, 29 bp, synthetic construct
  misc_feature 1..29: note = Probe
  source 1..29: mol_type = other DNA
ggtcgtgggttcgagccccacgttgggcg

SEQ ID NO: 32599 - DNA, 30 bp, synthetic construct
  misc_feature 1..30: note = Probe
  source 1..30: mol_type = other DNA
ggtcgtgggttcgagccccacgttgggcgc

SEQ ID NO: 32600 - DNA, 25 bp, synthetic construct
  misc_feature 1..25: note = Probe
  source 1..25: mol_type = other DNA
ggtcgtggttgtagtccgtgcgaga

SEQ ID NO: 32601 - DNA, 26 bp, synthetic construct
  misc_feature 1..26: note = Probe
  source 1..26: mol_type = other DNA
ggtcgtggttgtagtccgtgcgagaa

SEQ ID NO: 32602 - DNA, 18 bp, synthetic construct
  misc_feature 1..18: note = Probe
  source 1..18: mol_type = other DNA
ggtctaggggtatgattc

SEQ ID NO: 32603 - DNA, 20 bp, synthetic construct
  misc_feature 1..20: note = Probe
  source 1..20: mol_type = other DNA
ggtctaggggtatgattctc

SEQ ID NO: 32604 - DNA, 22 bp, synthetic construct
  misc_feature 1..22: note = Probe
  source 1..22: mol_type = other DNA
ggtctaggggtatgattctcgc

SEQ ID NO: 32605 - DNA, 23 bp, synthetic construct
  misc_feature 1..23: note = Probe
  source 1..23: mol_type = other DNA
ggtctaggggtatgattctcgct

SEQ ID NO: 32606 - DNA, 26 bp, synthetic construct
  misc_feature 1..26: note = Probe
  source 1..26: mol_type = other DNA
ggtctcgtaaaccgaagatcacgggt

SEQ ID NO: 32607 - DNA, 26 bp, synthetic construct
  misc_feature 1..26: note = Probe
  source 1..26: mol_type = other DNA
ggtctcgtaaaccgaagatcgcgggt

SEQ ID NO: 32608 - DNA, 15 bp, synthetic construct
  misc_feature 1..15: note = Probe
  source 1..15: mol_type = other DNA
ggtgagcactctgga

SEQ ID NO: 32609 - DNA, 34 bp, synthetic construct
  misc_feature 1..34: note = Probe
  source 1..34: mol_type = other DNA
ggtgagcactctggactctgaatccagcgatccg

SEQ ID NO: 32610 - DNA, 37 bp, synthetic construct
  misc_feature 1..37: note = Probe
  source 1..37: mol_type = other DNA
ggtgagcactctggactctgaatccagcgatccgagt

SEQ ID NO: 32611 - DNA, 38 bp, synthetic construct
  misc_feature 1..38: note = Probe
  source 1..38: mol_type = other DNA
ggtgagcactctggactctgaatccagcgatccgagtt

SEQ ID NO: 32612 - DNA, 15 bp, synthetic construct
  misc_feature 1..15: note = Probe
  source 1..15: mol_type = other DNA
ggtgagtatccccgc

SEQ ID NO: 32613 - DNA, 20 bp, synthetic construct
  misc_feature 1..20: note = Probe
  source 1..20: mol_type = other DNA
ggtgagtatccccgcctgtc

SEQ ID NO: 32614 - DNA, 36 bp, synthetic construct
  misc_feature 1..36: note = Probe
  source 1..36: mol_type = other DNA
ggtgagtatccccgcctgtcacgcgggagaccgggg

SEQ ID NO: 32615 - DNA, 33 bp, synthetic construct
  misc_feature 1..33: note = Probe
  source 1..33: mol_type = other DNA
ggtgcatgggtggttcagtggtagaattctcgc

SEQ ID NO: 32616 - DNA, 35 bp, synthetic construct
  misc_feature 1..35: note = Probe
  source 1..35: mol_type = other DNA
ggtgcatgggtggttcagtggtagaattctcgcct

SEQ ID NO: 32617 - DNA, 36 bp, synthetic construct; identical to SEQ ID NO: 22203
  misc_feature 1..36: note = Probe
  source 1..36: mol_type = other DNA

SEQ ID NO: 32618 - DNA, 18 bp, synthetic construct
  misc_feature 1..18: note = Probe
  source 1..18: mol_type = other DNA
ggtgcgagaggtcccggg

SEQ ID NO: 32619 - DNA, 19 bp, synthetic construct
  misc_feature 1..19: note = Probe
  source 1..19: mol_type = other DNA
ggtgcgagaggtcccgggt

SEQ ID NO: 32620 - DNA, 20 bp, synthetic construct
  misc_feature 1..20: note = Probe
  source 1..20: mol_type = other DNA
ggtgcgagaggtcccgggtt

SEQ ID NO: 32621 - DNA, 27 bp, synthetic construct
  misc_feature 1..27: note = Probe
  source 1..27: mol_type = other DNA
ggtgctaataacgccaaggtcgcgggt

SEQ ID NO: 32622 - DNA, 36 bp, synthetic construct
  misc_feature 1..36: note = Probe
  source 1..36: mol_type = other DNA
ggtgctaatggtggagttaaagactttttctctgat

SEQ ID NO: 32623 - DNA, 36 bp, synthetic construct
  misc_feature 1..36: note = Probe
  source 1..36: mol_type = other DNA
ggtgcttagctgttaactaagtgtttgtgggtttaa

SEQ ID NO: 32624 - DNA, 27 bp, synthetic construct
  misc_feature 1..27: note = Probe
  source 1..27: mol_type = other DNA
ggtggagttaaagactttttctctgat

SEQ ID NO: 32625 - DNA, 36 bp, synthetic construct
  misc_feature 1..36: note = Probe
  source 1..36: mol_type = other DNA
ggtggccgagatagctcagttgggagagcgttagac

SEQ ID NO: 32626 - DNA, 16 bp, synthetic construct
  misc_feature 1..16: note = Probe
  source 1..16: mol_type = other DNA
ggtggcctgtgacttt

SEQ ID NO: 32627 - DNA, 17 bp, synthetic construct
  misc_feature 1..17: note = Probe
  source 1..17: mol_type = other DNA
ggtggcctgtgactttt

SEQ ID NO: 32628 - DNA, 28 bp, synthetic construct
  misc_feature 1..28: note = Probe
  source 1..28: mol_type = other DNA
ggtggtctagtggttaggattcggcgct

SEQ ID NO: 32629 - DNA, 36 bp, synthetic construct
  misc_feature 1..36: note = Probe
  source 1..36: mol_type = other DNA
ggtggtctagtggttaggattcggcgctctcaccgc

SEQ ID NO: 32630 - DNA, 25 bp, synthetic construct
  misc_feature 1..25: note = Probe
  source 1..25: mol_type = other DNA
ggtggttcagtggtagaattctcgc

SEQ ID NO: 32631 - DNA, 26 bp, synthetic construct
  misc_feature 1..26: note = Probe
  source 1..26: mol_type = other DNA
ggtggttcagtggtagaattctcgcc

SEQ ID NO: 32632 - DNA, 27 bp, synthetic construct
  misc_feature 1..27: note = Probe
  source 1..27: mol_type = other DNA
ggtggttcagtggtagaattctcgcct

SEQ ID NO: 32633 - DNA, 30 bp, synthetic construct; identical to SEQ ID NO: 6787
  misc_feature 1..30: note = Probe
  source 1..30: mol_type = other DNA

SEQ ID NO: 32634 - DNA, 16 bp, synthetic construct
  misc_feature 1..16: note = Probe
  source 1..16: mol_type = other DNA
ggtggttctaacttgc

SEQ ID NO: 32635 - DNA, 30 bp, synthetic construct; identical to SEQ ID NO: 22239
  misc_feature 1..30: note = Probe
  source 1..30: mol_type = other DNA

SEQ ID NO: 32636 - DNA, 23 bp, synthetic construct
  misc_feature 1..23: note = Probe
  source 1..23: mol_type = other DNA
ggtgtaatggttagcactctgga

SEQ ID NO: 32637 - DNA, 24 bp, synthetic construct
  misc_feature 1..24: note = Probe
  source 1..24: mol_type = other DNA
ggtgtaatggttagcactctggac

SEQ ID NO: 32638 - DNA, 25 bp, synthetic construct
  misc_feature 1..25: note = Probe
  source 1..25: mol_type = other DNA
ggtgtaatggttagcactctggact

SEQ ID NO: 32639 - DNA, 26 bp, synthetic construct
  misc_feature 1..26: note = Probe
  source 1..26: mol_type = other DNA
ggtgtaatggttagcactctggactc

SEQ ID NO: 32640 - DNA, 30 bp, synthetic construct
  misc_feature 1..30: note = Probe
  source 1..30: mol_type = other DNA
ggtgtaatggttagcactctggactctgaa

SEQ ID NO: 32641 - DNA, 31 bp, synthetic construct
  misc_feature 1..31: note = Probe
  source 1..31: mol_type = other DNA
ggtgtaatggttagcactctggactctgaat

SEQ ID NO: 32642 - DNA, 32 bp, synthetic construct
  misc_feature 1..32: note = Probe
  source 1..32: mol_type = other DNA
ggtgtaatggttagcactctggactctgaatc

SEQ ID NO: 32643 - DNA, 33 bp, synthetic construct
  misc_feature 1..33: note = Probe
  source 1..33: mol_type = other DNA
ggtgtaatggttagcactctggactctgaatcc

SEQ ID NO: 32644 - DNA, 44 bp, synthetic construct
  misc_feature 1..44: note = Probe
  source 1..44: mol_type = other DNA
ggtgtaatggttagcactctggactctgaatccagcgatccgag

SEQ ID NO: 32645 - DNA, 45 bp, synthetic construct
  misc_feature 1..45: note = Probe
  source 1..45: mol_type = other DNA
ggtgtaatggttagcactctggactctgaatccagcgatccgagt

SEQ ID NO: 32646 - DNA, 46 bp, synthetic construct
  misc_feature 1..46: note = Probe
  source 1..46: mol_type = other DNA
ggtgtaatggttagcactctggactctgaatccagcgatccgagtt

SEQ ID NO: 32647 - DNA, 32 bp, synthetic construct
  misc_feature 1..32: note = Probe
  source 1..32: mol_type = other DNA
ggtgtaatggttagcactctggactttgaatc

SEQ ID NO: 32648 - DNA, 33 bp, synthetic construct
  misc_feature 1..33: note = Probe
  source 1..33: mol_type = other DNA
ggtgtaatggttagcactctggactttgaatcc

SEQ ID NO: 32649 - DNA, 36 bp, synthetic construct
  misc_feature 1..36: note = Probe
  source 1..36: mol_type = other DNA
ggtgtaatggttagcactctggactttgaatccagc

SEQ ID NO: 32650 - DNA, 15 bp, synthetic construct
  misc_feature 1..15: note = Probe
  source 1..15: mol_type = other DNA
ggtgtggtctgttgt

SEQ ID NO: 32651 - DNA, 16 bp, synthetic construct
  misc_feature 1..16: note = Probe
  source 1..16: mol_type = other DNA
ggtgtggtctgttgtt

SEQ ID NO: 32652 - DNA, 17 bp, synthetic construct
  misc_feature 1..17: note = Probe
  source 1..17: mol_type = other DNA
ggtgtggtctgttgttt

SEQ ID NO: 32653 - DNA, 18 bp, synthetic construct
  misc_feature 1..18: note = Probe
  source 1..18: mol_type = other DNA
ggtgtggtctgttgtttt

SEQ ID NO: 32654 - DNA, 19 bp, synthetic construct
  misc_feature 1..19: note = Probe
  source 1..19: mol_type = other DNA
ggtgtggtctgttgttttc

SEQ ID NO: 32655 - DNA, 16 bp, synthetic construct
  misc_feature 1..16: note = Probe
  source 1..16: mol_type = other DNA
ggttaaggcattggac

SEQ ID NO: 32656 - DNA, 19 bp, synthetic construct
  misc_feature 1..19: note = Probe
  source 1..19: mol_type = other DNA
ggttaaggcattggactta

SEQ ID NO: 32657 - DNA, 16 bp, synthetic construct
  misc_feature 1..16: note = Probe
  source 1..16: mol_type = other DNA
ggttaaggcgatggac

SEQ ID NO: 32658 - DNA, 16 bp, synthetic construct
  misc_feature 1..16: note = Probe
  source 1..16: mol_type = other DNA
ggttaaggcgttggac

SEQ ID NO: 32659 - DNA, 17 bp, synthetic construct
  misc_feature 1..17: note = Probe
  source 1..17: mol_type = other DNA
ggttaaggcgttggact

SEQ ID NO: 32660 - DNA, 19 bp, synthetic construct
  misc_feature 1..19: note = Probe
  source 1..19: mol_type = other DNA
ggttaaggcgttggactta

SEQ ID NO: 32661 - DNA, 15 bp, synthetic construct
  misc_feature 1..15: note = Probe
  source 1..15: mol_type = other DNA
ggttagcactctgga

SEQ ID NO: 32662 - DNA, 16 bp, synthetic construct
  misc_feature 1..16: note = Probe
  source 1..16: mol_type = other DNA
ggttagcactctggac

SEQ ID NO: 32663 - DNA, 17 bp, synthetic construct
  misc_feature 1..17: note = Probe
  source 1..17: mol_type = other DNA
ggttagcactctggact

SEQ ID NO: 32664 - DNA, 18 bp, synthetic construct
  misc_feature 1..18: note = Probe
  source 1..18: mol_type = other DNA
ggttagcactctggactc

SEQ ID NO: 32665 - DNA, 19 bp, synthetic construct
  misc_feature 1..19: note = Probe
  source 1..19: mol_type = other DNA
ggttagcactctggactct

SEQ ID NO: 32666 - DNA, 20 bp, synthetic construct
  misc_feature 1..20: note = Probe
  source 1..20: mol_type = other DNA
ggttagcactctggactctg

SEQ ID NO: 32667 - DNA, 21 bp, synthetic construct
  misc_feature 1..21: note = Probe
  source 1..21: mol_type = other DNA
ggttagcactctggactctga

SEQ ID NO: 32668 - DNA, 22 bp, synthetic construct
  misc_feature 1..22: note = Probe
  source 1..22: mol_type = other DNA
ggttagcactctggactctgaa

SEQ ID NO: 32669 - DNA, 26 bp, synthetic construct
  misc_feature 1..26: note = Probe
  source 1..26: mol_type = other DNA
ggttagcactctggactctgaatcca

SEQ ID NO: 32670 - DNA, 28 bp, synthetic construct
  misc_feature 1..28: note = Probe
  source 1..28: mol_type = other DNA
ggttagcactctggactctgaatccagc

SEQ ID NO: 32671 - DNA, 29 bp, synthetic construct
  misc_feature 1..29: note = Probe
  source 1..29: mol_type = other DNA
ggttagcactctggactctgaatccagcg

SEQ ID NO: 32672 - DNA, 35 bp, synthetic construct; identical to SEQ ID NO: 13946
  misc_feature 1..35: note = Probe
  source 1..35: mol_type = other DNA

SEQ ID NO: 32673 - DNA, 39 bp, synthetic construct
  misc_feature 1..39: note = Probe
  source 1..39: mol_type = other DNA
ggttagcactctggactctgaatccagcgatccgagttc

SEQ ID NO: 32674 - DNA, 40 bp, synthetic construct
  misc_feature 1..40: note = Probe
  source 1..40: mol_type = other DNA
ggttagcactctggactctgaatccagcgatccgagttca

SEQ ID NO: 32675 - DNA, 41 bp, synthetic construct
  misc_feature 1..41: note = Probe
  source 1..41: mol_type = other DNA
ggttagcactctggactctgaatccagcgatccgagttcaa

SEQ ID NO: 32676 - DNA, 22 bp, synthetic construct
  misc_feature 1..22: note = Probe
  source 1..22: mol_type = other DNA
ggttagcactctggactttgaa

SEQ ID NO: 32677 - DNA, 23 bp, synthetic construct
  misc_feature 1..23: note = Probe
  source 1..23: mol_type = other DNA
ggttagcactctggactttgaat

SEQ ID NO: 32678 - DNA, 25 bp, synthetic construct
  misc_feature 1..25: note = Probe
  source 1..25: mol_type = other DNA
ggttagcactctggactttgaatcc

SEQ ID NO: 32679 - DNA, 37 bp, synthetic construct
  misc_feature 1..37: note = Probe
  source 1..37: mol_type = other DNA
ggttagcactctggactttgaatccagcaatccgagt

SEQ ID NO: 32680 - DNA, 38 bp, synthetic construct
  misc_feature 1..38: note = Probe
  source 1..38: mol_type = other DNA
ggttagcactctggactttgaatccagcaatccgagtt

SEQ ID NO: 32681 - DNA, 39 bp, synthetic construct
  misc_feature 1..39: note = Probe
  source 1..39: mol_type = other DNA
ggttagcactctggactttgaatccagcaatccgagttc

SEQ ID NO: 32682 - DNA, 40 bp, synthetic construct
  misc_feature 1..40: note = Probe
  source 1..40: mol_type = other DNA
ggttagcactctggactttgaatccagcaatccgagttcg

SEQ ID NO: 32683 - DNA, 37 bp, synthetic construct; identical to SEQ ID NO: 22253
  misc_feature 1..37: note = Probe
  source 1..37: mol_type = other DNA

SEQ ID NO: 32684 - DNA, 39 bp, synthetic construct; identical to SEQ ID NO: 22255
  misc_feature 1..39: note = Probe
  source 1..39: mol_type = other DNA

SEQ ID NO: 32685 - DNA, 40 bp, synthetic construct
  misc_feature 1..40: note = Probe
  source 1..40: mol_type = other DNA
ggttagcactctggactttgaatccagcgatccgagttca

SEQ ID NO: 32686 - DNA, 16 bp, synthetic construct
  misc_feature 1..16: note = Probe
  source 1..16: mol_type = other DNA
ggttagcgcgcggtac

SEQ ID NO: 32687 - DNA, 23 bp, synthetic construct
  misc_feature 1..23: note = Probe
  source 1..23: mol_type = other DNA
ggttagcgcgttcggctgttaac

SEQ ID NO: 32688 - DNA, 16 bp, synthetic construct
  misc_feature 1..16: note = Probe
  source 1..16: mol_type = other DNA
ggttagctcagtcggc

SEQ ID NO: 32689 - DNA, 29 bp, synthetic construct
  misc_feature 1..29: note = Probe
  source 1..29: mol_type = other DNA
ggttagctcagtcggctagagcgtggtgc

SEQ ID NO: 32690 - DNA, 15 bp, synthetic construct
  misc_feature 1..15: note = Probe
  source 1..15: mol_type = other DNA
ggttaggattcggcg

SEQ ID NO: 32691 - DNA, 17 bp, synthetic construct
  misc_feature 1..17: note = Probe
  source 1..17: mol_type = other DNA
ggttaggattcggcgct

SEQ ID NO: 32692 - DNA, 19 bp, synthetic construct
  misc_feature 1..19: note = Probe
  source 1..19: mol_type = other DNA
ggttaggattcggcgctct

SEQ ID NO: 32693 - DNA, 23 bp, synthetic construct
  misc_feature 1..23: note = Probe
  source 1..23: mol_type = other DNA
ggttaggattcggcgctctcacc

SEQ ID NO: 32694 - DNA, 32 bp, synthetic construct
  misc_feature 1..32: note = Probe
  source 1..32: mol_type = other DNA
ggttaggattcggcgctctcaccgccgcggcc

SEQ ID NO: 32695 - DNA, 37 bp, synthetic construct; identical to SEQ ID NO: 22259
  misc_feature 1..37: note = Probe
  source 1..37: mol_type = other DNA

SEQ ID NO: 32696 - DNA, 22 bp, synthetic construct
  misc_feature 1..22: note = Probe
  source 1..22: mol_type = other DNA
ggttaggcctctttttaccagc

SEQ ID NO: 32697 - DNA, 15 bp, synthetic construct
  misc_feature 1..15: note = Probe
  source 1..15: mol_type = other DNA
ggttagtactctgcg

SEQ ID NO: 32698 - DNA, 17 bp, synthetic construct
  misc_feature 1..17: note = Probe
  source 1..17: mol_type = other DNA
ggttagtactctgcgtt

SEQ ID NO: 32699 - DNA, 15 bp, synthetic construct
  misc_feature 1..15: note = Probe
  source 1..15: mol_type = other DNA
ggttagtatccccgc

SEQ ID NO: 32700 - DNA, 20 bp, synthetic construct
  misc_feature 1..20: note = Probe
  source 1..20: mol_type = other DNA
ggttatacccttcccgtact

SEQ ID NO: 32701 - DNA, 15 bp, synthetic construct
  misc_feature 1..15: note = Probe
  source 1..15: mol_type = other DNA
ggttatcacgtctgc

SEQ ID NO: 32702 - DNA, 16 bp, synthetic construct
  misc_feature 1..16: note = Probe
  source 1..16: mol_type = other DNA
ggttatcacgtctgct

SEQ ID NO: 32703 - DNA, 16 bp, synthetic construct
  misc_feature 1..16: note = Probe
  source 1..16: mol_type = other DNA
ggttatcacgttcgcc

SEQ ID NO: 32704 - DNA, 23 bp, synthetic construct
  misc_feature 1..23: note = Probe
  source 1..23: mol_type = other DNA
ggttatcacgttcgcctaacacg

SEQ ID NO: 32705 - DNA, 23 bp, synthetic construct
  misc_feature 1..23: note = Probe
  source 1..23: mol_type = other DNA
ggttatcacgttcgcctcacacg

SEQ ID NO: 32706 - DNA, 20 bp, synthetic construct
  misc_feature 1..20: note = Probe
  source 1..20: mol_type = other DNA
ggttcaaatcccggacgagc

SEQ ID NO: 32707 - DNA, 24 bp, synthetic construct
  misc_feature 1..24: note = Probe
  source 1..24: mol_type = other DNA
ggttcaattcccggtcagggaacc

SEQ ID NO: 32708 - DNA, 25 bp, synthetic construct
  misc_feature 1..25: note = Probe
  source 1..25: mol_type = other DNA
ggttcaattcccggtcagggaacca

SEQ ID NO: 32709 - DNA, 23 bp, synthetic construct
  misc_feature 1..23: note = Probe
  source 1..23: mol_type = other DNA
ggttcagtggtagaattctcgcc

SEQ ID NO: 32710 - DNA, 24 bp, synthetic construct
  misc_feature 1..24: note = Probe
  source 1..24: mol_type = other DNA
ggttcagtggtagaattctcgcct

SEQ ID NO: 32711 - DNA, 27 bp, synthetic construct
  misc_feature 1..27: note = Probe
  source 1..27: mol_type = other DNA
ggttcagtggtagaattctcgcctgcc

SEQ ID NO: 32712 - DNA, 29 bp, synthetic construct
  misc_feature 1..29: note = Probe
  source 1..29: mol_type = other DNA
ggttcagtggtagaattctcgcctgccac

SEQ ID NO: 32713 - DNA, 15 bp, synthetic construct
  misc_feature 1..15: note = Probe
  source 1..15: mol_type = other DNA
ggttccatagtgtag

SEQ ID NO: 32714 - DNA, 19 bp, synthetic construct
  misc_feature 1..19: note = Probe
  source 1..19: mol_type = other DNA
ggttccatagtgtagcggt

SEQ ID NO: 32715 - DNA, 30 bp, synthetic construct; identical to SEQ ID NO: 8720
  misc_feature 1..30: note = Probe
  source 1..30: mol_type = other DNA

SEQ ID NO: 32716 - DNA, 31 bp, synthetic construct; identical to SEQ ID NO: 1432
  misc_feature 1..31: note = Probe
  source 1..31: mol_type = other DNA

SEQ ID NO: 32717 - DNA, 19 bp, synthetic construct
  misc_feature 1..19: note = Probe
  source 1..19: mol_type = other DNA
ggttccatagtgtagtggt

SEQ ID NO: 32718 - DNA, 23 bp, synthetic construct
  misc_feature 1..23: note = Probe
  source 1..23: mol_type = other DNA
ggttccatagtgtagtggttatc

SEQ ID NO: 32719 - DNA, 36 bp, synthetic construct; identical to SEQ ID NO: 6816
  misc_feature 1..36: note = Probe
  source 1..36: mol_type = other DNA

SEQ ID NO: 32720 - DNA, 34 bp, synthetic construct; identical to SEQ ID NO: 1455
  misc_feature 1..34: note = Probe
  source 1..34: mol_type = other DNA

SEQ ID NO: 32721 - DNA, 35 bp, synthetic construct; identical to SEQ ID NO: 6817
  misc_feature 1..35: note = Probe
  source 1..35: mol_type = other DNA

SEQ ID NO: 32722 - DNA, 43 bp, synthetic construct
  misc_feature 1..43: note = Probe
  source 1..43: mol_type = other DNA
ggttccatagtgtagtggttatcacgtctgctttacacgcaga

SEQ ID NO: 32723 - DNA, 36 bp, synthetic construct
  misc_feature 1..36: note = Probe
  source 1..36: mol_type = other DNA
ggttccatggtgtaatggtaagcactctggactctg

SEQ ID NO: 32724 - DNA, 50 bp, synthetic construct
  misc_feature 1..50: note = Probe
  source 1..50: mol_type = other DNA
ggttccatggtgtaatggtaagcactctggactctgaatccagcgatccg

SEQ ID NO: 32725 - DNA, 36 bp, synthetic construct
  misc_feature 1..36: note = Probe
  source 1..36: mol_type = other DNA
ggttccatggtgtaatggtgagcactctggactctg

SEQ ID NO: 32726 - DNA, 50 bp, synthetic construct
  misc_feature 1..50: note = Probe
  source 1..50: mol_type = other DNA
ggttccatggtgtaatggtgagcactctggactctgaatccagcgatccg

SEQ ID NO: 32727 - DNA, 27 bp, synthetic construct
  misc_feature 1..27: note = Probe
  source 1..27: mol_type = other DNA
ggttccatggtgtaatggttagcactc

SEQ ID NO: 32728 - DNA, 29 bp, synthetic construct
  misc_feature 1..29: note = Probe
  source 1..29: mol_type = other DNA
ggttccatggtgtaatggttagcactctg

SEQ ID NO: 32729 - DNA, 31 bp, synthetic construct; identical to SEQ ID NO: 22321
  misc_feature 1..31: note = Probe
  source 1..31: mol_type = other DNA

SEQ ID NO: 32730 - DNA, 35 bp, synthetic construct; identical to SEQ ID NO: 6828
  misc_feature 1..35: note = Probe
  source 1..35: mol_type = other DNA

SEQ ID NO: 32731 - DNA, 41 bp, synthetic construct
  misc_feature 1..41: note = Probe
  source 1..41: mol_type = other DNA
ggttccatggtgtaatggttagcactctggactctgaatcc

SEQ ID NO: 32732 - DNA, 42 bp, synthetic construct
  misc_feature 1..42: note = Probe
  source 1..42: mol_type = other DNA
ggttccatggtgtaatggttagcactctggactctgaatcca

SEQ ID NO: 32733 - DNA, 15 bp, synthetic construct
  misc_feature 1..15: note = Probe
  source 1..15: mol_type = other DNA
ggttcgaaaccgggc

SEQ ID NO: 32734 - DNA, 25 bp, synthetic construct
  misc_feature 1..25: note = Probe
  source 1..25: mol_type = other DNA
ggttcgattccccgacggggaggca

SEQ ID NO: 32735 - DNA, 16 bp, synthetic construct
  misc_feature 1..16: note = Probe
  source 1..16: mol_type = other DNA
ggttcgattcccggcc

SEQ ID NO: 32736 - DNA, 16 bp, synthetic construct
  misc_feature 1..16: note = Probe
  source 1..16: mol_type = other DNA
ggttcgattcccggtc

SEQ ID NO: 32737 - DNA, 24 bp, synthetic construct
  misc_feature 1..24: note = Probe
  source 1..24: mol_type = other DNA
ggttcgattcccggtcagggaagc

SEQ ID NO: 32738 - DNA, 24 bp, synthetic construct
  misc_feature 1..24: note = Probe
  source 1..24: mol_type = other DNA
ggttcgattcccggtcatggaacc

SEQ ID NO: 32739 - DNA, 25 bp, synthetic construct
  misc_feature 1..25: note = Probe
  source 1..25: mol_type = other DNA
ggttcgattcccggtcatggaacca

SEQ ID NO: 32740 - DNA, 36 bp, synthetic construct
  misc_feature 1..36: note = Probe
  source 1..36: mol_type = other DNA
ggttcgattccggctcgaaggacttcgtctgtaatt

SEQ ID NO: 32741 - DNA, 24 bp, synthetic construct
  misc_feature 1..24: note = Probe
  source 1..24: mol_type = other DNA
ggttcgattcctggtcagggaacc

SEQ ID NO: 32742 - DNA, 25 bp, synthetic construct
  misc_feature 1..25: note = Probe
  source 1..25: mol_type = other DNA
ggttcgattcctggtcagggaacca

SEQ ID NO: 32743 - DNA, 15 bp, synthetic construct
  misc_feature 1..15: note = Probe
  source 1..15: mol_type = other DNA
ggttgctgtcttttt

SEQ ID NO: 32744 - DNA, 36 bp, synthetic construct
  misc_feature 1..36: note = Probe
  source 1..36: mol_type = other DNA
ggttggtcccatggtgtaatggttagcactctggac

SEQ ID NO: 32745 - DNA, 20 bp, synthetic construct
  misc_feature 1..20: note = Probe
  source 1..20: mol_type = other DNA
ggttgtagtccgtgcgagaa

SEQ ID NO: 32746 - DNA, 21 bp, synthetic construct
  misc_feature 1..21: note = Probe
  source 1..21: mol_type = other DNA
ggttgtagtccgtgcgagaat

SEQ ID NO: 32747 - DNA, 22 bp, synthetic construct
  misc_feature 1..22: note = Probe
  source 1..22: mol_type = other DNA
ggttgtagtccgtgcgagaata

SEQ ID NO: 32748 - DNA, 19 bp, synthetic construct
  misc_feature 1..19: note = Probe
  source 1..19: mol_type = other DNA
ggtttaagtcccattggtc

SEQ ID NO: 32749 - DNA, 34 bp, synthetic construct
  misc_feature 1..34: note = Probe
  source 1..34: mol_type = other DNA
ggtttccgtagtgtagcggttatcacattcgcct

SEQ ID NO: 32750 - DNA, 34 bp, synthetic construct
  misc_feature 1..34: note = Probe
  source 1..34: mol_type = other DNA
ggtttccgtagtgtagtggtcatcacgttcgcct

SEQ ID NO: 32751 - DNA, 33 bp, synthetic construct
  misc_feature 1..33: note = Probe
  source 1..33: mol_type = other DNA
ggtttccgtagtgtagtggttatcacgttcgcc

SEQ ID NO: 32752 - DNA, 34 bp, synthetic construct; identical to SEQ ID NO: 22371
  misc_feature 1..34: note = Probe
  source 1..34: mol_type = other DNA

SEQ ID NO: 32753 - DNA, 36 bp, synthetic construct
  misc_feature 1..36: note = Probe
  source 1..36: mol_type = other DNA
ggtttccgtagtgtagtggttatcacgttcgcctaa

SEQ ID NO: 32754 - DNA, 37 bp, synthetic construct
  misc_feature 1..37: note = Probe
  source 1..37: mol_type = other DNA
ggtttccgtagtgtagtggttatcacgttcgcctaac

SEQ ID NO: 32755 - DNA, 35 bp, synthetic construct
  misc_feature 1..35: note = Probe
  source 1..35: mol_type = other DNA
ggtttccgtagtgtagtggttatcacgttcgcctc

SEQ ID NO: 32756 - DNA, 36 bp, synthetic construct; identical to SEQ ID NO: 22372
  misc_feature 1..36: note = Probe
  source 1..36: mol_type = other DNA

SEQ ID NO: 32757 - DNA, 37 bp, synthetic construct
  misc_feature 1..37: note = Probe
  source 1..37: mol_type = other DNA
ggtttccgtagtgtagtggttatcacgttcgcctcac

SEQ ID NO: 32758 - DNA, 34 bp, synthetic construct
  misc_feature 1..34: note = Probe
  source 1..34: mol_type = other DNA
ggtttccgtggtgtagtggttatcacattcgcct

SEQ ID NO: 32759 - DNA, 15 bp, synthetic construct
  misc_feature 1..15: note = Probe
  source 1..15: mol_type = other DNA
ggtttggtcctagcc

SEQ ID NO: 32760 - DNA, 16 bp, synthetic construct
  misc_feature 1..16: note = Probe
  source 1..16: mol_type = other DNA
ggtttggtcctagcct

SEQ ID NO: 32761 - DNA, 26 bp, synthetic construct
  misc_feature 1..26: note = Probe
  source 1..26: mol_type = other DNA
ggtttggtcctagcctttctattagc

SEQ ID NO: 32762 - DNA, 20 bp, synthetic construct
  misc_feature 1..20: note = Probe
  source 1..20: mol_type = other DNA
ggtttttcatatcattggtc

SEQ ID NO: 32763 - DNA, 21 bp, synthetic construct
  misc_feature 1..21: note = Probe
  source 1..21: mol_type = other DNA
ggtttttcatatcattggtcg

SEQ ID NO: 32764 - DNA, 26 bp, synthetic construct
  misc_feature 1..26: note = Probe
  source 1..26: mol_type = other DNA
ggtttttcatatcattggtcgtggtt

SEQ ID NO: 32765 - DNA, 27 bp, synthetic construct
  misc_feature 1..27: note = Probe
  source 1..27: mol_type = other DNA
ggtttttcatatcattggtcgtggttg

SEQ ID NO: 32766 - DNA, 29 bp, synthetic construct
  misc_feature 1..29: note = Probe
  source 1..29: mol_type = other DNA
ggtttttcatatcattggtcgtggttgta

SEQ ID NO: 32767 - DNA, 30 bp, synthetic construct; identical to SEQ ID NO: 11147
  misc_feature 1..30: note = Probe
  source 1..30: mol_type = other DNA

SEQ ID NO: 32768 - DNA, 31 bp, synthetic construct
  misc_feature 1..31: note = Probe
  source 1..31: mol_type = other DNA
ggtttttcatatcattggtcgtggttgtagt

SEQ ID NO: 32769 - DNA, 34 bp, synthetic construct
  misc_feature 1..34: note = Probe
  source 1..34: mol_type = other DNA
ggtttttcatatcattggtcgtggttgtagtccg

SEQ ID NO: 32770 - DNA, 35 bp, synthetic construct
  misc_feature 1..35: note = Probe
  source 1..35: mol_type = other DNA
ggtttttcatatcattggtcgtggttgtagtccgt

SEQ ID NO: 32771 - DNA, 37 bp, synthetic construct
  misc_feature 1..37: note = Probe
  source 1..37: mol_type = other DNA
ggtttttcatatcattggtcgtggttgtagtccgtgc

SEQ ID NO: 32772 - DNA, 38 bp, synthetic construct; identical to SEQ ID NO: 6871
  misc_feature 1..38: note = Probe
  source 1..38: mol_type = other DNA

SEQ ID NO: 32773 - DNA, 39 bp, synthetic construct
  misc_feature 1..39: note = Probe
  source 1..39: mol_type = other DNA
ggtttttcatatcattggtcgtggttgtagtccgtgcga

SEQ ID NO: 32774 - DNA, 40 bp, synthetic construct
  misc_feature 1..40: note = Probe
  source 1..40: mol_type = other DNA
ggtttttcatatcattggtcgtggttgtagtccgtgcgag

SEQ ID NO: 32775 - DNA, 43 bp, synthetic construct
  misc_feature 1..43: note = Probe
  source 1..43: mol_type = other DNA
ggtttttcatatcattggtcgtggttgtagtccgtgcgagaat

SEQ ID NO: 32776 - DNA, 44 bp, synthetic construct
  misc_feature 1..44: note = Probe
  source 1..44: mol_type = other DNA
ggtttttcatatcattggtcgtggttgtagtccgtgcgagaata

SEQ ID NO: 32777 - DNA, 46 bp, synthetic construct
  misc_feature 1..46: note = Probe
  source 1..46: mol_type = other DNA
ggtttttcatatcattggtcgtggttgtagtccgtgcgagaataat

SEQ ID NO: 32778 - DNA, 17 bp, synthetic construct
  misc_feature 1..17: note = Probe
  source 1..17: mol_type = other DNA
gtaaaccaggggtcgcg

SEQ ID NO: 32779 - DNA, 18 bp, synthetic construct
  misc_feature 1..18: note = Probe
  source 1..18: mol_type = other DNA
gtaaaccaggggtcgcga

SEQ ID NO: 32780 - DNA, 19 bp, synthetic construct
  misc_feature 1..19: note = Probe
  source 1..19: mol_type = other DNA
gtaaaccaggggtcgcgag

SEQ ID NO: 32781 - DNA, 21 bp, synthetic construct
  misc_feature 1..21: note = Probe
  source 1..21: mol_type = other DNA
gtaaaccaggggtcgcgagtt

SEQ ID NO: 32782 - DNA, 19 bp, synthetic construct
  misc_feature 1..19: note = Probe
  source 1..19: mol_type = other DNA
gtaaaccggagatgaaaac

SEQ ID NO: 32783 - DNA, 20 bp, synthetic construct
  misc_feature 1..20: note = Probe
  source 1..20: mol_type = other DNA
gtaaaccggagatgaaaacc

SEQ ID NO: 32784 - DNA, 21 bp, synthetic construct
  misc_feature 1..21: note = Probe
  source 1..21: mol_type = other DNA
gtaaaccggagatgaaaacct

SEQ ID NO: 32785 - DNA, 16 bp, synthetic construct
  misc_feature 1..16: note = Probe
  source 1..16: mol_type = other DNA
gtaaagaggagttgtt

SEQ ID NO: 32786 - DNA, 16 bp, synthetic construct
  misc_feature 1..16: note = Probe
  source 1..16: mol_type = other DNA
gtaaataataggagct

SEQ ID NO: 32787 - DNA, 17 bp, synthetic construct
  misc_feature 1..17: note = Probe
  source 1..17: mol_type = other DNA
gtaaataataggagctt

SEQ ID NO: 32788 - DNA, 22 bp, synthetic construct
  misc_feature 1..22: note = Probe
  source 1..22: mol_type = other DNA
gtaaataataggagcttaaacc

SEQ ID NO: 32789 - DNA, 23 bp, synthetic construct
  misc_feature 1..23: note = Probe
  source 1..23: mol_type = other DNA
gtaaataataggagcttaaaccc

SEQ ID NO: 32790 - DNA, 36 bp, synthetic construct
  misc_feature 1..36: note = Probe
  source 1..36: mol_type = other DNA
gtaaatatagtttaaccaaaacatcagattgtgaat

SEQ ID NO: 32791 - DNA, 50 bp, synthetic construct; identical to SEQ ID NO: 6887
  misc_feature 1..50: note = Probe
  source 1..50: mol_type = other DNA

SEQ ID NO: 32792 - DNA, 19 bp, synthetic construct
  misc_feature 1..19: note = Probe
  source 1..19: mol_type = other DNA
gtaagcaccttgcctgcgg

SEQ ID NO: 32793 - DNA, 20 bp, synthetic construct
  misc_feature 1..20: note = Probe
  source 1..20: mol_type = other DNA
gtaagcaccttgcctgcggg

SEQ ID NO: 32794 - DNA, 21 bp, synthetic construct
  misc_feature 1..21: note = Probe
  source 1..21: mol_type = other DNA
gtaagcaccttgcctgcgggc

SEQ ID NO: 32795 - DNA, 22 bp, synthetic construct
  misc_feature 1..22: note = Probe
  source 1..22: mol_type = other DNA
gtaagcaccttgcctgcgggct

SEQ ID NO: 32796 - DNA, 23 bp, synthetic construct
  misc_feature 1..23: note = Probe
  source 1..23: mol_type = other DNA
gtaagcaccttgcctgcgggctt

SEQ ID NO: 32797 - DNA, 20 bp, synthetic construct
  misc_feature 1..20: note = Probe
  source 1..20: mol_type = other DNA
gtaagccgttttaaaaactg

SEQ ID NO: 32798 - DNA, 21 bp, synthetic construct
  misc_feature 1..21: note = Probe
  source 1..21: mol_type = other DNA
gtaagccgttttaaaaactgt

SEQ ID NO: 32799 - DNA, 22 bp, synthetic construct
  misc_feature 1..22: note = Probe
  source 1..22: mol_type = other DNA
gtaagccgttttaaaaactgtt

SEQ ID NO: 32800 - DNA, 16 bp, synthetic construct
  misc_feature 1..16: note = Probe
  source 1..16: mol_type = other DNA
gtaaggcggctgtttt

SEQ ID NO: 32801 - DNA, 17 bp, synthetic construct
  misc_feature 1..17: note = Probe
  source 1..17: mol_type = other DNA
gtaaggcggctgttttt

SEQ ID NO: 32802 - DNA, 28 bp, synthetic construct
  misc_feature 1..28: note = Probe
  source 1..28: mol_type = other DNA
gtaaggtcagctaaataagctatcgggc

SEQ ID NO: 32803 - DNA, 29 bp, synthetic construct
  misc_feature 1..29: note = Probe
  source 1..29: mol_type = other DNA
gtaaggtcagctaaataagctatcgggcc

SEQ ID NO: 32804 - DNA, 30 bp, synthetic construct; identical to SEQ ID NO: 6891
  misc_feature 1..30: note = Probe
  source 1..30: mol_type = other DNA

SEQ ID NO: 32805 - DNA, 31 bp, synthetic construct; identical to SEQ ID NO: 6892
  misc_feature 1..31: note = Probe
  source 1..31: mol_type = other DNA

SEQ ID NO: 32806 - DNA, 33 bp, synthetic construct; identical to SEQ ID NO: 6894
  misc_feature 1..33: note = Probe
  source 1..33: mol_type = other DNA

SEQ ID NO: 32807 - DNA, 36 bp, synthetic construct; identical to SEQ ID NO: 6897
  misc_feature 1..36: note = Probe
  source 1..36: mol_type = other DNA

SEQ ID NO: 32808 - DNA, 36 bp, synthetic construct
  misc_feature 1..36: note = Probe
  source 1..36: mol_type = other DNA
gtaatcgcataaaacttaaaactttacagtcagagg

SEQ ID NO: 32809 - DNA, 16 bp, synthetic construct
  misc_feature 1..16: note = Probe
  source 1..16: mol_type = other DNA
gtaatggttagcactc

SEQ ID NO: 32810 - DNA, 19 bp, synthetic construct
  misc_feature 1..19: note = Probe
  source 1..19: mol_type = other DNA
gtaatggttagcactctgg

SEQ ID NO: 32811 - DNA, 20 bp, synthetic construct
  misc_feature 1..20: note = Probe
  source 1..20: mol_type = other DNA
gtaatggttagcactctgga

SEQ ID NO: 32812 - DNA, 22 bp, synthetic construct
  misc_feature 1..22: note = Probe
  source 1..22: mol_type = other DNA
gtaatggttagcactctggact

SEQ ID NO: 32813 - DNA, 23 bp, synthetic construct
  misc_feature 1..23: note = Probe
  source 1..23: mol_type = other DNA
gtaatggttagcactctggactc

SEQ ID NO: 32814 - DNA, 27 bp, synthetic construct
  misc_feature 1..27: note = Probe
  source 1..27: mol_type = other DNA
gtaatggttagcactctggactctgaa

SEQ ID NO: 32815 - DNA, 28 bp, synthetic construct
  misc_feature 1..28: note = Probe
  source 1..28: mol_type = other DNA
gtaatggttagcactctggactctgaat

SEQ ID NO: 32816 - DNA, 29 bp, synthetic construct
  misc_feature 1..29: note = Probe
  source 1..29: mol_type = other DNA
gtaatggttagcactctggactctgaatc

SEQ ID NO: 32817 - DNA, 41 bp, synthetic construct
  misc_feature 1..41: note = Probe
  source 1..41: mol_type = other DNA
gtaatggttagcactctggactctgaatccagcgatccgag

SEQ ID NO: 32818 - DNA, 43 bp, synthetic construct
  misc_feature 1..43: note = Probe
  source 1..43: mol_type = other DNA
gtaatggttagcactctggactctgaatccagcgatccgagtt

SEQ ID NO: 32819 - DNA, 36 bp, synthetic construct
  misc_feature 1..36: note = Probe
  source 1..36: mol_type = other DNA
gtaatggttagcactctggactttgaatccagcgat

SEQ ID NO: 32820 - DNA, 15 bp, synthetic construct
  misc_feature 1..15: note = Probe
  source 1..15: mol_type = other DNA
gtaccgttaacttcc

SEQ ID NO: 32821 - DNA, 36 bp, synthetic construct
  misc_feature 1..36: note = Probe
  source 1..36: mol_type = other DNA
gtacctgtctctgtggcgcaatcggttagcgcgttc

SEQ ID NO: 32822 - DNA, 27 bp, synthetic construct
  misc_feature 1..27: note = Probe
  source 1..27: mol_type = other DNA
gtacgcgaggcattggtggttcagtgg

SEQ ID NO: 32823 - DNA, 21 bp, synthetic construct
  misc_feature 1..21: note = Probe
  source 1..21: mol_type = other DNA
gtacgggccaggattgaaact

SEQ ID NO: 32824 - DNA, 22 bp, synthetic construct
  misc_feature 1..22: note = Probe
  source 1..22: mol_type = other DNA
gtacgggccaggattgaaactt

SEQ ID NO: 32825 - DNA, 23 bp, synthetic construct
  misc_feature 1..23: note = Probe
  source 1..23: mol_type = other DNA
gtacgggccaggattgaaacttt

SEQ ID NO: 32826 - DNA, 24 bp, synthetic construct
  misc_feature 1..24: note = Probe
  source 1..24: mol_type = other DNA
gtacgggccaggattgaaactttt

SEQ ID NO: 32827 - DNA, 22 bp, synthetic construct
  misc_feature 1..22: note = Probe
  source 1..22: mol_type = other DNA
gtactggaaagtgcacttggac

SEQ ID NO: 32828 - DNA, 23 bp, synthetic construct
  misc_feature 1..23: note = Probe
  source 1..23: mol_type = other DNA
gtactggaaagtgcacttggacg

SEQ ID NO: 32829 - DNA, 27 bp, synthetic construct
  misc_feature 1..27: note = Probe
  source 1..27: mol_type = other DNA
gtactggaaagtgcacttggacgaacc

SEQ ID NO: 32830 - DNA, 15 bp, synthetic construct
  misc_feature 1..15: note = Probe
  source 1..15: mol_type = other DNA
gtagaattctcgcct

SEQ ID NO: 32831 - DNA, 17 bp, synthetic construct
  misc_feature 1..17: note = Probe
  source 1..17: mol_type = other DNA
gtagaattctcgcctcc

SEQ ID NO: 32832 - DNA, 18 bp, synthetic construct
  misc_feature 1..18: note = Probe
  source 1..18: mol_type = other DNA
gtagaattctcgcctccc

SEQ ID NO: 32833 - DNA, 33 bp, synthetic construct
  misc_feature 1..33: note = Probe
  source 1..33: mol_type = other DNA
gtagaattctcgcctcccacgcgggagacccgg

SEQ ID NO: 32834 - DNA, 34 bp, synthetic construct
  misc_feature 1..34: note = Probe
  source 1..34: mol_type = other DNA
gtagaattctcgcctcccacgcgggagacccggg

SEQ ID NO: 32835 - DNA, 35 bp, synthetic construct
  misc_feature 1..35: note = Probe
  source 1..35: mol_type = other DNA
gtagaattctcgcctcccacgcgggagacccgggt

SEQ ID NO: 32836 - DNA, 16 bp, synthetic construct
  misc_feature 1..16: note = Probe
  source 1..16: mol_type = other DNA
gtagaattctcgcctg

SEQ ID NO: 32837 - DNA, 17 bp, synthetic construct
  misc_feature 1..17: note = Probe
  source 1..17: mol_type = other DNA
gtagaattctcgcctgc

SEQ ID NO: 32838 - DNA, 18 bp, synthetic construct
  misc_feature 1..18: note = Probe
  source 1..18: mol_type = other DNA
gtagaattctcgcctgcc

SEQ ID NO: 32839 - DNA, 19 bp, synthetic construct
  misc_feature 1..19: note = Probe
  source 1..19: mol_type = other DNA
gtagaattctcgcctgcca

SEQ ID NO: 32840 - DNA, 20 bp, synthetic construct
  misc_feature 1..20: note = Probe
  source 1..20: mol_type = other DNA
gtagaattctcgcctgccac

SEQ ID NO: 32841 - DNA, 21 bp, synthetic construct
  misc_feature 1..21: note = Probe
  source 1..21: mol_type = other DNA
gtagaattctcgcctgccacg

SEQ ID NO: 32842 - DNA, 22 bp, synthetic construct
  misc_feature 1..22: note = Probe
  source 1..22: mol_type = other DNA
gtagaattctcgcctgccacgc

SEQ ID NO: 32843 - DNA, 24 bp, synthetic construct
  misc_feature 1..24: note = Probe
  source 1..24: mol_type = other DNA
gtagaattctcgcctgccacgcgg

SEQ ID NO: 32844 - DNA, 25 bp, synthetic construct
  misc_feature 1..25: note = Probe
  source 1..25: mol_type = other DNA
gtagaattctcgcctgccacgcggg

SEQ ID NO: 32845 - DNA, 26 bp, synthetic construct
  misc_feature 1..26: note = Probe
  source 1..26: mol_type = other DNA
gtagaattctcgcctgccacgcggga

SEQ ID NO: 32846 - DNA, 30 bp, synthetic construct; identical to SEQ ID NO: 11172
  misc_feature 1..30: note = Probe
  source 1..30: mol_type = other DNA

SEQ ID NO: 32847 - DNA, 32 bp, synthetic construct
  misc_feature 1..32: note = Probe
  source 1..32: mol_type = other DNA
gtagaattctcgcctgccacgcgggaggcccg

SEQ ID NO: 32848 - DNA, 37 bp, synthetic construct
  misc_feature 1..37: note = Probe
  source 1..37: mol_type = other DNA
gtagaattctcgcctgccacgcgggaggcccgggttt

SEQ ID NO: 32849 - DNA, 32 bp, synthetic construct
  misc_feature 1..32: note = Probe
  source 1..32: mol_type = other DNA
gtagagagcctggatagctcagtcggtagagc

SEQ ID NO: 32850 - DNA, 33 bp, synthetic construct
  misc_feature 1..33: note = Probe
  source 1..33: mol_type = other DNA
gtagagagcctggatagctcagtcggtagagca

SEQ ID NO: 32851 - DNA, 35 bp, synthetic construct
  misc_feature 1..35: note = Probe
  source 1..35: mol_type = other DNA
gtagagagcctggatagctcagtcggtagagcatc

SEQ ID NO: 32852 - DNA, 36 bp, synthetic construct
  misc_feature 1..36: note = Probe
  source 1..36: mol_type = other DNA
gtagagagcctggatagctcagtcggtagagcatca

SEQ ID NO: 32853 - DNA, 39 bp, synthetic construct
  misc_feature 1..39: note = Probe
  source 1..39: mol_type = other DNA
gtagagagcctggatagctcagtcggtagagcatcagac

SEQ ID NO: 32854 - DNA, 40 bp, synthetic construct
  misc_feature 1..40: note = Probe
  source 1..40: mol_type = other DNA
gtagagagcctggatagctcagtcggtagagcatcagact

SEQ ID NO: 32855 - DNA, 15 bp, synthetic construct
  misc_feature 1..15: note = Probe
  source 1..15: mol_type = other DNA
gtagagcatcagact

SEQ ID NO: 32856 - DNA, 16 bp, synthetic construct
  misc_feature 1..16: note = Probe
  source 1..16: mol_type = other DNA
gtagagcatgagaccc

SEQ ID NO: 32857 - DNA, 15 bp, synthetic construct
  misc_feature 1..15: note = Probe
  source 1..15: mol_type = other DNA
gtagagcatgagact

SEQ ID NO: 32858 - DNA, 16 bp, synthetic construct
  misc_feature 1..16: note = Probe
  source 1..16: mol_type = other DNA
gtagagcatgagactc

SEQ ID NO: 32859 - DNA, 36 bp, synthetic construct; identical to SEQ ID NO: 22443
  misc_feature 1..36: note = Probe
  source 1..36: mol_type = other DNA

SEQ ID NO: 32860 - DNA, 15 bp, synthetic construct
  misc_feature 1..15: note = Probe
  source 1..15: mol_type = other DNA
gtagagcatgggact

SEQ ID NO: 32861 - DNA, 16 bp, synthetic construct
  misc_feature 1..16: note = Probe
  source 1..16: mol_type = other DNA
gtagagcatgggactc

SEQ ID NO: 32862 - DNA, 36 bp, synthetic construct; identical to SEQ ID NO: 22446
  misc_feature 1..36: note = Probe
  source 1..36: mol_type = other DNA

SEQ ID NO: 32863 - DNA, 15 bp, synthetic construct
  misc_feature 1..15: note = Probe
  source 1..15: mol_type = other DNA
gtagagcatttgact

SEQ ID NO: 32864 - DNA, 17 bp, synthetic construct
  misc_feature 1..17: note = Probe
  source 1..17: mol_type = other DNA
gtagagcatttgactgc

SEQ ID NO: 32865 - DNA, 36 bp, synthetic construct
  misc_feature 1..36: note = Probe
  source 1..36: mol_type = other DNA
gtagaggccttggtggtgcagtggtagaattctcgc

SEQ ID NO: 32866 - DNA, 38 bp, synthetic construct
  misc_feature 1..38: note = Probe
  source 1..38: mol_type = other DNA
gtagaggccttggtggtgcagtggtagaattctcgcct

SEQ ID NO: 32867 - DNA, 44 bp, synthetic construct
  misc_feature 1..44: note = Probe
  source 1..44: mol_type = other DNA
gtagaggccttggtggtgcagtggtagaattctcgcctcccacg

SEQ ID NO: 32868 - DNA, 24 bp, synthetic construct
  misc_feature 1..24: note = Probe
  source 1..24: mol_type = other DNA
gtagaggttccatagtgtagtggt

SEQ ID NO: 32869 - DNA, 36 bp, synthetic construct; identical to SEQ ID NO: 22452
  misc_feature 1..36: note = Probe
  source 1..36: mol_type = other DNA

SEQ ID NO: 32870 - DNA, 36 bp, synthetic construct
  misc_feature 1..36: note = Probe
  source 1..36: mol_type = other DNA
gtagcattggtggttcagtggtagaattctcgcctg

SEQ ID NO: 32871 - DNA, 36 bp, synthetic construct
  misc_feature 1..36: note = Probe
  source 1..36: mol_type = other DNA
gtagcggttatcacattcgcctcacacgcgaaaggt

SEQ ID NO: 32872 - DNA, 36 bp, synthetic construct
  misc_feature 1..36: note = Probe
  source 1..36: mol_type = other DNA
gtaggacgaggtggccgagtggttaaggcgatggac

SEQ ID NO: 32873 - DNA, 18 bp, synthetic construct
  misc_feature 1..18: note = Probe
  source 1..18: mol_type = other DNA
gtaggtagcgcatcagtc

SEQ ID NO: 32874 - DNA, 19 bp, synthetic construct
  misc_feature 1..19: note = Probe
  source 1..19: mol_type = other DNA
gtaggtagcgcatcagtct

SEQ ID NO: 32875 - DNA, 18 bp, synthetic construct
  misc_feature 1..18: note = Probe
  source 1..18: mol_type = other DNA
gtaggtagcgcgtcagtc

SEQ ID NO: 32876 - DNA, 19 bp, synthetic construct
  misc_feature 1..19: note = Probe
  source 1..19: mol_type = other DNA
gtaggtagcgcgtcagtct

SEQ ID NO: 32877 - DNA, 36 bp, synthetic construct
  misc_feature 1..36: note = Probe
  source 1..36: mol_type = other DNA
gtaggtggggatgtagctcagtggtagagcgcatgc

SEQ ID NO: 32878 - DNA, 18 bp, synthetic construct
  misc_feature 1..18: note = Probe
  source 1..18: mol_type = other DNA
gtagtccgtgcgagaata

SEQ ID NO: 32879 - DNA, 15 bp, synthetic construct
  misc_feature 1..15: note = Probe
  source 1..15: mol_type = other DNA
gtagtcgtggccgag

SEQ ID NO: 32880 - DNA, 17 bp, synthetic construct
  misc_feature 1..17: note = Probe
  source 1..17: mol_type = other DNA
gtagtcgtggccgagtg

SEQ ID NO: 32881 - DNA, 20 bp, synthetic construct
  misc_feature 1..20: note = Probe
  source 1..20: mol_type = other DNA
gtagtcgtggccgagtggtt

SEQ ID NO: 32882 - DNA, 22 bp, synthetic construct
  misc_feature 1..22: note = Probe
  source 1..22: mol_type = other DNA
gtagtcgtggccgagtggttaa

SEQ ID NO: 32883 - DNA, 25 bp, synthetic construct
  misc_feature 1..25: note = Probe
  source 1..25: mol_type = other DNA
gtagtcgtggccgagtggttaaggc

SEQ ID NO: 32884 - DNA, 32 bp, synthetic construct
  misc_feature 1..32: note = Probe
  source 1..32: mol_type = other DNA
gtagtcgtggccgagtggttaaggcgatggac

SEQ ID NO: 32885 - DNA, 32 bp, synthetic construct
  misc_feature 1..32: note = Probe
  source 1..32: mol_type = other DNA
gtagtcgtggccgagtggttaaggtgatggac

SEQ ID NO: 32886 - DNA, 26 bp, synthetic construct
  misc_feature 1..26: note = Probe
  source 1..26: mol_type = other DNA
gtagtgtagtggttatcacgttcgcc

SEQ ID NO: 32887 - DNA, 36 bp, synthetic construct
  misc_feature 1..36: note = Probe
  source 1..36: mol_type = other DNA
gtagttgaaatacaacgatggtttttcatatcattg

SEQ ID NO: 32888 - DNA, 21 bp, synthetic construct
  misc_feature 1..21: note = Probe
  source 1..21: mol_type = other DNA
gtataaatagtaccgttaact

SEQ ID NO: 32889 - DNA, 36 bp, synthetic construct
  misc_feature 1..36: note = Probe
  source 1..36: mol_type = other DNA
gtatagagcagagtggcgcagcggaagcgtgctggg

SEQ ID NO: 32890 - DNA, 36 bp, synthetic construct
  misc_feature 1..36: note = Probe
  source 1..36: mol_type = other DNA
gtatagtggtgagcatagctgccttccaagcagttg

SEQ ID NO: 32891 - DNA, 21 bp, synthetic construct
  misc_feature 1..21: note = Probe
  source 1..21: mol_type = other DNA
gtatagtggttagtactctgc

SEQ ID NO: 32892 - DNA, 22 bp, synthetic construct
  misc_feature 1..22: note = Probe
  source 1..22: mol_type = other DNA
gtatagtggttagtactctgcg

SEQ ID NO: 32893 - DNA, 24 bp, synthetic construct
  misc_feature 1..24: note = Probe
  source 1..24: mol_type = other DNA
gtatagtggttagtactctgcgtt

SEQ ID NO: 32894 - DNA, 34 bp, synthetic construct
  misc_feature 1..34: note = Probe
  source 1..34: mol_type = other DNA
gtatatagtttaaacaaaacgaatgatttcgact

SEQ ID NO: 32895 - DNA, 36 bp, synthetic construct
  misc_feature 1..36: note = Probe
  source 1..36: mol_type = other DNA
gtatatagtttaaacaaaacgaatgatttcgactca

SEQ ID NO: 32896 - DNA, 15 bp, synthetic construct
  misc_feature 1..15: note = Probe
  source 1..15: mol_type = other DNA
gtatccccgcctgtc

SEQ ID NO: 32897 - DNA, 16 bp, synthetic construct
  misc_feature 1..16: note = Probe
  source 1..16: mol_type = other DNA
gtatgaggccccgggt

SEQ ID NO: 32898 - DNA, 36 bp, synthetic construct
  misc_feature 1..36: note = Probe
  source 1..36: mol_type = other DNA
gtatgaggccccgggttcaatccccggcatctccag

SEQ ID NO: 32899 - DNA, 16 bp, synthetic construct
  misc_feature 1..16: note = Probe
  source 1..16: mol_type = other DNA
gtatgaggcctcgggt

SEQ ID NO: 32900 - DNA, 16 bp, synthetic construct
  misc_feature 1..16: note = Probe
  source 1..16: mol_type = other DNA
gtatgaggtcccgggt

SEQ ID NO: 32901 - DNA, 15 bp, synthetic construct
  misc_feature 1..15: note = Probe
  source 1..15: mol_type = other DNA
gtatgattctcgctt

SEQ ID NO: 32902 - DNA, 35 bp, synthetic construct; identical to SEQ ID NO: 22517
  misc_feature 1..35: note = Probe
  source 1..35: mol_type = other DNA

SEQ ID NO: 32903 - DNA, 36 bp, synthetic construct; identical to SEQ ID NO: 22518
  misc_feature 1..36: note = Probe
  source 1..36: mol_type = other DNA

SEQ ID NO: 32904 - DNA, 37 bp, synthetic construct; identical to SEQ ID NO: 22519
  misc_feature 1..37: note = Probe
  source 1..37: mol_type = other DNA

SEQ ID NO: 32905 - DNA, 35 bp, synthetic construct; identical to SEQ ID NO: 14018
  misc_feature 1..35: note = Probe
  source 1..35: mol_type = other DNA

SEQ ID NO: 32906 - DNA, 36 bp, synthetic construct; identical to SEQ ID NO: 14019
  misc_feature 1..36: note = Probe
  source 1..36: mol_type = other DNA

SEQ ID NO: 32907 - DNA, 37 bp, synthetic construct; identical to SEQ ID NO: 6933
  misc_feature 1..37: note = Probe
  source 1..37: mol_type = other DNA

SEQ ID NO: 32908 - DNA, 35 bp, synthetic construct
  misc_feature 1..35: note = Probe
  source 1..35: mol_type = other DNA
gtatgattctcgcttcgggtgtgagaggtcccggg

SEQ ID NO: 32909 - DNA, 36 bp, synthetic construct
  misc_feature 1..36: note = Probe
  source 1..36: mol_type = other DNA
gtatgattctcgcttcgggtgtgagaggtcccgggt

SEQ ID NO: 32910 - DNA, 18 bp, synthetic construct
  misc_feature 1..18: note = Probe
  source 1..18: mol_type = other DNA
gtatgattctcgctttgg

SEQ ID NO: 32911 - DNA, 35 bp, synthetic construct; identical to SEQ ID NO: 14021
  misc_feature 1..35: note = Probe
  source 1..35: mol_type = other DNA

SEQ ID NO: 32912 - DNA, 37 bp, synthetic construct; identical to SEQ ID NO: 14023
  misc_feature 1..37: note = Probe
  source 1..37: mol_type = other DNA

SEQ ID NO: 32913 - DNA, 36 bp, synthetic construct; identical to SEQ ID NO: 22529
  misc_feature 1..36: note = Probe
  source 1..36: mol_type = other DNA

SEQ ID NO: 32914 - DNA, 15 bp, synthetic construct
  misc_feature 1..15: note = Probe
  source 1..15: mol_type = other DNA
gtattctctgtggct

SEQ ID NO: 32915 - DNA, 16 bp, synthetic construct
  misc_feature 1..16: note = Probe
  source 1..16: mol_type = other DNA
gtattctctgtggctt

SEQ ID NO: 32916 - DNA, 17 bp, synthetic construct
  misc_feature 1..17: note = Probe
  source 1..17: mol_type = other DNA
gtattctctgtggcttt

SEQ ID NO: 32917 - DNA, 18 bp, synthetic construct
  misc_feature 1..18: note = Probe
  source 1..18: mol_type = other DNA
gtattctctgtggctttt

SEQ ID NO: 32918 - DNA, 19 bp, synthetic construct
  misc_feature 1..19: note = Probe
  source 1..19: mol_type = other DNA
gtattctctgtggctttta

SEQ ID NO: 32919 - DNA, 23 bp, synthetic construct
  misc_feature 1..23: note = Probe
  source 1..23: mol_type = other DNA
gtcaattcctcgttagtatagtg

SEQ ID NO: 32920 - DNA, 36 bp, synthetic construct
  misc_feature 1..36: note = Probe
  source 1..36: mol_type = other DNA
gtcaattcctcgttagtatagtggtgagtatccccg

SEQ ID NO: 32921 - DNA, 36 bp, synthetic construct; identical to SEQ ID NO: 14034
  misc_feature 1..36: note = Probe
  source 1..36: mol_type = other DNA

SEQ ID NO: 32922 - DNA, 23 bp, synthetic construct
  misc_feature 1..23: note = Probe
  source 1..23: mol_type = other DNA
gtcagctaaataagctatcgggc

SEQ ID NO: 32923 - DNA, 24 bp, synthetic construct
  misc_feature 1..24: note = Probe
  source 1..24: mol_type = other DNA
gtcagctaaataagctatcgggcc

SEQ ID NO: 32924 - DNA, 25 bp, synthetic construct
  misc_feature 1..25: note = Probe
  source 1..25: mol_type = other DNA
gtcagctaaataagctatcgggccc

SEQ ID NO: 32925 - DNA, 26 bp, synthetic construct
  misc_feature 1..26: note = Probe
  source 1..26: mol_type = other DNA
gtcagctaaataagctatcgggccca

SEQ ID NO: 32926 - DNA, 27 bp, synthetic construct
  misc_feature 1..27: note = Probe
  source 1..27: mol_type = other DNA
gtcagctaaataagctatcgggcccat

SEQ ID NO: 32927 - DNA, 15 bp, synthetic construct
  misc_feature 1..15: note = Probe
  source 1..15: mol_type = other DNA
gtcaggatggccgag

SEQ ID NO: 32928 - DNA, 16 bp, synthetic construct
  misc_feature 1..16: note = Probe
  source 1..16: mol_type = other DNA
gtcaggatggccgagc

SEQ ID NO: 32929 - DNA, 17 bp, synthetic construct
  misc_feature 1..17: note = Probe
  source 1..17: mol_type = other DNA
gtcaggatggccgagcg

SEQ ID NO: 32930 - DNA, 18 bp, synthetic construct
  misc_feature 1..18: note = Probe
  source 1..18: mol_type = other DNA
gtcaggatggccgagcgg

SEQ ID NO: 32931 - DNA, 19 bp, synthetic construct
  misc_feature 1..19: note = Probe
  source 1..19: mol_type = other DNA
gtcaggatggccgagcggt

SEQ ID NO: 32932 - DNA, 20 bp, synthetic construct
  misc_feature 1..20: note = Probe
  source 1..20: mol_type = other DNA
gtcaggatggccgagcggtc

SEQ ID NO: 32933 - DNA, 21 bp, synthetic construct
  misc_feature 1..21: note = Probe
  source 1..21: mol_type = other DNA
gtcaggatggccgagcggtct

SEQ ID NO: 32934 - DNA, 22 bp, synthetic construct
  misc_feature 1..22: note = Probe
  source 1..22: mol_type = other DNA
gtcaggatggccgagcggtcta

SEQ ID NO: 32935 - DNA, 23 bp, synthetic construct
  misc_feature 1..23: note = Probe
  source 1..23: mol_type = other DNA
gtcaggatggccgagcggtctaa

SEQ ID NO: 32936 - DNA, 24 bp, synthetic construct
  misc_feature 1..24: note = Probe
  source 1..24: mol_type = other DNA
gtcaggatggccgagcggtctaag

SEQ ID NO: 32937 - DNA, 25 bp, synthetic construct
  misc_feature 1..25: note = Probe
  source 1..25: mol_type = other DNA
gtcaggatggccgagcggtctaagg

SEQ ID NO: 32938 - DNA, 26 bp, synthetic construct
  misc_feature 1..26: note = Probe
  source 1..26: mol_type = other DNA
gtcaggatggccgagcggtctaaggc

SEQ ID NO: 32939 - DNA, 31 bp, synthetic construct; identical to SEQ ID NO: 6989
  misc_feature 1..31: note = Probe
  source 1..31: mol_type = other DNA

SEQ ID NO: 32940 - DNA, 35 bp, synthetic construct; identical to SEQ ID NO: 1480
  misc_feature 1..35: note = Probe
  source 1..35: mol_type = other DNA

SEQ ID NO: 32941 - DNA, 36 bp, synthetic construct; identical to SEQ ID NO: 22592
  misc_feature 1..36: note = Probe
  source 1..36: mol_type = other DNA

SEQ ID NO: 32942 - DNA, 16 bp, synthetic construct
  misc_feature 1..16: note = Probe
  source 1..16: mol_type = other DNA
gtcaggatggccgagt

SEQ ID NO: 32943 - DNA, 17 bp, synthetic construct
  misc_feature 1..17: note = Probe
  source 1..17: mol_type = other DNA
gtcaggatggccgagtg

SEQ ID NO: 32944 - DNA, 21 bp, synthetic construct
  misc_feature 1..21: note = Probe
  source 1..21: mol_type = other DNA
gtcaggatggccgagtggtct

SEQ ID NO: 32945 - DNA, 22 bp, synthetic construct
  misc_feature 1..22: note = Probe
  source 1..22: mol_type = other DNA
gtcaggatggccgagtggtcta

SEQ ID NO: 32946 - DNA, 32 bp, synthetic construct; identical to SEQ ID NO: 14044
  misc_feature 1..32: note = Probe
  source 1..32: mol_type = other DNA

SEQ ID NO: 32947 - DNA, 33 bp, synthetic construct
  misc_feature 1..33: note = Probe
  source 1..33: mol_type = other DNA
gtcaggatggccgagtggtctaaggcgccagac

SEQ ID NO: 32948 - DNA, 36 bp, synthetic construct; identical to SEQ ID NO: 22604
  misc_feature 1..36: note = Probe
  source 1..36: mol_type = other DNA

SEQ ID NO: 32949 - DNA, 24 bp, synthetic construct
  misc_feature 1..24: note = Probe
  source 1..24: mol_type = other DNA
gtcagggcttctgtagtgtagtgg

SEQ ID NO: 32950 - DNA, 36 bp, synthetic construct
  misc_feature 1..36: note = Probe
  source 1..36: mol_type = other DNA
gtcagggcttctgtagtgtagtggttatcacgttcg

SEQ ID NO: 32951 - DNA, 39 bp, synthetic construct
  misc_feature 1..39: note = Probe
  source 1..39: mol_type = other DNA
gtcagggcttctgtagtgtagtggttatcacgttcgcct

SEQ ID NO: 32952 - DNA, 36 bp, synthetic construct
  misc_feature 1..36: note = Probe
  source 1..36: mol_type = other DNA
gtcagggggtgtagctcagtggtagagcgcgtgctt

SEQ ID NO: 32953 - DNA, 15 bp, synthetic construct
  misc_feature 1..15: note = Probe
  source 1..15: mol_type = other DNA
gtcagtgcttctttt

SEQ ID NO: 32954 - DNA, 30 bp, synthetic construct; identical to SEQ ID NO: 22605
  misc_feature 1..30: note = Probe
  source 1..30: mol_type = other DNA

SEQ ID NO: 32955 - DNA, 36 bp, synthetic construct
  misc_feature 1..36: note = Probe
  source 1..36: mol_type = other DNA
gtcatctcccacatggtctagcggttaggattcctg

SEQ ID NO: 32956 - DNA, 39 bp, synthetic construct
  misc_feature 1..39: note = Probe
  source 1..39: mol_type = other DNA
gtcatctcccacatggtctagcggttaggattcctggtt

SEQ ID NO: 32957 - DNA, 40 bp, synthetic construct; identical to SEQ ID NO: 22607
  misc_feature 1..40: note = Probe
  source 1..40: mol_type = other DNA

SEQ ID NO: 32958 - DNA, 41 bp, synthetic construct
  misc_feature 1..41: note = Probe
  source 1..41: mol_type = other DNA
gtcatctcccacatggtctagcggttaggattcctggtttt

SEQ ID NO: 32959 - DNA, 36 bp, synthetic construct
  misc_feature 1..36: note = Probe
  source 1..36: mol_type = other DNA
gtccagggttcaagtccctgttcgggcgtttgtagt

SEQ ID NO: 32960 - DNA, 16 bp, synthetic construct
  misc_feature 1..16: note = Probe
  source 1..16: mol_type = other DNA
gtcccaccagagtcgc

SEQ ID NO: 32961 - DNA, 17 bp, synthetic construct
  misc_feature 1..17: note = Probe
  source 1..17: mol_type = other DNA
gtcccaccagagtcgct

SEQ ID NO: 32962 - DNA, 15 bp, synthetic construct
  misc_feature 1..15: note = Probe
  source 1..15: mol_type = other DNA
gtcccggcggagtcg

SEQ ID NO: 32963 - DNA, 33 bp, synthetic construct; identical to SEQ ID NO: 22621
  misc_feature 1..33: note = Probe
  source 1..33: mol_type = other DNA

SEQ ID NO: 32964 - DNA, 34 bp, synthetic construct; identical to SEQ ID NO: 22622
  misc_feature 1..34: note = Probe
  source 1..34: mol_type = other DNA

SEQ ID NO: 32965 - DNA, 35 bp, synthetic construct; identical to SEQ ID NO: 22623
  misc_feature 1..35: note = Probe
  source 1..35: mol_type = other DNA

SEQ ID NO: 32966 - DNA, 36 bp, synthetic construct; identical to SEQ ID NO: 22624
  misc_feature 1..36: note = Probe
  source 1..36: mol_type = other DNA

SEQ ID NO: 32967 - DNA, 36 bp, synthetic construct
  misc_feature 1..36: note = Probe
  source 1..36: mol_type = other DNA
gtccctagtagctcgccgtgatcgtatagtggttag

SEQ ID NO: 32968 - DNA, 36 bp, synthetic construct; identical to SEQ ID NO: 22631
  misc_feature 1..36: note = Probe
  source 1..36: mol_type = other DNA

SEQ ID NO: 32969 - DNA, 15 bp, synthetic construct
  misc_feature 1..15: note = Probe
  source 1..15: mol_type = other DNA
gtccctgggctgtca

SEQ ID NO: 32970 - DNA, 34 bp, synthetic construct
  misc_feature 1..34: note = Probe
  source 1..34: mol_type = other DNA
gtccctggtggtctagtggctaggattcggcgct

SEQ ID NO: 32971 - DNA, 18 bp, synthetic construct
  misc_feature 1..18: note = Probe
  source 1..18: mol_type = other DNA
gtccctgtccaggcgcta

SEQ ID NO: 32972 - DNA, 15 bp, synthetic construct
  misc_feature 1..15: note = Probe
  source 1..15: mol_type = other DNA
gtccctgttcgggcg

SEQ ID NO: 32973 - DNA, 18 bp, synthetic construct
  misc_feature 1..18: note = Probe
  source 1..18: mol_type = other DNA
gtccctgttcgggcgtct

SEQ ID NO: 32974 - DNA, 36 bp, synthetic construct
  misc_feature 1..36: note = Probe
  source 1..36: mol_type = other DNA
gtcccttcgatagctcagctggtagagcggaggact

SEQ ID NO: 32975 - DNA, 20 bp, synthetic construct
  misc_feature 1..20: note = Probe
  source 1..20: mol_type = other DNA
gtcctagcctttctattagc

SEQ ID NO: 32976 - DNA, 17 bp, synthetic construct
  misc_feature 1..17: note = Probe
  source 1..17: mol_type = other DNA
gtcctggctcgttggtc

SEQ ID NO: 32977 - DNA, 19 bp, synthetic construct
  misc_feature 1..19: note = Probe
  source 1..19: mol_type = other DNA
gtcctggctcgttggtcta

SEQ ID NO: 32978 - DNA, 35 bp, synthetic construct
  misc_feature 1..35: note = Probe
  source 1..35: mol_type = other DNA
gtcctggctcgttggtctaggggtatgattctcgc

SEQ ID NO: 32979 - DNA, 36 bp, synthetic construct; identical to SEQ ID NO: 22646
  misc_feature 1..36: note = Probe
  source 1..36: mol_type = other DNA

SEQ ID NO: 32980 - DNA, 38 bp, synthetic construct; identical to SEQ ID NO: 22647
  misc_feature 1..38: note = Probe
  source 1..38: mol_type = other DNA

SEQ ID NO: 32981 - DNA, 21 bp, synthetic construct
  misc_feature 1..21: note = Probe
  source 1..21: mol_type = other DNA
gtcctgtgtccctagtagctc

SEQ ID NO: 32982 - DNA, 27 bp, synthetic construct
  misc_feature 1..27: note = Probe
  source 1..27: mol_type = other DNA
gtccttggaaaaaggttttcatctccg

SEQ ID NO: 32983 - DNA, 17 bp, synthetic construct
  misc_feature 1..17: note = Probe
  source 1..17: mol_type = other DNA
gtccttgtagtataaac

SEQ ID NO: 32984 - DNA, 18 bp, synthetic construct
  misc_feature 1..18: note = Probe
  source 1..18: mol_type = other DNA
gtccttgtagtataaact

SEQ ID NO: 32985 - DNA, 19 bp, synthetic construct
  misc_feature 1..19: note = Probe
  source 1..19: mol_type = other DNA
gtccttgtagtataaacta

SEQ ID NO: 32986 - DNA, 26 bp, synthetic construct
  misc_feature 1..26: note = Probe
  source 1..26: mol_type = other DNA
gtccttgtagtataaactaatacacc

SEQ ID NO: 32987 - DNA, 27 bp, synthetic construct
  misc_feature 1..27: note = Probe
  source 1..27: mol_type = other DNA
gtccttgtagtataaactaatacacca

SEQ ID NO: 32988 - DNA, 28 bp, synthetic construct
  misc_feature 1..28: note = Probe
  source 1..28: mol_type = other DNA
gtccttgtagtataaactaatacaccag

SEQ ID NO: 32989 - DNA, 36 bp, synthetic construct
  misc_feature 1..36: note = Probe
  source 1..36: mol_type = other DNA
gtccttgtagtataaactaatacaccagtcttgtaa

SEQ ID NO: 32990 - DNA, 36 bp, synthetic construct
  misc_feature 1..36: note = Probe
  source 1..36: mol_type = other DNA
gtcgagacagcagagtggcgcagcggaagcgtgctg

SEQ ID NO: 32991 - DNA, 36 bp, synthetic construct
  misc_feature 1..36: note = Probe
  source 1..36: mol_type = other DNA
gtcgcccggctagctcagtcggtagagcatgagact

SEQ ID NO: 32992 - DNA, 36 bp, synthetic construct
  misc_feature 1..36: note = Probe
  source 1..36: mol_type = other DNA
gtcgccctcttagcgcagcgggcagcgcgtcagtct

SEQ ID NO: 32993 - DNA, 36 bp, synthetic construct
  misc_feature 1..36: note = Probe
  source 1..36: mol_type = other DNA
gtcgccgtcgtcctcgttagtatagtggtgagtatc

SEQ ID NO: 32994 - DNA, 40 bp, synthetic construct
  misc_feature 1..40: note = Probe
  source 1..40: mol_type = other DNA
gtcgccgtcgtcctcgttagtatagtggtgagtatccccg

SEQ ID NO: 32995 - DNA, 36 bp, synthetic construct
  misc_feature 1..36: note = Probe
  source 1..36: mol_type = other DNA
gtcgcgagttcaaatctcgctggggcctcggctgta

SEQ ID NO: 32996 - DNA, 27 bp, synthetic construct
  misc_feature 1..27: note = Probe
  source 1..27: mol_type = other DNA
gtcgcgggttcgatccccgtacgggcc

SEQ ID NO: 32997 - DNA, 36 bp, synthetic construct
  misc_feature 1..36: note = Probe
  source 1..36: mol_type = other DNA
gtcgcgggttcgatccccgtacgggccaggattgaa

SEQ ID NO: 32998 - DNA, 39 bp, synthetic construct
  misc_feature 1..39: note = Probe
  source 1..39: mol_type = other DNA
gtcgcgggttcgatccccgtacgggccaggattgaaact

SEQ ID NO: 32999 - DNA, 30 bp, synthetic construct
  misc_feature 1..30: note = Probe
  source 1..30: mol_type = other DNA
gtcgctggttcgattccggctcgaaggact

SEQ ID NO: 33000 - DNA, 36 bp, synthetic construct
  misc_feature 1..36: note = Probe
  source 1..36: mol_type = other DNA
gtcgctggttcgattccggctcgaaggacttcgtct

SEQ ID NO: 33001 - DNA, 19 bp, synthetic construct
  misc_feature 1..19: note = Probe
  source 1..19: mol_type = other DNA
gtcggctagagcgtggtgc

SEQ ID NO: 33002 - DNA, 28 bp, synthetic construct
  misc_feature 1..28: note = Probe
  source 1..28: mol_type = other DNA
gtcggctcgttggtctaggggtatgatt

SEQ ID NO: 33003 - DNA, 36 bp, synthetic construct
  misc_feature 1..36: note = Probe
  source 1..36: mol_type = other DNA
gtcggctcgttggtctaggggtatgattctcgctta

SEQ ID NO: 33004 - DNA, 36 bp, synthetic construct
  misc_feature 1..36: note = Probe
  source 1..36: mol_type = other DNA
gtcggctcgttggtctaggggtatgattctcgcttc

SEQ ID NO: 33005 - DNA, 16 bp, synthetic construct
  misc_feature 1..16: note = Probe
  source 1..16: mol_type = other DNA
gtcggtagagcatcag

SEQ ID NO: 33006 - DNA, 19 bp, synthetic construct
  misc_feature 1..19: note = Probe
  source 1..19: mol_type = other DNA
gtcggtagagcatcagact

SEQ ID NO: 33007 - DNA, 21 bp, synthetic construct
  misc_feature 1..21: note = Probe
  source 1..21: mol_type = other DNA
gtcggtagagcatcagacttt

SEQ ID NO: 33008 - DNA, 22 bp, synthetic construct
  misc_feature 1..22: note = Probe
  source 1..22: mol_type = other DNA
gtcggtagagcatcagactttt

SEQ ID NO: 33009 - DNA, 16 bp, synthetic construct
  misc_feature 1..16: note = Probe
  source 1..16: mol_type = other DNA
gtcggtagagcatgag

SEQ ID NO: 33010 - DNA, 17 bp, synthetic construct
  misc_feature 1..17: note = Probe
  source 1..17: mol_type = other DNA
gtcggtagagcatgaga

SEQ ID NO: 33011 - DNA, 18 bp, synthetic construct
  misc_feature 1..18: note = Probe
  source 1..18: mol_type = other DNA
gtcggtagagcatgagac

SEQ ID NO: 33012 - DNA, 19 bp, synthetic construct
  misc_feature 1..19: note = Probe
  source 1..19: mol_type = other DNA
gtcggtagagcatgagacc

SEQ ID NO: 33013 - DNA, 20 bp, synthetic construct
  misc_feature 1..20: note = Probe
  source 1..20: mol_type = other DNA
gtcggtagagcatgagaccc

SEQ ID NO: 33014 - DNA, 19 bp, synthetic construct
  misc_feature 1..19: note = Probe
  source 1..19: mol_type = other DNA
gtcggtagagcatgagact

SEQ ID NO: 33015 - DNA, 20 bp, synthetic construct
  misc_feature 1..20: note = Probe
  source 1..20: mol_type = other DNA
gtcggtagagcatgagactc

SEQ ID NO: 33016 - DNA, 26 bp, synthetic construct
  misc_feature 1..26: note = Probe
  source 1..26: mol_type = other DNA
gtcggtagagcatgagactcttaatc

SEQ ID NO: 33017 - DNA, 27 bp, synthetic construct
  misc_feature 1..27: note = Probe
  source 1..27: mol_type = other DNA
gtcggtagagcatgagactcttaatct

SEQ ID NO: 33018 - DNA, 16 bp, synthetic construct
  misc_feature 1..16: note = Probe
  source 1..16: mol_type = other DNA
gtcggtagagcatggg

SEQ ID NO: 33019 - DNA, 27 bp, synthetic construct
  misc_feature 1..27: note = Probe
  source 1..27: mol_type = other DNA
gtcggtagagcatgggactcttaatcc

SEQ ID NO: 33020 - DNA, 18 bp, synthetic construct
  misc_feature 1..18: note = Probe
  source 1..18: mol_type = other DNA
gtcgtcctcgttagtata

SEQ ID NO: 33021 - DNA, 21 bp, synthetic construct
  misc_feature 1..21: note = Probe
  source 1..21: mol_type = other DNA
gtcgtcctcgttagtatagtg

SEQ ID NO: 33022 - DNA, 30 bp, synthetic construct; identical to SEQ ID NO: 22679
  misc_feature 1..30: note = Probe
  source 1..30: mol_type = other DNA

SEQ ID NO: 33023 - DNA, 31 bp, synthetic construct
  misc_feature 1..31: note = Probe
  source 1..31: mol_type = other DNA
gtcgtcctcgttagtatagtggtgagtatcc

SEQ ID NO: 33024 - DNA, 36 bp, synthetic construct
  misc_feature 1..36: note = Probe
  source 1..36: mol_type = other DNA
gtcgtcctcgttagtatagtggtgagtatccccgcc

SEQ ID NO: 33025 - DNA, 37 bp, synthetic construct
  misc_feature 1..37: note = Probe
  source 1..37: mol_type = other DNA
gtcgtcctcgttagtatagtggtgagtatccccgcct

SEQ ID NO: 33026 - DNA, 38 bp, synthetic construct
  misc_feature 1..38: note = Probe
  source 1..38: mol_type = other DNA
gtcgtcctcgttagtatagtggtgagtatccccgcctg

SEQ ID NO: 33027 - DNA, 21 bp, synthetic construct
  misc_feature 1..21: note = Probe
  source 1..21: mol_type = other DNA
gtcgtggcgtcccggtagctc

SEQ ID NO: 33028 - DNA, 27 bp, synthetic construct
  misc_feature 1..27: note = Probe
  source 1..27: mol_type = other DNA
gtcgtgggttcgagccccacgttgggc

SEQ ID NO: 33029 - DNA, 28 bp, synthetic construct
  misc_feature 1..28: note = Probe
  source 1..28: mol_type = other DNA
gtcgtgggttcgagccccacgttgggcg

SEQ ID NO: 33030 - DNA, 29 bp, synthetic construct
  misc_feature 1..29: note = Probe
  source 1..29: mol_type = other DNA
gtcgtgggttcgagccccacgttgggcga

SEQ ID NO: 33031 - DNA, 29 bp, synthetic construct
  misc_feature 1..29: note = Probe
  source 1..29: mol_type = other DNA
gtcgtgggttcgagccccacgttgggcgc

SEQ ID NO: 33032 - DNA, 36 bp, synthetic construct
  misc_feature 1..36: note = Probe
  source 1..36: mol_type = other DNA
gtcgtgggttcgagccccacgttgggcgcgggttgt

SEQ ID NO: 33033 - DNA, 31 bp, synthetic construct
  misc_feature 1..31: note = Probe
  source 1..31: mol_type = other DNA
gtcgtgggttcgagccccacgttgggcgctg

SEQ ID NO: 33034 - DNA, 22 bp, synthetic construct
  misc_feature 1..22: note = Probe
  source 1..22: mol_type = other DNA
gtcgtggttgtagtccgtgcga

SEQ ID NO: 33035 - DNA, 23 bp, synthetic construct
  misc_feature 1..23: note = Probe
  source 1..23: mol_type = other DNA
gtcgtggttgtagtccgtgcgag

SEQ ID NO: 33036 - DNA, 26 bp, synthetic construct
  misc_feature 1..26: note = Probe
  source 1..26: mol_type = other DNA
gtcgtggttgtagtccgtgcgagaat

SEQ ID NO: 33037 - DNA, 27 bp, synthetic construct
  misc_feature 1..27: note = Probe
  source 1..27: mol_type = other DNA
gtcgtggttgtagtccgtgcgagaata

SEQ ID NO: 33038 - DNA, 24 bp, synthetic construct
  misc_feature 1..24: note = Probe
  source 1..24: mol_type = other DNA
gtctaacaacatggctttctcaac

SEQ ID NO: 33039 - DNA, 36 bp, synthetic construct
  misc_feature 1..36: note = Probe
  source 1..36: mol_type = other DNA
gtctacgggagcccggatagctcagtcggtagagca

SEQ ID NO: 33040 - DNA, 21 bp, synthetic construct
  misc_feature 1..21: note = Probe
  source 1..21: mol_type = other DNA
gtctaggggtatgattctcgc

SEQ ID NO: 33041 - DNA, 22 bp, synthetic construct
  misc_feature 1..22: note = Probe
  source 1..22: mol_type = other DNA
gtctaggggtatgattctcgct

SEQ ID NO: 33042 - DNA, 22 bp, synthetic construct
  misc_feature 1..22: note = Probe
  source 1..22: mol_type = other DNA
gtctaggggtatgattctcggt

SEQ ID NO: 33043 - DNA, 17 bp, synthetic construct
  misc_feature 1..17: note = Probe
  source 1..17: mol_type = other DNA
gtctagtggttaggatt

SEQ ID NO: 33044 - DNA, 36 bp, synthetic construct
  misc_feature 1..36: note = Probe
  source 1..36: mol_type = other DNA
gtctagtggttaggattcggcgctctcaccgccgcg

SEQ ID NO: 33045 - DNA, 25 bp, synthetic construct
  misc_feature 1..25: note = Probe
  source 1..25: mol_type = other DNA
gtctcgtaaaccgaagatcgcgggt

SEQ ID NO: 33046 - DNA, 36 bp, synthetic construct
  misc_feature 1..36: note = Probe
  source 1..36: mol_type = other DNA
gtctctgtggcgcaatcggttagcgcgttcggctgt

SEQ ID NO: 33047 - DNA, 33 bp, synthetic construct
  misc_feature 1..33: note = Probe
  source 1..33: mol_type = other DNA
gtctgcaccaggatggccgagtggttaaggcgt

SEQ ID NO: 33048 - DNA, 36 bp, synthetic construct
  misc_feature 1..36: note = Probe
  source 1..36: mol_type = other DNA
gtctgcagacgaggtggccgagtggttaaggcgatg

SEQ ID NO: 33049 - DNA, 36 bp, synthetic construct
  misc_feature 1..36: note = Probe
  source 1..36: mol_type = other DNA
gtctgcctccttagcgcagtaggcagcgcgtcagtc

SEQ ID NO: 33050 - DNA, 31 bp, synthetic construct
  misc_feature 1..31: note = Probe
  source 1..31: mol_type = other DNA
gtctggctctgtggcgcaatggatagcgcat

SEQ ID NO: 33051 - DNA, 36 bp, synthetic construct
  misc_feature 1..36: note = Probe
  source 1..36: mol_type = other DNA
gtctggctctgtggcgcaatggatagcgcattggac

SEQ ID NO: 33052 - DNA, 36 bp, synthetic construct
  misc_feature 1..36: note = Probe
  source 1..36: mol_type = other DNA
gtcttccctggtggtctagtggttaggattcggcgc

SEQ ID NO: 33053 - DNA, 25 bp, synthetic construct
  misc_feature 1..25: note = Probe
  source 1..25: mol_type = other DNA
gtcttgtaaaccggagatgaaaacc

SEQ ID NO: 33054 - DNA, 26 bp, synthetic construct
  misc_feature 1..26: note = Probe
  source 1..26: mol_type = other DNA
gtcttgtaaaccggagatgaaaacct

SEQ ID NO: 33055 - DNA, 36 bp, synthetic construct
  misc_feature 1..36: note = Probe
  source 1..36: mol_type = other DNA
gtcttgtaaaccggagatgaaaacctttttccaagg

SEQ ID NO: 33056 - DNA, 17 bp, synthetic construct
  misc_feature 1..17: note = Probe
  source 1..17: mol_type = other DNA
gtctttaactccaccat

SEQ ID NO: 33057 - DNA, 36 bp, synthetic construct
  misc_feature 1..36: note = Probe
  source 1..36: mol_type = other DNA
gtgaagagcccggatagctcagtcggtagagcatca

SEQ ID NO: 33058 - DNA, 40 bp, synthetic construct
  misc_feature 1..40: note = Probe
  source 1..40: mol_type = other DNA
gtgaagagcccggatagctcagtcggtagagcatcagact

SEQ ID NO: 33059 - DNA, 42 bp, synthetic construct
  misc_feature 1..42: note = Probe
  source 1..42: mol_type = other DNA
gtgaagagcccggatagctcagtcggtagagcatcagacttt

SEQ ID NO: 33060 - DNA, 15 bp, synthetic construct
  misc_feature 1..15: note = Probe
  source 1..15: mol_type = other DNA
gtgaagcattggact

SEQ ID NO: 33061 - DNA, 17 bp, synthetic construct
  misc_feature 1..17: note = Probe
  source 1..17: mol_type = other DNA
gtgaagcattggactgt

SEQ ID NO: 33062 - DNA, 18 bp, synthetic construct
  misc_feature 1..18: note = Probe
  source 1..18: mol_type = other DNA
gtgaagcattggactgta

SEQ ID NO: 33063 - DNA, 19 bp, synthetic construct
  misc_feature 1..19: note = Probe
  source 1..19: mol_type = other DNA
gtgaagcattggactgtaa

SEQ ID NO: 33064 - DNA, 20 bp, synthetic construct
  misc_feature 1..20: note = Probe
  source 1..20: mol_type = other DNA
gtgaagcattggactgtaaa

SEQ ID NO: 33065 - DNA, 21 bp, synthetic construct
  misc_feature 1..21: note = Probe
  source 1..21: mol_type = other DNA
gtgaagcattggactgtaaat

SEQ ID NO: 33066 - DNA, 22 bp, synthetic construct
  misc_feature 1..22: note = Probe
  source 1..22: mol_type = other DNA
gtgaagcattggactgtaaatc

SEQ ID NO: 33067 - DNA, 23 bp, synthetic construct
  misc_feature 1..23: note = Probe
  source 1..23: mol_type = other DNA
gtgaagcattggactgtaaatct

SEQ ID NO: 33068 - DNA, 36 bp, synthetic construct
  misc_feature 1..36: note = Probe
  source 1..36: mol_type = other DNA
gtgaagcattggactgtaaatctaaagacaggggtt

SEQ ID NO: 33069 - DNA, 36 bp, synthetic construct
  misc_feature 1..36: note = Probe
  source 1..36: mol_type = other DNA
gtgaatccttcgatagctcagttggtagagcggagg

SEQ ID NO: 33070 - DNA, 50 bp, synthetic construct
  misc_feature 1..50: note = Probe
  source 1..50: mol_type = other DNA
gtgaatccttcgatagctcagttggtagagcggaggactgtagttggctg

SEQ ID NO: 33071 - DNA, 29 bp, synthetic construct
  misc_feature 1..29: note = Probe
  source 1..29: mol_type = other DNA
gtgaatctgacaacagaggcttacgaccc

SEQ ID NO: 33072 - DNA, 30 bp, synthetic construct; identical to SEQ ID NO: 7044
  misc_feature 1..30: note = Probe
  source 1..30: mol_type = other DNA

SEQ ID NO: 33073 - DNA, 32 bp, synthetic construct; identical to SEQ ID NO: 7045
  misc_feature 1..32: note = Probe
  source 1..32: mol_type = other DNA

SEQ ID NO: 33074 - DNA, 31 bp, synthetic construct
  misc_feature 1..31: note = Probe
  source 1..31: mol_type = other DNA
gtgacctcgtggcgcaatggtagcgcgtctg

SEQ ID NO: 33075 - DNA, 36 bp, synthetic construct; identical to SEQ ID NO: 22713
  misc_feature 1..36: note = Probe
  source 1..36: mol_type = other DNA

SEQ ID NO: 33076 - DNA, 15 bp, synthetic construct
  misc_feature 1..15: note = Probe
  source 1..15: mol_type = other DNA
gtgacgaatagagca

SEQ ID NO: 33077 - DNA, 36 bp, synthetic construct
  misc_feature 1..36: note = Probe
  source 1..36: mol_type = other DNA
gtgacgaggtggccgagtggttaaggcgatggactg

SEQ ID NO: 33078 - DNA, 36 bp, synthetic construct
  misc_feature 1..36: note = Probe
  source 1..36: mol_type = other DNA
gtgagcactctggactctgaatccagcgatccgagt

SEQ ID NO: 33079 - DNA, 36 bp, synthetic construct
  misc_feature 1..36: note = Probe
  source 1..36: mol_type = other DNA
gtgagcccggagagctcagtgggtagagcatcagac

SEQ ID NO: 33080 - DNA, 17 bp, synthetic construct
  misc_feature 1..17: note = Probe
  source 1..17: mol_type = other DNA
gtgagcccggatagctc

SEQ ID NO: 33081 - DNA, 23 bp, synthetic construct
  misc_feature 1..23: note = Probe
  source 1..23: mol_type = other DNA
gtgagcccggatagctcagtcgg

SEQ ID NO: 33082 - DNA, 24 bp, synthetic construct
  misc_feature 1..24: note = Probe
  source 1..24: mol_type = other DNA
gtgagcccggatagctcagtcggt

SEQ ID NO: 33083 - DNA, 25 bp, synthetic construct
  misc_feature 1..25: note = Probe
  source 1..25: mol_type = other DNA
gtgagcccggatagctcagtcggta

SEQ ID NO: 33084 - DNA, 26 bp, synthetic construct
  misc_feature 1..26: note = Probe
  source 1..26: mol_type = other DNA
gtgagcccggatagctcagtcggtag

SEQ ID NO: 33085 - DNA, 27 bp, synthetic construct
  misc_feature 1..27: note = Probe
  source 1..27: mol_type = other DNA
gtgagcccggatagctcagtcggtaga

SEQ ID NO: 33086 - DNA, 28 bp, synthetic construct
  misc_feature 1..28: note = Probe
  source 1..28: mol_type = other DNA
gtgagcccggatagctcagtcggtagag

SEQ ID NO: 33087 - DNA, 29 bp, synthetic construct
  misc_feature 1..29: note = Probe
  source 1..29: mol_type = other DNA
gtgagcccggatagctcagtcggtagagc

SEQ ID NO: 33088 - DNA, 30 bp, synthetic construct; identical to SEQ ID NO: 22721
  misc_feature 1..30: note = Probe
  source 1..30: mol_type = other DNA

SEQ ID NO: 33089 - DNA, 31 bp, synthetic construct
  misc_feature 1..31: note = Probe
  source 1..31: mol_type = other DNA
gtgagcccggatagctcagtcggtagagcat

SEQ ID NO: 33090 - DNA, 32 bp, synthetic construct
  misc_feature 1..32: note = Probe
  source 1..32: mol_type = other DNA
gtgagcccggatagctcagtcggtagagcatc

SEQ ID NO: 33091 - DNA, 33 bp, synthetic construct; identical to SEQ ID NO: 22722
  misc_feature 1..33: note = Probe
  source 1..33: mol_type = other DNA

SEQ ID NO: 33092 - DNA, 34 bp, synthetic construct
  misc_feature 1..34: note = Probe
  source 1..34: mol_type = other DNA
gtgagcccggatagctcagtcggtagagcatcag

SEQ ID NO: 33093 - DNA, 35 bp, synthetic construct; identical to SEQ ID NO: 22723
  misc_feature 1..35: note = Probe
  source 1..35: mol_type = other DNA

SEQ ID NO: 33094 - DNA, 36 bp, synthetic construct; identical to SEQ ID NO: 22724
  misc_feature 1..36: note = Probe
  source 1..36: mol_type = other DNA

SEQ ID NO: 33095 - DNA, 37 bp, synthetic construct; identical to SEQ ID NO: 22725
  misc_feature 1..37: note = Probe
  source 1..37: mol_type = other DNA

SEQ ID NO: 33096 - DNA, 38 bp, synthetic construct; identical to SEQ ID NO: 22726
  misc_feature 1..38: note = Probe
  source 1..38: mol_type = other DNA

SEQ ID NO: 33097 - DNA, 39 bp, synthetic construct; identical to SEQ ID NO: 22727
  misc_feature 1..39: note = Probe
  source 1..39: mol_type = other DNA

SEQ ID NO: 33098 - DNA, 40 bp, synthetic construct; identical to SEQ ID NO: 22728
  misc_feature 1..40: note = Probe
  source 1..40: mol_type = other DNA

SEQ ID NO: 33099 - DNA, 41 bp, synthetic construct; identical to SEQ ID NO: 22729
  misc_feature 1..41: note = Probe
  source 1..41: mol_type = other DNA

SEQ ID NO: 33100 - DNA, 42 bp, synthetic construct; identical to SEQ ID NO: 22730
  misc_feature 1..42: note = Probe
  source 1..42: mol_type = other DNA

SEQ ID NO: 33101 - DNA, 43 bp, synthetic construct; identical to SEQ ID NO: 22731
  misc_feature 1..43: note = Probe
  source 1..43: mol_type = other DNA

SEQ ID NO: 33102 - DNA, 44 bp, synthetic construct
  misc_feature 1..44: note = Probe
  source 1..44: mol_type = other DNA
gtgagcccggatagctcagtcggtagagcatcagacttttaatc

SEQ ID NO: 33103 - DNA, 29 bp, synthetic construct
  misc_feature 1..29: note = Probe
  source 1..29: mol_type = other DNA
gtgagcccggctagctcagtcggtagagc

SEQ ID NO: 33104 - DNA, 30 bp, synthetic construct; identical to SEQ ID NO: 22733
  misc_feature 1..30: note = Probe
  source 1..30: mol_type = other DNA

SEQ ID NO: 33105 - DNA, 36 bp, synthetic construct
  misc_feature 1..36: note = Probe
  source 1..36: mol_type = other DNA
gtgagcccggctagctcagtcggtagagcatgagac

SEQ ID NO: 33106 - DNA, 28 bp, synthetic construct
  misc_feature 1..28: note = Probe
  source 1..28: mol_type = other DNA
gtgaggacaatggcacggcaaggggagt

SEQ ID NO: 33107 - DNA, 36 bp, synthetic construct; identical to SEQ ID NO: 22735
  misc_feature 1..36: note = Probe
  source 1..36: mol_type = other DNA

SEQ ID NO: 33108 - DNA, 15 bp, synthetic construct
  misc_feature 1..15: note = Probe
  source 1..15: mol_type = other DNA
gtgagtatccccgcc

SEQ ID NO: 33109 - DNA, 18 bp, synthetic construct
  misc_feature 1..18: note = Probe
  source 1..18: mol_type = other DNA
gtgagtatccccgcctgt

SEQ ID NO: 33110 - DNA, 21 bp, synthetic construct
  misc_feature 1..21: note = Probe
  source 1..21: mol_type = other DNA
gtgagtatccccgcctgtcac

SEQ ID NO: 33111 - DNA, 36 bp, synthetic construct; identical to SEQ ID NO: 22741
  misc_feature 1..36: note = Probe
  source 1..36: mol_type = other DNA

SEQ ID NO: 33112 - DNA, 27 bp, synthetic construct
  misc_feature 1..27: note = Probe
  source 1..27: mol_type = other DNA
gtgatcgtatagtggttagtactctgc

SEQ ID NO: 33113 - DNA, 28 bp, synthetic construct
  misc_feature 1..28: note = Probe
  source 1..28: mol_type = other DNA
gtgatcgtatagtggttagtactctgcg

SEQ ID NO: 33114 - DNA, 30 bp, synthetic construct; identical to SEQ ID NO: 1505
  misc_feature 1..30: note = Probe
  source 1..30: mol_type = other DNA

SEQ ID NO: 33115 - DNA, 29 bp, synthetic construct
  misc_feature 1..29: note = Probe
  source 1..29: mol_type = other DNA
gtgatggtttccctctggcagttctcaag

SEQ ID NO: 33116 - DNA, 36 bp, synthetic construct
  misc_feature 1..36: note = Probe
  source 1..36: mol_type = other DNA
gtgcacccttcgatagctcagctggtagagcggagg

SEQ ID NO: 33117 - DNA, 42 bp, synthetic construct
  misc_feature 1..42: note = Probe
  source 1..42: mol_type = other DNA
gtgcacccttcgatagctcagctggtagagcggaggactgta

SEQ ID NO: 33118 - DNA, 44 bp, synthetic construct
  misc_feature 1..44: note = Probe
  source 1..44: mol_type = other DNA
gtgcacccttcgatagctcagctggtagagcggaggactgtaga

SEQ ID NO: 33119 - DNA, 16 bp, synthetic construct
  misc_feature 1..16: note = Probe
  source 1..16: mol_type = other DNA
gtgcacttggacgaac

SEQ ID NO: 33120 - DNA, 17 bp, synthetic construct
  misc_feature 1..17: note = Probe
  source 1..17: mol_type = other DNA
gtgcacttggacgaacc

SEQ ID NO: 33121 - DNA, 33 bp, synthetic construct
  misc_feature 1..33: note = Probe
  source 1..33: mol_type = other DNA
gtgcaggtagcgtggccgagcggtctaaggcgc

SEQ ID NO: 33122 - DNA, 34 bp, synthetic construct
  misc_feature 1..34: note = Probe
  source 1..34: mol_type = other DNA
gtgcatgggtggttcagtggtagaattctcgcct

SEQ ID NO: 33123 - DNA, 36 bp, synthetic construct
  misc_feature 1..36: note = Probe
  source 1..36: mol_type = other DNA
gtgccaggatagttcaggtggtagagcatcagactt

SEQ ID NO: 33124 - DNA, 19 bp, synthetic construct
  misc_feature 1..19: note = Probe
  source 1..19: mol_type = other DNA
gtgccaggggatgtagctc

SEQ ID NO: 33125 - DNA, 36 bp, synthetic construct
  misc_feature 1..36: note = Probe
  source 1..36: mol_type = other DNA
gtgcccgctcccttcgatagctcagctggtagagcg

SEQ ID NO: 33126 - DNA, 36 bp, synthetic construct
  misc_feature 1..36: note = Probe
  source 1..36: mol_type = other DNA
gtgcccggctagctcagtcggtagagcatgagactc

SEQ ID NO: 33127 - DNA, 36 bp, synthetic construct
  misc_feature 1..36: note = Probe
  source 1..36: mol_type = other DNA
gtgccgaaatagctcagttgggagagcgttagactg

SEQ ID NO: 33128 - DNA, 36 bp, synthetic construct
  misc_feature 1..36: note = Probe
  source 1..36: mol_type = other DNA
gtgcgcccttcgatagctcagctggtagagcggagg

SEQ ID NO: 33129 - DNA, 42 bp, synthetic construct
  misc_feature 1..42: note = Probe
  source 1..42: mol_type = other DNA
gtgcgcccttcgatagctcagctggtagagcggaggactgta

SEQ ID NO: 33130 - DNA, 46 bp, synthetic construct
  misc_feature 1..46: note = Probe
  source 1..46: mol_type = other DNA
gtgcgcccttcgatagctcagctggtagagcggaggactgtagcct

SEQ ID NO: 33131 - DNA, 50 bp, synthetic construct
  misc_feature 1..50: note = Probe
  source 1..50: mol_type = other DNA
gtgcgcccttcgatagctcagctggtagagcggaggactgtagcctgtag

SEQ ID NO: 33132 - DNA, 36 bp, synthetic construct
  misc_feature 1..36: note = Probe
  source 1..36: mol_type = other DNA
gtgcggcgttggtggtatagtggtgagcatagctgc

SEQ ID NO: 33133 - DNA, 33 bp, synthetic construct; identical to SEQ ID NO: 22765
  misc_feature 1..33: note = Probe
  source 1..33: mol_type = other DNA

SEQ ID NO: 33134 - DNA, 36 bp, synthetic construct; identical to SEQ ID NO: 22768
  misc_feature 1..36: note = Probe
  source 1..36: mol_type = other DNA

SEQ ID NO: 33135 - DNA, 26 bp, synthetic construct
  misc_feature 1..26: note = Probe
  source 1..26: mol_type = other DNA
gtgctaataacgccaaggtcgcgggt

SEQ ID NO: 33136 - DNA, 35 bp, synthetic construct
  misc_feature 1..35: note = Probe
  source 1..35: mol_type = other DNA
gtgctaatggtggagttaaagactttttctctgat

SEQ ID NO: 33137 - DNA, 36 bp, synthetic construct
  misc_feature 1..36: note = Probe
  source 1..36: mol_type = other DNA
gtgctaatggtggagttaaagactttttctctgatt

SEQ ID NO: 33138 - DNA, 36 bp, synthetic construct
  misc_feature 1..36: note = Probe
  source 1..36: mol_type = other DNA
gtgcttccttcgatagctcagctggtagagcggagg

SEQ ID NO: 33139 - DNA, 47 bp, synthetic construct
  misc_feature 1..47: note = Probe
  source 1..47: mol_type = other DNA
gtgcttccttcgatagctcagctggtagagcggaggactgtagtact

SEQ ID NO: 33140 - DNA, 36 bp, synthetic construct
  misc_feature 1..36: note = Probe
  source 1..36: mol_type = other DNA
gtgctttgcacgcgtgggttcgaatcccatcctcgt

SEQ ID NO: 33141 - DNA, 34 bp, synthetic construct
  misc_feature 1..34: note = Probe
  source 1..34: mol_type = other DNA
gtggcacggagaattttggattctcagggatggg

SEQ ID NO: 33142 - DNA, 36 bp, synthetic construct
  misc_feature 1..36: note = Probe
  source 1..36: mol_type = other DNA
gtggcagcgatggccgagtggttaaggcgttggact

SEQ ID NO: 33143 - DNA, 32 bp, synthetic construct
  misc_feature 1..32: note = Probe
  source 1..32: mol_type = other DNA
gtggccctgtagctcagcggttggagcgctgg

SEQ ID NO: 33144 - DNA, 33 bp, synthetic construct
  misc_feature 1..33: note = Probe
  source 1..33: mol_type = other DNA
gtggccctgtagctcagcggttggagcgctggt

SEQ ID NO: 33145 - DNA, 36 bp, synthetic construct
  misc_feature 1..36: note = Probe
  source 1..36: mol_type = other DNA
gtggccctgtagctcagcggttggagcgctggtctc

SEQ ID NO: 33146 - DNA, 36 bp, synthetic construct
  misc_feature 1..36: note = Probe
  source 1..36: mol_type = other DNA
gtggccgagatagctcagttgggagagcgttagact

SEQ ID NO: 33147 - DNA, 15 bp, synthetic construct
  misc_feature 1..15: note = Probe
  source 1..15: mol_type = other DNA
gtggcctgtgacttt

SEQ ID NO: 33148 - DNA, 36 bp, synthetic construct
  misc_feature 1..36: note = Probe
  source 1..36: mol_type = other DNA
gtggcggctccatagctcaggggttagagcactggt

SEQ ID NO: 33149 - DNA, 36 bp, synthetic construct
  misc_feature 1..36: note = Probe
  source 1..36: mol_type = other DNA
gtggcgggggtatagctcagtggtagagcatttgac

SEQ ID NO: 33150 - DNA, 32 bp, synthetic construct
  misc_feature 1..32: note = Probe
  source 1..32: mol_type = other DNA
gtggcggttccatggtgtaatggttagcactc

SEQ ID NO: 33151 - DNA, 15 bp, synthetic construct
  misc_feature 1..15: note = Probe
  source 1..15: mol_type = other DNA
gtggcgtcccggtag

SEQ ID NO: 33152 - DNA, 16 bp, synthetic construct
  misc_feature 1..16: note = Probe
  source 1..16: mol_type = other DNA
gtggcgtcccggtagc

SEQ ID NO: 33153 - DNA, 17 bp, synthetic construct
  misc_feature 1..17: note = Probe
  source 1..17: mol_type = other DNA
gtggcgtcccggtagct

SEQ ID NO: 33154 - DNA, 18 bp, synthetic construct
  misc_feature 1..18: note = Probe
  source 1..18: mol_type = other DNA
gtggcgtcccggtagctc

SEQ ID NO: 33155 - DNA, 30 bp, synthetic construct
  misc_feature 1..30: note = Probe
  source 1..30: mol_type = other DNA
gtggcgtcccggtagctcgccgtgatcgta

SEQ ID NO: 33156 - DNA, 33 bp, synthetic construct
  misc_feature 1..33: note = Probe
  source 1..33: mol_type = other DNA
gtggcgtcccggtagctcgccgtgatcgtatag

SEQ ID NO: 33157 - DNA, 50 bp, synthetic construct
  misc_feature 1..50: note = Probe
  source 1..50: mol_type = other DNA
gtggcgtcccggtagctcgccgtgatcgtatagtggttagtactctgcgt

SEQ ID NO: 33158 - DNA, 16 bp, synthetic construct
  misc_feature 1..16: note = Probe
  source 1..16: mol_type = other DNA
gtggctaggattcggc

SEQ ID NO: 33159 - DNA, 17 bp, synthetic construct
  misc_feature 1..17: note = Probe
  source 1..17: mol_type = other DNA
gtggctaggattcggcg

SEQ ID NO: 33160 - DNA, 36 bp, synthetic construct
  misc_feature 1..36: note = Probe
  source 1..36: mol_type = other DNA
gtgggcagagtggtgcagcggaagcgtgctgggccc

SEQ ID NO: 33161 - DNA, 30 bp, synthetic construct; identical to SEQ ID NO: 22800
  misc_feature 1..30: note = Probe
  source 1..30: mol_type = other DNA

SEQ ID NO: 33162 - DNA, 36 bp, synthetic construct
  misc_feature 1..36: note = Probe
  source 1..36: mol_type = other DNA
gtggggtttccgtagtgtagtggttatcacgttcgc

SEQ ID NO: 33163 - DNA, 15 bp, synthetic construct
  misc_feature 1..15: note = Probe
  source 1..15: mol_type = other DNA
gtgggtggctttttt

SEQ ID NO: 33164 - DNA, 16 bp, synthetic construct
  misc_feature 1..16: note = Probe
  source 1..16: mol_type = other DNA
gtgggtggcttttttt

SEQ ID NO: 33165 - DNA, 27 bp, synthetic construct
  misc_feature 1..27: note = Probe
  source 1..27: mol_type = other DNA
gtgggttcgaatcccatcctcgtcgct

SEQ ID NO: 33166 - DNA, 27 bp, synthetic construct
  misc_feature 1..27: note = Probe
  source 1..27: mol_type = other DNA
gtgggttcgaatcccatcctcgtcggc

SEQ ID NO: 33167 - DNA, 26 bp, synthetic construct
  misc_feature 1..26: note = Probe
  source 1..26: mol_type = other DNA
gtgggtttaagtcccattggtctagt

SEQ ID NO: 33168 - DNA, 36 bp, synthetic construct
  misc_feature 1..36: note = Probe
  source 1..36: mol_type = other DNA
gtgggtttccgtagtgtagtggtcatcacgttcgcc

SEQ ID NO: 33169 - DNA, 16 bp, synthetic construct
  misc_feature 1..16: note = Probe
  source 1..16: mol_type = other DNA
gtggtagaattctcgc

SEQ ID NO: 33170 - DNA, 17 bp, synthetic construct
  misc_feature 1..17: note = Probe
  source 1..17: mol_type = other DNA
gtggtagaattctcgcc

SEQ ID NO: 33171 - DNA, 18 bp, synthetic construct
  misc_feature 1..18: note = Probe
  source 1..18: mol_type = other DNA
gtggtagaattctcgcct

SEQ ID NO: 33172 - DNA, 20 bp, synthetic construct
  misc_feature 1..20: note = Probe
  source 1..20: mol_type = other DNA
gtggtagaattctcgcctgc

SEQ ID NO: 33173 - DNA, 21 bp, synthetic construct
  misc_feature 1..21: note = Probe
  source 1..21: mol_type = other DNA
gtggtagaattctcgcctgcc

SEQ ID NO: 33174 - DNA, 22 bp, synthetic construct
  misc_feature 1..22: note = Probe
  source 1..22: mol_type = other DNA
gtggtagaattctcgcctgcca

SEQ ID NO: 33175 - DNA, 23 bp, synthetic construct
  misc_feature 1..23: note = Probe
  source 1..23: mol_type = other DNA
gtggtagaattctcgcctgccac

SEQ ID NO: 33176 - DNA, 29 bp, synthetic construct
  misc_feature 1..29: note = Probe
  source 1..29: mol_type = other DNA
gtggtagaattctcgcctgccacgcggga

SEQ ID NO: 33177 - DNA, 36 bp, synthetic construct
  misc_feature 1..36: note = Probe
  source 1..36: mol_type = other DNA
gtggtagaattctcgcctgccacgcgggaggcccgg

SEQ ID NO: 33178 - DNA, 18 bp, synthetic construct
  misc_feature 1..18: note = Probe
  source 1..18: mol_type = other DNA
gtggtagagcatttgact

SEQ ID NO: 33179 - DNA, 20 bp, synthetic construct
  misc_feature 1..20: note = Probe
  source 1..20: mol_type = other DNA
gtggtagagcatttgactgc

SEQ ID NO: 33180 - DNA, 16 bp, synthetic construct
  misc_feature 1..16: note = Probe
  source 1..16: mol_type = other DNA
gtggtagagcgcgtgc

SEQ ID NO: 33181 - DNA, 21 bp, synthetic construct
  misc_feature 1..21: note = Probe
  source 1..21: mol_type = other DNA
gtggtagagcgcgtgcttagc

SEQ ID NO: 33182 - DNA, 21 bp, synthetic construct
  misc_feature 1..21: note = Probe
  source 1..21: mol_type = other DNA
gtggtagagcgcgtgcttcgc

SEQ ID NO: 33183 - DNA, 16 bp, synthetic construct
  misc_feature 1..16: note = Probe
  source 1..16: mol_type = other DNA
gtggtatgattctcgc

SEQ ID NO: 33184 - DNA, 18 bp, synthetic construct
  misc_feature 1..18: note = Probe
  source 1..18: mol_type = other DNA
gtggtcatcacgttcgcc

SEQ ID NO: 33185 - DNA, 25 bp, synthetic construct
  misc_feature 1..25: note = Probe
  source 1..25: mol_type = other DNA
gtggtcatcacgttcgcctaacacg

SEQ ID NO: 33186 - DNA, 27 bp, synthetic construct
  misc_feature 1..27: note = Probe
  source 1..27: mol_type = other DNA
gtggtctagtggttaggattcggcgct

SEQ ID NO: 33187 - DNA, 19 bp, synthetic construct
  misc_feature 1..19: note = Probe
  source 1..19: mol_type = other DNA
gtggtgacttttgccctcc

SEQ ID NO: 33188 - DNA, 36 bp, synthetic construct; identical to SEQ ID NO: 14097
  misc_feature 1..36: note = Probe
  source 1..36: mol_type = other DNA

SEQ ID NO: 33189 - DNA, 16 bp, synthetic construct
  misc_feature 1..16: note = Probe
  source 1..16: mol_type = other DNA
gtggttaggattcggc

SEQ ID NO: 33190 - DNA, 17 bp, synthetic construct
  misc_feature 1..17: note = Probe
  source 1..17: mol_type = other DNA
gtggttaggattcggcg

SEQ ID NO: 33191 - DNA, 18 bp, synthetic construct
  misc_feature 1..18: note = Probe
  source 1..18: mol_type = other DNA
gtggttaggattcggcgc

SEQ ID NO: 33192 - DNA, 19 bp, synthetic construct
  misc_feature 1..19: note = Probe
  source 1..19: mol_type = other DNA
gtggttaggattcggcgct

SEQ ID NO: 33193 - DNA, 20 bp, synthetic construct
  misc_feature 1..20: note = Probe
  source 1..20: mol_type = other DNA
gtggttaggattcggcgctc

SEQ ID NO: 33194 - DNA, 25 bp, synthetic construct
  misc_feature 1..25: note = Probe
  source 1..25: mol_type = other DNA
gtggttaggattcggcgctctcacc

SEQ ID NO: 33195 - DNA, 34 bp, synthetic construct
  misc_feature 1..34: note = Probe
  source 1..34: mol_type = other DNA
gtggttaggattcggcgctctcaccgccgcggcc

SEQ ID NO: 33196 - DNA, 39 bp, synthetic construct; identical to SEQ ID NO: 14108
  misc_feature 1..39: note = Probe
  source 1..39: mol_type = other DNA

SEQ ID NO: 33197 - DNA, 15 bp, synthetic construct
  misc_feature 1..15: note = Probe
  source 1..15: mol_type = other DNA
gtggttagtactctg

SEQ ID NO: 33198 - DNA, 16 bp, synthetic construct
  misc_feature 1..16: note = Probe
  source 1..16: mol_type = other DNA
gtggttagtactctgc

SEQ ID NO: 33199 - DNA, 17 bp, synthetic construct
  misc_feature 1..17: note = Probe
  source 1..17: mol_type = other DNA
gtggttagtactctgcg

SEQ ID NO: 33200 - DNA, 18 bp, synthetic construct
  misc_feature 1..18: note = Probe
  source 1..18: mol_type = other DNA
gtggttagtactctgcgt

SEQ ID NO: 33201 - DNA, 20 bp, synthetic construct
  misc_feature 1..20: note = Probe
  source 1..20: mol_type = other DNA
gtggttagtactctgcgttg

SEQ ID NO: 33202 - DNA, 17 bp, synthetic construct
  misc_feature 1..17: note = Probe
  source 1..17: mol_type = other DNA
gtggttatcacgtctgc

SEQ ID NO: 33203 - DNA, 18 bp, synthetic construct
  misc_feature 1..18: note = Probe
  source 1..18: mol_type = other DNA
gtggttatcacgtctgct

SEQ ID NO: 33204 - DNA, 19 bp, synthetic construct
  misc_feature 1..19: note = Probe
  source 1..19: mol_type = other DNA
gtggttatcacgtctgctt

SEQ ID NO: 33205 - DNA, 20 bp, synthetic construct
  misc_feature 1..20: note = Probe
  source 1..20: mol_type = other DNA
gtggttatcacgtctgcttt

SEQ ID NO: 33206 - DNA, 21 bp, synthetic construct
  misc_feature 1..21: note = Probe
  source 1..21: mol_type = other DNA
gtggttatcacgtctgcttta

SEQ ID NO: 33207 - DNA, 22 bp, synthetic construct
  misc_feature 1..22: note = Probe
  source 1..22: mol_type = other DNA
gtggttatcacgtctgctttac

SEQ ID NO: 33208 - DNA, 25 bp, synthetic construct
  misc_feature 1..25: note = Probe
  source 1..25: mol_type = other DNA
gtggttatcacgtctgctttacacg

SEQ ID NO: 33209 - DNA, 17 bp, synthetic construct
  misc_feature 1..17: note = Probe
  source 1..17: mol_type = other DNA
gtggttatcacgttcgc

SEQ ID NO: 33210 - DNA, 18 bp, synthetic construct
  misc_feature 1..18: note = Probe
  source 1..18: mol_type = other DNA
gtggttatcacgttcgcc

SEQ ID NO: 33211 - DNA, 25 bp, synthetic construct
  misc_feature 1..25: note = Probe
  source 1..25: mol_type = other DNA
gtggttatcacgttcgcctaacacg

SEQ ID NO: 33212 - DNA, 20 bp, synthetic construct
  misc_feature 1..20: note = Probe
  source 1..20: mol_type = other DNA
gtggttatcacgttcgcctc

SEQ ID NO: 33213 - DNA, 21 bp, synthetic construct
  misc_feature 1..21: note = Probe
  source 1..21: mol_type = other DNA
gtggttatcacgttcgcctca

SEQ ID NO: 33214 - DNA, 22 bp, synthetic construct
  misc_feature 1..22: note = Probe
  source 1..22: mol_type = other DNA
gtggttatcacgttcgcctcac

SEQ ID NO: 33215 - DNA, 25 bp, synthetic construct
  misc_feature 1..25: note = Probe
  source 1..25: mol_type = other DNA
gtggttatcacgttcgcctcacacg

SEQ ID NO: 33216 - DNA, 25 bp, synthetic construct
  misc_feature 1..25: note = Probe
  source 1..25: mol_type = other DNA
gtggttcagtggtagaattctcgcc

SEQ ID NO: 33217 - DNA, 26 bp, synthetic construct
  misc_feature 1..26: note = Probe
  source 1..26: mol_type = other DNA
gtggttcagtggtagaattctcgcct

SEQ ID NO: 33218 - DNA, 29 bp, synthetic construct
  misc_feature 1..29: note = Probe
  source 1..29: mol_type = other DNA
gtggttcagtggtagaattctcgcctgcc

SEQ ID NO: 33219 - DNA, 36 bp, synthetic construct
  misc_feature 1..36: note = Probe
  source 1..36: mol_type = other DNA
gtggttcagtggtagaattctcgcctgccacgcggg

SEQ ID NO: 33220 - DNA, 15 bp, synthetic construct
  misc_feature 1..15: note = Probe
  source 1..15: mol_type = other DNA
gtggttctaacttgc

SEQ ID NO: 33221 - DNA, 28 bp, synthetic construct
  misc_feature 1..28: note = Probe
  source 1..28: mol_type = other DNA
gtggttctaacttgctggggtggcggtt

SEQ ID NO: 33222 - DNA, 29 bp, synthetic construct
  misc_feature 1..29: note = Probe
  source 1..29: mol_type = other DNA
gtggttctaacttgctggggtggcggttt

SEQ ID NO: 33223 - DNA, 36 bp, synthetic construct
  misc_feature 1..36: note = Probe
  source 1..36: mol_type = other DNA
gtggttgggggtgtagctcagtggtagagcgcgtgc

SEQ ID NO: 33224 - DNA, 16 bp, synthetic construct
  misc_feature 1..16: note = Probe
  source 1..16: mol_type = other DNA
gtggttgtagtccgtg

SEQ ID NO: 33225 - DNA, 17 bp, synthetic construct
  misc_feature 1..17: note = Probe
  source 1..17: mol_type = other DNA
gtggttgtagtccgtgc

SEQ ID NO: 33226 - DNA, 18 bp, synthetic construct
  misc_feature 1..18: note = Probe
  source 1..18: mol_type = other DNA
gtggttgtagtccgtgcg

SEQ ID NO: 33227 - DNA, 19 bp, synthetic construct
  misc_feature 1..19: note = Probe
  source 1..19: mol_type = other DNA
gtggttgtagtccgtgcga

SEQ ID NO: 33228 - DNA, 20 bp, synthetic construct
  misc_feature 1..20: note = Probe
  source 1..20: mol_type = other DNA
gtggttgtagtccgtgcgag

SEQ ID NO: 33229 - DNA, 25 bp, synthetic construct
  misc_feature 1..25: note = Probe
  source 1..25: mol_type = other DNA
gtggttgtagtccgtgcgagaataa

SEQ ID NO: 33230 - DNA, 36 bp, synthetic construct
  misc_feature 1..36: note = Probe
  source 1..36: mol_type = other DNA
gtggttgtagtccgtgcgagaataatgatgtatgct

SEQ ID NO: 33231 - DNA, 36 bp, synthetic construct
  misc_feature 1..36: note = Probe
  source 1..36: mol_type = other DNA
gtggtttccgtagtgtagtggttatcacgttcgcct

SEQ ID NO: 33232 - DNA, 16 bp, synthetic construct
  misc_feature 1..16: note = Probe
  source 1..16: mol_type = other DNA
gtgtaagcagggtcgt

SEQ ID NO: 33233 - DNA, 17 bp, synthetic construct
  misc_feature 1..17: note = Probe
  source 1..17: mol_type = other DNA
gtgtaagcagggtcgtt

SEQ ID NO: 33234 - DNA, 18 bp, synthetic construct
  misc_feature 1..18: note = Probe
  source 1..18: mol_type = other DNA
gtgtaagcagggtcgttt

SEQ ID NO: 33235 - DNA, 19 bp, synthetic construct
  misc_feature 1..19: note = Probe
  source 1..19: mol_type = other DNA
gtgtaagcagggtcgtttt

SEQ ID NO: 33236 - DNA, 20 bp, synthetic construct
  misc_feature 1..20: note = Probe
  source 1..20: mol_type = other DNA
gtgtaagcagggtcgtttta

SEQ ID NO: 33237 - DNA, 30 bp, synthetic construct
  misc_feature 1..30: note = Probe
  source 1..30: mol_type = other DNA
gtgtaatggtgagcactctggactctgaat

SEQ ID NO: 33238 - DNA, 36 bp, synthetic construct
  misc_feature 1..36: note = Probe
  source 1..36: mol_type = other DNA
gtgtaatggtgagcactctggactctgaatccagcg

SEQ ID NO: 33239 - DNA, 20 bp, synthetic construct
  misc_feature 1..20: note = Probe
  source 1..20: mol_type = other DNA
gtgtaatggttagcactctg

SEQ ID NO: 33240 - DNA, 22 bp, synthetic construct
  misc_feature 1..22: note = Probe
  source 1..22: mol_type = other DNA
gtgtaatggttagcactctgga

SEQ ID NO: 33241 - DNA, 23 bp, synthetic construct
  misc_feature 1..23: note = Probe
  source 1..23: mol_type = other DNA
gtgtaatggttagcactctggac

SEQ ID NO: 33242 - DNA, 24 bp, synthetic construct
  misc_feature 1..24: note = Probe
  source 1..24: mol_type = other DNA
gtgtaatggttagcactctggact

SEQ ID NO: 33243 - DNA, 25 bp, synthetic construct
  misc_feature 1..25: note = Probe
  source 1..25: mol_type = other DNA
gtgtaatggttagcactctggactc

SEQ ID NO: 33244 - DNA, 30 bp, synthetic construct
  misc_feature 1..30: note = Probe
  source 1..30: mol_type = other DNA
gtgtaatggttagcactctggactctgaat

SEQ ID NO: 33245 - DNA, 31 bp, synthetic construct
  misc_feature 1..31: note = Probe
  source 1..31: mol_type = other DNA
gtgtaatggttagcactctggactctgaatc

SEQ ID NO: 33246 - DNA, 32 bp, synthetic construct
  misc_feature 1..32: note = Probe
  source 1..32: mol_type = other DNA
gtgtaatggttagcactctggactctgaatcc

SEQ ID NO: 33247 - DNA, 43 bp, synthetic construct
  misc_feature 1..43: note = Probe
  source 1..43: mol_type = other DNA
gtgtaatggttagcactctggactctgaatccagcgatccgag

SEQ ID NO: 33248 - DNA, 44 bp, synthetic construct
  misc_feature 1..44: note = Probe
  source 1..44: mol_type = other DNA
gtgtaatggttagcactctggactctgaatccagcgatccgagt

SEQ ID NO: 33249 - DNA, 45 bp, synthetic construct
  misc_feature 1..45: note = Probe
  source 1..45: mol_type = other DNA
gtgtaatggttagcactctggactctgaatccagcgatccgagtt

SEQ ID NO: 33250 - DNA, 46 bp, synthetic construct
  misc_feature 1..46: note = Probe
  source 1..46: mol_type = other DNA
gtgtaatggttagcactctggactctgaatccagcgatccgagttc

SEQ ID NO: 33251 - DNA, 31 bp, synthetic construct
  misc_feature 1..31: note = Probe
  source 1..31: mol_type = other DNA
gtgtaatggttagcactctggactttgaatc

SEQ ID NO: 33252 - DNA, 32 bp, synthetic construct
  misc_feature 1..32: note = Probe
  source 1..32: mol_type = other DNA
gtgtaatggttagcactctggactttgaatcc

SEQ ID NO: 33253 - DNA, 36 bp, synthetic construct
  misc_feature 1..36: note = Probe
  source 1..36: mol_type = other DNA
gtgtaatggttagcactctggactttgaatccagcg

SEQ ID NO: 33254 - DNA, 45 bp, synthetic construct
  misc_feature 1..45: note = Probe
  source 1..45: mol_type = other DNA
gtgtaatggttagcactctggactttgaatccagcgatccgagtt

SEQ ID NO: 33255 - DNA, 36 bp, synthetic construct
  misc_feature 1..36: note = Probe
  source 1..36: mol_type = other DNA
gtgtagagagcctggatagctcagtcggtagagcat

SEQ ID NO: 33256 - DNA, 26 bp, synthetic construct
  misc_feature 1..26: note = Probe
  source 1..26: mol_type = other DNA
gtgtagaggccttggtggtgcagtgg

SEQ ID NO: 33257 - DNA, 17 bp, synthetic construct
  misc_feature 1..17: note = Probe
  source 1..17: mol_type = other DNA
gtgtagtcgtggccgag

SEQ ID NO: 33258 - DNA, 18 bp, synthetic construct
  misc_feature 1..18: note = Probe
  source 1..18: mol_type = other DNA
gtgtagtcgtggccgagt

SEQ ID NO: 33259 - DNA, 19 bp, synthetic construct
  misc_feature 1..19: note = Probe
  source 1..19: mol_type = other DNA
gtgtagtcgtggccgagtg

SEQ ID NO: 33260 - DNA, 36 bp, synthetic construct
  misc_feature 1..36: note = Probe
  source 1..36: mol_type = other DNA
gtgtagtcgtggccgagtggttaaggcgatggacta

SEQ ID NO: 33261 - DNA, 23 bp, synthetic construct
  misc_feature 1..23: note = Probe
  source 1..23: mol_type = other DNA
gtgtagtggttatcacgttcgcc

SEQ ID NO: 33262 - DNA, 25 bp, synthetic construct
  misc_feature 1..25: note = Probe
  source 1..25: mol_type = other DNA
gtgtagtggttatcacgttcgcctc

SEQ ID NO: 33263 - DNA, 15 bp, synthetic construct
  misc_feature 1..15: note = Probe
  source 1..15: mol_type = other DNA
gtgtccctagtagct

SEQ ID NO: 33264 - DNA, 16 bp, synthetic construct
  misc_feature 1..16: note = Probe
  source 1..16: mol_type = other DNA
gtgtccctagtagctc

SEQ ID NO: 33265 - DNA, 17 bp, synthetic construct
  misc_feature 1..17: note = Probe
  source 1..17: mol_type = other DNA
gtgtccctagtagctcg

SEQ ID NO: 33266 - DNA, 20 bp, synthetic construct
  misc_feature 1..20: note = Probe
  source 1..20: mol_type = other DNA
gtgtccctagtagctcgccg

SEQ ID NO: 33267 - DNA, 24 bp, synthetic construct
  misc_feature 1..24: note = Probe
  source 1..24: mol_type = other DNA
gtgtccctagtagctcgccgtgat

SEQ ID NO: 33268 - DNA, 31 bp, synthetic construct
  misc_feature 1..31: note = Probe
  source 1..31: mol_type = other DNA
gtgtccctagtagctcgccgtgatcgtatag

SEQ ID NO: 33269 - DNA, 36 bp, synthetic construct
  misc_feature 1..36: note = Probe
  source 1..36: mol_type = other DNA
gtgtccctagtagctcgccgtgatcgtatagtggtt

SEQ ID NO: 33270 - DNA, 33 bp, synthetic construct
  misc_feature 1..33: note = Probe
  source 1..33: mol_type = other DNA
gtgtccctggtggtctagtggctaggattcggc

SEQ ID NO: 33271 - DNA, 36 bp, synthetic construct
  misc_feature 1..36: note = Probe
  source 1..36: mol_type = other DNA
gtgtccttcgatagctcagttggtagagcggaggac

SEQ ID NO: 33272 - DNA, 44 bp, synthetic construct
  misc_feature 1..44: note = Probe
  source 1..44: mol_type = other DNA
gtgtccttcgatagctcagttggtagagcggaggactgtaggct

SEQ ID NO: 33273 - DNA, 18 bp, synthetic construct
  misc_feature 1..18: note = Probe
  source 1..18: mol_type = other DNA
gtgtcgcccggctagctc

SEQ ID NO: 33274 - DNA, 36 bp, synthetic construct
  misc_feature 1..36: note = Probe
  source 1..36: mol_type = other DNA
gtgtcgcccggctagctcagtcggtagagcatgaga

SEQ ID NO: 33275 - DNA, 36 bp, synthetic construct
  misc_feature 1..36: note = Probe
  source 1..36: mol_type = other DNA
gtgtcggctcgttggtctaggggtatgattctcgct

SEQ ID NO: 33276 - DNA, 33 bp, synthetic construct
  misc_feature 1..33: note = Probe
  source 1..33: mol_type = other DNA
gtgtctggctctgtggcgcaatggatagcgcat

SEQ ID NO: 33277 - DNA, 36 bp, synthetic construct
  misc_feature 1..36: note = Probe
  source 1..36: mol_type = other DNA
gtgtgaatccttcgatagctcagttggtagagcgga

SEQ ID NO: 33278 - DNA, 36 bp, synthetic construct
  misc_feature 1..36: note = Probe
  source 1..36: mol_type = other DNA
gtgtgacgaggtggccgagtggttaaggcgatggac

SEQ ID NO: 33279 - DNA, 15 bp, synthetic construct
  misc_feature 1..15: note = Probe
  source 1..15: mol_type = other DNA
gtgtgaggtattttt

SEQ ID NO: 33280 - DNA, 16 bp, synthetic construct
  misc_feature 1..16: note = Probe
  source 1..16: mol_type = other DNA
gtgtgaggtcccgggt

SEQ ID NO: 33281 - DNA, 36 bp, synthetic construct
  misc_feature 1..36: note = Probe
  source 1..36: mol_type = other DNA
gtgtggctcgttggtctaggggtatgattctcgctt

SEQ ID NO: 33282 - DNA, 36 bp, synthetic construct
  misc_feature 1..36: note = Probe
  source 1..36: mol_type = other DNA
gtgtggtttccgtagtgtagtggttatcacgttcgc

SEQ ID NO: 33283 - DNA, 38 bp, synthetic construct
  misc_feature 1..38: note = Probe
  source 1..38: mol_type = other DNA
gtgtggtttccgtagtgtagtggttatcacgttcgcct

SEQ ID NO: 33284 - DNA, 15 bp, synthetic construct
  misc_feature 1..15: note = Probe
  source 1..15: mol_type = other DNA
gtgtgtagctgcact

SEQ ID NO: 33285 - DNA, 36 bp, synthetic construct
  misc_feature 1..36: note = Probe
  source 1..36: mol_type = other DNA
gtgtgtggtagtgtggccgagcggtctaaggcgctg

SEQ ID NO: 33286 - DNA, 32 bp, synthetic construct; identical to SEQ ID NO: 7107
  misc_feature 1..32: note = Probe
  source 1..32: mol_type = other DNA

SEQ ID NO: 33287 - DNA, 20 bp, synthetic construct
  misc_feature 1..20: note = Probe
  source 1..20: mol_type = other DNA
gttaaagactttttctctga

SEQ ID NO: 33288 - DNA, 21 bp, synthetic construct
  misc_feature 1..21: note = Probe
  source 1..21: mol_type = other DNA
gttaaagactttttctctgat

SEQ ID NO: 33289 - DNA, 18 bp, synthetic construct
  misc_feature 1..18: note = Probe
  source 1..18: mol_type = other DNA
gttaaagattaagagaac

SEQ ID NO: 33290 - DNA, 19 bp, synthetic construct
  misc_feature 1..19: note = Probe
  source 1..19: mol_type = other DNA
gttaaagattaagagaacc

SEQ ID NO: 33291 - DNA, 20 bp, synthetic construct
  misc_feature 1..20: note = Probe
  source 1..20: mol_type = other DNA
gttaaagattaagagaacca

SEQ ID NO: 33292 - DNA, 22 bp, synthetic construct
  misc_feature 1..22: note = Probe
  source 1..22: mol_type = other DNA
gttaaagattaagagaaccaac

SEQ ID NO: 33293 - DNA, 23 bp, synthetic construct
  misc_feature 1..23: note = Probe
  source 1..23: mol_type = other DNA
gttaaagattaagagaaccaaca

SEQ ID NO: 33294 - DNA, 24 bp, synthetic construct
  misc_feature 1..24: note = Probe
  source 1..24: mol_type = other DNA
gttaaagattaagagaaccaacac

SEQ ID NO: 33295 - DNA, 25 bp, synthetic construct
  misc_feature 1..25: note = Probe
  source 1..25: mol_type = other DNA
gttaaagattaagagaaccaacacc

SEQ ID NO: 33296 - DNA, 26 bp, synthetic construct
  misc_feature 1..26: note = Probe
  source 1..26: mol_type = other DNA
gttaaagattaagagaaccaacacct

SEQ ID NO: 33297 - DNA, 27 bp, synthetic construct
  misc_feature 1..27: note = Probe
  source 1..27: mol_type = other DNA
gttaaagattaagagaaccaacacctc

SEQ ID NO: 33298 - DNA, 28 bp, synthetic construct
  misc_feature 1..28: note = Probe
  source 1..28: mol_type = other DNA
gttaaagattaagagaaccaacacctct

SEQ ID NO: 33299 - DNA, 36 bp, synthetic construct; identical to SEQ ID NO: 7116
  misc_feature 1..36: note = Probe
  source 1..36: mol_type = other DNA

SEQ ID NO: 33300 - DNA, 38 bp, synthetic construct; identical to SEQ ID NO: 7118
  misc_feature 1..38: note = Probe
  source 1..38: mol_type = other DNA

SEQ ID NO: 33301 - DNA, 39 bp, synthetic construct; identical to SEQ ID NO: 7119
  misc_feature 1..39: note = Probe
  source 1..39: mol_type = other DNA

SEQ ID NO: 33302 - DNA, 21 bp, synthetic construct
  misc_feature 1..21: note = Probe
  source 1..21: mol_type = other DNA
gttaaatacagaccaagagcc

SEQ ID NO: 33303 - DNA, 15 bp, synthetic construct
  misc_feature 1..15: note = Probe
  source 1..15: mol_type = other DNA
gttaaattataggct

SEQ ID NO: 33304 - DNA, 17 bp, synthetic construct
  misc_feature 1..17: note = Probe
  source 1..17: mol_type = other DNA
gttaaattataggctaa

SEQ ID NO: 33305 - DNA, 23 bp, synthetic construct
  misc_feature 1..23: note = Probe
  source 1..23: mol_type = other DNA
gttaactaagtgtttgtgggttt

SEQ ID NO: 33306 - DNA, 28 bp, synthetic construct
  misc_feature 1..28: note = Probe
  source 1..28: mol_type = other DNA
gttaactaagtgtttgtgggtttaagtc

SEQ ID NO: 33307 - DNA, 42 bp, synthetic construct; identical to SEQ ID NO: 22941
  misc_feature 1..42: note = Probe
  source 1..42: mol_type = other DNA

SEQ ID NO: 33308 - DNA, 43 bp, synthetic construct; identical to SEQ ID NO: 7129
  misc_feature 1..43: note = Probe
  source 1..43: mol_type = other DNA

SEQ ID NO: 33309 - DNA, 18 bp, synthetic construct
  misc_feature 1..18: note = Probe
  source 1..18: mol_type = other DNA
gttaagacggcagagccc

SEQ ID NO: 33310 - DNA, 16 bp, synthetic construct
  misc_feature 1..16: note = Probe
  source 1..16: mol_type = other DNA
gttaagatggcagagc

SEQ ID NO: 33311 - DNA, 17 bp, synthetic construct
  misc_feature 1..17: note = Probe
  source 1..17: mol_type = other DNA
gttaagatggcagagcc

SEQ ID NO: 33312 - DNA, 18 bp, synthetic construct
  misc_feature 1..18: note = Probe
  source 1..18: mol_type = other DNA
gttaagatggcagagccc

SEQ ID NO: 33313 - DNA, 19 bp, synthetic construct
  misc_feature 1..19: note = Probe
  source 1..19: mol_type = other DNA
gttaagatggcagagcccg

SEQ ID NO: 33314 - DNA, 20 bp, synthetic construct
  misc_feature 1..20: note = Probe
  source 1..20: mol_type = other DNA
gttaagatggcagagcccgg

SEQ ID NO: 33315 - DNA, 21 bp, synthetic construct
  misc_feature 1..21: note = Probe
  source 1..21: mol_type = other DNA
gttaagatggcagagcccggc

SEQ ID NO: 33316 - DNA, 22 bp, synthetic construct
  misc_feature 1..22: note = Probe
  source 1..22: mol_type = other DNA
gttaagatggcagagcccggca

SEQ ID NO: 33317 - DNA, 23 bp, synthetic construct
  misc_feature 1..23: note = Probe
  source 1..23: mol_type = other DNA
gttaagatggcagagcccggtaa

SEQ ID NO: 33318 - DNA, 27 bp, synthetic construct
  misc_feature 1..27: note = Probe
  source 1..27: mol_type = other DNA
gttaagatggcagagcccggtaatcgc

SEQ ID NO: 33319 - DNA, 38 bp, synthetic construct; identical to SEQ ID NO: 7140
  misc_feature 1..38: note = Probe
  source 1..38: mol_type = other DNA

SEQ ID NO: 33320 - DNA, 39 bp, synthetic construct; identical to SEQ ID NO: 7141
  misc_feature 1..39: note = Probe
  source 1..39: mol_type = other DNA

SEQ ID NO: 33321 - DNA, 40 bp, synthetic construct; identical to SEQ ID NO: 22959
  misc_feature 1..40: note = Probe
  source 1..40: mol_type = other DNA

SEQ ID NO: 33322 - DNA, 44 bp, synthetic construct; identical to SEQ ID NO: 22962
  misc_feature 1..44: note = Probe
  source 1..44: mol_type = other DNA

SEQ ID NO: 33323 - DNA, 45 bp, synthetic construct; identical to SEQ ID NO: 7144
  misc_feature 1..45: note = Probe
  source 1..45: mol_type = other DNA

SEQ ID NO: 33324 - DNA, 46 bp, synthetic construct
  misc_feature 1..46: note = Probe
  source 1..46: mol_type = other DNA
gttaagatggcagagcccggtaatcgcataaaacttaaaactttac

SEQ ID NO: 33325 - DNA, 47 bp, synthetic construct
  misc_feature 1..47: note = Probe
  source 1..47: mol_type = other DNA
gttaagatggcagagcccggtaatcgcataaaacttaaaactttaca

SEQ ID NO: 33326 - DNA, 50 bp, synthetic construct; identical to SEQ ID NO: 7145
  misc_feature 1..50: note = Probe
  source 1..50: mol_type = other DNA

SEQ ID NO: 33327 - DNA, 18 bp, synthetic construct
  misc_feature 1..18: note = Probe
  source 1..18: mol_type = other DNA
gttaagatggcagagcct

SEQ ID NO: 33328 - DNA, 16 bp, synthetic construct
  misc_feature 1..16: note = Probe
  source 1..16: mol_type = other DNA
gttagcactctggact

SEQ ID NO: 33329 - DNA, 21 bp, synthetic construct
  misc_feature 1..21: note = Probe
  source 1..21: mol_type = other DNA
gttagcactctggactctgaa

SEQ ID NO: 33330 - DNA, 22 bp, synthetic construct
  misc_feature 1..22: note = Probe
  source 1..22: mol_type = other DNA
gttagcactctggactctgaat

SEQ ID NO: 33331 - DNA, 23 bp, synthetic construct
  misc_feature 1..23: note = Probe
  source 1..23: mol_type = other DNA
gttagcactctggactctgaatc

SEQ ID NO: 33332 - DNA, 33 bp, synthetic construct
  misc_feature 1..33: note = Probe
  source 1..33: mol_type = other DNA
gttagcactctggactctgaatccagcgatccg

SEQ ID NO: 33333 - DNA, 35 bp, synthetic construct
  misc_feature 1..35: note = Probe
  source 1..35: mol_type = other DNA
gttagcactctggactctgaatccagcgatccgag

SEQ ID NO: 33334 - DNA, 37 bp, synthetic construct
  misc_feature 1..37: note = Probe
  source 1..37: mol_type = other DNA
gttagcactctggactctgaatccagcgatccgagtt

SEQ ID NO: 33335 - DNA, 38 bp, synthetic construct
  misc_feature 1..38: note = Probe
  source 1..38: mol_type = other DNA
gttagcactctggactctgaatccagcgatccgagttc

SEQ ID NO: 33336 - DNA, 39 bp, synthetic construct
  misc_feature 1..39: note = Probe
  source 1..39: mol_type = other DNA
gttagcactctggactctgaatccagcgatccgagttca

SEQ ID NO: 33337 - DNA, 36 bp, synthetic construct
  misc_feature 1..36: note = Probe
  source 1..36: mol_type = other DNA
gttagcactctggactttgaatccagcaatccgagt

SEQ ID NO: 33338 - DNA, 37 bp, synthetic construct
  misc_feature 1..37: note = Probe
  source 1..37: mol_type = other DNA
gttagcactctggactttgaatccagcgatccgagtt

SEQ ID NO: 33339 - DNA, 38 bp, synthetic construct
  misc_feature 1..38: note = Probe
  source 1..38: mol_type = other DNA
gttagcactctggactttgaatccagcgatccgagttc

SEQ ID NO: 33340 - DNA, 39 bp, synthetic construct
  misc_feature 1..39: note = Probe
  source 1..39: mol_type = other DNA
gttagcactctggactttgaatccagcgatccgagttca

SEQ ID NO: 33341 - DNA, 15 bp, synthetic construct
  misc_feature 1..15: note = Probe
  source 1..15: mol_type = other DNA
gttaggattcggcgc

SEQ ID NO: 33342 - DNA, 16 bp, synthetic construct
  misc_feature 1..16: note = Probe
  source 1..16: mol_type = other DNA
gttaggattcggcgct

SEQ ID NO: 33343 - DNA, 18 bp, synthetic construct
  misc_feature 1..18: note = Probe
  source 1..18: mol_type = other DNA
gttaggattcggcgctct

SEQ ID NO: 33344 - DNA, 22 bp, synthetic construct
  misc_feature 1..22: note = Probe
  source 1..22: mol_type = other DNA
gttaggattcggcgctctcacc

SEQ ID NO: 33345 - DNA, 23 bp, synthetic construct
  misc_feature 1..23: note = Probe
  source 1..23: mol_type = other DNA
gttaggattcggcgctctcaccg

SEQ ID NO: 33346 - DNA, 18 bp, synthetic construct
  misc_feature 1..18: note = Probe
  source 1..18: mol_type = other DNA
gttaggcctctttttacc

SEQ ID NO: 33347 - DNA, 21 bp, synthetic construct
  misc_feature 1..21: note = Probe
  source 1..21: mol_type = other DNA
gttaggcctctttttaccagc

SEQ ID NO: 33348 - DNA, 15 bp, synthetic construct
  misc_feature 1..15: note = Probe
  source 1..15: mol_type = other DNA
gttagtactctgcgt

SEQ ID NO: 33349 - DNA, 16 bp, synthetic construct
  misc_feature 1..16: note = Probe
  source 1..16: mol_type = other DNA
gttagtactctgcgtt

SEQ ID NO: 33350 - DNA, 17 bp, synthetic construct
  misc_feature 1..17: note = Probe
  source 1..17: mol_type = other DNA
gttagtactctgcgttg

SEQ ID NO: 33351 - DNA, 15 bp, synthetic construct
  misc_feature 1..15: note = Probe
  source 1..15: mol_type = other DNA
gttagtatccccgcc

SEQ ID NO: 33352 - DNA, 19 bp, synthetic construct
  misc_feature 1..19: note = Probe
  source 1..19: mol_type = other DNA
gttagtatccccgcctgtc

SEQ ID NO: 33353 - DNA, 25 bp, synthetic construct
  misc_feature 1..25: note = Probe
  source 1..25: mol_type = other DNA
gttagtctaggctgtcagctcttcc

SEQ ID NO: 33354 - DNA, 19 bp, synthetic construct
  misc_feature 1..19: note = Probe
  source 1..19: mol_type = other DNA
gttatacccttcccgtact

SEQ ID NO: 33355 - DNA, 17 bp, synthetic construct
  misc_feature 1..17: note = Probe
  source 1..17: mol_type = other DNA
gttatcacgtctgcttt

SEQ ID NO: 33356 - DNA, 22 bp, synthetic construct
  misc_feature 1..22: note = Probe
  source 1..22: mol_type = other DNA
gttatcacgtctgctttacacg

SEQ ID NO: 33357 - DNA, 15 bp, synthetic construct
  misc_feature 1..15: note = Probe
  source 1..15: mol_type = other DNA
gttatcacgttcgcc

SEQ ID NO: 33358 - DNA, 22 bp, synthetic construct
  misc_feature 1..22: note = Probe
  source 1..22: mol_type = other DNA
gttatcacgttcgcctaacacg

SEQ ID NO: 33359 - DNA, 22 bp, synthetic construct
  misc_feature 1..22: note = Probe
  source 1..22: mol_type = other DNA
gttatcacgttcgcctcacacg

SEQ ID NO: 33360 - DNA, 15 bp, synthetic construct
  misc_feature 1..15: note = Probe
  source 1..15: mol_type = other DNA
gttatgaaatggttt

SEQ ID NO: 33361 - DNA, 22 bp, synthetic construct
  misc_feature 1..22: note = Probe
  source 1..22: mol_type = other DNA
gttcaaatcccggacgagccct

SEQ ID NO: 33362 - DNA, 21 bp, synthetic construct
  misc_feature 1..21: note = Probe
  source 1..21: mol_type = other DNA
gttcaagtccctgttcgggcg

SEQ ID NO: 33363 - DNA, 23 bp, synthetic construct
  misc_feature 1..23: note = Probe
  source 1..23: mol_type = other DNA
gttcaattcccggtcagggaacc

SEQ ID NO: 33364 - DNA, 24 bp, synthetic construct
  misc_feature 1..24: note = Probe
  source 1..24: mol_type = other DNA
gttcaattcccggtcagggaacca

SEQ ID NO: 33365 - DNA, 15 bp, synthetic construct
  misc_feature 1..15: note = Probe
  source 1..15: mol_type = other DNA
gttcaggtcgcagtc

SEQ ID NO: 33366 - DNA, 19 bp, synthetic construct
  misc_feature 1..19: note = Probe
  source 1..19: mol_type = other DNA
gttcaggtcgcagtctccc

SEQ ID NO: 33367 - DNA, 21 bp, synthetic construct
  misc_feature 1..21: note = Probe
  source 1..21: mol_type = other DNA
gttcagtggtagaattctcgc

SEQ ID NO: 33368 - DNA, 22 bp, synthetic construct
  misc_feature 1..22: note = Probe
  source 1..22: mol_type = other DNA
gttcagtggtagaattctcgcc

SEQ ID NO: 33369 - DNA, 23 bp, synthetic construct
  misc_feature 1..23: note = Probe
  source 1..23: mol_type = other DNA
gttcagtggtagaattctcgcct

SEQ ID NO: 33370 - DNA, 26 bp, synthetic construct
  misc_feature 1..26: note = Probe
  source 1..26: mol_type = other DNA
gttcagtggtagaattctcgcctccc

SEQ ID NO: 33371 - DNA, 36 bp, synthetic construct
  misc_feature 1..36: note = Probe
  source 1..36: mol_type = other DNA
gttcagtggtagaattctcgcctcccacgcgggaga

SEQ ID NO: 33372 - DNA, 24 bp, synthetic construct
  misc_feature 1..24: note = Probe
  source 1..24: mol_type = other DNA
gttcagtggtagaattctcgcctg

SEQ ID NO: 33373 - DNA, 25 bp, synthetic construct
  misc_feature 1..25: note = Probe
  source 1..25: mol_type = other DNA
gttcagtggtagaattctcgcctgc

SEQ ID NO: 33374 - DNA, 26 bp, synthetic construct
  misc_feature 1..26: note = Probe
  source 1..26: mol_type = other DNA
gttcagtggtagaattctcgcctgcc

SEQ ID NO: 33375 - DNA, 27 bp, synthetic construct
  misc_feature 1..27: note = Probe
  source 1..27: mol_type = other DNA
gttcagtggtagaattctcgcctgcca

SEQ ID NO: 33376 - DNA, 36 bp, synthetic construct
  misc_feature 1..36: note = Probe
  source 1..36: mol_type = other DNA
gttcagtggtagaattctcgcctgccacgcgggagg

SEQ ID NO: 33377 - DNA, 30 bp, synthetic construct; identical to SEQ ID NO: 14124
  misc_feature 1..30: note = Probe
  source 1..30: mol_type = other DNA

SEQ ID NO: 33378 - DNA, 50 bp, synthetic construct
  misc_feature 1..50: note = Probe
  source 1..50: mol_type = other DNA
gttccatggtgtaatggttagcactctggactctgaatccagcgatccga

SEQ ID NO: 33379 - DNA, 36 bp, synthetic construct
  misc_feature 1..36: note = Probe
  source 1..36: mol_type = other DNA
gttccctggtggtctagtggttaggattcggcgctc

SEQ ID NO: 33380 - DNA, 15 bp, synthetic construct
  misc_feature 1..15: note = Probe
  source 1..15: mol_type = other DNA
gttccttctactttt

SEQ ID NO: 33381 - DNA, 30 bp, synthetic construct
  misc_feature 1..30: note = Probe
  source 1..30: mol_type = other DNA
gttccttgtccggtttatgtctcttggttt

SEQ ID NO: 33382 - DNA, 31 bp, synthetic construct
  misc_feature 1..31: note = Probe
  source 1..31: mol_type = other DNA
gttcgatccccggcatctccattgtagtttt

SEQ ID NO: 33383 - DNA, 23 bp, synthetic construct
  misc_feature 1..23: note = Probe
  source 1..23: mol_type = other DNA
gttcgattccccgacggggagac

SEQ ID NO: 33384 - DNA, 23 bp, synthetic construct
  misc_feature 1..23: note = Probe
  source 1..23: mol_type = other DNA
gttcgattccccgacggggaggc

SEQ ID NO: 33385 - DNA, 24 bp, synthetic construct
  misc_feature 1..24: note = Probe
  source 1..24: mol_type = other DNA
gttcgattccccgacggggaggca

SEQ ID NO: 33386 - DNA, 15 bp, synthetic construct
  misc_feature 1..15: note = Probe
  source 1..15: mol_type = other DNA
gttcgattcccggcc

SEQ ID NO: 33387 - DNA, 15 bp, synthetic construct
  misc_feature 1..15: note = Probe
  source 1..15: mol_type = other DNA
gttcgattcccgggc

SEQ ID NO: 33388 - DNA, 23 bp, synthetic construct
  misc_feature 1..23: note = Probe
  source 1..23: mol_type = other DNA
gttcgattcccggtcagggaaca

SEQ ID NO: 33389 - DNA, 24 bp, synthetic construct
  misc_feature 1..24: note = Probe
  source 1..24: mol_type = other DNA
gttcgattcccggtcagggaacaa

SEQ ID NO: 33390 - DNA, 23 bp, synthetic construct
  misc_feature 1..23: note = Probe
  source 1..23: mol_type = other DNA
gttcgattcccggtcagggaagc

SEQ ID NO: 33391 - DNA, 23 bp, synthetic construct
  misc_feature 1..23: note = Probe
  source 1..23: mol_type = other DNA
gttcgattcccggtcatggaacc

SEQ ID NO: 33392 - DNA, 24 bp, synthetic construct
  misc_feature 1..24: note = Probe
  source 1..24: mol_type = other DNA
gttcgattcccggtcatggaacca

SEQ ID NO: 33393 - DNA, 23 bp, synthetic construct
  misc_feature 1..23: note = Probe
  source 1..23: mol_type = other DNA
gttcgattcctggtcagggaacc

SEQ ID NO: 33394 - DNA, 24 bp, synthetic construct
  misc_feature 1..24: note = Probe
  source 1..24: mol_type = other DNA
gttcgattcctggtcagggaacca

SEQ ID NO: 33395 - DNA, 23 bp, synthetic construct
  misc_feature 1..23: note = Probe
  source 1..23: mol_type = other DNA
gttcgattccttccttttttgtc

SEQ ID NO: 33396 - DNA, 36 bp, synthetic construct
  misc_feature 1..36: note = Probe
  source 1..36: mol_type = other DNA
gttctggctcgttggtctagtggtatgattctcgct

SEQ ID NO: 33397 - DNA, 15 bp, synthetic construct
  misc_feature 1..15: note = Probe
  source 1..15: mol_type = other DNA
gttcttgtagttgaa

SEQ ID NO: 33398 - DNA, 16 bp, synthetic construct
  misc_feature 1..16: note = Probe
  source 1..16: mol_type = other DNA
gttcttgtagttgaaa

SEQ ID NO: 33399 - DNA, 17 bp, synthetic construct
  misc_feature 1..17: note = Probe
  source 1..17: mol_type = other DNA
gttcttgtagttgaaat

SEQ ID NO: 33400 - DNA, 18 bp, synthetic construct
  misc_feature 1..18: note = Probe
  source 1..18: mol_type = other DNA
gttcttgtagttgaaata

SEQ ID NO: 33401 - DNA, 19 bp, synthetic construct
  misc_feature 1..19: note = Probe
  source 1..19: mol_type = other DNA
gttcttgtagttgaaatac

SEQ ID NO: 33402 - DNA, 20 bp, synthetic construct
  misc_feature 1..20: note = Probe
  source 1..20: mol_type = other DNA
gttcttgtagttgaaataca

SEQ ID NO: 33403 - DNA, 22 bp, synthetic construct
  misc_feature 1..22: note = Probe
  source 1..22: mol_type = other DNA
gttcttgtagttgaaatacaac

SEQ ID NO: 33404 - DNA, 23 bp, synthetic construct
  misc_feature 1..23: note = Probe
  source 1..23: mol_type = other DNA
gttcttgtagttgaaatacaacg

SEQ ID NO: 33405 - DNA, 26 bp, synthetic construct
  misc_feature 1..26: note = Probe
  source 1..26: mol_type = other DNA
gttcttgtagttgaaatacaacgatg

SEQ ID NO: 33406 - DNA, 28 bp, synthetic construct
  misc_feature 1..28: note = Probe
  source 1..28: mol_type = other DNA
gttcttgtagttgaaatacaacgatggt

SEQ ID NO: 33407 - DNA, 29 bp, synthetic construct
  misc_feature 1..29: note = Probe
  source 1..29: mol_type = other DNA
gttcttgtagttgaaatacaacgatggtt

SEQ ID NO: 33408 - DNA, 32 bp, synthetic construct; identical to SEQ ID NO: 7197
  misc_feature 1..32: note = Probe
  source 1..32: mol_type = other DNA

SEQ ID NO: 33409 - DNA, 33 bp, synthetic construct; identical to SEQ ID NO: 7198
  misc_feature 1..33: note = Probe
  source 1..33: mol_type = other DNA

SEQ ID NO: 33410 - DNA, 34 bp, synthetic construct; identical to SEQ ID NO: 7199
  misc_feature 1..34: note = Probe
  source 1..34: mol_type = other DNA

SEQ ID NO: 33411 - DNA, 35 bp, synthetic construct
  misc_feature 1..35: note = Probe
  source 1..35: mol_type = other DNA
gttcttgtagttgaaatacaacgatggtttttcat

SEQ ID NO: 33412 - DNA, 36 bp, synthetic construct; identical to SEQ ID NO: 23017
  misc_feature 1..36: note = Probe
  source 1..36: mol_type = other DNA

SEQ ID NO: 33413 - DNA, 37 bp, synthetic construct
  misc_feature 1..37: note = Probe
  source 1..37: mol_type = other DNA
gttcttgtagttgaaatacaacgatggtttttcatat

SEQ ID NO: 33414 - DNA, 38 bp, synthetic construct; identical to SEQ ID NO: 7200
  misc_feature 1..38: note = Probe
  source 1..38: mol_type = other DNA

SEQ ID NO: 33415 - DNA, 39 bp, synthetic construct
  misc_feature 1..39: note = Probe
  source 1..39: mol_type = other DNA
gttcttgtagttgaaatacaacgatggtttttcatatca

SEQ ID NO: 33416 - DNA, 40 bp, synthetic construct
  misc_feature 1..40: note = Probe
  source 1..40: mol_type = other DNA
gttcttgtagttgaaatacaacgatggtttttcatatcat

SEQ ID NO: 33417 - DNA, 44 bp, synthetic construct; identical to SEQ ID NO: 7203
  misc_feature 1..44: note = Probe
  source 1..44: mol_type = other DNA

SEQ ID NO: 33418 - DNA, 45 bp, synthetic construct; identical to SEQ ID NO: 7204
  misc_feature 1..45: note = Probe
  source 1..45: mol_type = other DNA

SEQ ID NO: 33419 - DNA, 46 bp, synthetic construct; identical to SEQ ID NO: 1528
  misc_feature 1..46: note = Probe
  source 1..46: mol_type = other DNA

SEQ ID NO: 33420 - DNA, 50 bp, synthetic construct; identical to SEQ ID NO: 1529
  misc_feature 1..50: note = Probe
  source 1..50: mol_type = other DNA

SEQ ID NO: 33421 - DNA, 28 bp, synthetic construct
  misc_feature 1..28: note = Probe
  source 1..28: mol_type = other DNA
gttgatgcagagtggggttttgcagtcc

SEQ ID NO: 33422 - DNA, 29 bp, synthetic construct
  misc_feature 1..29: note = Probe
  source 1..29: mol_type = other DNA
gttgatgcagagtggggttttgcagtcct

SEQ ID NO: 33423 - DNA, 30 bp, synthetic construct; identical to SEQ ID NO: 14129
  misc_feature 1..30: note = Probe
  source 1..30: mol_type = other DNA

SEQ ID NO: 33424 - DNA, 33 bp, synthetic construct; identical to SEQ ID NO: 23021
  misc_feature 1..33: note = Probe
  source 1..33: mol_type = other DNA

SEQ ID NO: 33425 - DNA, 15 bp, synthetic construct
  misc_feature 1..15: note = Probe
  source 1..15: mol_type = other DNA
gttgattagggtgct

SEQ ID NO: 33426 - DNA, 16 bp, synthetic construct
  misc_feature 1..16: note = Probe
  source 1..16: mol_type = other DNA
gttgattagggtgctt

SEQ ID NO: 33427 - DNA, 20 bp, synthetic construct
  misc_feature 1..20: note = Probe
  source 1..20: mol_type = other DNA
gttgattagggtgcttagct

SEQ ID NO: 33428 - DNA, 22 bp, synthetic construct
  misc_feature 1..22: note = Probe
  source 1..22: mol_type = other DNA
gttgattagggtgcttagctgt

SEQ ID NO: 33429 - DNA, 23 bp, synthetic construct
  misc_feature 1..23: note = Probe
  source 1..23: mol_type = other DNA
gttgattagggtgcttagctgtt

SEQ ID NO: 33430 - DNA, 26 bp, synthetic construct
  misc_feature 1..26: note = Probe
  source 1..26: mol_type = other DNA
gttgattagggtgcttagctgttaac

SEQ ID NO: 33431 - DNA, 28 bp, synthetic construct
  misc_feature 1..28: note = Probe
  source 1..28: mol_type = other DNA
gttgattagggtgcttagctgttaacta

SEQ ID NO: 33432 - DNA, 41 bp, synthetic construct
  misc_feature 1..41: note = Probe
  source 1..41: mol_type = other DNA
gttgattagggtgcttagctgttaactaagtgtttgtgggt

SEQ ID NO: 33433 - DNA, 43 bp, synthetic construct
  misc_feature 1..43: note = Probe
  source 1..43: mol_type = other DNA
gttgattagggtgcttagctgttaactaagtgtttgtgggttt

SEQ ID NO: 33434 - DNA, 21 bp, synthetic construct
  misc_feature 1..21: note = Probe
  source 1..21: mol_type = other DNA
gttgggagagcgttagactga

SEQ ID NO: 33435 - DNA, 22 bp, synthetic construct
  misc_feature 1..22: note = Probe
  source 1..22: mol_type = other DNA
gttgggagagcgttagactgaa

SEQ ID NO: 33436 - DNA, 18 bp, synthetic construct
  misc_feature 1..18: note = Probe
  source 1..18: mol_type = other DNA
gttggtagagcatgggac

SEQ ID NO: 33437 - DNA, 20 bp, synthetic construct
  misc_feature 1..20: note = Probe
  source 1..20: mol_type = other DNA
gttggtagagcatgggactc

SEQ ID NO: 33438 - DNA, 17 bp, synthetic construct
  misc_feature 1..17: note = Probe
  source 1..17: mol_type = other DNA
gttggtagagcggagga

SEQ ID NO: 33439 - DNA, 18 bp, synthetic construct
  misc_feature 1..18: note = Probe
  source 1..18: mol_type = other DNA
gttggtagagcggaggac

SEQ ID NO: 33440 - DNA, 22 bp, synthetic construct
  misc_feature 1..22: note = Probe
  source 1..22: mol_type = other DNA
gttggtagagcggaggactgta

SEQ ID NO: 33441 - DNA, 23 bp, synthetic construct
  misc_feature 1..23: note = Probe
  source 1..23: mol_type = other DNA
gttggtagagcggaggactgtag

SEQ ID NO: 33442 - DNA, 24 bp, synthetic construct
  misc_feature 1..24: note = Probe
  source 1..24: mol_type = other DNA
gttggtagagcggaggactgtagt

SEQ ID NO: 33443 - DNA, 23 bp, synthetic construct
  misc_feature 1..23: note = Probe
  source 1..23: mol_type = other DNA
gttggtctaggggtatgattctc

SEQ ID NO: 33444 - DNA, 25 bp, synthetic construct
  misc_feature 1..25: note = Probe
  source 1..25: mol_type = other DNA
gttggtctaggggtatgattctcgc

SEQ ID NO: 33445 - DNA, 26 bp, synthetic construct
  misc_feature 1..26: note = Probe
  source 1..26: mol_type = other DNA
gttggtctaggggtatgattctcgct

SEQ ID NO: 33446 - DNA, 30 bp, synthetic construct; identical to SEQ ID NO: 23033
  misc_feature 1..30: note = Probe
  source 1..30: mol_type = other DNA

SEQ ID NO: 33447 - DNA, 36 bp, synthetic construct
  misc_feature 1..36: note = Probe
  source 1..36: mol_type = other DNA
gttggtggtatagtggtgagcatagctgccttccaa

SEQ ID NO: 33448 - DNA, 19 bp, synthetic construct
  misc_feature 1..19: note = Probe
  source 1..19: mol_type = other DNA
gttggttagagcgtggtgc

SEQ ID NO: 33449 - DNA, 36 bp, synthetic construct
  misc_feature 1..36: note = Probe
  source 1..36: mol_type = other DNA
gttggtttccgtagtgtagtggttatcacgttcgcc

SEQ ID NO: 33450 - DNA, 37 bp, synthetic construct
  misc_feature 1..37: note = Probe
  source 1..37: mol_type = other DNA
gttggtttccgtagtgtagtggttatcacgttcgcct

SEQ ID NO: 33451 - DNA, 17 bp, synthetic construct
  misc_feature 1..17: note = Probe
  source 1..17: mol_type = other DNA
gttgtagtccgtgcgag

SEQ ID NO: 33452 - DNA, 18 bp, synthetic construct
  misc_feature 1..18: note = Probe
  source 1..18: mol_type = other DNA
gttgtagtccgtgcgaga

SEQ ID NO: 33453 - DNA, 19 bp, synthetic construct
  misc_feature 1..19: note = Probe
  source 1..19: mol_type = other DNA
gttgtagtccgtgcgagaa

SEQ ID NO: 33454 - DNA, 20 bp, synthetic construct
  misc_feature 1..20: note = Probe
  source 1..20: mol_type = other DNA
gttgtagtccgtgcgagaat

SEQ ID NO: 33455 - DNA, 21 bp, synthetic construct
  misc_feature 1..21: note = Probe
  source 1..21: mol_type = other DNA
gttgtagtccgtgcgagaata

SEQ ID NO: 33456 - DNA, 22 bp, synthetic construct
  misc_feature 1..22: note = Probe
  source 1..22: mol_type = other DNA
gttgtagtccgtgcgagaataa

SEQ ID NO: 33457 - DNA, 33 bp, synthetic construct
  misc_feature 1..33: note = Probe
  source 1..33: mol_type = other DNA
gttgttggccccatggtgtaatggttagcactc

SEQ ID NO: 33458 - DNA, 28 bp, synthetic construct
  misc_feature 1..28: note = Probe
  source 1..28: mol_type = other DNA
gtttaaacaaaacgaatgatttcgactc

SEQ ID NO: 33459 - DNA, 29 bp, synthetic construct
  misc_feature 1..29: note = Probe
  source 1..29: mol_type = other DNA
gtttaaacaaaacgaatgatttcgactca

SEQ ID NO: 33460 - DNA, 25 bp, synthetic construct
  misc_feature 1..25: note = Probe
  source 1..25: mol_type = other DNA
gtttaaattagaatcttagctttgg

SEQ ID NO: 33461 - DNA, 26 bp, synthetic construct
  misc_feature 1..26: note = Probe
  source 1..26: mol_type = other DNA
gtttaaattagaatcttagctttggg

SEQ ID NO: 33462 - DNA, 36 bp, synthetic construct
  misc_feature 1..36: note = Probe
  source 1..36: mol_type = other DNA
gtttaaattagaatcttagctttgggtgctaatggt

SEQ ID NO: 33463 - DNA, 28 bp, synthetic construct
  misc_feature 1..28: note = Probe
  source 1..28: mol_type = other DNA
gtttaaccaaaacatcagattgtgaatc

SEQ ID NO: 33464 - DNA, 36 bp, synthetic construct; identical to SEQ ID NO: 23054
  misc_feature 1..36: note = Probe
  source 1..36: mol_type = other DNA

SEQ ID NO: 33465 - DNA, 42 bp, synthetic construct
  misc_feature 1..42: note = Probe
  source 1..42: mol_type = other DNA
gtttaaccaaaacatcagattgtgaatctgacaacagaggct

SEQ ID NO: 33466 - DNA, 18 bp, synthetic construct
  misc_feature 1..18: note = Probe
  source 1..18: mol_type = other DNA
gtttaagtcccattggtc

SEQ ID NO: 33467 - DNA, 19 bp, synthetic construct
  misc_feature 1..19: note = Probe
  source 1..19: mol_type = other DNA
gtttaagtcccattggtct

SEQ ID NO: 33468 - DNA, 15 bp, synthetic construct
  misc_feature 1..15: note = Probe
  source 1..15: mol_type = other DNA
gtttagacgggctca

SEQ ID NO: 33469 - DNA, 16 bp, synthetic construct
  misc_feature 1..16: note = Probe
  source 1..16: mol_type = other DNA
gtttagacgggctcac

SEQ ID NO: 33470 - DNA, 17 bp, synthetic construct
  misc_feature 1..17: note = Probe
  source 1..17: mol_type = other DNA
gtttagacgggctcaca

SEQ ID NO: 33471 - DNA, 18 bp, synthetic construct
  misc_feature 1..18: note = Probe
  source 1..18: mol_type = other DNA
gtttagacgggctcacat

SEQ ID NO: 33472 - DNA, 19 bp, synthetic construct
  misc_feature 1..19: note = Probe
  source 1..19: mol_type = other DNA
gtttagacgggctcacatc

SEQ ID NO: 33473 - DNA, 20 bp, synthetic construct
  misc_feature 1..20: note = Probe
  source 1..20: mol_type = other DNA
gtttagacgggctcacatca

SEQ ID NO: 33474 - DNA, 21 bp, synthetic construct
  misc_feature 1..21: note = Probe
  source 1..21: mol_type = other DNA
gtttagacgggctcacatcac

SEQ ID NO: 33475 - DNA, 22 bp, synthetic construct
  misc_feature 1..22: note = Probe
  source 1..22: mol_type = other DNA
gtttagacgggctcacatcacc

SEQ ID NO: 33476 - DNA, 23 bp, synthetic construct
  misc_feature 1..23: note = Probe
  source 1..23: mol_type = other DNA
gtttagacgggctcacatcaccc

SEQ ID NO: 33477 - DNA, 27 bp, synthetic construct
  misc_feature 1..27: note = Probe
  source 1..27: mol_type = other DNA
gtttagacgggctcacatcaccccata

SEQ ID NO: 33478 - DNA, 28 bp, synthetic construct
  misc_feature 1..28: note = Probe
  source 1..28: mol_type = other DNA
gtttagacgggctcacatcaccccataa

SEQ ID NO: 33479 - DNA, 29 bp, synthetic construct
  misc_feature 1..29: note = Probe
  source 1..29: mol_type = other DNA
gtttagacgggctcacatcaccccataaa

SEQ ID NO: 33480 - DNA, 16 bp, synthetic construct
  misc_feature 1..16: note = Probe
  source 1..16: mol_type = other DNA
gtttatgtagcttacc

SEQ ID NO: 33481 - DNA, 23 bp, synthetic construct
  misc_feature 1..23: note = Probe
  source 1..23: mol_type = other DNA
gtttatgtagcttacctcctcaa

SEQ ID NO: 33482 - DNA, 24 bp, synthetic construct
  misc_feature 1..24: note = Probe
  source 1..24: mol_type = other DNA
gtttatgtagcttacctcctcaaa

SEQ ID NO: 33483 - DNA, 26 bp, synthetic construct
  misc_feature 1..26: note = Probe
  source 1..26: mol_type = other DNA
gtttatgtagcttacctcctcaaagc

SEQ ID NO: 33484 - DNA, 27 bp, synthetic construct
  misc_feature 1..27: note = Probe
  source 1..27: mol_type = other DNA
gtttatgtagcttacctcctcaaagca

SEQ ID NO: 33485 - DNA, 30 bp, synthetic construct; identical to SEQ ID NO: 1536
  misc_feature 1..30: note = Probe
  source 1..30: mol_type = other DNA

SEQ ID NO: 33486 - DNA, 32 bp, synthetic construct; identical to SEQ ID NO: 7245
  misc_feature 1..32: note = Probe
  source 1..32: mol_type = other DNA

SEQ ID NO: 33487 - DNA, 34 bp, synthetic construct; identical to SEQ ID NO: 1538
  misc_feature 1..34: note = Probe
  source 1..34: mol_type = other DNA

SEQ ID NO: 33488 - DNA, 35 bp, synthetic construct; identical to SEQ ID NO: 1539
  misc_feature 1..35: note = Probe
  source 1..35: mol_type = other DNA

SEQ ID NO: 33489 - DNA, 37 bp, synthetic construct; identical to SEQ ID NO: 1541
  misc_feature 1..37: note = Probe
  source 1..37: mol_type = other DNA

SEQ ID NO: 33490 - DNA, 50 bp, synthetic construct; identical to SEQ ID NO: 7251
  misc_feature 1..50: note = Probe
  source 1..50: mol_type = other DNA

SEQ ID NO: 33491 - DNA, 32 bp, synthetic construct; identical to SEQ ID NO: 23082
  misc_feature 1..32: note = Probe
  source 1..32: mol_type = other DNA

SEQ ID NO: 33492 - DNA, 34 bp, synthetic construct; identical to SEQ ID NO: 23084
  misc_feature 1..34: note = Probe
  source 1..34: mol_type = other DNA

SEQ ID NO: 33493 - DNA, 36 bp, synthetic construct
  misc_feature 1..36: note = Probe
  source 1..36: mol_type = other DNA
gtttccgtagtggagtggttatcacgttcgcctcac

SEQ ID NO: 33494 - DNA, 15 bp, synthetic construct
  misc_feature 1..15: note = Probe
  source 1..15: mol_type = other DNA
gtttccgtagtgtag

SEQ ID NO: 33495 - DNA, 30 bp, synthetic construct; identical to SEQ ID NO: 8769
  misc_feature 1..30: note = Probe
  source 1..30: mol_type = other DNA

SEQ ID NO: 33496 - DNA, 35 bp, synthetic construct; identical to SEQ ID NO: 1551
  misc_feature 1..35: note = Probe
  source 1..35: mol_type = other DNA

SEQ ID NO: 33497 - DNA, 50 bp, synthetic construct; identical to SEQ ID NO: 7255
  misc_feature 1..50: note = Probe
  source 1..50: mol_type = other DNA

SEQ ID NO: 33498 - DNA, 16 bp, synthetic construct
  misc_feature 1..16: note = Probe
  source 1..16: mol_type = other DNA
gtttccgtagtgtagt

SEQ ID NO: 33499 - DNA, 18 bp, synthetic construct
  misc_feature 1..18: note = Probe
  source 1..18: mol_type = other DNA
gtttccgtagtgtagtgg

SEQ ID NO: 33500 - DNA, 19 bp, synthetic construct
  misc_feature 1..19: note = Probe
  source 1..19: mol_type = other DNA
gtttccgtagtgtagtggt

SEQ ID NO: 33501 - DNA, 29 bp, synthetic construct
  misc_feature 1..29: note = Probe
  source 1..29: mol_type = other DNA
gtttccgtagtgtagtggtcatcacgttc

SEQ ID NO: 33502 - DNA, 30 bp, synthetic construct; identical to SEQ ID NO: 8772
  misc_feature 1..30: note = Probe
  source 1..30: mol_type = other DNA

SEQ ID NO: 33503 - DNA, 31 bp, synthetic construct; identical to SEQ ID NO: 1559
  misc_feature 1..31: note = Probe
  source 1..31: mol_type = other DNA

SEQ ID NO: 33504 - DNA, 34 bp, synthetic construct; identical to SEQ ID NO: 7259
  misc_feature 1..34: note = Probe
  source 1..34: mol_type = other DNA

SEQ ID NO: 33505 - DNA, 35 bp, synthetic construct; identical to SEQ ID NO: 7260
  misc_feature 1..35: note = Probe
  source 1..35: mol_type = other DNA

SEQ ID NO: 33506 - DNA, 36 bp, synthetic construct; identical to SEQ ID NO: 7261
  misc_feature 1..36: note = Probe
  source 1..36: mol_type = other DNA

SEQ ID NO: 33507 - DNA, 37 bp, synthetic construct; identical to SEQ ID NO: 7262
  misc_feature 1..37: note = Probe
  source 1..37: mol_type = other DNA

SEQ ID NO: 33508 - DNA, 39 bp, synthetic construct; identical to SEQ ID NO: 23108
  misc_feature 1..39: note = Probe
  source 1..39: mol_type = other DNA

SEQ ID NO: 33509 - DNA, 42 bp, synthetic construct
  misc_feature 1..42: note = Probe
  source 1..42: mol_type = other DNA
gtttccgtagtgtagtggtcatcacgttcgcctaacacgcga

SEQ ID NO: 33510 - DNA, 50 bp, synthetic construct; identical to SEQ ID NO: 7263
  misc_feature 1..50: note = Probe
  source 1..50: mol_type = other DNA

SEQ ID NO: 33511 - DNA, 20 bp, synthetic construct
  misc_feature 1..20: note = Probe
  source 1..20: mol_type = other DNA
gtttccgtagtgtagtggtt

SEQ ID NO: 33512 - DNA, 21 bp, synthetic construct
  misc_feature 1..21: note = Probe
  source 1..21: mol_type = other DNA
gtttccgtagtgtagtggtta

SEQ ID NO: 33513 - DNA, 22 bp, synthetic construct
  misc_feature 1..22: note = Probe
  source 1..22: mol_type = other DNA
gtttccgtagtgtagtggttat

SEQ ID NO: 33514 - DNA, 23 bp, synthetic construct
  misc_feature 1..23: note = Probe
  source 1..23: mol_type = other DNA
gtttccgtagtgtagtggttatc

SEQ ID NO: 33515 - DNA, 24 bp, synthetic construct
  misc_feature 1..24: note = Probe
  source 1..24: mol_type = other DNA
gtttccgtagtgtagtggttatca

SEQ ID NO: 33516 - DNA, 25 bp, synthetic construct
  misc_feature 1..25: note = Probe
  source 1..25: mol_type = other DNA
gtttccgtagtgtagtggttatcac

SEQ ID NO: 33517 - DNA, 26 bp, synthetic construct
  misc_feature 1..26: note = Probe
  source 1..26: mol_type = other DNA
gtttccgtagtgtagtggttatcacg

SEQ ID NO: 33518 - DNA, 27 bp, synthetic construct
  misc_feature 1..27: note = Probe
  source 1..27: mol_type = other DNA
gtttccgtagtgtagtggttatcacgt

SEQ ID NO: 33519 - DNA, 28 bp, synthetic construct
  misc_feature 1..28: note = Probe
  source 1..28: mol_type = other DNA
gtttccgtagtgtagtggttatcacgtt

SEQ ID NO: 33520 - DNA, 29 bp, synthetic construct
  misc_feature 1..29: note = Probe
  source 1..29: mol_type = other DNA
gtttccgtagtgtagtggttatcacgttc

SEQ ID NO: 33521 - DNA, 30 bp, synthetic construct; identical to SEQ ID NO: 7273
  misc_feature 1..30: note = Probe
  source 1..30: mol_type = other DNA

SEQ ID NO: 33522 - DNA, 31 bp, synthetic construct; identical to SEQ ID NO: 7274
  misc_feature 1..31: note = Probe
  source 1..31: mol_type = other DNA

SEQ ID NO: 33523 - DNA, 32 bp, synthetic construct; identical to SEQ ID NO: 7275
  misc_feature 1..32: note = Probe
  source 1..32: mol_type = other DNA

SEQ ID NO: 33524 - DNA, 33 bp, synthetic construct; identical to SEQ ID NO: 7276
  misc_feature 1..33: note = Probe
  source 1..33: mol_type = other DNA

SEQ ID NO: 33525 - DNA, 34 bp, synthetic construct; identical to SEQ ID NO: 1562
  misc_feature 1..34: note = Probe
  source 1..34: mol_type = other DNA

SEQ ID NO: 33526 - DNA, 35 bp, synthetic construct; identical to SEQ ID NO: 23123
  misc_feature 1..35: note = Probe
  source 1..35: mol_type = other DNA

SEQ ID NO: 33527 - DNA, 36 bp, synthetic construct; identical to SEQ ID NO: 23124
  misc_feature 1..36: note = Probe
  source 1..36: mol_type = other DNA

SEQ ID NO: 33528 - DNA, 39 bp, synthetic construct
  misc_feature 1..39: note = Probe
  source 1..39: mol_type = other DNA
gtttccgtagtgtagtggttatcacgttcgcctaacacg

SEQ ID NO: 33529 - DNA, 40 bp, synthetic construct; identical to SEQ ID NO: 23125
  misc_feature 1..40: note = Probe
  source 1..40: mol_type = other DNA

SEQ ID NO: 33530 - DNA, 41 bp, synthetic construct; identical to SEQ ID NO: 23126
  misc_feature 1..41: note = Probe
  source 1..41: mol_type = other DNA

SEQ ID NO: 33531 - DNA, 42 bp, synthetic construct
  misc_feature 1..42: note = Probe
  source 1..42: mol_type = other DNA
gtttccgtagtgtagtggttatcacgttcgcctaacacgcga

SEQ ID NO: 33532 - DNA, 43 bp, synthetic construct
  misc_feature 1..43: note = Probe
  source 1..43: mol_type = other DNA
gtttccgtagtgtagtggttatcacgttcgcctaacacgcgaa

SEQ ID NO: 33533 - DNA, 50 bp, synthetic construct; identical to SEQ ID NO: 7277
  misc_feature 1..50: note = Probe
  source 1..50: mol_type = other DNA

SEQ ID NO: 33534 - DNA, 34 bp, synthetic construct; identical to SEQ ID NO: 7278
  misc_feature 1..34: note = Probe
  source 1..34: mol_type = other DNA

SEQ ID NO: 33535 - DNA, 35 bp, synthetic construct; identical to SEQ ID NO: 7279
  misc_feature 1..35: note = Probe
  source 1..35: mol_type = other DNA

SEQ ID NO: 33536 - DNA, 36 bp, synthetic construct; identical to SEQ ID NO: 7280
  misc_feature 1..36: note = Probe
  source 1..36: mol_type = other DNA

SEQ ID NO: 33537 - DNA, 37 bp, synthetic construct; identical to SEQ ID NO: 7281
  misc_feature 1..37: note = Probe
  source 1..37: mol_type = other DNA

SEQ ID NO: 33538 - DNA, 38 bp, synthetic construct; identical to SEQ ID NO: 1563
  misc_feature 1..38: note = Probe
  source 1..38: mol_type = other DNA

SEQ ID NO: 33539 - DNA, 39 bp, synthetic construct; identical to SEQ ID NO: 14159
  misc_feature 1..39: note = Probe
  source 1..39: mol_type = other DNA

SEQ ID NO: 33540 - DNA, 40 bp, synthetic construct; identical to SEQ ID NO: 14160
  misc_feature 1..40: note = Probe
  source 1..40: mol_type = other DNA

SEQ ID NO: 33541 - DNA, 41 bp, synthetic construct; identical to SEQ ID NO: 23134
  misc_feature 1..41: note = Probe
  source 1..41: mol_type = other DNA

SEQ ID NO: 33542 - DNA, 42 bp, synthetic construct; identical to SEQ ID NO: 23135
  misc_feature 1..42: note = Probe
  source 1..42: mol_type = other DNA

SEQ ID NO: 33543 - DNA, 43 bp, synthetic construct
  misc_feature 1..43: note = Probe
  source 1..43: mol_type = other DNA
gtttccgtagtgtagtggttatcacgttcgcctcacacgcgaa

SEQ ID NO: 33544 - DNA, 32 bp, synthetic construct; identical to SEQ ID NO: 23138
  misc_feature 1..32: note = Probe
  source 1..32: mol_type = other DNA

SEQ ID NO: 33545 - DNA, 34 bp, synthetic construct; identical to SEQ ID NO: 23140
  misc_feature 1..34: note = Probe
  source 1..34: mol_type = other DNA

SEQ ID NO: 33546 - DNA, 36 bp, synthetic construct
  misc_feature 1..36: note = Probe
  source 1..36: mol_type = other DNA
gtttccgtagtgtagtggttatcacgtttgcctaac

SEQ ID NO: 33547 - DNA, 32 bp, synthetic construct; identical to SEQ ID NO: 23144
  misc_feature 1..32: note = Probe
  source 1..32: mol_type = other DNA

SEQ ID NO: 33548 - DNA, 33 bp, synthetic construct; identical to SEQ ID NO: 7282
  misc_feature 1..33: note = Probe
  source 1..33: mol_type = other DNA

SEQ ID NO: 33549 - DNA, 36 bp, synthetic construct
  misc_feature 1..36: note = Probe
  source 1..36: mol_type = other DNA
gtttccgtgcttccttcgatagctcagctggtagag

SEQ ID NO: 33550 - DNA, 32 bp, synthetic construct; identical to SEQ ID NO: 7284
  misc_feature 1..32: note = Probe
  source 1..32: mol_type = other DNA

SEQ ID NO: 33551 - DNA, 33 bp, synthetic construct; identical to SEQ ID NO: 7285
  misc_feature 1..33: note = Probe
  source 1..33: mol_type = other DNA

SEQ ID NO: 33552 - DNA, 34 bp, synthetic construct; identical to SEQ ID NO: 23153
  misc_feature 1..34: note = Probe
  source 1..34: mol_type = other DNA

SEQ ID NO: 33553 - DNA, 36 bp, synthetic construct
  misc_feature 1..36: note = Probe
  source 1..36: mol_type = other DNA
gtttccgtggtgtagtggttatcacattcgccttac

SEQ ID NO: 33554 - DNA, 16 bp, synthetic construct
  misc_feature 1..16: note = Probe
  source 1..16: mol_type = other DNA
gtttcggcacttcctc

SEQ ID NO: 33555 - DNA, 15 bp, synthetic construct
  misc_feature 1..15: note = Probe
  source 1..15: mol_type = other DNA
gtttggtcctagcct

SEQ ID NO: 33556 - DNA, 25 bp, synthetic construct
  misc_feature 1..25: note = Probe
  source 1..25: mol_type = other DNA
gtttggtcctagcctttctattagc

SEQ ID NO: 33557 - DNA, 15 bp, synthetic construct
  misc_feature 1..15: note = Probe
  source 1..15: mol_type = other DNA
gtttgtgggtttaag

SEQ ID NO: 33558 - DNA, 16 bp, synthetic construct
  misc_feature 1..16: note = Probe
  source 1..16: mol_type = other DNA
gtttgtgggtttaagt

SEQ ID NO: 33559 - DNA, 17 bp, synthetic construct
  misc_feature 1..17: note = Probe
  source 1..17: mol_type = other DNA
gtttgtgggtttaagtc

SEQ ID NO: 33560 - DNA, 18 bp, synthetic construct
  misc_feature 1..18: note = Probe
  source 1..18: mol_type = other DNA
gtttgtgggtttaagtcc

SEQ ID NO: 33561 - DNA, 19 bp, synthetic construct
  misc_feature 1..19: note = Probe
  source 1..19: mol_type = other DNA
gtttgtgggtttaagtccc

SEQ ID NO: 33562 - DNA, 20 bp, synthetic construct
  misc_feature 1..20: note = Probe
  source 1..20: mol_type = other DNA
gtttgtgggtttaagtccca

SEQ ID NO: 33563 - DNA, 21 bp, synthetic construct
  misc_feature 1..21: note = Probe
  source 1..21: mol_type = other DNA
gtttgtgggtttaagtcccat

SEQ ID NO: 33564 - DNA, 22 bp, synthetic construct
  misc_feature 1..22: note = Probe
  source 1..22: mol_type = other DNA
gtttgtgggtttaagtcccatt

SEQ ID NO: 33565 - DNA, 23 bp, synthetic construct
  misc_feature 1..23: note = Probe
  source 1..23: mol_type = other DNA
gtttgtgggtttaagtcccattg

SEQ ID NO: 33566 - DNA, 25 bp, synthetic construct
  misc_feature 1..25: note = Probe
  source 1..25: mol_type = other DNA
gtttgtgggtttaagtcccattggt

SEQ ID NO: 33567 - DNA, 26 bp, synthetic construct
  misc_feature 1..26: note = Probe
  source 1..26: mol_type = other DNA
gtttgtgggtttaagtcccattggtc

SEQ ID NO: 33568 - DNA, 27 bp, synthetic construct
  misc_feature 1..27: note = Probe
  source 1..27: mol_type = other DNA
gtttgtgggtttaagtcccattggtct

SEQ ID NO: 33569 - DNA, 28 bp, synthetic construct
  misc_feature 1..28: note = Probe
  source 1..28: mol_type = other DNA
gtttgtgggtttaagtcccattggtcta

SEQ ID NO: 33570 - DNA, 29 bp, synthetic construct
  misc_feature 1..29: note = Probe
  source 1..29: mol_type = other DNA
gtttgtgggtttaagtcccattggtctag

SEQ ID NO: 33571 - DNA, 30 bp, synthetic construct; identical to SEQ ID NO: 7300
  misc_feature 1..30: note = Probe
  source 1..30: mol_type = other DNA

SEQ ID NO: 33572 - DNA, 31 bp, synthetic construct; identical to SEQ ID NO: 7301
  misc_feature 1..31: note = Probe
  source 1..31: mol_type = other DNA

SEQ ID NO: 33573 - DNA, 32 bp, synthetic construct; identical to SEQ ID NO: 7302
  misc_feature 1..32: note = Probe
  source 1..32: mol_type = other DNA

SEQ ID NO: 33574 - DNA, 15 bp, synthetic construct
  misc_feature 1..15: note = Probe
  source 1..15: mol_type = other DNA
gtttgtggtagtttt

SEQ ID NO: 33575 - DNA, 22 bp, synthetic construct
  misc_feature 1..22: note = Probe
  source 1..22: mol_type = other DNA
gtttgttaagatggcagagccc

SEQ ID NO: 33576 - DNA, 29 bp, synthetic construct
  misc_feature 1..29: note = Probe
  source 1..29: mol_type = other DNA
gttttggagtaagaatcacttaaaggtga

SEQ ID NO: 33577 - DNA, 19 bp, synthetic construct
  misc_feature 1..19: note = Probe
  source 1..19: mol_type = other DNA
gtttttcatatcattggtc

SEQ ID NO: 33578 - DNA, 20 bp, synthetic construct
  misc_feature 1..20: note = Probe
  source 1..20: mol_type = other DNA
gtttttcatatcattggtcg

SEQ ID NO: 33579 - DNA, 25 bp, synthetic construct
  misc_feature 1..25: note = Probe
  source 1..25: mol_type = other DNA
gtttttcatatcattggtcgtggtt

SEQ ID NO: 33580 - DNA, 28 bp, synthetic construct
  misc_feature 1..28: note = Probe
  source 1..28: mol_type = other DNA
gtttttcatatcattggtcgtggttgta

SEQ ID NO: 33581 - DNA, 31 bp, synthetic construct; identical to SEQ ID NO: 23173
  misc_feature 1..31: note = Probe
  source 1..31: mol_type = other DNA

SEQ ID NO: 33582 - DNA, 33 bp, synthetic construct
  misc_feature 1..33: note = Probe
  source 1..33: mol_type = other DNA
gtttttcatatcattggtcgtggttgtagtccg

SEQ ID NO: 33583 - DNA, 34 bp, synthetic construct
  misc_feature 1..34: note = Probe
  source 1..34: mol_type = other DNA
gtttttcatatcattggtcgtggttgtagtccgt

SEQ ID NO: 33584 - DNA, 35 bp, synthetic construct
  misc_feature 1..35: note = Probe
  source 1..35: mol_type = other DNA
gtttttcatatcattggtcgtggttgtagtccgtg

SEQ ID NO: 33585 - DNA, 40 bp, synthetic construct
  misc_feature 1..40: note = Probe
  source 1..40: mol_type = other DNA
gtttttcatatcattggtcgtggttgtagtccgtgcgaga

SEQ ID NO: 33586 - DNA, 41 bp, synthetic construct
  misc_feature 1..41: note = Probe
  source 1..41: mol_type = other DNA
gtttttcatatcattggtcgtggttgtagtccgtgcgagaa

SEQ ID NO: 33587 - DNA, 43 bp, synthetic construct; identical to SEQ ID NO: 7306
  misc_feature 1..43: note = Probe
  source 1..43: mol_type = other DNA

SEQ ID NO: 33588 - DNA, 45 bp, synthetic construct
  misc_feature 1..45: note = Probe
  source 1..45: mol_type = other DNA
gtttttcatatcattggtcgtggttgtagtccgtgcgagaataat

SEQ ID NO: 33589 - DNA, 29 bp, synthetic construct
  misc_feature 1..29: note = Probe
  source 1..29: mol_type = other DNA
taaaacttaaaactttacagtcagaggtt

SEQ ID NO: 33590 - DNA, 30 bp, synthetic construct
  misc_feature 1..30: note = Probe
  source 1..30: mol_type = other DNA
taaaacttaaaactttacagtcagaggttc

SEQ ID NO: 33591 - DNA, 36 bp, synthetic construct
  misc_feature 1..36: note = Probe
  source 1..36: mol_type = other DNA
taaaacttaaaactttacagtcagaggttcaattcc

SEQ ID NO: 33592 - DNA, 27 bp, synthetic construct
  misc_feature 1..27: note = Probe
  source 1..27: mol_type = other DNA
taaaatggctgagtgaagcattggact

SEQ ID NO: 33593 - DNA, 26 bp, synthetic construct
  misc_feature 1..26: note = Probe
  source 1..26: mol_type = other DNA
taaacaaaacgaatgatttcgactca

SEQ ID NO: 33594 - DNA, 36 bp, synthetic construct
  misc_feature 1..36: note = Probe
  source 1..36: mol_type = other DNA
taaacaggagatcctgggttcgaatcccagcggggc

SEQ ID NO: 33595 - DNA, 36 bp, synthetic construct
  misc_feature 1..36: note = Probe
  source 1..36: mol_type = other DNA
taaacaggagatcctgggttcgaatcccagcggtgc

SEQ ID NO: 33596 - DNA, 19 bp, synthetic construct
  misc_feature 1..19: note = Probe
  source 1..19: mol_type = other DNA
taaaccaggggtcgcgagt

SEQ ID NO: 33597 - DNA, 36 bp, synthetic construct
  misc_feature 1..36: note = Probe
  source 1..36: mol_type = other DNA
taaacccccttatttctaggactatgagaatcgaac

SEQ ID NO: 33598 - DNA, 37 bp, synthetic construct
  misc_feature 1..37: note = Probe
  source 1..37: mol_type = other DNA
taaacccccttatttctaggactatgagaatcgaacc

SEQ ID NO: 33599 - DNA, 19 bp, synthetic construct
  misc_feature 1..19: note = Probe
  source 1..19: mol_type = other DNA
taaaccgaagatcgcgggt

SEQ ID NO: 33600 - DNA, 18 bp, synthetic construct
  misc_feature 1..18: note = Probe
  source 1..18: mol_type = other DNA
taaaccggagatgaaaac

SEQ ID NO: 33601 - DNA, 19 bp, synthetic construct
  misc_feature 1..19: note = Probe
  source 1..19: mol_type = other DNA
taaaccggagatgaaaacc

SEQ ID NO: 33602 - DNA, 20 bp, synthetic construct
  misc_feature 1..20: note = Probe
  source 1..20: mol_type = other DNA
taaaccggagatgaaaacct

SEQ ID NO: 33603 - DNA, 18 bp, synthetic construct
  misc_feature 1..18: note = Probe
  source 1..18: mol_type = other DNA
taaacctagccccaaacc

SEQ ID NO: 33604 - DNA, 27 bp, synthetic construct
  misc_feature 1..27: note = Probe
  source 1..27: mol_type = other DNA
taaacctagccccaaacccactccacc

SEQ ID NO: 33605 - DNA, 28 bp, synthetic construct
  misc_feature 1..28: note = Probe
  source 1..28: mol_type = other DNA
taaacctagccccaaacccactccacct

SEQ ID NO: 33606 - DNA, 29 bp, synthetic construct
  misc_feature 1..29: note = Probe
  source 1..29: mol_type = other DNA
taaacttcgccttaattttaataatcaac

SEQ ID NO: 33607 - DNA, 21 bp, synthetic construct
  misc_feature 1..21: note = Probe
  source 1..21: mol_type = other DNA
taaagacaggggttaggcctc

SEQ ID NO: 33608 - DNA, 29 bp, synthetic construct
  misc_feature 1..29: note = Probe
  source 1..29: mol_type = other DNA
taaagacaggggttaggcctctttttacc

SEQ ID NO: 33609 - DNA, 32 bp, synthetic construct; identical to SEQ ID NO: 23197
  misc_feature 1..32: note = Probe
  source 1..32: mol_type = other DNA

SEQ ID NO: 33610 - DNA, 16 bp, synthetic construct
  misc_feature 1..16: note = Probe
  source 1..16: mol_type = other DNA
taaagattaagagaac

SEQ ID NO: 33611 - DNA, 17 bp, synthetic construct
  misc_feature 1..17: note = Probe
  source 1..17: mol_type = other DNA
taaagattaagagaacc

SEQ ID NO: 33612 - DNA, 18 bp, synthetic construct
  misc_feature 1..18: note = Probe
  source 1..18: mol_type = other DNA
taaagattaagagaacca

SEQ ID NO: 33613 - DNA, 20 bp, synthetic construct
  misc_feature 1..20: note = Probe
  source 1..20: mol_type = other DNA
taaagattaagagaaccaac

SEQ ID NO: 33614 - DNA, 21 bp, synthetic construct
  misc_feature 1..21: note = Probe
  source 1..21: mol_type = other DNA
taaagattaagagaaccaaca

SEQ ID NO: 33615 - DNA, 22 bp, synthetic construct
  misc_feature 1..22: note = Probe
  source 1..22: mol_type = other DNA
taaagattaagagaaccaacac

SEQ ID NO: 33616 - DNA, 23 bp, synthetic construct
  misc_feature 1..23: note = Probe
  source 1..23: mol_type = other DNA
taaagattaagagaaccaacacc

SEQ ID NO: 33617 - DNA, 24 bp, synthetic construct
  misc_feature 1..24: note = Probe
  source 1..24: mol_type = other DNA
taaagattaagagaaccaacacct

SEQ ID NO: 33618 - DNA, 25 bp, synthetic construct
  misc_feature 1..25: note = Probe
  source 1..25: mol_type = other DNA
taaagattaagagaaccaacacctc

SEQ ID NO: 33619 - DNA, 26 bp, synthetic construct
  misc_feature 1..26: note = Probe
  source 1..26: mol_type = other DNA
taaagattaagagaaccaacacctct

SEQ ID NO: 33620 - DNA, 32 bp, synthetic construct
  misc_feature 1..32: note = Probe
  source 1..32: mol_type = other DNA
taaagattaagagaaccaacacctctttacag

SEQ ID NO: 33621 - DNA, 36 bp, synthetic construct; identical to SEQ ID NO: 23202
  misc_feature 1..36: note = Probe
  source 1..36: mol_type = other DNA

SEQ ID NO: 33622 - DNA, 25 bp, synthetic construct
  misc_feature 1..25: note = Probe
  source 1..25: mol_type = other DNA
taaaggataacagctatccattggt

SEQ ID NO: 33623 - DNA, 27 bp, synthetic construct
  misc_feature 1..27: note = Probe
  source 1..27: mol_type = other DNA
taaaggataacagctatccattggtct

SEQ ID NO: 33624 - DNA, 28 bp, synthetic construct
  misc_feature 1..28: note = Probe
  source 1..28: mol_type = other DNA
taaaggataacagctatccattggtctt

SEQ ID NO: 33625 - DNA, 29 bp, synthetic construct
  misc_feature 1..29: note = Probe
  source 1..29: mol_type = other DNA
taaaggataacagctatccattggtctta

SEQ ID NO: 33626 - DNA, 30 bp, synthetic construct
  misc_feature 1..30: note = Probe
  source 1..30: mol_type = other DNA
taaaggataacagctatccattggtcttag

SEQ ID NO: 33627 - DNA, 33 bp, synthetic construct
  misc_feature 1..33: note = Probe
  source 1..33: mol_type = other DNA
taaaggataacagctatccattggtcttaggcc

SEQ ID NO: 33628 - DNA, 34 bp, synthetic construct
  misc_feature 1..34: note = Probe
  source 1..34: mol_type = other DNA
taaaggataacagctatccattggtcttaggccc

SEQ ID NO: 33629 - DNA, 35 bp, synthetic construct
  misc_feature 1..35: note = Probe
  source 1..35: mol_type = other DNA
taaaggataacagctatccattggtcttaggcccc

SEQ ID NO: 33630 - DNA, 36 bp, synthetic construct
  misc_feature 1..36: note = Probe
  source 1..36: mol_type = other DNA
taaaggataacagctatccattggtcttaggcccca

SEQ ID NO: 33631 - DNA, 17 bp, synthetic construct
  misc_feature 1..17: note = Probe
  source 1..17: mol_type = other DNA
taaagtggctgatttgc

SEQ ID NO: 33632 - DNA, 16 bp, synthetic construct
  misc_feature 1..16: note = Probe
  source 1..16: mol_type = other DNA
taaataagctatcggg

SEQ ID NO: 33633 - DNA, 17 bp, synthetic construct
  misc_feature 1..17: note = Probe
  source 1..17: mol_type = other DNA
taaataagctatcgggc

SEQ ID NO: 33634 - DNA, 18 bp, synthetic construct
  misc_feature 1..18: note = Probe
  source 1..18: mol_type = other DNA
taaataagctatcgggcc

SEQ ID NO: 33635 - DNA, 19 bp, synthetic construct
  misc_feature 1..19: note = Probe
  source 1..19: mol_type = other DNA
taaataagctatcgggccc

SEQ ID NO: 33636 - DNA, 20 bp, synthetic construct
  misc_feature 1..20: note = Probe
  source 1..20: mol_type = other DNA
taaataagctatcgggccca

SEQ ID NO: 33637 - DNA, 21 bp, synthetic construct
  misc_feature 1..21: note = Probe
  source 1..21: mol_type = other DNA
taaataagctatcgggcccat

SEQ ID NO: 33638 - DNA, 24 bp, synthetic construct
  misc_feature 1..24: note = Probe
  source 1..24: mol_type = other DNA
taaataagctatcgggcccatacc

SEQ ID NO: 33639 - DNA, 25 bp, synthetic construct
  misc_feature 1..25: note = Probe
  source 1..25: mol_type = other DNA
taaataagctatcgggcccataccc

SEQ ID NO: 33640 - DNA, 36 bp, synthetic construct
  misc_feature 1..36: note = Probe
  source 1..36: mol_type = other DNA
taaataagctatcgggcccataccccgaaaatgttg

SEQ ID NO: 33641 - DNA, 15 bp, synthetic construct
  misc_feature 1..15: note = Probe
  source 1..15: mol_type = other DNA
taaataataggagct

SEQ ID NO: 33642 - DNA, 16 bp, synthetic construct
  misc_feature 1..16: note = Probe
  source 1..16: mol_type = other DNA
taaataataggagctt

SEQ ID NO: 33643 - DNA, 21 bp, synthetic construct
  misc_feature 1..21: note = Probe
  source 1..21: mol_type = other DNA
taaataataggagcttaaacc

SEQ ID NO: 33644 - DNA, 18 bp, synthetic construct
  misc_feature 1..18: note = Probe
  source 1..18: mol_type = other DNA
taaatacagaccaagagc

SEQ ID NO: 33645 - DNA, 22 bp, synthetic construct
  misc_feature 1..22: note = Probe
  source 1..22: mol_type = other DNA
taaatacagaccaagagccttc

SEQ ID NO: 33646 - DNA, 23 bp, synthetic construct
  misc_feature 1..23: note = Probe
  source 1..23: mol_type = other DNA
taaatacagaccaagagccttca

SEQ ID NO: 33647 - DNA, 26 bp, synthetic construct
  misc_feature 1..26: note = Probe
  source 1..26: mol_type = other DNA
taaatacagaccaagagccttcaaag

SEQ ID NO: 33648 - DNA, 28 bp, synthetic construct
  misc_feature 1..28: note = Probe
  source 1..28: mol_type = other DNA
taaatacagaccaagagccttcaaagcc

SEQ ID NO: 33649 - DNA, 32 bp, synthetic construct
  misc_feature 1..32: note = Probe
  source 1..32: mol_type = other DNA
taaatacagaccaagagccttcaaagccctca

SEQ ID NO: 33650 - DNA, 36 bp, synthetic construct
  misc_feature 1..36: note = Probe
  source 1..36: mol_type = other DNA
taaatacagaccaagagccttcaaagccctcagtaa

SEQ ID NO: 33651 - DNA, 18 bp, synthetic construct
  misc_feature 1..18: note = Probe
  source 1..18: mol_type = other DNA
taaatactaccgtatggc

SEQ ID NO: 33652 - DNA, 17 bp, synthetic construct
  misc_feature 1..17: note = Probe
  source 1..17: mol_type = other DNA
taaatagtaccgttaac

SEQ ID NO: 33653 - DNA, 18 bp, synthetic construct
  misc_feature 1..18: note = Probe
  source 1..18: mol_type = other DNA
taaatagtaccgttaact

SEQ ID NO: 33654 - DNA, 20 bp, synthetic construct
  misc_feature 1..20: note = Probe
  source 1..20: mol_type = other DNA
taaatagtaccgttaacttc

SEQ ID NO: 33655 - DNA, 21 bp, synthetic construct
  misc_feature 1..21: note = Probe
  source 1..21: mol_type = other DNA
taaatagtaccgttaacttcc

SEQ ID NO: 33656 - DNA, 36 bp, synthetic construct
  misc_feature 1..36: note = Probe
  source 1..36: mol_type = other DNA
taaatagtaccgttaacttccaattaactagttttg

SEQ ID NO: 33657 - DNA, 36 bp, synthetic construct
  misc_feature 1..36: note = Probe
  source 1..36: mol_type = other DNA
taaatctaaagacaggggttaggcctctttttacca

SEQ ID NO: 33658 - DNA, 18 bp, synthetic construct
  misc_feature 1..18: note = Probe
  source 1..18: mol_type = other DNA
taaattagaatcttagct

SEQ ID NO: 33659 - DNA, 21 bp, synthetic construct
  misc_feature 1..21: note = Probe
  source 1..21: mol_type = other DNA
taaattagaatcttagctttg

SEQ ID NO: 33660 - DNA, 22 bp, synthetic construct
  misc_feature 1..22: note = Probe
  source 1..22: mol_type = other DNA
taaattagaatcttagctttgg

SEQ ID NO: 33661 - DNA, 27 bp, synthetic construct
  misc_feature 1..27: note = Probe
  source 1..27: mol_type = other DNA
taaattagaatcttagctttgggtgct

SEQ ID NO: 33662 - DNA, 46 bp, synthetic construct
  misc_feature 1..46: note = Probe
  source 1..46: mol_type = other DNA
taaattagaatcttagctttgggtgctaatggtggagttaaagact

SEQ ID NO: 33663 - DNA, 50 bp, synthetic construct; identical to SEQ ID NO: 1567
  misc_feature 1..50: note = Probe
  source 1..50: mol_type = other DNA

SEQ ID NO: 33664 - DNA, 18 bp, synthetic construct
  misc_feature 1..18: note = Probe
  source 1..18: mol_type = other DNA
taacaacatggctttctc

SEQ ID NO: 33665 - DNA, 21 bp, synthetic construct
  misc_feature 1..21: note = Probe
  source 1..21: mol_type = other DNA
taacaacatggctttctcaac

SEQ ID NO: 33666 - DNA, 15 bp, synthetic construct
  misc_feature 1..15: note = Probe
  source 1..15: mol_type = other DNA
taacacaaagcaccc

SEQ ID NO: 33667 - DNA, 16 bp, synthetic construct
  misc_feature 1..16: note = Probe
  source 1..16: mol_type = other DNA
taacacaaagcaccca

SEQ ID NO: 33668 - DNA, 23 bp, synthetic construct
  misc_feature 1..23: note = Probe
  source 1..23: mol_type = other DNA
taacacaaagcacccaacttaca

SEQ ID NO: 33669 - DNA, 25 bp, synthetic construct
  misc_feature 1..25: note = Probe
  source 1..25: mol_type = other DNA
taacacaaagcacccaacttacact

SEQ ID NO: 33670 - DNA, 30 bp, synthetic construct; identical to SEQ ID NO: 7355
  misc_feature 1..30: note = Probe
  source 1..30: mol_type = other DNA

SEQ ID NO: 33671 - DNA, 32 bp, synthetic construct; identical to SEQ ID NO: 7356
  misc_feature 1..32: note = Probe
  source 1..32: mol_type = other DNA

SEQ ID NO: 33672 - DNA, 33 bp, synthetic construct; identical to SEQ ID NO: 23226
  misc_feature 1..33: note = Probe
  source 1..33: mol_type = other DNA

SEQ ID NO: 33673 - DNA, 36 bp, synthetic construct
  misc_feature 1..36: note = Probe
  source 1..36: mol_type = other DNA
taacacaaagcacccaacttacacttaggagatttc

SEQ ID NO: 33674 - DNA, 40 bp, synthetic construct
  misc_feature 1..40: note = Probe
  source 1..40: mol_type = other DNA
taacacaaagcacccaacttacacttaggagatttcaact

SEQ ID NO: 33675 - DNA, 50 bp, synthetic construct; identical to SEQ ID NO: 1568
  misc_feature 1..50: note = Probe
  source 1..50: mol_type = other DNA

SEQ ID NO: 33676 - DNA, 15 bp, synthetic construct
  misc_feature 1..15: note = Probe
  source 1..15: mol_type = other DNA
taacagctaaggact

SEQ ID NO: 33677 - DNA, 17 bp, synthetic construct
  misc_feature 1..17: note = Probe
  source 1..17: mol_type = other DNA
taacagctaaggactgc

SEQ ID NO: 33678 - DNA, 23 bp, synthetic construct
  misc_feature 1..23: note = Probe
  source 1..23: mol_type = other DNA
taacagctaaggactgcaaaacc

SEQ ID NO: 33679 - DNA, 24 bp, synthetic construct
  misc_feature 1..24: note = Probe
  source 1..24: mol_type = other DNA
taacagctaaggactgcaaaaccc

SEQ ID NO: 33680 - DNA, 25 bp, synthetic construct
  misc_feature 1..25: note = Probe
  source 1..25: mol_type = other DNA
taacagctaaggactgcaaaacccc

SEQ ID NO: 33681 - DNA, 26 bp, synthetic construct
  misc_feature 1..26: note = Probe
  source 1..26: mol_type = other DNA
taacagctaaggactgcaaaacccca

SEQ ID NO: 33682 - DNA, 27 bp, synthetic construct
  misc_feature 1..27: note = Probe
  source 1..27: mol_type = other DNA
taacagctaaggactgcaaaaccccac

SEQ ID NO: 33683 - DNA, 28 bp, synthetic construct
  misc_feature 1..28: note = Probe
  source 1..28: mol_type = other DNA
taacagctaaggactgcaaaaccccact

SEQ ID NO: 33684 - DNA, 29 bp, synthetic construct
  misc_feature 1..29: note = Probe
  source 1..29: mol_type = other DNA
taacagctaaggactgcaaaaccccactc

SEQ ID NO: 33685 - DNA, 30 bp, synthetic construct; identical to SEQ ID NO: 11605
  misc_feature 1..30: note = Probe
  source 1..30: mol_type = other DNA

SEQ ID NO: 33686 - DNA, 18 bp, synthetic construct
  misc_feature 1..18: note = Probe
  source 1..18: mol_type = other DNA
taacagctatccattggt

SEQ ID NO: 33687 - DNA, 22 bp, synthetic construct
  misc_feature 1..22: note = Probe
  source 1..22: mol_type = other DNA
taacagctatccattggtctta

SEQ ID NO: 33688 - DNA, 27 bp, synthetic construct
  misc_feature 1..27: note = Probe
  source 1..27: mol_type = other DNA
taacagctatccattggtcttaggccc

SEQ ID NO: 33689 - DNA, 28 bp, synthetic construct
  misc_feature 1..28: note = Probe
  source 1..28: mol_type = other DNA
taacagctatccattggtcttaggcccc

SEQ ID NO: 33690 - DNA, 36 bp, synthetic construct
  misc_feature 1..36: note = Probe
  source 1..36: mol_type = other DNA
taacagctatccattggtcttaggccccaaaaattt

SEQ ID NO: 33691 - DNA, 20 bp, synthetic construct
  misc_feature 1..20: note = Probe
  source 1..20: mol_type = other DNA
taaccaaaacatcagattgt

SEQ ID NO: 33692 - DNA, 22 bp, synthetic construct
  misc_feature 1..22: note = Probe
  source 1..22: mol_type = other DNA
taaccaaaacatcagattgtga

SEQ ID NO: 33693 - DNA, 25 bp, synthetic construct
  misc_feature 1..25: note = Probe
  source 1..25: mol_type = other DNA
taaccaaaacatcagattgtgaatc

SEQ ID NO: 33694 - DNA, 26 bp, synthetic construct
  misc_feature 1..26: note = Probe
  source 1..26: mol_type = other DNA
taaccaaaacatcagattgtgaatct

SEQ ID NO: 33695 - DNA, 33 bp, synthetic construct; identical to SEQ ID NO: 7368
  misc_feature 1..33: note = Probe
  source 1..33: mol_type = other DNA

SEQ ID NO: 33696 - DNA, 36 bp, synthetic construct; identical to SEQ ID NO: 23251
  misc_feature 1..36: note = Probe
  source 1..36: mol_type = other DNA

SEQ ID NO: 33697 - DNA, 39 bp, synthetic construct; identical to SEQ ID NO: 7371
  misc_feature 1..39: note = Probe
  source 1..39: mol_type = other DNA

SEQ ID NO: 33698 - DNA, 50 bp, synthetic construct; identical to SEQ ID NO: 1569
  misc_feature 1..50: note = Probe
  source 1..50: mol_type = other DNA

SEQ ID NO: 33699 - DNA, 29 bp, synthetic construct
  misc_feature 1..29: note = Probe
  source 1..29: mol_type = other DNA
taaccatgcacactactataaccacccta

SEQ ID NO: 33700 - DNA, 21 bp, synthetic construct
  misc_feature 1..21: note = Probe
  source 1..21: mol_type = other DNA
taacccagaggtcgatggatc

SEQ ID NO: 33701 - DNA, 22 bp, synthetic construct
  misc_feature 1..22: note = Probe
  source 1..22: mol_type = other DNA
taacccagaggtcgatggatcg

SEQ ID NO: 33702 - DNA, 23 bp, synthetic construct
  misc_feature 1..23: note = Probe
  source 1..23: mol_type = other DNA
taacccagaggtcgatggatcga

SEQ ID NO: 33703 - DNA, 41 bp, synthetic construct; identical to SEQ ID NO: 7378
  misc_feature 1..41: note = Probe
  source 1..41: mol_type = other DNA

SEQ ID NO: 33704 - DNA, 41 bp, synthetic construct
  misc_feature 1..41: note = Probe
  source 1..41: mol_type = other DNA
taaccgaaaggttggtggttcgagcccacccagggacgcta

SEQ ID NO: 33705 - DNA, 30 bp, synthetic construct; identical to SEQ ID NO: 23258
  misc_feature 1..30: note = Probe
  source 1..30: mol_type = other DNA

SEQ ID NO: 33706 - DNA, 36 bp, synthetic construct
  misc_feature 1..36: note = Probe
  source 1..36: mol_type = other DNA
taaccttttaagttaaagattaagagaaccaacacc

SEQ ID NO: 33707 - DNA, 21 bp, synthetic construct
  misc_feature 1..21: note = Probe
  source 1..21: mol_type = other DNA
taactaagtgtttgtgggttt

SEQ ID NO: 33708 - DNA, 36 bp, synthetic construct; identical to SEQ ID NO: 23261
  misc_feature 1..36: note = Probe
  source 1..36: mol_type = other DNA

SEQ ID NO: 33709 - DNA, 17 bp, synthetic construct
  misc_feature 1..17: note = Probe
  source 1..17: mol_type = other DNA
taactagttttgacaac

SEQ ID NO: 33710 - DNA, 24 bp, synthetic construct
  misc_feature 1..24: note = Probe
  source 1..24: mol_type = other DNA
taactcatgcccccatgtctaaca

SEQ ID NO: 33711 - DNA, 36 bp, synthetic construct; identical to SEQ ID NO: 7391
  misc_feature 1..36: note = Probe
  source 1..36: mol_type = other DNA

SEQ ID NO: 33712 - DNA, 41 bp, synthetic construct; identical to SEQ ID NO: 7396
  misc_feature 1..41: note = Probe
  source 1..41: mol_type = other DNA

SEQ ID NO: 33713 - DNA, 36 bp, synthetic construct
  misc_feature 1..36: note = Probe
  source 1..36: mol_type = other DNA
taacttagcattaaccttttaagttaaagattaaga

SEQ ID NO: 33714 - DNA, 25 bp, synthetic construct
  misc_feature 1..25: note = Probe
  source 1..25: mol_type = other DNA
taacttccaattaactagttttgac

SEQ ID NO: 33715 - DNA, 15 bp, synthetic construct
  misc_feature 1..15: note = Probe
  source 1..15: mol_type = other DNA
taacttgaccgctct

SEQ ID NO: 33716 - DNA, 16 bp, synthetic construct
  misc_feature 1..16: note = Probe
  source 1..16: mol_type = other DNA
taacttgaccgctctg

SEQ ID NO: 33717 - DNA, 17 bp, synthetic construct
  misc_feature 1..17: note = Probe
  source 1..17: mol_type = other DNA
taacttgaccgctctga

SEQ ID NO: 33718 - DNA, 18 bp, synthetic construct
  misc_feature 1..18: note = Probe
  source 1..18: mol_type = other DNA
taacttgaccgctctgag

SEQ ID NO: 33719 - DNA, 19 bp, synthetic construct
  misc_feature 1..19: note = Probe
  source 1..19: mol_type = other DNA
taacttgaccgctctgagc

SEQ ID NO: 33720 - DNA, 20 bp, synthetic construct
  misc_feature 1..20: note = Probe
  source 1..20: mol_type = other DNA
taacttgaccgctctgagct

SEQ ID NO: 33721 - DNA, 25 bp, synthetic construct
  misc_feature 1..25: note = Probe
  source 1..25: mol_type = other DNA
taacttgaccgctctgagctaaacc

SEQ ID NO: 33722 - DNA, 26 bp, synthetic construct
  misc_feature 1..26: note = Probe
  source 1..26: mol_type = other DNA
taacttgaccgctctgagctaaacct

SEQ ID NO: 33723 - DNA, 30 bp, synthetic construct
  misc_feature 1..30: note = Probe
  source 1..30: mol_type = other DNA
taacttgaccgctctgagctaaacctagcc

SEQ ID NO: 33724 - DNA, 31 bp, synthetic construct
  misc_feature 1..31: note = Probe
  source 1..31: mol_type = other DNA
taacttgaccgctctgagctaaacctagccc

SEQ ID NO: 33725 - DNA, 32 bp, synthetic construct
  misc_feature 1..32: note = Probe
  source 1..32: mol_type = other DNA
taacttgaccgctctgagctaaacctagcccc

SEQ ID NO: 33726 - DNA, 33 bp, synthetic construct
  misc_feature 1..33: note = Probe
  source 1..33: mol_type = other DNA
taacttgaccgctctgagctaaacctagcccca

SEQ ID NO: 33727 - DNA, 36 bp, synthetic construct
  misc_feature 1..36: note = Probe
  source 1..36: mol_type = other DNA
taacttgaccgctctgagctaaacctagccccaaac

SEQ ID NO: 33728 - DNA, 28 bp, synthetic construct
  misc_feature 1..28: note = Probe
  source 1..28: mol_type = other DNA
taactttgtcaaagttaaattataggct

SEQ ID NO: 33729 - DNA, 15 bp, synthetic construct
  misc_feature 1..15: note = Probe
  source 1..15: mol_type = other DNA
taagagaaccaacac

SEQ ID NO: 33730 - DNA, 16 bp, synthetic construct
  misc_feature 1..16: note = Probe
  source 1..16: mol_type = other DNA
taagagaaccaacacc

SEQ ID NO: 33731 - DNA, 17 bp, synthetic construct
  misc_feature 1..17: note = Probe
  source 1..17: mol_type = other DNA
taagagaaccaacacct

SEQ ID NO: 33732 - DNA, 29 bp, synthetic construct
  misc_feature 1..29: note = Probe
  source 1..29: mol_type = other DNA
taagagaaccaacacctctttacagtgaa

SEQ ID NO: 33733 - DNA, 15 bp, synthetic construct
  misc_feature 1..15: note = Probe
  source 1..15: mol_type = other DNA
taagatggcagagcc

SEQ ID NO: 33734 - DNA, 16 bp, synthetic construct
  misc_feature 1..16: note = Probe
  source 1..16: mol_type = other DNA
taagatggcagagccc

SEQ ID NO: 33735 - DNA, 17 bp, synthetic construct
  misc_feature 1..17: note = Probe
  source 1..17: mol_type = other DNA
taagatggcagagcccg

SEQ ID NO: 33736 - DNA, 28 bp, synthetic construct
  misc_feature 1..28: note = Probe
  source 1..28: mol_type = other DNA
taagatggcagagcccggtaatcgcata

SEQ ID NO: 33737 - DNA, 30 bp, synthetic construct
  misc_feature 1..30: note = Probe
  source 1..30: mol_type = other DNA
taagatggcagagcccggtaatcgcataaa

SEQ ID NO: 33738 - DNA, 40 bp, synthetic construct
  misc_feature 1..40: note = Probe
  source 1..40: mol_type = other DNA
taagatggcagagcccggtaatcgcataaaacttaaaact

SEQ ID NO: 33739 - DNA, 21 bp, synthetic construct
  misc_feature 1..21: note = Probe
  source 1..21: mol_type = other DNA
taagcaccttgcctgcgggct

SEQ ID NO: 33740 - DNA, 36 bp, synthetic construct
  misc_feature 1..36: note = Probe
  source 1..36: mol_type = other DNA
taagcattggtggttcagtggtagaattctcgcctg

SEQ ID NO: 33741 - DNA, 19 bp, synthetic construct
  misc_feature 1..19: note = Probe
  source 1..19: mol_type = other DNA
taagccagggattgtgggt

SEQ ID NO: 33742 - DNA, 36 bp, synthetic construct
  misc_feature 1..36: note = Probe
  source 1..36: mol_type = other DNA
taagccagggattgtgggttcgagtcccacccgggg

SEQ ID NO: 33743 - DNA, 36 bp, synthetic construct
  misc_feature 1..36: note = Probe
  source 1..36: mol_type = other DNA
taagccagggattgtgggttcgagtcccacctgggg

SEQ ID NO: 33744 - DNA, 36 bp, synthetic construct
  misc_feature 1..36: note = Probe
  source 1..36: mol_type = other DNA
taagccagggattgtgggttcgagtcccatctgggg

SEQ ID NO: 33745 - DNA, 40 bp, synthetic construct; identical to SEQ ID NO: 7410
  misc_feature 1..40: note = Probe
  source 1..40: mol_type = other DNA

SEQ ID NO: 33746 - DNA, 41 bp, synthetic construct; identical to SEQ ID NO: 7411
  misc_feature 1..41: note = Probe
  source 1..41: mol_type = other DNA

SEQ ID NO: 33747 - DNA, 15 bp, synthetic construct
  misc_feature 1..15: note = Probe
  source 1..15: mol_type = other DNA
taagctatcgggccc

SEQ ID NO: 33748 - DNA, 16 bp, synthetic construct
  misc_feature 1..16: note = Probe
  source 1..16: mol_type = other DNA
taagctatcgggccca

SEQ ID NO: 33749 - DNA, 17 bp, synthetic construct
  misc_feature 1..17: note = Probe
  source 1..17: mol_type = other DNA
taagctatcgggcccat

SEQ ID NO: 33750 - DNA, 20 bp, synthetic construct
  misc_feature 1..20: note = Probe
  source 1..20: mol_type = other DNA
taagctatcgggcccatacc

SEQ ID NO: 33751 - DNA, 36 bp, synthetic construct; identical to SEQ ID NO: 7429
  misc_feature 1..36: note = Probe
  source 1..36: mol_type = other DNA

SEQ ID NO: 33752 - DNA, 16 bp, synthetic construct
  misc_feature 1..16: note = Probe
  source 1..16: mol_type = other DNA
taaggactgcaaaacc

SEQ ID NO: 33753 - DNA, 17 bp, synthetic construct
  misc_feature 1..17: note = Probe
  source 1..17: mol_type = other DNA
taaggactgcaaaaccc

SEQ ID NO: 33754 - DNA, 21 bp, synthetic construct
  misc_feature 1..21: note = Probe
  source 1..21: mol_type = other DNA
taaggactgcaaaaccccact

SEQ ID NO: 33755 - DNA, 23 bp, synthetic construct
  misc_feature 1..23: note = Probe
  source 1..23: mol_type = other DNA
taaggactgcaaaaccccactct

SEQ ID NO: 33756 - DNA, 36 bp, synthetic construct
  misc_feature 1..36: note = Probe
  source 1..36: mol_type = other DNA
taaggcattggcctcctaagccagggattgtgggtt

SEQ ID NO: 33757 - DNA, 15 bp, synthetic construct
  misc_feature 1..15: note = Probe
  source 1..15: mol_type = other DNA
taaggcggctgtttt

SEQ ID NO: 33758 - DNA, 15 bp, synthetic construct
  misc_feature 1..15: note = Probe
  source 1..15: mol_type = other DNA
taaggtcagctaaat

SEQ ID NO: 33759 - DNA, 18 bp, synthetic construct
  misc_feature 1..18: note = Probe
  source 1..18: mol_type = other DNA
taaggtcagctaaataag

SEQ ID NO: 33760 - DNA, 27 bp, synthetic construct
  misc_feature 1..27: note = Probe
  source 1..27: mol_type = other DNA
taaggtcagctaaataagctatcgggc

SEQ ID NO: 33761 - DNA, 28 bp, synthetic construct
  misc_feature 1..28: note = Probe
  source 1..28: mol_type = other DNA
taaggtcagctaaataagctatcgggcc

SEQ ID NO: 33762 - DNA, 29 bp, synthetic construct
  misc_feature 1..29: note = Probe
  source 1..29: mol_type = other DNA
taaggtcagctaaataagctatcgggccc

SEQ ID NO: 33763 - DNA, 30 bp, synthetic construct; identical to SEQ ID NO: 7439
  misc_feature 1..30: note = Probe
  source 1..30: mol_type = other DNA

SEQ ID NO: 33764 - DNA, 31 bp, synthetic construct; identical to SEQ ID NO: 7440
  misc_feature 1..31: note = Probe
  source 1..31: mol_type = other DNA

SEQ ID NO: 33765 - DNA, 36 bp, synthetic construct; identical to SEQ ID NO: 23320
  misc_feature 1..36: note = Probe
  source 1..36: mol_type = other DNA

SEQ ID NO: 33766 - DNA, 15 bp, synthetic construct
  misc_feature 1..15: note = Probe
  source 1..15: mol_type = other DNA
taagtcccattggtc

SEQ ID NO: 33767 - DNA, 16 bp, synthetic construct
  misc_feature 1..16: note = Probe
  source 1..16: mol_type = other DNA
taagtgtttgtgggtt

SEQ ID NO: 33768 - DNA, 17 bp, synthetic construct
  misc_feature 1..17: note = Probe
  source 1..17: mol_type = other DNA
taagtgtttgtgggttt

SEQ ID NO: 33769 - DNA, 22 bp, synthetic construct
  misc_feature 1..22: note = Probe
  source 1..22: mol_type = other DNA
taagtgtttgtgggtttaagtc

SEQ ID NO: 33770 - DNA, 23 bp, synthetic construct
  misc_feature 1..23: note = Probe
  source 1..23: mol_type = other DNA
taagtgtttgtgggtttaagtcc

SEQ ID NO: 33771 - DNA, 31 bp, synthetic construct; identical to SEQ ID NO: 7456
  misc_feature 1..31: note = Probe
  source 1..31: mol_type = other DNA

SEQ ID NO: 33772 - DNA, 22 bp, synthetic construct
  misc_feature 1..22: note = Probe
  source 1..22: mol_type = other DNA
taagttaaagattaagagaacc

SEQ ID NO: 33773 - DNA, 27 bp, synthetic construct
  misc_feature 1..27: note = Probe
  source 1..27: mol_type = other DNA
taagttaaagattaagagaaccaacac

SEQ ID NO: 33774 - DNA, 28 bp, synthetic construct
  misc_feature 1..28: note = Probe
  source 1..28: mol_type = other DNA
taagttaaagattaagagaaccaacacc

SEQ ID NO: 33775 - DNA, 29 bp, synthetic construct
  misc_feature 1..29: note = Probe
  source 1..29: mol_type = other DNA
taagttaaagattaagagaaccaacacct

SEQ ID NO: 33776 - DNA, 36 bp, synthetic construct
  misc_feature 1..36: note = Probe
  source 1..36: mol_type = other DNA
taagttaaagattaagagaaccaacacctctttaca

SEQ ID NO: 33777 - DNA, 16 bp, synthetic construct
  misc_feature 1..16: note = Probe
  source 1..16: mol_type = other DNA
taataacgccaaggtc

SEQ ID NO: 33778 - DNA, 22 bp, synthetic construct
  misc_feature 1..22: note = Probe
  source 1..22: mol_type = other DNA
taataacgccaaggtcgcgggt

SEQ ID NO: 33779 - DNA, 23 bp, synthetic construct
  misc_feature 1..23: note = Probe
  source 1..23: mol_type = other DNA
taataacgccaaggtcgcgggtt

SEQ ID NO: 33780 - DNA, 17 bp, synthetic construct
  misc_feature 1..17: note = Probe
  source 1..17: mol_type = other DNA
taataggagcttaaacc

SEQ ID NO: 33781 - DNA, 19 bp, synthetic construct
  misc_feature 1..19: note = Probe
  source 1..19: mol_type = other DNA
taataggagcttaaacccc

SEQ ID NO: 33782 - DNA, 18 bp, synthetic construct
  misc_feature 1..18: note = Probe
  source 1..18: mol_type = other DNA
taatcccctggcccaacc

SEQ ID NO: 33783 - DNA, 19 bp, synthetic construct
  misc_feature 1..19: note = Probe
  source 1..19: mol_type = other DNA
taatcccctggcccaaccc

SEQ ID NO: 33784 - DNA, 28 bp, synthetic construct
  misc_feature 1..28: note = Probe
  source 1..28: mol_type = other DNA
taatcccctggcccaacccgtcatctac

SEQ ID NO: 33785 - DNA, 36 bp, synthetic construct
  misc_feature 1..36: note = Probe
  source 1..36: mol_type = other DNA
taatctcagggtcgtgggttcgagccccacgttggg

SEQ ID NO: 33786 - DNA, 41 bp, synthetic construct
  misc_feature 1..41: note = Probe
  source 1..41: mol_type = other DNA
taatctcagggtcgtgggttcgagccccacgttgggcggca

SEQ ID NO: 33787 - DNA, 15 bp, synthetic construct
  misc_feature 1..15: note = Probe
  source 1..15: mol_type = other DNA
taatctgaaggtcct

SEQ ID NO: 33788 - DNA, 19 bp, synthetic construct
  misc_feature 1..19: note = Probe
  source 1..19: mol_type = other DNA
taatctgaaggtcctgagt

SEQ ID NO: 33789 - DNA, 36 bp, synthetic construct
  misc_feature 1..36: note = Probe
  source 1..36: mol_type = other DNA
taatctgaaggtcctgagttcgaacctcagaggggg

SEQ ID NO: 33790 - DNA, 41 bp, synthetic construct
  misc_feature 1..41: note = Probe
  source 1..41: mol_type = other DNA
taatctgaaggtcctgagttcgaacctcagagggggcagct

SEQ ID NO: 33791 - DNA, 36 bp, synthetic construct
  misc_feature 1..36: note = Probe
  source 1..36: mol_type = other DNA
taatctgaaggtcctgagttcgagcctcagagaggg

SEQ ID NO: 33792 - DNA, 38 bp, synthetic construct
  misc_feature 1..38: note = Probe
  source 1..38: mol_type = other DNA
taatctgaaggtcgtgagttcgagcctcacacggggca

SEQ ID NO: 33793 - DNA, 36 bp, synthetic construct
  misc_feature 1..36: note = Probe
  source 1..36: mol_type = other DNA
taatctgaaggtcgtgagttcgatcctcacacgggg

SEQ ID NO: 33794 - DNA, 40 bp, synthetic construct
  misc_feature 1..40: note = Probe
  source 1..40: mol_type = other DNA
taatctgaaggtcgtgagttcgatcctcacacggggcaca

SEQ ID NO: 33795 - DNA, 41 bp, synthetic construct; identical to SEQ ID NO: 7465
  misc_feature 1..41: note = Probe
  source 1..41: mol_type = other DNA

SEQ ID NO: 33796 - DNA, 36 bp, synthetic construct
  misc_feature 1..36: note = Probe
  source 1..36: mol_type = other DNA
taatctgagggtccagggttcaagtccctgttcggg

SEQ ID NO: 33797 - DNA, 40 bp, synthetic construct
  misc_feature 1..40: note = Probe
  source 1..40: mol_type = other DNA
taatctgagggtccagggttcaagtccctgttcgggcggc

SEQ ID NO: 33798 - DNA, 41 bp, synthetic construct
  misc_feature 1..41: note = Probe
  source 1..41: mol_type = other DNA
taatctgagggtccagggttcaagtccctgttcgggcggca

SEQ ID NO: 33799 - DNA, 40 bp, synthetic construct
  misc_feature 1..40: note = Probe
  source 1..40: mol_type = other DNA
taatctgagggtccagggttcaagtccctgttcgggcgtc

SEQ ID NO: 33800 - DNA, 15 bp, synthetic construct
  misc_feature 1..15: note = Probe
  source 1..15: mol_type = other DNA
taatggataaggcac

SEQ ID NO: 33801 - DNA, 16 bp, synthetic construct
  misc_feature 1..16: note = Probe
  source 1..16: mol_type = other DNA
taatggataaggcact

SEQ ID NO: 33802 - DNA, 17 bp, synthetic construct
  misc_feature 1..17: note = Probe
  source 1..17: mol_type = other DNA
taatggataaggcactg

SEQ ID NO: 33803 - DNA, 19 bp, synthetic construct
  misc_feature 1..19: note = Probe
  source 1..19: mol_type = other DNA
taatggataaggcactggc

SEQ ID NO: 33804 - DNA, 16 bp, synthetic construct
  misc_feature 1..16: note = Probe
  source 1..16: mol_type = other DNA
taatggataaggcatt

SEQ ID NO: 33805 - DNA, 17 bp, synthetic construct
  misc_feature 1..17: note = Probe
  source 1..17: mol_type = other DNA
taatggataaggcattg

SEQ ID NO: 33806 - DNA, 21 bp, synthetic construct
  misc_feature 1..21: note = Probe
  source 1..21: mol_type = other DNA
taatggataaggcgtctgact

SEQ ID NO: 33807 - DNA, 32 bp, synthetic construct
  misc_feature 1..32: note = Probe
  source 1..32: mol_type = other DNA
taatggcacatgcagcgcaagtaggtctacaa

SEQ ID NO: 33808 - DNA, 19 bp, synthetic construct
  misc_feature 1..19: note = Probe
  source 1..19: mol_type = other DNA
taatggtggagttaaagac

SEQ ID NO: 33809 - DNA, 20 bp, synthetic construct
  misc_feature 1..20: note = Probe
  source 1..20: mol_type = other DNA
taatggtggagttaaagact

SEQ ID NO: 33810 - DNA, 31 bp, synthetic construct
  misc_feature 1..31: note = Probe
  source 1..31: mol_type = other DNA
taatggtggagttaaagactttttctctgat

SEQ ID NO: 33811 - DNA, 17 bp, synthetic construct
  misc_feature 1..17: note = Probe
  source 1..17: mol_type = other DNA
taatggttagcactctg

SEQ ID NO: 33812 - DNA, 18 bp, synthetic construct
  misc_feature 1..18: note = Probe
  source 1..18: mol_type = other DNA
taatggttagcactctgg

SEQ ID NO: 33813 - DNA, 19 bp, synthetic construct
  misc_feature 1..19: note = Probe
  source 1..19: mol_type = other DNA
taatggttagcactctgga

SEQ ID NO: 33814 - DNA, 21 bp, synthetic construct
  misc_feature 1..21: note = Probe
  source 1..21: mol_type = other DNA
taatggttagcactctggact

SEQ ID NO: 33815 - DNA, 22 bp, synthetic construct
  misc_feature 1..22: note = Probe
  source 1..22: mol_type = other DNA
taatggttagcactctggactc

SEQ ID NO: 33816 - DNA, 26 bp, synthetic construct
  misc_feature 1..26: note = Probe
  source 1..26: mol_type = other DNA
taatggttagcactctggactctgaa

SEQ ID NO: 33817 - DNA, 27 bp, synthetic construct
  misc_feature 1..27: note = Probe
  source 1..27: mol_type = other DNA
taatggttagcactctggactctgaat

SEQ ID NO: 33818 - DNA, 28 bp, synthetic construct
  misc_feature 1..28: note = Probe
  source 1..28: mol_type = other DNA
taatggttagcactctggactctgaatc

SEQ ID NO: 33819 - DNA, 30 bp, synthetic construct
  misc_feature 1..30: note = Probe
  source 1..30: mol_type = other DNA
taatggttagcactctggactctgaatcca

SEQ ID NO: 33820 - DNA, 40 bp, synthetic construct
  misc_feature 1..40: note = Probe
  source 1..40: mol_type = other DNA
taatggttagcactctggactctgaatccagcgatccgag

SEQ ID NO: 33821 - DNA, 41 bp, synthetic construct
  misc_feature 1..41: note = Probe
  source 1..41: mol_type = other DNA
taatggttagcactctggactctgaatccagcgatccgagt

SEQ ID NO: 33822 - DNA, 42 bp, synthetic construct
  misc_feature 1..42: note = Probe
  source 1..42: mol_type = other DNA
taatggttagcactctggactctgaatccagcgatccgagtt

SEQ ID NO: 33823 - DNA, 36 bp, synthetic construct
  misc_feature 1..36: note = Probe
  source 1..36: mol_type = other DNA
taatggttagcactctggactttgaatccagcgatc

SEQ ID NO: 33824 - DNA, 42 bp, synthetic construct
  misc_feature 1..42: note = Probe
  source 1..42: mol_type = other DNA
taatggttagcactctggactttgaatccagcgatccgagtt

SEQ ID NO: 33825 - DNA, 17 bp, synthetic construct
  misc_feature 1..17: note = Probe
  source 1..17: mol_type = other DNA
taattaaagtggctgat

SEQ ID NO: 33826 - DNA, 18 bp, synthetic construct
  misc_feature 1..18: note = Probe
  source 1..18: mol_type = other DNA
taattaaagtggctgatt

SEQ ID NO: 33827 - DNA, 21 bp, synthetic construct
  misc_feature 1..21: note = Probe
  source 1..21: mol_type = other DNA
taattaaagtggctgatttgc

SEQ ID NO: 33828 - DNA, 19 bp, synthetic construct
  misc_feature 1..19: note = Probe
  source 1..19: mol_type = other DNA
taattgaaaacaaaatact

SEQ ID NO: 33829 - DNA, 29 bp, synthetic construct
  misc_feature 1..29: note = Probe
  source 1..29: mol_type = other DNA
taattgaaaacaaaatactcaaatgggcc

SEQ ID NO: 33830 - DNA, 30 bp, synthetic construct; identical to SEQ ID NO: 7468
  misc_feature 1..30: note = Probe
  source 1..30: mol_type = other DNA

SEQ ID NO: 33831 - DNA, 17 bp, synthetic construct
  misc_feature 1..17: note = Probe
  source 1..17: mol_type = other DNA
taattttaataatcaac

SEQ ID NO: 33832 - DNA, 23 bp, synthetic construct
  misc_feature 1..23: note = Probe
  source 1..23: mol_type = other DNA
tacaaaaaggattagactgaacc

SEQ ID NO: 33833 - DNA, 36 bp, synthetic construct
  misc_feature 1..36: note = Probe
  source 1..36: mol_type = other DNA
tacaacgatggtttttcatatcattggtcgtggttg

SEQ ID NO: 33834 - DNA, 41 bp, synthetic construct
  misc_feature 1..41: note = Probe
  source 1..41: mol_type = other DNA
tacaacgatggtttttcatatcattggtcgtggttgtagtc

SEQ ID NO: 33835 - DNA, 42 bp, synthetic construct
  misc_feature 1..42: note = Probe
  source 1..42: mol_type = other DNA
tacaacgatggtttttcatatcattggtcgtggttgtagtcc

SEQ ID NO: 33836 - DNA, 50 bp, synthetic construct; identical to SEQ ID NO: 1574
  misc_feature 1..50: note = Probe
  source 1..50: mol_type = other DNA

SEQ ID NO: 33837 - DNA, 15 bp, synthetic construct
  misc_feature 1..15: note = Probe
  source 1..15: mol_type = other DNA
tacaatctccagcat

SEQ ID NO: 33838 - DNA, 16 bp, synthetic construct
  misc_feature 1..16: note = Probe
  source 1..16: mol_type = other DNA
tacaatctccagcatt

SEQ ID NO: 33839 - DNA, 17 bp, synthetic construct
  misc_feature 1..17: note = Probe
  source 1..17: mol_type = other DNA
tacaatctccagcattc

SEQ ID NO: 33840 - DNA, 18 bp, synthetic construct
  misc_feature 1..18: note = Probe
  source 1..18: mol_type = other DNA
tacaatctccagcattcc

SEQ ID NO: 33841 - DNA, 19 bp, synthetic construct
  misc_feature 1..19: note = Probe
  source 1..19: mol_type = other DNA
tacaatctccagcattccc

SEQ ID NO: 33842 - DNA, 20 bp, synthetic construct
  misc_feature 1..20: note = Probe
  source 1..20: mol_type = other DNA
tacaatctccagcattcccc

SEQ ID NO: 33843 - DNA, 21 bp, synthetic construct
  misc_feature 1..21: note = Probe
  source 1..21: mol_type = other DNA
tacaatctccagcattccccc

SEQ ID NO: 33844 - DNA, 22 bp, synthetic construct
  misc_feature 1..22: note = Probe
  source 1..22: mol_type = other DNA
tacaatctccagcattccccct

SEQ ID NO: 33845 - DNA, 23 bp, synthetic construct
  misc_feature 1..23: note = Probe
  source 1..23: mol_type = other DNA
tacaatctccagcattccccctc

SEQ ID NO: 33846 - DNA, 24 bp, synthetic construct
  misc_feature 1..24: note = Probe
  source 1..24: mol_type = other DNA
tacaatctccagcattccccctca

SEQ ID NO: 33847 - DNA, 27 bp, synthetic construct
  misc_feature 1..27: note = Probe
  source 1..27: mol_type = other DNA
tacaatctccagcattccccctcaaac

SEQ ID NO: 33848 - DNA, 28 bp, synthetic construct
  misc_feature 1..28: note = Probe
  source 1..28: mol_type = other DNA
tacaatctccagcattccccctcaaacc

SEQ ID NO: 33849 - DNA, 29 bp, synthetic construct
  misc_feature 1..29: note = Probe
  source 1..29: mol_type = other DNA
tacaatctccagcattccccctcaaacct

SEQ ID NO: 33850 - DNA, 30 bp, synthetic construct; identical to SEQ ID NO: 7478
  misc_feature 1..30: note = Probe
  source 1..30: mol_type = other DNA

SEQ ID NO: 33851 - DNA, 33 bp, synthetic construct; identical to SEQ ID NO: 7481
  misc_feature 1..33: note = Probe
  source 1..33: mol_type = other DNA

SEQ ID NO: 33852 - DNA, 34 bp, synthetic construct
  misc_feature 1..34: note = Probe
  source 1..34: mol_type = other DNA
tacaatctccagcattccccctcaaacctaagaa

SEQ ID NO: 33853 - DNA, 18 bp, synthetic construct
  misc_feature 1..18: note = Probe
  source 1..18: mol_type = other DNA
tacacgcagaaggtcctg

SEQ ID NO: 33854 - DNA, 26 bp, synthetic construct
  misc_feature 1..26: note = Probe
  source 1..26: mol_type = other DNA
tacactgaaaatgtttagacgggctc

SEQ ID NO: 33855 - DNA, 20 bp, synthetic construct
  misc_feature 1..20: note = Probe
  source 1..20: mol_type = other DNA
tacacttaggagatttcaac

SEQ ID NO: 33856 - DNA, 21 bp, synthetic construct
  misc_feature 1..21: note = Probe
  source 1..21: mol_type = other DNA
tacacttaggagatttcaact

SEQ ID NO: 33857 - DNA, 22 bp, synthetic construct
  misc_feature 1..22: note = Probe
  source 1..22: mol_type = other DNA
tacacttaggagatttcaactt

SEQ ID NO: 33858 - DNA, 26 bp, synthetic construct
  misc_feature 1..26: note = Probe
  source 1..26: mol_type = other DNA
tacacttaggagatttcaacttaact

SEQ ID NO: 33859 - DNA, 31 bp, synthetic construct; identical to SEQ ID NO: 23360
  misc_feature 1..31: note = Probe
  source 1..31: mol_type = other DNA

SEQ ID NO: 33860 - DNA, 32 bp, synthetic construct; identical to SEQ ID NO: 7488
  misc_feature 1..32: note = Probe
  source 1..32: mol_type = other DNA

SEQ ID NO: 33861 - DNA, 34 bp, synthetic construct; identical to SEQ ID NO: 7490
  misc_feature 1..34: note = Probe
  source 1..34: mol_type = other DNA

SEQ ID NO: 33862 - DNA, 35 bp, synthetic construct; identical to SEQ ID NO: 7491
  misc_feature 1..35: note = Probe
  source 1..35: mol_type = other DNA

SEQ ID NO: 33863 - DNA, 36 bp, synthetic construct; identical to SEQ ID NO: 7492
  misc_feature 1..36: note = Probe
  source 1..36: mol_type = other DNA

SEQ ID NO: 33864 - DNA, 40 bp, synthetic construct; identical to SEQ ID NO: 7496
  misc_feature 1..40: note = Probe
  source 1..40: mol_type = other DNA

SEQ ID NO: 33865 - DNA, 41 bp, synthetic construct; identical to SEQ ID NO: 7497
  misc_feature 1..41: note = Probe
  source 1..41: mol_type = other DNA

SEQ ID NO: 33866 - DNA, 15 bp, synthetic construct
  misc_feature 1..15: note = Probe
  source 1..15: mol_type = other DNA
tacagaccaagagcc

SEQ ID NO: 33867 - DNA, 16 bp, synthetic construct
  misc_feature 1..16: note = Probe
  source 1..16: mol_type = other DNA
tacagaccaagagcct

SEQ ID NO: 33868 - DNA, 24 bp, synthetic construct
  misc_feature 1..24: note = Probe
  source 1..24: mol_type = other DNA
tacagaccaagagccttcaaagcc

SEQ ID NO: 33869 - DNA, 15 bp, synthetic construct
  misc_feature 1..15: note = Probe
  source 1..15: mol_type = other DNA
tacagtcagaggttc

SEQ ID NO: 33870 - DNA, 20 bp, synthetic construct
  misc_feature 1..20: note = Probe
  source 1..20: mol_type = other DNA
tacagtcagaggttcaattc

SEQ ID NO: 33871 - DNA, 21 bp, synthetic construct
  misc_feature 1..21: note = Probe
  source 1..21: mol_type = other DNA
tacagtcagaggttcaattcc

SEQ ID NO: 33872 - DNA, 36 bp, synthetic construct
  misc_feature 1..36: note = Probe
  source 1..36: mol_type = other DNA
tacagtggctcgttggtctaggggtatgattctcgc

SEQ ID NO: 33873 - DNA, 15 bp, synthetic construct
  misc_feature 1..15: note = Probe
  source 1..15: mol_type = other DNA
tacccacacccaccc

SEQ ID NO: 33874 - DNA, 32 bp, synthetic construct; identical to SEQ ID NO: 7512
  misc_feature 1..32: note = Probe
  source 1..32: mol_type = other DNA

SEQ ID NO: 33875 - DNA, 15 bp, synthetic construct
  misc_feature 1..15: note = Probe
  source 1..15: mol_type = other DNA
tacccatggccaacc

SEQ ID NO: 33876 - DNA, 16 bp, synthetic construct
  misc_feature 1..16: note = Probe
  source 1..16: mol_type = other DNA
tacccatggccaacct

SEQ ID NO: 33877 - DNA, 18 bp, synthetic construct
  misc_feature 1..18: note = Probe
  source 1..18: mol_type = other DNA
tacccatggccaacctcc

SEQ ID NO: 33878 - DNA, 19 bp, synthetic construct
  misc_feature 1..19: note = Probe
  source 1..19: mol_type = other DNA
tacccatggccaacctcct

SEQ ID NO: 33879 - DNA, 22 bp, synthetic construct
  misc_feature 1..22: note = Probe
  source 1..22: mol_type = other DNA
tacccatggccaacctcctact

SEQ ID NO: 33880 - DNA, 23 bp, synthetic construct
  misc_feature 1..23: note = Probe
  source 1..23: mol_type = other DNA
tacccatggccaacctcctactc

SEQ ID NO: 33881 - DNA, 24 bp, synthetic construct
  misc_feature 1..24: note = Probe
  source 1..24: mol_type = other DNA
tacccatggccaacctcctactcc

SEQ ID NO: 33882 - DNA, 25 bp, synthetic construct
  misc_feature 1..25: note = Probe
  source 1..25: mol_type = other DNA
tacccatggccaacctcctactcct

SEQ ID NO: 33883 - DNA, 27 bp, synthetic construct
  misc_feature 1..27: note = Probe
  source 1..27: mol_type = other DNA
tacccatggccaacctcctactcctca

SEQ ID NO: 33884 - DNA, 16 bp, synthetic construct
  misc_feature 1..16: note = Probe
  source 1..16: mol_type = other DNA
taccccctctagagcc

SEQ ID NO: 33885 - DNA, 18 bp, synthetic construct
  misc_feature 1..18: note = Probe
  source 1..18: mol_type = other DNA
tacctcctcaaagcaata

SEQ ID NO: 33886 - DNA, 22 bp, synthetic construct
  misc_feature 1..22: note = Probe
  source 1..22: mol_type = other DNA
tacctcctcaaagcaatacact

SEQ ID NO: 33887 - DNA, 36 bp, synthetic construct
  misc_feature 1..36: note = Probe
  source 1..36: mol_type = other DNA
tacctcctcaaagcaatacactgaaaatgtttagac

SEQ ID NO: 33888 - DNA, 18 bp, synthetic construct
  misc_feature 1..18: note = Probe
  source 1..18: mol_type = other DNA
tacgaccccttatttacc

SEQ ID NO: 33889 - DNA, 19 bp, synthetic construct
  misc_feature 1..19: note = Probe
  source 1..19: mol_type = other DNA
tacgaccccttatttaccg

SEQ ID NO: 33890 - DNA, 36 bp, synthetic construct
  misc_feature 1..36: note = Probe
  source 1..36: mol_type = other DNA
tacgggagcccggatagctcagtcggtagagcatca

SEQ ID NO: 33891 - DNA, 42 bp, synthetic construct
  misc_feature 1..42: note = Probe
  source 1..42: mol_type = other DNA
tacgggagcccggatagctcagtcggtagagcatcagacttt

SEQ ID NO: 33892 - DNA, 43 bp, synthetic construct
  misc_feature 1..43: note = Probe
  source 1..43: mol_type = other DNA
tacgggagcccggatagctcagtcggtagagcatcagactttt

SEQ ID NO: 33893 - DNA, 20 bp, synthetic construct
  misc_feature 1..20: note = Probe
  source 1..20: mol_type = other DNA
tacgggccaggattgaaact

SEQ ID NO: 33894 - DNA, 21 bp, synthetic construct
  misc_feature 1..21: note = Probe
  source 1..21: mol_type = other DNA
tacgggccaggattgaaactt

SEQ ID NO: 33895 - DNA, 22 bp, synthetic construct
  misc_feature 1..22: note = Probe
  source 1..22: mol_type = other DNA
tacgggccaggattgaaacttt

SEQ ID NO: 33896 - DNA, 23 bp, synthetic construct
  misc_feature 1..23: note = Probe
  source 1..23: mol_type = other DNA
tacgggccaggattgaaactttt

SEQ ID NO: 33897 - DNA, 16 bp, synthetic construct
  misc_feature 1..16: note = Probe
  source 1..16: mol_type = other DNA
tactataaccacccta

SEQ ID NO: 33898 - DNA, 17 bp, synthetic construct
  misc_feature 1..17: note = Probe
  source 1..17: mol_type = other DNA
tactctgcgttgtggcc

SEQ ID NO: 33899 - DNA, 18 bp, synthetic construct
  misc_feature 1..18: note = Probe
  source 1..18: mol_type = other DNA
tactctgcgttgtggccg

SEQ ID NO: 33900 - DNA, 19 bp, synthetic construct
  misc_feature 1..19: note = Probe
  source 1..19: mol_type = other DNA
tactctgcgttgtggccgc

SEQ ID NO: 33901 - DNA, 20 bp, synthetic construct
  misc_feature 1..20: note = Probe
  source 1..20: mol_type = other DNA
tactctgcgttgtggccgca

SEQ ID NO: 33902 - DNA, 21 bp, synthetic construct
  misc_feature 1..21: note = Probe
  source 1..21: mol_type = other DNA
tactctgcgttgtggccgcag

SEQ ID NO: 33903 - DNA, 23 bp, synthetic construct
  misc_feature 1..23: note = Probe
  source 1..23: mol_type = other DNA
tactgactagtctggtgttattt

SEQ ID NO: 33904 - DNA, 21 bp, synthetic construct
  misc_feature 1..21: note = Probe
  source 1..21: mol_type = other DNA
tactggaaagtgcacttggac

SEQ ID NO: 33905 - DNA, 22 bp, synthetic construct
  misc_feature 1..22: note = Probe
  source 1..22: mol_type = other DNA
tactggaaagtgcacttggacg

SEQ ID NO: 33906 - DNA, 23 bp, synthetic construct
  misc_feature 1..23: note = Probe
  source 1..23: mol_type = other DNA
tactggaaagtgcacttggacga

SEQ ID NO: 33907 - DNA, 24 bp, synthetic construct
  misc_feature 1..24: note = Probe
  source 1..24: mol_type = other DNA
tactggaaagtgcacttggacgaa

SEQ ID NO: 33908 - DNA, 25 bp, synthetic construct
  misc_feature 1..25: note = Probe
  source 1..25: mol_type = other DNA
tactggaaagtgcacttggacgaac

SEQ ID NO: 33909 - DNA, 26 bp, synthetic construct
  misc_feature 1..26: note = Probe
  source 1..26: mol_type = other DNA
tactggaaagtgcacttggacgaacc

SEQ ID NO: 33910 - DNA, 27 bp, synthetic construct
  misc_feature 1..27: note = Probe
  source 1..27: mol_type = other DNA
tactggaaagtgcacttggacgaacca

SEQ ID NO: 33911 - DNA, 28 bp, synthetic construct
  misc_feature 1..28: note = Probe
  source 1..28: mol_type = other DNA
tactttgatagagtaaataataggagct

SEQ ID NO: 33912 - DNA, 36 bp, synthetic construct
  misc_feature 1..36: note = Probe
  source 1..36: mol_type = other DNA
tactttgatagagtaaataataggagcttaaacccc

SEQ ID NO: 33913 - DNA, 17 bp, synthetic construct
  misc_feature 1..17: note = Probe
  source 1..17: mol_type = other DNA
tagaatcttagctttgg

SEQ ID NO: 33914 - DNA, 22 bp, synthetic construct
  misc_feature 1..22: note = Probe
  source 1..22: mol_type = other DNA
tagaatcttagctttgggtgct

SEQ ID NO: 33915 - DNA, 50 bp, synthetic construct; identical to SEQ ID NO: 1580
  misc_feature 1..50: note = Probe
  source 1..50: mol_type = other DNA

SEQ ID NO: 33916 - DNA, 15 bp, synthetic construct
  misc_feature 1..15: note = Probe
  source 1..15: mol_type = other DNA
tagaattctcgcctc

SEQ ID NO: 33917 - DNA, 16 bp, synthetic construct
  misc_feature 1..16: note = Probe
  source 1..16: mol_type = other DNA
tagaattctcgcctcc

SEQ ID NO: 33918 - DNA, 17 bp, synthetic construct
  misc_feature 1..17: note = Probe
  source 1..17: mol_type = other DNA
tagaattctcgcctccc

SEQ ID NO: 33919 - DNA, 15 bp, synthetic construct
  misc_feature 1..15: note = Probe
  source 1..15: mol_type = other DNA
tagaattctcgcctg

SEQ ID NO: 33920 - DNA, 16 bp, synthetic construct
  misc_feature 1..16: note = Probe
  source 1..16: mol_type = other DNA
tagaattctcgcctgc

SEQ ID NO: 33921 - DNA, 17 bp, synthetic construct
  misc_feature 1..17: note = Probe
  source 1..17: mol_type = other DNA
tagaattctcgcctgcc

SEQ ID NO: 33922 - DNA, 18 bp, synthetic construct
  misc_feature 1..18: note = Probe
  source 1..18: mol_type = other DNA
tagaattctcgcctgcca

SEQ ID NO: 33923 - DNA, 19 bp, synthetic construct
  misc_feature 1..19: note = Probe
  source 1..19: mol_type = other DNA
tagaattctcgcctgccac

SEQ ID NO: 33924 - DNA, 22 bp, synthetic construct
  misc_feature 1..22: note = Probe
  source 1..22: mol_type = other DNA
tagaattctcgcctgccacgcg

SEQ ID NO: 33925 - DNA, 23 bp, synthetic construct
  misc_feature 1..23: note = Probe
  source 1..23: mol_type = other DNA
tagaattctcgcctgccacgcgg

SEQ ID NO: 33926 - DNA, 25 bp, synthetic construct
  misc_feature 1..25: note = Probe
  source 1..25: mol_type = other DNA
tagaattctcgcctgccacgcggga

SEQ ID NO: 33927 - DNA, 30 bp, synthetic construct; identical to SEQ ID NO: 23407
  misc_feature 1..30: note = Probe
  source 1..30: mol_type = other DNA

SEQ ID NO: 33928 - DNA, 33 bp, synthetic construct
  misc_feature 1..33: note = Probe
  source 1..33: mol_type = other DNA
tagaattctcgcctgccacgcgggaggcccggg

SEQ ID NO: 33929 - DNA, 34 bp, synthetic construct
  misc_feature 1..34: note = Probe
  source 1..34: mol_type = other DNA
tagaattctcgcctgccacgcgggaggcccgggt

SEQ ID NO: 33930 - DNA, 36 bp, synthetic construct
  misc_feature 1..36: note = Probe
  source 1..36: mol_type = other DNA
tagaattctcgcctgccacgcgggaggcccgggttc

SEQ ID NO: 33931 - DNA, 36 bp, synthetic construct
  misc_feature 1..36: note = Probe
  source 1..36: mol_type = other DNA
tagaattctcgcctgccacgcgggaggcccgggttt

SEQ ID NO: 33932 - DNA, 20 bp, synthetic construct
  misc_feature 1..20: note = Probe
  source 1..20: mol_type = other DNA
tagaattcttgcctgccacg

SEQ ID NO: 33933 - DNA, 15 bp, synthetic construct
  misc_feature 1..15: note = Probe
  source 1..15: mol_type = other DNA
tagacgggctcacat

SEQ ID NO: 33934 - DNA, 16 bp, synthetic construct
  misc_feature 1..16: note = Probe
  source 1..16: mol_type = other DNA
tagacgggctcacatc

SEQ ID NO: 33935 - DNA, 17 bp, synthetic construct
  misc_feature 1..17: note = Probe
  source 1..17: mol_type = other DNA
tagacgggctcacatca

SEQ ID NO: 33936 - DNA, 18 bp, synthetic construct
  misc_feature 1..18: note = Probe
  source 1..18: mol_type = other DNA
tagacgggctcacatcac

SEQ ID NO: 33937 - DNA, 19 bp, synthetic construct
  misc_feature 1..19: note = Probe
  source 1..19: mol_type = other DNA
tagacgggctcacatcacc

SEQ ID NO: 33938 - DNA, 20 bp, synthetic construct
  misc_feature 1..20: note = Probe
  source 1..20: mol_type = other DNA
tagacgggctcacatcaccc

SEQ ID NO: 33939 - DNA, 21 bp, synthetic construct
  misc_feature 1..21: note = Probe
  source 1..21: mol_type = other DNA
tagacgggctcacatcacccc

SEQ ID NO: 33940 - DNA, 24 bp, synthetic construct
  misc_feature 1..24: note = Probe
  source 1..24: mol_type = other DNA
tagacgggctcacatcaccccata

SEQ ID NO: 33941 - DNA, 26 bp, synthetic construct
  misc_feature 1..26: note = Probe
  source 1..26: mol_type = other DNA
tagacgggctcacatcaccccataaa

SEQ ID NO: 33942 - DNA, 30 bp, synthetic construct; identical to SEQ ID NO: 7542
  misc_feature 1..30: note = Probe
  source 1..30: mol_type = other DNA

SEQ ID NO: 33943 - DNA, 36 bp, synthetic construct
  misc_feature 1..36: note = Probe
  source 1..36: mol_type = other DNA
tagagagcctggatagctcagtcggtagagcatcag

SEQ ID NO: 33944 - DNA, 15 bp, synthetic construct
  misc_feature 1..15: note = Probe
  source 1..15: mol_type = other DNA
tagagcatgagaccc

SEQ ID NO: 33945 - DNA, 15 bp, synthetic construct
  misc_feature 1..15: note = Probe
  source 1..15: mol_type = other DNA
tagagcatgagactc

SEQ ID NO: 33946 - DNA, 36 bp, synthetic construct
  misc_feature 1..36: note = Probe
  source 1..36: mol_type = other DNA
tagagcatgagactcttaatctcagggtcgtgggtt

SEQ ID NO: 33947 - DNA, 15 bp, synthetic construct
  misc_feature 1..15: note = Probe
  source 1..15: mol_type = other DNA
tagagcatgggactc

SEQ ID NO: 33948 - DNA, 22 bp, synthetic construct
  misc_feature 1..22: note = Probe
  source 1..22: mol_type = other DNA
tagagcatgggactcttaatcc

SEQ ID NO: 33949 - DNA, 23 bp, synthetic construct
  misc_feature 1..23: note = Probe
  source 1..23: mol_type = other DNA
tagagcatgggactcttaatccc

SEQ ID NO: 33950 - DNA, 35 bp, synthetic construct; identical to SEQ ID NO: 23426
  misc_feature 1..35: note = Probe
  source 1..35: mol_type = other DNA

SEQ ID NO: 33951 - DNA, 36 bp, synthetic construct
  misc_feature 1..36: note = Probe
  source 1..36: mol_type = other DNA
tagagcatgggactcttaatcccagggtcgtgggtt

SEQ ID NO: 33952 - DNA, 16 bp, synthetic construct
  misc_feature 1..16: note = Probe
  source 1..16: mol_type = other DNA
tagagcatttgactgc

SEQ ID NO: 33953 - DNA, 19 bp, synthetic construct
  misc_feature 1..19: note = Probe
  source 1..19: mol_type = other DNA
tagagcccactgtaaagct

SEQ ID NO: 33954 - DNA, 15 bp, synthetic construct
  misc_feature 1..15: note = Probe
  source 1..15: mol_type = other DNA
tagagcggaggactg

SEQ ID NO: 33955 - DNA, 17 bp, synthetic construct
  misc_feature 1..17: note = Probe
  source 1..17: mol_type = other DNA
tagagcggaggactgta

SEQ ID NO: 33956 - DNA, 18 bp, synthetic construct
  misc_feature 1..18: note = Probe
  source 1..18: mol_type = other DNA
tagagcggaggactgtag

SEQ ID NO: 33957 - DNA, 19 bp, synthetic construct
  misc_feature 1..19: note = Probe
  source 1..19: mol_type = other DNA
tagagtaaataataggagc

SEQ ID NO: 33958 - DNA, 27 bp, synthetic construct
  misc_feature 1..27: note = Probe
  source 1..27: mol_type = other DNA
tagagtaaataataggagcttaaaccc

SEQ ID NO: 33959 - DNA, 17 bp, synthetic construct
  misc_feature 1..17: note = Probe
  source 1..17: mol_type = other DNA
tagattgaagccagttg

SEQ ID NO: 33960 - DNA, 22 bp, synthetic construct
  misc_feature 1..22: note = Probe
  source 1..22: mol_type = other DNA
tagattgaagccagttgattag

SEQ ID NO: 33961 - DNA, 23 bp, synthetic construct
  misc_feature 1..23: note = Probe
  source 1..23: mol_type = other DNA
tagattgaagccagttgattagg

SEQ ID NO: 33962 - DNA, 24 bp, synthetic construct
  misc_feature 1..24: note = Probe
  source 1..24: mol_type = other DNA
tagattgaagccagttgattaggg

SEQ ID NO: 33963 - DNA, 25 bp, synthetic construct
  misc_feature 1..25: note = Probe
  source 1..25: mol_type = other DNA
tagattgaagccagttgattagggt

SEQ ID NO: 33964 - DNA, 26 bp, synthetic construct
  misc_feature 1..26: note = Probe
  source 1..26: mol_type = other DNA
tagattgaagccagttgattagggtg

SEQ ID NO: 33965 - DNA, 28 bp, synthetic construct
  misc_feature 1..28: note = Probe
  source 1..28: mol_type = other DNA
tagattgaagccagttgattagggtgct

SEQ ID NO: 33966 - DNA, 29 bp, synthetic construct
  misc_feature 1..29: note = Probe
  source 1..29: mol_type = other DNA
tagattgaagccagttgattagggtgctt

SEQ ID NO: 33967 - DNA, 30 bp, synthetic construct
  misc_feature 1..30: note = Probe
  source 1..30: mol_type = other DNA
tagattgaagccagttgattagggtgctta

SEQ ID NO: 33968 - DNA, 32 bp, synthetic construct; identical to SEQ ID NO: 23435
  misc_feature 1..32: note = Probe
  source 1..32: mol_type = other DNA

SEQ ID NO: 33969 - DNA, 34 bp, synthetic construct
  misc_feature 1..34: note = Probe
  source 1..34: mol_type = other DNA
tagattgaagccagttgattagggtgcttagctg

SEQ ID NO: 33970 - DNA, 35 bp, synthetic construct; identical to SEQ ID NO: 7554
  misc_feature 1..35: note = Probe
  source 1..35: mol_type = other DNA

SEQ ID NO: 33971 - DNA, 37 bp, synthetic construct; identical to SEQ ID NO: 7556
  misc_feature 1..37: note = Probe
  source 1..37: mol_type = other DNA

SEQ ID NO: 33972 - DNA, 38 bp, synthetic construct; identical to SEQ ID NO: 23439
  misc_feature 1..38: note = Probe
  source 1..38: mol_type = other DNA

SEQ ID NO: 33973 - DNA, 39 bp, synthetic construct; identical to SEQ ID NO: 23440
  misc_feature 1..39: note = Probe
  source 1..39: mol_type = other DNA

SEQ ID NO: 33974 - DNA, 40 bp, synthetic construct; identical to SEQ ID NO: 7557
  misc_feature 1..40: note = Probe
  source 1..40: mol_type = other DNA

SEQ ID NO: 33975 - DNA, 41 bp, synthetic construct; identical to SEQ ID NO: 23442
  misc_feature 1..41: note = Probe
  source 1..41: mol_type = other DNA

SEQ ID NO: 33976 - DNA, 50 bp, synthetic construct; identical to SEQ ID NO: 1582
  misc_feature 1..50: note = Probe
  source 1..50: mol_type = other DNA

SEQ ID NO: 33977 - DNA, 15 bp, synthetic construct
  misc_feature 1..15: note = Probe
  source 1..15: mol_type = other DNA
tagcactctggactc

SEQ ID NO: 33978 - DNA, 18 bp, synthetic construct
  misc_feature 1..18: note = Probe
  source 1..18: mol_type = other DNA
tagcactctggactctga

SEQ ID NO: 33979 - DNA, 19 bp, synthetic construct
  misc_feature 1..19: note = Probe
  source 1..19: mol_type = other DNA
tagcactctggactctgaa

SEQ ID NO: 33980 - DNA, 20 bp, synthetic construct
  misc_feature 1..20: note = Probe
  source 1..20: mol_type = other DNA
tagcactctggactctgaat

SEQ ID NO: 33981 - DNA, 21 bp, synthetic construct
  misc_feature 1..21: note = Probe
  source 1..21: mol_type = other DNA
tagcactctggactctgaatc

SEQ ID NO: 33982 - DNA, 22 bp, synthetic construct
  misc_feature 1..22: note = Probe
  source 1..22: mol_type = other DNA
tagcactctggactctgaatcc

SEQ ID NO: 33983 - DNA, 34 bp, synthetic construct
  misc_feature 1..34: note = Probe
  source 1..34: mol_type = other DNA
tagcactctggactctgaatccagcgatccgagt

SEQ ID NO: 33984 - DNA, 35 bp, synthetic construct
  misc_feature 1..35: note = Probe
  source 1..35: mol_type = other DNA
tagcactctggactctgaatccagcgatccgagtt

SEQ ID NO: 33985 - DNA, 36 bp, synthetic construct
  misc_feature 1..36: note = Probe
  source 1..36: mol_type = other DNA
tagcactctggactctgaatccagcgatccgagttc

SEQ ID NO: 33986 - DNA, 21 bp, synthetic construct
  misc_feature 1..21: note = Probe
  source 1..21: mol_type = other DNA
tagcactctggactttgaatc

SEQ ID NO: 33987 - DNA, 34 bp, synthetic construct
  misc_feature 1..34: note = Probe
  source 1..34: mol_type = other DNA
tagcactctggactttgaatccagcgatccgagt

SEQ ID NO: 33988 - DNA, 35 bp, synthetic construct
  misc_feature 1..35: note = Probe
  source 1..35: mol_type = other DNA
tagcactctggactttgaatccagcgatccgagtt

SEQ ID NO: 33989 - DNA, 36 bp, synthetic construct
  misc_feature 1..36: note = Probe
  source 1..36: mol_type = other DNA
tagcactctggactttgaatccagcgatccgagttc

SEQ ID NO: 33990 - DNA, 42 bp, synthetic construct; identical to SEQ ID NO: 23452
  misc_feature 1..42: note = Probe
  source 1..42: mol_type = other DNA

SEQ ID NO: 33991 - DNA, 43 bp, synthetic construct
  misc_feature 1..43: note = Probe
  source 1..43: mol_type = other DNA
tagcattaaccttttaagttaaagattaagagaaccaacacct

SEQ ID NO: 33992 - DNA, 16 bp, synthetic construct
  misc_feature 1..16: note = Probe
  source 1..16: mol_type = other DNA
tagccccaaacccact

SEQ ID NO: 33993 - DNA, 18 bp, synthetic construct
  misc_feature 1..18: note = Probe
  source 1..18: mol_type = other DNA
tagccccaaacccactcc

SEQ ID NO: 33994 - DNA, 19 bp, synthetic construct
  misc_feature 1..19: note = Probe
  source 1..19: mol_type = other DNA
tagccccaaacccactcca

SEQ ID NO: 33995 - DNA, 20 bp, synthetic construct
  misc_feature 1..20: note = Probe
  source 1..20: mol_type = other DNA
tagccccaaacccactccac

SEQ ID NO: 33996 - DNA, 21 bp, synthetic construct
  misc_feature 1..21: note = Probe
  source 1..21: mol_type = other DNA
tagccccaaacccactccacc

SEQ ID NO: 33997 - DNA, 22 bp, synthetic construct
  misc_feature 1..22: note = Probe
  source 1..22: mol_type = other DNA
tagccccaaacccactccacct

SEQ ID NO: 33998 - DNA, 27 bp, synthetic construct
  misc_feature 1..27: note = Probe
  source 1..27: mol_type = other DNA
tagccgcccggctagctcagtcggtag

SEQ ID NO: 33999 - DNA, 28 bp, synthetic construct
  misc_feature 1..28: note = Probe
  source 1..28: mol_type = other DNA
tagccgcccggctagctcagtcggtaga

SEQ ID NO: 34000 - DNA, 29 bp, synthetic construct
  misc_feature 1..29: note = Probe
  source 1..29: mol_type = other DNA
tagccgcccggctagctcagtcggtagag

SEQ ID NO: 34001 - DNA, 18 bp, synthetic construct
  misc_feature 1..18: note = Probe
  source 1..18: mol_type = other DNA
tagccgtaaggcggctgt

SEQ ID NO: 34002 - DNA, 19 bp, synthetic construct
  misc_feature 1..19: note = Probe
  source 1..19: mol_type = other DNA
tagccgtaaggcggctgtt

SEQ ID NO: 34003 - DNA, 20 bp, synthetic construct
  misc_feature 1..20: note = Probe
  source 1..20: mol_type = other DNA
tagccgtaaggcggctgttt

SEQ ID NO: 34004 - DNA, 21 bp, synthetic construct
  misc_feature 1..21: note = Probe
  source 1..21: mol_type = other DNA
tagccgtaaggcggctgtttt

SEQ ID NO: 34005 - DNA, 16 bp, synthetic construct
  misc_feature 1..16: note = Probe
  source 1..16: mol_type = other DNA
tagcctttctattagc

SEQ ID NO: 34006 - DNA, 26 bp, synthetic construct
  misc_feature 1..26: note = Probe
  source 1..26: mol_type = other DNA
tagctcagctggtagagcggaggact

SEQ ID NO: 34007 - DNA, 25 bp, synthetic construct
  misc_feature 1..25: note = Probe
  source 1..25: mol_type = other DNA
tagctcaggggttagagcactggtc

SEQ ID NO: 34008 - DNA, 26 bp, synthetic construct
  misc_feature 1..26: note = Probe
  source 1..26: mol_type = other DNA
tagctcaggggttagagcactggtct

SEQ ID NO: 34009 - DNA, 16 bp, synthetic construct
  misc_feature 1..16: note = Probe
  source 1..16: mol_type = other DNA
tagctcagtcggtaga

SEQ ID NO: 34010 - DNA, 17 bp, synthetic construct
  misc_feature 1..17: note = Probe
  source 1..17: mol_type = other DNA
tagctcagtcggtagag

SEQ ID NO: 34011 - DNA, 18 bp, synthetic construct
  misc_feature 1..18: note = Probe
  source 1..18: mol_type = other DNA
tagctcagtcggtagagc

SEQ ID NO: 34012 - DNA, 25 bp, synthetic construct
  misc_feature 1..25: note = Probe
  source 1..25: mol_type = other DNA
tagctcagtcggtagagcatcagac

SEQ ID NO: 34013 - DNA, 27 bp, synthetic construct
  misc_feature 1..27: note = Probe
  source 1..27: mol_type = other DNA
tagctcagtcggtagagcatcagactt

SEQ ID NO: 34014 - DNA, 30 bp, synthetic construct; identical to SEQ ID NO: 14184
  misc_feature 1..30: note = Probe
  source 1..30: mol_type = other DNA

SEQ ID NO: 34015 - DNA, 25 bp, synthetic construct
  misc_feature 1..25: note = Probe
  source 1..25: mol_type = other DNA
tagctcagtcggtagagcatgagac

SEQ ID NO: 34016 - DNA, 26 bp, synthetic construct
  misc_feature 1..26: note = Probe
  source 1..26: mol_type = other DNA
tagctcagtcggtagagcatgagact

SEQ ID NO: 34017 - DNA, 28 bp, synthetic construct
  misc_feature 1..28: note = Probe
  source 1..28: mol_type = other DNA
tagctcagtcggtagagcatgagactct

SEQ ID NO: 34018 - DNA, 28 bp, synthetic construct
  misc_feature 1..28: note = Probe
  source 1..28: mol_type = other DNA
tagctcagtcggtagagcatgggactct

SEQ ID NO: 34019 - DNA, 36 bp, synthetic construct
  misc_feature 1..36: note = Probe
  source 1..36: mol_type = other DNA
tagctcagttgggagagcgttagactgaagatctaa

SEQ ID NO: 34020 - DNA, 26 bp, synthetic construct
  misc_feature 1..26: note = Probe
  source 1..26: mol_type = other DNA
tagctcagttggtagagcggaggact

SEQ ID NO: 34021 - DNA, 15 bp, synthetic construct
  misc_feature 1..15: note = Probe
  source 1..15: mol_type = other DNA
tagctgccttccaag

SEQ ID NO: 34022 - DNA, 33 bp, synthetic construct
  misc_feature 1..33: note = Probe
  source 1..33: mol_type = other DNA
tagctgttaactaagtgtttgtgggtttaagtc

SEQ ID NO: 34023 - DNA, 26 bp, synthetic construct
  misc_feature 1..26: note = Probe
  source 1..26: mol_type = other DNA
tagctttgggtgctaatggtggagtt

SEQ ID NO: 34024 - DNA, 27 bp, synthetic construct
  misc_feature 1..27: note = Probe
  source 1..27: mol_type = other DNA
tagctttgggtgctaatggtggagtta

SEQ ID NO: 34025 - DNA, 28 bp, synthetic construct
  misc_feature 1..28: note = Probe
  source 1..28: mol_type = other DNA
tagctttgggtgctaatggtggagttaa

SEQ ID NO: 34026 - DNA, 29 bp, synthetic construct
  misc_feature 1..29: note = Probe
  source 1..29: mol_type = other DNA
tagctttgggtgctaatggtggagttaaa

SEQ ID NO: 34027 - DNA, 30 bp, synthetic construct
  misc_feature 1..30: note = Probe
  source 1..30: mol_type = other DNA
tagctttgggtgctaatggtggagttaaag

SEQ ID NO: 34028 - DNA, 31 bp, synthetic construct
  misc_feature 1..31: note = Probe
  source 1..31: mol_type = other DNA
tagctttgggtgctaatggtggagttaaaga

SEQ ID NO: 34029 - DNA, 32 bp, synthetic construct
  misc_feature 1..32: note = Probe
  source 1..32: mol_type = other DNA
tagctttgggtgctaatggtggagttaaagac

SEQ ID NO: 34030 - DNA, 33 bp, synthetic construct
  misc_feature 1..33: note = Probe
  source 1..33: mol_type = other DNA
tagctttgggtgctaatggtggagttaaagact

SEQ ID NO: 34031 - DNA, 45 bp, synthetic construct
  misc_feature 1..45: note = Probe
  source 1..45: mol_type = other DNA
tagctttgggtgctaatggtggagttaaagactttttctctgatt

SEQ ID NO: 34032 - DNA, 17 bp, synthetic construct
  misc_feature 1..17: note = Probe
  source 1..17: mol_type = other DNA
taggactatgagaatcg

SEQ ID NO: 34033 - DNA, 21 bp, synthetic construct
  misc_feature 1..21: note = Probe
  source 1..21: mol_type = other DNA
taggactatgagaatcgaacc

SEQ ID NO: 34034 - DNA, 22 bp, synthetic construct
  misc_feature 1..22: note = Probe
  source 1..22: mol_type = other DNA
taggactatgagaatcgaaccc

SEQ ID NO: 34035 - DNA, 32 bp, synthetic construct
  misc_feature 1..32: note = Probe
  source 1..32: mol_type = other DNA
taggactatgagaatcgaacccatccctgaga

SEQ ID NO: 34036 - DNA, 15 bp, synthetic construct
  misc_feature 1..15: note = Probe
  source 1..15: mol_type = other DNA
taggagatttcaact

SEQ ID NO: 34037 - DNA, 16 bp, synthetic construct
  misc_feature 1..16: note = Probe
  source 1..16: mol_type = other DNA
taggagatttcaactt

SEQ ID NO: 34038 - DNA, 20 bp, synthetic construct
  misc_feature 1..20: note = Probe
  source 1..20: mol_type = other DNA
taggagatttcaacttaact

SEQ ID NO: 34039 - DNA, 21 bp, synthetic construct
  misc_feature 1..21: note = Probe
  source 1..21: mol_type = other DNA
taggagatttcaacttaactt

SEQ ID NO: 34040 - DNA, 22 bp, synthetic construct
  misc_feature 1..22: note = Probe
  source 1..22: mol_type = other DNA
taggagatttcaacttaacttg

SEQ ID NO: 34041 - DNA, 24 bp, synthetic construct
  misc_feature 1..24: note = Probe
  source 1..24: mol_type = other DNA
taggagatttcaacttaacttgac

SEQ ID NO: 34042 - DNA, 25 bp, synthetic construct
  misc_feature 1..25: note = Probe
  source 1..25: mol_type = other DNA
taggagatttcaacttaacttgacc

SEQ ID NO: 34043 - DNA, 26 bp, synthetic construct
  misc_feature 1..26: note = Probe
  source 1..26: mol_type = other DNA
taggagatttcaacttaacttgaccg

SEQ ID NO: 34044 - DNA, 28 bp, synthetic construct
  misc_feature 1..28: note = Probe
  source 1..28: mol_type = other DNA
taggagatttcaacttaacttgaccgct

SEQ ID NO: 34045 - DNA, 29 bp, synthetic construct
  misc_feature 1..29: note = Probe
  source 1..29: mol_type = other DNA
taggagatttcaacttaacttgaccgctc

SEQ ID NO: 34046 - DNA, 30 bp, synthetic construct; identical to SEQ ID NO: 11700
  misc_feature 1..30: note = Probe
  source 1..30: mol_type = other DNA

SEQ ID NO: 34047 - DNA, 33 bp, synthetic construct; identical to SEQ ID NO: 7577
  misc_feature 1..33: note = Probe
  source 1..33: mol_type = other DNA

SEQ ID NO: 34048 - DNA, 34 bp, synthetic construct; identical to SEQ ID NO: 7578
  misc_feature 1..34: note = Probe
  source 1..34: mol_type = other DNA

SEQ ID NO: 34049 - DNA, 35 bp, synthetic construct; identical to SEQ ID NO: 7579
  misc_feature 1..35: note = Probe
  source 1..35: mol_type = other DNA

SEQ ID NO: 34050 - DNA, 36 bp, synthetic construct
  misc_feature 1..36: note = Probe
  source 1..36: mol_type = other DNA
taggagatttcaacttaacttgaccgctctgagcta

SEQ ID NO: 34051 - DNA, 15 bp, synthetic construct
  misc_feature 1..15: note = Probe
  source 1..15: mol_type = other DNA
taggagcttaaaccc

SEQ ID NO: 34052 - DNA, 17 bp, synthetic construct
  misc_feature 1..17: note = Probe
  source 1..17: mol_type = other DNA
taggagcttaaaccccc

SEQ ID NO: 34053 - DNA, 21 bp, synthetic construct
  misc_feature 1..21: note = Probe
  source 1..21: mol_type = other DNA
taggatgcgagaggtcccggg

SEQ ID NO: 34054 - DNA, 22 bp, synthetic construct
  misc_feature 1..22: note = Probe
  source 1..22: mol_type = other DNA
taggatgcgagaggtcccgggt

SEQ ID NO: 34055 - DNA, 23 bp, synthetic construct
  misc_feature 1..23: note = Probe
  source 1..23: mol_type = other DNA
taggatgcgagaggtcccgggtt

SEQ ID NO: 34056 - DNA, 15 bp, synthetic construct
  misc_feature 1..15: note = Probe
  source 1..15: mol_type = other DNA
taggatggggtgtga

SEQ ID NO: 34057 - DNA, 16 bp, synthetic construct
  misc_feature 1..16: note = Probe
  source 1..16: mol_type = other DNA
taggatggggtgtgat

SEQ ID NO: 34058 - DNA, 17 bp, synthetic construct
  misc_feature 1..17: note = Probe
  source 1..17: mol_type = other DNA
taggatggggtgtgata

SEQ ID NO: 34059 - DNA, 18 bp, synthetic construct
  misc_feature 1..18: note = Probe
  source 1..18: mol_type = other DNA
taggatggggtgtgatag

SEQ ID NO: 34060 - DNA, 37 bp, synthetic construct; identical to SEQ ID NO: 7588
  misc_feature 1..37: note = Probe
  source 1..37: mol_type = other DNA

SEQ ID NO: 34061 - DNA, 38 bp, synthetic construct; identical to SEQ ID NO: 23494
  misc_feature 1..38: note = Probe
  source 1..38: mol_type = other DNA

SEQ ID NO: 34062 - DNA, 39 bp, synthetic construct
  misc_feature 1..39: note = Probe
  source 1..39: mol_type = other DNA
taggatggggtgtgataggtggcacggagaattttggat

SEQ ID NO: 34063 - DNA, 40 bp, synthetic construct
  misc_feature 1..40: note = Probe
  source 1..40: mol_type = other DNA
taggatggggtgtgataggtggcacggagaattttggatt

SEQ ID NO: 34064 - DNA, 42 bp, synthetic construct
  misc_feature 1..42: note = Probe
  source 1..42: mol_type = other DNA
taggatggggtgtgataggtggcacggagaattttggattct

SEQ ID NO: 34065 - DNA, 43 bp, synthetic construct
  misc_feature 1..43: note = Probe
  source 1..43: mol_type = other DNA
taggatggggtgtgataggtggcacggagaattttggattctc

SEQ ID NO: 34066 - DNA, 44 bp, synthetic construct
  misc_feature 1..44: note = Probe
  source 1..44: mol_type = other DNA
taggatggggtgtgataggtggcacggagaattttggattctca

SEQ ID NO: 34067 - DNA, 50 bp, synthetic construct; identical to SEQ ID NO: 23496
  misc_feature 1..50: note = Probe
  source 1..50: mol_type = other DNA

SEQ ID NO: 34068 - DNA, 15 bp, synthetic construct
  misc_feature 1..15: note = Probe
  source 1..15: mol_type = other DNA
taggattcggcgctc

SEQ ID NO: 34069 - DNA, 23 bp, synthetic construct
  misc_feature 1..23: note = Probe
  source 1..23: mol_type = other DNA
taggattcggcgctctcaccgcc

SEQ ID NO: 34070 - DNA, 29 bp, synthetic construct
  misc_feature 1..29: note = Probe
  source 1..29: mol_type = other DNA
taggattcggcgctctcaccgccgcggcc

SEQ ID NO: 34071 - DNA, 36 bp, synthetic construct
  misc_feature 1..36: note = Probe
  source 1..36: mol_type = other DNA
taggattcggcgctctcaccgccgcggcccgggttc

SEQ ID NO: 34072 - DNA, 36 bp, synthetic construct
  misc_feature 1..36: note = Probe
  source 1..36: mol_type = other DNA
taggccccaaaaattttggtgcaactccaaataaaa

SEQ ID NO: 34073 - DNA, 19 bp, synthetic construct
  misc_feature 1..19: note = Probe
  source 1..19: mol_type = other DNA
taggcctctttttaccagc

SEQ ID NO: 34074 - DNA, 18 bp, synthetic construct
  misc_feature 1..18: note = Probe
  source 1..18: mol_type = other DNA
taggctgtcagctcttcc

SEQ ID NO: 34075 - DNA, 19 bp, synthetic construct
  misc_feature 1..19: note = Probe
  source 1..19: mol_type = other DNA
tagggctttggctgtgggg

SEQ ID NO: 34076 - DNA, 16 bp, synthetic construct
  misc_feature 1..16: note = Probe
  source 1..16: mol_type = other DNA
taggggtatgattctc

SEQ ID NO: 34077 - DNA, 18 bp, synthetic construct
  misc_feature 1..18: note = Probe
  source 1..18: mol_type = other DNA
taggggtatgattctcgc

SEQ ID NO: 34078 - DNA, 19 bp, synthetic construct
  misc_feature 1..19: note = Probe
  source 1..19: mol_type = other DNA
taggggtatgattctcgct

SEQ ID NO: 34079 - DNA, 20 bp, synthetic construct
  misc_feature 1..20: note = Probe
  source 1..20: mol_type = other DNA
taggggtatgattctcgctt

SEQ ID NO: 34080 - DNA, 19 bp, synthetic construct
  misc_feature 1..19: note = Probe
  source 1..19: mol_type = other DNA
taggggtatgattctcggt

SEQ ID NO: 34081 - DNA, 18 bp, synthetic construct
  misc_feature 1..18: note = Probe
  source 1..18: mol_type = other DNA
tagggtgcgagaggtccc

SEQ ID NO: 34082 - DNA, 21 bp, synthetic construct
  misc_feature 1..21: note = Probe
  source 1..21: mol_type = other DNA
tagggtgcgagaggtcccggg

SEQ ID NO: 34083 - DNA, 22 bp, synthetic construct
  misc_feature 1..22: note = Probe
  source 1..22: mol_type = other DNA
tagggtgcgagaggtcccgggt

SEQ ID NO: 34084 - DNA, 23 bp, synthetic construct
  misc_feature 1..23: note = Probe
  source 1..23: mol_type = other DNA
tagggtgcgagaggtcccgggtt

SEQ ID NO: 34085 - DNA, 16 bp, synthetic construct
  misc_feature 1..16: note = Probe
  source 1..16: mol_type = other DNA
tagggtgcttagctgt

SEQ ID NO: 34086 - DNA, 17 bp, synthetic construct
  misc_feature 1..17: note = Probe
  source 1..17: mol_type = other DNA
tagggtgcttagctgtt

SEQ ID NO: 34087 - DNA, 21 bp, synthetic construct
  misc_feature 1..21: note = Probe
  source 1..21: mol_type = other DNA
tagggtgcttagctgttaact

SEQ ID NO: 34088 - DNA, 36 bp, synthetic construct
  misc_feature 1..36: note = Probe
  source 1..36: mol_type = other DNA
tagggtgcttagctgttaactaagtgtttgtgggtt

SEQ ID NO: 34089 - DNA, 15 bp, synthetic construct
  misc_feature 1..15: note = Probe
  source 1..15: mol_type = other DNA
tagggtgtgcgtgtt

SEQ ID NO: 34090 - DNA, 16 bp, synthetic construct
  misc_feature 1..16: note = Probe
  source 1..16: mol_type = other DNA
tagggtgtgcgtgttt

SEQ ID NO: 34091 - DNA, 17 bp, synthetic construct
  misc_feature 1..17: note = Probe
  source 1..17: mol_type = other DNA
tagggtgtgcgtgtttt

SEQ ID NO: 34092 - DNA, 18 bp, synthetic construct
  misc_feature 1..18: note = Probe
  source 1..18: mol_type = other DNA
tagggtgtgcgtgttttt

SEQ ID NO: 34093 - DNA, 19 bp, synthetic construct
  misc_feature 1..19: note = Probe
  source 1..19: mol_type = other DNA
tagggtgtgcgtgtttttt

SEQ ID NO: 34094 - DNA, 20 bp, synthetic construct
  misc_feature 1..20: note = Probe
  source 1..20: mol_type = other DNA
tagggtgtgcgtgttttttt

SEQ ID NO: 34095 - DNA, 21 bp, synthetic construct
  misc_feature 1..21: note = Probe
  source 1..21: mol_type = other DNA
tagggtgtgcgtgtttttttt

SEQ ID NO: 34096 - DNA, 17 bp, synthetic construct
  misc_feature 1..17: note = Probe
  source 1..17: mol_type = other DNA
taggtagcgcatcagtc

SEQ ID NO: 34097 - DNA, 28 bp, synthetic construct
  misc_feature 1..28: note = Probe
  source 1..28: mol_type = other DNA
taggtttggtcctagcctttctattagc

SEQ ID NO: 34098 - DNA, 17 bp, synthetic construct
  misc_feature 1..17: note = Probe
  source 1..17: mol_type = other DNA
tagtaaacaggagatcc

SEQ ID NO: 34099 - DNA, 16 bp, synthetic construct
  misc_feature 1..16: note = Probe
  source 1..16: mol_type = other DNA
tagtaccgttaacttc

SEQ ID NO: 34100 - DNA, 17 bp, synthetic construct
  misc_feature 1..17: note = Probe
  source 1..17: mol_type = other DNA
tagtaccgttaacttcc

SEQ ID NO: 34101 - DNA, 34 bp, synthetic construct
  misc_feature 1..34: note = Probe
  source 1..34: mol_type = other DNA
tagtaccgttaacttccaattaactagttttgac

SEQ ID NO: 34102 - DNA, 34 bp, synthetic construct
  misc_feature 1..34: note = Probe
  source 1..34: mol_type = other DNA
tagtactctgcgttgtggccgcagcaacctcggt

SEQ ID NO: 34103 - DNA, 36 bp, synthetic construct
  misc_feature 1..36: note = Probe
  source 1..36: mol_type = other DNA
tagtactctgcgttgtggccgcagcaacctcggttc

SEQ ID NO: 34104 - DNA, 23 bp, synthetic construct
  misc_feature 1..23: note = Probe
  source 1..23: mol_type = other DNA
tagtctaggctgtcagctcttcc

SEQ ID NO: 34105 - DNA, 18 bp, synthetic construct
  misc_feature 1..18: note = Probe
  source 1..18: mol_type = other DNA
tagtggctaggattcggc

SEQ ID NO: 34106 - DNA, 19 bp, synthetic construct
  misc_feature 1..19: note = Probe
  source 1..19: mol_type = other DNA
tagtggctaggattcggcg

SEQ ID NO: 34107 - DNA, 18 bp, synthetic construct
  misc_feature 1..18: note = Probe
  source 1..18: mol_type = other DNA
tagtggtatgattctcgc

SEQ ID NO: 34108 - DNA, 19 bp, synthetic construct
  misc_feature 1..19: note = Probe
  source 1..19: mol_type = other DNA
tagtggtatgattctcgct

SEQ ID NO: 34109 - DNA, 36 bp, synthetic construct
  misc_feature 1..36: note = Probe
  source 1..36: mol_type = other DNA
tagtggtgagcatagctgccttccaagcagttgacc

SEQ ID NO: 34110 - DNA, 19 bp, synthetic construct
  misc_feature 1..19: note = Probe
  source 1..19: mol_type = other DNA
tagtggtgagtatccccgc

SEQ ID NO: 34111 - DNA, 24 bp, synthetic construct
  misc_feature 1..24: note = Probe
  source 1..24: mol_type = other DNA
tagtggtgagtatccccgcctgtc

SEQ ID NO: 34112 - DNA, 26 bp, synthetic construct
  misc_feature 1..26: note = Probe
  source 1..26: mol_type = other DNA
tagtggtgagtatccccgcctgtcac

SEQ ID NO: 34113 - DNA, 36 bp, synthetic construct; identical to SEQ ID NO: 14212
  misc_feature 1..36: note = Probe
  source 1..36: mol_type = other DNA

SEQ ID NO: 34114 - DNA, 18 bp, synthetic construct
  misc_feature 1..18: note = Probe
  source 1..18: mol_type = other DNA
tagtggttaggattcggc

SEQ ID NO: 34115 - DNA, 19 bp, synthetic construct
  misc_feature 1..19: note = Probe
  source 1..19: mol_type = other DNA
tagtggttaggattcggcg

SEQ ID NO: 34116 - DNA, 20 bp, synthetic construct
  misc_feature 1..20: note = Probe
  source 1..20: mol_type = other DNA
tagtggttaggattcggcgc

SEQ ID NO: 34117 - DNA, 21 bp, synthetic construct
  misc_feature 1..21: note = Probe
  source 1..21: mol_type = other DNA
tagtggttaggattcggcgct

SEQ ID NO: 34118 - DNA, 18 bp, synthetic construct
  misc_feature 1..18: note = Probe
  source 1..18: mol_type = other DNA
tagtggttagtactctgc

SEQ ID NO: 34119 - DNA, 20 bp, synthetic construct
  misc_feature 1..20: note = Probe
  source 1..20: mol_type = other DNA
tagtggttagtactctgcgt

SEQ ID NO: 34120 - DNA, 22 bp, synthetic construct
  misc_feature 1..22: note = Probe
  source 1..22: mol_type = other DNA
tagtggttagtactctgcgttg

SEQ ID NO: 34121 - DNA, 23 bp, synthetic construct
  misc_feature 1..23: note = Probe
  source 1..23: mol_type = other DNA
tagtggttagtactctgcgttgt

SEQ ID NO: 34122 - DNA, 36 bp, synthetic construct
  misc_feature 1..36: note = Probe
  source 1..36: mol_type = other DNA
tagtggttagtactctgcgttgtggccgcagcaacc

SEQ ID NO: 34123 - DNA, 21 bp, synthetic construct
  misc_feature 1..21: note = Probe
  source 1..21: mol_type = other DNA
tagtggttatcacgtctgctt

SEQ ID NO: 34124 - DNA, 25 bp, synthetic construct
  misc_feature 1..25: note = Probe
  source 1..25: mol_type = other DNA
tagtgtagtggtcatcacgttcgcc

SEQ ID NO: 34125 - DNA, 16 bp, synthetic construct
  misc_feature 1..16: note = Probe
  source 1..16: mol_type = other DNA
tagtgtagtggttatc

SEQ ID NO: 34126 - DNA, 24 bp, synthetic construct
  misc_feature 1..24: note = Probe
  source 1..24: mol_type = other DNA
tagtgtagtggttatcacgtctgc

SEQ ID NO: 34127 - DNA, 26 bp, synthetic construct
  misc_feature 1..26: note = Probe
  source 1..26: mol_type = other DNA
tagtgtagtggttatcacgtctgctt

SEQ ID NO: 34128 - DNA, 27 bp, synthetic construct
  misc_feature 1..27: note = Probe
  source 1..27: mol_type = other DNA
tagtgtagtggttatcacgtctgcttt

SEQ ID NO: 34129 - DNA, 28 bp, synthetic construct
  misc_feature 1..28: note = Probe
  source 1..28: mol_type = other DNA
tagtgtagtggttatcacgtctgcttta

SEQ ID NO: 34130 - DNA, 25 bp, synthetic construct
  misc_feature 1..25: note = Probe
  source 1..25: mol_type = other DNA
tagtgtagtggttatcacgttcgcc

SEQ ID NO: 34131 - DNA, 26 bp, synthetic construct
  misc_feature 1..26: note = Probe
  source 1..26: mol_type = other DNA
tagtgtagtggttatcacgttcgcct

SEQ ID NO: 34132 - DNA, 33 bp, synthetic construct
  misc_feature 1..33: note = Probe
  source 1..33: mol_type = other DNA
tagttgaaatacaacgatggtttttcatatcat

SEQ ID NO: 34133 - DNA, 29 bp, synthetic construct
  misc_feature 1..29: note = Probe
  source 1..29: mol_type = other DNA
tagtttaaacaaaacgaatgatttcgact

SEQ ID NO: 34134 - DNA, 30 bp, synthetic construct
  misc_feature 1..30: note = Probe
  source 1..30: mol_type = other DNA
tagtttaaacaaaacgaatgatttcgactc

SEQ ID NO: 34135 - DNA, 36 bp, synthetic construct
  misc_feature 1..36: note = Probe
  source 1..36: mol_type = other DNA
tagtttaaccaaaacatcagattgtgaatctgacaa

SEQ ID NO: 34136 - DNA, 20 bp, synthetic construct
  misc_feature 1..20: note = Probe
  source 1..20: mol_type = other DNA
tataaatagtaccgttaact

SEQ ID NO: 34137 - DNA, 22 bp, synthetic construct
  misc_feature 1..22: note = Probe
  source 1..22: mol_type = other DNA
tataaatagtaccgttaacttc

SEQ ID NO: 34138 - DNA, 23 bp, synthetic construct
  misc_feature 1..23: note = Probe
  source 1..23: mol_type = other DNA
tataaatagtaccgttaacttcc

SEQ ID NO: 34139 - DNA, 36 bp, synthetic construct
  misc_feature 1..36: note = Probe
  source 1..36: mol_type = other DNA
tataaatagtaccgttaacttccaattaactagttt

SEQ ID NO: 34140 - DNA, 15 bp, synthetic construct
  misc_feature 1..15: note = Probe
  source 1..15: mol_type = other DNA
tatacccacacccac

SEQ ID NO: 34141 - DNA, 16 bp, synthetic construct
  misc_feature 1..16: note = Probe
  source 1..16: mol_type = other DNA
tatacccacacccacc

SEQ ID NO: 34142 - DNA, 17 bp, synthetic construct
  misc_feature 1..17: note = Probe
  source 1..17: mol_type = other DNA
tatacccacacccaccc

SEQ ID NO: 34143 - DNA, 18 bp, synthetic construct
  misc_feature 1..18: note = Probe
  source 1..18: mol_type = other DNA
tatacccacacccaccca

SEQ ID NO: 34144 - DNA, 19 bp, synthetic construct
  misc_feature 1..19: note = Probe
  source 1..19: mol_type = other DNA
tatacccacacccacccaa

SEQ ID NO: 34145 - DNA, 20 bp, synthetic construct
  misc_feature 1..20: note = Probe
  source 1..20: mol_type = other DNA
tatacccacacccacccaag

SEQ ID NO: 34146 - DNA, 21 bp, synthetic construct
  misc_feature 1..21: note = Probe
  source 1..21: mol_type = other DNA
tatacccacacccacccaaga

SEQ ID NO: 34147 - DNA, 22 bp, synthetic construct
  misc_feature 1..22: note = Probe
  source 1..22: mol_type = other DNA
tatacccacacccacccaagaa

SEQ ID NO: 34148 - DNA, 23 bp, synthetic construct
  misc_feature 1..23: note = Probe
  source 1..23: mol_type = other DNA
tatacccacacccacccaagaac

SEQ ID NO: 34149 - DNA, 24 bp, synthetic construct
  misc_feature 1..24: note = Probe
  source 1..24: mol_type = other DNA
tatacccacacccacccaagaaca

SEQ ID NO: 34150 - DNA, 25 bp, synthetic construct
  misc_feature 1..25: note = Probe
  source 1..25: mol_type = other DNA
tatacccacacccacccaagaacag

SEQ ID NO: 34151 - DNA, 26 bp, synthetic construct
  misc_feature 1..26: note = Probe
  source 1..26: mol_type = other DNA
tatacccacacccacccaagaacagg

SEQ ID NO: 34152 - DNA, 27 bp, synthetic construct
  misc_feature 1..27: note = Probe
  source 1..27: mol_type = other DNA
tatacccacacccacccaagaacaggg

SEQ ID NO: 34153 - DNA, 28 bp, synthetic construct
  misc_feature 1..28: note = Probe
  source 1..28: mol_type = other DNA
tatacccacacccacccaagaacagggt

SEQ ID NO: 34154 - DNA, 29 bp, synthetic construct
  misc_feature 1..29: note = Probe
  source 1..29: mol_type = other DNA
tatacccacacccacccaagaacagggtt

SEQ ID NO: 34155 - DNA, 30 bp, synthetic construct; identical to SEQ ID NO: 7623
  misc_feature 1..30: note = Probe
  source 1..30: mol_type = other DNA

SEQ ID NO: 34156 - DNA, 31 bp, synthetic construct; identical to SEQ ID NO: 7624
  misc_feature 1..31: note = Probe
  source 1..31: mol_type = other DNA

SEQ ID NO: 34157 - DNA, 32 bp, synthetic construct; identical to SEQ ID NO: 7625
  misc_feature 1..32: note = Probe
  source 1..32: mol_type = other DNA

SEQ ID NO: 34158 - DNA, 33 bp, synthetic construct; identical to SEQ ID NO: 7626
  misc_feature 1..33: note = Probe
  source 1..33: mol_type = other DNA

SEQ ID NO: 34159 - DNA, 34 bp, synthetic construct; identical to SEQ ID NO: 7627
  misc_feature 1..34: note = Probe
  source 1..34: mol_type = other DNA

SEQ ID NO: 34160 - DNA, 35 bp, synthetic construct; identical to SEQ ID NO: 7628
  misc_feature 1..35: note = Probe
  source 1..35: mol_type = other DNA

SEQ ID NO: 34161 - DNA, 36 bp, synthetic construct; identical to SEQ ID NO: 7629
  misc_feature 1..36: note = Probe
  source 1..36: mol_type = other DNA

SEQ ID NO: 34162 - DNA, 17 bp, synthetic construct
  misc_feature 1..17: note = Probe
  source 1..17: mol_type = other DNA
tatacccttcccgtact

SEQ ID NO: 34163 - DNA, 27 bp, synthetic construct
  misc_feature 1..27: note = Probe
  source 1..27: mol_type = other DNA
tatagctcaggggtagagcatttgact

SEQ ID NO: 34164 - DNA, 23 bp, synthetic construct
  misc_feature 1..23: note = Probe
  source 1..23: mol_type = other DNA
tatagtggttagtactctgcgtt

SEQ ID NO: 34165 - DNA, 31 bp, synthetic construct
  misc_feature 1..31: note = Probe
  source 1..31: mol_type = other DNA
tatagtttaaacaaaacgaatgatttcgact

SEQ ID NO: 34166 - DNA, 32 bp, synthetic construct
  misc_feature 1..32: note = Probe
  source 1..32: mol_type = other DNA
tatagtttaaacaaaacgaatgatttcgactc

SEQ ID NO: 34167 - DNA, 33 bp, synthetic construct
  misc_feature 1..33: note = Probe
  source 1..33: mol_type = other DNA
tatatagtttaaacaaaacgaatgatttcgact

SEQ ID NO: 34168 - DNA, 20 bp, synthetic construct
  misc_feature 1..20: note = Probe
  source 1..20: mol_type = other DNA
tatcacgttcgcctaacacg

SEQ ID NO: 34169 - DNA, 20 bp, synthetic construct
  misc_feature 1..20: note = Probe
  source 1..20: mol_type = other DNA
tatcacgttcgcctcacacg

SEQ ID NO: 34170 - DNA, 20 bp, synthetic construct
  misc_feature 1..20: note = Probe
  source 1..20: mol_type = other DNA
tatcattggtcgtggttgta

SEQ ID NO: 34171 - DNA, 22 bp, synthetic construct
  misc_feature 1..22: note = Probe
  source 1..22: mol_type = other DNA
tatcattggtcgtggttgtagt

SEQ ID NO: 34172 - DNA, 26 bp, synthetic construct
  misc_feature 1..26: note = Probe
  source 1..26: mol_type = other DNA
tatcattggtcgtggttgtagtccgt

SEQ ID NO: 34173 - DNA, 28 bp, synthetic construct
  misc_feature 1..28: note = Probe
  source 1..28: mol_type = other DNA
tatcattggtcgtggttgtagtccgtgc

SEQ ID NO: 34174 - DNA, 34 bp, synthetic construct
  misc_feature 1..34: note = Probe
  source 1..34: mol_type = other DNA
tatcattggtcgtggttgtagtccgtgcgagaat

SEQ ID NO: 34175 - DNA, 35 bp, synthetic construct
  misc_feature 1..35: note = Probe
  source 1..35: mol_type = other DNA
tatcattggtcgtggttgtagtccgtgcgagaata

SEQ ID NO: 34176 - DNA, 36 bp, synthetic construct
  misc_feature 1..36: note = Probe
  source 1..36: mol_type = other DNA
tatcattggtcgtggttgtagtccgtgcgagaataa

SEQ ID NO: 34177 - DNA, 15 bp, synthetic construct
  misc_feature 1..15: note = Probe
  source 1..15: mol_type = other DNA
tatccattggtctta

SEQ ID NO: 34178 - DNA, 16 bp, synthetic construct
  misc_feature 1..16: note = Probe
  source 1..16: mol_type = other DNA
tatccattggtcttag

SEQ ID NO: 34179 - DNA, 19 bp, synthetic construct
  misc_feature 1..19: note = Probe
  source 1..19: mol_type = other DNA
tatccattggtcttaggcc

SEQ ID NO: 34180 - DNA, 22 bp, synthetic construct
  misc_feature 1..22: note = Probe
  source 1..22: mol_type = other DNA
tatccattggtcttaggcccca

SEQ ID NO: 34181 - DNA, 32 bp, synthetic construct
  misc_feature 1..32: note = Probe
  source 1..32: mol_type = other DNA
tatccattggtcttaggccccaaaaattttgg

SEQ ID NO: 34182 - DNA, 36 bp, synthetic construct
  misc_feature 1..36: note = Probe
  source 1..36: mol_type = other DNA
tatccattggtcttaggccccaaaaattttggtgca

SEQ ID NO: 34183 - DNA, 15 bp, synthetic construct
  misc_feature 1..15: note = Probe
  source 1..15: mol_type = other DNA
tatcgggcccatacc

SEQ ID NO: 34184 - DNA, 16 bp, synthetic construct
  misc_feature 1..16: note = Probe
  source 1..16: mol_type = other DNA
tatcgggcccataccc

SEQ ID NO: 34185 - DNA, 30 bp, synthetic construct
  misc_feature 1..30: note = Probe
  source 1..30: mol_type = other DNA
tatcgggcccataccccgaaaatgttggtt

SEQ ID NO: 34186 - DNA, 15 bp, synthetic construct
  misc_feature 1..15: note = Probe
  source 1..15: mol_type = other DNA
tatgagaatcgaacc

SEQ ID NO: 34187 - DNA, 16 bp, synthetic construct
  misc_feature 1..16: note = Probe
  source 1..16: mol_type = other DNA
tatgagaatcgaaccc

SEQ ID NO: 34188 - DNA, 17 bp, synthetic construct
  misc_feature 1..17: note = Probe
  source 1..17: mol_type = other DNA
tatgagaatcgaaccca

SEQ ID NO: 34189 - DNA, 19 bp, synthetic construct
  misc_feature 1..19: note = Probe
  source 1..19: mol_type = other DNA
tatgagaatcgaacccatc

SEQ ID NO: 34190 - DNA, 20 bp, synthetic construct
  misc_feature 1..20: note = Probe
  source 1..20: mol_type = other DNA
tatgagaatcgaacccatcc

SEQ ID NO: 34191 - DNA, 21 bp, synthetic construct
  misc_feature 1..21: note = Probe
  source 1..21: mol_type = other DNA
tatgagaatcgaacccatccc

SEQ ID NO: 34192 - DNA, 22 bp, synthetic construct
  misc_feature 1..22: note = Probe
  source 1..22: mol_type = other DNA
tatgagaatcgaacccatccct

SEQ ID NO: 34193 - DNA, 24 bp, synthetic construct
  misc_feature 1..24: note = Probe
  source 1..24: mol_type = other DNA
tatgagaatcgaacccatccctga

SEQ ID NO: 34194 - DNA, 25 bp, synthetic construct
  misc_feature 1..25: note = Probe
  source 1..25: mol_type = other DNA
tatgagaatcgaacccatccctgag

SEQ ID NO: 34195 - DNA, 26 bp, synthetic construct
  misc_feature 1..26: note = Probe
  source 1..26: mol_type = other DNA
tatgagaatcgaacccatccctgaga

SEQ ID NO: 34196 - DNA, 35 bp, synthetic construct
  misc_feature 1..35: note = Probe
  source 1..35: mol_type = other DNA
tatgattctcgcttaggatgcgagaggtcccgggt

SEQ ID NO: 34197 - DNA, 34 bp, synthetic construct
  misc_feature 1..34: note = Probe
  source 1..34: mol_type = other DNA
tatgattctcgcttagggtgcgagaggtcccggg

SEQ ID NO: 34198 - DNA, 35 bp, synthetic construct; identical to SEQ ID NO: 23612
  misc_feature 1..35: note = Probe
  source 1..35: mol_type = other DNA

SEQ ID NO: 34199 - DNA, 36 bp, synthetic construct
  misc_feature 1..36: note = Probe
  source 1..36: mol_type = other DNA
tatgattctcgcttagggtgcgagaggtcccgggtt

SEQ ID NO: 34200 - DNA, 34 bp, synthetic construct; identical to SEQ ID NO: 23613
  misc_feature 1..34: note = Probe
  source 1..34: mol_type = other DNA

SEQ ID NO: 34201 - DNA, 36 bp, synthetic construct; identical to SEQ ID NO: 23615
  misc_feature 1..36: note = Probe
  source 1..36: mol_type = other DNA

SEQ ID NO: 34202 - DNA, 34 bp, synthetic construct
  misc_feature 1..34: note = Probe
  source 1..34: mol_type = other DNA
tatgattctcgcttcgggtgtgagaggtcccggg

SEQ ID NO: 34203 - DNA, 36 bp, synthetic construct
  misc_feature 1..36: note = Probe
  source 1..36: mol_type = other DNA
tatgattctcgcttcgggtgtgagaggtcccgggtt

SEQ ID NO: 34204 - DNA, 34 bp, synthetic construct; identical to SEQ ID NO: 23616
  misc_feature 1..34: note = Probe
  source 1..34: mol_type = other DNA

SEQ ID NO: 34205 - DNA, 34 bp, synthetic construct
  misc_feature 1..34: note = Probe
  source 1..34: mol_type = other DNA
tatgattctcggtttgggtccgagaggtcccggg

SEQ ID NO: 34206 - DNA, 35 bp, synthetic construct
  misc_feature 1..35: note = Probe
  source 1..35: mol_type = other DNA
tatgattctcggtttgggtccgagaggtcccgggt

SEQ ID NO: 34207 - DNA, 36 bp, synthetic construct
  misc_feature 1..36: note = Probe
  source 1..36: mol_type = other DNA
tatgattctcggtttgggtccgagaggtcccgggtt

SEQ ID NO: 34208 - DNA, 16 bp, synthetic construct
  misc_feature 1..16: note = Probe
  source 1..16: mol_type = other DNA
tatgtagcttacctcc

SEQ ID NO: 34209 - DNA, 17 bp, synthetic construct
  misc_feature 1..17: note = Probe
  source 1..17: mol_type = other DNA
tatgtagcttacctcct

SEQ ID NO: 34210 - DNA, 15 bp, synthetic construct
  misc_feature 1..15: note = Probe
  source 1..15: mol_type = other DNA
tattctctgtggctt

SEQ ID NO: 34211 - DNA, 36 bp, synthetic construct
  misc_feature 1..36: note = Probe
  source 1..36: mol_type = other DNA
tattgaattgcaaattcgaagaagcagcttcaaacc

SEQ ID NO: 34212 - DNA, 27 bp, synthetic construct
  misc_feature 1..27: note = Probe
  source 1..27: mol_type = other DNA
tatttctaggactatgagaatcgaacc

SEQ ID NO: 34213 - DNA, 28 bp, synthetic construct
  misc_feature 1..28: note = Probe
  source 1..28: mol_type = other DNA
tatttctaggactatgagaatcgaaccc

SEQ ID NO: 34214 - DNA, 36 bp, synthetic construct
  misc_feature 1..36: note = Probe
  source 1..36: mol_type = other DNA
tatttctaggactatgagaatcgaacccatccctga

SEQ ID NO: 34215 - DNA, 16 bp, synthetic construct
  misc_feature 1..16: note = Probe
  source 1..16: mol_type = other DNA
tcaaacctgccggggc

SEQ ID NO: 34216 - DNA, 20 bp, synthetic construct
  misc_feature 1..20: note = Probe
  source 1..20: mol_type = other DNA
tcaaacctgccggggcttct

SEQ ID NO: 34217 - DNA, 16 bp, synthetic construct
  misc_feature 1..16: note = Probe
  source 1..16: mol_type = other DNA
tcaaagcaatacactg

SEQ ID NO: 34218 - DNA, 33 bp, synthetic construct
  misc_feature 1..33: note = Probe
  source 1..33: mol_type = other DNA
tcaaagcaatacactgaaaatgtttagacgggc

SEQ ID NO: 34219 - DNA, 34 bp, synthetic construct
  misc_feature 1..34: note = Probe
  source 1..34: mol_type = other DNA
tcaaagcaatacactgaaaatgtttagacgggct

SEQ ID NO: 34220 - DNA, 35 bp, synthetic construct
  misc_feature 1..35: note = Probe
  source 1..35: mol_type = other DNA
tcaaagcaatacactgaaaatgtttagacgggctc

SEQ ID NO: 34221 - DNA, 37 bp, synthetic construct; identical to SEQ ID NO: 1604
  misc_feature 1..37: note = Probe
  source 1..37: mol_type = other DNA

SEQ ID NO: 34222 - DNA, 36 bp, synthetic construct
  misc_feature 1..36: note = Probe
  source 1..36: mol_type = other DNA
tcaaagccctcagtaagttgcaatacttaatttctg

SEQ ID NO: 34223 - DNA, 36 bp, synthetic construct
  misc_feature 1..36: note = Probe
  source 1..36: mol_type = other DNA
tcaaaggttgtgggttcgagtcccaccagagtcgct

SEQ ID NO: 34224 - DNA, 20 bp, synthetic construct
  misc_feature 1..20: note = Probe
  source 1..20: mol_type = other DNA
tcaaagttaaattataggct

SEQ ID NO: 34225 - DNA, 36 bp, synthetic construct; identical to SEQ ID NO: 23626
  misc_feature 1..36: note = Probe
  source 1..36: mol_type = other DNA

SEQ ID NO: 34226 - DNA, 22 bp, synthetic construct
  misc_feature 1..22: note = Probe
  source 1..22: mol_type = other DNA
tcaaatcacgtcggggtcaaca

SEQ ID NO: 34227 - DNA, 17 bp, synthetic construct
  misc_feature 1..17: note = Probe
  source 1..17: mol_type = other DNA
tcaaatcccggacgagc

SEQ ID NO: 34228 - DNA, 18 bp, synthetic construct
  misc_feature 1..18: note = Probe
  source 1..18: mol_type = other DNA
tcaaatcccggacgagcc

SEQ ID NO: 34229 - DNA, 19 bp, synthetic construct
  misc_feature 1..19: note = Probe
  source 1..19: mol_type = other DNA
tcaaatcccggacgagccc

SEQ ID NO: 34230 - DNA, 22 bp, synthetic construct
  misc_feature 1..22: note = Probe
  source 1..22: mol_type = other DNA
tcaaatcccggacgagcccaca

SEQ ID NO: 34231 - DNA, 22 bp, synthetic construct
  misc_feature 1..22: note = Probe
  source 1..22: mol_type = other DNA
tcaaatcccggacgagccccct

SEQ ID NO: 34232 - DNA, 22 bp, synthetic construct
  misc_feature 1..22: note = Probe
  source 1..22: mol_type = other DNA
tcaaatcccggacgagccctca

SEQ ID NO: 34233 - DNA, 22 bp, synthetic construct
  misc_feature 1..22: note = Probe
  source 1..22: mol_type = other DNA
tcaaatccgggtgccccctcaa

SEQ ID NO: 34234 - DNA, 22 bp, synthetic construct
  misc_feature 1..22: note = Probe
  source 1..22: mol_type = other DNA
tcaaatctcggtggaacctgca

SEQ ID NO: 34235 - DNA, 20 bp, synthetic construct
  misc_feature 1..20: note = Probe
  source 1..20: mol_type = other DNA
tcaaatctcggtgggacctc

SEQ ID NO: 34236 - DNA, 15 bp, synthetic construct
  misc_feature 1..15: note = Probe
  source 1..15: mol_type = other DNA
tcaacggtcggcgaa

SEQ ID NO: 34237 - DNA, 16 bp, synthetic construct
  misc_feature 1..16: note = Probe
  source 1..16: mol_type = other DNA
tcaacggtcggcgaac

SEQ ID NO: 34238 - DNA, 17 bp, synthetic construct
  misc_feature 1..17: note = Probe
  source 1..17: mol_type = other DNA
tcaacggtcggcgaaca

SEQ ID NO: 34239 - DNA, 18 bp, synthetic construct
  misc_feature 1..18: note = Probe
  source 1..18: mol_type = other DNA
tcaacggtcggcgaacat

SEQ ID NO: 34240 - DNA, 19 bp, synthetic construct
  misc_feature 1..19: note = Probe
  source 1..19: mol_type = other DNA
tcaacggtcggcgaacatc

SEQ ID NO: 34241 - DNA, 21 bp, synthetic construct
  misc_feature 1..21: note = Probe
  source 1..21: mol_type = other DNA
tcaacttaacttgaccgctct

SEQ ID NO: 34242 - DNA, 23 bp, synthetic construct
  misc_feature 1..23: note = Probe
  source 1..23: mol_type = other DNA
tcaacttaacttgaccgctctga

SEQ ID NO: 34243 - DNA, 24 bp, synthetic construct
  misc_feature 1..24: note = Probe
  source 1..24: mol_type = other DNA
tcaacttaacttgaccgctctgag

SEQ ID NO: 34244 - DNA, 25 bp, synthetic construct
  misc_feature 1..25: note = Probe
  source 1..25: mol_type = other DNA
tcaacttaacttgaccgctctgagc

SEQ ID NO: 34245 - DNA, 36 bp, synthetic construct
  misc_feature 1..36: note = Probe
  source 1..36: mol_type = other DNA
tcaacttaacttgaccgctctgagctaaacctagcc

SEQ ID NO: 34246 - DNA, 16 bp, synthetic construct
  misc_feature 1..16: note = Probe
  source 1..16: mol_type = other DNA
tcaagaggtccccggt

SEQ ID NO: 34247 - DNA, 22 bp, synthetic construct
  misc_feature 1..22: note = Probe
  source 1..22: mol_type = other DNA
tcaagtccctgtccaggcgcta

SEQ ID NO: 34248 - DNA, 22 bp, synthetic construct
  misc_feature 1..22: note = Probe
  source 1..22: mol_type = other DNA
tcaagtccctgttcgggcggca

SEQ ID NO: 34249 - DNA, 22 bp, synthetic construct
  misc_feature 1..22: note = Probe
  source 1..22: mol_type = other DNA
tcaatccccagcacctccacaa

SEQ ID NO: 34250 - DNA, 21 bp, synthetic construct
  misc_feature 1..21: note = Probe
  source 1..21: mol_type = other DNA
tcaatccccggcacctccacc

SEQ ID NO: 34251 - DNA, 17 bp, synthetic construct
  misc_feature 1..17: note = Probe
  source 1..17: mol_type = other DNA
tcacaagaactgctaac

SEQ ID NO: 34252 - DNA, 19 bp, synthetic construct
  misc_feature 1..19: note = Probe
  source 1..19: mol_type = other DNA
tcacaagaactgctaactc

SEQ ID NO: 34253 - DNA, 20 bp, synthetic construct
  misc_feature 1..20: note = Probe
  source 1..20: mol_type = other DNA
tcacaagaactgctaactca

SEQ ID NO: 34254 - DNA, 22 bp, synthetic construct
  misc_feature 1..22: note = Probe
  source 1..22: mol_type = other DNA
tcacaagaactgctaactcatg

SEQ ID NO: 34255 - DNA, 24 bp, synthetic construct
  misc_feature 1..24: note = Probe
  source 1..24: mol_type = other DNA
tcacaagaactgctaactcatgcc

SEQ ID NO: 34256 - DNA, 32 bp, synthetic construct; identical to SEQ ID NO: 7660
  misc_feature 1..32: note = Probe
  source 1..32: mol_type = other DNA

SEQ ID NO: 34257 - DNA, 33 bp, synthetic construct
  misc_feature 1..33: note = Probe
  source 1..33: mol_type = other DNA
tcacaagaactgctaactcatgcccccatgtct

SEQ ID NO: 34258 - DNA, 37 bp, synthetic construct
  misc_feature 1..37: note = Probe
  source 1..37: mol_type = other DNA
tcacaagaactgctaactcatgcccccatgtctaaca

SEQ ID NO: 34259 - DNA, 40 bp, synthetic construct
  misc_feature 1..40: note = Probe
  source 1..40: mol_type = other DNA
tcacaagaactgctaactcatgcccccatgtctaacaaca

SEQ ID NO: 34260 - DNA, 45 bp, synthetic construct; identical to SEQ ID NO: 1607
  misc_feature 1..45: note = Probe
  source 1..45: mol_type = other DNA

SEQ ID NO: 34261 - DNA, 22 bp, synthetic construct
  misc_feature 1..22: note = Probe
  source 1..22: mol_type = other DNA
tcacacgcgaaaggtccccggt

SEQ ID NO: 34262 - DNA, 36 bp, synthetic construct
  misc_feature 1..36: note = Probe
  source 1..36: mol_type = other DNA
tcacagtgtcaggatggccgagtggtctaaggcgcc

SEQ ID NO: 34263 - DNA, 36 bp, synthetic construct
  misc_feature 1..36: note = Probe
  source 1..36: mol_type = other DNA
tcacccaggcggcccgggttcgactcccggtgtggg

SEQ ID NO: 34264 - DNA, 41 bp, synthetic construct; identical to SEQ ID NO: 7674
  misc_feature 1..41: note = Probe
  source 1..41: mol_type = other DNA

SEQ ID NO: 34265 - DNA, 41 bp, synthetic construct
  misc_feature 1..41: note = Probe
  source 1..41: mol_type = other DNA
tcacccaggcggcccgggttcgactcccggtgtgggaatga

SEQ ID NO: 34266 - DNA, 15 bp, synthetic construct
  misc_feature 1..15: note = Probe
  source 1..15: mol_type = other DNA
tcaccgccgcggccc

SEQ ID NO: 34267 - DNA, 16 bp, synthetic construct
  misc_feature 1..16: note = Probe
  source 1..16: mol_type = other DNA
tcaccgccgcggcccg

SEQ ID NO: 34268 - DNA, 19 bp, synthetic construct
  misc_feature 1..19: note = Probe
  source 1..19: mol_type = other DNA
tcaccgccgcggcccgggt

SEQ ID NO: 34269 - DNA, 38 bp, synthetic construct; identical to SEQ ID NO: 23666
  misc_feature 1..38: note = Probe
  source 1..38: mol_type = other DNA

SEQ ID NO: 34270 - DNA, 39 bp, synthetic construct; identical to SEQ ID NO: 7679
  misc_feature 1..39: note = Probe
  source 1..39: mol_type = other DNA

SEQ ID NO: 34271 - DNA, 41 bp, synthetic construct
  misc_feature 1..41: note = Probe
  source 1..41: mol_type = other DNA
tcaccgccgcggcccgggttcgattcccggtcagggaaaga

SEQ ID NO: 34272 - DNA, 39 bp, synthetic construct; identical to SEQ ID NO: 7680
  misc_feature 1..39: note = Probe
  source 1..39: mol_type = other DNA

SEQ ID NO: 34273 - DNA, 40 bp, synthetic construct
  misc_feature 1..40: note = Probe
  source 1..40: mol_type = other DNA
tcaccgccgcggcccgggttcgattcccggtcagggaagc

SEQ ID NO: 34274 - DNA, 41 bp, synthetic construct
  misc_feature 1..41: note = Probe
  source 1..41: mol_type = other DNA
tcaccgccgcggcccgggttcgattcccggtcagggaagcc

SEQ ID NO: 34275 - DNA, 39 bp, synthetic construct; identical to SEQ ID NO: 7681
  misc_feature 1..39: note = Probe
  source 1..39: mol_type = other DNA

SEQ ID NO: 34276 - DNA, 41 bp, synthetic construct
  misc_feature 1..41: note = Probe
  source 1..41: mol_type = other DNA
tcaccgccgcggcccgggttcgattcccggtcagggaatga

SEQ ID NO: 34277 - DNA, 19 bp, synthetic construct
  misc_feature 1..19: note = Probe
  source 1..19: mol_type = other DNA
tcacctggagcatgttttc

SEQ ID NO: 34278 - DNA, 20 bp, synthetic construct
  misc_feature 1..20: note = Probe
  source 1..20: mol_type = other DNA
tcacctggagcatgttttct

SEQ ID NO: 34279 - DNA, 21 bp, synthetic construct
  misc_feature 1..21: note = Probe
  source 1..21: mol_type = other DNA
tcacctggagcatgttttctt

SEQ ID NO: 34280 - DNA, 22 bp, synthetic construct
  misc_feature 1..22: note = Probe
  source 1..22: mol_type = other DNA
tcacctggagcatgttttcttc

SEQ ID NO: 34281 - DNA, 15 bp, synthetic construct
  misc_feature 1..15: note = Probe
  source 1..15: mol_type = other DNA
tcacgcgggagaccg

SEQ ID NO: 34282 - DNA, 29 bp, synthetic construct
  misc_feature 1..29: note = Probe
  source 1..29: mol_type = other DNA
tcacgcgggagaccggggttcgattcccc

SEQ ID NO: 34283 - DNA, 30 bp, synthetic construct
  misc_feature 1..30: note = Probe
  source 1..30: mol_type = other DNA
tcacgcgggagaccggggttcgattccccg

SEQ ID NO: 34284 - DNA, 34 bp, synthetic construct; identical to SEQ ID NO: 1620
  misc_feature 1..34: note = Probe
  source 1..34: mol_type = other DNA

SEQ ID NO: 34285 - DNA, 35 bp, synthetic construct; identical to SEQ ID NO: 1621
  misc_feature 1..35: note = Probe
  source 1..35: mol_type = other DNA

SEQ ID NO: 34286 - DNA, 39 bp, synthetic construct; identical to SEQ ID NO: 7699
  misc_feature 1..39: note = Probe
  source 1..39: mol_type = other DNA

SEQ ID NO: 34287 - DNA, 40 bp, synthetic construct; identical to SEQ ID NO: 7706
  misc_feature 1..40: note = Probe
  source 1..40: mol_type = other DNA

SEQ ID NO: 34288 - DNA, 41 bp, synthetic construct; identical to SEQ ID NO: 7707
  misc_feature 1..41: note = Probe
  source 1..41: mol_type = other DNA

SEQ ID NO: 34289 - DNA, 39 bp, synthetic construct; identical to SEQ ID NO: 7711
  misc_feature 1..39: note = Probe
  source 1..39: mol_type = other DNA

SEQ ID NO: 34290 - DNA, 40 bp, synthetic construct; identical to SEQ ID NO: 7715
  misc_feature 1..40: note = Probe
  source 1..40: mol_type = other DNA

SEQ ID NO: 34291 - DNA, 41 bp, synthetic construct; identical to SEQ ID NO: 7716
  misc_feature 1..41: note = Probe
  source 1..41: mol_type = other DNA

SEQ ID NO: 34292 - DNA, 36 bp, synthetic construct
  misc_feature 1..36: note = Probe
  source 1..36: mol_type = other DNA
tcacggcattgtgaggacaatggcacggcaagggga

SEQ ID NO: 34293 - DNA, 25 bp, synthetic construct
  misc_feature 1..25: note = Probe
  source 1..25: mol_type = other DNA
tcacgtcggggtcaaacaaaacatt

SEQ ID NO: 34294 - DNA, 26 bp, synthetic construct
  misc_feature 1..26: note = Probe
  source 1..26: mol_type = other DNA
tcacgtcggggtcaaacaaaacattg

SEQ ID NO: 34295 - DNA, 27 bp, synthetic construct
  misc_feature 1..27: note = Probe
  source 1..27: mol_type = other DNA
tcacgtcggggtcaaacaaaacattgt

SEQ ID NO: 34296 - DNA, 28 bp, synthetic construct
  misc_feature 1..28: note = Probe
  source 1..28: mol_type = other DNA
tcacgtcggggtcaaacaaaacattgtt

SEQ ID NO: 34297 - DNA, 29 bp, synthetic construct
  misc_feature 1..29: note = Probe
  source 1..29: mol_type = other DNA
tcacgtcggggtcaaacaaaacattgttt

SEQ ID NO: 34298 - DNA, 18 bp, synthetic construct
  misc_feature 1..18: note = Probe
  source 1..18: mol_type = other DNA
tcacgtctgctttacacg

SEQ ID NO: 34299 - DNA, 36 bp, synthetic construct
  misc_feature 1..36: note = Probe
  source 1..36: mol_type = other DNA
tcagaagattccaggttcgactcctggctggctcgg

SEQ ID NO: 34300 - DNA, 36 bp, synthetic construct
  misc_feature 1..36: note = Probe
  source 1..36: mol_type = other DNA
tcagaagattccaggttcgactcctggctggctcgt

SEQ ID NO: 34301 - DNA, 36 bp, synthetic construct
  misc_feature 1..36: note = Probe
  source 1..36: mol_type = other DNA
tcagaagattctaggttcgactcctggctggctcgc

SEQ ID NO: 34302 - DNA, 38 bp, synthetic construct; identical to SEQ ID NO: 7729
  misc_feature 1..38: note = Probe
  source 1..38: mol_type = other DNA

SEQ ID NO: 34303 - DNA, 36 bp, synthetic construct
  misc_feature 1..36: note = Probe
  source 1..36: mol_type = other DNA
tcagaagattgagggttcgagtcccttcgtggtcgg

SEQ ID NO: 34304 - DNA, 36 bp, synthetic construct
  misc_feature 1..36: note = Probe
  source 1..36: mol_type = other DNA
tcagaagattgagggttcgagtcccttcgtggtcgt

SEQ ID NO: 34305 - DNA, 36 bp, synthetic construct
  misc_feature 1..36: note = Probe
  source 1..36: mol_type = other DNA
tcagaagattgcaggttcgagtcctgccgcggtcga

SEQ ID NO: 34306 - DNA, 15 bp, synthetic construct
  misc_feature 1..15: note = Probe
  source 1..15: mol_type = other DNA
tcagaaggctgcgtg

SEQ ID NO: 34307 - DNA, 16 bp, synthetic construct
  misc_feature 1..16: note = Probe
  source 1..16: mol_type = other DNA
tcagaaggctgcgtgt

SEQ ID NO: 34308 - DNA, 17 bp, synthetic construct
  misc_feature 1..17: note = Probe
  source 1..17: mol_type = other DNA
tcagaaggctgcgtgtt

SEQ ID NO: 34309 - DNA, 18 bp, synthetic construct
  misc_feature 1..18: note = Probe
  source 1..18: mol_type = other DNA
tcagaaggctgcgtgttc

SEQ ID NO: 34310 - DNA, 36 bp, synthetic construct
  misc_feature 1..36: note = Probe
  source 1..36: mol_type = other DNA
tcagaaggctgcgtgttcgaatcacgtcggggtcaa

SEQ ID NO: 34311 - DNA, 15 bp, synthetic construct
  misc_feature 1..15: note = Probe
  source 1..15: mol_type = other DNA
tcagaaggtctcact

SEQ ID NO: 34312 - DNA, 16 bp, synthetic construct
  misc_feature 1..16: note = Probe
  source 1..16: mol_type = other DNA
tcagaaggtctcactt

SEQ ID NO: 34313 - DNA, 17 bp, synthetic construct
  misc_feature 1..17: note = Probe
  source 1..17: mol_type = other DNA
tcagaaggtctcacttt

SEQ ID NO: 34314 - DNA, 18 bp, synthetic construct
  misc_feature 1..18: note = Probe
  source 1..18: mol_type = other DNA
tcagaaggtctcactttt

SEQ ID NO: 34315 - DNA, 28 bp, synthetic construct
  misc_feature 1..28: note = Probe
  source 1..28: mol_type = other DNA
tcagagaaaaagtctttaactccaccat

SEQ ID NO: 34316 - DNA, 27 bp, synthetic construct
  misc_feature 1..27: note = Probe
  source 1..27: mol_type = other DNA
tcagattgtgaatctgacaacagaggc

SEQ ID NO: 34317 - DNA, 28 bp, synthetic construct
  misc_feature 1..28: note = Probe
  source 1..28: mol_type = other DNA
tcagattgtgaatctgacaacagaggct

SEQ ID NO: 34318 - DNA, 29 bp, synthetic construct
  misc_feature 1..29: note = Probe
  source 1..29: mol_type = other DNA
tcagattgtgaatctgacaacagaggctt

SEQ ID NO: 34319 - DNA, 33 bp, synthetic construct
  misc_feature 1..33: note = Probe
  source 1..33: mol_type = other DNA
tcagattgtgaatctgacaacagaggcttacga

SEQ ID NO: 34320 - DNA, 34 bp, synthetic construct
  misc_feature 1..34: note = Probe
  source 1..34: mol_type = other DNA
tcagattgtgaatctgacaacagaggcttacgac

SEQ ID NO: 34321 - DNA, 35 bp, synthetic construct
  misc_feature 1..35: note = Probe
  source 1..35: mol_type = other DNA
tcagattgtgaatctgacaacagaggcttacgacc

SEQ ID NO: 34322 - DNA, 37 bp, synthetic construct
  misc_feature 1..37: note = Probe
  source 1..37: mol_type = other DNA
tcagattgtgaatctgacaacagaggcttacgacccc

SEQ ID NO: 34323 - DNA, 22 bp, synthetic construct
  misc_feature 1..22: note = Probe
  source 1..22: mol_type = other DNA
tcagctaaataagctatcgggc

SEQ ID NO: 34324 - DNA, 23 bp, synthetic construct
  misc_feature 1..23: note = Probe
  source 1..23: mol_type = other DNA
tcagctaaataagctatcgggcc

SEQ ID NO: 34325 - DNA, 24 bp, synthetic construct
  misc_feature 1..24: note = Probe
  source 1..24: mol_type = other DNA
tcagctaaataagctatcgggccc

SEQ ID NO: 34326 - DNA, 25 bp, synthetic construct
  misc_feature 1..25: note = Probe
  source 1..25: mol_type = other DNA
tcagctaaataagctatcgggccca

SEQ ID NO: 34327 - DNA, 26 bp, synthetic construct
  misc_feature 1..26: note = Probe
  source 1..26: mol_type = other DNA
tcagctaaataagctatcgggcccat

SEQ ID NO: 34328 - DNA, 27 bp, synthetic construct
  misc_feature 1..27: note = Probe
  source 1..27: mol_type = other DNA
tcagctaaataagctatcgggcccata

SEQ ID NO: 34329 - DNA, 29 bp, synthetic construct
  misc_feature 1..29: note = Probe
  source 1..29: mol_type = other DNA
tcagctaaataagctatcgggcccatacc

SEQ ID NO: 34330 - DNA, 36 bp, synthetic construct; identical to SEQ ID NO: 7736
  misc_feature 1..36: note = Probe
  source 1..36: mol_type = other DNA

SEQ ID NO: 34331 - DNA, 18 bp, synthetic construct
  misc_feature 1..18: note = Probe
  source 1..18: mol_type = other DNA
tcagctatagggtggaga

SEQ ID NO: 34332 - DNA, 15 bp, synthetic construct
  misc_feature 1..15: note = Probe
  source 1..15: mol_type = other DNA
tcaggatggccgagc

SEQ ID NO: 34333 - DNA, 24 bp, synthetic construct
  misc_feature 1..24: note = Probe
  source 1..24: mol_type = other DNA
tcaggatggccgagcggtctaagg

SEQ ID NO: 34334 - DNA, 19 bp, synthetic construct
  misc_feature 1..19: note = Probe
  source 1..19: mol_type = other DNA
tcagggatgggttcgattc

SEQ ID NO: 34335 - DNA, 21 bp, synthetic construct
  misc_feature 1..21: note = Probe
  source 1..21: mol_type = other DNA
tcagggatgggttcgattctc

SEQ ID NO: 34336 - DNA, 29 bp, synthetic construct
  misc_feature 1..29: note = Probe
  source 1..29: mol_type = other DNA
tcagggatgggttcgattctcatagtcct

SEQ ID NO: 34337 - DNA, 36 bp, synthetic construct
  misc_feature 1..36: note = Probe
  source 1..36: mol_type = other DNA
tcaggggcccggatagctcagtcggtagagcatcag

SEQ ID NO: 34338 - DNA, 15 bp, synthetic construct
  misc_feature 1..15: note = Probe
  source 1..15: mol_type = other DNA
tcagtcggtagagca

SEQ ID NO: 34339 - DNA, 18 bp, synthetic construct
  misc_feature 1..18: note = Probe
  source 1..18: mol_type = other DNA
tcagtcggtagagcatca

SEQ ID NO: 34340 - DNA, 20 bp, synthetic construct
  misc_feature 1..20: note = Probe
  source 1..20: mol_type = other DNA
tcagtcggtagagcatcaga

SEQ ID NO: 34341 - DNA, 22 bp, synthetic construct
  misc_feature 1..22: note = Probe
  source 1..22: mol_type = other DNA
tcagtcggtagagcatcagact

SEQ ID NO: 34342 - DNA, 24 bp, synthetic construct
  misc_feature 1..24: note = Probe
  source 1..24: mol_type = other DNA
tcagtcggtagagcatcagacttt

SEQ ID NO: 34343 - DNA, 26 bp, synthetic construct
  misc_feature 1..26: note = Probe
  source 1..26: mol_type = other DNA
tcagtcggtagagcatcagactttta

SEQ ID NO: 34344 - DNA, 21 bp, synthetic construct
  misc_feature 1..21: note = Probe
  source 1..21: mol_type = other DNA
tcagtcggtagagcatgagac

SEQ ID NO: 34345 - DNA, 22 bp, synthetic construct
  misc_feature 1..22: note = Probe
  source 1..22: mol_type = other DNA
tcagtcggtagagcatgagact

SEQ ID NO: 34346 - DNA, 36 bp, synthetic construct
  misc_feature 1..36: note = Probe
  source 1..36: mol_type = other DNA
tcagtcggtagagcatgagactcttaatctcagggt

SEQ ID NO: 34347 - DNA, 21 bp, synthetic construct
  misc_feature 1..21: note = Probe
  source 1..21: mol_type = other DNA
tcagtcggtagagcatgggac

SEQ ID NO: 34348 - DNA, 23 bp, synthetic construct
  misc_feature 1..23: note = Probe
  source 1..23: mol_type = other DNA
tcagtcggtagagcatgggactc

SEQ ID NO: 34349 - DNA, 31 bp, synthetic construct
  misc_feature 1..31: note = Probe
  source 1..31: mol_type = other DNA
tcagtcggtagagcatgggactcttaatccc

SEQ ID NO: 34350 - DNA, 19 bp, synthetic construct
  misc_feature 1..19: note = Probe
  source 1..19: mol_type = other DNA
tcagtggtagaattctcgc

SEQ ID NO: 34351 - DNA, 20 bp, synthetic construct
  misc_feature 1..20: note = Probe
  source 1..20: mol_type = other DNA
tcagtggtagaattctcgcc

SEQ ID NO: 34352 - DNA, 21 bp, synthetic construct
  misc_feature 1..21: note = Probe
  source 1..21: mol_type = other DNA
tcagtggtagaattctcgcct

SEQ ID NO: 34353 - DNA, 23 bp, synthetic construct
  misc_feature 1..23: note = Probe
  source 1..23: mol_type = other DNA
tcagtggtagaattctcgcctgc

SEQ ID NO: 34354 - DNA, 24 bp, synthetic construct
  misc_feature 1..24: note = Probe
  source 1..24: mol_type = other DNA
tcagtggtagaattctcgcctgcc

SEQ ID NO: 34355 - DNA, 36 bp, synthetic construct
  misc_feature 1..36: note = Probe
  source 1..36: mol_type = other DNA
tcagtggtagaattctcgcctgccacgcgggaggcc

SEQ ID NO: 34356 - DNA, 36 bp, synthetic construct; identical to SEQ ID NO: 23728
  misc_feature 1..36: note = Probe
  source 1..36: mol_type = other DNA

SEQ ID NO: 34357 - DNA, 31 bp, synthetic construct
  misc_feature 1..31: note = Probe
  source 1..31: mol_type = other DNA
tcataactttgtcaaagttaaattataggct

SEQ ID NO: 34358 - DNA, 22 bp, synthetic construct
  misc_feature 1..22: note = Probe
  source 1..22: mol_type = other DNA
tcataatctgaaggtcctgagt

SEQ ID NO: 34359 - DNA, 36 bp, synthetic construct
  misc_feature 1..36: note = Probe
  source 1..36: mol_type = other DNA
tcataatctgaaggtcgtgagttcgagcctcacacg

SEQ ID NO: 34360 - DNA, 36 bp, synthetic construct
  misc_feature 1..36: note = Probe
  source 1..36: mol_type = other DNA
tcataatctgaaggtcgtgagttcgatcctcacacg

SEQ ID NO: 34361 - DNA, 27 bp, synthetic construct
  misc_feature 1..27: note = Probe
  source 1..27: mol_type = other DNA
tcatatcattggtcgtggttgtagtcc

SEQ ID NO: 34362 - DNA, 32 bp, synthetic construct; identical to SEQ ID NO: 7748
  misc_feature 1..32: note = Probe
  source 1..32: mol_type = other DNA

SEQ ID NO: 34363 - DNA, 35 bp, synthetic construct
  misc_feature 1..35: note = Probe
  source 1..35: mol_type = other DNA
tcatatcattggtcgtggttgtagtccgtgcgaga

SEQ ID NO: 34364 - DNA, 37 bp, synthetic construct
  misc_feature 1..37: note = Probe
  source 1..37: mol_type = other DNA
tcatatcattggtcgtggttgtagtccgtgcgagaat

SEQ ID NO: 34365 - DNA, 38 bp, synthetic construct; identical to SEQ ID NO: 14239
  misc_feature 1..38: note = Probe
  source 1..38: mol_type = other DNA

SEQ ID NO: 34366 - DNA, 40 bp, synthetic construct; identical to SEQ ID NO: 7750
  misc_feature 1..40: note = Probe
  source 1..40: mol_type = other DNA

SEQ ID NO: 34367 - DNA, 15 bp, synthetic construct
  misc_feature 1..15: note = Probe
  source 1..15: mol_type = other DNA
tcatattgaattgca

SEQ ID NO: 34368 - DNA, 36 bp, synthetic construct
  misc_feature 1..36: note = Probe
  source 1..36: mol_type = other DNA
tcatattgaattgcaaattcgaagaagcagcttcaa

SEQ ID NO: 34369 - DNA, 36 bp, synthetic construct; identical to SEQ ID NO: 7767
  misc_feature 1..36: note = Probe
  source 1..36: mol_type = other DNA

SEQ ID NO: 34370 - DNA, 18 bp, synthetic construct
  misc_feature 1..18: note = Probe
  source 1..18: mol_type = other DNA
tcattggtcgtggttgta

SEQ ID NO: 34371 - DNA, 23 bp, synthetic construct
  misc_feature 1..23: note = Probe
  source 1..23: mol_type = other DNA
tcattggtcgtggttgtagtccg

SEQ ID NO: 34372 - DNA, 25 bp, synthetic construct
  misc_feature 1..25: note = Probe
  source 1..25: mol_type = other DNA
tcattggtcgtggttgtagtccgtg

SEQ ID NO: 34373 - DNA, 27 bp, synthetic construct
  misc_feature 1..27: note = Probe
  source 1..27: mol_type = other DNA
tcattggtcgtggttgtagtccgtgcg

SEQ ID NO: 34374 - DNA, 36 bp, synthetic construct
  misc_feature 1..36: note = Probe
  source 1..36: mol_type = other DNA
tcattggtcgtggttgtagtccgtgcgagaataatg

SEQ ID NO: 34375 - DNA, 18 bp, synthetic construct
  misc_feature 1..18: note = Probe
  source 1..18: mol_type = other DNA
tccaatggaggcgtgggt

SEQ ID NO: 34376 - DNA, 36 bp, synthetic construct
  misc_feature 1..36: note = Probe
  source 1..36: mol_type = other DNA
tccaatggaggcgtgggttcgaatcccacttctgac

SEQ ID NO: 34377 - DNA, 40 bp, synthetic construct
  misc_feature 1..40: note = Probe
  source 1..40: mol_type = other DNA
tccaatggaggcgtgggttcgaatcccacttctgacacaa

SEQ ID NO: 34378 - DNA, 20 bp, synthetic construct
  misc_feature 1..20: note = Probe
  source 1..20: mol_type = other DNA
tccaattaactagttttgac

SEQ ID NO: 34379 - DNA, 27 bp, synthetic construct
  misc_feature 1..27: note = Probe
  source 1..27: mol_type = other DNA
tccagggttcaagtccctgttcgggcg

SEQ ID NO: 34380 - DNA, 28 bp, synthetic construct
  misc_feature 1..28: note = Probe
  source 1..28: mol_type = other DNA
tccagggttcaagtccctgttcgggcgg

SEQ ID NO: 34381 - DNA, 28 bp, synthetic construct
  misc_feature 1..28: note = Probe
  source 1..28: mol_type = other DNA
tccagggttcaagtccctgttcgggcgt

SEQ ID NO: 34382 - DNA, 36 bp, synthetic construct
  misc_feature 1..36: note = Probe
  source 1..36: mol_type = other DNA
tccatggtgtaatggttagcactctggactctgaat

SEQ ID NO: 34383 - DNA, 25 bp, synthetic construct
  misc_feature 1..25: note = Probe
  source 1..25: mol_type = other DNA
tccattggggtttccccgcgcaggt

SEQ ID NO: 34384 - DNA, 35 bp, synthetic construct
  misc_feature 1..35: note = Probe
  source 1..35: mol_type = other DNA
tccattggggtttccccgcgcaggttcgaatcctg

SEQ ID NO: 34385 - DNA, 36 bp, synthetic construct
  misc_feature 1..36: note = Probe
  source 1..36: mol_type = other DNA
tccattggggtttccccgcgcaggttcgaatcctgc

SEQ ID NO: 34386 - DNA, 36 bp, synthetic construct
  misc_feature 1..36: note = Probe
  source 1..36: mol_type = other DNA
tccattggggtttccccgcgcaggttcgaatcctgt

SEQ ID NO: 34387 - DNA, 17 bp, synthetic construct
  misc_feature 1..17: note = Probe
  source 1..17: mol_type = other DNA
tccattggtcttaggcc

SEQ ID NO: 34388 - DNA, 20 bp, synthetic construct
  misc_feature 1..20: note = Probe
  source 1..20: mol_type = other DNA
tccattggtcttaggcccca

SEQ ID NO: 34389 - DNA, 36 bp, synthetic construct
  misc_feature 1..36: note = Probe
  source 1..36: mol_type = other DNA
tccattggtcttaggccccaaaaattttggtgcaac

SEQ ID NO: 34390 - DNA, 36 bp, synthetic construct
  misc_feature 1..36: note = Probe
  source 1..36: mol_type = other DNA
tccattgtgctttgcacgcgtgggttcgaatcccat

SEQ ID NO: 34391 - DNA, 15 bp, synthetic construct
  misc_feature 1..15: note = Probe
  source 1..15: mol_type = other DNA
tcccacatggtctag

SEQ ID NO: 34392 - DNA, 16 bp, synthetic construct
  misc_feature 1..16: note = Probe
  source 1..16: mol_type = other DNA
tcccacatggtctagc

SEQ ID NO: 34393 - DNA, 17 bp, synthetic construct
  misc_feature 1..17: note = Probe
  source 1..17: mol_type = other DNA
tcccacatggtctagcg

SEQ ID NO: 34394 - DNA, 22 bp, synthetic construct
  misc_feature 1..22: note = Probe
  source 1..22: mol_type = other DNA
tcccacatggtctagcggttag

SEQ ID NO: 34395 - DNA, 27 bp, synthetic construct
  misc_feature 1..27: note = Probe
  source 1..27: mol_type = other DNA
tcccacatggtctagcggttaggattc

SEQ ID NO: 34396 - DNA, 37 bp, synthetic construct; identical to SEQ ID NO: 1650
  misc_feature 1..37: note = Probe
  source 1..37: mol_type = other DNA

SEQ ID NO: 34397 - DNA, 27 bp, synthetic construct
  misc_feature 1..27: note = Probe
  source 1..27: mol_type = other DNA
tcccacccagggacggaagtcgcattt

SEQ ID NO: 34398 - DNA, 15 bp, synthetic construct
  misc_feature 1..15: note = Probe
  source 1..15: mol_type = other DNA
tcccaccgctgccac

SEQ ID NO: 34399 - DNA, 15 bp, synthetic construct
  misc_feature 1..15: note = Probe
  source 1..15: mol_type = other DNA
tcccacttctgacac

SEQ ID NO: 34400 - DNA, 36 bp, synthetic construct
  misc_feature 1..36: note = Probe
  source 1..36: mol_type = other DNA
tcccagggtcgtgggttcgagccccacgttgggcgc

SEQ ID NO: 34401 - DNA, 16 bp, synthetic construct
  misc_feature 1..16: note = Probe
  source 1..16: mol_type = other DNA
tcccatatggtctagc

SEQ ID NO: 34402 - DNA, 26 bp, synthetic construct
  misc_feature 1..26: note = Probe
  source 1..26: mol_type = other DNA
tcccatatggtctagcggttaggatt

SEQ ID NO: 34403 - DNA, 31 bp, synthetic construct; identical to SEQ ID NO: 1660
  misc_feature 1..31: note = Probe
  source 1..31: mol_type = other DNA

SEQ ID NO: 34404 - DNA, 34 bp, synthetic construct; identical to SEQ ID NO: 1663
  misc_feature 1..34: note = Probe
  source 1..34: mol_type = other DNA

SEQ ID NO: 34405 - DNA, 35 bp, synthetic construct; identical to SEQ ID NO: 1664
  misc_feature 1..35: note = Probe
  source 1..35: mol_type = other DNA

SEQ ID NO: 34406 - DNA, 37 bp, synthetic construct; identical to SEQ ID NO: 1666
  misc_feature 1..37: note = Probe
  source 1..37: mol_type = other DNA

SEQ ID NO: 34407 - DNA, 15 bp, synthetic construct
  misc_feature 1..15: note = Probe
  source 1..15: mol_type = other DNA
tcccatcctcgtcgc

SEQ ID NO: 34408 - DNA, 36 bp, synthetic construct
  misc_feature 1..36: note = Probe
  source 1..36: mol_type = other DNA
tcccatggtgtaatggttagcactctggactttgaa

SEQ ID NO: 34409 - DNA, 50 bp, synthetic construct
  misc_feature 1..50: note = Probe
  source 1..50: mol_type = other DNA
tcccatggtgtaatggttagcactctggactttgaatccagcgatccgag

SEQ ID NO: 34410 - DNA, 15 bp, synthetic construct
  misc_feature 1..15: note = Probe
  source 1..15: mol_type = other DNA
tccccagtacctcca

SEQ ID NO: 34411 - DNA, 15 bp, synthetic construct
  misc_feature 1..15: note = Probe
  source 1..15: mol_type = other DNA
tccccggcacctcca

SEQ ID NO: 34412 - DNA, 16 bp, synthetic construct
  misc_feature 1..16: note = Probe
  source 1..16: mol_type = other DNA
tccccggcacctccaa

SEQ ID NO: 34413 - DNA, 17 bp, synthetic construct
  misc_feature 1..17: note = Probe
  source 1..17: mol_type = other DNA
tccccggcacctccaaa

SEQ ID NO: 34414 - DNA, 19 bp, synthetic construct
  misc_feature 1..19: note = Probe
  source 1..19: mol_type = other DNA
tccccggcacctccaccag

SEQ ID NO: 34415 - DNA, 20 bp, synthetic construct
  misc_feature 1..20: note = Probe
  source 1..20: mol_type = other DNA
tccccggcacctccaccagt

SEQ ID NO: 34416 - DNA, 21 bp, synthetic construct
  misc_feature 1..21: note = Probe
  source 1..21: mol_type = other DNA
tccccggcacctccaccagtt

SEQ ID NO: 34417 - DNA, 22 bp, synthetic construct
  misc_feature 1..22: note = Probe
  source 1..22: mol_type = other DNA
tccccggcacctccaccagttt

SEQ ID NO: 34418 - DNA, 18 bp, synthetic construct
  misc_feature 1..18: note = Probe
  source 1..18: mol_type = other DNA
tccccggcacctccagct

SEQ ID NO: 34419 - DNA, 17 bp, synthetic construct
  misc_feature 1..17: note = Probe
  source 1..17: mol_type = other DNA
tccccggcacctccatt

SEQ ID NO: 34420 - DNA, 15 bp, synthetic construct
  misc_feature 1..15: note = Probe
  source 1..15: mol_type = other DNA
tccccggcatctcca

SEQ ID NO: 34421 - DNA, 25 bp, synthetic construct
  misc_feature 1..25: note = Probe
  source 1..25: mol_type = other DNA
tccccggcatctccattgtagtttt

SEQ ID NO: 34422 - DNA, 15 bp, synthetic construct
  misc_feature 1..15: note = Probe
  source 1..15: mol_type = other DNA
tccccgtacgggcca

SEQ ID NO: 34423 - DNA, 25 bp, synthetic construct
  misc_feature 1..25: note = Probe
  source 1..25: mol_type = other DNA
tccccgtacgggccaactttgtttt

SEQ ID NO: 34424 - DNA, 16 bp, synthetic construct
  misc_feature 1..16: note = Probe
  source 1..16: mol_type = other DNA
tccccgtacgggccac

SEQ ID NO: 34425 - DNA, 18 bp, synthetic construct
  misc_feature 1..18: note = Probe
  source 1..18: mol_type = other DNA
tccccgtacgggccacga

SEQ ID NO: 34426 - DNA, 26 bp, synthetic construct
  misc_feature 1..26: note = Probe
  source 1..26: mol_type = other DNA
tccccgtacgggccaggattgaaact

SEQ ID NO: 34427 - DNA, 27 bp, synthetic construct
  misc_feature 1..27: note = Probe
  source 1..27: mol_type = other DNA
tccccgtacgggccaggattgaaactt

SEQ ID NO: 34428 - DNA, 28 bp, synthetic construct
  misc_feature 1..28: note = Probe
  source 1..28: mol_type = other DNA
tccccgtacgggccaggattgaaacttt

SEQ ID NO: 34429 - DNA, 29 bp, synthetic construct
  misc_feature 1..29: note = Probe
  source 1..29: mol_type = other DNA
tccccgtacgggccaggattgaaactttt

SEQ ID NO: 34430 - DNA, 15 bp, synthetic construct
  misc_feature 1..15: note = Probe
  source 1..15: mol_type = other DNA
tcccctggcccaacc

SEQ ID NO: 34431 - DNA, 16 bp, synthetic construct
  misc_feature 1..16: note = Probe
  source 1..16: mol_type = other DNA
tcccctggcccaaccc

SEQ ID NO: 34432 - DNA, 25 bp, synthetic construct
  misc_feature 1..25: note = Probe
  source 1..25: mol_type = other DNA
tcccctggcccaacccgtcatctac

SEQ ID NO: 34433 - DNA, 15 bp, synthetic construct
  misc_feature 1..15: note = Probe
  source 1..15: mol_type = other DNA
tcccgccttttttcc

SEQ ID NO: 34434 - DNA, 16 bp, synthetic construct
  misc_feature 1..16: note = Probe
  source 1..16: mol_type = other DNA
tcccgccttttttccc

SEQ ID NO: 34435 - DNA, 17 bp, synthetic construct
  misc_feature 1..17: note = Probe
  source 1..17: mol_type = other DNA
tcccgccttttttcccg

SEQ ID NO: 34436 - DNA, 18 bp, synthetic construct
  misc_feature 1..18: note = Probe
  source 1..18: mol_type = other DNA
tcccgccttttttcccgg

SEQ ID NO: 34437 - DNA, 19 bp, synthetic construct
  misc_feature 1..19: note = Probe
  source 1..19: mol_type = other DNA
tcccgccttttttcccggc

SEQ ID NO: 34438 - DNA, 20 bp, synthetic construct
  misc_feature 1..20: note = Probe
  source 1..20: mol_type = other DNA
tcccgccttttttcccggcg

SEQ ID NO: 34439 - DNA, 23 bp, synthetic construct
  misc_feature 1..23: note = Probe
  source 1..23: mol_type = other DNA
tcccgccttttttcccggcggcg

SEQ ID NO: 34440 - DNA, 24 bp, synthetic construct
  misc_feature 1..24: note = Probe
  source 1..24: mol_type = other DNA
tcccgccttttttcccggcggcgg

SEQ ID NO: 34441 - DNA, 25 bp, synthetic construct
  misc_feature 1..25: note = Probe
  source 1..25: mol_type = other DNA
tcccgccttttttcccggcggcggg

SEQ ID NO: 34442 - DNA, 27 bp, synthetic construct
  misc_feature 1..27: note = Probe
  source 1..27: mol_type = other DNA
tcccgccttttttcccggcggcgggag

SEQ ID NO: 34443 - DNA, 29 bp, synthetic construct
  misc_feature 1..29: note = Probe
  source 1..29: mol_type = other DNA
tcccgccttttttcccggcggcgggagaa

SEQ ID NO: 34444 - DNA, 15 bp, synthetic construct
  misc_feature 1..15: note = Probe
  source 1..15: mol_type = other DNA
tcccggacgagccca

SEQ ID NO: 34445 - DNA, 16 bp, synthetic construct
  misc_feature 1..16: note = Probe
  source 1..16: mol_type = other DNA
tcccggacgagcccac

SEQ ID NO: 34446 - DNA, 17 bp, synthetic construct
  misc_feature 1..17: note = Probe
  source 1..17: mol_type = other DNA
tcccggacgagcccaca

SEQ ID NO: 34447 - DNA, 17 bp, synthetic construct
  misc_feature 1..17: note = Probe
  source 1..17: mol_type = other DNA
tcccggacgagcccact

SEQ ID NO: 34448 - DNA, 21 bp, synthetic construct
  misc_feature 1..21: note = Probe
  source 1..21: mol_type = other DNA
tcccggacgagcccaggcttt

SEQ ID NO: 34449 - DNA, 15 bp, synthetic construct
  misc_feature 1..15: note = Probe
  source 1..15: mol_type = other DNA
tcccggacgagcccc

SEQ ID NO: 34450 - DNA, 16 bp, synthetic construct
  misc_feature 1..16: note = Probe
  source 1..16: mol_type = other DNA
tcccggacgagccccc

SEQ ID NO: 34451 - DNA, 17 bp, synthetic construct
  misc_feature 1..17: note = Probe
  source 1..17: mol_type = other DNA
tcccggacgagccccct

SEQ ID NO: 34452 - DNA, 16 bp, synthetic construct
  misc_feature 1..16: note = Probe
  source 1..16: mol_type = other DNA
tcccggacgagcccct

SEQ ID NO: 34453 - DNA, 17 bp, synthetic construct
  misc_feature 1..17: note = Probe
  source 1..17: mol_type = other DNA
tcccggacgagcccctc

SEQ ID NO: 34454 - DNA, 17 bp, synthetic construct
  misc_feature 1..17: note = Probe
  source 1..17: mol_type = other DNA
tcccggacgagcccctt

SEQ ID NO: 34455 - DNA, 15 bp, synthetic construct
  misc_feature 1..15: note = Probe
  source 1..15: mol_type = other DNA
tcccggacgagcccg

SEQ ID NO: 34456 - DNA, 17 bp, synthetic construct
  misc_feature 1..17: note = Probe
  source 1..17: mol_type = other DNA
tcccggacgagcccgct

SEQ ID NO: 34457 - DNA, 15 bp, synthetic construct
  misc_feature 1..15: note = Probe
  source 1..15: mol_type = other DNA
tcccggacgagccct

SEQ ID NO: 34458 - DNA, 16 bp, synthetic construct
  misc_feature 1..16: note = Probe
  source 1..16: mol_type = other DNA
tcccggacgagcccta

SEQ ID NO: 34459 - DNA, 16 bp, synthetic construct
  misc_feature 1..16: note = Probe
  source 1..16: mol_type = other DNA
tcccggacgagccctc

SEQ ID NO: 34460 - DNA, 17 bp, synthetic construct
  misc_feature 1..17: note = Probe
  source 1..17: mol_type = other DNA
tcccggacgagccctca

SEQ ID NO: 34461 - DNA, 18 bp, synthetic construct
  misc_feature 1..18: note = Probe
  source 1..18: mol_type = other DNA
tcccggacgagccctcat

SEQ ID NO: 34462 - DNA, 19 bp, synthetic construct
  misc_feature 1..19: note = Probe
  source 1..19: mol_type = other DNA
tcccggacgagccctcatt

SEQ ID NO: 34463 - DNA, 20 bp, synthetic construct
  misc_feature 1..20: note = Probe
  source 1..20: mol_type = other DNA
tcccggacgagccctcattt

SEQ ID NO: 34464 - DNA, 21 bp, synthetic construct
  misc_feature 1..21: note = Probe
  source 1..21: mol_type = other DNA
tcccggacgagccctcatttt

SEQ ID NO: 34465 - DNA, 23 bp, synthetic construct
  misc_feature 1..23: note = Probe
  source 1..23: mol_type = other DNA
tcccggacgagccctcattttct

SEQ ID NO: 34466 - DNA, 16 bp, synthetic construct
  misc_feature 1..16: note = Probe
  source 1..16: mol_type = other DNA
tcccggacgagccctg

SEQ ID NO: 34467 - DNA, 17 bp, synthetic construct
  misc_feature 1..17: note = Probe
  source 1..17: mol_type = other DNA
tcccggacgagccctgt

SEQ ID NO: 34468 - DNA, 18 bp, synthetic construct
  misc_feature 1..18: note = Probe
  source 1..18: mol_type = other DNA
tcccggacgagccctgtt

SEQ ID NO: 34469 - DNA, 19 bp, synthetic construct
  misc_feature 1..19: note = Probe
  source 1..19: mol_type = other DNA
tcccggacgagccctgttt

SEQ ID NO: 34470 - DNA, 25 bp, synthetic construct
  misc_feature 1..25: note = Probe
  source 1..25: mol_type = other DNA
tcccggccaatgcaacgatgacgtt

SEQ ID NO: 34471 - DNA, 26 bp, synthetic construct
  misc_feature 1..26: note = Probe
  source 1..26: mol_type = other DNA
tcccggccaatgcaacgatgacgttt

SEQ ID NO: 34472 - DNA, 27 bp, synthetic construct
  misc_feature 1..27: note = Probe
  source 1..27: mol_type = other DNA
tcccggccaatgcaacgatgacgtttt

SEQ ID NO: 34473 - DNA, 28 bp, synthetic construct
  misc_feature 1..28: note = Probe
  source 1..28: mol_type = other DNA
tcccggccaatgcaacgatgacgtttta

SEQ ID NO: 34474 - DNA, 15 bp, synthetic construct
  misc_feature 1..15: note = Probe
  source 1..15: mol_type = other DNA
tcccggccaatgcac

SEQ ID NO: 34475 - DNA, 15 bp, synthetic construct
  misc_feature 1..15: note = Probe
  source 1..15: mol_type = other DNA
tcccgggcggcgcac

SEQ ID NO: 34476 - DNA, 16 bp, synthetic construct
  misc_feature 1..16: note = Probe
  source 1..16: mol_type = other DNA
tcccgggcggcgcact

SEQ ID NO: 34477 - DNA, 15 bp, synthetic construct
  misc_feature 1..15: note = Probe
  source 1..15: mol_type = other DNA
tcccgggtttcggca

SEQ ID NO: 34478 - DNA, 16 bp, synthetic construct
  misc_feature 1..16: note = Probe
  source 1..16: mol_type = other DNA
tcccgggtttcggcac

SEQ ID NO: 34479 - DNA, 17 bp, synthetic construct
  misc_feature 1..17: note = Probe
  source 1..17: mol_type = other DNA
tcccgggtttcggcact

SEQ ID NO: 34480 - DNA, 18 bp, synthetic construct
  misc_feature 1..18: note = Probe
  source 1..18: mol_type = other DNA
tcccgggtttcggcagcg

SEQ ID NO: 34481 - DNA, 15 bp, synthetic construct
  misc_feature 1..15: note = Probe
  source 1..15: mol_type = other DNA
tcccggtcagggaac

SEQ ID NO: 34482 - DNA, 16 bp, synthetic construct
  misc_feature 1..16: note = Probe
  source 1..16: mol_type = other DNA
tcccggtcagggaacc

SEQ ID NO: 34483 - DNA, 17 bp, synthetic construct
  misc_feature 1..17: note = Probe
  source 1..17: mol_type = other DNA
tcccggtcagggaacca

SEQ ID NO: 34484 - DNA, 16 bp, synthetic construct
  misc_feature 1..16: note = Probe
  source 1..16: mol_type = other DNA
tcccggtgtgggaacg

SEQ ID NO: 34485 - DNA, 15 bp, synthetic construct
  misc_feature 1..15: note = Probe
  source 1..15: mol_type = other DNA
tccctggtagtctag

SEQ ID NO: 34486 - DNA, 15 bp, synthetic construct
  misc_feature 1..15: note = Probe
  source 1..15: mol_type = other DNA
tccctggtggtctag

SEQ ID NO: 34487 - DNA, 16 bp, synthetic construct
  misc_feature 1..16: note = Probe
  source 1..16: mol_type = other DNA
tccctggtggtctagt

SEQ ID NO: 34488 - DNA, 17 bp, synthetic construct
  misc_feature 1..17: note = Probe
  source 1..17: mol_type = other DNA
tccctggtggtctagtg

SEQ ID NO: 34489 - DNA, 19 bp, synthetic construct
  misc_feature 1..19: note = Probe
  source 1..19: mol_type = other DNA
tccctggtggtctagtggc

SEQ ID NO: 34490 - DNA, 20 bp, synthetic construct
  misc_feature 1..20: note = Probe
  source 1..20: mol_type = other DNA
tccctggtggtctagtggct

SEQ ID NO: 34491 - DNA, 23 bp, synthetic construct
  misc_feature 1..23: note = Probe
  source 1..23: mol_type = other DNA
tccctggtggtctagtggctagg

SEQ ID NO: 34492 - DNA, 25 bp, synthetic construct
  misc_feature 1..25: note = Probe
  source 1..25: mol_type = other DNA
tccctggtggtctagtggctaggat

SEQ ID NO: 34493 - DNA, 26 bp, synthetic construct
  misc_feature 1..26: note = Probe
  source 1..26: mol_type = other DNA
tccctggtggtctagtggctaggatt

SEQ ID NO: 34494 - DNA, 28 bp, synthetic construct
  misc_feature 1..28: note = Probe
  source 1..28: mol_type = other DNA
tccctggtggtctagtggctaggattcg

SEQ ID NO: 34495 - DNA, 29 bp, synthetic construct
  misc_feature 1..29: note = Probe
  source 1..29: mol_type = other DNA
tccctggtggtctagtggctaggattcgg

SEQ ID NO: 34496 - DNA, 30 bp, synthetic construct; identical to SEQ ID NO: 7856
  misc_feature 1..30: note = Probe
  source 1..30: mol_type = other DNA

SEQ ID NO: 34497 - DNA, 37 bp, synthetic construct; identical to SEQ ID NO: 1677
  misc_feature 1..37: note = Probe
  source 1..37: mol_type = other DNA

SEQ ID NO: 34498 - DNA, 19 bp, synthetic construct
  misc_feature 1..19: note = Probe
  source 1..19: mol_type = other DNA
tccctggtggtctagtggt

SEQ ID NO: 34499 - DNA, 23 bp, synthetic construct
  misc_feature 1..23: note = Probe
  source 1..23: mol_type = other DNA
tccctggtggtctagtggttagg

SEQ ID NO: 34500 - DNA, 24 bp, synthetic construct
  misc_feature 1..24: note = Probe
  source 1..24: mol_type = other DNA
tccctggtggtctagtggttagga

SEQ ID NO: 34501 - DNA, 25 bp, synthetic construct
  misc_feature 1..25: note = Probe
  source 1..25: mol_type = other DNA
tccctggtggtctagtggttaggat

SEQ ID NO: 34502 - DNA, 26 bp, synthetic construct
  misc_feature 1..26: note = Probe
  source 1..26: mol_type = other DNA
tccctggtggtctagtggttaggatt

SEQ ID NO: 34503 - DNA, 27 bp, synthetic construct
  misc_feature 1..27: note = Probe
  source 1..27: mol_type = other DNA
tccctggtggtctagtggttaggattc

SEQ ID NO: 34504 - DNA, 28 bp, synthetic construct
  misc_feature 1..28: note = Probe
  source 1..28: mol_type = other DNA
tccctggtggtctagtggttaggattcg

SEQ ID NO: 34505 - DNA, 29 bp, synthetic construct
  misc_feature 1..29: note = Probe
  source 1..29: mol_type = other DNA
tccctggtggtctagtggttaggattcgg

SEQ ID NO: 34506 - DNA, 30 bp, synthetic construct; identical to SEQ ID NO: 7870
  misc_feature 1..30: note = Probe
  source 1..30: mol_type = other DNA

SEQ ID NO: 34507 - DNA, 38 bp, synthetic construct; identical to SEQ ID NO: 1686
  misc_feature 1..38: note = Probe
  source 1..38: mol_type = other DNA

SEQ ID NO: 34508 - DNA, 40 bp, synthetic construct; identical to SEQ ID NO: 1688
  misc_feature 1..40: note = Probe
  source 1..40: mol_type = other DNA

SEQ ID NO: 34509 - DNA, 42 bp, synthetic construct; identical to SEQ ID NO: 1689
  misc_feature 1..42: note = Probe
  source 1..42: mol_type = other DNA

SEQ ID NO: 34510 - DNA, 15 bp, synthetic construct
  misc_feature 1..15: note = Probe
  source 1..15: mol_type = other DNA
tccctgtccaggcgc

SEQ ID NO: 34511 - DNA, 17 bp, synthetic construct
  misc_feature 1..17: note = Probe
  source 1..17: mol_type = other DNA
tccctgtccaggcgcta

SEQ ID NO: 34512 - DNA, 17 bp, synthetic construct
  misc_feature 1..17: note = Probe
  source 1..17: mol_type = other DNA
tccctgttcgggcggca

SEQ ID NO: 34513 - DNA, 15 bp, synthetic construct
  misc_feature 1..15: note = Probe
  source 1..15: mol_type = other DNA
tccctgttcgggcgt

SEQ ID NO: 34514 - DNA, 19 bp, synthetic construct
  misc_feature 1..19: note = Probe
  source 1..19: mol_type = other DNA
tccggatggaggcgtgggt

SEQ ID NO: 34515 - DNA, 36 bp, synthetic construct
  misc_feature 1..36: note = Probe
  source 1..36: mol_type = other DNA
tccggatggaggcgtgggttcgaatcccacttctga

SEQ ID NO: 34516 - DNA, 16 bp, synthetic construct
  misc_feature 1..16: note = Probe
  source 1..16: mol_type = other DNA
tccggctcgaaggaag

SEQ ID NO: 34517 - DNA, 15 bp, synthetic construct
  misc_feature 1..15: note = Probe
  source 1..15: mol_type = other DNA
tccggctcgaaggac

SEQ ID NO: 34518 - DNA, 16 bp, synthetic construct
  misc_feature 1..16: note = Probe
  source 1..16: mol_type = other DNA
tccggctcgaaggacg

SEQ ID NO: 34519 - DNA, 17 bp, synthetic construct
  misc_feature 1..17: note = Probe
  source 1..17: mol_type = other DNA
tccggctcgaaggacga

SEQ ID NO: 34520 - DNA, 16 bp, synthetic construct
  misc_feature 1..16: note = Probe
  source 1..16: mol_type = other DNA
tccggctcgaaggact

SEQ ID NO: 34521 - DNA, 17 bp, synthetic construct
  misc_feature 1..17: note = Probe
  source 1..17: mol_type = other DNA
tccggctcgaaggactt

SEQ ID NO: 34522 - DNA, 21 bp, synthetic construct
  misc_feature 1..21: note = Probe
  source 1..21: mol_type = other DNA
tccggctcgaaggacttcgtc

SEQ ID NO: 34523 - DNA, 16 bp, synthetic construct
  misc_feature 1..16: note = Probe
  source 1..16: mol_type = other DNA
tccggctcgaaggagc

SEQ ID NO: 34524 - DNA, 15 bp, synthetic construct
  misc_feature 1..15: note = Probe
  source 1..15: mol_type = other DNA
tccggctcggaggac

SEQ ID NO: 34525 - DNA, 16 bp, synthetic construct
  misc_feature 1..16: note = Probe
  source 1..16: mol_type = other DNA
tccggctcggaggacg

SEQ ID NO: 34526 - DNA, 15 bp, synthetic construct
  misc_feature 1..15: note = Probe
  source 1..15: mol_type = other DNA
tccgggtgccccctc

SEQ ID NO: 34527 - DNA, 16 bp, synthetic construct
  misc_feature 1..16: note = Probe
  source 1..16: mol_type = other DNA
tccgggtgccccctca

SEQ ID NO: 34528 - DNA, 17 bp, synthetic construct
  misc_feature 1..17: note = Probe
  source 1..17: mol_type = other DNA
tccgggtgccccctcaa

SEQ ID NO: 34529 - DNA, 16 bp, synthetic construct
  misc_feature 1..16: note = Probe
  source 1..16: mol_type = other DNA
tccgggtgccccctcg

SEQ ID NO: 34530 - DNA, 16 bp, synthetic construct
  misc_feature 1..16: note = Probe
  source 1..16: mol_type = other DNA
tccgggtgccccctct

SEQ ID NO: 34531 - DNA, 30 bp, synthetic construct; identical to SEQ ID NO: 23951
  misc_feature 1..30: note = Probe
  source 1..30: mol_type = other DNA

SEQ ID NO: 34532 - DNA, 29 bp, synthetic construct
  misc_feature 1..29: note = Probe
  source 1..29: mol_type = other DNA
tccgtagtgtagcggttatcacattcgcc

SEQ ID NO: 34533 - DNA, 30 bp, synthetic construct; identical to SEQ ID NO: 7878
  misc_feature 1..30: note = Probe
  source 1..30: mol_type = other DNA

SEQ ID NO: 34534 - DNA, 32 bp, synthetic construct; identical to SEQ ID NO: 7880
  misc_feature 1..32: note = Probe
  source 1..32: mol_type = other DNA

SEQ ID NO: 34535 - DNA, 31 bp, synthetic construct; identical to SEQ ID NO: 7884
  misc_feature 1..31: note = Probe
  source 1..31: mol_type = other DNA

SEQ ID NO: 34536 - DNA, 32 bp, synthetic construct; identical to SEQ ID NO: 7885
  misc_feature 1..32: note = Probe
  source 1..32: mol_type = other DNA

SEQ ID NO: 34537 - DNA, 33 bp, synthetic construct; identical to SEQ ID NO: 7886
  misc_feature 1..33: note = Probe
  source 1..33: mol_type = other DNA

SEQ ID NO: 34538 - DNA, 20 bp, synthetic construct
  misc_feature 1..20: note = Probe
  source 1..20: mol_type = other DNA
tccgtagtgtagtggttatc

SEQ ID NO: 34539 - DNA, 29 bp, synthetic construct
  misc_feature 1..29: note = Probe
  source 1..29: mol_type = other DNA
tccgtagtgtagtggttatcacgttcgcc

SEQ ID NO: 34540 - DNA, 30 bp, synthetic construct; identical to SEQ ID NO: 7893
  misc_feature 1..30: note = Probe
  source 1..30: mol_type = other DNA

SEQ ID NO: 34541 - DNA, 36 bp, synthetic construct
  misc_feature 1..36: note = Probe
  source 1..36: mol_type = other DNA
tccgtagtgtagtggttatcacgttcgcctaacacg

SEQ ID NO: 34542 - DNA, 31 bp, synthetic construct; identical to SEQ ID NO: 7895
  misc_feature 1..31: note = Probe
  source 1..31: mol_type = other DNA

SEQ ID NO: 34543 - DNA, 32 bp, synthetic construct; identical to SEQ ID NO: 7896
  misc_feature 1..32: note = Probe
  source 1..32: mol_type = other DNA

SEQ ID NO: 34544 - DNA, 33 bp, synthetic construct; identical to SEQ ID NO: 7897
  misc_feature 1..33: note = Probe
  source 1..33: mol_type = other DNA

SEQ ID NO: 34545 - DNA, 36 bp, synthetic construct; identical to SEQ ID NO: 23970
  misc_feature 1..36: note = Probe
  source 1..36: mol_type = other DNA

SEQ ID NO: 34546 - DNA, 32 bp, synthetic construct
  misc_feature 1..32: note = Probe
  source 1..32: mol_type = other DNA
tccgtggtggtctagtggctaggattcggcgc

SEQ ID NO: 34547 - DNA, 33 bp, synthetic construct; identical to SEQ ID NO: 7900
  misc_feature 1..33: note = Probe
  source 1..33: mol_type = other DNA

SEQ ID NO: 34548 - DNA, 29 bp, synthetic construct
  misc_feature 1..29: note = Probe
  source 1..29: mol_type = other DNA
tccgtggtgtagtggttatcacattcgcc

SEQ ID NO: 34549 - DNA, 30 bp, synthetic construct; identical to SEQ ID NO: 23977
  misc_feature 1..30: note = Probe
  source 1..30: mol_type = other DNA

SEQ ID NO: 34550 - DNA, 22 bp, synthetic construct
  misc_feature 1..22: note = Probe
  source 1..22: mol_type = other DNA
tcctaagccagggattgtgggt

SEQ ID NO: 34551 - DNA, 36 bp, synthetic construct
  misc_feature 1..36: note = Probe
  source 1..36: mol_type = other DNA
tcctaagccagggattgtgggttcgagtcccatctg

SEQ ID NO: 34552 - DNA, 19 bp, synthetic construct
  misc_feature 1..19: note = Probe
  source 1..19: mol_type = other DNA
tcctcaaagcaatacactg

SEQ ID NO: 34553 - DNA, 36 bp, synthetic construct
  misc_feature 1..36: note = Probe
  source 1..36: mol_type = other DNA
tcctcaaagcaatacactgaaaatgtttagacgggc

SEQ ID NO: 34554 - DNA, 16 bp, synthetic construct
  misc_feature 1..16: note = Probe
  source 1..16: mol_type = other DNA
tcctcgctggggcctc

SEQ ID NO: 34555 - DNA, 18 bp, synthetic construct
  misc_feature 1..18: note = Probe
  source 1..18: mol_type = other DNA
tcctcgctggggcctcct

SEQ ID NO: 34556 - DNA, 15 bp, synthetic construct
  misc_feature 1..15: note = Probe
  source 1..15: mol_type = other DNA
tcctcgttagtatag

SEQ ID NO: 34557 - DNA, 16 bp, synthetic construct
  misc_feature 1..16: note = Probe
  source 1..16: mol_type = other DNA
tcctcgttagtatagt

SEQ ID NO: 34558 - DNA, 17 bp, synthetic construct
  misc_feature 1..17: note = Probe
  source 1..17: mol_type = other DNA
tcctcgttagtatagtg

SEQ ID NO: 34559 - DNA, 28 bp, synthetic construct
  misc_feature 1..28: note = Probe
  source 1..28: mol_type = other DNA
tcctcgttagtatagtggtgagtatccc

SEQ ID NO: 34560 - DNA, 29 bp, synthetic construct
  misc_feature 1..29: note = Probe
  source 1..29: mol_type = other DNA
tcctcgttagtatagtggtgagtatcccc

SEQ ID NO: 34561 - DNA, 30 bp, synthetic construct; identical to SEQ ID NO: 1701
  misc_feature 1..30: note = Probe
  source 1..30: mol_type = other DNA

SEQ ID NO: 34562 - DNA, 31 bp, synthetic construct; identical to SEQ ID NO: 1702
  misc_feature 1..31: note = Probe
  source 1..31: mol_type = other DNA

SEQ ID NO: 34563 - DNA, 34 bp, synthetic construct; identical to SEQ ID NO: 1705
  misc_feature 1..34: note = Probe
  source 1..34: mol_type = other DNA

SEQ ID NO: 34564 - DNA, 35 bp, synthetic construct; identical to SEQ ID NO: 1706
  misc_feature 1..35: note = Probe
  source 1..35: mol_type = other DNA

SEQ ID NO: 34565 - DNA, 50 bp, synthetic construct; identical to SEQ ID NO: 1711
  misc_feature 1..50: note = Probe
  source 1..50: mol_type = other DNA

SEQ ID NO: 34566 - DNA, 33 bp, synthetic construct; identical to SEQ ID NO: 1715
  misc_feature 1..33: note = Probe
  source 1..33: mol_type = other DNA

SEQ ID NO: 34567 - DNA, 36 bp, synthetic construct; identical to SEQ ID NO: 1718
  misc_feature 1..36: note = Probe
  source 1..36: mol_type = other DNA

SEQ ID NO: 34568 - DNA, 22 bp, synthetic construct
  misc_feature 1..22: note = Probe
  source 1..22: mol_type = other DNA
tcctgctcacagcgtcactagt

SEQ ID NO: 34569 - DNA, 23 bp, synthetic construct
  misc_feature 1..23: note = Probe
  source 1..23: mol_type = other DNA
tcctgctcacagcgtcactagtt

SEQ ID NO: 34570 - DNA, 24 bp, synthetic construct
  misc_feature 1..24: note = Probe
  source 1..24: mol_type = other DNA
tcctgctcacagcgtcactagttt

SEQ ID NO: 34571 - DNA, 25 bp, synthetic construct
  misc_feature 1..25: note = Probe
  source 1..25: mol_type = other DNA
tcctgctcacagcgtcactagtttt

SEQ ID NO: 34572 - DNA, 15 bp, synthetic construct
  misc_feature 1..15: note = Probe
  source 1..15: mol_type = other DNA
tcctggctggctcgc

SEQ ID NO: 34573 - DNA, 17 bp, synthetic construct
  misc_feature 1..17: note = Probe
  source 1..17: mol_type = other DNA
tcctggctggctcgctt

SEQ ID NO: 34574 - DNA, 36 bp, synthetic construct
  misc_feature 1..36: note = Probe
  source 1..36: mol_type = other DNA
tcctggttttcacccaggcggcccgggttcgactcc

SEQ ID NO: 34575 - DNA, 16 bp, synthetic construct
  misc_feature 1..16: note = Probe
  source 1..16: mol_type = other DNA
tccttaggtcgctggt

SEQ ID NO: 34576 - DNA, 17 bp, synthetic construct
  misc_feature 1..17: note = Probe
  source 1..17: mol_type = other DNA
tccttaggtcgctggtt

SEQ ID NO: 34577 - DNA, 30 bp, synthetic construct; identical to SEQ ID NO: 24012
  misc_feature 1..30: note = Probe
  source 1..30: mol_type = other DNA

SEQ ID NO: 34578 - DNA, 36 bp, synthetic construct
  misc_feature 1..36: note = Probe
  source 1..36: mol_type = other DNA
tccttaggtcgctggttcgattccggctcgaaggac

SEQ ID NO: 34579 - DNA, 36 bp, synthetic construct
  misc_feature 1..36: note = Probe
  source 1..36: mol_type = other DNA
tccttaggtcgctggttcgattccggctcgaaggag

SEQ ID NO: 34580 - DNA, 29 bp, synthetic construct
  misc_feature 1..29: note = Probe
  source 1..29: mol_type = other DNA
tcgaaaccatcctctgctagggagcgttt

SEQ ID NO: 34581 - DNA, 21 bp, synthetic construct
  misc_feature 1..21: note = Probe
  source 1..21: mol_type = other DNA
tcgaaaccatcctctgctatc

SEQ ID NO: 34582 - DNA, 18 bp, synthetic construct
  misc_feature 1..18: note = Probe
  source 1..18: mol_type = other DNA
tcgaaaccgggcggaaac

SEQ ID NO: 34583 - DNA, 21 bp, synthetic construct
  misc_feature 1..21: note = Probe
  source 1..21: mol_type = other DNA
tcgaaaccgggcggaaacacc

SEQ ID NO: 34584 - DNA, 22 bp, synthetic construct
  misc_feature 1..22: note = Probe
  source 1..22: mol_type = other DNA
tcgaaaccgggcggaaacacct

SEQ ID NO: 34585 - DNA, 18 bp, synthetic construct
  misc_feature 1..18: note = Probe
  source 1..18: mol_type = other DNA
tcgaacccatccctgaga

SEQ ID NO: 34586 - DNA, 30 bp, synthetic construct
  misc_feature 1..30: note = Probe
  source 1..30: mol_type = other DNA
tcgaagaagcagcttcaaacctgccggggc

SEQ ID NO: 34587 - DNA, 31 bp, synthetic construct; identical to SEQ ID NO: 7937
  misc_feature 1..31: note = Probe
  source 1..31: mol_type = other DNA

SEQ ID NO: 34588 - DNA, 32 bp, synthetic construct; identical to SEQ ID NO: 7938
  misc_feature 1..32: note = Probe
  source 1..32: mol_type = other DNA

SEQ ID NO: 34589 - DNA, 33 bp, synthetic construct; identical to SEQ ID NO: 7939
  misc_feature 1..33: note = Probe
  source 1..33: mol_type = other DNA

SEQ ID NO: 34590 - DNA, 21 bp, synthetic construct
  misc_feature 1..21: note = Probe
  source 1..21: mol_type = other DNA
tcgaatcccaccgctgccaca

SEQ ID NO: 34591 - DNA, 21 bp, synthetic construct
  misc_feature 1..21: note = Probe
  source 1..21: mol_type = other DNA
tcgaatcccaccgctgccagc

SEQ ID NO: 34592 - DNA, 21 bp, synthetic construct
  misc_feature 1..21: note = Probe
  source 1..21: mol_type = other DNA
tcgaatcccaccttcgtcgac

SEQ ID NO: 34593 - DNA, 19 bp, synthetic construct
  misc_feature 1..19: note = Probe
  source 1..19: mol_type = other DNA
tcgaatcccactcctgaca

SEQ ID NO: 34594 - DNA, 20 bp, synthetic construct
  misc_feature 1..20: note = Probe
  source 1..20: mol_type = other DNA
tcgaatcccactcctgacaa

SEQ ID NO: 34595 - DNA, 20 bp, synthetic construct
  misc_feature 1..20: note = Probe
  source 1..20: mol_type = other DNA
tcgaatcccactcctgacag

SEQ ID NO: 34596 - DNA, 19 bp, synthetic construct
  misc_feature 1..19: note = Probe
  source 1..19: mol_type = other DNA
tcgaatcccacttctgaca

SEQ ID NO: 34597 - DNA, 20 bp, synthetic construct
  misc_feature 1..20: note = Probe
  source 1..20: mol_type = other DNA
tcgaatcccacttctgacac

SEQ ID NO: 34598 - DNA, 21 bp, synthetic construct
  misc_feature 1..21: note = Probe
  source 1..21: mol_type = other DNA
tcgaatcccacttctgacaca

SEQ ID NO: 34599 - DNA, 22 bp, synthetic construct
  misc_feature 1..22: note = Probe
  source 1..22: mol_type = other DNA
tcgaatcccacttctgacacaa

SEQ ID NO: 34600 - DNA, 22 bp, synthetic construct
  misc_feature 1..22: note = Probe
  source 1..22: mol_type = other DNA
tcgaatcccacttctgacacag

SEQ ID NO: 34601 - DNA, 22 bp, synthetic construct
  misc_feature 1..22: note = Probe
  source 1..22: mol_type = other DNA
tcgaatcccagcggtgcctcaa

SEQ ID NO: 34602 - DNA, 22 bp, synthetic construct
  misc_feature 1..22: note = Probe
  source 1..22: mol_type = other DNA
tcgaatcccagcggtgcctccg

SEQ ID NO: 34603 - DNA, 20 bp, synthetic construct
  misc_feature 1..20: note = Probe
  source 1..20: mol_type = other DNA
tcgaatcccatcctcgtcgc

SEQ ID NO: 34604 - DNA, 21 bp, synthetic construct
  misc_feature 1..21: note = Probe
  source 1..21: mol_type = other DNA
tcgaatcccatcctcgtcgct

SEQ ID NO: 34605 - DNA, 21 bp, synthetic construct
  misc_feature 1..21: note = Probe
  source 1..21: mol_type = other DNA
tcgaatcccatcctcgtcggc

SEQ ID NO: 34606 - DNA, 21 bp, synthetic construct
  misc_feature 1..21: note = Probe
  source 1..21: mol_type = other DNA
tcgaatccggctcgaaggacg

SEQ ID NO: 34607 - DNA, 22 bp, synthetic construct
  misc_feature 1..22: note = Probe
  source 1..22: mol_type = other DNA
tcgaatccggctcgaaggacga

SEQ ID NO: 34608 - DNA, 21 bp, synthetic construct
  misc_feature 1..21: note = Probe
  source 1..21: mol_type = other DNA
tcgaatccggctcggaggacg

SEQ ID NO: 34609 - DNA, 21 bp, synthetic construct
  misc_feature 1..21: note = Probe
  source 1..21: mol_type = other DNA
tcgaatcctgccgactacggc

SEQ ID NO: 34610 - DNA, 22 bp, synthetic construct
  misc_feature 1..22: note = Probe
  source 1..22: mol_type = other DNA
tcgaatcctgccgactacggca

SEQ ID NO: 34611 - DNA, 21 bp, synthetic construct
  misc_feature 1..21: note = Probe
  source 1..21: mol_type = other DNA
tcgaatcctgccgactacgtc

SEQ ID NO: 34612 - DNA, 22 bp, synthetic construct
  misc_feature 1..22: note = Probe
  source 1..22: mol_type = other DNA
tcgaatcctgccgactacgtca

SEQ ID NO: 34613 - DNA, 22 bp, synthetic construct
  misc_feature 1..22: note = Probe
  source 1..22: mol_type = other DNA
tcgaatcctgctcacagcgtca

SEQ ID NO: 34614 - DNA, 32 bp, synthetic construct
  misc_feature 1..32: note = Probe
  source 1..32: mol_type = other DNA
tcgactcattaaattatgataatcatatttac

SEQ ID NO: 34615 - DNA, 33 bp, synthetic construct; identical to SEQ ID NO: 7958
  misc_feature 1..33: note = Probe
  source 1..33: mol_type = other DNA

SEQ ID NO: 34616 - DNA, 36 bp, synthetic construct
  misc_feature 1..36: note = Probe
  source 1..36: mol_type = other DNA
tcgactcattaaattatgataatcatatttaccaaa

SEQ ID NO: 34617 - DNA, 21 bp, synthetic construct
  misc_feature 1..21: note = Probe
  source 1..21: mol_type = other DNA
tcgactcccggtgtgggaacg

SEQ ID NO: 34618 - DNA, 21 bp, synthetic construct
  misc_feature 1..21: note = Probe
  source 1..21: mol_type = other DNA
tcgactcctggctggctcgcg

SEQ ID NO: 34619 - DNA, 22 bp, synthetic construct
  misc_feature 1..22: note = Probe
  source 1..22: mol_type = other DNA
tcgactcctggctggctcgcga

SEQ ID NO: 34620 - DNA, 21 bp, synthetic construct
  misc_feature 1..21: note = Probe
  source 1..21: mol_type = other DNA
tcgactcctggctggctcgct

SEQ ID NO: 34621 - DNA, 18 bp, synthetic construct
  misc_feature 1..18: note = Probe
  source 1..18: mol_type = other DNA
tcgagaggggctgtgctc

SEQ ID NO: 34622 - DNA, 21 bp, synthetic construct
  misc_feature 1..21: note = Probe
  source 1..21: mol_type = other DNA
tcgagaggggctgtgctcgca

SEQ ID NO: 34623 - DNA, 24 bp, synthetic construct
  misc_feature 1..24: note = Probe
  source 1..24: mol_type = other DNA
tcgagaggggctgtgctcgcaagg

SEQ ID NO: 34624 - DNA, 25 bp, synthetic construct
  misc_feature 1..25: note = Probe
  source 1..25: mol_type = other DNA
tcgagaggggctgtgctcgcaaggt

SEQ ID NO: 34625 - DNA, 26 bp, synthetic construct
  misc_feature 1..26: note = Probe
  source 1..26: mol_type = other DNA
tcgagaggggctgtgctcgcaaggtt

SEQ ID NO: 34626 - DNA, 27 bp, synthetic construct
  misc_feature 1..27: note = Probe
  source 1..27: mol_type = other DNA
tcgagaggggctgtgctcgcaaggttt

SEQ ID NO: 34627 - DNA, 28 bp, synthetic construct
  misc_feature 1..28: note = Probe
  source 1..28: mol_type = other DNA
tcgagaggggctgtgctcgcaaggtttc

SEQ ID NO: 34628 - DNA, 29 bp, synthetic construct
  misc_feature 1..29: note = Probe
  source 1..29: mol_type = other DNA
tcgagaggggctgtgctcgcaaggtttct

SEQ ID NO: 34629 - DNA, 30 bp, synthetic construct; identical to SEQ ID NO: 11965
  misc_feature 1..30: note = Probe
  source 1..30: mol_type = other DNA

SEQ ID NO: 34630 - DNA, 22 bp, synthetic construct
  misc_feature 1..22: note = Probe
  source 1..22: mol_type = other DNA
tcgagcccacccagggacgcct

SEQ ID NO: 34631 - DNA, 22 bp, synthetic construct
  misc_feature 1..22: note = Probe
  source 1..22: mol_type = other DNA
tcgagcccacccagggacgcta

SEQ ID NO: 34632 - DNA, 18 bp, synthetic construct
  misc_feature 1..18: note = Probe
  source 1..18: mol_type = other DNA
tcgagccccagtggaacc

SEQ ID NO: 34633 - DNA, 20 bp, synthetic construct
  misc_feature 1..20: note = Probe
  source 1..20: mol_type = other DNA
tcgagccccagtggaaccac

SEQ ID NO: 34634 - DNA, 21 bp, synthetic construct
  misc_feature 1..21: note = Probe
  source 1..21: mol_type = other DNA
tcgagccccagtggaaccacg

SEQ ID NO: 34635 - DNA, 36 bp, synthetic construct
  misc_feature 1..36: note = Probe
  source 1..36: mol_type = other DNA
tcgagccccagtggaaccatgagatgttacctagcg

SEQ ID NO: 34636 - DNA, 30 bp, synthetic construct
  misc_feature 1..30: note = Probe
  source 1..30: mol_type = other DNA
tcgatagctcagctggtagagcggaggact

SEQ ID NO: 34637 - DNA, 17 bp, synthetic construct
  misc_feature 1..17: note = Probe
  source 1..17: mol_type = other DNA
tcgatccccggcatctc

SEQ ID NO: 34638 - DNA, 22 bp, synthetic construct
  misc_feature 1..22: note = Probe
  source 1..22: mol_type = other DNA
tcgatccccgtacgggccacga

SEQ ID NO: 34639 - DNA, 20 bp, synthetic construct
  misc_feature 1..20: note = Probe
  source 1..20: mol_type = other DNA
tcgatcccgggtttcggcac

SEQ ID NO: 34640 - DNA, 21 bp, synthetic construct
  misc_feature 1..21: note = Probe
  source 1..21: mol_type = other DNA
tcgattccccgacggggagac

SEQ ID NO: 34641 - DNA, 21 bp, synthetic construct
  misc_feature 1..21: note = Probe
  source 1..21: mol_type = other DNA
tcgattccccgacggggaggc

SEQ ID NO: 34642 - DNA, 22 bp, synthetic construct
  misc_feature 1..22: note = Probe
  source 1..22: mol_type = other DNA
tcgattccccgacggggaggca

SEQ ID NO: 34643 - DNA, 17 bp, synthetic construct
  misc_feature 1..17: note = Probe
  source 1..17: mol_type = other DNA
tcgattcccggccaacg

SEQ ID NO: 34644 - DNA, 19 bp, synthetic construct
  misc_feature 1..19: note = Probe
  source 1..19: mol_type = other DNA
tcgattcccggccaacgca

SEQ ID NO: 34645 - DNA, 20 bp, synthetic construct
  misc_feature 1..20: note = Probe
  source 1..20: mol_type = other DNA
tcgattcccggccaacgcaa

SEQ ID NO: 34646 - DNA, 20 bp, synthetic construct
  misc_feature 1..20: note = Probe
  source 1..20: mol_type = other DNA
tcgattcccggccaacgcag

SEQ ID NO: 34647 - DNA, 21 bp, synthetic construct
  misc_feature 1..21: note = Probe
  source 1..21: mol_type = other DNA
tcgattcccggccaacgcagc

SEQ ID NO: 34648 - DNA, 22 bp, synthetic construct
  misc_feature 1..22: note = Probe
  source 1..22: mol_type = other DNA
tcgattcccggccaacgcagcg

SEQ ID NO: 34649 - DNA, 20 bp, synthetic construct
  misc_feature 1..20: note = Probe
  source 1..20: mol_type = other DNA
tcgattcccggccaacgcat

SEQ ID NO: 34650 - DNA, 17 bp, synthetic construct
  misc_feature 1..17: note = Probe
  source 1..17: mol_type = other DNA
tcgattcccggccaatg

SEQ ID NO: 34651 - DNA, 19 bp, synthetic construct
  misc_feature 1..19: note = Probe
  source 1..19: mol_type = other DNA
tcgattcccggccaatgca

SEQ ID NO: 34652 - DNA, 21 bp, synthetic construct
  misc_feature 1..21: note = Probe
  source 1..21: mol_type = other DNA
tcgattcccggccaatgcaac

SEQ ID NO: 34653 - DNA, 22 bp, synthetic construct
  misc_feature 1..22: note = Probe
  source 1..22: mol_type = other DNA
tcgattcccggccaatgcaacg

SEQ ID NO: 34654 - DNA, 20 bp, synthetic construct
  misc_feature 1..20: note = Probe
  source 1..20: mol_type = other DNA
tcgattcccggccaatgcac

SEQ ID NO: 34655 - DNA, 21 bp, synthetic construct
  misc_feature 1..21: note = Probe
  source 1..21: mol_type = other DNA
tcgattcccggccaatgcacg

SEQ ID NO: 34656 - DNA, 22 bp, synthetic construct
  misc_feature 1..22: note = Probe
  source 1..22: mol_type = other DNA
tcgattcccggccaatgcacga

SEQ ID NO: 34657 - DNA, 21 bp, synthetic construct
  misc_feature 1..21: note = Probe
  source 1..21: mol_type = other DNA
tcgattcccggccaatgcact

SEQ ID NO: 34658 - DNA, 21 bp, synthetic construct
  misc_feature 1..21: note = Probe
  source 1..21: mol_type = other DNA
tcgattcccggccaatgcagc

SEQ ID NO: 34659 - DNA, 22 bp, synthetic construct
  misc_feature 1..22: note = Probe
  source 1..22: mol_type = other DNA
tcgattcccggccaatgcagca

SEQ ID NO: 34660 - DNA, 19 bp, synthetic construct
  misc_feature 1..19: note = Probe
  source 1..19: mol_type = other DNA
tcgattcccggcccatgca

SEQ ID NO: 34661 - DNA, 21 bp, synthetic construct
  misc_feature 1..21: note = Probe
  source 1..21: mol_type = other DNA
tcgattcccggcccatgcagc

SEQ ID NO: 34662 - DNA, 22 bp, synthetic construct
  misc_feature 1..22: note = Probe
  source 1..22: mol_type = other DNA
tcgattcccggcccatgcagca

SEQ ID NO: 34663 - DNA, 19 bp, synthetic construct
  misc_feature 1..19: note = Probe
  source 1..19: mol_type = other DNA
tcgattcccgggcggcgca

SEQ ID NO: 34664 - DNA, 20 bp, synthetic construct
  misc_feature 1..20: note = Probe
  source 1..20: mol_type = other DNA
tcgattcccgggcggcgcac

SEQ ID NO: 34665 - DNA, 21 bp, synthetic construct
  misc_feature 1..21: note = Probe
  source 1..21: mol_type = other DNA
tcgattcccgggcggcgcact

SEQ ID NO: 34666 - DNA, 19 bp, synthetic construct
  misc_feature 1..19: note = Probe
  source 1..19: mol_type = other DNA
tcgattccggctcgaagga

SEQ ID NO: 34667 - DNA, 20 bp, synthetic construct
  misc_feature 1..20: note = Probe
  source 1..20: mol_type = other DNA
tcgattccggctcgaaggac

SEQ ID NO: 34668 - DNA, 21 bp, synthetic construct
  misc_feature 1..21: note = Probe
  source 1..21: mol_type = other DNA
tcgattccggctcgaaggact

SEQ ID NO: 34669 - DNA, 21 bp, synthetic construct
  misc_feature 1..21: note = Probe
  source 1..21: mol_type = other DNA
tcgattccggctcgaaggagc

SEQ ID NO: 34670 - DNA, 21 bp, synthetic construct
  misc_feature 1..21: note = Probe
  source 1..21: mol_type = other DNA
tcgattccttccttttttgtc

SEQ ID NO: 34671 - DNA, 36 bp, synthetic construct
  misc_feature 1..36: note = Probe
  source 1..36: mol_type = other DNA
tcgcataaaacttaaaactttacagtcagaggttca

SEQ ID NO: 34672 - DNA, 22 bp, synthetic construct
  misc_feature 1..22: note = Probe
  source 1..22: mol_type = other DNA
tcgcatgtatgaggccccgggt

SEQ ID NO: 34673 - DNA, 15 bp, synthetic construct
  misc_feature 1..15: note = Probe
  source 1..15: mol_type = other DNA
tcgcccggctagctc

SEQ ID NO: 34674 - DNA, 36 bp, synthetic construct
  misc_feature 1..36: note = Probe
  source 1..36: mol_type = other DNA
tcgcccggctagctcagtcggtagagcatgagactc

SEQ ID NO: 34675 - DNA, 23 bp, synthetic construct
  misc_feature 1..23: note = Probe
  source 1..23: mol_type = other DNA
tcgccgtgatcgtatagtggtta

SEQ ID NO: 34676 - DNA, 36 bp, synthetic construct
  misc_feature 1..36: note = Probe
  source 1..36: mol_type = other DNA
tcgccgtgatcgtatagtggttagtactctgcgttg

SEQ ID NO: 34677 - DNA, 26 bp, synthetic construct
  misc_feature 1..26: note = Probe
  source 1..26: mol_type = other DNA
tcgcctcccacgcgggagacccgggt

SEQ ID NO: 34678 - DNA, 15 bp, synthetic construct
  misc_feature 1..15: note = Probe
  source 1..15: mol_type = other DNA
tcgcgatgtctgttt

SEQ ID NO: 34679 - DNA, 26 bp, synthetic construct
  misc_feature 1..26: note = Probe
  source 1..26: mol_type = other DNA
tcgcgggttcgatccccgtacgggcc

SEQ ID NO: 34680 - DNA, 27 bp, synthetic construct
  misc_feature 1..27: note = Probe
  source 1..27: mol_type = other DNA
tcgcgggttcgatccccgtacgggcca

SEQ ID NO: 34681 - DNA, 36 bp, synthetic construct
  misc_feature 1..36: note = Probe
  source 1..36: mol_type = other DNA
tcgcgggttcgatccccgtacgggccaggattgaaa

SEQ ID NO: 34682 - DNA, 17 bp, synthetic construct
  misc_feature 1..17: note = Probe
  source 1..17: mol_type = other DNA
tcggcgctctcaccgcc

SEQ ID NO: 34683 - DNA, 28 bp, synthetic construct
  misc_feature 1..28: note = Probe
  source 1..28: mol_type = other DNA
tcggcgctctcaccgccgcggcccgggt

SEQ ID NO: 34684 - DNA, 29 bp, synthetic construct
  misc_feature 1..29: note = Probe
  source 1..29: mol_type = other DNA
tcggcgctctcaccgccgcggcccgggtt

SEQ ID NO: 34685 - DNA, 36 bp, synthetic construct
  misc_feature 1..36: note = Probe
  source 1..36: mol_type = other DNA
tcggcgctctcaccgccgcggcccgggttcgattcc

SEQ ID NO: 34686 - DNA, 23 bp, synthetic construct
  misc_feature 1..23: note = Probe
  source 1..23: mol_type = other DNA
tcggctgttaaccgaaaggttgg

SEQ ID NO: 34687 - DNA, 28 bp, synthetic construct
  misc_feature 1..28: note = Probe
  source 1..28: mol_type = other DNA
tcggctgttaaccgaaaggttggtggtt

SEQ ID NO: 34688 - DNA, 33 bp, synthetic construct
  misc_feature 1..33: note = Probe
  source 1..33: mol_type = other DNA
tcggctgttaaccgaaaggttggtggttcgagc

SEQ ID NO: 34689 - DNA, 36 bp, synthetic construct
  misc_feature 1..36: note = Probe
  source 1..36: mol_type = other DNA
tcggctgttaaccgaaaggttggtggttcgagccca

SEQ ID NO: 34690 - DNA, 27 bp, synthetic construct
  misc_feature 1..27: note = Probe
  source 1..27: mol_type = other DNA
tcggctgttaactgaaaggttggtggt

SEQ ID NO: 34691 - DNA, 23 bp, synthetic construct
  misc_feature 1..23: note = Probe
  source 1..23: mol_type = other DNA
tcggctttccctgctaactgggc

SEQ ID NO: 34692 - DNA, 24 bp, synthetic construct
  misc_feature 1..24: note = Probe
  source 1..24: mol_type = other DNA
tcggctttccctgctaactgggct

SEQ ID NO: 34693 - DNA, 25 bp, synthetic construct
  misc_feature 1..25: note = Probe
  source 1..25: mol_type = other DNA
tcggctttccctgctaactgggctt

SEQ ID NO: 34694 - DNA, 26 bp, synthetic construct
  misc_feature 1..26: note = Probe
  source 1..26: mol_type = other DNA
tcggctttccctgctaactgggcttt

SEQ ID NO: 34695 - DNA, 27 bp, synthetic construct
  misc_feature 1..27: note = Probe
  source 1..27: mol_type = other DNA
tcggctttccctgctaactgggctttt

SEQ ID NO: 34696 - DNA, 29 bp, synthetic construct
  misc_feature 1..29: note = Probe
  source 1..29: mol_type = other DNA
tcggctttccctgctaactgggctttttt

SEQ ID NO: 34697 - DNA, 36 bp, synthetic construct
  misc_feature 1..36: note = Probe
  source 1..36: mol_type = other DNA
tcgggagcgcccggatagctcagtcggtagagcatc

SEQ ID NO: 34698 - DNA, 36 bp, synthetic construct
  misc_feature 1..36: note = Probe
  source 1..36: mol_type = other DNA
tcgggcccataccccgaaaatgttggttataccctt

SEQ ID NO: 34699 - DNA, 36 bp, synthetic construct
  misc_feature 1..36: note = Probe
  source 1..36: mol_type = other DNA
tcgggcgcccggctagctcagtcggtagagcatgag

SEQ ID NO: 34700 - DNA, 19 bp, synthetic construct
  misc_feature 1..19: note = Probe
  source 1..19: mol_type = other DNA
tcgggcgggagtggtggct

SEQ ID NO: 34701 - DNA, 20 bp, synthetic construct
  misc_feature 1..20: note = Probe
  source 1..20: mol_type = other DNA
tcgggcgggagtggtggctt

SEQ ID NO: 34702 - DNA, 21 bp, synthetic construct
  misc_feature 1..21: note = Probe
  source 1..21: mol_type = other DNA
tcgggcgggagtggtggcttt

SEQ ID NO: 34703 - DNA, 22 bp, synthetic construct
  misc_feature 1..22: note = Probe
  source 1..22: mol_type = other DNA
tcgggcgggagtggtggctttt

SEQ ID NO: 34704 - DNA, 23 bp, synthetic construct
  misc_feature 1..23: note = Probe
  source 1..23: mol_type = other DNA
tcgggcgggagtggtggctttta

SEQ ID NO: 34705 - DNA, 17 bp, synthetic construct
  misc_feature 1..17: note = Probe
  source 1..17: mol_type = other DNA
tcgggtgcgagaggtcc

SEQ ID NO: 34706 - DNA, 24 bp, synthetic construct
  misc_feature 1..24: note = Probe
  source 1..24: mol_type = other DNA
tcgggtgcgagaggtcccgggttc

SEQ ID NO: 34707 - DNA, 21 bp, synthetic construct
  misc_feature 1..21: note = Probe
  source 1..21: mol_type = other DNA
tcgggtgtgagaggtcccggg

SEQ ID NO: 34708 - DNA, 22 bp, synthetic construct
  misc_feature 1..22: note = Probe
  source 1..22: mol_type = other DNA
tcgggtgtgagaggtcccgggt

SEQ ID NO: 34709 - DNA, 23 bp, synthetic construct
  misc_feature 1..23: note = Probe
  source 1..23: mol_type = other DNA
tcgggtgtgagaggtcccgggtt

SEQ ID NO: 34710 - DNA, 15 bp, synthetic construct
  misc_feature 1..15: note = Probe
  source 1..15: mol_type = other DNA
tcggtagagcatcag

SEQ ID NO: 34711 - DNA, 20 bp, synthetic construct
  misc_feature 1..20: note = Probe
  source 1..20: mol_type = other DNA
tcggtagagcatcagacttt

SEQ ID NO: 34712 - DNA, 21 bp, synthetic construct
  misc_feature 1..21: note = Probe
  source 1..21: mol_type = other DNA
tcggtagagcatcagactttt

SEQ ID NO: 34713 - DNA, 16 bp, synthetic construct
  misc_feature 1..16: note = Probe
  source 1..16: mol_type = other DNA
tcggtagagcatgaga

SEQ ID NO: 34714 - DNA, 17 bp, synthetic construct
  misc_feature 1..17: note = Probe
  source 1..17: mol_type = other DNA
tcggtagagcatgagac

SEQ ID NO: 34715 - DNA, 18 bp, synthetic construct
  misc_feature 1..18: note = Probe
  source 1..18: mol_type = other DNA
tcggtagagcatgagacc

SEQ ID NO: 34716 - DNA, 18 bp, synthetic construct
  misc_feature 1..18: note = Probe
  source 1..18: mol_type = other DNA
tcggtagagcatgagact

SEQ ID NO: 34717 - DNA, 19 bp, synthetic construct
  misc_feature 1..19: note = Probe
  source 1..19: mol_type = other DNA
tcggtagagcatgagactc

SEQ ID NO: 34718 - DNA, 25 bp, synthetic construct
  misc_feature 1..25: note = Probe
  source 1..25: mol_type = other DNA
tcggtagagcatgagactcttaatc

SEQ ID NO: 34719 - DNA, 26 bp, synthetic construct
  misc_feature 1..26: note = Probe
  source 1..26: mol_type = other DNA
tcggtagagcatgagactcttaatct

SEQ ID NO: 34720 - DNA, 27 bp, synthetic construct
  misc_feature 1..27: note = Probe
  source 1..27: mol_type = other DNA
tcggtagagcatgagactcttaatctc

SEQ ID NO: 34721 - DNA, 36 bp, synthetic construct
  misc_feature 1..36: note = Probe
  source 1..36: mol_type = other DNA
tcggtagagcatgagactcttaatctcagggtcgtg

SEQ ID NO: 34722 - DNA, 39 bp, synthetic construct
  misc_feature 1..39: note = Probe
  source 1..39: mol_type = other DNA
tcggtagagcatgagactcttaatctcagggtcgtgggt

SEQ ID NO: 34723 - DNA, 15 bp, synthetic construct
  misc_feature 1..15: note = Probe
  source 1..15: mol_type = other DNA
tcggtagagcatggg

SEQ ID NO: 34724 - DNA, 16 bp, synthetic construct
  misc_feature 1..16: note = Probe
  source 1..16: mol_type = other DNA
tcggtagagcatggga

SEQ ID NO: 34725 - DNA, 25 bp, synthetic construct
  misc_feature 1..25: note = Probe
  source 1..25: mol_type = other DNA
tcggtagagcatgggactcttaatc

SEQ ID NO: 34726 - DNA, 36 bp, synthetic construct
  misc_feature 1..36: note = Probe
  source 1..36: mol_type = other DNA
tcggtagagcatgggactcttaatcccagggtcgtg

SEQ ID NO: 34727 - DNA, 36 bp, synthetic construct
  misc_feature 1..36: note = Probe
  source 1..36: mol_type = other DNA
tcggtgcatgggtggttcagtggtagaattctcgcc

SEQ ID NO: 34728 - DNA, 23 bp, synthetic construct
  misc_feature 1..23: note = Probe
  source 1..23: mol_type = other DNA
tcggtggaacctgcattggtttt

SEQ ID NO: 34729 - DNA, 21 bp, synthetic construct
  misc_feature 1..21: note = Probe
  source 1..21: mol_type = other DNA
tcggtgggacctcacgagact

SEQ ID NO: 34730 - DNA, 25 bp, synthetic construct
  misc_feature 1..25: note = Probe
  source 1..25: mol_type = other DNA
tcggttagcgcgttcggctgttaac

SEQ ID NO: 34731 - DNA, 17 bp, synthetic construct
  misc_feature 1..17: note = Probe
  source 1..17: mol_type = other DNA
tcgtaaacaggagatcc

SEQ ID NO: 34732 - DNA, 18 bp, synthetic construct
  misc_feature 1..18: note = Probe
  source 1..18: mol_type = other DNA
tcgtaaacaggagatcct

SEQ ID NO: 34733 - DNA, 22 bp, synthetic construct
  misc_feature 1..22: note = Probe
  source 1..22: mol_type = other DNA
tcgtaaaccgaagatcacgggt

SEQ ID NO: 34734 - DNA, 23 bp, synthetic construct
  misc_feature 1..23: note = Probe
  source 1..23: mol_type = other DNA
tcgtatagtggttagtactctgc

SEQ ID NO: 34735 - DNA, 36 bp, synthetic construct
  misc_feature 1..36: note = Probe
  source 1..36: mol_type = other DNA
tcgtatagtggttagtactctgcgttgtggccgcag

SEQ ID NO: 34736 - DNA, 41 bp, synthetic construct
  misc_feature 1..41: note = Probe
  source 1..41: mol_type = other DNA
tcgtatagtggttagtactctgcgttgtggccgcagcaacc

SEQ ID NO: 34737 - DNA, 42 bp, synthetic construct
  misc_feature 1..42: note = Probe
  source 1..42: mol_type = other DNA
tcgtatagtggttagtactctgcgttgtggccgcagcaacct

SEQ ID NO: 34738 - DNA, 46 bp, synthetic construct
  misc_feature 1..46: note = Probe
  source 1..46: mol_type = other DNA
tcgtatagtggttagtactctgcgttgtggccgcagcaacctcggt

SEQ ID NO: 34739 - DNA, 15 bp, synthetic construct
  misc_feature 1..15: note = Probe
  source 1..15: mol_type = other DNA
tcgtggctactgttt

SEQ ID NO: 34740 - DNA, 16 bp, synthetic construct
  misc_feature 1..16: note = Probe
  source 1..16: mol_type = other DNA
tcgtggctactgtttt

SEQ ID NO: 34741 - DNA, 17 bp, synthetic construct
  misc_feature 1..17: note = Probe
  source 1..17: mol_type = other DNA
tcgtggctactgttttt

SEQ ID NO: 34742 - DNA, 18 bp, synthetic construct
  misc_feature 1..18: note = Probe
  source 1..18: mol_type = other DNA
tcgtggctactgtttttc

SEQ ID NO: 34743 - DNA, 26 bp, synthetic construct
  misc_feature 1..26: note = Probe
  source 1..26: mol_type = other DNA
tcgtgggttcgagccccacgttgggc

SEQ ID NO: 34744 - DNA, 27 bp, synthetic construct
  misc_feature 1..27: note = Probe
  source 1..27: mol_type = other DNA
tcgtgggttcgagccccacgttgggcg

SEQ ID NO: 34745 - DNA, 28 bp, synthetic construct
  misc_feature 1..28: note = Probe
  source 1..28: mol_type = other DNA
tcgtgggttcgagccccacgttgggcgc

SEQ ID NO: 34746 - DNA, 15 bp, synthetic construct
  misc_feature 1..15: note = Probe
  source 1..15: mol_type = other DNA
tcgtggttgtagtcc

SEQ ID NO: 34747 - DNA, 22 bp, synthetic construct
  misc_feature 1..22: note = Probe
  source 1..22: mol_type = other DNA
tcgtggttgtagtccgtgcgag

SEQ ID NO: 34748 - DNA, 25 bp, synthetic construct
  misc_feature 1..25: note = Probe
  source 1..25: mol_type = other DNA
tcgtggttgtagtccgtgcgagaat

SEQ ID NO: 34749 - DNA, 26 bp, synthetic construct
  misc_feature 1..26: note = Probe
  source 1..26: mol_type = other DNA
tcgtggttgtagtccgtgcgagaata

SEQ ID NO: 34750 - DNA, 27 bp, synthetic construct
  misc_feature 1..27: note = Probe
  source 1..27: mol_type = other DNA
tcgtggttgtagtccgtgcgagaataa

SEQ ID NO: 34751 - DNA, 28 bp, synthetic construct
  misc_feature 1..28: note = Probe
  source 1..28: mol_type = other DNA
tcgttagtatagtggtgagtatccccgc

SEQ ID NO: 34752 - DNA, 15 bp, synthetic construct
  misc_feature 1..15: note = Probe
  source 1..15: mol_type = other DNA
tcgttggtctagggg

SEQ ID NO: 34753 - DNA, 17 bp, synthetic construct
  misc_feature 1..17: note = Probe
  source 1..17: mol_type = other DNA
tcgttggtctaggggta

SEQ ID NO: 34754 - DNA, 23 bp, synthetic construct
  misc_feature 1..23: note = Probe
  source 1..23: mol_type = other DNA
tcgttggtctaggggtatgattc

SEQ ID NO: 34755 - DNA, 24 bp, synthetic construct
  misc_feature 1..24: note = Probe
  source 1..24: mol_type = other DNA
tcgttggtctaggggtatgattct

SEQ ID NO: 34756 - DNA, 25 bp, synthetic construct
  misc_feature 1..25: note = Probe
  source 1..25: mol_type = other DNA
tcgttggtctaggggtatgattctc

SEQ ID NO: 34757 - DNA, 26 bp, synthetic construct
  misc_feature 1..26: note = Probe
  source 1..26: mol_type = other DNA
tcgttggtctaggggtatgattctcg

SEQ ID NO: 34758 - DNA, 27 bp, synthetic construct
  misc_feature 1..27: note = Probe
  source 1..27: mol_type = other DNA
tcgttggtctaggggtatgattctcgc

SEQ ID NO: 34759 - DNA, 28 bp, synthetic construct
  misc_feature 1..28: note = Probe
  source 1..28: mol_type = other DNA
tcgttggtctaggggtatgattctcgct

SEQ ID NO: 34760 - DNA, 29 bp, synthetic construct
  misc_feature 1..29: note = Probe
  source 1..29: mol_type = other DNA
tcgttggtctaggggtatgattctcgctt

SEQ ID NO: 34761 - DNA, 28 bp, synthetic construct
  misc_feature 1..28: note = Probe
  source 1..28: mol_type = other DNA
tcgttggtctaggggtatgattctcggt

SEQ ID NO: 34762 - DNA, 34 bp, synthetic construct; identical to SEQ ID NO: 24121
  misc_feature 1..34: note = Probe
  source 1..34: mol_type = other DNA

SEQ ID NO: 34763 - DNA, 36 bp, synthetic construct
  misc_feature 1..36: note = Probe
  source 1..36: mol_type = other DNA
tctaaaggtccctggttcgatcccgggtttcggcac

SEQ ID NO: 34764 - DNA, 23 bp, synthetic construct
  misc_feature 1..23: note = Probe
  source 1..23: mol_type = other DNA
tctaacaacatggctttctcaac

SEQ ID NO: 34765 - DNA, 18 bp, synthetic construct
  misc_feature 1..18: note = Probe
  source 1..18: mol_type = other DNA
tctaccccctctagagcc

SEQ ID NO: 34766 - DNA, 19 bp, synthetic construct
  misc_feature 1..19: note = Probe
  source 1..19: mol_type = other DNA
tctaccccctctagagccc

SEQ ID NO: 34767 - DNA, 21 bp, synthetic construct
  misc_feature 1..21: note = Probe
  source 1..21: mol_type = other DNA
tctagagcccactgtaaagct

SEQ ID NO: 34768 - DNA, 36 bp, synthetic construct
  misc_feature 1..36: note = Probe
  source 1..36: mol_type = other DNA
tctagagcccactgtaaagctaacttagcattaacc

SEQ ID NO: 34769 - DNA, 19 bp, synthetic construct
  misc_feature 1..19: note = Probe
  source 1..19: mol_type = other DNA
tctagaggctgaaggcatt

SEQ ID NO: 34770 - DNA, 30 bp, synthetic construct
  misc_feature 1..30: note = Probe
  source 1..30: mol_type = other DNA
tctagattttatgtatacgggttcttcgaa

SEQ ID NO: 34771 - DNA, 32 bp, synthetic construct
  misc_feature 1..32: note = Probe
  source 1..32: mol_type = other DNA
tctagcggttaggattcctggttttcacccag

SEQ ID NO: 34772 - DNA, 23 bp, synthetic construct
  misc_feature 1..23: note = Probe
  source 1..23: mol_type = other DNA
tctaggactatgagaatcgaacc

SEQ ID NO: 34773 - DNA, 34 bp, synthetic construct
  misc_feature 1..34: note = Probe
  source 1..34: mol_type = other DNA
tctaggactatgagaatcgaacccatccctgaga

SEQ ID NO: 34774 - DNA, 20 bp, synthetic construct
  misc_feature 1..20: note = Probe
  source 1..20: mol_type = other DNA
tctaggctgtcagctcttcc

SEQ ID NO: 34775 - DNA, 18 bp, synthetic construct
  misc_feature 1..18: note = Probe
  source 1..18: mol_type = other DNA
tctaggggtatgattctc

SEQ ID NO: 34776 - DNA, 20 bp, synthetic construct
  misc_feature 1..20: note = Probe
  source 1..20: mol_type = other DNA
tctaggggtatgattctcgc

SEQ ID NO: 34777 - DNA, 21 bp, synthetic construct
  misc_feature 1..21: note = Probe
  source 1..21: mol_type = other DNA
tctaggggtatgattctcgct

SEQ ID NO: 34778 - DNA, 22 bp, synthetic construct
  misc_feature 1..22: note = Probe
  source 1..22: mol_type = other DNA
tctaggggtatgattctcgctt

SEQ ID NO: 34779 - DNA, 20 bp, synthetic construct
  misc_feature 1..20: note = Probe
  source 1..20: mol_type = other DNA
tctagtggttaggattcggc

SEQ ID NO: 34780 - DNA, 32 bp, synthetic construct
  misc_feature 1..32: note = Probe
  source 1..32: mol_type = other DNA
tctagtggttaggattcggcgctctcaccgcc

SEQ ID NO: 34781 - DNA, 39 bp, synthetic construct; identical to SEQ ID NO: 24131
  misc_feature 1..39: note = Probe
  source 1..39: mol_type = other DNA

SEQ ID NO: 34782 - DNA, 43 bp, synthetic construct
  misc_feature 1..43: note = Probe
  source 1..43: mol_type = other DNA
tctagtggttaggattcggcgctctcaccgccgcggcccgggt

SEQ ID NO: 34783 - DNA, 15 bp, synthetic construct
  misc_feature 1..15: note = Probe
  source 1..15: mol_type = other DNA
tctcaccgccgcggc

SEQ ID NO: 34784 - DNA, 16 bp, synthetic construct
  misc_feature 1..16: note = Probe
  source 1..16: mol_type = other DNA
tctcaccgccgcggcc

SEQ ID NO: 34785 - DNA, 17 bp, synthetic construct
  misc_feature 1..17: note = Probe
  source 1..17: mol_type = other DNA
tctcaccgccgcggccc

SEQ ID NO: 34786 - DNA, 18 bp, synthetic construct
  misc_feature 1..18: note = Probe
  source 1..18: mol_type = other DNA
tctcaccgccgcggcccg

SEQ ID NO: 34787 - DNA, 21 bp, synthetic construct
  misc_feature 1..21: note = Probe
  source 1..21: mol_type = other DNA
tctcaccgccgcggcccgggt

SEQ ID NO: 34788 - DNA, 36 bp, synthetic construct
  misc_feature 1..36: note = Probe
  source 1..36: mol_type = other DNA
tctcaccgccgcggcccgggttcgattcccggtcag

SEQ ID NO: 34789 - DNA, 43 bp, synthetic construct
  misc_feature 1..43: note = Probe
  source 1..43: mol_type = other DNA
tctcaccgccgcggcccgggttcgattcccggtcagggaaaga

SEQ ID NO: 34790 - DNA, 43 bp, synthetic construct; identical to SEQ ID NO: 8000
  misc_feature 1..43: note = Probe
  source 1..43: mol_type = other DNA

SEQ ID NO: 34791 - DNA, 43 bp, synthetic construct
  misc_feature 1..43: note = Probe
  source 1..43: mol_type = other DNA
tctcaccgccgcggcccgggttcgattcccggtcagggaatga

SEQ ID NO: 34792 - DNA, 23 bp, synthetic construct
  misc_feature 1..23: note = Probe
  source 1..23: mol_type = other DNA
tctcagggatgggttcgattctc

SEQ ID NO: 34793 - DNA, 31 bp, synthetic construct; identical to SEQ ID NO: 24132
  misc_feature 1..31: note = Probe
  source 1..31: mol_type = other DNA

SEQ ID NO: 34794 - DNA, 38 bp, synthetic construct
  misc_feature 1..38: note = Probe
  source 1..38: mol_type = other DNA
tctcagggtcgtgggttcgagccccacgttgggcggca

SEQ ID NO: 34795 - DNA, 20 bp, synthetic construct
  misc_feature 1..20: note = Probe
  source 1..20: mol_type = other DNA
tctccaatggaggcgtgggt

SEQ ID NO: 34796 - DNA, 36 bp, synthetic construct; identical to SEQ ID NO: 24137
  misc_feature 1..36: note = Probe
  source 1..36: mol_type = other DNA

SEQ ID NO: 34797 - DNA, 39 bp, synthetic construct
  misc_feature 1..39: note = Probe
  source 1..39: mol_type = other DNA
tctccaatggaggcgtgggttcgaatcccacttctgaca

SEQ ID NO: 34798 - DNA, 20 bp, synthetic construct
  misc_feature 1..20: note = Probe
  source 1..20: mol_type = other DNA
tctcccctggaggcgtgggt

SEQ ID NO: 34799 - DNA, 21 bp, synthetic construct
  misc_feature 1..21: note = Probe
  source 1..21: mol_type = other DNA
tctcccctggaggcgtgggtt

SEQ ID NO: 34800 - DNA, 21 bp, synthetic construct
  misc_feature 1..21: note = Probe
  source 1..21: mol_type = other DNA
tctccggatggaggcgtgggt

SEQ ID NO: 34801 - DNA, 15 bp, synthetic construct
  misc_feature 1..15: note = Probe
  source 1..15: mol_type = other DNA
tctcgcctgccacgc

SEQ ID NO: 34802 - DNA, 15 bp, synthetic construct
  misc_feature 1..15: note = Probe
  source 1..15: mol_type = other DNA
tctcgctggggcctc

SEQ ID NO: 34803 - DNA, 17 bp, synthetic construct
  misc_feature 1..17: note = Probe
  source 1..17: mol_type = other DNA
tctcgctggggcctcgg

SEQ ID NO: 34804 - DNA, 19 bp, synthetic construct
  misc_feature 1..19: note = Probe
  source 1..19: mol_type = other DNA
tctcggtggaacctgcatt

SEQ ID NO: 34805 - DNA, 25 bp, synthetic construct
  misc_feature 1..25: note = Probe
  source 1..25: mol_type = other DNA
tctcggtggaacctgcattggtttt

SEQ ID NO: 34806 - DNA, 36 bp, synthetic construct
  misc_feature 1..36: note = Probe
  source 1..36: mol_type = other DNA
tctcggtggaacctgctcgaagatatatgtatatat

SEQ ID NO: 34807 - DNA, 15 bp, synthetic construct
  misc_feature 1..15: note = Probe
  source 1..15: mol_type = other DNA
tctcggtgggaccta

SEQ ID NO: 34808 - DNA, 15 bp, synthetic construct
  misc_feature 1..15: note = Probe
  source 1..15: mol_type = other DNA
tctcggtgggacctc

SEQ ID NO: 34809 - DNA, 16 bp, synthetic construct
  misc_feature 1..16: note = Probe
  source 1..16: mol_type = other DNA
tctcggtgggacctca

SEQ ID NO: 34810 - DNA, 16 bp, synthetic construct
  misc_feature 1..16: note = Probe
  source 1..16: mol_type = other DNA
tctgaaggtcctgagt

SEQ ID NO: 34811 - DNA, 36 bp, synthetic construct
  misc_feature 1..36: note = Probe
  source 1..36: mol_type = other DNA
tctgaaggtcctgagttcgaacctcagagggggcaa

SEQ ID NO: 34812 - DNA, 36 bp, synthetic construct
  misc_feature 1..36: note = Probe
  source 1..36: mol_type = other DNA
tctgaaggtcctgagttcgaacctcagagggggcag

SEQ ID NO: 34813 - DNA, 38 bp, synthetic construct; identical to SEQ ID NO: 24142
  misc_feature 1..38: note = Probe
  source 1..38: mol_type = other DNA

SEQ ID NO: 34814 - DNA, 36 bp, synthetic construct
  misc_feature 1..36: note = Probe
  source 1..36: mol_type = other DNA
tctgaaggtcctgagttcgagcctcagagagggcag

SEQ ID NO: 34815 - DNA, 16 bp, synthetic construct
  misc_feature 1..16: note = Probe
  source 1..16: mol_type = other DNA
tctgaaggtcgtgagt

SEQ ID NO: 34816 - DNA, 34 bp, synthetic construct
  misc_feature 1..34: note = Probe
  source 1..34: mol_type = other DNA
tctgaaggtcgtgagttcgagcctcacacggggc

SEQ ID NO: 34817 - DNA, 35 bp, synthetic construct
  misc_feature 1..35: note = Probe
  source 1..35: mol_type = other DNA
tctgaaggtcgtgagttcgagcctcacacggggca

SEQ ID NO: 34818 - DNA, 36 bp, synthetic construct
  misc_feature 1..36: note = Probe
  source 1..36: mol_type = other DNA
tctgaaggtcgtgagttcgagcctcacacggggcag

SEQ ID NO: 34819 - DNA, 33 bp, synthetic construct
  misc_feature 1..33: note = Probe
  source 1..33: mol_type = other DNA
tctgaaggtcgtgagttcgatcctcacacgggg

SEQ ID NO: 34820 - DNA, 34 bp, synthetic construct
  misc_feature 1..34: note = Probe
  source 1..34: mol_type = other DNA
tctgaaggtcgtgagttcgatcctcacacggggc

SEQ ID NO: 34821 - DNA, 35 bp, synthetic construct; identical to SEQ ID NO: 24143
  misc_feature 1..35: note = Probe
  source 1..35: mol_type = other DNA

SEQ ID NO: 34822 - DNA, 37 bp, synthetic construct
  misc_feature 1..37: note = Probe
  source 1..37: mol_type = other DNA
tctgaaggtcgtgagttcgatcctcacacggggcaca

SEQ ID NO: 34823 - DNA, 38 bp, synthetic construct; identical to SEQ ID NO: 8005
  misc_feature 1..38: note = Probe
  source 1..38: mol_type = other DNA

SEQ ID NO: 34824 - DNA, 19 bp, synthetic construct
  misc_feature 1..19: note = Probe
  source 1..19: mol_type = other DNA
tctgaatccagcgatccga

SEQ ID NO: 34825 - DNA, 23 bp, synthetic construct
  misc_feature 1..23: note = Probe
  source 1..23: mol_type = other DNA
tctgaatccagcgatccgagttc

SEQ ID NO: 34826 - DNA, 21 bp, synthetic construct
  misc_feature 1..21: note = Probe
  source 1..21: mol_type = other DNA
tctgacaacagaggcttacga

SEQ ID NO: 34827 - DNA, 36 bp, synthetic construct; identical to SEQ ID NO: 8009
  misc_feature 1..36: note = Probe
  source 1..36: mol_type = other DNA

SEQ ID NO: 34828 - DNA, 16 bp, synthetic construct
  misc_feature 1..16: note = Probe
  source 1..16: mol_type = other DNA
tctgacacattcgttt

SEQ ID NO: 34829 - DNA, 22 bp, synthetic construct
  misc_feature 1..22: note = Probe
  source 1..22: mol_type = other DNA
tctgacagagctcaattacttt

SEQ ID NO: 34830 - DNA, 28 bp, synthetic construct
  misc_feature 1..28: note = Probe
  source 1..28: mol_type = other DNA
tctgacttcggatcagaagattgagggt

SEQ ID NO: 34831 - DNA, 22 bp, synthetic construct
  misc_feature 1..22: note = Probe
  source 1..22: mol_type = other DNA
tctgagggtccagggttcaagt

SEQ ID NO: 34832 - DNA, 36 bp, synthetic construct
  misc_feature 1..36: note = Probe
  source 1..36: mol_type = other DNA
tctgagggtccagggttcaagtccctgtccaggcgc

SEQ ID NO: 34833 - DNA, 38 bp, synthetic construct
  misc_feature 1..38: note = Probe
  source 1..38: mol_type = other DNA
tctgagggtccagggttcaagtccctgtccaggcgcta

SEQ ID NO: 34834 - DNA, 36 bp, synthetic construct
  misc_feature 1..36: note = Probe
  source 1..36: mol_type = other DNA
tctgagggtccagggttcaagtccctgttcaggcga

SEQ ID NO: 34835 - DNA, 35 bp, synthetic construct
  misc_feature 1..35: note = Probe
  source 1..35: mol_type = other DNA
tctgagggtccagggttcaagtccctgttcgggcg

SEQ ID NO: 34836 - DNA, 36 bp, synthetic construct; identical to SEQ ID NO: 24148
  misc_feature 1..36: note = Probe
  source 1..36: mol_type = other DNA

SEQ ID NO: 34837 - DNA, 37 bp, synthetic construct
  misc_feature 1..37: note = Probe
  source 1..37: mol_type = other DNA
tctgagggtccagggttcaagtccctgttcgggcggc

SEQ ID NO: 34838 - DNA, 38 bp, synthetic construct; identical to SEQ ID NO: 24149
  misc_feature 1..38: note = Probe
  source 1..38: mol_type = other DNA

SEQ ID NO: 34839 - DNA, 36 bp, synthetic construct; identical to SEQ ID NO: 24150
  misc_feature 1..36: note = Probe
  source 1..36: mol_type = other DNA

SEQ ID NO: 34840 - DNA, 37 bp, synthetic construct
  misc_feature 1..37: note = Probe
  source 1..37: mol_type = other DNA
tctgagggtccagggttcaagtccctgttcgggcgtc

SEQ ID NO: 34841 - DNA, 36 bp, synthetic construct
  misc_feature 1..36: note = Probe
  source 1..36: mol_type = other DNA
tctgataaaagagttactttgatagagtaaataata

SEQ ID NO: 34842 - DNA, 28 bp, synthetic construct
  misc_feature 1..28: note = Probe
  source 1..28: mol_type = other DNA
tctgattccggatcagaagattgagggt

SEQ ID NO: 34843 - DNA, 15 bp, synthetic construct
  misc_feature 1..15: note = Probe
  source 1..15: mol_type = other DNA
tctggactctgaatc

SEQ ID NO: 34844 - DNA, 16 bp, synthetic construct
  misc_feature 1..16: note = Probe
  source 1..16: mol_type = other DNA
tctggactctgaatcc

SEQ ID NO: 34845 - DNA, 27 bp, synthetic construct
  misc_feature 1..27: note = Probe
  source 1..27: mol_type = other DNA
tctggactctgaatccagcgatccgag

SEQ ID NO: 34846 - DNA, 30 bp, synthetic construct
  misc_feature 1..30: note = Probe
  source 1..30: mol_type = other DNA
tctggactctgaatccagcgatccgagttc

SEQ ID NO: 34847 - DNA, 15 bp, synthetic construct
  misc_feature 1..15: note = Probe
  source 1..15: mol_type = other DNA
tctggactttgaatc

SEQ ID NO: 34848 - DNA, 16 bp, synthetic construct
  misc_feature 1..16: note = Probe
  source 1..16: mol_type = other DNA
tctggactttgaatcc

SEQ ID NO: 34849 - DNA, 22 bp, synthetic construct
  misc_feature 1..22: note = Probe
  source 1..22: mol_type = other DNA
tctggtaaagaggagttgtttt

SEQ ID NO: 34850 - DNA, 29 bp, synthetic construct
  misc_feature 1..29: note = Probe
  source 1..29: mol_type = other DNA
tctgtagtgtagtggttatcacgttcgcc

SEQ ID NO: 34851 - DNA, 30 bp, synthetic construct; identical to SEQ ID NO: 24153
  misc_feature 1..30: note = Probe
  source 1..30: mol_type = other DNA

SEQ ID NO: 34852 - DNA, 24 bp, synthetic construct
  misc_feature 1..24: note = Probe
  source 1..24: mol_type = other DNA
tctgtgctccggagttacctcgtt

SEQ ID NO: 34853 - DNA, 30 bp, synthetic construct
  misc_feature 1..30: note = Probe
  source 1..30: mol_type = other DNA
tcttagctttgggtgctaatggtggagtta

SEQ ID NO: 34854 - DNA, 35 bp, synthetic construct
  misc_feature 1..35: note = Probe
  source 1..35: mol_type = other DNA
tcttagctttgggtgctaatggtggagttaaagac

SEQ ID NO: 34855 - DNA, 50 bp, synthetic construct; identical to SEQ ID NO: 8014
  misc_feature 1..50: note = Probe
  source 1..50: mol_type = other DNA

SEQ ID NO: 34856 - DNA, 31 bp, synthetic construct
  misc_feature 1..31: note = Probe
  source 1..31: mol_type = other DNA
tcttgcgacccgggttcgattcccgggcggc

SEQ ID NO: 34857 - DNA, 32 bp, synthetic construct; identical to SEQ ID NO: 24159
  misc_feature 1..32: note = Probe
  source 1..32: mol_type = other DNA

SEQ ID NO: 34858 - DNA, 16 bp, synthetic construct
  misc_feature 1..16: note = Probe
  source 1..16: mol_type = other DNA
tctttaactccaccat

SEQ ID NO: 34859 - DNA, 27 bp, synthetic construct
  misc_feature 1..27: note = Probe
  source 1..27: mol_type = other DNA
tcttttagtataaatagtaccgttaac

SEQ ID NO: 34860 - DNA, 28 bp, synthetic construct
  misc_feature 1..28: note = Probe
  source 1..28: mol_type = other DNA
tcttttagtataaatagtaccgttaact

SEQ ID NO: 34861 - DNA, 29 bp, synthetic construct
  misc_feature 1..29: note = Probe
  source 1..29: mol_type = other DNA
tcttttagtataaatagtaccgttaactt

SEQ ID NO: 34862 - DNA, 30 bp, synthetic construct; identical to SEQ ID NO: 24164
  misc_feature 1..30: note = Probe
  source 1..30: mol_type = other DNA

SEQ ID NO: 34863 - DNA, 31 bp, synthetic construct; identical to SEQ ID NO: 1727
  misc_feature 1..31: note = Probe
  source 1..31: mol_type = other DNA

SEQ ID NO: 34864 - DNA, 19 bp, synthetic construct
  misc_feature 1..19: note = Probe
  source 1..19: mol_type = other DNA
tgaaaaagtcatggaggcc

SEQ ID NO: 34865 - DNA, 25 bp, synthetic construct
  misc_feature 1..25: note = Probe
  source 1..25: mol_type = other DNA
tgaaaacaaaatactcaaatgggcc

SEQ ID NO: 34866 - DNA, 26 bp, synthetic construct
  misc_feature 1..26: note = Probe
  source 1..26: mol_type = other DNA
tgaaaacaaaatactcaaatgggcct

SEQ ID NO: 34867 - DNA, 23 bp, synthetic construct
  misc_feature 1..23: note = Probe
  source 1..23: mol_type = other DNA
tgaaaacctttttccaaggacaa

SEQ ID NO: 34868 - DNA, 20 bp, synthetic construct
  misc_feature 1..20: note = Probe
  source 1..20: mol_type = other DNA
tgaaaatgtttagacgggct

SEQ ID NO: 34869 - DNA, 21 bp, synthetic construct
  misc_feature 1..21: note = Probe
  source 1..21: mol_type = other DNA
tgaaaatgtttagacgggctc

SEQ ID NO: 34870 - DNA, 22 bp, synthetic construct
  misc_feature 1..22: note = Probe
  source 1..22: mol_type = other DNA
tgaaaatgtttagacgggctca

SEQ ID NO: 34871 - DNA, 23 bp, synthetic construct
  misc_feature 1..23: note = Probe
  source 1..23: mol_type = other DNA
tgaaaatgtttagacgggctcac

SEQ ID NO: 34872 - DNA, 24 bp, synthetic construct
  misc_feature 1..24: note = Probe
  source 1..24: mol_type = other DNA
tgaaaatgtttagacgggctcaca

SEQ ID NO: 34873 - DNA, 29 bp, synthetic construct
  misc_feature 1..29: note = Probe
  source 1..29: mol_type = other DNA
tgaaaatgtttagacgggctcacatcacc

SEQ ID NO: 34874 - DNA, 30 bp, synthetic construct
  misc_feature 1..30: note = Probe
  source 1..30: mol_type = other DNA
tgaaaatgtttagacgggctcacatcaccc

SEQ ID NO: 34875 - DNA, 36 bp, synthetic construct
  misc_feature 1..36: note = Probe
  source 1..36: mol_type = other DNA
tgaaatacaacgatggtttttcatatcattggtcgt

SEQ ID NO: 34876 - DNA, 50 bp, synthetic construct
  misc_feature 1..50: note = Probe
  source 1..50: mol_type = other DNA
tgaaatacaacgatggtttttcatatcattggtcgtggttgtagtccgtg

SEQ ID NO: 34877 - DNA, 36 bp, synthetic construct
  misc_feature 1..36: note = Probe
  source 1..36: mol_type = other DNA
tgaagagcccggatagctcagtcggtagagcatcag

SEQ ID NO: 34878 - DNA, 40 bp, synthetic construct
  misc_feature 1..40: note = Probe
  source 1..40: mol_type = other DNA
tgaagagcccggatagctcagtcggtagagcatcagactt

SEQ ID NO: 34879 - DNA, 41 bp, synthetic construct
  misc_feature 1..41: note = Probe
  source 1..41: mol_type = other DNA
tgaagagcccggatagctcagtcggtagagcatcagacttt

SEQ ID NO: 34880 - DNA, 16 bp, synthetic construct
  misc_feature 1..16: note = Probe
  source 1..16: mol_type = other DNA
tgaagcattggactgt

SEQ ID NO: 34881 - DNA, 17 bp, synthetic construct
  misc_feature 1..17: note = Probe
  source 1..17: mol_type = other DNA
tgaagcattggactgta

SEQ ID NO: 34882 - DNA, 18 bp, synthetic construct
  misc_feature 1..18: note = Probe
  source 1..18: mol_type = other DNA
tgaagcattggactgtaa

SEQ ID NO: 34883 - DNA, 19 bp, synthetic construct
  misc_feature 1..19: note = Probe
  source 1..19: mol_type = other DNA
tgaagcattggactgtaaa

SEQ ID NO: 34884 - DNA, 21 bp, synthetic construct
  misc_feature 1..21: note = Probe
  source 1..21: mol_type = other DNA
tgaagcattggactgtaaatc

SEQ ID NO: 34885 - DNA, 22 bp, synthetic construct
  misc_feature 1..22: note = Probe
  source 1..22: mol_type = other DNA
tgaagcattggactgtaaatct

SEQ ID NO: 34886 - DNA, 36 bp, synthetic construct
  misc_feature 1..36: note = Probe
  source 1..36: mol_type = other DNA
tgaagcattggactgtaaatctaaagacaggggtta

SEQ ID NO: 34887 - DNA, 28 bp, synthetic construct
  misc_feature 1..28: note = Probe
  source 1..28: mol_type = other DNA
tgaagccagttgattagggtgcttagct

SEQ ID NO: 34888 - DNA, 31 bp, synthetic construct
  misc_feature 1..31: note = Probe
  source 1..31: mol_type = other DNA
tgaagccagttgattagggtgcttagctgtt

SEQ ID NO: 34889 - DNA, 35 bp, synthetic construct
  misc_feature 1..35: note = Probe
  source 1..35: mol_type = other DNA
tgaagccagttgattagggtgcttagctgttaact

SEQ ID NO: 34890 - DNA, 36 bp, synthetic construct
  misc_feature 1..36: note = Probe
  source 1..36: mol_type = other DNA
tgaagccagttgattagggtgcttagctgttaacta

SEQ ID NO: 34891 - DNA, 33 bp, synthetic construct; identical to SEQ ID NO: 8023
  misc_feature 1..33: note = Probe
  source 1..33: mol_type = other DNA

SEQ ID NO: 34892 - DNA, 19 bp, synthetic construct
  misc_feature 1..19: note = Probe
  source 1..19: mol_type = other DNA
tgaatccagcaatccgagt

SEQ ID NO: 34893 - DNA, 16 bp, synthetic construct
  misc_feature 1..16: note = Probe
  source 1..16: mol_type = other DNA
tgaatccagcgatccg

SEQ ID NO: 34894 - DNA, 17 bp, synthetic construct
  misc_feature 1..17: note = Probe
  source 1..17: mol_type = other DNA
tgaatccagcgatccga

SEQ ID NO: 34895 - DNA, 21 bp, synthetic construct
  misc_feature 1..21: note = Probe
  source 1..21: mol_type = other DNA
tgaatccagcgatccgagttc

SEQ ID NO: 34896 - DNA, 22 bp, synthetic construct
  misc_feature 1..22: note = Probe
  source 1..22: mol_type = other DNA
tgaatccagcgatccgagttca

SEQ ID NO: 34897 - DNA, 27 bp, synthetic construct
  misc_feature 1..27: note = Probe
  source 1..27: mol_type = other DNA
tgaatctgacaacagaggcttacgacc

SEQ ID NO: 34898 - DNA, 33 bp, synthetic construct; identical to SEQ ID NO: 1737
  misc_feature 1..33: note = Probe
  source 1..33: mol_type = other DNA

SEQ ID NO: 34899 - DNA, 35 bp, synthetic construct; identical to SEQ ID NO: 1739
  misc_feature 1..35: note = Probe
  source 1..35: mol_type = other DNA

SEQ ID NO: 34900 - DNA, 38 bp, synthetic construct; identical to SEQ ID NO: 1742
  misc_feature 1..38: note = Probe
  source 1..38: mol_type = other DNA

SEQ ID NO: 34901 - DNA, 39 bp, synthetic construct; identical to SEQ ID NO: 8042
  misc_feature 1..39: note = Probe
  source 1..39: mol_type = other DNA

SEQ ID NO: 34902 - DNA, 40 bp, synthetic construct; identical to SEQ ID NO: 8043
  misc_feature 1..40: note = Probe
  source 1..40: mol_type = other DNA

SEQ ID NO: 34903 - DNA, 36 bp, synthetic construct
  misc_feature 1..36: note = Probe
  source 1..36: mol_type = other DNA
tgaattgcaaattcgaagaagcagcttcaaacctgc

SEQ ID NO: 34904 - DNA, 21 bp, synthetic construct
  misc_feature 1..21: note = Probe
  source 1..21: mol_type = other DNA
tgacaacagaggcttacgacc

SEQ ID NO: 34905 - DNA, 22 bp, synthetic construct
  misc_feature 1..22: note = Probe
  source 1..22: mol_type = other DNA
tgacaacagaggcttacgaccc

SEQ ID NO: 34906 - DNA, 18 bp, synthetic construct
  misc_feature 1..18: note = Probe
  source 1..18: mol_type = other DNA
tgacagtgcgagcggagc

SEQ ID NO: 34907 - DNA, 19 bp, synthetic construct
  misc_feature 1..19: note = Probe
  source 1..19: mol_type = other DNA
tgacagtgcgagcggagca

SEQ ID NO: 34908 - DNA, 15 bp, synthetic construct
  misc_feature 1..15: note = Probe
  source 1..15: mol_type = other DNA
tgaccgctctgagct

SEQ ID NO: 34909 - DNA, 20 bp, synthetic construct
  misc_feature 1..20: note = Probe
  source 1..20: mol_type = other DNA
tgaccgctctgagctaaacc

SEQ ID NO: 34910 - DNA, 21 bp, synthetic construct
  misc_feature 1..21: note = Probe
  source 1..21: mol_type = other DNA
tgaccgctctgagctaaacct

SEQ ID NO: 34911 - DNA, 25 bp, synthetic construct
  misc_feature 1..25: note = Probe
  source 1..25: mol_type = other DNA
tgaccgctctgagctaaacctagcc

SEQ ID NO: 34912 - DNA, 26 bp, synthetic construct
  misc_feature 1..26: note = Probe
  source 1..26: mol_type = other DNA
tgaccgctctgagctaaacctagccc

SEQ ID NO: 34913 - DNA, 27 bp, synthetic construct
  misc_feature 1..27: note = Probe
  source 1..27: mol_type = other DNA
tgaccgctctgagctaaacctagcccc

SEQ ID NO: 34914 - DNA, 28 bp, synthetic construct
  misc_feature 1..28: note = Probe
  source 1..28: mol_type = other DNA
tgaccgctctgagctaaacctagcccca

SEQ ID NO: 34915 - DNA, 32 bp, synthetic construct
  misc_feature 1..32: note = Probe
  source 1..32: mol_type = other DNA
tgaccgctctgagctaaacctagccccaaacc

SEQ ID NO: 34916 - DNA, 36 bp, synthetic construct
  misc_feature 1..36: note = Probe
  source 1..36: mol_type = other DNA
tgaccgctctgagctaaacctagccccaaacccact

SEQ ID NO: 34917 - DNA, 25 bp, synthetic construct
  misc_feature 1..25: note = Probe
  source 1..25: mol_type = other DNA
tgactgcagatcaagaggtccccgg

SEQ ID NO: 34918 - DNA, 27 bp, synthetic construct
  misc_feature 1..27: note = Probe
  source 1..27: mol_type = other DNA
tgactgcagatcaagaggtccccggtt

SEQ ID NO: 34919 - DNA, 15 bp, synthetic construct
  misc_feature 1..15: note = Probe
  source 1..15: mol_type = other DNA
tgactggacctttct

SEQ ID NO: 34920 - DNA, 17 bp, synthetic construct
  misc_feature 1..17: note = Probe
  source 1..17: mol_type = other DNA
tgactggacctttcttt

SEQ ID NO: 34921 - DNA, 18 bp, synthetic construct
  misc_feature 1..18: note = Probe
  source 1..18: mol_type = other DNA
tgactggacctttctttt

SEQ ID NO: 34922 - DNA, 26 bp, synthetic construct
  misc_feature 1..26: note = Probe
  source 1..26: mol_type = other DNA
tgacttcggatcagaagattgagggt

SEQ ID NO: 34923 - DNA, 27 bp, synthetic construct
  misc_feature 1..27: note = Probe
  source 1..27: mol_type = other DNA
tgacttcggatcagaagattgagggtt

SEQ ID NO: 34924 - DNA, 27 bp, synthetic construct
  misc_feature 1..27: note = Probe
  source 1..27: mol_type = other DNA
tgacttcggatcagaagattgcaggtt

SEQ ID NO: 34925 - DNA, 24 bp, synthetic construct
  misc_feature 1..24: note = Probe
  source 1..24: mol_type = other DNA
tgagaatcgaacccatccctgaga

SEQ ID NO: 34926 - DNA, 17 bp, synthetic construct
  misc_feature 1..17: note = Probe
  source 1..17: mol_type = other DNA
tgagagcgctcggtttt

SEQ ID NO: 34927 - DNA, 28 bp, synthetic construct
  misc_feature 1..28: note = Probe
  source 1..28: mol_type = other DNA
tgagatactgactagtctggtgttattt

SEQ ID NO: 34928 - DNA, 20 bp, synthetic construct
  misc_feature 1..20: note = Probe
  source 1..20: mol_type = other DNA
tgagatgttacctagcgttt

SEQ ID NO: 34929 - DNA, 36 bp, synthetic construct
  misc_feature 1..36: note = Probe
  source 1..36: mol_type = other DNA
tgagcactctggactctgaatccagcgatccgagtt

SEQ ID NO: 34930 - DNA, 29 bp, synthetic construct
  misc_feature 1..29: note = Probe
  source 1..29: mol_type = other DNA
tgagcccggatagctcagtcggtagagca

SEQ ID NO: 34931 - DNA, 31 bp, synthetic construct
  misc_feature 1..31: note = Probe
  source 1..31: mol_type = other DNA
tgagcccggatagctcagtcggtagagcatc

SEQ ID NO: 34932 - DNA, 36 bp, synthetic construct
  misc_feature 1..36: note = Probe
  source 1..36: mol_type = other DNA
tgagcccggatagctcagtcggtagagcatcagact

SEQ ID NO: 34933 - DNA, 38 bp, synthetic construct
  misc_feature 1..38: note = Probe
  source 1..38: mol_type = other DNA
tgagcccggatagctcagtcggtagagcatcagacttt

SEQ ID NO: 34934 - DNA, 27 bp, synthetic construct
  misc_feature 1..27: note = Probe
  source 1..27: mol_type = other DNA
tgaggacaatggcacggcaaggggagt

SEQ ID NO: 34935 - DNA, 33 bp, synthetic construct; identical to SEQ ID NO: 8066
  misc_feature 1..33: note = Probe
  source 1..33: mol_type = other DNA

SEQ ID NO: 34936 - DNA, 36 bp, synthetic construct; identical to SEQ ID NO: 24212
  misc_feature 1..36: note = Probe
  source 1..36: mol_type = other DNA

SEQ ID NO: 34937 - DNA, 16 bp, synthetic construct
  misc_feature 1..16: note = Probe
  source 1..16: mol_type = other DNA
tgaggtttttctgttt

SEQ ID NO: 34938 - DNA, 17 bp, synthetic construct
  misc_feature 1..17: note = Probe
  source 1..17: mol_type = other DNA
tgagtatccccgcctgt

SEQ ID NO: 34939 - DNA, 18 bp, synthetic construct
  misc_feature 1..18: note = Probe
  source 1..18: mol_type = other DNA
tgagtatccccgcctgtc

SEQ ID NO: 34940 - DNA, 17 bp, synthetic construct
  misc_feature 1..17: note = Probe
  source 1..17: mol_type = other DNA
tgagtgaagcattggac

SEQ ID NO: 34941 - DNA, 18 bp, synthetic construct
  misc_feature 1..18: note = Probe
  source 1..18: mol_type = other DNA
tgagtgaagcattggact

SEQ ID NO: 34942 - DNA, 19 bp, synthetic construct
  misc_feature 1..19: note = Probe
  source 1..19: mol_type = other DNA
tgagtgaagcattggactg

SEQ ID NO: 34943 - DNA, 20 bp, synthetic construct
  misc_feature 1..20: note = Probe
  source 1..20: mol_type = other DNA
tgagtgaagcattggactgt

SEQ ID NO: 34944 - DNA, 21 bp, synthetic construct
  misc_feature 1..21: note = Probe
  source 1..21: mol_type = other DNA
tgagtgaagcattggactgta

SEQ ID NO: 34945 - DNA, 22 bp, synthetic construct
  misc_feature 1..22: note = Probe
  source 1..22: mol_type = other DNA
tgagtgaagcattggactgtaa

SEQ ID NO: 34946 - DNA, 23 bp, synthetic construct
  misc_feature 1..23: note = Probe
  source 1..23: mol_type = other DNA
tgagtgaagcattggactgtaaa

SEQ ID NO: 34947 - DNA, 24 bp, synthetic construct
  misc_feature 1..24: note = Probe
  source 1..24: mol_type = other DNA
tgagtgaagcattggactgtaaat

SEQ ID NO: 34948 - DNA, 25 bp, synthetic construct
  misc_feature 1..25: note = Probe
  source 1..25: mol_type = other DNA
tgagtgaagcattggactgtaaatc

SEQ ID NO: 34949 - DNA, 26 bp, synthetic construct
  misc_feature 1..26: note = Probe
  source 1..26: mol_type = other DNA
tgagtgaagcattggactgtaaatct

SEQ ID NO: 34950 - DNA, 27 bp, synthetic construct
  misc_feature 1..27: note = Probe
  source 1..27: mol_type = other DNA
tgagtgaagcattggactgtaaatcta

SEQ ID NO: 34951 - DNA, 28 bp, synthetic construct
  misc_feature 1..28: note = Probe
  source 1..28: mol_type = other DNA
tgagtgaagcattggactgtaaatctaa

SEQ ID NO: 34952 - DNA, 29 bp, synthetic construct
  misc_feature 1..29: note = Probe
  source 1..29: mol_type = other DNA
tgagtgaagcattggactgtaaatctaaa

SEQ ID NO: 34953 - DNA, 36 bp, synthetic construct
  misc_feature 1..36: note = Probe
  source 1..36: mol_type = other DNA
tgagtgaagcattggactgtaaatctaaagacaggg

SEQ ID NO: 34954 - DNA, 36 bp, synthetic construct
  misc_feature 1..36: note = Probe
  source 1..36: mol_type = other DNA
tgataaaagagttactttgatagagtaaataatagg

SEQ ID NO: 34955 - DNA, 40 bp, synthetic construct
  misc_feature 1..40: note = Probe
  source 1..40: mol_type = other DNA
tgataaaagagttactttgatagagtaaataataggagct

SEQ ID NO: 34956 - DNA, 23 bp, synthetic construct
  misc_feature 1..23: note = Probe
  source 1..23: mol_type = other DNA
tgatagagtaaataataggagct

SEQ ID NO: 34957 - DNA, 30 bp, synthetic construct
  misc_feature 1..30: note = Probe
  source 1..30: mol_type = other DNA
tgatagagtaaataataggagcttaaaccc

SEQ ID NO: 34958 - DNA, 29 bp, synthetic construct
  misc_feature 1..29: note = Probe
  source 1..29: mol_type = other DNA
tgatcgtatagtggttagtactctgcgtt

SEQ ID NO: 34959 - DNA, 21 bp, synthetic construct
  misc_feature 1..21: note = Probe
  source 1..21: mol_type = other DNA
tgatgccgaggttgtgagttc

SEQ ID NO: 34960 - DNA, 29 bp, synthetic construct
  misc_feature 1..29: note = Probe
  source 1..29: mol_type = other DNA
tgatgtatgctttgtttctgttgagtgtg

SEQ ID NO: 34961 - DNA, 25 bp, synthetic construct
  misc_feature 1..25: note = Probe
  source 1..25: mol_type = other DNA
tgattagggtgcttagctgttaact

SEQ ID NO: 34962 - DNA, 36 bp, synthetic construct
  misc_feature 1..36: note = Probe
  source 1..36: mol_type = other DNA
tgattagggtgcttagctgttaactaagtgtttgtg

SEQ ID NO: 34963 - DNA, 26 bp, synthetic construct
  misc_feature 1..26: note = Probe
  source 1..26: mol_type = other DNA
tgattccggatcagaagattgagggt

SEQ ID NO: 34964 - DNA, 19 bp, synthetic construct
  misc_feature 1..19: note = Probe
  source 1..19: mol_type = other DNA
tgattctcgcttagggtgc

SEQ ID NO: 34965 - DNA, 33 bp, synthetic construct
  misc_feature 1..33: note = Probe
  source 1..33: mol_type = other DNA
tgattctcgcttagggtgcgagaggtcccgggt

SEQ ID NO: 34966 - DNA, 19 bp, synthetic construct
  misc_feature 1..19: note = Probe
  source 1..19: mol_type = other DNA
tgattctcgcttcgggtgc

SEQ ID NO: 34967 - DNA, 33 bp, synthetic construct
  misc_feature 1..33: note = Probe
  source 1..33: mol_type = other DNA
tgattctcgcttcgggtgcgagaggtcccgggt

SEQ ID NO: 34968 - DNA, 19 bp, synthetic construct
  misc_feature 1..19: note = Probe
  source 1..19: mol_type = other DNA
tgattctcgctttgggtgc

SEQ ID NO: 34969 - DNA, 33 bp, synthetic construct
  misc_feature 1..33: note = Probe
  source 1..33: mol_type = other DNA
tgattctcgctttgggtgcgagaggtcccgggt

SEQ ID NO: 34970 - DNA, 19 bp, synthetic construct
  misc_feature 1..19: note = Probe
  source 1..19: mol_type = other DNA
tgattctcggtttgggtcc

SEQ ID NO: 34971 - DNA, 36 bp, synthetic construct
  misc_feature 1..36: note = Probe
  source 1..36: mol_type = other DNA
tgatttcgactcattaaattatgataatcatattta

SEQ ID NO: 34972 - DNA, 16 bp, synthetic construct
  misc_feature 1..16: note = Probe
  source 1..16: mol_type = other DNA
tgcaaaaccccactct

SEQ ID NO: 34973 - DNA, 36 bp, synthetic construct; identical to SEQ ID NO: 8078
  misc_feature 1..36: note = Probe
  source 1..36: mol_type = other DNA

SEQ ID NO: 34974 - DNA, 21 bp, synthetic construct
  misc_feature 1..21: note = Probe
  source 1..21: mol_type = other DNA
tgcacactactataaccaccc

SEQ ID NO: 34975 - DNA, 23 bp, synthetic construct
  misc_feature 1..23: note = Probe
  source 1..23: mol_type = other DNA
tgcacactactataaccacccta

SEQ ID NO: 34976 - DNA, 17 bp, synthetic construct
  misc_feature 1..17: note = Probe
  source 1..17: mol_type = other DNA
tgcacgaggccccgggt

SEQ ID NO: 34977 - DNA, 36 bp, synthetic construct; identical to SEQ ID NO: 14380
  misc_feature 1..36: note = Probe
  source 1..36: mol_type = other DNA

SEQ ID NO: 34978 - DNA, 15 bp, synthetic construct
  misc_feature 1..15: note = Probe
  source 1..15: mol_type = other DNA
tgcacttggacgaac

SEQ ID NO: 34979 - DNA, 16 bp, synthetic construct
  misc_feature 1..16: note = Probe
  source 1..16: mol_type = other DNA
tgcacttggacgaacc

SEQ ID NO: 34980 - DNA, 17 bp, synthetic construct
  misc_feature 1..17: note = Probe
  source 1..17: mol_type = other DNA
tgcacttggacgaacca

SEQ ID NO: 34981 - DNA, 22 bp, synthetic construct
  misc_feature 1..22: note = Probe
  source 1..22: mol_type = other DNA
tgcagcgcaagtaggtctacaa

SEQ ID NO: 34982 - DNA, 36 bp, synthetic construct; identical to SEQ ID NO: 24248
  misc_feature 1..36: note = Probe
  source 1..36: mol_type = other DNA

SEQ ID NO: 34983 - DNA, 33 bp, synthetic construct; identical to SEQ ID NO: 8089
  misc_feature 1..33: note = Probe
  source 1..33: mol_type = other DNA

SEQ ID NO: 34984 - DNA, 36 bp, synthetic construct
  misc_feature 1..36: note = Probe
  source 1..36: mol_type = other DNA
tgccacgcgggaggcccgggttcgattcccggccaa

SEQ ID NO: 34985 - DNA, 16 bp, synthetic construct
  misc_feature 1..16: note = Probe
  source 1..16: mol_type = other DNA
tgcccccatgtctaac

SEQ ID NO: 34986 - DNA, 29 bp, synthetic construct
  misc_feature 1..29: note = Probe
  source 1..29: mol_type = other DNA
tgcccccatgtctaacaacatggctttct

SEQ ID NO: 34987 - DNA, 31 bp, synthetic construct; identical to SEQ ID NO: 8104
  misc_feature 1..31: note = Probe
  source 1..31: mol_type = other DNA

SEQ ID NO: 34988 - DNA, 33 bp, synthetic construct; identical to SEQ ID NO: 8106
  misc_feature 1..33: note = Probe
  source 1..33: mol_type = other DNA

SEQ ID NO: 34989 - DNA, 15 bp, synthetic construct
  misc_feature 1..15: note = Probe
  source 1..15: mol_type = other DNA
tgcccctcatttaca

SEQ ID NO: 34990 - DNA, 16 bp, synthetic construct
  misc_feature 1..16: note = Probe
  source 1..16: mol_type = other DNA
tgcccctcatttacat

SEQ ID NO: 34991 - DNA, 17 bp, synthetic construct
  misc_feature 1..17: note = Probe
  source 1..17: mol_type = other DNA
tgcccctcatttacata

SEQ ID NO: 34992 - DNA, 28 bp, synthetic construct
  misc_feature 1..28: note = Probe
  source 1..28: mol_type = other DNA
tgcccctcatttacataaatattatact

SEQ ID NO: 34993 - DNA, 29 bp, synthetic construct
  misc_feature 1..29: note = Probe
  source 1..29: mol_type = other DNA
tgcccctcatttacataaatattatacta

SEQ ID NO: 34994 - DNA, 16 bp, synthetic construct
  misc_feature 1..16: note = Probe
  source 1..16: mol_type = other DNA
tgcccgcatcctccac

SEQ ID NO: 34995 - DNA, 17 bp, synthetic construct
  misc_feature 1..17: note = Probe
  source 1..17: mol_type = other DNA
tgcccgcatcctccact

SEQ ID NO: 34996 - DNA, 34 bp, synthetic construct; identical to SEQ ID NO: 8109
  misc_feature 1..34: note = Probe
  source 1..34: mol_type = other DNA

SEQ ID NO: 34997 - DNA, 35 bp, synthetic construct
  misc_feature 1..35: note = Probe
  source 1..35: mol_type = other DNA
tgcccggctagctcagtcggtagagcatgagactc

SEQ ID NO: 34998 - DNA, 36 bp, synthetic construct
  misc_feature 1..36: note = Probe
  source 1..36: mol_type = other DNA
tgcccggctagctcagtcggtagagcatgagactct

SEQ ID NO: 34999 - DNA, 37 bp, synthetic construct
  misc_feature 1..37: note = Probe
  source 1..37: mol_type = other DNA
tgcccggctagctcagtcggtagagcatgagactctt

SEQ ID NO: 35000 - DNA, 34 bp, synthetic construct; identical to SEQ ID NO: 8110
  misc_feature 1..34: note = Probe
  source 1..34: mol_type = other DNA

SEQ ID NO: 35001 - DNA, 36 bp, synthetic construct
  misc_feature 1..36: note = Probe
  source 1..36: mol_type = other DNA
tgcccggctagctcagtcggtagagcatgggactct

SEQ ID NO: 35002 - DNA, 36 bp, synthetic construct
  misc_feature 1..36: note = Probe
  source 1..36: mol_type = other DNA
tgccgaggttgtgagttcgagcctcacctggagcaa

SEQ ID NO: 35003 - DNA, 15 bp, synthetic construct
  misc_feature 1..15: note = Probe
  source 1..15: mol_type = other DNA
tgccgtgatcgtata

SEQ ID NO: 35004 - DNA, 16 bp, synthetic construct
  misc_feature 1..16: note = Probe
  source 1..16: mol_type = other DNA
tgccgtgatcgtatag

SEQ ID NO: 35005 - DNA, 22 bp, synthetic construct
  misc_feature 1..22: note = Probe
  source 1..22: mol_type = other DNA
tgccgtgatcgtatagtggtta

SEQ ID NO: 35006 - DNA, 24 bp, synthetic construct
  misc_feature 1..24: note = Probe
  source 1..24: mol_type = other DNA
tgccgtgatcgtatagtggttagt

SEQ ID NO: 35007 - DNA, 25 bp, synthetic construct
  misc_feature 1..25: note = Probe
  source 1..25: mol_type = other DNA
tgccgtgatcgtatagtggttagta

SEQ ID NO: 35008 - DNA, 26 bp, synthetic construct
  misc_feature 1..26: note = Probe
  source 1..26: mol_type = other DNA
tgccgtgatcgtatagtggttagtac

SEQ ID NO: 35009 - DNA, 27 bp, synthetic construct
  misc_feature 1..27: note = Probe
  source 1..27: mol_type = other DNA
tgccgtgatcgtatagtggttagtact

SEQ ID NO: 35010 - DNA, 28 bp, synthetic construct
  misc_feature 1..28: note = Probe
  source 1..28: mol_type = other DNA
tgccgtgatcgtatagtggttagtactc

SEQ ID NO: 35011 - DNA, 29 bp, synthetic construct
  misc_feature 1..29: note = Probe
  source 1..29: mol_type = other DNA
tgccgtgatcgtatagtggttagtactct

SEQ ID NO: 35012 - DNA, 30 bp, synthetic construct; identical to SEQ ID NO: 12089
  misc_feature 1..30: note = Probe
  source 1..30: mol_type = other DNA

SEQ ID NO: 35013 - DNA, 31 bp, synthetic construct; identical to SEQ ID NO: 8115
  misc_feature 1..31: note = Probe
  source 1..31: mol_type = other DNA

SEQ ID NO: 35014 - DNA, 32 bp, synthetic construct; identical to SEQ ID NO: 8116
  misc_feature 1..32: note = Probe
  source 1..32: mol_type = other DNA

SEQ ID NO: 35015 - DNA, 33 bp, synthetic construct; identical to SEQ ID NO: 1754
  misc_feature 1..33: note = Probe
  source 1..33: mol_type = other DNA

SEQ ID NO: 35016 - DNA, 34 bp, synthetic construct; identical to SEQ ID NO: 8117
  misc_feature 1..34: note = Probe
  source 1..34: mol_type = other DNA

SEQ ID NO: 35017 - DNA, 35 bp, synthetic construct; identical to SEQ ID NO: 1755
  misc_feature 1..35: note = Probe
  source 1..35: mol_type = other DNA

SEQ ID NO: 35018 - DNA, 36 bp, synthetic construct; identical to SEQ ID NO: 1756
  misc_feature 1..36: note = Probe
  source 1..36: mol_type = other DNA

SEQ ID NO: 35019 - DNA, 37 bp, synthetic construct; identical to SEQ ID NO: 1757
  misc_feature 1..37: note = Probe
  source 1..37: mol_type = other DNA

SEQ ID NO: 35020 - DNA, 40 bp, synthetic construct; identical to SEQ ID NO: 24303
  misc_feature 1..40: note = Probe
  source 1..40: mol_type = other DNA

SEQ ID NO: 35021 - DNA, 50 bp, synthetic construct
  misc_feature 1..50: note = Probe
  source 1..50: mol_type = other DNA
tgccgtgatcgtatagtggttagtactctgcgttgtggccgcagcaacct

SEQ ID NO: 35022 - DNA, 30 bp, synthetic construct; identical to SEQ ID NO: 24306
  misc_feature 1..30: note = Probe
  source 1..30: mol_type = other DNA

SEQ ID NO: 35023 - DNA, 36 bp, synthetic construct; identical to SEQ ID NO: 24311
  misc_feature 1..36: note = Probe
  source 1..36: mol_type = other DNA

SEQ ID NO: 35024 - DNA, 15 bp, synthetic construct
  misc_feature 1..15: note = Probe
  source 1..15: mol_type = other DNA
tgcggtaccactttt

SEQ ID NO: 35025 - DNA, 16 bp, synthetic construct
  misc_feature 1..16: note = Probe
  source 1..16: mol_type = other DNA
tgcggtaccacttttg

SEQ ID NO: 35026 - DNA, 17 bp, synthetic construct
  misc_feature 1..17: note = Probe
  source 1..17: mol_type = other DNA
tgctaactcatgccccc

SEQ ID NO: 35027 - DNA, 23 bp, synthetic construct
  misc_feature 1..23: note = Probe
  source 1..23: mol_type = other DNA
tgctaactcatgcccccatgtct

SEQ ID NO: 35028 - DNA, 27 bp, synthetic construct
  misc_feature 1..27: note = Probe
  source 1..27: mol_type = other DNA
tgctaactcatgcccccatgtctaaca

SEQ ID NO: 35029 - DNA, 30 bp, synthetic construct
  misc_feature 1..30: note = Probe
  source 1..30: mol_type = other DNA
tgctaactcatgcccccatgtctaacaaca

SEQ ID NO: 35030 - DNA, 36 bp, synthetic construct; identical to SEQ ID NO: 8127
  misc_feature 1..36: note = Probe
  source 1..36: mol_type = other DNA

SEQ ID NO: 35031 - DNA, 44 bp, synthetic construct; identical to SEQ ID NO: 8134
  misc_feature 1..44: note = Probe
  source 1..44: mol_type = other DNA

SEQ ID NO: 35032 - DNA, 17 bp, synthetic construct
  misc_feature 1..17: note = Probe
  source 1..17: mol_type = other DNA
tgctaatccattgtgct

SEQ ID NO: 35033 - DNA, 16 bp, synthetic construct
  misc_feature 1..16: note = Probe
  source 1..16: mol_type = other DNA
tgctaatggtggagtt

SEQ ID NO: 35034 - DNA, 17 bp, synthetic construct
  misc_feature 1..17: note = Probe
  source 1..17: mol_type = other DNA
tgctaatggtggagtta

SEQ ID NO: 35035 - DNA, 34 bp, synthetic construct
  misc_feature 1..34: note = Probe
  source 1..34: mol_type = other DNA
tgctaatggtggagttaaagactttttctctgat

SEQ ID NO: 35036 - DNA, 15 bp, synthetic construct
  misc_feature 1..15: note = Probe
  source 1..15: mol_type = other DNA
tgctatcggagtttt

SEQ ID NO: 35037 - DNA, 16 bp, synthetic construct
  misc_feature 1..16: note = Probe
  source 1..16: mol_type = other DNA
tgctatcggagttttt

SEQ ID NO: 35038 - DNA, 17 bp, synthetic construct
  misc_feature 1..17: note = Probe
  source 1..17: mol_type = other DNA
tgctatcggagtttttt

SEQ ID NO: 35039 - DNA, 19 bp, synthetic construct
  misc_feature 1..19: note = Probe
  source 1..19: mol_type = other DNA
tgctatcggagttttttca

SEQ ID NO: 35040 - DNA, 22 bp, synthetic construct
  misc_feature 1..22: note = Probe
  source 1..22: mol_type = other DNA
tgctcacagcgtcactagtttt

SEQ ID NO: 35041 - DNA, 26 bp, synthetic construct
  misc_feature 1..26: note = Probe
  source 1..26: mol_type = other DNA
tgctttgcacgtatgaggccccgggt

SEQ ID NO: 35042 - DNA, 27 bp, synthetic construct
  misc_feature 1..27: note = Probe
  source 1..27: mol_type = other DNA
tgctttgcacgtatgaggccccgggtt

SEQ ID NO: 35043 - DNA, 18 bp, synthetic construct
  misc_feature 1..18: note = Probe
  source 1..18: mol_type = other DNA
tggaaagtgcacttggac

SEQ ID NO: 35044 - DNA, 36 bp, synthetic construct
  misc_feature 1..36: note = Probe
  source 1..36: mol_type = other DNA
tggacgaaccagagtgtagcttaacacaaagcaccc

SEQ ID NO: 35045 - DNA, 36 bp, synthetic construct
  misc_feature 1..36: note = Probe
  source 1..36: mol_type = other DNA
tggactgtaaatctaaagacaggggttaggcctctt

SEQ ID NO: 35046 - DNA, 27 bp, synthetic construct
  misc_feature 1..27: note = Probe
  source 1..27: mol_type = other DNA
tggactttgaatccagcgatccgagtt

SEQ ID NO: 35047 - DNA, 36 bp, synthetic construct
  misc_feature 1..36: note = Probe
  source 1..36: mol_type = other DNA
tggaggcgtgggttcgaatcccactcctgacagttc

SEQ ID NO: 35048 - DNA, 18 bp, synthetic construct
  misc_feature 1..18: note = Probe
  source 1..18: mol_type = other DNA
tggataacgcgtctgact

SEQ ID NO: 35049 - DNA, 16 bp, synthetic construct
  misc_feature 1..16: note = Probe
  source 1..16: mol_type = other DNA
tggataaggcactggc

SEQ ID NO: 35050 - DNA, 16 bp, synthetic construct
  misc_feature 1..16: note = Probe
  source 1..16: mol_type = other DNA
tggataaggcattggc

SEQ ID NO: 35051 - DNA, 15 bp, synthetic construct
  misc_feature 1..15: note = Probe
  source 1..15: mol_type = other DNA
tggataaggcgtctg

SEQ ID NO: 35052 - DNA, 17 bp, synthetic construct
  misc_feature 1..17: note = Probe
  source 1..17: mol_type = other DNA
tggataaggcgtctgac

SEQ ID NO: 35053 - DNA, 18 bp, synthetic construct
  misc_feature 1..18: note = Probe
  source 1..18: mol_type = other DNA
tggataaggcgtctgact

SEQ ID NO: 35054 - DNA, 17 bp, synthetic construct
  misc_feature 1..17: note = Probe
  source 1..17: mol_type = other DNA
tggataaggcgtctgat

SEQ ID NO: 35055 - DNA, 18 bp, synthetic construct
  misc_feature 1..18: note = Probe
  source 1..18: mol_type = other DNA
tggataaggcgtctgatt

SEQ ID NO: 35056 - DNA, 20 bp, synthetic construct
  misc_feature 1..20: note = Probe
  source 1..20: mol_type = other DNA
tggataaggcgtctgattcc

SEQ ID NO: 35057 - DNA, 16 bp, synthetic construct
  misc_feature 1..16: note = Probe
  source 1..16: mol_type = other DNA
tggatagcgcattgga

SEQ ID NO: 35058 - DNA, 17 bp, synthetic construct
  misc_feature 1..17: note = Probe
  source 1..17: mol_type = other DNA
tggatagcgcattggac

SEQ ID NO: 35059 - DNA, 15 bp, synthetic construct
  misc_feature 1..15: note = Probe
  source 1..15: mol_type = other DNA
tggatagggcgtggc

SEQ ID NO: 35060 - DNA, 16 bp, synthetic construct
  misc_feature 1..16: note = Probe
  source 1..16: mol_type = other DNA
tggatagggcgtggca

SEQ ID NO: 35061 - DNA, 29 bp, synthetic construct
  misc_feature 1..29: note = Probe
  source 1..29: mol_type = other DNA
tggatgccatagtggggcccttcacttac

SEQ ID NO: 35062 - DNA, 18 bp, synthetic construct
  misc_feature 1..18: note = Probe
  source 1..18: mol_type = other DNA
tggcacggcaaggggctc

SEQ ID NO: 35063 - DNA, 20 bp, synthetic construct
  misc_feature 1..20: note = Probe
  source 1..20: mol_type = other DNA
tggcagtatgtgtgcgagtg

SEQ ID NO: 35064 - DNA, 21 bp, synthetic construct
  misc_feature 1..21: note = Probe
  source 1..21: mol_type = other DNA
tggccaacctcctactcctca

SEQ ID NO: 35065 - DNA, 20 bp, synthetic construct
  misc_feature 1..20: note = Probe
  source 1..20: mol_type = other DNA
tggcccaacccgtcatctac

SEQ ID NO: 35066 - DNA, 23 bp, synthetic construct
  misc_feature 1..23: note = Probe
  source 1..23: mol_type = other DNA
tggccgagcggtctaaggcgctg

SEQ ID NO: 35067 - DNA, 24 bp, synthetic construct
  misc_feature 1..24: note = Probe
  source 1..24: mol_type = other DNA
tggccgagcggtctaaggcgctgc

SEQ ID NO: 35068 - DNA, 22 bp, synthetic construct
  misc_feature 1..22: note = Probe
  source 1..22: mol_type = other DNA
tggccgcagcaacctcggttcg

SEQ ID NO: 35069 - DNA, 27 bp, synthetic construct
  misc_feature 1..27: note = Probe
  source 1..27: mol_type = other DNA
tggccgcccggctagctcagtcggtag

SEQ ID NO: 35070 - DNA, 28 bp, synthetic construct
  misc_feature 1..28: note = Probe
  source 1..28: mol_type = other DNA
tggccgcccggctagctcagtcggtaga

SEQ ID NO: 35071 - DNA, 29 bp, synthetic construct
  misc_feature 1..29: note = Probe
  source 1..29: mol_type = other DNA
tggccgcccggctagctcagtcggtagag

SEQ ID NO: 35072 - DNA, 31 bp, synthetic construct; identical to SEQ ID NO: 24349
  misc_feature 1..31: note = Probe
  source 1..31: mol_type = other DNA

SEQ ID NO: 35073 - DNA, 36 bp, synthetic construct
  misc_feature 1..36: note = Probe
  source 1..36: mol_type = other DNA
tggccgcccggctagctcagtcggtagagcatgaga

SEQ ID NO: 35074 - DNA, 19 bp, synthetic construct
  misc_feature 1..19: note = Probe
  source 1..19: mol_type = other DNA
tggcctccatgactttttc

SEQ ID NO: 35075 - DNA, 20 bp, synthetic construct
  misc_feature 1..20: note = Probe
  source 1..20: mol_type = other DNA
tggcctccatgactttttca

SEQ ID NO: 35076 - DNA, 22 bp, synthetic construct
  misc_feature 1..22: note = Probe
  source 1..22: mol_type = other DNA
tggcctccatgactttttcaaa

SEQ ID NO: 35077 - DNA, 27 bp, synthetic construct
  misc_feature 1..27: note = Probe
  source 1..27: mol_type = other DNA
tggcctcctaagccagggattgtgggt

SEQ ID NO: 35078 - DNA, 15 bp, synthetic construct
  misc_feature 1..15: note = Probe
  source 1..15: mol_type = other DNA
tggcctgtgactttt

SEQ ID NO: 35079 - DNA, 15 bp, synthetic construct
  misc_feature 1..15: note = Probe
  source 1..15: mol_type = other DNA
tggctaggattcggc

SEQ ID NO: 35080 - DNA, 16 bp, synthetic construct
  misc_feature 1..16: note = Probe
  source 1..16: mol_type = other DNA
tggctaggattcggcg

SEQ ID NO: 35081 - DNA, 27 bp, synthetic construct
  misc_feature 1..27: note = Probe
  source 1..27: mol_type = other DNA
tggctaggattcggcgctttcaccgcc

SEQ ID NO: 35082 - DNA, 36 bp, synthetic construct
  misc_feature 1..36: note = Probe
  source 1..36: mol_type = other DNA
tggctccgtggcgcaatggatagcgcattggacttc

SEQ ID NO: 35083 - DNA, 50 bp, synthetic construct
  misc_feature 1..50: note = Probe
  source 1..50: mol_type = other DNA
tggctccgtggcgcaatggatagcgcattggacttctagaggctgaaggc

SEQ ID NO: 35084 - DNA, 21 bp, synthetic construct
  misc_feature 1..21: note = Probe
  source 1..21: mol_type = other DNA
tggctgagtgaagcattggac

SEQ ID NO: 35085 - DNA, 22 bp, synthetic construct
  misc_feature 1..22: note = Probe
  source 1..22: mol_type = other DNA
tggctgagtgaagcattggact

SEQ ID NO: 35086 - DNA, 24 bp, synthetic construct
  misc_feature 1..24: note = Probe
  source 1..24: mol_type = other DNA
tggctgagtgaagcattggactgt

SEQ ID NO: 35087 - DNA, 25 bp, synthetic construct
  misc_feature 1..25: note = Probe
  source 1..25: mol_type = other DNA
tggctgagtgaagcattggactgta

SEQ ID NO: 35088 - DNA, 26 bp, synthetic construct
  misc_feature 1..26: note = Probe
  source 1..26: mol_type = other DNA
tggctgagtgaagcattggactgtaa

SEQ ID NO: 35089 - DNA, 27 bp, synthetic construct
  misc_feature 1..27: note = Probe
  source 1..27: mol_type = other DNA
tggctgagtgaagcattggactgtaaa

SEQ ID NO: 35090 - DNA, 28 bp, synthetic construct
  misc_feature 1..28: note = Probe
  source 1..28: mol_type = other DNA
tggctgagtgaagcattggactgtaaat

SEQ ID NO: 35091 - DNA, 19 bp, synthetic construct
  misc_feature 1..19: note = Probe
  source 1..19: mol_type = other DNA
tggggtggcctgtgacttt

SEQ ID NO: 35092 - DNA, 20 bp, synthetic construct
  misc_feature 1..20: note = Probe
  source 1..20: mol_type = other DNA
tggggtggcctgtgactttt

SEQ ID NO: 35093 - DNA, 17 bp, synthetic construct
  misc_feature 1..17: note = Probe
  source 1..17: mol_type = other DNA
tgggtgcgagaggtccc

SEQ ID NO: 35094 - DNA, 20 bp, synthetic construct
  misc_feature 1..20: note = Probe
  source 1..20: mol_type = other DNA
tgggtgcgagaggtcccggg

SEQ ID NO: 35095 - DNA, 22 bp, synthetic construct
  misc_feature 1..22: note = Probe
  source 1..22: mol_type = other DNA
tgggtgcgagaggtcccgggtt

SEQ ID NO: 35096 - DNA, 20 bp, synthetic construct
  misc_feature 1..20: note = Probe
  source 1..20: mol_type = other DNA
tgggtgctaatggtggagtt

SEQ ID NO: 35097 - DNA, 21 bp, synthetic construct
  misc_feature 1..21: note = Probe
  source 1..21: mol_type = other DNA
tgggtgctaatggtggagtta

SEQ ID NO: 35098 - DNA, 36 bp, synthetic construct
  misc_feature 1..36: note = Probe
  source 1..36: mol_type = other DNA
tgggtgctaatggtggagttaaagactttttctctg

SEQ ID NO: 35099 - DNA, 15 bp, synthetic construct
  misc_feature 1..15: note = Probe
  source 1..15: mol_type = other DNA
tgggtggttcagtgg

SEQ ID NO: 35100 - DNA, 17 bp, synthetic construct
  misc_feature 1..17: note = Probe
  source 1..17: mol_type = other DNA
tgggtggttcagtggta

SEQ ID NO: 35101 - DNA, 27 bp, synthetic construct
  misc_feature 1..27: note = Probe
  source 1..27: mol_type = other DNA
tgggtggttcagtggtagaattctcgc

SEQ ID NO: 35102 - DNA, 28 bp, synthetic construct
  misc_feature 1..28: note = Probe
  source 1..28: mol_type = other DNA
tgggtggttcagtggtagaattctcgcc

SEQ ID NO: 35103 - DNA, 29 bp, synthetic construct
  misc_feature 1..29: note = Probe
  source 1..29: mol_type = other DNA
tgggtggttcagtggtagaattctcgcct

SEQ ID NO: 35104 - DNA, 36 bp, synthetic construct
  misc_feature 1..36: note = Probe
  source 1..36: mol_type = other DNA
tgggtggttcagtggtagaattctcgcctgccacgc

SEQ ID NO: 35105 - DNA, 23 bp, synthetic construct
  misc_feature 1..23: note = Probe
  source 1..23: mol_type = other DNA
tgggttcgagccccacgttgggc

SEQ ID NO: 35106 - DNA, 21 bp, synthetic construct
  misc_feature 1..21: note = Probe
  source 1..21: mol_type = other DNA
tgggtttaagtcccattggtc

SEQ ID NO: 35107 - DNA, 25 bp, synthetic construct
  misc_feature 1..25: note = Probe
  source 1..25: mol_type = other DNA
tgggtttaagtcccattggtctagt

SEQ ID NO: 35108 - DNA, 15 bp, synthetic construct
  misc_feature 1..15: note = Probe
  source 1..15: mol_type = other DNA
tggtagaattctcgc

SEQ ID NO: 35109 - DNA, 16 bp, synthetic construct
  misc_feature 1..16: note = Probe
  source 1..16: mol_type = other DNA
tggtagaattctcgcc

SEQ ID NO: 35110 - DNA, 17 bp, synthetic construct
  misc_feature 1..17: note = Probe
  source 1..17: mol_type = other DNA
tggtagaattctcgcct

SEQ ID NO: 35111 - DNA, 19 bp, synthetic construct
  misc_feature 1..19: note = Probe
  source 1..19: mol_type = other DNA
tggtagaattctcgcctcc

SEQ ID NO: 35112 - DNA, 33 bp, synthetic construct
  misc_feature 1..33: note = Probe
  source 1..33: mol_type = other DNA
tggtagaattctcgcctcccacgcgggagaccc

SEQ ID NO: 35113 - DNA, 36 bp, synthetic construct
  misc_feature 1..36: note = Probe
  source 1..36: mol_type = other DNA
tggtagaattctcgcctcccacgcgggagacccggg

SEQ ID NO: 35114 - DNA, 18 bp, synthetic construct
  misc_feature 1..18: note = Probe
  source 1..18: mol_type = other DNA
tggtagaattctcgcctg

SEQ ID NO: 35115 - DNA, 19 bp, synthetic construct
  misc_feature 1..19: note = Probe
  source 1..19: mol_type = other DNA
tggtagaattctcgcctgc

SEQ ID NO: 35116 - DNA, 20 bp, synthetic construct
  misc_feature 1..20: note = Probe
  source 1..20: mol_type = other DNA
tggtagaattctcgcctgcc

SEQ ID NO: 35117 - DNA, 21 bp, synthetic construct
  misc_feature 1..21: note = Probe
  source 1..21: mol_type = other DNA
tggtagaattctcgcctgcca

SEQ ID NO: 35118 - DNA, 22 bp, synthetic construct
  misc_feature 1..22: note = Probe
  source 1..22: mol_type = other DNA
tggtagaattctcgcctgccac

SEQ ID NO: 35119 - DNA, 27 bp, synthetic construct
  misc_feature 1..27: note = Probe
  source 1..27: mol_type = other DNA
tggtagaattctcgcctgccacgcggg

SEQ ID NO: 35120 - DNA, 32 bp, synthetic construct
  misc_feature 1..32: note = Probe
  source 1..32: mol_type = other DNA
tggtagaattctcgcctgccacgcgggaggcc

SEQ ID NO: 35121 - DNA, 34 bp, synthetic construct; identical to SEQ ID NO: 24375
  misc_feature 1..34: note = Probe
  source 1..34: mol_type = other DNA

SEQ ID NO: 35122 - DNA, 37 bp, synthetic construct; identical to SEQ ID NO: 24376
  misc_feature 1..37: note = Probe
  source 1..37: mol_type = other DNA

SEQ ID NO: 35123 - DNA, 38 bp, synthetic construct; identical to SEQ ID NO: 24377
  misc_feature 1..38: note = Probe
  source 1..38: mol_type = other DNA

SEQ ID NO: 35124 - DNA, 17 bp, synthetic construct
  misc_feature 1..17: note = Probe
  source 1..17: mol_type = other DNA
tggtagagcatttgact

SEQ ID NO: 35125 - DNA, 19 bp, synthetic construct
  misc_feature 1..19: note = Probe
  source 1..19: mol_type = other DNA
tggtagagcatttgactgc

SEQ ID NO: 35126 - DNA, 15 bp, synthetic construct
  misc_feature 1..15: note = Probe
  source 1..15: mol_type = other DNA
tggtagagcgcatgc

SEQ ID NO: 35127 - DNA, 16 bp, synthetic construct
  misc_feature 1..16: note = Probe
  source 1..16: mol_type = other DNA
tggtagagcgcatgct

SEQ ID NO: 35128 - DNA, 15 bp, synthetic construct
  misc_feature 1..15: note = Probe
  source 1..15: mol_type = other DNA
tggtagagcgcgtgc

SEQ ID NO: 35129 - DNA, 16 bp, synthetic construct
  misc_feature 1..16: note = Probe
  source 1..16: mol_type = other DNA
tggtagagcgcgtgct

SEQ ID NO: 35130 - DNA, 20 bp, synthetic construct
  misc_feature 1..20: note = Probe
  source 1..20: mol_type = other DNA
tggtagagcgcgtgcttagc

SEQ ID NO: 35131 - DNA, 20 bp, synthetic construct
  misc_feature 1..20: note = Probe
  source 1..20: mol_type = other DNA
tggtagagcgcgtgcttcgc

SEQ ID NO: 35132 - DNA, 15 bp, synthetic construct
  misc_feature 1..15: note = Probe
  source 1..15: mol_type = other DNA
tggtagagcgctcgc

SEQ ID NO: 35133 - DNA, 16 bp, synthetic construct
  misc_feature 1..16: note = Probe
  source 1..16: mol_type = other DNA
tggtagagcgctcgct

SEQ ID NO: 35134 - DNA, 15 bp, synthetic construct
  misc_feature 1..15: note = Probe
  source 1..15: mol_type = other DNA
tggtagagcggagga

SEQ ID NO: 35135 - DNA, 16 bp, synthetic construct
  misc_feature 1..16: note = Probe
  source 1..16: mol_type = other DNA
tggtagagcggaggac

SEQ ID NO: 35136 - DNA, 17 bp, synthetic construct
  misc_feature 1..17: note = Probe
  source 1..17: mol_type = other DNA
tggtagagcggaggact

SEQ ID NO: 35137 - DNA, 18 bp, synthetic construct
  misc_feature 1..18: note = Probe
  source 1..18: mol_type = other DNA
tggtagagcggaggactg

SEQ ID NO: 35138 - DNA, 20 bp, synthetic construct
  misc_feature 1..20: note = Probe
  source 1..20: mol_type = other DNA
tggtagagcggaggactgta

SEQ ID NO: 35139 - DNA, 21 bp, synthetic construct
  misc_feature 1..21: note = Probe
  source 1..21: mol_type = other DNA
tggtagagcggaggactgtag

SEQ ID NO: 35140 - DNA, 15 bp, synthetic construct
  misc_feature 1..15: note = Probe
  source 1..15: mol_type = other DNA
tggtagcgcgtctga

SEQ ID NO: 35141 - DNA, 37 bp, synthetic construct; identical to SEQ ID NO: 1772
  misc_feature 1..37: note = Probe
  source 1..37: mol_type = other DNA

SEQ ID NO: 35142 - DNA, 38 bp, synthetic construct; identical to SEQ ID NO: 8175
  misc_feature 1..38: note = Probe
  source 1..38: mol_type = other DNA

SEQ ID NO: 35143 - DNA, 15 bp, synthetic construct
  misc_feature 1..15: note = Probe
  source 1..15: mol_type = other DNA
tggtatgattctcgc

SEQ ID NO: 35144 - DNA, 16 bp, synthetic construct
  misc_feature 1..16: note = Probe
  source 1..16: mol_type = other DNA
tggtatgattctcgct

SEQ ID NO: 35145 - DNA, 16 bp, synthetic construct
  misc_feature 1..16: note = Probe
  source 1..16: mol_type = other DNA
tggtcatcacgttcgc

SEQ ID NO: 35146 - DNA, 17 bp, synthetic construct
  misc_feature 1..17: note = Probe
  source 1..17: mol_type = other DNA
tggtcatcacgttcgcc

SEQ ID NO: 35147 - DNA, 24 bp, synthetic construct
  misc_feature 1..24: note = Probe
  source 1..24: mol_type = other DNA
tggtcatcacgttcgcctaacacg

SEQ ID NO: 35148 - DNA, 22 bp, synthetic construct
  misc_feature 1..22: note = Probe
  source 1..22: mol_type = other DNA
tggtcctagcctttctattagc

SEQ ID NO: 35149 - DNA, 15 bp, synthetic construct
  misc_feature 1..15: note = Probe
  source 1..15: mol_type = other DNA
tggtcgtggttgtag

SEQ ID NO: 35150 - DNA, 16 bp, synthetic construct
  misc_feature 1..16: note = Probe
  source 1..16: mol_type = other DNA
tggtcgtggttgtagt

SEQ ID NO: 35151 - DNA, 17 bp, synthetic construct
  misc_feature 1..17: note = Probe
  source 1..17: mol_type = other DNA
tggtcgtggttgtagtc

SEQ ID NO: 35152 - DNA, 18 bp, synthetic construct
  misc_feature 1..18: note = Probe
  source 1..18: mol_type = other DNA
tggtcgtggttgtagtcc

SEQ ID NO: 35153 - DNA, 19 bp, synthetic construct
  misc_feature 1..19: note = Probe
  source 1..19: mol_type = other DNA
tggtcgtggttgtagtccg

SEQ ID NO: 35154 - DNA, 21 bp, synthetic construct
  misc_feature 1..21: note = Probe
  source 1..21: mol_type = other DNA
tggtcgtggttgtagtccgtg

SEQ ID NO: 35155 - DNA, 23 bp, synthetic construct
  misc_feature 1..23: note = Probe
  source 1..23: mol_type = other DNA
tggtcgtggttgtagtccgtgcg

SEQ ID NO: 35156 - DNA, 24 bp, synthetic construct
  misc_feature 1..24: note = Probe
  source 1..24: mol_type = other DNA
tggtcgtggttgtagtccgtgcga

SEQ ID NO: 35157 - DNA, 25 bp, synthetic construct
  misc_feature 1..25: note = Probe
  source 1..25: mol_type = other DNA
tggtcgtggttgtagtccgtgcgag

SEQ ID NO: 35158 - DNA, 30 bp, synthetic construct; identical to SEQ ID NO: 12156
  misc_feature 1..30: note = Probe
  source 1..30: mol_type = other DNA

SEQ ID NO: 35159 - DNA, 21 bp, synthetic construct
  misc_feature 1..21: note = Probe
  source 1..21: mol_type = other DNA
tggtctagcggttaggattcc

SEQ ID NO: 35160 - DNA, 35 bp, synthetic construct
  misc_feature 1..35: note = Probe
  source 1..35: mol_type = other DNA
tggtctagcggttaggattcctggttttcacccag

SEQ ID NO: 35161 - DNA, 36 bp, synthetic construct
  misc_feature 1..36: note = Probe
  source 1..36: mol_type = other DNA
tggtctagcggttaggattcctggttttcacccagg

SEQ ID NO: 35162 - DNA, 15 bp, synthetic construct
  misc_feature 1..15: note = Probe
  source 1..15: mol_type = other DNA
tggtctaggggtatg

SEQ ID NO: 35163 - DNA, 16 bp, synthetic construct
  misc_feature 1..16: note = Probe
  source 1..16: mol_type = other DNA
tggtctaggggtatga

SEQ ID NO: 35164 - DNA, 17 bp, synthetic construct
  misc_feature 1..17: note = Probe
  source 1..17: mol_type = other DNA
tggtctaggggtatgat

SEQ ID NO: 35165 - DNA, 19 bp, synthetic construct
  misc_feature 1..19: note = Probe
  source 1..19: mol_type = other DNA
tggtctaggggtatgattc

SEQ ID NO: 35166 - DNA, 20 bp, synthetic construct
  misc_feature 1..20: note = Probe
  source 1..20: mol_type = other DNA
tggtctaggggtatgattct

SEQ ID NO: 35167 - DNA, 21 bp, synthetic construct
  misc_feature 1..21: note = Probe
  source 1..21: mol_type = other DNA
tggtctaggggtatgattctc

SEQ ID NO: 35168 - DNA, 22 bp, synthetic construct
  misc_feature 1..22: note = Probe
  source 1..22: mol_type = other DNA
tggtctaggggtatgattctcg

SEQ ID NO: 35169 - DNA, 23 bp, synthetic construct
  misc_feature 1..23: note = Probe
  source 1..23: mol_type = other DNA
tggtctaggggtatgattctcgc

SEQ ID NO: 35170 - DNA, 24 bp, synthetic construct
  misc_feature 1..24: note = Probe
  source 1..24: mol_type = other DNA
tggtctaggggtatgattctcgct

SEQ ID NO: 35171 - DNA, 25 bp, synthetic construct
  misc_feature 1..25: note = Probe
  source 1..25: mol_type = other DNA
tggtctaggggtatgattctcgctt

SEQ ID NO: 35172 - DNA, 23 bp, synthetic construct
  misc_feature 1..23: note = Probe
  source 1..23: mol_type = other DNA
tggtctaggggtatgattctcgg

SEQ ID NO: 35173 - DNA, 24 bp, synthetic construct
  misc_feature 1..24: note = Probe
  source 1..24: mol_type = other DNA
tggtctaggggtatgattctcggt

SEQ ID NO: 35174 - DNA, 27 bp, synthetic construct
  misc_feature 1..27: note = Probe
  source 1..27: mol_type = other DNA
tggtctagtggttaggattcggcgctc

SEQ ID NO: 35175 - DNA, 36 bp, synthetic construct
  misc_feature 1..36: note = Probe
  source 1..36: mol_type = other DNA
tggtctagtggttaggattcggcgctctcaccgccg

SEQ ID NO: 35176 - DNA, 16 bp, synthetic construct
  misc_feature 1..16: note = Probe
  source 1..16: mol_type = other DNA
tggtgagcactctgga

SEQ ID NO: 35177 - DNA, 36 bp, synthetic construct
  misc_feature 1..36: note = Probe
  source 1..36: mol_type = other DNA
tggtgagcactctggactctgaatccagcgatccga

SEQ ID NO: 35178 - DNA, 16 bp, synthetic construct
  misc_feature 1..16: note = Probe
  source 1..16: mol_type = other DNA
tggtgagcatagctgc

SEQ ID NO: 35179 - DNA, 15 bp, synthetic construct
  misc_feature 1..15: note = Probe
  source 1..15: mol_type = other DNA
tggtgagtatccccg

SEQ ID NO: 35180 - DNA, 16 bp, synthetic construct
  misc_feature 1..16: note = Probe
  source 1..16: mol_type = other DNA
tggtgagtatccccgc

SEQ ID NO: 35181 - DNA, 17 bp, synthetic construct
  misc_feature 1..17: note = Probe
  source 1..17: mol_type = other DNA
tggtgagtatccccgcc

SEQ ID NO: 35182 - DNA, 21 bp, synthetic construct
  misc_feature 1..21: note = Probe
  source 1..21: mol_type = other DNA
tggtgagtatccccgcctgtc

SEQ ID NO: 35183 - DNA, 23 bp, synthetic construct
  misc_feature 1..23: note = Probe
  source 1..23: mol_type = other DNA
tggtgagtatccccgcctgtcac

SEQ ID NO: 35184 - DNA, 36 bp, synthetic construct; identical to SEQ ID NO: 24418
  misc_feature 1..36: note = Probe
  source 1..36: mol_type = other DNA

SEQ ID NO: 35185 - DNA, 28 bp, synthetic construct
  misc_feature 1..28: note = Probe
  source 1..28: mol_type = other DNA
tggtgctaataacgccaaggtcgcgggt

SEQ ID NO: 35186 - DNA, 29 bp, synthetic construct
  misc_feature 1..29: note = Probe
  source 1..29: mol_type = other DNA
tggtgctaataacgccaaggtcgcgggtt

SEQ ID NO: 35187 - DNA, 28 bp, synthetic construct
  misc_feature 1..28: note = Probe
  source 1..28: mol_type = other DNA
tggtgctaataacgctaaggtcgcgggt

SEQ ID NO: 35188 - DNA, 28 bp, synthetic construct
  misc_feature 1..28: note = Probe
  source 1..28: mol_type = other DNA
tggtggagttaaagactttttctctgat

SEQ ID NO: 35189 - DNA, 50 bp, synthetic construct
  misc_feature 1..50: note = Probe
  source 1..50: mol_type = other DNA
tggtggtatagtggtaagcatagctgccttccaagcagttgacccgggtt

SEQ ID NO: 35190 - DNA, 36 bp, synthetic construct
  misc_feature 1..36: note = Probe
  source 1..36: mol_type = other DNA
tggtggtatagtggtgagcatagctgccttccaagc

SEQ ID NO: 35191 - DNA, 50 bp, synthetic construct
  misc_feature 1..50: note = Probe
  source 1..50: mol_type = other DNA
tggtggtatagtggtgagcatagctgccttccaagcagttgacccgggtt

SEQ ID NO: 35192 - DNA, 29 bp, synthetic construct
  misc_feature 1..29: note = Probe
  source 1..29: mol_type = other DNA
tggtggtctagtggttaggattcggcgct

SEQ ID NO: 35193 - DNA, 30 bp, synthetic construct; identical to SEQ ID NO: 14419
  misc_feature 1..30: note = Probe
  source 1..30: mol_type = other DNA

SEQ ID NO: 35194 - DNA, 35 bp, synthetic construct
  misc_feature 1..35: note = Probe
  source 1..35: mol_type = other DNA
tggtggtctagtggttaggattcggcgctctcacc

SEQ ID NO: 35195 - DNA, 36 bp, synthetic construct
  misc_feature 1..36: note = Probe
  source 1..36: mol_type = other DNA
tggtggtctagtggttaggattcggcgctctcaccg

SEQ ID NO: 35196 - DNA, 26 bp, synthetic construct
  misc_feature 1..26: note = Probe
  source 1..26: mol_type = other DNA
tggtggttcagtggtagaattctcgc

SEQ ID NO: 35197 - DNA, 27 bp, synthetic construct
  misc_feature 1..27: note = Probe
  source 1..27: mol_type = other DNA
tggtggttcagtggtagaattctcgcc

SEQ ID NO: 35198 - DNA, 28 bp, synthetic construct
  misc_feature 1..28: note = Probe
  source 1..28: mol_type = other DNA
tggtggttcagtggtagaattctcgcct

SEQ ID NO: 35199 - DNA, 36 bp, synthetic construct
  misc_feature 1..36: note = Probe
  source 1..36: mol_type = other DNA
tggtggttcagtggtagaattctcgcctcccacgcg

SEQ ID NO: 35200 - DNA, 31 bp, synthetic construct; identical to SEQ ID NO: 8197
  misc_feature 1..31: note = Probe
  source 1..31: mol_type = other DNA

SEQ ID NO: 35201 - DNA, 36 bp, synthetic construct
  misc_feature 1..36: note = Probe
  source 1..36: mol_type = other DNA
tggtggttcagtggtagaattctcgcctgccacgcg

SEQ ID NO: 35202 - DNA, 16 bp, synthetic construct
  misc_feature 1..16: note = Probe
  source 1..16: mol_type = other DNA
tggtgtaatggttagc

SEQ ID NO: 35203 - DNA, 23 bp, synthetic construct
  misc_feature 1..23: note = Probe
  source 1..23: mol_type = other DNA
tggtgtaatggttagcactctgg

SEQ ID NO: 35204 - DNA, 24 bp, synthetic construct
  misc_feature 1..24: note = Probe
  source 1..24: mol_type = other DNA
tggtgtaatggttagcactctgga

SEQ ID NO: 35205 - DNA, 25 bp, synthetic construct
  misc_feature 1..25: note = Probe
  source 1..25: mol_type = other DNA
tggtgtaatggttagcactctggac

SEQ ID NO: 35206 - DNA, 26 bp, synthetic construct
  misc_feature 1..26: note = Probe
  source 1..26: mol_type = other DNA
tggtgtaatggttagcactctggact

SEQ ID NO: 35207 - DNA, 27 bp, synthetic construct
  misc_feature 1..27: note = Probe
  source 1..27: mol_type = other DNA
tggtgtaatggttagcactctggactc

SEQ ID NO: 35208 - DNA, 31 bp, synthetic construct
  misc_feature 1..31: note = Probe
  source 1..31: mol_type = other DNA
tggtgtaatggttagcactctggactctgaa

SEQ ID NO: 35209 - DNA, 34 bp, synthetic construct
  misc_feature 1..34: note = Probe
  source 1..34: mol_type = other DNA
tggtgtaatggttagcactctggactctgaatcc

SEQ ID NO: 35210 - DNA, 35 bp, synthetic construct
  misc_feature 1..35: note = Probe
  source 1..35: mol_type = other DNA
tggtgtaatggttagcactctggactctgaatcca

SEQ ID NO: 35211 - DNA, 45 bp, synthetic construct
  misc_feature 1..45: note = Probe
  source 1..45: mol_type = other DNA
tggtgtaatggttagcactctggactctgaatccagcgatccgag

SEQ ID NO: 35212 - DNA, 46 bp, synthetic construct
  misc_feature 1..46: note = Probe
  source 1..46: mol_type = other DNA
tggtgtaatggttagcactctggactctgaatccagcgatccgagt

SEQ ID NO: 35213 - DNA, 47 bp, synthetic construct
  misc_feature 1..47: note = Probe
  source 1..47: mol_type = other DNA
tggtgtaatggttagcactctggactctgaatccagcgatccgagtt

SEQ ID NO: 35214 - DNA, 36 bp, synthetic construct
  misc_feature 1..36: note = Probe
  source 1..36: mol_type = other DNA
tggtgtaatggttagcactctggactctgaatccgg

SEQ ID NO: 35215 - DNA, 34 bp, synthetic construct
  misc_feature 1..34: note = Probe
  source 1..34: mol_type = other DNA
tggtgtaatggttagcactctggactttgaatcc

SEQ ID NO: 35216 - DNA, 36 bp, synthetic construct
  misc_feature 1..36: note = Probe
  source 1..36: mol_type = other DNA
tggtgtaatggttagcactctggactttgaatccag

SEQ ID NO: 35217 - DNA, 17 bp, synthetic construct
  misc_feature 1..17: note = Probe
  source 1..17: mol_type = other DNA
tggtgtggtctgttgtt

SEQ ID NO: 35218 - DNA, 18 bp, synthetic construct
  misc_feature 1..18: note = Probe
  source 1..18: mol_type = other DNA
tggtgtggtctgttgttt

SEQ ID NO: 35219 - DNA, 19 bp, synthetic construct
  misc_feature 1..19: note = Probe
  source 1..19: mol_type = other DNA
tggtgtggtctgttgtttt

SEQ ID NO: 35220 - DNA, 20 bp, synthetic construct
  misc_feature 1..20: note = Probe
  source 1..20: mol_type = other DNA
tggtgtggtctgttgttttc

SEQ ID NO: 35221 - DNA, 17 bp, synthetic construct
  misc_feature 1..17: note = Probe
  source 1..17: mol_type = other DNA
tggttaaggcgatggac

SEQ ID NO: 35222 - DNA, 17 bp, synthetic construct
  misc_feature 1..17: note = Probe
  source 1..17: mol_type = other DNA
tggttaaggcgttggac

SEQ ID NO: 35223 - DNA, 15 bp, synthetic construct
  misc_feature 1..15: note = Probe
  source 1..15: mol_type = other DNA
tggttagcactctgg

SEQ ID NO: 35224 - DNA, 16 bp, synthetic construct
  misc_feature 1..16: note = Probe
  source 1..16: mol_type = other DNA
tggttagcactctgga

SEQ ID NO: 35225 - DNA, 17 bp, synthetic construct
  misc_feature 1..17: note = Probe
  source 1..17: mol_type = other DNA
tggttagcactctggac

SEQ ID NO: 35226 - DNA, 18 bp, synthetic construct
  misc_feature 1..18: note = Probe
  source 1..18: mol_type = other DNA
tggttagcactctggact

SEQ ID NO: 35227 - DNA, 19 bp, synthetic construct
  misc_feature 1..19: note = Probe
  source 1..19: mol_type = other DNA
tggttagcactctggactc

SEQ ID NO: 35228 - DNA, 22 bp, synthetic construct
  misc_feature 1..22: note = Probe
  source 1..22: mol_type = other DNA
tggttagcactctggactctga

SEQ ID NO: 35229 - DNA, 23 bp, synthetic construct
  misc_feature 1..23: note = Probe
  source 1..23: mol_type = other DNA
tggttagcactctggactctgaa

SEQ ID NO: 35230 - DNA, 26 bp, synthetic construct
  misc_feature 1..26: note = Probe
  source 1..26: mol_type = other DNA
tggttagcactctggactctgaatcc

SEQ ID NO: 35231 - DNA, 27 bp, synthetic construct
  misc_feature 1..27: note = Probe
  source 1..27: mol_type = other DNA
tggttagcactctggactctgaatcca

SEQ ID NO: 35232 - DNA, 37 bp, synthetic construct
  misc_feature 1..37: note = Probe
  source 1..37: mol_type = other DNA
tggttagcactctggactctgaatccagcgatccgag

SEQ ID NO: 35233 - DNA, 38 bp, synthetic construct; identical to SEQ ID NO: 24441
  misc_feature 1..38: note = Probe
  source 1..38: mol_type = other DNA

SEQ ID NO: 35234 - DNA, 39 bp, synthetic construct
  misc_feature 1..39: note = Probe
  source 1..39: mol_type = other DNA
tggttagcactctggactctgaatccagcgatccgagtt

SEQ ID NO: 35235 - DNA, 24 bp, synthetic construct
  misc_feature 1..24: note = Probe
  source 1..24: mol_type = other DNA
tggttagcactctggactttgaat

SEQ ID NO: 35236 - DNA, 25 bp, synthetic construct
  misc_feature 1..25: note = Probe
  source 1..25: mol_type = other DNA
tggttagcactctggactttgaatc

SEQ ID NO: 35237 - DNA, 26 bp, synthetic construct
  misc_feature 1..26: note = Probe
  source 1..26: mol_type = other DNA
tggttagcactctggactttgaatcc

SEQ ID NO: 35238 - DNA, 36 bp, synthetic construct
  misc_feature 1..36: note = Probe
  source 1..36: mol_type = other DNA
tggttagcactctggactttgaatccagcgatccga

SEQ ID NO: 35239 - DNA, 39 bp, synthetic construct
  misc_feature 1..39: note = Probe
  source 1..39: mol_type = other DNA
tggttagcactctggactttgaatccagcgatccgagtt

SEQ ID NO: 35240 - DNA, 27 bp, synthetic construct
  misc_feature 1..27: note = Probe
  source 1..27: mol_type = other DNA
tggttaggagtcggcactctcaccgcc

SEQ ID NO: 35241 - DNA, 15 bp, synthetic construct
  misc_feature 1..15: note = Probe
  source 1..15: mol_type = other DNA
tggttaggattcggc

SEQ ID NO: 35242 - DNA, 20 bp, synthetic construct
  misc_feature 1..20: note = Probe
  source 1..20: mol_type = other DNA
tggttaggattcggcgctct

SEQ ID NO: 35243 - DNA, 22 bp, synthetic construct
  misc_feature 1..22: note = Probe
  source 1..22: mol_type = other DNA
tggttaggattcggcgctctca

SEQ ID NO: 35244 - DNA, 23 bp, synthetic construct
  misc_feature 1..23: note = Probe
  source 1..23: mol_type = other DNA
tggttaggattcggcgctctcac

SEQ ID NO: 35245 - DNA, 25 bp, synthetic construct
  misc_feature 1..25: note = Probe
  source 1..25: mol_type = other DNA
tggttaggattcggcgctctcaccg

SEQ ID NO: 35246 - DNA, 26 bp, synthetic construct
  misc_feature 1..26: note = Probe
  source 1..26: mol_type = other DNA
tggttaggattcggcgctctcaccgc

SEQ ID NO: 35247 - DNA, 28 bp, synthetic construct
  misc_feature 1..28: note = Probe
  source 1..28: mol_type = other DNA
tggttaggattcggcgctctcaccgccg

SEQ ID NO: 35248 - DNA, 29 bp, synthetic construct
  misc_feature 1..29: note = Probe
  source 1..29: mol_type = other DNA
tggttaggattcggcgctctcaccgccgc

SEQ ID NO: 35249 - DNA, 33 bp, synthetic construct; identical to SEQ ID NO: 24446
  misc_feature 1..33: note = Probe
  source 1..33: mol_type = other DNA

SEQ ID NO: 35250 - DNA, 38 bp, synthetic construct; identical to SEQ ID NO: 24448
  misc_feature 1..38: note = Probe
  source 1..38: mol_type = other DNA

SEQ ID NO: 35251 - DNA, 15 bp, synthetic construct
  misc_feature 1..15: note = Probe
  source 1..15: mol_type = other DNA
tggttagtactctgc

SEQ ID NO: 35252 - DNA, 16 bp, synthetic construct
  misc_feature 1..16: note = Probe
  source 1..16: mol_type = other DNA
tggttagtactctgcg

SEQ ID NO: 35253 - DNA, 16 bp, synthetic construct
  misc_feature 1..16: note = Probe
  source 1..16: mol_type = other DNA
tggttagtatccccgc

SEQ ID NO: 35254 - DNA, 17 bp, synthetic construct
  misc_feature 1..17: note = Probe
  source 1..17: mol_type = other DNA
tggttatcacgtctgct

SEQ ID NO: 35255 - DNA, 25 bp, synthetic construct
  misc_feature 1..25: note = Probe
  source 1..25: mol_type = other DNA
tggttatcacgtctgctttacacgc

SEQ ID NO: 35256 - DNA, 16 bp, synthetic construct
  misc_feature 1..16: note = Probe
  source 1..16: mol_type = other DNA
tggttatcacgttcgc

SEQ ID NO: 35257 - DNA, 17 bp, synthetic construct
  misc_feature 1..17: note = Probe
  source 1..17: mol_type = other DNA
tggttatcacgttcgcc

SEQ ID NO: 35258 - DNA, 24 bp, synthetic construct
  misc_feature 1..24: note = Probe
  source 1..24: mol_type = other DNA
tggttatcacgttcgcctaacacg

SEQ ID NO: 35259 - DNA, 25 bp, synthetic construct
  misc_feature 1..25: note = Probe
  source 1..25: mol_type = other DNA
tggttatcacgttcgcctaacacgc

SEQ ID NO: 35260 - DNA, 24 bp, synthetic construct
  misc_feature 1..24: note = Probe
  source 1..24: mol_type = other DNA
tggttatcacgttcgcctcacacg

SEQ ID NO: 35261 - DNA, 25 bp, synthetic construct
  misc_feature 1..25: note = Probe
  source 1..25: mol_type = other DNA
tggttatcacgttcgcctcacacgc

SEQ ID NO: 35262 - DNA, 23 bp, synthetic construct
  misc_feature 1..23: note = Probe
  source 1..23: mol_type = other DNA
tggttcagtggtagaattctcgc

SEQ ID NO: 35263 - DNA, 24 bp, synthetic construct
  misc_feature 1..24: note = Probe
  source 1..24: mol_type = other DNA
tggttcagtggtagaattctcgcc

SEQ ID NO: 35264 - DNA, 25 bp, synthetic construct
  misc_feature 1..25: note = Probe
  source 1..25: mol_type = other DNA
tggttcagtggtagaattctcgcct

SEQ ID NO: 35265 - DNA, 27 bp, synthetic construct
  misc_feature 1..27: note = Probe
  source 1..27: mol_type = other DNA
tggttcagtggtagaattctcgcctcc

SEQ ID NO: 35266 - DNA, 28 bp, synthetic construct
  misc_feature 1..28: note = Probe
  source 1..28: mol_type = other DNA
tggttcagtggtagaattctcgcctgcc

SEQ ID NO: 35267 - DNA, 29 bp, synthetic construct
  misc_feature 1..29: note = Probe
  source 1..29: mol_type = other DNA
tggttcagtggtagaattctcgcctgcca

SEQ ID NO: 35268 - DNA, 30 bp, synthetic construct
  misc_feature 1..30: note = Probe
  source 1..30: mol_type = other DNA
tggttcagtggtagaattctcgcctgccac

SEQ ID NO: 35269 - DNA, 31 bp, synthetic construct
  misc_feature 1..31: note = Probe
  source 1..31: mol_type = other DNA
tggttcagtggtagaattctcgcctgccacg

SEQ ID NO: 35270 - DNA, 36 bp, synthetic construct
  misc_feature 1..36: note = Probe
  source 1..36: mol_type = other DNA
tggttcagtggtagaattctcgcctgccacgcggga

SEQ ID NO: 35271 - DNA, 45 bp, synthetic construct
  misc_feature 1..45: note = Probe
  source 1..45: mol_type = other DNA
tggttcagtggtagaattctcgcctgccacgcgggaggcccgggt

SEQ ID NO: 35272 - DNA, 17 bp, synthetic construct
  misc_feature 1..17: note = Probe
  source 1..17: mol_type = other DNA
tggttgtagtccgtgcg

SEQ ID NO: 35273 - DNA, 19 bp, synthetic construct
  misc_feature 1..19: note = Probe
  source 1..19: mol_type = other DNA
tggttgtagtccgtgcgag

SEQ ID NO: 35274 - DNA, 24 bp, synthetic construct
  misc_feature 1..24: note = Probe
  source 1..24: mol_type = other DNA
tggttgtagtccgtgcgagaataa

SEQ ID NO: 35275 - DNA, 36 bp, synthetic construct
  misc_feature 1..36: note = Probe
  source 1..36: mol_type = other DNA
tggttttcacccaggcggcccgggttcgactcccgg

SEQ ID NO: 35276 - DNA, 33 bp, synthetic construct
  misc_feature 1..33: note = Probe
  source 1..33: mol_type = other DNA
tggtttttcatatcattggtcgtggttgtagtc

SEQ ID NO: 35277 - DNA, 20 bp, synthetic construct
  misc_feature 1..20: note = Probe
  source 1..20: mol_type = other DNA
tgtaaaccggagatgaaaac

SEQ ID NO: 35278 - DNA, 22 bp, synthetic construct
  misc_feature 1..22: note = Probe
  source 1..22: mol_type = other DNA
tgtaaaccggagatgaaaacct

SEQ ID NO: 35279 - DNA, 36 bp, synthetic construct; identical to SEQ ID NO: 8220
  misc_feature 1..36: note = Probe
  source 1..36: mol_type = other DNA

SEQ ID NO: 35280 - DNA, 33 bp, synthetic construct; identical to SEQ ID NO: 8227
  misc_feature 1..33: note = Probe
  source 1..33: mol_type = other DNA

SEQ ID NO: 35281 - DNA, 36 bp, synthetic construct
  misc_feature 1..36: note = Probe
  source 1..36: mol_type = other DNA
tgtaaatatagtttaaccaaaacatcagattgtgaa

SEQ ID NO: 35282 - DNA, 38 bp, synthetic construct; identical to SEQ ID NO: 8229
  misc_feature 1..38: note = Probe
  source 1..38: mol_type = other DNA

SEQ ID NO: 35283 - DNA, 50 bp, synthetic construct; identical to SEQ ID NO: 8238
  misc_feature 1..50: note = Probe
  source 1..50: mol_type = other DNA

SEQ ID NO: 35284 - DNA, 36 bp, synthetic construct
  misc_feature 1..36: note = Probe
  source 1..36: mol_type = other DNA
tgtaaatctaaagacaggggttaggcctctttttac

SEQ ID NO: 35285 - DNA, 21 bp, synthetic construct
  misc_feature 1..21: note = Probe
  source 1..21: mol_type = other DNA
tgtaatggtgagcactctgga

SEQ ID NO: 35286 - DNA, 29 bp, synthetic construct
  misc_feature 1..29: note = Probe
  source 1..29: mol_type = other DNA
tgtaatggtgagcactctggactctgaat

SEQ ID NO: 35287 - DNA, 17 bp, synthetic construct
  misc_feature 1..17: note = Probe
  source 1..17: mol_type = other DNA
tgtaatggttagcactc

SEQ ID NO: 35288 - DNA, 20 bp, synthetic construct
  misc_feature 1..20: note = Probe
  source 1..20: mol_type = other DNA
tgtaatggttagcactctgg

SEQ ID NO: 35289 - DNA, 21 bp, synthetic construct
  misc_feature 1..21: note = Probe
  source 1..21: mol_type = other DNA
tgtaatggttagcactctgga

SEQ ID NO: 35290 - DNA, 22 bp, synthetic construct
  misc_feature 1..22: note = Probe
  source 1..22: mol_type = other DNA
tgtaatggttagcactctggac

SEQ ID NO: 35291 - DNA, 23 bp, synthetic construct
  misc_feature 1..23: note = Probe
  source 1..23: mol_type = other DNA
tgtaatggttagcactctggact

SEQ ID NO: 35292 - DNA, 24 bp, synthetic construct
  misc_feature 1..24: note = Probe
  source 1..24: mol_type = other DNA
tgtaatggttagcactctggactc

SEQ ID NO: 35293 - DNA, 27 bp, synthetic construct
  misc_feature 1..27: note = Probe
  source 1..27: mol_type = other DNA
tgtaatggttagcactctggactctga

SEQ ID NO: 35294 - DNA, 28 bp, synthetic construct
  misc_feature 1..28: note = Probe
  source 1..28: mol_type = other DNA
tgtaatggttagcactctggactctgaa

SEQ ID NO: 35295 - DNA, 43 bp, synthetic construct
  misc_feature 1..43: note = Probe
  source 1..43: mol_type = other DNA
tgtaatggttagcactctggactctgaatccagcgatccgagt

SEQ ID NO: 35296 - DNA, 44 bp, synthetic construct
  misc_feature 1..44: note = Probe
  source 1..44: mol_type = other DNA
tgtaatggttagcactctggactctgaatccagcgatccgagtt

SEQ ID NO: 35297 - DNA, 28 bp, synthetic construct
  misc_feature 1..28: note = Probe
  source 1..28: mol_type = other DNA
tgtaatggttagcactctggactttgaa

SEQ ID NO: 35298 - DNA, 29 bp, synthetic construct
  misc_feature 1..29: note = Probe
  source 1..29: mol_type = other DNA
tgtaatggttagcactctggactttgaat

SEQ ID NO: 35299 - DNA, 31 bp, synthetic construct
  misc_feature 1..31: note = Probe
  source 1..31: mol_type = other DNA
tgtaatggttagcactctggactttgaatcc

SEQ ID NO: 35300 - DNA, 32 bp, synthetic construct
  misc_feature 1..32: note = Probe
  source 1..32: mol_type = other DNA
tgtaatggttagcactctggactttgaatcca

SEQ ID NO: 35301 - DNA, 36 bp, synthetic construct
  misc_feature 1..36: note = Probe
  source 1..36: mol_type = other DNA
tgtaatggttagcactctggactttgaatccagcga

SEQ ID NO: 35302 - DNA, 43 bp, synthetic construct
  misc_feature 1..43: note = Probe
  source 1..43: mol_type = other DNA
tgtaatggttagcactctggactttgaatccagcgatccgagt

SEQ ID NO: 35303 - DNA, 44 bp, synthetic construct
  misc_feature 1..44: note = Probe
  source 1..44: mol_type = other DNA
tgtaatggttagcactctggactttgaatccagcgatccgagtt

SEQ ID NO: 35304 - DNA, 23 bp, synthetic construct
  misc_feature 1..23: note = Probe
  source 1..23: mol_type = other DNA
tgtactggaaagtgcacttggac

SEQ ID NO: 35305 - DNA, 24 bp, synthetic construct
  misc_feature 1..24: note = Probe
  source 1..24: mol_type = other DNA
tgtactggaaagtgcacttggacg

SEQ ID NO: 35306 - DNA, 27 bp, synthetic construct
  misc_feature 1..27: note = Probe
  source 1..27: mol_type = other DNA
tgtactggaaagtgcacttggacgaac

SEQ ID NO: 35307 - DNA, 28 bp, synthetic construct
  misc_feature 1..28: note = Probe
  source 1..28: mol_type = other DNA
tgtactggaaagtgcacttggacgaacc

SEQ ID NO: 35308 - DNA, 22 bp, synthetic construct
  misc_feature 1..22: note = Probe
  source 1..22: mol_type = other DNA
tgtagcttaacacaaagcaccc

SEQ ID NO: 35309 - DNA, 15 bp, synthetic construct
  misc_feature 1..15: note = Probe
  source 1..15: mol_type = other DNA
tgtagcttacctcct

SEQ ID NO: 35310 - DNA, 17 bp, synthetic construct
  misc_feature 1..17: note = Probe
  source 1..17: mol_type = other DNA
tgtagtccgtgcgagaa

SEQ ID NO: 35311 - DNA, 18 bp, synthetic construct
  misc_feature 1..18: note = Probe
  source 1..18: mol_type = other DNA
tgtagtccgtgcgagaat

SEQ ID NO: 35312 - DNA, 19 bp, synthetic construct
  misc_feature 1..19: note = Probe
  source 1..19: mol_type = other DNA
tgtagtccgtgcgagaata

SEQ ID NO: 35313 - DNA, 20 bp, synthetic construct
  misc_feature 1..20: note = Probe
  source 1..20: mol_type = other DNA
tgtagtccgtgcgagaataa

SEQ ID NO: 35314 - DNA, 16 bp, synthetic construct
  misc_feature 1..16: note = Probe
  source 1..16: mol_type = other DNA
tgtagtcgtggccgag

SEQ ID NO: 35315 - DNA, 23 bp, synthetic construct
  misc_feature 1..23: note = Probe
  source 1..23: mol_type = other DNA
tgtagtggtcatcacgttcgcct

SEQ ID NO: 35316 - DNA, 22 bp, synthetic construct
  misc_feature 1..22: note = Probe
  source 1..22: mol_type = other DNA
tgtagtggttatcacgttcgcc

SEQ ID NO: 35317 - DNA, 23 bp, synthetic construct
  misc_feature 1..23: note = Probe
  source 1..23: mol_type = other DNA
tgtagtggttatcacgttcgcct

SEQ ID NO: 35318 - DNA, 36 bp, synthetic construct
  misc_feature 1..36: note = Probe
  source 1..36: mol_type = other DNA
tgtagttgaaatacaacgatggtttttcatatcatt

SEQ ID NO: 35319 - DNA, 17 bp, synthetic construct
  misc_feature 1..17: note = Probe
  source 1..17: mol_type = other DNA
tgtatgaggccccgggt

SEQ ID NO: 35320 - DNA, 15 bp, synthetic construct
  misc_feature 1..15: note = Probe
  source 1..15: mol_type = other DNA
tgtatgtctccatct

SEQ ID NO: 35321 - DNA, 20 bp, synthetic construct
  misc_feature 1..20: note = Probe
  source 1..20: mol_type = other DNA
tgtatgtctccatctattga

SEQ ID NO: 35322 - DNA, 22 bp, synthetic construct
  misc_feature 1..22: note = Probe
  source 1..22: mol_type = other DNA
tgtatgtctccatctattgatg

SEQ ID NO: 35323 - DNA, 31 bp, synthetic construct; identical to SEQ ID NO: 8251
  misc_feature 1..31: note = Probe
  source 1..31: mol_type = other DNA

SEQ ID NO: 35324 - DNA, 15 bp, synthetic construct
  misc_feature 1..15: note = Probe
  source 1..15: mol_type = other DNA
tgtcacgcgggagac

SEQ ID NO: 35325 - DNA, 21 bp, synthetic construct
  misc_feature 1..21: note = Probe
  source 1..21: mol_type = other DNA
tgtcacgcgggagaccggggt

SEQ ID NO: 35326 - DNA, 36 bp, synthetic construct; identical to SEQ ID NO: 14453
  misc_feature 1..36: note = Probe
  source 1..36: mol_type = other DNA

SEQ ID NO: 35327 - DNA, 28 bp, synthetic construct
  misc_feature 1..28: note = Probe
  source 1..28: mol_type = other DNA
tgtccttggaaaaaggttttcatctccg

SEQ ID NO: 35328 - DNA, 19 bp, synthetic construct
  misc_feature 1..19: note = Probe
  source 1..19: mol_type = other DNA
tgtccttgtagtataaact

SEQ ID NO: 35329 - DNA, 17 bp, synthetic construct
  misc_feature 1..17: note = Probe
  source 1..17: mol_type = other DNA
tgtcgcccggctagctc

SEQ ID NO: 35330 - DNA, 26 bp, synthetic construct
  misc_feature 1..26: note = Probe
  source 1..26: mol_type = other DNA
tgtcgcccggctagctcagtcggtag

SEQ ID NO: 35331 - DNA, 36 bp, synthetic construct
  misc_feature 1..36: note = Probe
  source 1..36: mol_type = other DNA
tgtcgcccggctagctcagtcggtagagcatgagac

SEQ ID NO: 35332 - DNA, 36 bp, synthetic construct
  misc_feature 1..36: note = Probe
  source 1..36: mol_type = other DNA
tgtcggctcgttggtctaggggtatgattctcgctt

SEQ ID NO: 35333 - DNA, 25 bp, synthetic construct
  misc_feature 1..25: note = Probe
  source 1..25: mol_type = other DNA
tgtctaacaacatggctttctcaac

SEQ ID NO: 35334 - DNA, 29 bp, synthetic construct
  misc_feature 1..29: note = Probe
  source 1..29: mol_type = other DNA
tgtgaatctgacaacagaggcttacgacc

SEQ ID NO: 35335 - DNA, 30 bp, synthetic construct; identical to SEQ ID NO: 24530
  misc_feature 1..30: note = Probe
  source 1..30: mol_type = other DNA

SEQ ID NO: 35336 - DNA, 32 bp, synthetic construct; identical to SEQ ID NO: 8265
  misc_feature 1..32: note = Probe
  source 1..32: mol_type = other DNA

SEQ ID NO: 35337 - DNA, 29 bp, synthetic construct
  misc_feature 1..29: note = Probe
  source 1..29: mol_type = other DNA
tgtgaggacaatggcacggcaaggggagt

SEQ ID NO: 35338 - DNA, 19 bp, synthetic construct
  misc_feature 1..19: note = Probe
  source 1..19: mol_type = other DNA
tgtgctccggagttacctc

SEQ ID NO: 35339 - DNA, 20 bp, synthetic construct
  misc_feature 1..20: note = Probe
  source 1..20: mol_type = other DNA
tgtgctccggagttacctcg

SEQ ID NO: 35340 - DNA, 21 bp, synthetic construct
  misc_feature 1..21: note = Probe
  source 1..21: mol_type = other DNA
tgtgctccggagttacctcgt

SEQ ID NO: 35341 - DNA, 22 bp, synthetic construct
  misc_feature 1..22: note = Probe
  source 1..22: mol_type = other DNA
tgtgctccggagttacctcgtt

SEQ ID NO: 35342 - DNA, 23 bp, synthetic construct
  misc_feature 1..23: note = Probe
  source 1..23: mol_type = other DNA
tgtgctccggagttacctcgttt

SEQ ID NO: 35343 - DNA, 24 bp, synthetic construct
  misc_feature 1..24: note = Probe
  source 1..24: mol_type = other DNA
tgtgctccggagttacctcgtttt

SEQ ID NO: 35344 - DNA, 25 bp, synthetic construct
  misc_feature 1..25: note = Probe
  source 1..25: mol_type = other DNA
tgtgctccggagttacctcgttttg

SEQ ID NO: 35345 - DNA, 29 bp, synthetic construct
  misc_feature 1..29: note = Probe
  source 1..29: mol_type = other DNA
tgtggaaacaatggtacggcaagggcctc

SEQ ID NO: 35346 - DNA, 29 bp, synthetic construct
  misc_feature 1..29: note = Probe
  source 1..29: mol_type = other DNA
tgtgggaacaatggcacggcaaggggctc

SEQ ID NO: 35347 - DNA, 23 bp, synthetic construct
  misc_feature 1..23: note = Probe
  source 1..23: mol_type = other DNA
tgtgggtttaagtcccattggtc

SEQ ID NO: 35348 - DNA, 27 bp, synthetic construct
  misc_feature 1..27: note = Probe
  source 1..27: mol_type = other DNA
tgtgggtttaagtcccattggtctagt

SEQ ID NO: 35349 - DNA, 33 bp, synthetic construct
  misc_feature 1..33: note = Probe
  source 1..33: mol_type = other DNA
tgttaactaagtgtttgtgggtttaagtcccat

SEQ ID NO: 35350 - DNA, 18 bp, synthetic construct
  misc_feature 1..18: note = Probe
  source 1..18: mol_type = other DNA
tgttaagatggcagagcc

SEQ ID NO: 35351 - DNA, 19 bp, synthetic construct
  misc_feature 1..19: note = Probe
  source 1..19: mol_type = other DNA
tgttaagatggcagagccc

SEQ ID NO: 35352 - DNA, 36 bp, synthetic construct
  misc_feature 1..36: note = Probe
  source 1..36: mol_type = other DNA
tgttaagatggcagagcccggtaatcgcataaaact

SEQ ID NO: 35353 - DNA, 43 bp, synthetic construct
  misc_feature 1..43: note = Probe
  source 1..43: mol_type = other DNA
tgttaagatggcagagcccggtaatcgcataaaacttaaaact

SEQ ID NO: 35354 - DNA, 15 bp, synthetic construct
  misc_feature 1..15: note = Probe
  source 1..15: mol_type = other DNA
tgtttagacgggctc

SEQ ID NO: 35355 - DNA, 16 bp, synthetic construct
  misc_feature 1..16: note = Probe
  source 1..16: mol_type = other DNA
tgtttagacgggctca

SEQ ID NO: 35356 - DNA, 17 bp, synthetic construct
  misc_feature 1..17: note = Probe
  source 1..17: mol_type = other DNA
tgtttagacgggctcac

SEQ ID NO: 35357 - DNA, 18 bp, synthetic construct
  misc_feature 1..18: note = Probe
  source 1..18: mol_type = other DNA
tgtttagacgggctcaca

SEQ ID NO: 35358 - DNA, 19 bp, synthetic construct
  misc_feature 1..19: note = Probe
  source 1..19: mol_type = other DNA
tgtttagacgggctcacat

SEQ ID NO: 35359 - DNA, 20 bp, synthetic construct
  misc_feature 1..20: note = Probe
  source 1..20: mol_type = other DNA
tgtttagacgggctcacatc

SEQ ID NO: 35360 - DNA, 21 bp, synthetic construct
  misc_feature 1..21: note = Probe
  source 1..21: mol_type = other DNA
tgtttagacgggctcacatca

SEQ ID NO: 35361 - DNA, 22 bp, synthetic construct
  misc_feature 1..22: note = Probe
  source 1..22: mol_type = other DNA
tgtttagacgggctcacatcac

SEQ ID NO: 35362 - DNA, 23 bp, synthetic construct
  misc_feature 1..23: note = Probe
  source 1..23: mol_type = other DNA
tgtttagacgggctcacatcacc

SEQ ID NO: 35363 - DNA, 24 bp, synthetic construct
  misc_feature 1..24: note = Probe
  source 1..24: mol_type = other DNA
tgtttagacgggctcacatcaccc

SEQ ID NO: 35364 - DNA, 25 bp, synthetic construct
  misc_feature 1..25: note = Probe
  source 1..25: mol_type = other DNA
tgtttagacgggctcacatcacccc

SEQ ID NO: 35365 - DNA, 26 bp, synthetic construct
  misc_feature 1..26: note = Probe
  source 1..26: mol_type = other DNA
tgtttagacgggctcacatcacccca

SEQ ID NO: 35366 - DNA, 28 bp, synthetic construct
  misc_feature 1..28: note = Probe
  source 1..28: mol_type = other DNA
tgtttagacgggctcacatcaccccata

SEQ ID NO: 35367 - DNA, 29 bp, synthetic construct
  misc_feature 1..29: note = Probe
  source 1..29: mol_type = other DNA
tgtttagacgggctcacatcaccccataa

SEQ ID NO: 35368 - DNA, 30 bp, synthetic construct
  misc_feature 1..30: note = Probe
  source 1..30: mol_type = other DNA
tgtttagacgggctcacatcaccccataaa

SEQ ID NO: 35369 - DNA, 34 bp, synthetic construct
  misc_feature 1..34: note = Probe
  source 1..34: mol_type = other DNA
tgtttccgtagtgtagtggttatcacgttcgcct

SEQ ID NO: 35370 - DNA, 27 bp, synthetic construct
  misc_feature 1..27: note = Probe
  source 1..27: mol_type = other DNA
tgtttgtgggtttaagtcccattggtc

SEQ ID NO: 35371 - DNA, 31 bp, synthetic construct; identical to SEQ ID NO: 8293
  misc_feature 1..31: note = Probe
  source 1..31: mol_type = other DNA

SEQ ID NO: 35372 - DNA, 18 bp, synthetic construct
  misc_feature 1..18: note = Probe
  source 1..18: mol_type = other DNA
ttaaagattaagagaacc

SEQ ID NO: 35373 - DNA, 19 bp, synthetic construct
  misc_feature 1..19: note = Probe
  source 1..19: mol_type = other DNA
ttaaagattaagagaacca

SEQ ID NO: 35374 - DNA, 21 bp, synthetic construct
  misc_feature 1..21: note = Probe
  source 1..21: mol_type = other DNA
ttaaagattaagagaaccaac

SEQ ID NO: 35375 - DNA, 23 bp, synthetic construct
  misc_feature 1..23: note = Probe
  source 1..23: mol_type = other DNA
ttaaagattaagagaaccaacac

SEQ ID NO: 35376 - DNA, 24 bp, synthetic construct
  misc_feature 1..24: note = Probe
  source 1..24: mol_type = other DNA
ttaaagattaagagaaccaacacc

SEQ ID NO: 35377 - DNA, 25 bp, synthetic construct
  misc_feature 1..25: note = Probe
  source 1..25: mol_type = other DNA
ttaaagattaagagaaccaacacct

SEQ ID NO: 35378 - DNA, 27 bp, synthetic construct
  misc_feature 1..27: note = Probe
  source 1..27: mol_type = other DNA
ttaaagattaagagaaccaacacctct

SEQ ID NO: 35379 - DNA, 36 bp, synthetic construct; identical to SEQ ID NO: 24564
  misc_feature 1..36: note = Probe
  source 1..36: mol_type = other DNA

SEQ ID NO: 35380 - DNA, 38 bp, synthetic construct
  misc_feature 1..38: note = Probe
  source 1..38: mol_type = other DNA
ttaaagattaagagaaccaacacctctttacagtgaaa

SEQ ID NO: 35381 - DNA, 26 bp, synthetic construct
  misc_feature 1..26: note = Probe
  source 1..26: mol_type = other DNA
ttaaaggataacagctatccattggt

SEQ ID NO: 35382 - DNA, 28 bp, synthetic construct
  misc_feature 1..28: note = Probe
  source 1..28: mol_type = other DNA
ttaaaggataacagctatccattggtct

SEQ ID NO: 35383 - DNA, 29 bp, synthetic construct
  misc_feature 1..29: note = Probe
  source 1..29: mol_type = other DNA
ttaaaggataacagctatccattggtctt

SEQ ID NO: 35384 - DNA, 30 bp, synthetic construct
  misc_feature 1..30: note = Probe
  source 1..30: mol_type = other DNA
ttaaaggataacagctatccattggtctta

SEQ ID NO: 35385 - DNA, 31 bp, synthetic construct
  misc_feature 1..31: note = Probe
  source 1..31: mol_type = other DNA
ttaaaggataacagctatccattggtcttag

SEQ ID NO: 35386 - DNA, 34 bp, synthetic construct
  misc_feature 1..34: note = Probe
  source 1..34: mol_type = other DNA
ttaaaggataacagctatccattggtcttaggcc

SEQ ID NO: 35387 - DNA, 36 bp, synthetic construct
  misc_feature 1..36: note = Probe
  source 1..36: mol_type = other DNA
ttaaaggataacagctatccattggtcttaggcccc

SEQ ID NO: 35388 - DNA, 18 bp, synthetic construct
  misc_feature 1..18: note = Probe
  source 1..18: mol_type = other DNA
ttaaagtggctgatttgc

SEQ ID NO: 35389 - DNA, 20 bp, synthetic construct
  misc_feature 1..20: note = Probe
  source 1..20: mol_type = other DNA
ttaaatacagaccaagagcc

SEQ ID NO: 35390 - DNA, 23 bp, synthetic construct
  misc_feature 1..23: note = Probe
  source 1..23: mol_type = other DNA
ttaaattagaatcttagctttgg

SEQ ID NO: 35391 - DNA, 33 bp, synthetic construct
  misc_feature 1..33: note = Probe
  source 1..33: mol_type = other DNA
ttaaattagaatcttagctttgggtgctaatgg

SEQ ID NO: 35392 - DNA, 16 bp, synthetic construct
  misc_feature 1..16: note = Probe
  source 1..16: mol_type = other DNA
ttaacacaaagcaccc

SEQ ID NO: 35393 - DNA, 17 bp, synthetic construct
  misc_feature 1..17: note = Probe
  source 1..17: mol_type = other DNA
ttaacacaaagcaccca

SEQ ID NO: 35394 - DNA, 36 bp, synthetic construct
  misc_feature 1..36: note = Probe
  source 1..36: mol_type = other DNA
ttaacacaaagcacccaacttacacttaggagattt

SEQ ID NO: 35395 - DNA, 36 bp, synthetic construct
  misc_feature 1..36: note = Probe
  source 1..36: mol_type = other DNA
ttaaccaaaacatcagattgtgaatctgacaacaga

SEQ ID NO: 35396 - DNA, 41 bp, synthetic construct; identical to SEQ ID NO: 1787
  misc_feature 1..41: note = Probe
  source 1..41: mol_type = other DNA

SEQ ID NO: 35397 - DNA, 42 bp, synthetic construct
  misc_feature 1..42: note = Probe
  source 1..42: mol_type = other DNA
ttaaccgaaaggttggtggttcgagcccacccagggacgcct

SEQ ID NO: 35398 - DNA, 42 bp, synthetic construct
  misc_feature 1..42: note = Probe
  source 1..42: mol_type = other DNA
ttaaccgaaaggttggtggttcgagcccacccagggacgcta

SEQ ID NO: 35399 - DNA, 36 bp, synthetic construct
  misc_feature 1..36: note = Probe
  source 1..36: mol_type = other DNA
ttaaccgaaaggttggtggttcgatcccacccaggg

SEQ ID NO: 35400 - DNA, 31 bp, synthetic construct
  misc_feature 1..31: note = Probe
  source 1..31: mol_type = other DNA
ttaaccttttaagttaaagattaagagaacc

SEQ ID NO: 35401 - DNA, 36 bp, synthetic construct
  misc_feature 1..36: note = Probe
  source 1..36: mol_type = other DNA
ttaaccttttaagttaaagattaagagaaccaacac

SEQ ID NO: 35402 - DNA, 20 bp, synthetic construct
  misc_feature 1..20: note = Probe
  source 1..20: mol_type = other DNA
ttaactaagtgtttgtgggt

SEQ ID NO: 35403 - DNA, 21 bp, synthetic construct
  misc_feature 1..21: note = Probe
  source 1..21: mol_type = other DNA
ttaactaagtgtttgtgggtt

SEQ ID NO: 35404 - DNA, 22 bp, synthetic construct
  misc_feature 1..22: note = Probe
  source 1..22: mol_type = other DNA
ttaactaagtgtttgtgggttt

SEQ ID NO: 35405 - DNA, 42 bp, synthetic construct; identical to SEQ ID NO: 8319
  misc_feature 1..42: note = Probe
  source 1..42: mol_type = other DNA

SEQ ID NO: 35406 - DNA, 15 bp, synthetic construct
  misc_feature 1..15: note = Probe
  source 1..15: mol_type = other DNA
ttaacttgaccgctc

SEQ ID NO: 35407 - DNA, 16 bp, synthetic construct
  misc_feature 1..16: note = Probe
  source 1..16: mol_type = other DNA
ttaacttgaccgctct

SEQ ID NO: 35408 - DNA, 17 bp, synthetic construct
  misc_feature 1..17: note = Probe
  source 1..17: mol_type = other DNA
ttaacttgaccgctctg

SEQ ID NO: 35409 - DNA, 18 bp, synthetic construct
  misc_feature 1..18: note = Probe
  source 1..18: mol_type = other DNA
ttaacttgaccgctctga

SEQ ID NO: 35410 - DNA, 19 bp, synthetic construct
  misc_feature 1..19: note = Probe
  source 1..19: mol_type = other DNA
ttaacttgaccgctctgag

SEQ ID NO: 35411 - DNA, 20 bp, synthetic construct
  misc_feature 1..20: note = Probe
  source 1..20: mol_type = other DNA
ttaacttgaccgctctgagc

SEQ ID NO: 35412 - DNA, 27 bp, synthetic construct
  misc_feature 1..27: note = Probe
  source 1..27: mol_type = other DNA
ttaacttgaccgctctgagctaaacct

SEQ ID NO: 35413 - DNA, 33 bp, synthetic construct
  misc_feature 1..33: note = Probe
  source 1..33: mol_type = other DNA
ttaacttgaccgctctgagctaaacctagcccc

SEQ ID NO: 35414 - DNA, 36 bp, synthetic construct
  misc_feature 1..36: note = Probe
  source 1..36: mol_type = other DNA
ttaacttgaccgctctgagctaaacctagccccaaa

SEQ ID NO: 35415 - DNA, 16 bp, synthetic construct
  misc_feature 1..16: note = Probe
  source 1..16: mol_type = other DNA
ttaagagaaccaacac

SEQ ID NO: 35416 - DNA, 17 bp, synthetic construct
  misc_feature 1..17: note = Probe
  source 1..17: mol_type = other DNA
ttaagagaaccaacacc

SEQ ID NO: 35417 - DNA, 18 bp, synthetic construct
  misc_feature 1..18: note = Probe
  source 1..18: mol_type = other DNA
ttaagagaaccaacacct

SEQ ID NO: 35418 - DNA, 30 bp, synthetic construct; identical to SEQ ID NO: 12276
  misc_feature 1..30: note = Probe
  source 1..30: mol_type = other DNA

SEQ ID NO: 35419 - DNA, 16 bp, synthetic construct
  misc_feature 1..16: note = Probe
  source 1..16: mol_type = other DNA
ttaagatggcagagcc

SEQ ID NO: 35420 - DNA, 17 bp, synthetic construct
  misc_feature 1..17: note = Probe
  source 1..17: mol_type = other DNA
ttaagatggcagagccc

SEQ ID NO: 35421 - DNA, 36 bp, synthetic construct
  misc_feature 1..36: note = Probe
  source 1..36: mol_type = other DNA
ttaagatggcagagcccggtaatcgcataaaactta

SEQ ID NO: 35422 - DNA, 41 bp, synthetic construct
  misc_feature 1..41: note = Probe
  source 1..41: mol_type = other DNA
ttaagatggcagagcccggtaatcgcataaaacttaaaact

SEQ ID NO: 35423 - DNA, 15 bp, synthetic construct
  misc_feature 1..15: note = Probe
  source 1..15: mol_type = other DNA
ttaaggcgatggact

SEQ ID NO: 35424 - DNA, 16 bp, synthetic construct
  misc_feature 1..16: note = Probe
  source 1..16: mol_type = other DNA
ttaagtcccattggtc

SEQ ID NO: 35425 - DNA, 23 bp, synthetic construct
  misc_feature 1..23: note = Probe
  source 1..23: mol_type = other DNA
ttaagttaaagattaagagaacc

SEQ ID NO: 35426 - DNA, 28 bp, synthetic construct
  misc_feature 1..28: note = Probe
  source 1..28: mol_type = other DNA
ttaagttaaagattaagagaaccaacac

SEQ ID NO: 35427 - DNA, 29 bp, synthetic construct
  misc_feature 1..29: note = Probe
  source 1..29: mol_type = other DNA
ttaagttaaagattaagagaaccaacacc

SEQ ID NO: 35428 - DNA, 30 bp, synthetic construct
  misc_feature 1..30: note = Probe
  source 1..30: mol_type = other DNA
ttaagttaaagattaagagaaccaacacct

SEQ ID NO: 35429 - DNA, 36 bp, synthetic construct
  misc_feature 1..36: note = Probe
  source 1..36: mol_type = other DNA
ttaagttaaagattaagagaaccaacacctctttac

SEQ ID NO: 35430 - DNA, 15 bp, synthetic construct
  misc_feature 1..15: note = Probe
  source 1..15: mol_type = other DNA
ttaatcccagggtcg

SEQ ID NO: 35431 - DNA, 19 bp, synthetic construct
  misc_feature 1..19: note = Probe
  source 1..19: mol_type = other DNA
ttaatcccctggcccaacc

SEQ ID NO: 35432 - DNA, 20 bp, synthetic construct
  misc_feature 1..20: note = Probe
  source 1..20: mol_type = other DNA
ttaatcccctggcccaaccc

SEQ ID NO: 35433 - DNA, 29 bp, synthetic construct
  misc_feature 1..29: note = Probe
  source 1..29: mol_type = other DNA
ttaatcccctggcccaacccgtcatctac

SEQ ID NO: 35434 - DNA, 15 bp, synthetic construct
  misc_feature 1..15: note = Probe
  source 1..15: mol_type = other DNA
ttaatctcagggtcg

SEQ ID NO: 35435 - DNA, 33 bp, synthetic construct
  misc_feature 1..33: note = Probe
  source 1..33: mol_type = other DNA
ttaatctcagggtcgtgggttcgagccccacgt

SEQ ID NO: 35436 - DNA, 42 bp, synthetic construct
  misc_feature 1..42: note = Probe
  source 1..42: mol_type = other DNA
ttaatctcagggtcgtgggttcgagccccacgttgggcggca

SEQ ID NO: 35437 - DNA, 36 bp, synthetic construct
  misc_feature 1..36: note = Probe
  source 1..36: mol_type = other DNA
ttaatctgagggtccagggttcaagtccctgttcgg

SEQ ID NO: 35438 - DNA, 41 bp, synthetic construct
  misc_feature 1..41: note = Probe
  source 1..41: mol_type = other DNA
ttaatctgagggtccagggttcaagtccctgttcgggcggc

SEQ ID NO: 35439 - DNA, 42 bp, synthetic construct
  misc_feature 1..42: note = Probe
  source 1..42: mol_type = other DNA
ttaatctgagggtccagggttcaagtccctgttcgggcggca

SEQ ID NO: 35440 - DNA, 41 bp, synthetic construct
  misc_feature 1..41: note = Probe
  source 1..41: mol_type = other DNA
ttaatctgagggtccagggttcaagtccctgttcgggcgtc

SEQ ID NO: 35441 - DNA, 18 bp, synthetic construct
  misc_feature 1..18: note = Probe
  source 1..18: mol_type = other DNA
ttaattttaataatcaac

SEQ ID NO: 35442 - DNA, 19 bp, synthetic construct
  misc_feature 1..19: note = Probe
  source 1..19: mol_type = other DNA
ttacacgcagaaggtcctg

SEQ ID NO: 35443 - DNA, 21 bp, synthetic construct
  misc_feature 1..21: note = Probe
  source 1..21: mol_type = other DNA
ttacacttaggagatttcaac

SEQ ID NO: 35444 - DNA, 22 bp, synthetic construct
  misc_feature 1..22: note = Probe
  source 1..22: mol_type = other DNA
ttacacttaggagatttcaact

SEQ ID NO: 35445 - DNA, 23 bp, synthetic construct
  misc_feature 1..23: note = Probe
  source 1..23: mol_type = other DNA
ttacacttaggagatttcaactt

SEQ ID NO: 35446 - DNA, 27 bp, synthetic construct
  misc_feature 1..27: note = Probe
  source 1..27: mol_type = other DNA
ttacacttaggagatttcaacttaact

SEQ ID NO: 35447 - DNA, 32 bp, synthetic construct
  misc_feature 1..32: note = Probe
  source 1..32: mol_type = other DNA
ttacacttaggagatttcaacttaacttgacc

SEQ ID NO: 35448 - DNA, 35 bp, synthetic construct; identical to SEQ ID NO: 8334
  misc_feature 1..35: note = Probe
  source 1..35: mol_type = other DNA

SEQ ID NO: 35449 - DNA, 36 bp, synthetic construct
  misc_feature 1..36: note = Probe
  source 1..36: mol_type = other DNA
ttacacttaggagatttcaacttaacttgaccgctc

SEQ ID NO: 35450 - DNA, 37 bp, synthetic construct; identical to SEQ ID NO: 8335
  misc_feature 1..37: note = Probe
  source 1..37: mol_type = other DNA

SEQ ID NO: 35451 - DNA, 41 bp, synthetic construct; identical to SEQ ID NO: 8338
  misc_feature 1..41: note = Probe
  source 1..41: mol_type = other DNA

SEQ ID NO: 35452 - DNA, 42 bp, synthetic construct; identical to SEQ ID NO: 8339
  misc_feature 1..42: note = Probe
  source 1..42: mol_type = other DNA

SEQ ID NO: 35453 - DNA, 15 bp, synthetic construct
  misc_feature 1..15: note = Probe
  source 1..15: mol_type = other DNA
ttacagtcagaggtt

SEQ ID NO: 35454 - DNA, 16 bp, synthetic construct
  misc_feature 1..16: note = Probe
  source 1..16: mol_type = other DNA
ttacagtcagaggttc

SEQ ID NO: 35455 - DNA, 17 bp, synthetic construct
  misc_feature 1..17: note = Probe
  source 1..17: mol_type = other DNA
ttacagtcagaggttca

SEQ ID NO: 35456 - DNA, 22 bp, synthetic construct
  misc_feature 1..22: note = Probe
  source 1..22: mol_type = other DNA
ttacagtcagaggttcaattcc

SEQ ID NO: 35457 - DNA, 23 bp, synthetic construct
  misc_feature 1..23: note = Probe
  source 1..23: mol_type = other DNA
ttacagtcagaggttcaattcct

SEQ ID NO: 35458 - DNA, 27 bp, synthetic construct
  misc_feature 1..27: note = Probe
  source 1..27: mol_type = other DNA
ttacagtcagaggttcaattcctcttc

SEQ ID NO: 35459 - DNA, 19 bp, synthetic construct
  misc_feature 1..19: note = Probe
  source 1..19: mol_type = other DNA
ttacgaccccttatttacc

SEQ ID NO: 35460 - DNA, 20 bp, synthetic construct
  misc_feature 1..20: note = Probe
  source 1..20: mol_type = other DNA
ttacgaccccttatttaccg

SEQ ID NO: 35461 - DNA, 36 bp, synthetic construct; identical to SEQ ID NO: 24605
  misc_feature 1..36: note = Probe
  source 1..36: mol_type = other DNA

SEQ ID NO: 35462 - DNA, 18 bp, synthetic construct
  misc_feature 1..18: note = Probe
  source 1..18: mol_type = other DNA
ttagaatcttagctttgg

SEQ ID NO: 35463 - DNA, 23 bp, synthetic construct
  misc_feature 1..23: note = Probe
  source 1..23: mol_type = other DNA
ttagaatcttagctttgggtgct

SEQ ID NO: 35464 - DNA, 36 bp, synthetic construct
  misc_feature 1..36: note = Probe
  source 1..36: mol_type = other DNA
ttagaatcttagctttgggtgctaatggtggagtta

SEQ ID NO: 35465 - DNA, 50 bp, synthetic construct; identical to SEQ ID NO: 1793
  misc_feature 1..50: note = Probe
  source 1..50: mol_type = other DNA

SEQ ID NO: 35466 - DNA, 15 bp, synthetic construct
  misc_feature 1..15: note = Probe
  source 1..15: mol_type = other DNA
ttagacgggctcaca

SEQ ID NO: 35467 - DNA, 16 bp, synthetic construct
  misc_feature 1..16: note = Probe
  source 1..16: mol_type = other DNA
ttagacgggctcacat

SEQ ID NO: 35468 - DNA, 17 bp, synthetic construct
  misc_feature 1..17: note = Probe
  source 1..17: mol_type = other DNA
ttagacgggctcacatc

SEQ ID NO: 35469 - DNA, 18 bp, synthetic construct
  misc_feature 1..18: note = Probe
  source 1..18: mol_type = other DNA
ttagacgggctcacatca

SEQ ID NO: 35470 - DNA, 19 bp, synthetic construct
  misc_feature 1..19: note = Probe
  source 1..19: mol_type = other DNA
ttagacgggctcacatcac

SEQ ID NO: 35471 - DNA, 20 bp, synthetic construct
  misc_feature 1..20: note = Probe
  source 1..20: mol_type = other DNA
ttagacgggctcacatcacc

SEQ ID NO: 35472 - DNA, 21 bp, synthetic construct
  misc_feature 1..21: note = Probe
  source 1..21: mol_type = other DNA
ttagacgggctcacatcaccc

SEQ ID NO: 35473 - DNA, 25 bp, synthetic construct
  misc_feature 1..25: note = Probe
  source 1..25: mol_type = other DNA
ttagacgggctcacatcaccccata

SEQ ID NO: 35474 - DNA, 27 bp, synthetic construct
  misc_feature 1..27: note = Probe
  source 1..27: mol_type = other DNA
ttagacgggctcacatcaccccataaa

SEQ ID NO: 35475 - DNA, 28 bp, synthetic construct
  misc_feature 1..28: note = Probe
  source 1..28: mol_type = other DNA
ttagacgggctcacatcaccccataaac

SEQ ID NO: 35476 - DNA, 29 bp, synthetic construct
  misc_feature 1..29: note = Probe
  source 1..29: mol_type = other DNA
ttagacgggctcacatcaccccataaaca

SEQ ID NO: 35477 - DNA, 30 bp, synthetic construct; identical to SEQ ID NO: 8357
  misc_feature 1..30: note = Probe
  source 1..30: mol_type = other DNA

SEQ ID NO: 35478 - DNA, 31 bp, synthetic construct; identical to SEQ ID NO: 8358
  misc_feature 1..31: note = Probe
  source 1..31: mol_type = other DNA

SEQ ID NO: 35479 - DNA, 15 bp, synthetic construct
  misc_feature 1..15: note = Probe
  source 1..15: mol_type = other DNA
ttagcactctggact

SEQ ID NO: 35480 - DNA, 16 bp, synthetic construct
  misc_feature 1..16: note = Probe
  source 1..16: mol_type = other DNA
ttagcactctggactc

SEQ ID NO: 35481 - DNA, 19 bp, synthetic construct
  misc_feature 1..19: note = Probe
  source 1..19: mol_type = other DNA
ttagcactctggactctga

SEQ ID NO: 35482 - DNA, 20 bp, synthetic construct
  misc_feature 1..20: note = Probe
  source 1..20: mol_type = other DNA
ttagcactctggactctgaa

SEQ ID NO: 35483 - DNA, 21 bp, synthetic construct
  misc_feature 1..21: note = Probe
  source 1..21: mol_type = other DNA
ttagcactctggactctgaat

SEQ ID NO: 35484 - DNA, 23 bp, synthetic construct
  misc_feature 1..23: note = Probe
  source 1..23: mol_type = other DNA
ttagcactctggactctgaatcc

SEQ ID NO: 35485 - DNA, 24 bp, synthetic construct
  misc_feature 1..24: note = Probe
  source 1..24: mol_type = other DNA
ttagcactctggactctgaatcca

SEQ ID NO: 35486 - DNA, 31 bp, synthetic construct
  misc_feature 1..31: note = Probe
  source 1..31: mol_type = other DNA
ttagcactctggactctgaatccagcgatcc

SEQ ID NO: 35487 - DNA, 32 bp, synthetic construct
  misc_feature 1..32: note = Probe
  source 1..32: mol_type = other DNA
ttagcactctggactctgaatccagcgatccg

SEQ ID NO: 35488 - DNA, 33 bp, synthetic construct
  misc_feature 1..33: note = Probe
  source 1..33: mol_type = other DNA
ttagcactctggactctgaatccagcgatccga

SEQ ID NO: 35489 - DNA, 37 bp, synthetic construct
  misc_feature 1..37: note = Probe
  source 1..37: mol_type = other DNA
ttagcactctggactctgaatccagcgatccgagttc

SEQ ID NO: 35490 - DNA, 38 bp, synthetic construct
  misc_feature 1..38: note = Probe
  source 1..38: mol_type = other DNA
ttagcactctggactctgaatccagcgatccgagttca

SEQ ID NO: 35491 - DNA, 22 bp, synthetic construct
  misc_feature 1..22: note = Probe
  source 1..22: mol_type = other DNA
ttagcactctggactttgaatc

SEQ ID NO: 35492 - DNA, 23 bp, synthetic construct
  misc_feature 1..23: note = Probe
  source 1..23: mol_type = other DNA
ttagcactctggactttgaatcc

SEQ ID NO: 35493 - DNA, 34 bp, synthetic construct
  misc_feature 1..34: note = Probe
  source 1..34: mol_type = other DNA
ttagcactctggactttgaatccagcaatccgag

SEQ ID NO: 35494 - DNA, 35 bp, synthetic construct
  misc_feature 1..35: note = Probe
  source 1..35: mol_type = other DNA
ttagcactctggactttgaatccagcaatccgagt

SEQ ID NO: 35495 - DNA, 36 bp, synthetic construct
  misc_feature 1..36: note = Probe
  source 1..36: mol_type = other DNA
ttagcactctggactttgaatccagcaatccgagtt

SEQ ID NO: 35496 - DNA, 34 bp, synthetic construct
  misc_feature 1..34: note = Probe
  source 1..34: mol_type = other DNA
ttagcactctggactttgaatccagcgatccgag

SEQ ID NO: 35497 - DNA, 35 bp, synthetic construct
  misc_feature 1..35: note = Probe
  source 1..35: mol_type = other DNA
ttagcactctggactttgaatccagcgatccgagt

SEQ ID NO: 35498 - DNA, 37 bp, synthetic construct
  misc_feature 1..37: note = Probe
  source 1..37: mol_type = other DNA
ttagcactctggactttgaatccagcgatccgagttc

SEQ ID NO: 35499 - DNA, 38 bp, synthetic construct
  misc_feature 1..38: note = Probe
  source 1..38: mol_type = other DNA
ttagcactctggactttgaatccagcgatccgagttca

SEQ ID NO: 35500 - DNA, 23 bp, synthetic construct
  misc_feature 1..23: note = Probe
  source 1..23: mol_type = other DNA
ttagcatgcacgaggccccgggt

SEQ ID NO: 35501 - DNA, 23 bp, synthetic construct
  misc_feature 1..23: note = Probe
  source 1..23: mol_type = other DNA
ttagcatgcgagaggtagcggga

SEQ ID NO: 35502 - DNA, 37 bp, synthetic construct; identical to SEQ ID NO: 8364
  misc_feature 1..37: note = Probe
  source 1..37: mol_type = other DNA

SEQ ID NO: 35503 - DNA, 43 bp, synthetic construct
  misc_feature 1..43: note = Probe
  source 1..43: mol_type = other DNA
ttagcattaaccttttaagttaaagattaagagaaccaacacc

SEQ ID NO: 35504 - DNA, 27 bp, synthetic construct
  misc_feature 1..27: note = Probe
  source 1..27: mol_type = other DNA
ttagctttgggtgctaatggtggagtt

SEQ ID NO: 35505 - DNA, 31 bp, synthetic construct
  misc_feature 1..31: note = Probe
  source 1..31: mol_type = other DNA
ttagctttgggtgctaatggtggagttaaag

SEQ ID NO: 35506 - DNA, 32 bp, synthetic construct
  misc_feature 1..32: note = Probe
  source 1..32: mol_type = other DNA
ttagctttgggtgctaatggtggagttaaaga

SEQ ID NO: 35507 - DNA, 33 bp, synthetic construct
  misc_feature 1..33: note = Probe
  source 1..33: mol_type = other DNA
ttagctttgggtgctaatggtggagttaaagac

SEQ ID NO: 35508 - DNA, 34 bp, synthetic construct
  misc_feature 1..34: note = Probe
  source 1..34: mol_type = other DNA
ttagctttgggtgctaatggtggagttaaagact

SEQ ID NO: 35509 - DNA, 36 bp, synthetic construct
  misc_feature 1..36: note = Probe
  source 1..36: mol_type = other DNA
ttagctttgggtgctaatggtggagttaaagacttt

SEQ ID NO: 35510 - DNA, 15 bp, synthetic construct
  misc_feature 1..15: note = Probe
  source 1..15: mol_type = other DNA
ttaggagatttcaac

SEQ ID NO: 35511 - DNA, 16 bp, synthetic construct
  misc_feature 1..16: note = Probe
  source 1..16: mol_type = other DNA
ttaggagatttcaact

SEQ ID NO: 35512 - DNA, 21 bp, synthetic construct
  misc_feature 1..21: note = Probe
  source 1..21: mol_type = other DNA
ttaggagatttcaacttaact

SEQ ID NO: 35513 - DNA, 26 bp, synthetic construct
  misc_feature 1..26: note = Probe
  source 1..26: mol_type = other DNA
ttaggagatttcaacttaacttgacc

SEQ ID NO: 35514 - DNA, 27 bp, synthetic construct
  misc_feature 1..27: note = Probe
  source 1..27: mol_type = other DNA
ttaggagatttcaacttaacttgaccg

SEQ ID NO: 35515 - DNA, 29 bp, synthetic construct
  misc_feature 1..29: note = Probe
  source 1..29: mol_type = other DNA
ttaggagatttcaacttaacttgaccgct

SEQ ID NO: 35516 - DNA, 30 bp, synthetic construct; identical to SEQ ID NO: 8367
  misc_feature 1..30: note = Probe
  source 1..30: mol_type = other DNA

SEQ ID NO: 35517 - DNA, 31 bp, synthetic construct; identical to SEQ ID NO: 8368
  misc_feature 1..31: note = Probe
  source 1..31: mol_type = other DNA

SEQ ID NO: 35518 - DNA, 35 bp, synthetic construct; identical to SEQ ID NO: 8372
  misc_feature 1..35: note = Probe
  source 1..35: mol_type = other DNA

SEQ ID NO: 35519 - DNA, 36 bp, synthetic construct; identical to SEQ ID NO: 8373
  misc_feature 1..36: note = Probe
  source 1..36: mol_type = other DNA

SEQ ID NO: 35520 - DNA, 19 bp, synthetic construct
  misc_feature 1..19: note = Probe
  source 1..19: mol_type = other DNA
ttaggatgcgagaggtccc

SEQ ID NO: 35521 - DNA, 22 bp, synthetic construct
  misc_feature 1..22: note = Probe
  source 1..22: mol_type = other DNA
ttaggatgcgagaggtcccggg

SEQ ID NO: 35522 - DNA, 23 bp, synthetic construct
  misc_feature 1..23: note = Probe
  source 1..23: mol_type = other DNA
ttaggatgcgagaggtcccgggt

SEQ ID NO: 35523 - DNA, 24 bp, synthetic construct
  misc_feature 1..24: note = Probe
  source 1..24: mol_type = other DNA
ttaggatgcgagaggtcccgggtt

SEQ ID NO: 35524 - DNA, 31 bp, synthetic construct
  misc_feature 1..31: note = Probe
  source 1..31: mol_type = other DNA
ttaggatggggtgtgataggtggcacggaga

SEQ ID NO: 35525 - DNA, 36 bp, synthetic construct
  misc_feature 1..36: note = Probe
  source 1..36: mol_type = other DNA
ttaggatggggtgtgataggtggcacggagaatttt

SEQ ID NO: 35526 - DNA, 15 bp, synthetic construct
  misc_feature 1..15: note = Probe
  source 1..15: mol_type = other DNA
ttaggattcggcgct

SEQ ID NO: 35527 - DNA, 17 bp, synthetic construct
  misc_feature 1..17: note = Probe
  source 1..17: mol_type = other DNA
ttaggattcggcgctct

SEQ ID NO: 35528 - DNA, 21 bp, synthetic construct
  misc_feature 1..21: note = Probe
  source 1..21: mol_type = other DNA
ttaggattcggcgctctcacc

SEQ ID NO: 35529 - DNA, 36 bp, synthetic construct
  misc_feature 1..36: note = Probe
  source 1..36: mol_type = other DNA
ttaggccccaaaaattttggtgcaactccaaataaa

SEQ ID NO: 35530 - DNA, 17 bp, synthetic construct
  misc_feature 1..17: note = Probe
  source 1..17: mol_type = other DNA
ttaggcctctttttacc

SEQ ID NO: 35531 - DNA, 20 bp, synthetic construct
  misc_feature 1..20: note = Probe
  source 1..20: mol_type = other DNA
ttaggcctctttttaccagc

SEQ ID NO: 35532 - DNA, 18 bp, synthetic construct
  misc_feature 1..18: note = Probe
  source 1..18: mol_type = other DNA
ttagggtgcgagaggtcc

SEQ ID NO: 35533 - DNA, 19 bp, synthetic construct
  misc_feature 1..19: note = Probe
  source 1..19: mol_type = other DNA
ttagggtgcgagaggtccc

SEQ ID NO: 35534 - DNA, 21 bp, synthetic construct
  misc_feature 1..21: note = Probe
  source 1..21: mol_type = other DNA
ttagggtgcgagaggtcccgg

SEQ ID NO: 35535 - DNA, 22 bp, synthetic construct
  misc_feature 1..22: note = Probe
  source 1..22: mol_type = other DNA
ttagggtgcgagaggtcccggg

SEQ ID NO: 35536 - DNA, 23 bp, synthetic construct
  misc_feature 1..23: note = Probe
  source 1..23: mol_type = other DNA
ttagggtgcgagaggtcccgggt

SEQ ID NO: 35537 - DNA, 24 bp, synthetic construct
  misc_feature 1..24: note = Probe
  source 1..24: mol_type = other DNA
ttagggtgcgagaggtcccgggtt

SEQ ID NO: 35538 - DNA, 18 bp, synthetic construct
  misc_feature 1..18: note = Probe
  source 1..18: mol_type = other DNA
ttagggtgcttagctgtt

SEQ ID NO: 35539 - DNA, 22 bp, synthetic construct
  misc_feature 1..22: note = Probe
  source 1..22: mol_type = other DNA
ttagggtgcttagctgttaact

SEQ ID NO: 35540 - DNA, 34 bp, synthetic construct
  misc_feature 1..34: note = Probe
  source 1..34: mol_type = other DNA
ttagtactctgcgttgtggccgcagcaacctcgg

SEQ ID NO: 35541 - DNA, 35 bp, synthetic construct
  misc_feature 1..35: note = Probe
  source 1..35: mol_type = other DNA
ttagtactctgcgttgtggccgcagcaacctcggt

SEQ ID NO: 35542 - DNA, 36 bp, synthetic construct
  misc_feature 1..36: note = Probe
  source 1..36: mol_type = other DNA
ttagtactctgcgttgtggccgcagcaacctcggtt

SEQ ID NO: 35543 - DNA, 24 bp, synthetic construct
  misc_feature 1..24: note = Probe
  source 1..24: mol_type = other DNA
ttagtctaggctgtcagctcttcc

SEQ ID NO: 35544 - DNA, 18 bp, synthetic construct
  misc_feature 1..18: note = Probe
  source 1..18: mol_type = other DNA
ttatacccttcccgtact

SEQ ID NO: 35545 - DNA, 19 bp, synthetic construct
  misc_feature 1..19: note = Probe
  source 1..19: mol_type = other DNA
ttatacccttcccgtacta

SEQ ID NO: 35546 - DNA, 21 bp, synthetic construct
  misc_feature 1..21: note = Probe
  source 1..21: mol_type = other DNA
ttatcacgttcgcctaacacg

SEQ ID NO: 35547 - DNA, 21 bp, synthetic construct
  misc_feature 1..21: note = Probe
  source 1..21: mol_type = other DNA
ttatcacgttcgcctcacacg

SEQ ID NO: 35548 - DNA, 18 bp, synthetic construct
  misc_feature 1..18: note = Probe
  source 1..18: mol_type = other DNA
ttatgtagcttacctcct

SEQ ID NO: 35549 - DNA, 24 bp, synthetic construct
  misc_feature 1..24: note = Probe
  source 1..24: mol_type = other DNA
ttattcaattgaaacagcgtgatt

SEQ ID NO: 35550 - DNA, 25 bp, synthetic construct
  misc_feature 1..25: note = Probe
  source 1..25: mol_type = other DNA
ttattcaattgaaacagcgtgattt

SEQ ID NO: 35551 - DNA, 26 bp, synthetic construct
  misc_feature 1..26: note = Probe
  source 1..26: mol_type = other DNA
ttattcaattgaaacagcgtgatttt

SEQ ID NO: 35552 - DNA, 24 bp, synthetic construct
  misc_feature 1..24: note = Probe
  source 1..24: mol_type = other DNA
ttatttctaggactatgagaatcg

SEQ ID NO: 35553 - DNA, 27 bp, synthetic construct
  misc_feature 1..27: note = Probe
  source 1..27: mol_type = other DNA
ttatttctaggactatgagaatcgaac

SEQ ID NO: 35554 - DNA, 28 bp, synthetic construct
  misc_feature 1..28: note = Probe
  source 1..28: mol_type = other DNA
ttatttctaggactatgagaatcgaacc

SEQ ID NO: 35555 - DNA, 29 bp, synthetic construct
  misc_feature 1..29: note = Probe
  source 1..29: mol_type = other DNA
ttatttctaggactatgagaatcgaaccc

SEQ ID NO: 35556 - DNA, 30 bp, synthetic construct
  misc_feature 1..30: note = Probe
  source 1..30: mol_type = other DNA
ttatttctaggactatgagaatcgaaccca

SEQ ID NO: 35557 - DNA, 32 bp, synthetic construct
  misc_feature 1..32: note = Probe
  source 1..32: mol_type = other DNA
ttatttctaggactatgagaatcgaacccatc

SEQ ID NO: 35558 - DNA, 33 bp, synthetic construct
  misc_feature 1..33: note = Probe
  source 1..33: mol_type = other DNA
ttatttctaggactatgagaatcgaacccatcc

SEQ ID NO: 35559 - DNA, 36 bp, synthetic construct
  misc_feature 1..36: note = Probe
  source 1..36: mol_type = other DNA
ttatttctaggactatgagaatcgaacccatccctg

SEQ ID NO: 35560 - DNA, 17 bp, synthetic construct
  misc_feature 1..17: note = Probe
  source 1..17: mol_type = other DNA
ttcaaacctgccggggc

SEQ ID NO: 35561 - DNA, 18 bp, synthetic construct
  misc_feature 1..18: note = Probe
  source 1..18: mol_type = other DNA
ttcaaacctgccggggct

SEQ ID NO: 35562 - DNA, 21 bp, synthetic construct
  misc_feature 1..21: note = Probe
  source 1..21: mol_type = other DNA
ttcaaacctgccggggcttct

SEQ ID NO: 35563 - DNA, 36 bp, synthetic construct
  misc_feature 1..36: note = Probe
  source 1..36: mol_type = other DNA
ttcaaagccctcagtaagttgcaatacttaatttct

SEQ ID NO: 35564 - DNA, 17 bp, synthetic construct
  misc_feature 1..17: note = Probe
  source 1..17: mol_type = other DNA
ttcaaaggtgaacgttt

SEQ ID NO: 35565 - DNA, 18 bp, synthetic construct
  misc_feature 1..18: note = Probe
  source 1..18: mol_type = other DNA
ttcaaaggtgaacgtttt

SEQ ID NO: 35566 - DNA, 36 bp, synthetic construct
  misc_feature 1..36: note = Probe
  source 1..36: mol_type = other DNA
ttcaaaggttccgggttcgagtcccggcggagtcgt

SEQ ID NO: 35567 - DNA, 38 bp, synthetic construct; identical to SEQ ID NO: 24636
  misc_feature 1..38: note = Probe
  source 1..38: mol_type = other DNA

SEQ ID NO: 35568 - DNA, 36 bp, synthetic construct
  misc_feature 1..36: note = Probe
  source 1..36: mol_type = other DNA
ttcaaaggttgtgggttcgaatcccaccagagtcga

SEQ ID NO: 35569 - DNA, 38 bp, synthetic construct
  misc_feature 1..38: note = Probe
  source 1..38: mol_type = other DNA
ttcaaaggttgtgggttcgagtcccaccagagtcgctt

SEQ ID NO: 35570 - DNA, 19 bp, synthetic construct
  misc_feature 1..19: note = Probe
  source 1..19: mol_type = other DNA
ttcaaatcccggacgagcc

SEQ ID NO: 35571 - DNA, 20 bp, synthetic construct
  misc_feature 1..20: note = Probe
  source 1..20: mol_type = other DNA
ttcaaatcccggacgagccc

SEQ ID NO: 35572 - DNA, 23 bp, synthetic construct
  misc_feature 1..23: note = Probe
  source 1..23: mol_type = other DNA
ttcaaatcccggacgagccctca

SEQ ID NO: 35573 - DNA, 20 bp, synthetic construct
  misc_feature 1..20: note = Probe
  source 1..20: mol_type = other DNA
ttcaacttaacttgaccgct

SEQ ID NO: 35574 - DNA, 22 bp, synthetic construct
  misc_feature 1..22: note = Probe
  source 1..22: mol_type = other DNA
ttcaacttaacttgaccgctct

SEQ ID NO: 35575 - DNA, 24 bp, synthetic construct
  misc_feature 1..24: note = Probe
  source 1..24: mol_type = other DNA
ttcaacttaacttgaccgctctga

SEQ ID NO: 35576 - DNA, 25 bp, synthetic construct
  misc_feature 1..25: note = Probe
  source 1..25: mol_type = other DNA
ttcaacttaacttgaccgctctgag

SEQ ID NO: 35577 - DNA, 26 bp, synthetic construct
  misc_feature 1..26: note = Probe
  source 1..26: mol_type = other DNA
ttcaacttaacttgaccgctctgagc

SEQ ID NO: 35578 - DNA, 32 bp, synthetic construct
  misc_feature 1..32: note = Probe
  source 1..32: mol_type = other DNA
ttcaacttaacttgaccgctctgagctaaacc

SEQ ID NO: 35579 - DNA, 33 bp, synthetic construct
  misc_feature 1..33: note = Probe
  source 1..33: mol_type = other DNA
ttcaacttaacttgaccgctctgagctaaacct

SEQ ID NO: 35580 - DNA, 36 bp, synthetic construct
  misc_feature 1..36: note = Probe
  source 1..36: mol_type = other DNA
ttcaacttaacttgaccgctctgagctaaacctagc

SEQ ID NO: 35581 - DNA, 36 bp, synthetic construct
  misc_feature 1..36: note = Probe
  source 1..36: mol_type = other DNA
ttcagatgcgttggtggtatagtggtgagcatagct

SEQ ID NO: 35582 - DNA, 19 bp, synthetic construct
  misc_feature 1..19: note = Probe
  source 1..19: mol_type = other DNA
ttcagctatagggtggaga

SEQ ID NO: 35583 - DNA, 15 bp, synthetic construct
  misc_feature 1..15: note = Probe
  source 1..15: mol_type = other DNA
ttcaggtcgcagtct

SEQ ID NO: 35584 - DNA, 16 bp, synthetic construct
  misc_feature 1..16: note = Probe
  source 1..16: mol_type = other DNA
ttcaggtcgcagtctc

SEQ ID NO: 35585 - DNA, 17 bp, synthetic construct
  misc_feature 1..17: note = Probe
  source 1..17: mol_type = other DNA
ttcaggtcgcagtctcc

SEQ ID NO: 35586 - DNA, 20 bp, synthetic construct
  misc_feature 1..20: note = Probe
  source 1..20: mol_type = other DNA
ttcagtggtagaattctcgc

SEQ ID NO: 35587 - DNA, 21 bp, synthetic construct
  misc_feature 1..21: note = Probe
  source 1..21: mol_type = other DNA
ttcagtggtagaattctcgcc

SEQ ID NO: 35588 - DNA, 22 bp, synthetic construct
  misc_feature 1..22: note = Probe
  source 1..22: mol_type = other DNA
ttcagtggtagaattctcgcct

SEQ ID NO: 35589 - DNA, 24 bp, synthetic construct
  misc_feature 1..24: note = Probe
  source 1..24: mol_type = other DNA
ttcagtggtagaattctcgcctgc

SEQ ID NO: 35590 - DNA, 25 bp, synthetic construct
  misc_feature 1..25: note = Probe
  source 1..25: mol_type = other DNA
ttcagtggtagaattctcgcctgcc

SEQ ID NO: 35591 - DNA, 26 bp, synthetic construct
  misc_feature 1..26: note = Probe
  source 1..26: mol_type = other DNA
ttcagtggtagaattctcgcctgcca

SEQ ID NO: 35592 - DNA, 36 bp, synthetic construct
  misc_feature 1..36: note = Probe
  source 1..36: mol_type = other DNA
ttcagtggtagaattctcgcctgccacgcgggaggc

SEQ ID NO: 35593 - DNA, 31 bp, synthetic construct; identical to SEQ ID NO: 8393
  misc_feature 1..31: note = Probe
  source 1..31: mol_type = other DNA

SEQ ID NO: 35594 - DNA, 32 bp, synthetic construct
  misc_feature 1..32: note = Probe
  source 1..32: mol_type = other DNA
ttcagttgatgcagagtggggttttgcagtcc

SEQ ID NO: 35595 - DNA, 33 bp, synthetic construct; identical to SEQ ID NO: 8394
  misc_feature 1..33: note = Probe
  source 1..33: mol_type = other DNA

SEQ ID NO: 35596 - DNA, 36 bp, synthetic construct; identical to SEQ ID NO: 8396
  misc_feature 1..36: note = Probe
  source 1..36: mol_type = other DNA

SEQ ID NO: 35597 - DNA, 37 bp, synthetic construct; identical to SEQ ID NO: 8397
  misc_feature 1..37: note = Probe
  source 1..37: mol_type = other DNA

SEQ ID NO: 35598 - DNA, 38 bp, synthetic construct; identical to SEQ ID NO: 8398
  misc_feature 1..38: note = Probe
  source 1..38: mol_type = other DNA

SEQ ID NO: 35599 - DNA, 32 bp, synthetic construct
  misc_feature 1..32: note = Probe
  source 1..32: mol_type = other DNA
ttcataactttgtcaaagttaaattataggct

SEQ ID NO: 35600 - DNA, 27 bp, synthetic construct
  misc_feature 1..27: note = Probe
  source 1..27: mol_type = other DNA
ttcatatcattggtcgtggttgtagtc

SEQ ID NO: 35601 - DNA, 28 bp, synthetic construct
  misc_feature 1..28: note = Probe
  source 1..28: mol_type = other DNA
ttcatatcattggtcgtggttgtagtcc

SEQ ID NO: 35602 - DNA, 31 bp, synthetic construct
  misc_feature 1..31: note = Probe
  source 1..31: mol_type = other DNA
ttcatatcattggtcgtggttgtagtccgtg

SEQ ID NO: 35603 - DNA, 33 bp, synthetic construct
  misc_feature 1..33: note = Probe
  source 1..33: mol_type = other DNA
ttcatatcattggtcgtggttgtagtccgtgcg

SEQ ID NO: 35604 - DNA, 34 bp, synthetic construct
  misc_feature 1..34: note = Probe
  source 1..34: mol_type = other DNA
ttcatatcattggtcgtggttgtagtccgtgcga

SEQ ID NO: 35605 - DNA, 35 bp, synthetic construct
  misc_feature 1..35: note = Probe
  source 1..35: mol_type = other DNA
ttcatatcattggtcgtggttgtagtccgtgcgag

SEQ ID NO: 35606 - DNA, 37 bp, synthetic construct
  misc_feature 1..37: note = Probe
  source 1..37: mol_type = other DNA
ttcatatcattggtcgtggttgtagtccgtgcgagaa

SEQ ID NO: 35607 - DNA, 38 bp, synthetic construct
  misc_feature 1..38: note = Probe
  source 1..38: mol_type = other DNA
ttcatatcattggtcgtggttgtagtccgtgcgagaat

SEQ ID NO: 35608 - DNA, 39 bp, synthetic construct; identical to SEQ ID NO: 14465
  misc_feature 1..39: note = Probe
  source 1..39: mol_type = other DNA

SEQ ID NO: 35609 - DNA, 41 bp, synthetic construct; identical to SEQ ID NO: 8401
  misc_feature 1..41: note = Probe
  source 1..41: mol_type = other DNA

SEQ ID NO: 35610 - DNA, 16 bp, synthetic construct
  misc_feature 1..16: note = Probe
  source 1..16: mol_type = other DNA
ttcatattgaattgca

SEQ ID NO: 35611 - DNA, 36 bp, synthetic construct
  misc_feature 1..36: note = Probe
  source 1..36: mol_type = other DNA
ttcatattgaattgcaaattcgaagaagcagcttca

SEQ ID NO: 35612 - DNA, 16 bp, synthetic construct
  misc_feature 1..16: note = Probe
  source 1..16: mol_type = other DNA
ttcatttctctccttt

SEQ ID NO: 35613 - DNA, 17 bp, synthetic construct
  misc_feature 1..17: note = Probe
  source 1..17: mol_type = other DNA
ttccaagcagttgaccc

SEQ ID NO: 35614 - DNA, 18 bp, synthetic construct
  misc_feature 1..18: note = Probe
  source 1..18: mol_type = other DNA
ttccaagcagttgacccg

SEQ ID NO: 35615 - DNA, 21 bp, synthetic construct
  misc_feature 1..21: note = Probe
  source 1..21: mol_type = other DNA
ttccaagcagttgacccgggt

SEQ ID NO: 35616 - DNA, 36 bp, synthetic construct
  misc_feature 1..36: note = Probe
  source 1..36: mol_type = other DNA
ttccaattaactagttttgacaacattcaaaaaaga

SEQ ID NO: 35617 - DNA, 16 bp, synthetic construct
  misc_feature 1..16: note = Probe
  source 1..16: mol_type = other DNA
ttccagctcgaaggaa

SEQ ID NO: 35618 - DNA, 29 bp, synthetic construct
  misc_feature 1..29: note = Probe
  source 1..29: mol_type = other DNA
ttccatagtgtagtggttatcacgtctgc

SEQ ID NO: 35619 - DNA, 30 bp, synthetic construct; identical to SEQ ID NO: 24665
  misc_feature 1..30: note = Probe
  source 1..30: mol_type = other DNA

SEQ ID NO: 35620 - DNA, 33 bp, synthetic construct; identical to SEQ ID NO: 24668
  misc_feature 1..33: note = Probe
  source 1..33: mol_type = other DNA

SEQ ID NO: 35621 - DNA, 34 bp, synthetic construct; identical to SEQ ID NO: 24669
  misc_feature 1..34: note = Probe
  source 1..34: mol_type = other DNA

SEQ ID NO: 35622 - DNA, 31 bp, synthetic construct
  misc_feature 1..31: note = Probe
  source 1..31: mol_type = other DNA
ttccatggtgtaatggttagcactctggact

SEQ ID NO: 35623 - DNA, 33 bp, synthetic construct
  misc_feature 1..33: note = Probe
  source 1..33: mol_type = other DNA
ttccatggtgtaatggttagcactctggactct

SEQ ID NO: 35624 - DNA, 36 bp, synthetic construct
  misc_feature 1..36: note = Probe
  source 1..36: mol_type = other DNA
ttccatggtgtaatggttagcactctggactctgaa

SEQ ID NO: 35625 - DNA, 50 bp, synthetic construct
  misc_feature 1..50: note = Probe
  source 1..50: mol_type = other DNA
ttccatggtgtaatggttagcactctggactctgaatccagcgatccgag

SEQ ID NO: 35626 - DNA, 16 bp, synthetic construct
  misc_feature 1..16: note = Probe
  source 1..16: mol_type = other DNA
ttcccattcttgcgac

SEQ ID NO: 35627 - DNA, 18 bp, synthetic construct
  misc_feature 1..18: note = Probe
  source 1..18: mol_type = other DNA
ttccccgacggggaggca

SEQ ID NO: 35628 - DNA, 16 bp, synthetic construct
  misc_feature 1..16: note = Probe
  source 1..16: mol_type = other DNA
ttcccggccaacgcaa

SEQ ID NO: 35629 - DNA, 16 bp, synthetic construct
  misc_feature 1..16: note = Probe
  source 1..16: mol_type = other DNA
ttcccggccaacgcag

SEQ ID NO: 35630 - DNA, 17 bp, synthetic construct
  misc_feature 1..17: note = Probe
  source 1..17: mol_type = other DNA
ttcccggccaacgcagc

SEQ ID NO: 35631 - DNA, 18 bp, synthetic construct
  misc_feature 1..18: note = Probe
  source 1..18: mol_type = other DNA
ttcccggccaacgcagcg

SEQ ID NO: 35632 - DNA, 16 bp, synthetic construct
  misc_feature 1..16: note = Probe
  source 1..16: mol_type = other DNA
ttcccggccaacgcat

SEQ ID NO: 35633 - DNA, 15 bp, synthetic construct
  misc_feature 1..15: note = Probe
  source 1..15: mol_type = other DNA
ttcccggccaatgca

SEQ ID NO: 35634 - DNA, 24 bp, synthetic construct
  misc_feature 1..24: note = Probe
  source 1..24: mol_type = other DNA
ttcccggccaatgcaacgatgacg

SEQ ID NO: 35635 - DNA, 26 bp, synthetic construct
  misc_feature 1..26: note = Probe
  source 1..26: mol_type = other DNA
ttcccggccaatgcaacgatgacgtt

SEQ ID NO: 35636 - DNA, 27 bp, synthetic construct
  misc_feature 1..27: note = Probe
  source 1..27: mol_type = other DNA
ttcccggccaatgcaacgatgacgttt

SEQ ID NO: 35637 - DNA, 28 bp, synthetic construct
  misc_feature 1..28: note = Probe
  source 1..28: mol_type = other DNA
ttcccggccaatgcaacgatgacgtttt

SEQ ID NO: 35638 - DNA, 29 bp, synthetic construct
  misc_feature 1..29: note = Probe
  source 1..29: mol_type = other DNA
ttcccggccaatgcaacgatgacgtttta

SEQ ID NO: 35639 - DNA, 16 bp, synthetic construct
  misc_feature 1..16: note = Probe
  source 1..16: mol_type = other DNA
ttcccggccaatgcac

SEQ ID NO: 35640 - DNA, 15 bp, synthetic construct
  misc_feature 1..15: note = Probe
  source 1..15: mol_type = other DNA
ttcccgggcggcgca

SEQ ID NO: 35641 - DNA, 16 bp, synthetic construct
  misc_feature 1..16: note = Probe
  source 1..16: mol_type = other DNA
ttcccgggcggcgcac

SEQ ID NO: 35642 - DNA, 17 bp, synthetic construct
  misc_feature 1..17: note = Probe
  source 1..17: mol_type = other DNA
ttcccgggcggcgcact

SEQ ID NO: 35643 - DNA, 16 bp, synthetic construct
  misc_feature 1..16: note = Probe
  source 1..16: mol_type = other DNA
ttcccggtcagggaac

SEQ ID NO: 35644 - DNA, 17 bp, synthetic construct
  misc_feature 1..17: note = Probe
  source 1..17: mol_type = other DNA
ttcccggtcagggaacc

SEQ ID NO: 35645 - DNA, 18 bp, synthetic construct
  misc_feature 1..18: note = Probe
  source 1..18: mol_type = other DNA
ttcccggtcagggaacca

SEQ ID NO: 35646 - DNA, 34 bp, synthetic construct; identical to SEQ ID NO: 24676
  misc_feature 1..34: note = Probe
  source 1..34: mol_type = other DNA

SEQ ID NO: 35647 - DNA, 35 bp, synthetic construct
  misc_feature 1..35: note = Probe
  source 1..35: mol_type = other DNA
ttccctggtggtctagtggttaggattcggcgctc

SEQ ID NO: 35648 - DNA, 36 bp, synthetic construct
  misc_feature 1..36: note = Probe
  source 1..36: mol_type = other DNA
ttccctggtggtctagtggttaggattcggcgctct

SEQ ID NO: 35649 - DNA, 37 bp, synthetic construct
  misc_feature 1..37: note = Probe
  source 1..37: mol_type = other DNA
ttccctggtggtctagtggttaggattcggcgctctc

SEQ ID NO: 35650 - DNA, 19 bp, synthetic construct
  misc_feature 1..19: note = Probe
  source 1..19: mol_type = other DNA
ttccggatcagaagattga

SEQ ID NO: 35651 - DNA, 23 bp, synthetic construct
  misc_feature 1..23: note = Probe
  source 1..23: mol_type = other DNA
ttccggatcagaagattgagggt

SEQ ID NO: 35652 - DNA, 15 bp, synthetic construct
  misc_feature 1..15: note = Probe
  source 1..15: mol_type = other DNA
ttccggctcgaagga

SEQ ID NO: 35653 - DNA, 17 bp, synthetic construct
  misc_feature 1..17: note = Probe
  source 1..17: mol_type = other DNA
ttccggctcgaaggaag

SEQ ID NO: 35654 - DNA, 17 bp, synthetic construct
  misc_feature 1..17: note = Probe
  source 1..17: mol_type = other DNA
ttccggctcgaaggact

SEQ ID NO: 35655 - DNA, 18 bp, synthetic construct
  misc_feature 1..18: note = Probe
  source 1..18: mol_type = other DNA
ttccggctcgaaggactt

SEQ ID NO: 35656 - DNA, 22 bp, synthetic construct
  misc_feature 1..22: note = Probe
  source 1..22: mol_type = other DNA
ttccggctcgaaggacttcgtc

SEQ ID NO: 35657 - DNA, 17 bp, synthetic construct
  misc_feature 1..17: note = Probe
  source 1..17: mol_type = other DNA
ttccggctcgaaggaga

SEQ ID NO: 35658 - DNA, 17 bp, synthetic construct
  misc_feature 1..17: note = Probe
  source 1..17: mol_type = other DNA
ttccggctcgaaggagc

SEQ ID NO: 35659 - DNA, 18 bp, synthetic construct
  misc_feature 1..18: note = Probe
  source 1..18: mol_type = other DNA
ttccggctcgaaggagct

SEQ ID NO: 35660 - DNA, 31 bp, synthetic construct
  misc_feature 1..31: note = Probe
  source 1..31: mol_type = other DNA
ttccgtagtggagtggttatcacgttcgcct

SEQ ID NO: 35661 - DNA, 30 bp, synthetic construct; identical to SEQ ID NO: 24681
  misc_feature 1..30: note = Probe
  source 1..30: mol_type = other DNA

SEQ ID NO: 35662 - DNA, 31 bp, synthetic construct; identical to SEQ ID NO: 14469
  misc_feature 1..31: note = Probe
  source 1..31: mol_type = other DNA

SEQ ID NO: 35663 - DNA, 32 bp, synthetic construct; identical to SEQ ID NO: 8419
  misc_feature 1..32: note = Probe
  source 1..32: mol_type = other DNA

SEQ ID NO: 35664 - DNA, 33 bp, synthetic construct; identical to SEQ ID NO: 8420
  misc_feature 1..33: note = Probe
  source 1..33: mol_type = other DNA

SEQ ID NO: 35665 - DNA, 21 bp, synthetic construct
  misc_feature 1..21: note = Probe
  source 1..21: mol_type = other DNA
ttccgtagtgtagtggtcatc

SEQ ID NO: 35666 - DNA, 32 bp, synthetic construct; identical to SEQ ID NO: 24688
  misc_feature 1..32: note = Probe
  source 1..32: mol_type = other DNA

SEQ ID NO: 35667 - DNA, 33 bp, synthetic construct; identical to SEQ ID NO: 8422
  misc_feature 1..33: note = Probe
  source 1..33: mol_type = other DNA

SEQ ID NO: 35668 - DNA, 34 bp, synthetic construct; identical to SEQ ID NO: 24690
  misc_feature 1..34: note = Probe
  source 1..34: mol_type = other DNA

SEQ ID NO: 35669 - DNA, 21 bp, synthetic construct
  misc_feature 1..21: note = Probe
  source 1..21: mol_type = other DNA
ttccgtagtgtagtggttatc

SEQ ID NO: 35670 - DNA, 30 bp, synthetic construct; identical to SEQ ID NO: 8425
  misc_feature 1..30: note = Probe
  source 1..30: mol_type = other DNA

SEQ ID NO: 35671 - DNA, 31 bp, synthetic construct; identical to SEQ ID NO: 8426
  misc_feature 1..31: note = Probe
  source 1..31: mol_type = other DNA

SEQ ID NO: 35672 - DNA, 33 bp, synthetic construct
  misc_feature 1..33: note = Probe
  source 1..33: mol_type = other DNA
ttccgtagtgtagtggttatcacgttcgcctaa

SEQ ID NO: 35673 - DNA, 32 bp, synthetic construct; identical to SEQ ID NO: 8427
  misc_feature 1..32: note = Probe
  source 1..32: mol_type = other DNA

SEQ ID NO: 35674 - DNA, 33 bp, synthetic construct; identical to SEQ ID NO: 8428
  misc_feature 1..33: note = Probe
  source 1..33: mol_type = other DNA

SEQ ID NO: 35675 - DNA, 34 bp, synthetic construct; identical to SEQ ID NO: 8429
  misc_feature 1..34: note = Probe
  source 1..34: mol_type = other DNA

SEQ ID NO: 35676 - DNA, 35 bp, synthetic construct; identical to SEQ ID NO: 8430
  misc_feature 1..35: note = Probe
  source 1..35: mol_type = other DNA

SEQ ID NO: 35677 - DNA, 36 bp, synthetic construct
  misc_feature 1..36: note = Probe
  source 1..36: mol_type = other DNA
ttccgtagtgtagtggttatcacgttcgcctcacac

SEQ ID NO: 35678 - DNA, 31 bp, synthetic construct
  misc_feature 1..31: note = Probe
  source 1..31: mol_type = other DNA
ttccgtagtgtagtggttatcacgtttgcct

SEQ ID NO: 35679 - DNA, 15 bp, synthetic construct
  misc_feature 1..15: note = Probe
  source 1..15: mol_type = other DNA
ttccgtgggtttgtt

SEQ ID NO: 35680 - DNA, 16 bp, synthetic construct
  misc_feature 1..16: note = Probe
  source 1..16: mol_type = other DNA
ttccgtgggtttgttt

SEQ ID NO: 35681 - DNA, 17 bp, synthetic construct
  misc_feature 1..17: note = Probe
  source 1..17: mol_type = other DNA
ttccgtgggtttgtttt

SEQ ID NO: 35682 - DNA, 18 bp, synthetic construct
  misc_feature 1..18: note = Probe
  source 1..18: mol_type = other DNA
ttccgtgggtttgttttt

SEQ ID NO: 35683 - DNA, 19 bp, synthetic construct
  misc_feature 1..19: note = Probe
  source 1..19: mol_type = other DNA
ttccgtgggtttgtttttt

SEQ ID NO: 35684 - DNA, 20 bp, synthetic construct
  misc_feature 1..20: note = Probe
  source 1..20: mol_type = other DNA
ttccgtgggtttgttttttt

SEQ ID NO: 35685 - DNA, 30 bp, synthetic construct; identical to SEQ ID NO: 24706
  misc_feature 1..30: note = Probe
  source 1..30: mol_type = other DNA

SEQ ID NO: 35686 - DNA, 31 bp, synthetic construct; identical to SEQ ID NO: 24707
  misc_feature 1..31: note = Probe
  source 1..31: mol_type = other DNA

SEQ ID NO: 35687 - DNA, 29 bp, synthetic construct
  misc_feature 1..29: note = Probe
  source 1..29: mol_type = other DNA
ttccttgtccggtttatgtctcttggttt

SEQ ID NO: 35688 - DNA, 32 bp, synthetic construct; identical to SEQ ID NO: 8435
  misc_feature 1..32: note = Probe
  source 1..32: mol_type = other DNA

SEQ ID NO: 35689 - DNA, 33 bp, synthetic construct; identical to SEQ ID NO: 8436
  misc_feature 1..33: note = Probe
  source 1..33: mol_type = other DNA

SEQ ID NO: 35690 - DNA, 33 bp, synthetic construct
  misc_feature 1..33: note = Probe
  source 1..33: mol_type = other DNA
ttcgactcattaaattatgataatcatatttac

SEQ ID NO: 35691 - DNA, 36 bp, synthetic construct
  misc_feature 1..36: note = Probe
  source 1..36: mol_type = other DNA
ttcgactcattaaattatgataatcatatttaccaa

SEQ ID NO: 35692 - DNA, 16 bp, synthetic construct
  misc_feature 1..16: note = Probe
  source 1..16: mol_type = other DNA
ttcgactcccggtgtg

SEQ ID NO: 35693 - DNA, 21 bp, synthetic construct
  misc_feature 1..21: note = Probe
  source 1..21: mol_type = other DNA
ttcgactttagtggaaacttt

SEQ ID NO: 35694 - DNA, 30 bp, synthetic construct
  misc_feature 1..30: note = Probe
  source 1..30: mol_type = other DNA
ttcgactttagtggaaactttgaggtttac

SEQ ID NO: 35695 - DNA, 19 bp, synthetic construct
  misc_feature 1..19: note = Probe
  source 1..19: mol_type = other DNA
ttcgagtctcggtggaacc

SEQ ID NO: 35696 - DNA, 20 bp, synthetic construct
  misc_feature 1..20: note = Probe
  source 1..20: mol_type = other DNA
ttcgagtctcggtggaacct

SEQ ID NO: 35697 - DNA, 31 bp, synthetic construct
  misc_feature 1..31: note = Probe
  source 1..31: mol_type = other DNA
ttcgatagctcagctggtagagcggaggact

SEQ ID NO: 35698 - DNA, 29 bp, synthetic construct
  misc_feature 1..29: note = Probe
  source 1..29: mol_type = other DNA
ttcgatccccggcatctccattgtagttt

SEQ ID NO: 35699 - DNA, 30 bp, synthetic construct
  misc_feature 1..30: note = Probe
  source 1..30: mol_type = other DNA
ttcgatccccggcatctccattgtagtttt

SEQ ID NO: 35700 - DNA, 16 bp, synthetic construct
  misc_feature 1..16: note = Probe
  source 1..16: mol_type = other DNA
ttcgattccccgacgg

SEQ ID NO: 35701 - DNA, 32 bp, synthetic construct
  misc_feature 1..32: note = Probe
  source 1..32: mol_type = other DNA
ttcgattcccggccaatgcaacgatgacgttt

SEQ ID NO: 35702 - DNA, 23 bp, synthetic construct
  misc_feature 1..23: note = Probe
  source 1..23: mol_type = other DNA
ttcgattcccggccaatgcacga

SEQ ID NO: 35703 - DNA, 23 bp, synthetic construct
  misc_feature 1..23: note = Probe
  source 1..23: mol_type = other DNA
ttcgattcccggccaatgcagca

SEQ ID NO: 35704 - DNA, 17 bp, synthetic construct
  misc_feature 1..17: note = Probe
  source 1..17: mol_type = other DNA
ttcgattcccggtcagg

SEQ ID NO: 35705 - DNA, 22 bp, synthetic construct
  misc_feature 1..22: note = Probe
  source 1..22: mol_type = other DNA
ttcgattccggctcgaaggact

SEQ ID NO: 35706 - DNA, 15 bp, synthetic construct
  misc_feature 1..15: note = Probe
  source 1..15: mol_type = other DNA
ttcggcgctctcacc

SEQ ID NO: 35707 - DNA, 17 bp, synthetic construct
  misc_feature 1..17: note = Probe
  source 1..17: mol_type = other DNA
ttcggcgctctcaccgc

SEQ ID NO: 35708 - DNA, 18 bp, synthetic construct
  misc_feature 1..18: note = Probe
  source 1..18: mol_type = other DNA
ttcggcgctctcaccgcc

SEQ ID NO: 35709 - DNA, 26 bp, synthetic construct
  misc_feature 1..26: note = Probe
  source 1..26: mol_type = other DNA
ttcggcgctctcaccgccgcggcccg

SEQ ID NO: 35710 - DNA, 27 bp, synthetic construct
  misc_feature 1..27: note = Probe
  source 1..27: mol_type = other DNA
ttcggcgctctcaccgccgcggcccgg

SEQ ID NO: 35711 - DNA, 28 bp, synthetic construct
  misc_feature 1..28: note = Probe
  source 1..28: mol_type = other DNA
ttcggcgctctcaccgccgcggcccggg

SEQ ID NO: 35712 - DNA, 31 bp, synthetic construct
  misc_feature 1..31: note = Probe
  source 1..31: mol_type = other DNA
ttcggcgctctcaccgccgcggcccgggttc

SEQ ID NO: 35713 - DNA, 35 bp, synthetic construct
  misc_feature 1..35: note = Probe
  source 1..35: mol_type = other DNA
ttcggcgctctcaccgccgcggcccgggttcgatt

SEQ ID NO: 35714 - DNA, 50 bp, synthetic construct
  misc_feature 1..50: note = Probe
  source 1..50: mol_type = other DNA
ttcggcgctctcaccgccgcggcccgggttcgattcccggtcagggaagc

SEQ ID NO: 35715 - DNA, 26 bp, synthetic construct
  misc_feature 1..26: note = Probe
  source 1..26: mol_type = other DNA
ttcggctgttaaccgaaaggttggtg

SEQ ID NO: 35716 - DNA, 27 bp, synthetic construct
  misc_feature 1..27: note = Probe
  source 1..27: mol_type = other DNA
ttcggctgttaaccgaaaggttggtgg

SEQ ID NO: 35717 - DNA, 28 bp, synthetic construct
  misc_feature 1..28: note = Probe
  source 1..28: mol_type = other DNA
ttcggctgttaaccgaaaggttggtggt

SEQ ID NO: 35718 - DNA, 29 bp, synthetic construct
  misc_feature 1..29: note = Probe
  source 1..29: mol_type = other DNA
ttcggctgttaaccgaaaggttggtggtt

SEQ ID NO: 35719 - DNA, 30 bp, synthetic construct
  misc_feature 1..30: note = Probe
  source 1..30: mol_type = other DNA
ttcggctgttaaccgaaaggttggtggttc

SEQ ID NO: 35720 - DNA, 36 bp, synthetic construct
  misc_feature 1..36: note = Probe
  source 1..36: mol_type = other DNA
ttcggctgttaaccgaaaggttggtggttcgagccc

SEQ ID NO: 35721 - DNA, 20 bp, synthetic construct
  misc_feature 1..20: note = Probe
  source 1..20: mol_type = other DNA
ttcgggcgggagtggtggct

SEQ ID NO: 35722 - DNA, 21 bp, synthetic construct
  misc_feature 1..21: note = Probe
  source 1..21: mol_type = other DNA
ttcgggcgggagtggtggctt

SEQ ID NO: 35723 - DNA, 22 bp, synthetic construct
  misc_feature 1..22: note = Probe
  source 1..22: mol_type = other DNA
ttcgggcgggagtggtggcttt

SEQ ID NO: 35724 - DNA, 23 bp, synthetic construct
  misc_feature 1..23: note = Probe
  source 1..23: mol_type = other DNA
ttcgggcgggagtggtggctttt

SEQ ID NO: 35725 - DNA, 18 bp, synthetic construct
  misc_feature 1..18: note = Probe
  source 1..18: mol_type = other DNA
ttcgggtgcgagaggtcc

SEQ ID NO: 35726 - DNA, 19 bp, synthetic construct
  misc_feature 1..19: note = Probe
  source 1..19: mol_type = other DNA
ttcgggtgcgagaggtccc

SEQ ID NO: 35727 - DNA, 21 bp, synthetic construct
  misc_feature 1..21: note = Probe
  source 1..21: mol_type = other DNA
ttcgggtgcgagaggtcccgg

SEQ ID NO: 35728 - DNA, 22 bp, synthetic construct
  misc_feature 1..22: note = Probe
  source 1..22: mol_type = other DNA
ttcgggtgcgagaggtcccggg

SEQ ID NO: 35729 - DNA, 23 bp, synthetic construct
  misc_feature 1..23: note = Probe
  source 1..23: mol_type = other DNA
ttcgggtgcgagaggtcccgggt

SEQ ID NO: 35730 - DNA, 24 bp, synthetic construct
  misc_feature 1..24: note = Probe
  source 1..24: mol_type = other DNA
ttcgggtgcgagaggtcccgggtt

SEQ ID NO: 35731 - DNA, 24 bp, synthetic construct
  misc_feature 1..24: note = Probe
  source 1..24: mol_type = other DNA
ttctaggactatgagaatcgaacc

SEQ ID NO: 35732 - DNA, 25 bp, synthetic construct
  misc_feature 1..25: note = Probe
  source 1..25: mol_type = other DNA
ttctaggactatgagaatcgaaccc

SEQ ID NO: 35733 - DNA, 35 bp, synthetic construct
  misc_feature 1..35: note = Probe
  source 1..35: mol_type = other DNA
ttctaggactatgagaatcgaacccatccctgaga

SEQ ID NO: 35734 - DNA, 15 bp, synthetic construct
  misc_feature 1..15: note = Probe
  source 1..15: mol_type = other DNA
ttctcgcctgccacg

SEQ ID NO: 35735 - DNA, 16 bp, synthetic construct
  misc_feature 1..16: note = Probe
  source 1..16: mol_type = other DNA
ttctcgcctgccacgc

SEQ ID NO: 35736 - DNA, 19 bp, synthetic construct
  misc_feature 1..19: note = Probe
  source 1..19: mol_type = other DNA
ttctggtctccaatggagg

SEQ ID NO: 35737 - DNA, 36 bp, synthetic construct
  misc_feature 1..36: note = Probe
  source 1..36: mol_type = other DNA
ttctggtctccaatggaggcgtgggttcgaatccca

SEQ ID NO: 35738 - DNA, 16 bp, synthetic construct
  misc_feature 1..16: note = Probe
  source 1..16: mol_type = other DNA
ttctggtctccggatg

SEQ ID NO: 35739 - DNA, 50 bp, synthetic construct
  misc_feature 1..50: note = Probe
  source 1..50: mol_type = other DNA
ttctggtctccggatggaggcgtgggttcgaatcccacttctgacacatt

SEQ ID NO: 35740 - DNA, 32 bp, synthetic construct
  misc_feature 1..32: note = Probe
  source 1..32: mol_type = other DNA
ttctgtagtgtagtggttatcacgttcgcctc

SEQ ID NO: 35741 - DNA, 33 bp, synthetic construct; identical to SEQ ID NO: 24743
  misc_feature 1..33: note = Probe
  source 1..33: mol_type = other DNA

SEQ ID NO: 35742 - DNA, 30 bp, synthetic construct
  misc_feature 1..30: note = Probe
  source 1..30: mol_type = other DNA
ttctgtttaattaggacggcaatgttgtgt

SEQ ID NO: 35743 - DNA, 33 bp, synthetic construct; identical to SEQ ID NO: 24744
  misc_feature 1..33: note = Probe
  source 1..33: mol_type = other DNA

SEQ ID NO: 35744 - DNA, 36 bp, synthetic construct; identical to SEQ ID NO: 24745
  misc_feature 1..36: note = Probe
  source 1..36: mol_type = other DNA

SEQ ID NO: 35745 - DNA, 26 bp, synthetic construct
  misc_feature 1..26: note = Probe
  source 1..26: mol_type = other DNA
ttgaaaacaaaatactcaaatgggcc

SEQ ID NO: 35746 - DNA, 23 bp, synthetic construct
  misc_feature 1..23: note = Probe
  source 1..23: mol_type = other DNA
ttgaaaccagctttggggggttc

SEQ ID NO: 35747 - DNA, 24 bp, synthetic construct
  misc_feature 1..24: note = Probe
  source 1..24: mol_type = other DNA
ttgaaaccagctttggggggttcg

SEQ ID NO: 35748 - DNA, 36 bp, synthetic construct
  misc_feature 1..36: note = Probe
  source 1..36: mol_type = other DNA
ttgaaatacaacgatggtttttcatatcattggtcg

SEQ ID NO: 35749 - DNA, 19 bp, synthetic construct
  misc_feature 1..19: note = Probe
  source 1..19: mol_type = other DNA
ttgaatccagcgatccgag

SEQ ID NO: 35750 - DNA, 20 bp, synthetic construct
  misc_feature 1..20: note = Probe
  source 1..20: mol_type = other DNA
ttgaatccagcgatccgagt

SEQ ID NO: 35751 - DNA, 21 bp, synthetic construct
  misc_feature 1..21: note = Probe
  source 1..21: mol_type = other DNA
ttgaatccagcgatccgagtt

SEQ ID NO: 35752 - DNA, 36 bp, synthetic construct
  misc_feature 1..36: note = Probe
  source 1..36: mol_type = other DNA
ttgaattgcaaattcgaagaagcagcttcaaacctg

SEQ ID NO: 35753 - DNA, 22 bp, synthetic construct
  misc_feature 1..22: note = Probe
  source 1..22: mol_type = other DNA
ttgaccgctctgagctaaacct

SEQ ID NO: 35754 - DNA, 26 bp, synthetic construct
  misc_feature 1..26: note = Probe
  source 1..26: mol_type = other DNA
ttgactgcagatcaagaggtccccgg

SEQ ID NO: 35755 - DNA, 22 bp, synthetic construct
  misc_feature 1..22: note = Probe
  source 1..22: mol_type = other DNA
ttgagatactgactagtctggt

SEQ ID NO: 35756 - DNA, 23 bp, synthetic construct
  misc_feature 1..23: note = Probe
  source 1..23: mol_type = other DNA
ttgagatactgactagtctggtg

SEQ ID NO: 35757 - DNA, 24 bp, synthetic construct
  misc_feature 1..24: note = Probe
  source 1..24: mol_type = other DNA
ttgagatactgactagtctggtgt

SEQ ID NO: 35758 - DNA, 25 bp, synthetic construct
  misc_feature 1..25: note = Probe
  source 1..25: mol_type = other DNA
ttgagatactgactagtctggtgtt

SEQ ID NO: 35759 - DNA, 26 bp, synthetic construct
  misc_feature 1..26: note = Probe
  source 1..26: mol_type = other DNA
ttgagatactgactagtctggtgtta

SEQ ID NO: 35760 - DNA, 27 bp, synthetic construct
  misc_feature 1..27: note = Probe
  source 1..27: mol_type = other DNA
ttgagatactgactagtctggtgttat

SEQ ID NO: 35761 - DNA, 28 bp, synthetic construct
  misc_feature 1..28: note = Probe
  source 1..28: mol_type = other DNA
ttgagatactgactagtctggtgttatt

SEQ ID NO: 35762 - DNA, 29 bp, synthetic construct
  misc_feature 1..29: note = Probe
  source 1..29: mol_type = other DNA
ttgagatactgactagtctggtgttattt

SEQ ID NO: 35763 - DNA, 23 bp, synthetic construct
  misc_feature 1..23: note = Probe
  source 1..23: mol_type = other DNA
ttgatagagtaaataataggagc

SEQ ID NO: 35764 - DNA, 25 bp, synthetic construct
  misc_feature 1..25: note = Probe
  source 1..25: mol_type = other DNA
ttgatagagtaaataataggagctt

SEQ ID NO: 35765 - DNA, 30 bp, synthetic construct
  misc_feature 1..30: note = Probe
  source 1..30: mol_type = other DNA
ttgatagagtaaataataggagcttaaacc

SEQ ID NO: 35766 - DNA, 32 bp, synthetic construct
  misc_feature 1..32: note = Probe
  source 1..32: mol_type = other DNA
ttgatagagtaaataataggagcttaaacccc

SEQ ID NO: 35767 - DNA, 33 bp, synthetic construct
  misc_feature 1..33: note = Probe
  source 1..33: mol_type = other DNA
ttgatagagtaaataataggagcttaaaccccc

SEQ ID NO: 35768 - DNA, 36 bp, synthetic construct
  misc_feature 1..36: note = Probe
  source 1..36: mol_type = other DNA
ttgatagagtaaataataggagcttaaaccccctta

SEQ ID NO: 35769 - DNA, 19 bp, synthetic construct
  misc_feature 1..19: note = Probe
  source 1..19: mol_type = other DNA
ttgattagggtgcttagct

SEQ ID NO: 35770 - DNA, 22 bp, synthetic construct
  misc_feature 1..22: note = Probe
  source 1..22: mol_type = other DNA
ttgattagggtgcttagctgtt

SEQ ID NO: 35771 - DNA, 26 bp, synthetic construct
  misc_feature 1..26: note = Probe
  source 1..26: mol_type = other DNA
ttgattagggtgcttagctgttaact

SEQ ID NO: 35772 - DNA, 40 bp, synthetic construct
  misc_feature 1..40: note = Probe
  source 1..40: mol_type = other DNA
ttgattagggtgcttagctgttaactaagtgtttgtgggt

SEQ ID NO: 35773 - DNA, 36 bp, synthetic construct
  misc_feature 1..36: note = Probe
  source 1..36: mol_type = other DNA
ttgcaaattcgaagaagcagcttcaaacctgccggg

SEQ ID NO: 35774 - DNA, 18 bp, synthetic construct
  misc_feature 1..18: note = Probe
  source 1..18: mol_type = other DNA
ttgcacgtatgaggcccc

SEQ ID NO: 35775 - DNA, 23 bp, synthetic construct
  misc_feature 1..23: note = Probe
  source 1..23: mol_type = other DNA
ttgcacgtatgaggccccgggtt

SEQ ID NO: 35776 - DNA, 24 bp, synthetic construct
  misc_feature 1..24: note = Probe
  source 1..24: mol_type = other DNA
ttgcacgtatgaggccccgggttc

SEQ ID NO: 35777 - DNA, 22 bp, synthetic construct
  misc_feature 1..22: note = Probe
  source 1..22: mol_type = other DNA
ttgcatgtatgaggccccgggt

SEQ ID NO: 35778 - DNA, 23 bp, synthetic construct
  misc_feature 1..23: note = Probe
  source 1..23: mol_type = other DNA
ttgcatgtatgaggccccgggtt

SEQ ID NO: 35779 - DNA, 17 bp, synthetic construct
  misc_feature 1..17: note = Probe
  source 1..17: mol_type = other DNA
ttgccatgttaacgttt

SEQ ID NO: 35780 - DNA, 18 bp, synthetic construct
  misc_feature 1..18: note = Probe
  source 1..18: mol_type = other DNA
ttgccatgttaacgtttt

SEQ ID NO: 35781 - DNA, 23 bp, synthetic construct
  misc_feature 1..23: note = Probe
  source 1..23: mol_type = other DNA
ttggacgaaccagagtgtagctt

SEQ ID NO: 35782 - DNA, 27 bp, synthetic construct
  misc_feature 1..27: note = Probe
  source 1..27: mol_type = other DNA
ttggacgaaccagagtgtagcttaaca

SEQ ID NO: 35783 - DNA, 29 bp, synthetic construct
  misc_feature 1..29: note = Probe
  source 1..29: mol_type = other DNA
ttggacgaaccagagtgtagcttaacaca

SEQ ID NO: 35784 - DNA, 36 bp, synthetic construct
  misc_feature 1..36: note = Probe
  source 1..36: mol_type = other DNA
ttggacgaaccagagtgtagcttaacacaaagcacc

SEQ ID NO: 35785 - DNA, 33 bp, synthetic construct
  misc_feature 1..33: note = Probe
  source 1..33: mol_type = other DNA
ttggactgtaaatctaaagacaggggttaggcc

SEQ ID NO: 35786 - DNA, 34 bp, synthetic construct
  misc_feature 1..34: note = Probe
  source 1..34: mol_type = other DNA
ttggactgtaaatctaaagacaggggttaggcct

SEQ ID NO: 35787 - DNA, 35 bp, synthetic construct
  misc_feature 1..35: note = Probe
  source 1..35: mol_type = other DNA
ttggactgtaaatctaaagacaggggttaggcctc

SEQ ID NO: 35788 - DNA, 36 bp, synthetic construct
  misc_feature 1..36: note = Probe
  source 1..36: mol_type = other DNA
ttggattctcagggatgggttcgattctcatagtcc

SEQ ID NO: 35789 - DNA, 28 bp, synthetic construct
  misc_feature 1..28: note = Probe
  source 1..28: mol_type = other DNA
ttggcctcctaagccagggattgtgggt

SEQ ID NO: 35790 - DNA, 18 bp, synthetic construct
  misc_feature 1..18: note = Probe
  source 1..18: mol_type = other DNA
ttggctgtgtccttagac

SEQ ID NO: 35791 - DNA, 19 bp, synthetic construct
  misc_feature 1..19: note = Probe
  source 1..19: mol_type = other DNA
ttggctgtgtccttagaca

SEQ ID NO: 35792 - DNA, 20 bp, synthetic construct
  misc_feature 1..20: note = Probe
  source 1..20: mol_type = other DNA
ttggctgttaactaaaaggt

SEQ ID NO: 35793 - DNA, 22 bp, synthetic construct
  misc_feature 1..22: note = Probe
  source 1..22: mol_type = other DNA
ttggctgttaactaaaaggttg

SEQ ID NO: 35794 - DNA, 23 bp, synthetic construct
  misc_feature 1..23: note = Probe
  source 1..23: mol_type = other DNA
ttggctgttaactaaaaggttgg

SEQ ID NO: 35795 - DNA, 20 bp, synthetic construct
  misc_feature 1..20: note = Probe
  source 1..20: mol_type = other DNA
ttgggagagcgttagactga

SEQ ID NO: 35796 - DNA, 21 bp, synthetic construct
  misc_feature 1..21: note = Probe
  source 1..21: mol_type = other DNA
ttgggagagcgttagactgaa

SEQ ID NO: 35797 - DNA, 15 bp, synthetic construct
  misc_feature 1..15: note = Probe
  source 1..15: mol_type = other DNA
ttggggggttcgatt

SEQ ID NO: 35798 - DNA, 17 bp, synthetic construct
  misc_feature 1..17: note = Probe
  source 1..17: mol_type = other DNA
ttggggggttcgattcc

SEQ ID NO: 35799 - DNA, 18 bp, synthetic construct
  misc_feature 1..18: note = Probe
  source 1..18: mol_type = other DNA
ttggggggttcgattcct

SEQ ID NO: 35800 - DNA, 22 bp, synthetic construct
  misc_feature 1..22: note = Probe
  source 1..22: mol_type = other DNA
ttgggtccgagaggtcccgggt

SEQ ID NO: 35801 - DNA, 23 bp, synthetic construct
  misc_feature 1..23: note = Probe
  source 1..23: mol_type = other DNA
ttgggtccgagaggtcccgggtt

SEQ ID NO: 35802 - DNA, 17 bp, synthetic construct
  misc_feature 1..17: note = Probe
  source 1..17: mol_type = other DNA
ttgggtgcgagaggtcc

SEQ ID NO: 35803 - DNA, 19 bp, synthetic construct
  misc_feature 1..19: note = Probe
  source 1..19: mol_type = other DNA
ttgggtgcgagaggtcccg

SEQ ID NO: 35804 - DNA, 20 bp, synthetic construct
  misc_feature 1..20: note = Probe
  source 1..20: mol_type = other DNA
ttgggtgcgagaggtcccgg

SEQ ID NO: 35805 - DNA, 24 bp, synthetic construct
  misc_feature 1..24: note = Probe
  source 1..24: mol_type = other DNA
ttgggtgcgagaggtcccgggttc

SEQ ID NO: 35806 - DNA, 21 bp, synthetic construct
  misc_feature 1..21: note = Probe
  source 1..21: mol_type = other DNA
ttgggtgctaatggtggagtt

SEQ ID NO: 35807 - DNA, 22 bp, synthetic construct
  misc_feature 1..22: note = Probe
  source 1..22: mol_type = other DNA
ttgggtgctaatggtggagtta

SEQ ID NO: 35808 - DNA, 23 bp, synthetic construct
  misc_feature 1..23: note = Probe
  source 1..23: mol_type = other DNA
ttgggtgctaatggtggagttaa

SEQ ID NO: 35809 - DNA, 24 bp, synthetic construct
  misc_feature 1..24: note = Probe
  source 1..24: mol_type = other DNA
ttgggtgctaatggtggagttaaa

SEQ ID NO: 35810 - DNA, 25 bp, synthetic construct
  misc_feature 1..25: note = Probe
  source 1..25: mol_type = other DNA
ttgggtgctaatggtggagttaaag

SEQ ID NO: 35811 - DNA, 26 bp, synthetic construct
  misc_feature 1..26: note = Probe
  source 1..26: mol_type = other DNA
ttgggtgctaatggtggagttaaaga

SEQ ID NO: 35812 - DNA, 27 bp, synthetic construct
  misc_feature 1..27: note = Probe
  source 1..27: mol_type = other DNA
ttgggtgctaatggtggagttaaagac

SEQ ID NO: 35813 - DNA, 28 bp, synthetic construct
  misc_feature 1..28: note = Probe
  source 1..28: mol_type = other DNA
ttgggtgctaatggtggagttaaagact

SEQ ID NO: 35814 - DNA, 31 bp, synthetic construct
  misc_feature 1..31: note = Probe
  source 1..31: mol_type = other DNA
ttgggtgctaatggtggagttaaagactttt

SEQ ID NO: 35815 - DNA, 39 bp, synthetic construct
  misc_feature 1..39: note = Probe
  source 1..39: mol_type = other DNA
ttgggtgctaatggtggagttaaagactttttctctgat

SEQ ID NO: 35816 - DNA, 40 bp, synthetic construct; identical to SEQ ID NO: 8480
  misc_feature 1..40: note = Probe
  source 1..40: mol_type = other DNA

SEQ ID NO: 35817 - DNA, 16 bp, synthetic construct
  misc_feature 1..16: note = Probe
  source 1..16: mol_type = other DNA
ttggtagagcggagga

SEQ ID NO: 35818 - DNA, 17 bp, synthetic construct
  misc_feature 1..17: note = Probe
  source 1..17: mol_type = other DNA
ttggtagagcggaggac

SEQ ID NO: 35819 - DNA, 18 bp, synthetic construct
  misc_feature 1..18: note = Probe
  source 1..18: mol_type = other DNA
ttggtagagcggaggact

SEQ ID NO: 35820 - DNA, 19 bp, synthetic construct
  misc_feature 1..19: note = Probe
  source 1..19: mol_type = other DNA
ttggtagagcggaggactg

SEQ ID NO: 35821 - DNA, 21 bp, synthetic construct
  misc_feature 1..21: note = Probe
  source 1..21: mol_type = other DNA
ttggtagagcggaggactgta

SEQ ID NO: 35822 - DNA, 22 bp, synthetic construct
  misc_feature 1..22: note = Probe
  source 1..22: mol_type = other DNA
ttggtagagcggaggactgtag

SEQ ID NO: 35823 - DNA, 23 bp, synthetic construct
  misc_feature 1..23: note = Probe
  source 1..23: mol_type = other DNA
ttggtagagcggaggactgtagt

SEQ ID NO: 35824 - DNA, 23 bp, synthetic construct
  misc_feature 1..23: note = Probe
  source 1..23: mol_type = other DNA
ttggtcctagcctttctattagc

SEQ ID NO: 35825 - DNA, 15 bp, synthetic construct
  misc_feature 1..15: note = Probe
  source 1..15: mol_type = other DNA
ttggtcgtggttgta

SEQ ID NO: 35826 - DNA, 16 bp, synthetic construct
  misc_feature 1..16: note = Probe
  source 1..16: mol_type = other DNA
ttggtcgtggttgtag

SEQ ID NO: 35827 - DNA, 17 bp, synthetic construct
  misc_feature 1..17: note = Probe
  source 1..17: mol_type = other DNA
ttggtcgtggttgtagt

SEQ ID NO: 35828 - DNA, 21 bp, synthetic construct
  misc_feature 1..21: note = Probe
  source 1..21: mol_type = other DNA
ttggtcgtggttgtagtccgt

SEQ ID NO: 35829 - DNA, 31 bp, synthetic construct
  misc_feature 1..31: note = Probe
  source 1..31: mol_type = other DNA
ttggtcgtggttgtagtccgtgcgagaataa

SEQ ID NO: 35830 - DNA, 32 bp, synthetic construct; identical to SEQ ID NO: 8483
  misc_feature 1..32: note = Probe
  source 1..32: mol_type = other DNA

SEQ ID NO: 35831 - DNA, 33 bp, synthetic construct; identical to SEQ ID NO: 8484
  misc_feature 1..33: note = Probe
  source 1..33: mol_type = other DNA

SEQ ID NO: 35832 - DNA, 35 bp, synthetic construct
  misc_feature 1..35: note = Probe
  source 1..35: mol_type = other DNA
ttggtcgtggttgtagtccgtgcgagaataatgat

SEQ ID NO: 35833 - DNA, 36 bp, synthetic construct
  misc_feature 1..36: note = Probe
  source 1..36: mol_type = other DNA
ttggtcgtggttgtagtccgtgcgagaataatgatg

SEQ ID NO: 35834 - DNA, 39 bp, synthetic construct
  misc_feature 1..39: note = Probe
  source 1..39: mol_type = other DNA
ttggtcgtggttgtagtccgtgcgagaataatgatgtat

SEQ ID NO: 35835 - DNA, 42 bp, synthetic construct
  misc_feature 1..42: note = Probe
  source 1..42: mol_type = other DNA
ttggtcgtggttgtagtccgtgcgagaataatgatgtatgct

SEQ ID NO: 35836 - DNA, 20 bp, synthetic construct
  misc_feature 1..20: note = Probe
  source 1..20: mol_type = other DNA
ttggtctaggggtatgattc

SEQ ID NO: 35837 - DNA, 21 bp, synthetic construct
  misc_feature 1..21: note = Probe
  source 1..21: mol_type = other DNA
ttggtctaggggtatgattct

SEQ ID NO: 35838 - DNA, 22 bp, synthetic construct
  misc_feature 1..22: note = Probe
  source 1..22: mol_type = other DNA
ttggtctaggggtatgattctc

SEQ ID NO: 35839 - DNA, 24 bp, synthetic construct
  misc_feature 1..24: note = Probe
  source 1..24: mol_type = other DNA
ttggtctaggggtatgattctcgc

SEQ ID NO: 35840 - DNA, 25 bp, synthetic construct
  misc_feature 1..25: note = Probe
  source 1..25: mol_type = other DNA
ttggtctaggggtatgattctcgct

SEQ ID NO: 35841 - DNA, 26 bp, synthetic construct
  misc_feature 1..26: note = Probe
  source 1..26: mol_type = other DNA
ttggtctaggggtatgattctcgctt

SEQ ID NO: 35842 - DNA, 25 bp, synthetic construct
  misc_feature 1..25: note = Probe
  source 1..25: mol_type = other DNA
ttggtctaggggtatgattctcggt

SEQ ID NO: 35843 - DNA, 15 bp, synthetic construct
  misc_feature 1..15: note = Probe
  source 1..15: mol_type = other DNA
ttggtcttaggcccc

SEQ ID NO: 35844 - DNA, 28 bp, synthetic construct
  misc_feature 1..28: note = Probe
  source 1..28: mol_type = other DNA
ttggtcttaggccccaaaaattttggtg

SEQ ID NO: 35845 - DNA, 30 bp, synthetic construct
  misc_feature 1..30: note = Probe
  source 1..30: mol_type = other DNA
ttggtcttaggccccaaaaattttggtgca

SEQ ID NO: 35846 - DNA, 34 bp, synthetic construct
  misc_feature 1..34: note = Probe
  source 1..34: mol_type = other DNA
ttggtcttaggccccaaaaattttggtgcaactc

SEQ ID NO: 35847 - DNA, 36 bp, synthetic construct
  misc_feature 1..36: note = Probe
  source 1..36: mol_type = other DNA
ttggtcttaggccccaaaaattttggtgcaactcca

SEQ ID NO: 35848 - DNA, 36 bp, synthetic construct
  misc_feature 1..36: note = Probe
  source 1..36: mol_type = other DNA
ttggtggtatagtggtaagcatagctgccttccaag

SEQ ID NO: 35849 - DNA, 36 bp, synthetic construct
  misc_feature 1..36: note = Probe
  source 1..36: mol_type = other DNA
ttggtggtatagtggtgagcatagctgccttccaag

SEQ ID NO: 35850 - DNA, 50 bp, synthetic construct
  misc_feature 1..50: note = Probe
  source 1..50: mol_type = other DNA
ttggtggtatagtggtgagcatagctgccttccaagcagttgacccgggt

SEQ ID NO: 35851 - DNA, 36 bp, synthetic construct
  misc_feature 1..36: note = Probe
  source 1..36: mol_type = other DNA
ttggtggtatagtggttagcatagctgccttccaag

SEQ ID NO: 35852 - DNA, 15 bp, synthetic construct
  misc_feature 1..15: note = Probe
  source 1..15: mol_type = other DNA
ttggtggttcagtgg

SEQ ID NO: 35853 - DNA, 17 bp, synthetic construct
  misc_feature 1..17: note = Probe
  source 1..17: mol_type = other DNA
ttggtggttcagtggta

SEQ ID NO: 35854 - DNA, 18 bp, synthetic construct
  misc_feature 1..18: note = Probe
  source 1..18: mol_type = other DNA
ttggtggttcagtggtag

SEQ ID NO: 35855 - DNA, 20 bp, synthetic construct
  misc_feature 1..20: note = Probe
  source 1..20: mol_type = other DNA
ttggtggttcagtggtagaa

SEQ ID NO: 35856 - DNA, 25 bp, synthetic construct
  misc_feature 1..25: note = Probe
  source 1..25: mol_type = other DNA
ttggtggttcagtggtagaattctc

SEQ ID NO: 35857 - DNA, 27 bp, synthetic construct
  misc_feature 1..27: note = Probe
  source 1..27: mol_type = other DNA
ttggtggttcagtggtagaattctcgc

SEQ ID NO: 35858 - DNA, 28 bp, synthetic construct
  misc_feature 1..28: note = Probe
  source 1..28: mol_type = other DNA
ttggtggttcagtggtagaattctcgcc

SEQ ID NO: 35859 - DNA, 29 bp, synthetic construct
  misc_feature 1..29: note = Probe
  source 1..29: mol_type = other DNA
ttggtggttcagtggtagaattctcgcct

SEQ ID NO: 35860 - DNA, 36 bp, synthetic construct
  misc_feature 1..36: note = Probe
  source 1..36: mol_type = other DNA
ttggtggttcagtggtagaattctcgcctcccacgc

SEQ ID NO: 35861 - DNA, 30 bp, synthetic construct; identical to SEQ ID NO: 8491
  misc_feature 1..30: note = Probe
  source 1..30: mol_type = other DNA

SEQ ID NO: 35862 - DNA, 31 bp, synthetic construct; identical to SEQ ID NO: 8492
  misc_feature 1..31: note = Probe
  source 1..31: mol_type = other DNA

SEQ ID NO: 35863 - DNA, 32 bp, synthetic construct; identical to SEQ ID NO: 8493
  misc_feature 1..32: note = Probe
  source 1..32: mol_type = other DNA

SEQ ID NO: 35864 - DNA, 33 bp, synthetic construct
  misc_feature 1..33: note = Probe
  source 1..33: mol_type = other DNA
ttggtggttcagtggtagaattctcgcctgcca

SEQ ID NO: 35865 - DNA, 50 bp, synthetic construct; identical to SEQ ID NO: 8494
  misc_feature 1..50: note = Probe
  source 1..50: mol_type = other DNA

SEQ ID NO: 35866 - DNA, 17 bp, synthetic construct
  misc_feature 1..17: note = Probe
  source 1..17: mol_type = other DNA
ttgtaaacaggagatcc

SEQ ID NO: 35867 - DNA, 18 bp, synthetic construct
  misc_feature 1..18: note = Probe
  source 1..18: mol_type = other DNA
ttgtaaacaggagatcct

SEQ ID NO: 35868 - DNA, 19 bp, synthetic construct
  misc_feature 1..19: note = Probe
  source 1..19: mol_type = other DNA
ttgtaaaccaggggtcgcg

SEQ ID NO: 35869 - DNA, 22 bp, synthetic construct
  misc_feature 1..22: note = Probe
  source 1..22: mol_type = other DNA
ttgtaaaccaggggtcgcgagt

SEQ ID NO: 35870 - DNA, 23 bp, synthetic construct
  misc_feature 1..23: note = Probe
  source 1..23: mol_type = other DNA
ttgtaaaccaggggtcgcgagtt

SEQ ID NO: 35871 - DNA, 21 bp, synthetic construct
  misc_feature 1..21: note = Probe
  source 1..21: mol_type = other DNA
ttgtaaaccggagatgaaaac

SEQ ID NO: 35872 - DNA, 32 bp, synthetic construct; identical to SEQ ID NO: 24781
  misc_feature 1..32: note = Probe
  source 1..32: mol_type = other DNA

SEQ ID NO: 35873 - DNA, 33 bp, synthetic construct
  misc_feature 1..33: note = Probe
  source 1..33: mol_type = other DNA
ttgtaaaccggagatgaaaacctttttccaagg

SEQ ID NO: 35874 - DNA, 35 bp, synthetic construct; identical to SEQ ID NO: 1799
  misc_feature 1..35: note = Probe
  source 1..35: mol_type = other DNA

SEQ ID NO: 35875 - DNA, 38 bp, synthetic construct; identical to SEQ ID NO: 8498
  misc_feature 1..38: note = Probe
  source 1..38: mol_type = other DNA

SEQ ID NO: 35876 - DNA, 17 bp, synthetic construct
  misc_feature 1..17: note = Probe
  source 1..17: mol_type = other DNA
ttgtagtccgtgcgaga

SEQ ID NO: 35877 - DNA, 18 bp, synthetic construct
  misc_feature 1..18: note = Probe
  source 1..18: mol_type = other DNA
ttgtagtccgtgcgagaa

SEQ ID NO: 35878 - DNA, 19 bp, synthetic construct
  misc_feature 1..19: note = Probe
  source 1..19: mol_type = other DNA
ttgtagtccgtgcgagaat

SEQ ID NO: 35879 - DNA, 20 bp, synthetic construct
  misc_feature 1..20: note = Probe
  source 1..20: mol_type = other DNA
ttgtagtccgtgcgagaata

SEQ ID NO: 35880 - DNA, 21 bp, synthetic construct
  misc_feature 1..21: note = Probe
  source 1..21: mol_type = other DNA
ttgtagtccgtgcgagaataa

SEQ ID NO: 35881 - DNA, 36 bp, synthetic construct
  misc_feature 1..36: note = Probe
  source 1..36: mol_type = other DNA
ttgtagttgaaatacaacgatggtttttcatatcat

SEQ ID NO: 35882 - DNA, 23 bp, synthetic construct
  misc_feature 1..23: note = Probe
  source 1..23: mol_type = other DNA
ttgtcaaagttaaattataggct

SEQ ID NO: 35883 - DNA, 16 bp, synthetic construct
  misc_feature 1..16: note = Probe
  source 1..16: mol_type = other DNA
ttgtgaatctgacaac

SEQ ID NO: 35884 - DNA, 17 bp, synthetic construct
  misc_feature 1..17: note = Probe
  source 1..17: mol_type = other DNA
ttgtgaatctgacaaca

SEQ ID NO: 35885 - DNA, 19 bp, synthetic construct
  misc_feature 1..19: note = Probe
  source 1..19: mol_type = other DNA
ttgtgaatctgacaacaga

SEQ ID NO: 35886 - DNA, 22 bp, synthetic construct
  misc_feature 1..22: note = Probe
  source 1..22: mol_type = other DNA
ttgtgaatctgacaacagaggc

SEQ ID NO: 35887 - DNA, 23 bp, synthetic construct
  misc_feature 1..23: note = Probe
  source 1..23: mol_type = other DNA
ttgtgaatctgacaacagaggct

SEQ ID NO: 35888 - DNA, 24 bp, synthetic construct
  misc_feature 1..24: note = Probe
  source 1..24: mol_type = other DNA
ttgtgaatctgacaacagaggctt

SEQ ID NO: 35889 - DNA, 27 bp, synthetic construct
  misc_feature 1..27: note = Probe
  source 1..27: mol_type = other DNA
ttgtgaatctgacaacagaggcttacg

SEQ ID NO: 35890 - DNA, 42 bp, synthetic construct
  misc_feature 1..42: note = Probe
  source 1..42: mol_type = other DNA
ttgtgaatctgacaacagaggcttacgaccccttatttaccg

SEQ ID NO: 35891 - DNA, 43 bp, synthetic construct; identical to SEQ ID NO: 8510
  misc_feature 1..43: note = Probe
  source 1..43: mol_type = other DNA

SEQ ID NO: 35892 - DNA, 18 bp, synthetic construct
  misc_feature 1..18: note = Probe
  source 1..18: mol_type = other DNA
ttgtgaggacaatggcac

SEQ ID NO: 35893 - DNA, 19 bp, synthetic construct
  misc_feature 1..19: note = Probe
  source 1..19: mol_type = other DNA
ttgtgaggacaatggcacg

SEQ ID NO: 35894 - DNA, 20 bp, synthetic construct
  misc_feature 1..20: note = Probe
  source 1..20: mol_type = other DNA
ttgtgaggacaatggcacgg

SEQ ID NO: 35895 - DNA, 21 bp, synthetic construct
  misc_feature 1..21: note = Probe
  source 1..21: mol_type = other DNA
ttgtgaggacaatggcacggc

SEQ ID NO: 35896 - DNA, 24 bp, synthetic construct
  misc_feature 1..24: note = Probe
  source 1..24: mol_type = other DNA
ttgtgaggacaatggcacggcaag

SEQ ID NO: 35897 - DNA, 25 bp, synthetic construct
  misc_feature 1..25: note = Probe
  source 1..25: mol_type = other DNA
ttgtgaggacaatggcacggcaagg

SEQ ID NO: 35898 - DNA, 26 bp, synthetic construct
  misc_feature 1..26: note = Probe
  source 1..26: mol_type = other DNA
ttgtgaggacaatggcacggcaaggg

SEQ ID NO: 35899 - DNA, 27 bp, synthetic construct
  misc_feature 1..27: note = Probe
  source 1..27: mol_type = other DNA
ttgtgaggacaatggcacggcaagggg

SEQ ID NO: 35900 - DNA, 28 bp, synthetic construct
  misc_feature 1..28: note = Probe
  source 1..28: mol_type = other DNA
ttgtgaggacaatggcacggcaagggga

SEQ ID NO: 35901 - DNA, 29 bp, synthetic construct
  misc_feature 1..29: note = Probe
  source 1..29: mol_type = other DNA
ttgtgaggacaatggcacggcaaggggag

SEQ ID NO: 35902 - DNA, 30 bp, synthetic construct; identical to SEQ ID NO: 12423
  misc_feature 1..30: note = Probe
  source 1..30: mol_type = other DNA

SEQ ID NO: 35903 - DNA, 27 bp, synthetic construct
  misc_feature 1..27: note = Probe
  source 1..27: mol_type = other DNA
ttgtggaaacaatggtacggcaagggc

SEQ ID NO: 35904 - DNA, 30 bp, synthetic construct
  misc_feature 1..30: note = Probe
  source 1..30: mol_type = other DNA
ttgtggaaacaatggtacggcaagggcctc

SEQ ID NO: 35905 - DNA, 17 bp, synthetic construct
  misc_feature 1..17: note = Probe
  source 1..17: mol_type = other DNA
ttgtggccgcagcaacc

SEQ ID NO: 35906 - DNA, 18 bp, synthetic construct
  misc_feature 1..18: note = Probe
  source 1..18: mol_type = other DNA
ttgtggccgcagcaacct

SEQ ID NO: 35907 - DNA, 22 bp, synthetic construct
  misc_feature 1..22: note = Probe
  source 1..22: mol_type = other DNA
ttgtggccgcagcaacctcggt

SEQ ID NO: 35908 - DNA, 27 bp, synthetic construct
  misc_feature 1..27: note = Probe
  source 1..27: mol_type = other DNA
ttgtgggaacaatggcacggcaagggg

SEQ ID NO: 35909 - DNA, 30 bp, synthetic construct; identical to SEQ ID NO: 12431
  misc_feature 1..30: note = Probe
  source 1..30: mol_type = other DNA

SEQ ID NO: 35910 - DNA, 28 bp, synthetic construct
  misc_feature 1..28: note = Probe
  source 1..28: mol_type = other DNA
ttgtgggtttaagtcccattggtctagt

SEQ ID NO: 35911 - DNA, 18 bp, synthetic construct
  misc_feature 1..18: note = Probe
  source 1..18: mol_type = other DNA
ttgtttctgttgagtgtg

SEQ ID NO: 35912 - DNA, 26 bp, synthetic construct
  misc_feature 1..26: note = Probe
  source 1..26: mol_type = other DNA
tttaaacaaaacgaatgatttcgact

SEQ ID NO: 35913 - DNA, 27 bp, synthetic construct
  misc_feature 1..27: note = Probe
  source 1..27: mol_type = other DNA
tttaaacaaaacgaatgatttcgactc

SEQ ID NO: 35914 - DNA, 17 bp, synthetic construct
  misc_feature 1..17: note = Probe
  source 1..17: mol_type = other DNA
tttaaaggataacagct

SEQ ID NO: 35915 - DNA, 27 bp, synthetic construct
  misc_feature 1..27: note = Probe
  source 1..27: mol_type = other DNA
tttaaaggataacagctatccattggt

SEQ ID NO: 35916 - DNA, 29 bp, synthetic construct
  misc_feature 1..29: note = Probe
  source 1..29: mol_type = other DNA
tttaaaggataacagctatccattggtct

SEQ ID NO: 35917 - DNA, 30 bp, synthetic construct
  misc_feature 1..30: note = Probe
  source 1..30: mol_type = other DNA
tttaaaggataacagctatccattggtctt

SEQ ID NO: 35918 - DNA, 31 bp, synthetic construct
  misc_feature 1..31: note = Probe
  source 1..31: mol_type = other DNA
tttaaaggataacagctatccattggtctta

SEQ ID NO: 35919 - DNA, 32 bp, synthetic construct
  misc_feature 1..32: note = Probe
  source 1..32: mol_type = other DNA
tttaaaggataacagctatccattggtcttag

SEQ ID NO: 35920 - DNA, 35 bp, synthetic construct
  misc_feature 1..35: note = Probe
  source 1..35: mol_type = other DNA
tttaaaggataacagctatccattggtcttaggcc

SEQ ID NO: 35921 - DNA, 36 bp, synthetic construct
  misc_feature 1..36: note = Probe
  source 1..36: mol_type = other DNA
tttaaaggataacagctatccattggtcttaggccc

SEQ ID NO: 35922 - DNA, 37 bp, synthetic construct
  misc_feature 1..37: note = Probe
  source 1..37: mol_type = other DNA
tttaaaggataacagctatccattggtcttaggcccc

SEQ ID NO: 35923 - DNA, 24 bp, synthetic construct
  misc_feature 1..24: note = Probe
  source 1..24: mol_type = other DNA
tttaaattagaatcttagctttgg

SEQ ID NO: 35924 - DNA, 36 bp, synthetic construct
  misc_feature 1..36: note = Probe
  source 1..36: mol_type = other DNA
tttaaattagaatcttagctttgggtgctaatggtg

SEQ ID NO: 35925 - DNA, 36 bp, synthetic construct
  misc_feature 1..36: note = Probe
  source 1..36: mol_type = other DNA
tttaaccaaaacatcagattgtgaatctgacaacag

SEQ ID NO: 35926 - DNA, 17 bp, synthetic construct
  misc_feature 1..17: note = Probe
  source 1..17: mol_type = other DNA
tttaagtcccattggtc

SEQ ID NO: 35927 - DNA, 23 bp, synthetic construct
  misc_feature 1..23: note = Probe
  source 1..23: mol_type = other DNA
tttaagttaaagattaagagaac

SEQ ID NO: 35928 - DNA, 24 bp, synthetic construct
  misc_feature 1..24: note = Probe
  source 1..24: mol_type = other DNA
tttaagttaaagattaagagaacc

SEQ ID NO: 35929 - DNA, 29 bp, synthetic construct
  misc_feature 1..29: note = Probe
  source 1..29: mol_type = other DNA
tttaagttaaagattaagagaaccaacac

SEQ ID NO: 35930 - DNA, 30 bp, synthetic construct
  misc_feature 1..30: note = Probe
  source 1..30: mol_type = other DNA
tttaagttaaagattaagagaaccaacacc

SEQ ID NO: 35931 - DNA, 31 bp, synthetic construct
  misc_feature 1..31: note = Probe
  source 1..31: mol_type = other DNA
tttaagttaaagattaagagaaccaacacct

SEQ ID NO: 35932 - DNA, 36 bp, synthetic construct
  misc_feature 1..36: note = Probe
  source 1..36: mol_type = other DNA
tttaagttaaagattaagagaaccaacacctcttta

SEQ ID NO: 35933 - DNA, 36 bp, synthetic construct
  misc_feature 1..36: note = Probe
  source 1..36: mol_type = other DNA
tttaatctgagggtccagggttcaagtccctgttcg

SEQ ID NO: 35934 - DNA, 43 bp, synthetic construct
  misc_feature 1..43: note = Probe
  source 1..43: mol_type = other DNA
tttaatctgagggtccagggttcaagtccctgttcgggcggca

SEQ ID NO: 35935 - DNA, 20 bp, synthetic construct
  misc_feature 1..20: note = Probe
  source 1..20: mol_type = other DNA
tttacacgcagaaggtcctg

SEQ ID NO: 35936 - DNA, 16 bp, synthetic construct
  misc_feature 1..16: note = Probe
  source 1..16: mol_type = other DNA
tttacagtcagaggtt

SEQ ID NO: 35937 - DNA, 17 bp, synthetic construct
  misc_feature 1..17: note = Probe
  source 1..17: mol_type = other DNA
tttacagtcagaggttc

SEQ ID NO: 35938 - DNA, 18 bp, synthetic construct
  misc_feature 1..18: note = Probe
  source 1..18: mol_type = other DNA
tttacagtcagaggttca

SEQ ID NO: 35939 - DNA, 22 bp, synthetic construct
  misc_feature 1..22: note = Probe
  source 1..22: mol_type = other DNA
tttacagtcagaggttcaattc

SEQ ID NO: 35940 - DNA, 23 bp, synthetic construct
  misc_feature 1..23: note = Probe
  source 1..23: mol_type = other DNA
tttacagtcagaggttcaattcc

SEQ ID NO: 35941 - DNA, 15 bp, synthetic construct
  misc_feature 1..15: note = Probe
  source 1..15: mol_type = other DNA
tttagacgggctcac

SEQ ID NO: 35942 - DNA, 16 bp, synthetic construct
  misc_feature 1..16: note = Probe
  source 1..16: mol_type = other DNA
tttagacgggctcaca

SEQ ID NO: 35943 - DNA, 17 bp, synthetic construct
  misc_feature 1..17: note = Probe
  source 1..17: mol_type = other DNA
tttagacgggctcacat

SEQ ID NO: 35944 - DNA, 18 bp, synthetic construct
  misc_feature 1..18: note = Probe
  source 1..18: mol_type = other DNA
tttagacgggctcacatc

SEQ ID NO: 35945 - DNA, 19 bp, synthetic construct
  misc_feature 1..19: note = Probe
  source 1..19: mol_type = other DNA
tttagacgggctcacatca

SEQ ID NO: 35946 - DNA, 20 bp, synthetic construct
  misc_feature 1..20: note = Probe
  source 1..20: mol_type = other DNA
tttagacgggctcacatcac

SEQ ID NO: 35947 - DNA, 21 bp, synthetic construct
  misc_feature 1..21: note = Probe
  source 1..21: mol_type = other DNA
tttagacgggctcacatcacc

SEQ ID NO: 35948 - DNA, 22 bp, synthetic construct
  misc_feature 1..22: note = Probe
  source 1..22: mol_type = other DNA
tttagacgggctcacatcaccc

SEQ ID NO: 35949 - DNA, 23 bp, synthetic construct
  misc_feature 1..23: note = Probe
  source 1..23: mol_type = other DNA
tttagacgggctcacatcacccc

SEQ ID NO: 35950 - DNA, 26 bp, synthetic construct
  misc_feature 1..26: note = Probe
  source 1..26: mol_type = other DNA
tttagacgggctcacatcaccccata

SEQ ID NO: 35951 - DNA, 28 bp, synthetic construct
  misc_feature 1..28: note = Probe
  source 1..28: mol_type = other DNA
tttagacgggctcacatcaccccataaa

SEQ ID NO: 35952 - DNA, 29 bp, synthetic construct
  misc_feature 1..29: note = Probe
  source 1..29: mol_type = other DNA
tttagacgggctcacatcaccccataaac

SEQ ID NO: 35953 - DNA, 30 bp, synthetic construct; identical to SEQ ID NO: 24807
  misc_feature 1..30: note = Probe
  source 1..30: mol_type = other DNA

SEQ ID NO: 35954 - DNA, 19 bp, synthetic construct
  misc_feature 1..19: note = Probe
  source 1..19: mol_type = other DNA
tttatgtagcttacctcct

SEQ ID NO: 35955 - DNA, 15 bp, synthetic construct
  misc_feature 1..15: note = Probe
  source 1..15: mol_type = other DNA
tttcaacttaacttg

SEQ ID NO: 35956 - DNA, 17 bp, synthetic construct
  misc_feature 1..17: note = Probe
  source 1..17: mol_type = other DNA
tttcaacttaacttgac

SEQ ID NO: 35957 - DNA, 21 bp, synthetic construct
  misc_feature 1..21: note = Probe
  source 1..21: mol_type = other DNA
tttcaacttaacttgaccgct

SEQ ID NO: 35958 - DNA, 23 bp, synthetic construct
  misc_feature 1..23: note = Probe
  source 1..23: mol_type = other DNA
tttcaacttaacttgaccgctct

SEQ ID NO: 35959 - DNA, 24 bp, synthetic construct
  misc_feature 1..24: note = Probe
  source 1..24: mol_type = other DNA
tttcaacttaacttgaccgctctg

SEQ ID NO: 35960 - DNA, 25 bp, synthetic construct
  misc_feature 1..25: note = Probe
  source 1..25: mol_type = other DNA
tttcaacttaacttgaccgctctga

SEQ ID NO: 35961 - DNA, 26 bp, synthetic construct
  misc_feature 1..26: note = Probe
  source 1..26: mol_type = other DNA
tttcaacttaacttgaccgctctgag

SEQ ID NO: 35962 - DNA, 27 bp, synthetic construct
  misc_feature 1..27: note = Probe
  source 1..27: mol_type = other DNA
tttcaacttaacttgaccgctctgagc

SEQ ID NO: 35963 - DNA, 36 bp, synthetic construct
  misc_feature 1..36: note = Probe
  source 1..36: mol_type = other DNA
tttcacccaggcggcccgggttcgactcccggtgtg

SEQ ID NO: 35964 - DNA, 15 bp, synthetic construct
  misc_feature 1..15: note = Probe
  source 1..15: mol_type = other DNA
tttcaccgccgcggc

SEQ ID NO: 35965 - DNA, 17 bp, synthetic construct
  misc_feature 1..17: note = Probe
  source 1..17: mol_type = other DNA
tttcaccgccgcggccc

SEQ ID NO: 35966 - DNA, 33 bp, synthetic construct
  misc_feature 1..33: note = Probe
  source 1..33: mol_type = other DNA
tttcataactttgtcaaagttaaattataggct

SEQ ID NO: 35967 - DNA, 16 bp, synthetic construct
  misc_feature 1..16: note = Probe
  source 1..16: mol_type = other DNA
tttcatatcattggtc

SEQ ID NO: 35968 - DNA, 29 bp, synthetic construct
  misc_feature 1..29: note = Probe
  source 1..29: mol_type = other DNA
tttcatatcattggtcgtggttgtagtcc

SEQ ID NO: 35969 - DNA, 37 bp, synthetic construct
  misc_feature 1..37: note = Probe
  source 1..37: mol_type = other DNA
tttcatatcattggtcgtggttgtagtccgtgcgaga

SEQ ID NO: 35970 - DNA, 38 bp, synthetic construct
  misc_feature 1..38: note = Probe
  source 1..38: mol_type = other DNA
tttcatatcattggtcgtggttgtagtccgtgcgagaa

SEQ ID NO: 35971 - DNA, 42 bp, synthetic construct
  misc_feature 1..42: note = Probe
  source 1..42: mol_type = other DNA
tttcatatcattggtcgtggttgtagtccgtgcgagaataat

SEQ ID NO: 35972 - DNA, 17 bp, synthetic construct
  misc_feature 1..17: note = Probe
  source 1..17: mol_type = other DNA
tttcatattgaattgca

SEQ ID NO: 35973 - DNA, 36 bp, synthetic construct
  misc_feature 1..36: note = Probe
  source 1..36: mol_type = other DNA
tttcatattgaattgcaaattcgaagaagcagcttc

SEQ ID NO: 35974 - DNA, 31 bp, synthetic construct
  misc_feature 1..31: note = Probe
  source 1..31: mol_type = other DNA
tttccgtagtgtagcggttatcacattcgcc

SEQ ID NO: 35975 - DNA, 32 bp, synthetic construct
  misc_feature 1..32: note = Probe
  source 1..32: mol_type = other DNA
tttccgtagtgtagcggttatcacattcgcct

SEQ ID NO: 35976 - DNA, 22 bp, synthetic construct
  misc_feature 1..22: note = Probe
  source 1..22: mol_type = other DNA
tttccgtagtgtagtggtcatc

SEQ ID NO: 35977 - DNA, 36 bp, synthetic construct
  misc_feature 1..36: note = Probe
  source 1..36: mol_type = other DNA
tttccgtagtgtagtggtcatcacgttcgcctaaca

SEQ ID NO: 35978 - DNA, 22 bp, synthetic construct
  misc_feature 1..22: note = Probe
  source 1..22: mol_type = other DNA
tttccgtagtgtagtggttatc

SEQ ID NO: 35979 - DNA, 30 bp, synthetic construct; identical to SEQ ID NO: 24813
  misc_feature 1..30: note = Probe
  source 1..30: mol_type = other DNA

SEQ ID NO: 35980 - DNA, 31 bp, synthetic construct; identical to SEQ ID NO: 24814
  misc_feature 1..31: note = Probe
  source 1..31: mol_type = other DNA

SEQ ID NO: 35981 - DNA, 32 bp, synthetic construct; identical to SEQ ID NO: 24815
  misc_feature 1..32: note = Probe
  source 1..32: mol_type = other DNA

SEQ ID NO: 35982 - DNA, 38 bp, synthetic construct
  misc_feature 1..38: note = Probe
  source 1..38: mol_type = other DNA
tttccgtagtgtagtggttatcacgttcgcctaacacg

SEQ ID NO: 35983 - DNA, 33 bp, synthetic construct; identical to SEQ ID NO: 24817
  misc_feature 1..33: note = Probe
  source 1..33: mol_type = other DNA

SEQ ID NO: 35984 - DNA, 34 bp, synthetic construct; identical to SEQ ID NO: 24818
  misc_feature 1..34: note = Probe
  source 1..34: mol_type = other DNA

SEQ ID NO: 35985 - DNA, 36 bp, synthetic construct
  misc_feature 1..36: note = Probe
  source 1..36: mol_type = other DNA
tttccgtagtgtagtggttatcacgttcgcctcaca

SEQ ID NO: 35986 - DNA, 38 bp, synthetic construct
  misc_feature 1..38: note = Probe
  source 1..38: mol_type = other DNA
tttccgtagtgtagtggttatcacgttcgcctcacacg

SEQ ID NO: 35987 - DNA, 31 bp, synthetic construct
  misc_feature 1..31: note = Probe
  source 1..31: mol_type = other DNA
tttccgtggtgtagtggttatcacattcgcc

SEQ ID NO: 35988 - DNA, 32 bp, synthetic construct
  misc_feature 1..32: note = Probe
  source 1..32: mol_type = other DNA
tttccgtggtgtagtggttatcacattcgcct

SEQ ID NO: 35989 - DNA, 24 bp, synthetic construct
  misc_feature 1..24: note = Probe
  source 1..24: mol_type = other DNA
tttcctttccgtttcatctttctc

SEQ ID NO: 35990 - DNA, 22 bp, synthetic construct
  misc_feature 1..22: note = Probe
  source 1..22: mol_type = other DNA
tttcgactcattaaattatgat

SEQ ID NO: 35991 - DNA, 33 bp, synthetic construct
  misc_feature 1..33: note = Probe
  source 1..33: mol_type = other DNA
tttcgactcattaaattatgataatcatattta

SEQ ID NO: 35992 - DNA, 34 bp, synthetic construct
  misc_feature 1..34: note = Probe
  source 1..34: mol_type = other DNA
tttcgactcattaaattatgataatcatatttac

SEQ ID NO: 35993 - DNA, 35 bp, synthetic construct
  misc_feature 1..35: note = Probe
  source 1..35: mol_type = other DNA
tttcgactcattaaattatgataatcatatttacc

SEQ ID NO: 35994 - DNA, 36 bp, synthetic construct
  misc_feature 1..36: note = Probe
  source 1..36: mol_type = other DNA
tttcgactcattaaattatgataatcatatttacca

SEQ ID NO: 35995 - DNA, 25 bp, synthetic construct
  misc_feature 1..25: note = Probe
  source 1..25: mol_type = other DNA
tttctaggactatgagaatcgaacc

SEQ ID NO: 35996 - DNA, 26 bp, synthetic construct
  misc_feature 1..26: note = Probe
  source 1..26: mol_type = other DNA
tttctaggactatgagaatcgaaccc

SEQ ID NO: 35997 - DNA, 15 bp, synthetic construct
  misc_feature 1..15: note = Probe
  source 1..15: mol_type = other DNA
tttctggaggttttt

SEQ ID NO: 35998 - DNA, 16 bp, synthetic construct
  misc_feature 1..16: note = Probe
  source 1..16: mol_type = other DNA
tttctggtctccggat

SEQ ID NO: 35999 - DNA, 21 bp, synthetic construct
  misc_feature 1..21: note = Probe
  source 1..21: mol_type = other DNA
tttgaatccagcaatccgagt

SEQ ID NO: 36000 - DNA, 20 bp, synthetic construct
  misc_feature 1..20: note = Probe
  source 1..20: mol_type = other DNA
tttgaatccagcgatccgag

SEQ ID NO: 36001 - DNA, 21 bp, synthetic construct
  misc_feature 1..21: note = Probe
  source 1..21: mol_type = other DNA
tttgaatccagcgatccgagt

SEQ ID NO: 36002 - DNA, 22 bp, synthetic construct
  misc_feature 1..22: note = Probe
  source 1..22: mol_type = other DNA
tttgaatccagcgatccgagtt

SEQ ID NO: 36003 - DNA, 27 bp, synthetic construct
  misc_feature 1..27: note = Probe
  source 1..27: mol_type = other DNA
tttgactgcagatcaagaggtccccgg

SEQ ID NO: 36004 - DNA, 28 bp, synthetic construct
  misc_feature 1..28: note = Probe
  source 1..28: mol_type = other DNA
tttgactgcagatcaagaggtccccggt

SEQ ID NO: 36005 - DNA, 23 bp, synthetic construct
  misc_feature 1..23: note = Probe
  source 1..23: mol_type = other DNA
tttgagatactgactagtctggt

SEQ ID NO: 36006 - DNA, 24 bp, synthetic construct
  misc_feature 1..24: note = Probe
  source 1..24: mol_type = other DNA
tttgagatactgactagtctggtg

SEQ ID NO: 36007 - DNA, 25 bp, synthetic construct
  misc_feature 1..25: note = Probe
  source 1..25: mol_type = other DNA
tttgagatactgactagtctggtgt

SEQ ID NO: 36008 - DNA, 29 bp, synthetic construct
  misc_feature 1..29: note = Probe
  source 1..29: mol_type = other DNA
tttgagatactgactagtctggtgttatt

SEQ ID NO: 36009 - DNA, 30 bp, synthetic construct
  misc_feature 1..30: note = Probe
  source 1..30: mol_type = other DNA
tttgagatactgactagtctggtgttattt

SEQ ID NO: 36010 - DNA, 24 bp, synthetic construct
  misc_feature 1..24: note = Probe
  source 1..24: mol_type = other DNA
tttgatagagtaaataataggagc

SEQ ID NO: 36011 - DNA, 26 bp, synthetic construct
  misc_feature 1..26: note = Probe
  source 1..26: mol_type = other DNA
tttgatagagtaaataataggagctt

SEQ ID NO: 36012 - DNA, 31 bp, synthetic construct
  misc_feature 1..31: note = Probe
  source 1..31: mol_type = other DNA
tttgatagagtaaataataggagcttaaacc

SEQ ID NO: 36013 - DNA, 33 bp, synthetic construct
  misc_feature 1..33: note = Probe
  source 1..33: mol_type = other DNA
tttgatagagtaaataataggagcttaaacccc

SEQ ID NO: 36014 - DNA, 36 bp, synthetic construct
  misc_feature 1..36: note = Probe
  source 1..36: mol_type = other DNA
tttgatagagtaaataataggagcttaaaccccctt

SEQ ID NO: 36015 - DNA, 18 bp, synthetic construct
  misc_feature 1..18: note = Probe
  source 1..18: mol_type = other DNA
tttgcacgtatgaggccc

SEQ ID NO: 36016 - DNA, 20 bp, synthetic construct
  misc_feature 1..20: note = Probe
  source 1..20: mol_type = other DNA
tttgcacgtatgaggccccg

SEQ ID NO: 36017 - DNA, 22 bp, synthetic construct
  misc_feature 1..22: note = Probe
  source 1..22: mol_type = other DNA
tttgcacgtatgaggccccggg

SEQ ID NO: 36018 - DNA, 25 bp, synthetic construct
  misc_feature 1..25: note = Probe
  source 1..25: mol_type = other DNA
tttgcacgtatgaggccccgggttc

SEQ ID NO: 36019 - DNA, 19 bp, synthetic construct
  misc_feature 1..19: note = Probe
  source 1..19: mol_type = other DNA
tttgcatgtatgaggcccc

SEQ ID NO: 36020 - DNA, 23 bp, synthetic construct
  misc_feature 1..23: note = Probe
  source 1..23: mol_type = other DNA
tttgcatgtatgaggccccgggt

SEQ ID NO: 36021 - DNA, 24 bp, synthetic construct
  misc_feature 1..24: note = Probe
  source 1..24: mol_type = other DNA
tttgcatgtatgaggccccgggtt

SEQ ID NO: 36022 - DNA, 23 bp, synthetic construct
  misc_feature 1..23: note = Probe
  source 1..23: mol_type = other DNA
tttgcatgtatgaggcctcgggt

SEQ ID NO: 36023 - DNA, 23 bp, synthetic construct
  misc_feature 1..23: note = Probe
  source 1..23: mol_type = other DNA
tttgcatgtatgaggtcccgggt

SEQ ID NO: 36024 - DNA, 24 bp, synthetic construct
  misc_feature 1..24: note = Probe
  source 1..24: mol_type = other DNA
tttgcatgtatgaggtcccgggtt

SEQ ID NO: 36025 - DNA, 36 bp, synthetic construct
  misc_feature 1..36: note = Probe
  source 1..36: mol_type = other DNA
tttgcggacatccttaggtcgctggttcgattccgg

SEQ ID NO: 36026 - DNA, 36 bp, synthetic construct
  misc_feature 1..36: note = Probe
  source 1..36: mol_type = other DNA
tttggattctcagggatgggttcgattctcatagtc

SEQ ID NO: 36027 - DNA, 24 bp, synthetic construct
  misc_feature 1..24: note = Probe
  source 1..24: mol_type = other DNA
tttggccttttcgagatactgttt

SEQ ID NO: 36028 - DNA, 25 bp, synthetic construct
  misc_feature 1..25: note = Probe
  source 1..25: mol_type = other DNA
tttggccttttcgagatactgtttt

SEQ ID NO: 36029 - DNA, 24 bp, synthetic construct
  misc_feature 1..24: note = Probe
  source 1..24: mol_type = other DNA
tttgggtccgagaggtcccgggtt

SEQ ID NO: 36030 - DNA, 18 bp, synthetic construct
  misc_feature 1..18: note = Probe
  source 1..18: mol_type = other DNA
tttgggtgcgagaggtcc

SEQ ID NO: 36031 - DNA, 20 bp, synthetic construct
  misc_feature 1..20: note = Probe
  source 1..20: mol_type = other DNA
tttgggtgcgagaggtcccg

SEQ ID NO: 36032 - DNA, 21 bp, synthetic construct
  misc_feature 1..21: note = Probe
  source 1..21: mol_type = other DNA
tttgggtgcgagaggtcccgg

SEQ ID NO: 36033 - DNA, 25 bp, synthetic construct
  misc_feature 1..25: note = Probe
  source 1..25: mol_type = other DNA
tttgggtgcgagaggtcccgggttc

SEQ ID NO: 36034 - DNA, 23 bp, synthetic construct
  misc_feature 1..23: note = Probe
  source 1..23: mol_type = other DNA
tttgggtgctaatggtggagtta

SEQ ID NO: 36035 - DNA, 41 bp, synthetic construct
  misc_feature 1..41: note = Probe
  source 1..41: mol_type = other DNA
tttgggtgctaatggtggagttaaagactttttctctgatt

SEQ ID NO: 36036 - DNA, 24 bp, synthetic construct
  misc_feature 1..24: note = Probe
  source 1..24: mol_type = other DNA
tttggtcctagcctttctattagc

SEQ ID NO: 36037 - DNA, 24 bp, synthetic construct
  misc_feature 1..24: note = Probe
  source 1..24: mol_type = other DNA
tttgtcaaagttaaattataggct

SEQ ID NO: 36038 - DNA, 36 bp, synthetic construct
  misc_feature 1..36: note = Probe
  source 1..36: mol_type = other DNA
tttgtcaaagttaaattataggctaaatcctatata

SEQ ID NO: 36039 - DNA, 15 bp, synthetic construct
  misc_feature 1..15: note = Probe
  source 1..15: mol_type = other DNA
tttgtccttggaaaa

SEQ ID NO: 36040 - DNA, 17 bp, synthetic construct
  misc_feature 1..17: note = Probe
  source 1..17: mol_type = other DNA
tttgtccttggaaaaag

SEQ ID NO: 36041 - DNA, 30 bp, synthetic construct
  misc_feature 1..30: note = Probe
  source 1..30: mol_type = other DNA
tttgtccttggaaaaaggttttcatctccg

SEQ ID NO: 36042 - DNA, 16 bp, synthetic construct
  misc_feature 1..16: note = Probe
  source 1..16: mol_type = other DNA
tttgtgggtttaagtc

SEQ ID NO: 36043 - DNA, 25 bp, synthetic construct
  misc_feature 1..25: note = Probe
  source 1..25: mol_type = other DNA
tttgtgggtttaagtcccattggtc

SEQ ID NO: 36044 - DNA, 29 bp, synthetic construct
  misc_feature 1..29: note = Probe
  source 1..29: mol_type = other DNA
tttgtgggtttaagtcccattggtctagt

SEQ ID NO: 36045 - DNA, 30 bp, synthetic construct; identical to SEQ ID NO: 24832
  misc_feature 1..30: note = Probe
  source 1..30: mol_type = other DNA

SEQ ID NO: 36046 - DNA, 31 bp, synthetic construct
  misc_feature 1..31: note = Probe
  source 1..31: mol_type = other DNA
tttgtgggtttaagtcccattggtctagtaa

SEQ ID NO: 36047 - DNA, 18 bp, synthetic construct
  misc_feature 1..18: note = Probe
  source 1..18: mol_type = other DNA
ttttaaaggataacagct

SEQ ID NO: 36048 - DNA, 28 bp, synthetic construct
  misc_feature 1..28: note = Probe
  source 1..28: mol_type = other DNA
ttttaaaggataacagctatccattggt

SEQ ID NO: 36049 - DNA, 30 bp, synthetic construct
  misc_feature 1..30: note = Probe
  source 1..30: mol_type = other DNA
ttttaaaggataacagctatccattggtct

SEQ ID NO: 36050 - DNA, 31 bp, synthetic construct
  misc_feature 1..31: note = Probe
  source 1..31: mol_type = other DNA
ttttaaaggataacagctatccattggtctt

SEQ ID NO: 36051 - DNA, 32 bp, synthetic construct
  misc_feature 1..32: note = Probe
  source 1..32: mol_type = other DNA
ttttaaaggataacagctatccattggtctta

SEQ ID NO: 36052 - DNA, 33 bp, synthetic construct
  misc_feature 1..33: note = Probe
  source 1..33: mol_type = other DNA
ttttaaaggataacagctatccattggtcttag

SEQ ID NO: 36053 - DNA, 36 bp, synthetic construct
  misc_feature 1..36: note = Probe
  source 1..36: mol_type = other DNA
ttttaaaggataacagctatccattggtcttaggcc

SEQ ID NO: 36054 - DNA, 38 bp, synthetic construct
  misc_feature 1..38: note = Probe
  source 1..38: mol_type = other DNA
ttttaaaggataacagctatccattggtcttaggcccc

SEQ ID NO: 36055 - DNA, 24 bp, synthetic construct
  misc_feature 1..24: note = Probe
  source 1..24: mol_type = other DNA
ttttaagttaaagattaagagaac

SEQ ID NO: 36056 - DNA, 25 bp, synthetic construct
  misc_feature 1..25: note = Probe
  source 1..25: mol_type = other DNA
ttttaagttaaagattaagagaacc

SEQ ID NO: 36057 - DNA, 26 bp, synthetic construct
  misc_feature 1..26: note = Probe
  source 1..26: mol_type = other DNA
ttttaagttaaagattaagagaacca

SEQ ID NO: 36058 - DNA, 29 bp, synthetic construct
  misc_feature 1..29: note = Probe
  source 1..29: mol_type = other DNA
ttttaagttaaagattaagagaaccaaca

SEQ ID NO: 36059 - DNA, 30 bp, synthetic construct
  misc_feature 1..30: note = Probe
  source 1..30: mol_type = other DNA
ttttaagttaaagattaagagaaccaacac

SEQ ID NO: 36060 - DNA, 31 bp, synthetic construct
  misc_feature 1..31: note = Probe
  source 1..31: mol_type = other DNA
ttttaagttaaagattaagagaaccaacacc

SEQ ID NO: 36061 - DNA, 32 bp, synthetic construct
  misc_feature 1..32: note = Probe
  source 1..32: mol_type = other DNA
ttttaagttaaagattaagagaaccaacacct

SEQ ID NO: 36062 - DNA, 33 bp, synthetic construct
  misc_feature 1..33: note = Probe
  source 1..33: mol_type = other DNA
ttttaagttaaagattaagagaaccaacacctc

SEQ ID NO: 36063 - DNA, 36 bp, synthetic construct
  misc_feature 1..36: note = Probe
  source 1..36: mol_type = other DNA
ttttaagttaaagattaagagaaccaacacctcttt

SEQ ID NO: 36064 - DNA, 36 bp, synthetic construct
  misc_feature 1..36: note = Probe
  source 1..36: mol_type = other DNA
ttttaatctgagggtccagggttcaagtccctgttc

SEQ ID NO: 36065 - DNA, 43 bp, synthetic construct
  misc_feature 1..43: note = Probe
  source 1..43: mol_type = other DNA
ttttaatctgagggtccagggttcaagtccctgttcgggcggc

SEQ ID NO: 36066 - DNA, 44 bp, synthetic construct
  misc_feature 1..44: note = Probe
  source 1..44: mol_type = other DNA
ttttaatctgagggtccagggttcaagtccctgttcgggcggca

SEQ ID NO: 36067 - DNA, 43 bp, synthetic construct
  misc_feature 1..43: note = Probe
  source 1..43: mol_type = other DNA
ttttaatctgagggtccagggttcaagtccctgttcgggcgtc

SEQ ID NO: 36068 - DNA, 36 bp, synthetic construct
  misc_feature 1..36: note = Probe
  source 1..36: mol_type = other DNA
ttttaatctgagggtccagggttcatgtccctgttc

SEQ ID NO: 36069 - DNA, 17 bp, synthetic construct
  misc_feature 1..17: note = Probe
  source 1..17: mol_type = other DNA
ttttcacccaggcggcc

SEQ ID NO: 36070 - DNA, 18 bp, synthetic construct
  misc_feature 1..18: note = Probe
  source 1..18: mol_type = other DNA
ttttcacccaggcggccc

SEQ ID NO: 36071 - DNA, 19 bp, synthetic construct
  misc_feature 1..19: note = Probe
  source 1..19: mol_type = other DNA
ttttcacccaggcggcccg

SEQ ID NO: 36072 - DNA, 44 bp, synthetic construct
  misc_feature 1..44: note = Probe
  source 1..44: mol_type = other DNA
ttttcacccaggcggcccgggttcgactcccggtgtgggaacgc

SEQ ID NO: 36073 - DNA, 44 bp, synthetic construct
  misc_feature 1..44: note = Probe
  source 1..44: mol_type = other DNA
ttttcacccaggcggcccgggttcgactcccggtgtgggaatga

SEQ ID NO: 36074 - DNA, 18 bp, synthetic construct
  misc_feature 1..18: note = Probe
  source 1..18: mol_type = other DNA
ttttcacccaggtggccc

SEQ ID NO: 36075 - DNA, 17 bp, synthetic construct
  misc_feature 1..17: note = Probe
  source 1..17: mol_type = other DNA
ttttcatatcattggtc

SEQ ID NO: 36076 - DNA, 29 bp, synthetic construct
  misc_feature 1..29: note = Probe
  source 1..29: mol_type = other DNA
ttttcatatcattggtcgtggttgtagtc

SEQ ID NO: 36077 - DNA, 30 bp, synthetic construct; identical to SEQ ID NO: 12458
  misc_feature 1..30: note = Probe
  source 1..30: mol_type = other DNA

SEQ ID NO: 36078 - DNA, 35 bp, synthetic construct
  misc_feature 1..35: note = Probe
  source 1..35: mol_type = other DNA
ttttcatatcattggtcgtggttgtagtccgtgcg

SEQ ID NO: 36079 - DNA, 39 bp, synthetic construct
  misc_feature 1..39: note = Probe
  source 1..39: mol_type = other DNA
ttttcatatcattggtcgtggttgtagtccgtgcgagaa

SEQ ID NO: 36080 - DNA, 43 bp, synthetic construct
  misc_feature 1..43: note = Probe
  source 1..43: mol_type = other DNA
ttttcatatcattggtcgtggttgtagtccgtgcgagaataat

SEQ ID NO: 36081 - DNA, 18 bp, synthetic construct
  misc_feature 1..18: note = Probe
  source 1..18: mol_type = other DNA
ttttcatattgaattgca

SEQ ID NO: 36082 - DNA, 15 bp, synthetic construct
  misc_feature 1..15: note = Probe
  source 1..15: mol_type = other DNA
ttttcccggcggcgg

SEQ ID NO: 36083 - DNA, 16 bp, synthetic construct
  misc_feature 1..16: note = Probe
  source 1..16: mol_type = other DNA
ttttcccggcggcggg

SEQ ID NO: 36084 - DNA, 20 bp, synthetic construct
  misc_feature 1..20: note = Probe
  source 1..20: mol_type = other DNA
ttttcccggcggcgggagaa

SEQ ID NO: 36085 - DNA, 36 bp, synthetic construct
  misc_feature 1..36: note = Probe
  source 1..36: mol_type = other DNA
ttttggattctcagggatgggttcgattctcatagt

SEQ ID NO: 36086 - DNA, 39 bp, synthetic construct
  misc_feature 1..39: note = Probe
  source 1..39: mol_type = other DNA
ttttggattctcagggatgggttcgattctcatagtcct

SEQ ID NO: 36087 - DNA, 15 bp, synthetic construct
  misc_feature 1..15: note = Probe
  source 1..15: mol_type = other DNA
ttttggtgcaactcc

SEQ ID NO: 36088 - DNA, 18 bp, synthetic construct
  misc_feature 1..18: note = Probe
  source 1..18: mol_type = other DNA
tttttcatatcattggtc

SEQ ID NO: 36089 - DNA, 39 bp, synthetic construct
  misc_feature 1..39: note = Probe
  source 1..39: mol_type = other DNA
tttttcatatcattggtcgtggttgtagtccgtgcgaga

SEQ ID NO: 36090 - DNA, 40 bp, synthetic construct
  misc_feature 1..40: note = Probe
  source 1..40: mol_type = other DNA
tttttcatatcattggtcgtggttgtagtccgtgcgagaa

SEQ ID NO: 36091 - DNA, 15 bp, synthetic construct
  misc_feature 1..15: note = Probe
  source 1..15: mol_type = other DNA
tttttcccggcggcg

SEQ ID NO: 36092 - DNA, 16 bp, synthetic construct
  misc_feature 1..16: note = Probe
  source 1..16: mol_type = other DNA
tttttcccggcggcgg

SEQ ID NO: 36093 - DNA, 17 bp, synthetic construct
  misc_feature 1..17: note = Probe
  source 1..17: mol_type = other DNA
tttttcccggcggcggg

SEQ ID NO: 36094 - DNA, 21 bp, synthetic construct
  misc_feature 1..21: note = Probe
  source 1..21: mol_type = other DNA
tttttcccggcggcgggagaa

SEQ ID NO: 36095 - DNA, 15 bp, synthetic construct
  misc_feature 1..15: note = Probe
  source 1..15: mol_type = other DNA
ttttttcccggcggc

SEQ ID NO: 36096 - DNA, 16 bp, synthetic construct
  misc_feature 1..16: note = Probe
  source 1..16: mol_type = other DNA
ttttttcccggcggcg

SEQ ID NO: 36097 - DNA, 17 bp, synthetic construct
  misc_feature 1..17: note = Probe
  source 1..17: mol_type = other DNA
ttttttcccggcggcgg

SEQ ID NO: 36098 - DNA, 18 bp, synthetic construct
  misc_feature 1..18: note = Probe
  source 1..18: mol_type = other DNA
ttttttcccggcggcggg

SEQ ID NO: 36099 - DNA, 22 bp, synthetic construct
  misc_feature 1..22: note = Probe
  source 1..22: mol_type = other DNA
ttttttcccggcggcgggagaa

SEQ ID NO: 36100 - DNA, 50 bp, synthetic construct; identical to SEQ ID NO: 4
  misc_feature 1..50: note = Probe
  source 1..50: mol_type = other DNA

SEQ ID NO: 36101 - DNA, 50 bp, synthetic construct; identical to SEQ ID NO: 14
  misc_feature 1..50: note = Probe
  source 1..50: mol_type = other DNA

SEQ ID NO: 36102 - DNA, 36 bp, synthetic construct; identical to SEQ ID NO: 21
  misc_feature 1..36: note = Probe
  source 1..36: mol_type = other DNA

SEQ ID NO: 36103 - DNA, 50 bp, synthetic construct; identical to SEQ ID NO: 25
  misc_feature 1..50: note = Probe
  source 1..50: mol_type = other DNA

SEQ ID NO: 36104 - DNA, 50 bp, synthetic construct; identical to SEQ ID NO: 32
  misc_feature 1..50: note = Probe
  source 1..50: mol_type = other DNA

SEQ ID NO: 36105 - DNA, 32 bp, synthetic construct; identical to SEQ ID NO: 14644
  misc_feature 1..32: note = Probe
  source 1..32: mol_type = other DNA

SEQ ID NO: 36106 - DNA, 34 bp, synthetic construct; identical to SEQ ID NO: 33
  misc_feature 1..34: note = Probe
  source 1..34: mol_type = other DNA

SEQ ID NO: 36107 - DNA, 35 bp, synthetic construct; identical to SEQ ID NO: 34
  misc_feature 1..35: note = Probe
  source 1..35: mol_type = other DNA

SEQ ID NO: 36108 - DNA, 50 bp, synthetic construct; identical to SEQ ID NO: 39
  misc_feature 1..50: note = Probe
  source 1..50: mol_type = other DNA

SEQ ID NO: 36109 - DNA, 18 bp, synthetic construct
  misc_feature 1..18: note = Probe
  source 1..18: mol_type = other DNA
aacagctatccattggtc

SEQ ID NO: 36110 - DNA, 50 bp, synthetic construct; identical to SEQ ID NO: 42
  misc_feature 1..50: note = Probe
  source 1..50: mol_type = other DNA

SEQ ID NO: 36111 - DNA, 50 bp, synthetic construct; identical to SEQ ID NO: 47
  misc_feature 1..50: note = Probe
  source 1..50: mol_type = other DNA

SEQ ID NO: 36112 - DNA, 50 bp, synthetic construct; identical to SEQ ID NO: 2201
  misc_feature 1..50: note = Probe
  source 1..50: mol_type = other DNA

SEQ ID NO: 36113 - DNA, 27 bp, synthetic construct
  misc_feature 1..27: note = Probe
  source 1..27: mol_type = other DNA
aagattgagggttcgagtcccttcgtg

SEQ ID NO: 36114 - DNA, 29 bp, synthetic construct
  misc_feature 1..29: note = Probe
  source 1..29: mol_type = other DNA
aagattgagggttcgagtcccttcgtggt

SEQ ID NO: 36115 - DNA, 31 bp, synthetic construct; identical to SEQ ID NO: 2265
  misc_feature 1..31: note = Probe
  source 1..31: mol_type = other DNA

SEQ ID NO: 36116 - DNA, 18 bp, synthetic construct
  misc_feature 1..18: note = Probe
  source 1..18: mol_type = other DNA
aagccagggattgtgggt

SEQ ID NO: 36117 - DNA, 33 bp, synthetic construct
  misc_feature 1..33: note = Probe
  source 1..33: mol_type = other DNA
aagcgtgctgggcccataacccagaggtcgatg

SEQ ID NO: 36118 - DNA, 50 bp, synthetic construct; identical to SEQ ID NO: 84
  misc_feature 1..50: note = Probe
  source 1..50: mol_type = other DNA

SEQ ID NO: 36119 - DNA, 29 bp, synthetic construct
  misc_feature 1..29: note = Probe
  source 1..29: mol_type = other DNA
aaggtccctggttcgatcccgggtttcgg

SEQ ID NO: 36120 - DNA, 31 bp, synthetic construct
  misc_feature 1..31: note = Probe
  source 1..31: mol_type = other DNA
aaggtccctggttcgatcccgggtttcggca

SEQ ID NO: 36121 - DNA, 29 bp, synthetic construct
  misc_feature 1..29: note = Probe
  source 1..29: mol_type = other DNA
aaggtcctgggttcgagccccagtggaac

SEQ ID NO: 36122 - DNA, 30 bp, synthetic construct; identical to SEQ ID NO: 8941
  misc_feature 1..30: note = Probe
  source 1..30: mol_type = other DNA

SEQ ID NO: 36123 - DNA, 28 bp, synthetic construct
  misc_feature 1..28: note = Probe
  source 1..28: mol_type = other DNA
aaggtcgcgggttcgatccccgtactgg

SEQ ID NO: 36124 - DNA, 17 bp, synthetic construct
  misc_feature 1..17: note = Probe
  source 1..17: mol_type = other DNA
aatccagcgatccgagt

SEQ ID NO: 36125 - DNA, 20 bp, synthetic construct
  misc_feature 1..20: note = Probe
  source 1..20: mol_type = other DNA
aatccagcgatccgagttca

SEQ ID NO: 36126 - DNA, 34 bp, synthetic construct; identical to SEQ ID NO: 15226
  misc_feature 1..34: note = Probe
  source 1..34: mol_type = other DNA

SEQ ID NO: 36127 - DNA, 35 bp, synthetic construct
  misc_feature 1..35: note = Probe
  source 1..35: mol_type = other DNA
aatccagcgatccgagttcaaatctcggtggaacc

SEQ ID NO: 36128 - DNA, 34 bp, synthetic construct; identical to SEQ ID NO: 2440
  misc_feature 1..34: note = Probe
  source 1..34: mol_type = other DNA

SEQ ID NO: 36129 - DNA, 35 bp, synthetic construct
  misc_feature 1..35: note = Probe
  source 1..35: mol_type = other DNA
aatccagcgatccgagttcaagtctcggtggaacc

SEQ ID NO: 36130 - DNA, 34 bp, synthetic construct
  misc_feature 1..34: note = Probe
  source 1..34: mol_type = other DNA
aatccagcgatccgagttcgagtctcggtggaac

SEQ ID NO: 36131 - DNA, 20 bp, synthetic construct
  misc_feature 1..20: note = Probe
  source 1..20: mol_type = other DNA
aatccccggcacctccacca

SEQ ID NO: 36132 - DNA, 18 bp, synthetic construct
  misc_feature 1..18: note = Probe
  source 1..18: mol_type = other DNA
aatctgaaggtcgtgagt

SEQ ID NO: 36133 - DNA, 50 bp, synthetic construct; identical to SEQ ID NO: 113
  misc_feature 1..50: note = Probe
  source 1..50: mol_type = other DNA

SEQ ID NO: 36134 - DNA, 50 bp, synthetic construct; identical to SEQ ID NO: 117
  misc_feature 1..50: note = Probe
  source 1..50: mol_type = other DNA

SEQ ID NO: 36135 - DNA, 18 bp, synthetic construct
  misc_feature 1..18: note = Probe
  source 1..18: mol_type = other DNA
acaacagaggcttacgac

SEQ ID NO: 36136 - DNA, 21 bp, synthetic construct
  misc_feature 1..21: note = Probe
  source 1..21: mol_type = other DNA
acaacagaggcttacgacccc

SEQ ID NO: 36137 - DNA, 23 bp, synthetic construct
  misc_feature 1..23: note = Probe
  source 1..23: mol_type = other DNA
acaacagaggcttacgacccctt

SEQ ID NO: 36138 - DNA, 28 bp, synthetic construct
  misc_feature 1..28: note = Probe
  source 1..28: mol_type = other DNA
acaacagaggcttacgaccccttattta

SEQ ID NO: 36139 - DNA, 30 bp, synthetic construct; identical to SEQ ID NO: 2562
  misc_feature 1..30: note = Probe
  source 1..30: mol_type = other DNA

SEQ ID NO: 36140 - DNA, 20 bp, synthetic construct
  misc_feature 1..20: note = Probe
  source 1..20: mol_type = other DNA
acaacattcaaaaaagagta

SEQ ID NO: 36141 - DNA, 50 bp, synthetic construct; identical to SEQ ID NO: 124
  misc_feature 1..50: note = Probe
  source 1..50: mol_type = other DNA

SEQ ID NO: 36142 - DNA, 18 bp, synthetic construct
  misc_feature 1..18: note = Probe
  source 1..18: mol_type = other DNA
acacgcagaaggtcctgg

SEQ ID NO: 36143 - DNA, 19 bp, synthetic construct
  misc_feature 1..19: note = Probe
  source 1..19: mol_type = other DNA
acacgcagaaggtcctggg

SEQ ID NO: 36144 - DNA, 20 bp, synthetic construct
  misc_feature 1..20: note = Probe
  source 1..20: mol_type = other DNA
acacgcagaaggtcctgggt

SEQ ID NO: 36145 - DNA, 23 bp, synthetic construct
  misc_feature 1..23: note = Probe
  source 1..23: mol_type = other DNA
acacgcagaaggtcctgggttcg

SEQ ID NO: 36146 - DNA, 29 bp, synthetic construct
  misc_feature 1..29: note = Probe
  source 1..29: mol_type = other DNA
acacgcagaaggtcctgggttcgagcccc

SEQ ID NO: 36147 - DNA, 36 bp, synthetic construct; identical to SEQ ID NO: 12522
  misc_feature 1..36: note = Probe
  source 1..36: mol_type = other DNA

SEQ ID NO: 36148 - DNA, 37 bp, synthetic construct; identical to SEQ ID NO: 15407
  misc_feature 1..37: note = Probe
  source 1..37: mol_type = other DNA

SEQ ID NO: 36149 - DNA, 38 bp, synthetic construct; identical to SEQ ID NO: 12523
  misc_feature 1..38: note = Probe
  source 1..38: mol_type = other DNA

SEQ ID NO: 36150 - DNA, 18 bp, synthetic construct
  misc_feature 1..18: note = Probe
  source 1..18: mol_type = other DNA
acacgcgaaaggtccccg

SEQ ID NO: 36151 - DNA, 19 bp, synthetic construct
  misc_feature 1..19: note = Probe
  source 1..19: mol_type = other DNA
acacgcgaaaggtccccgg

SEQ ID NO: 36152 - DNA, 20 bp, synthetic construct
  misc_feature 1..20: note = Probe
  source 1..20: mol_type = other DNA
acacgcgaaaggtccccggt

SEQ ID NO: 36153 - DNA, 18 bp, synthetic construct
  misc_feature 1..18: note = Probe
  source 1..18: mol_type = other DNA
acacgcgaaaggtccctg

SEQ ID NO: 36154 - DNA, 19 bp, synthetic construct
  misc_feature 1..19: note = Probe
  source 1..19: mol_type = other DNA
acacgcgaaaggtccctgg

SEQ ID NO: 36155 - DNA, 50 bp, synthetic construct; identical to SEQ ID NO: 129
  misc_feature 1..50: note = Probe
  source 1..50: mol_type = other DNA

SEQ ID NO: 36156 - DNA, 18 bp, synthetic construct
  misc_feature 1..18: note = Probe
  source 1..18: mol_type = other DNA
acagctatccattggtct

SEQ ID NO: 36157 - DNA, 27 bp, synthetic construct
  misc_feature 1..27: note = Probe
  source 1..27: mol_type = other DNA
acagctatccattggtcttaggcccca

SEQ ID NO: 36158 - DNA, 26 bp, synthetic construct
  misc_feature 1..26: note = Probe
  source 1..26: mol_type = other DNA
acatggtctagcggttaggattcctg

SEQ ID NO: 36159 - DNA, 50 bp, synthetic construct; identical to SEQ ID NO: 138
  misc_feature 1..50: note = Probe
  source 1..50: mol_type = other DNA

SEQ ID NO: 36160 - DNA, 33 bp, synthetic construct; identical to SEQ ID NO: 2763
  misc_feature 1..33: note = Probe
  source 1..33: mol_type = other DNA

SEQ ID NO: 36161 - DNA, 34 bp, synthetic construct; identical to SEQ ID NO: 12544
  misc_feature 1..34: note = Probe
  source 1..34: mol_type = other DNA

SEQ ID NO: 36162 - DNA, 35 bp, synthetic construct; identical to SEQ ID NO: 149
  misc_feature 1..35: note = Probe
  source 1..35: mol_type = other DNA

SEQ ID NO: 36163 - DNA, 36 bp, synthetic construct; identical to SEQ ID NO: 150
  misc_feature 1..36: note = Probe
  source 1..36: mol_type = other DNA

SEQ ID NO: 36164 - DNA, 33 bp, synthetic construct; identical to SEQ ID NO: 12549
  misc_feature 1..33: note = Probe
  source 1..33: mol_type = other DNA

SEQ ID NO: 36165 - DNA, 34 bp, synthetic construct; identical to SEQ ID NO: 15598
  misc_feature 1..34: note = Probe
  source 1..34: mol_type = other DNA

SEQ ID NO: 36166 - DNA, 35 bp, synthetic construct; identical to SEQ ID NO: 15599
  misc_feature 1..35: note = Probe
  source 1..35: mol_type = other DNA

SEQ ID NO: 36167 - DNA, 33 bp, synthetic construct; identical to SEQ ID NO: 12557
  misc_feature 1..33: note = Probe
  source 1..33: mol_type = other DNA

SEQ ID NO: 36168 - DNA, 34 bp, synthetic construct; identical to SEQ ID NO: 15659
  misc_feature 1..34: note = Probe
  source 1..34: mol_type = other DNA

SEQ ID NO: 36169 - DNA, 35 bp, synthetic construct; identical to SEQ ID NO: 12558
  misc_feature 1..35: note = Probe
  source 1..35: mol_type = other DNA

SEQ ID NO: 36170 - DNA, 30 bp, synthetic construct; identical to SEQ ID NO: 165
  misc_feature 1..30: note = Probe
  source 1..30: mol_type = other DNA

SEQ ID NO: 36171 - DNA, 27 bp, synthetic construct
  misc_feature 1..27: note = Probe
  source 1..27: mol_type = other DNA
accggggttcaattccccgacggggag

SEQ ID NO: 36172 - DNA, 20 bp, synthetic construct
  misc_feature 1..20: note = Probe
  source 1..20: mol_type = other DNA
accggggttcgattccccga

SEQ ID NO: 36173 - DNA, 24 bp, synthetic construct
  misc_feature 1..24: note = Probe
  source 1..24: mol_type = other DNA
accggggttcgattccccgacggg

SEQ ID NO: 36174 - DNA, 25 bp, synthetic construct
  misc_feature 1..25: note = Probe
  source 1..25: mol_type = other DNA
accggggttcgattccccgacgggg

SEQ ID NO: 36175 - DNA, 27 bp, synthetic construct
  misc_feature 1..27: note = Probe
  source 1..27: mol_type = other DNA
accggggttcgattccccgacggggag

SEQ ID NO: 36176 - DNA, 17 bp, synthetic construct
  misc_feature 1..17: note = Probe
  source 1..17: mol_type = other DNA
acctcctcaaagcaata

SEQ ID NO: 36177 - DNA, 22 bp, synthetic construct
  misc_feature 1..22: note = Probe
  source 1..22: mol_type = other DNA
acctcctcaaagcaatacactg

SEQ ID NO: 36178 - DNA, 23 bp, synthetic construct
  misc_feature 1..23: note = Probe
  source 1..23: mol_type = other DNA
acctcctcaaagcaatacactga

SEQ ID NO: 36179 - DNA, 17 bp, synthetic construct
  misc_feature 1..17: note = Probe
  source 1..17: mol_type = other DNA
acgcagaaggtcctggg

SEQ ID NO: 36180 - DNA, 34 bp, synthetic construct; identical to SEQ ID NO: 12574
  misc_feature 1..34: note = Probe
  source 1..34: mol_type = other DNA

SEQ ID NO: 36181 - DNA, 35 bp, synthetic construct; identical to SEQ ID NO: 12575
  misc_feature 1..35: note = Probe
  source 1..35: mol_type = other DNA

SEQ ID NO: 36182 - DNA, 36 bp, synthetic construct; identical to SEQ ID NO: 2844
  misc_feature 1..36: note = Probe
  source 1..36: mol_type = other DNA

SEQ ID NO: 36183 - DNA, 37 bp, synthetic construct; identical to SEQ ID NO: 166
  misc_feature 1..37: note = Probe
  source 1..37: mol_type = other DNA

SEQ ID NO: 36184 - DNA, 18 bp, synthetic construct
  misc_feature 1..18: note = Probe
  source 1..18: mol_type = other DNA
acgcgaaaggtccccggt

SEQ ID NO: 36185 - DNA, 18 bp, synthetic construct
  misc_feature 1..18: note = Probe
  source 1..18: mol_type = other DNA
acgcgggagaccggggtt

SEQ ID NO: 36186 - DNA, 29 bp, synthetic construct
  misc_feature 1..29: note = Probe
  source 1..29: mol_type = other DNA
acgcgggagaccggggttcaattccccga

SEQ ID NO: 36187 - DNA, 32 bp, synthetic construct; identical to SEQ ID NO: 177
  misc_feature 1..32: note = Probe
  source 1..32: mol_type = other DNA

SEQ ID NO: 36188 - DNA, 33 bp, synthetic construct; identical to SEQ ID NO: 178
  misc_feature 1..33: note = Probe
  source 1..33: mol_type = other DNA

SEQ ID NO: 36189 - DNA, 34 bp, synthetic construct; identical to SEQ ID NO: 179
  misc_feature 1..34: note = Probe
  source 1..34: mol_type = other DNA

SEQ ID NO: 36190 - DNA, 35 bp, synthetic construct; identical to SEQ ID NO: 12593
  misc_feature 1..35: note = Probe
  source 1..35: mol_type = other DNA

SEQ ID NO: 36191 - DNA, 36 bp, synthetic construct; identical to SEQ ID NO: 180
  misc_feature 1..36: note = Probe
  source 1..36: mol_type = other DNA

SEQ ID NO: 36192 - DNA, 20 bp, synthetic construct
  misc_feature 1..20: note = Probe
  source 1..20: mol_type = other DNA
acgcgggagaccggggttcg

SEQ ID NO: 36193 - DNA, 23 bp, synthetic construct
  misc_feature 1..23: note = Probe
  source 1..23: mol_type = other DNA
acgcgggagaccggggttcgatt

SEQ ID NO: 36194 - DNA, 24 bp, synthetic construct
  misc_feature 1..24: note = Probe
  source 1..24: mol_type = other DNA
acgcgggagaccggggttcgattc

SEQ ID NO: 36195 - DNA, 27 bp, synthetic construct
  misc_feature 1..27: note = Probe
  source 1..27: mol_type = other DNA
acgcgggagaccggggttcgattcccc

SEQ ID NO: 36196 - DNA, 28 bp, synthetic construct
  misc_feature 1..28: note = Probe
  source 1..28: mol_type = other DNA
acgcgggagaccggggttcgattcccca

SEQ ID NO: 36197 - DNA, 34 bp, synthetic construct
  misc_feature 1..34: note = Probe
  source 1..34: mol_type = other DNA
acgcgggagaccggggttcgattccccaacgggg

SEQ ID NO: 36198 - DNA, 28 bp, synthetic construct
  misc_feature 1..28: note = Probe
  source 1..28: mol_type = other DNA
acgcgggagaccggggttcgattccccg

SEQ ID NO: 36199 - DNA, 29 bp, synthetic construct
  misc_feature 1..29: note = Probe
  source 1..29: mol_type = other DNA
acgcgggagaccggggttcgattccccga

SEQ ID NO: 36200 - DNA, 30 bp, synthetic construct; identical to SEQ ID NO: 182
  misc_feature 1..30: note = Probe
  source 1..30: mol_type = other DNA

SEQ ID NO: 36201 - DNA, 31 bp, synthetic construct; identical to SEQ ID NO: 183
  misc_feature 1..31: note = Probe
  source 1..31: mol_type = other DNA

SEQ ID NO: 36202 - DNA, 32 bp, synthetic construct; identical to SEQ ID NO: 184
  misc_feature 1..32: note = Probe
  source 1..32: mol_type = other DNA

SEQ ID NO: 36203 - DNA, 33 bp, synthetic construct; identical to SEQ ID NO: 185
  misc_feature 1..33: note = Probe
  source 1..33: mol_type = other DNA

SEQ ID NO: 36204 - DNA, 34 bp, synthetic construct; identical to SEQ ID NO: 186
  misc_feature 1..34: note = Probe
  source 1..34: mol_type = other DNA

SEQ ID NO: 36205 - DNA, 35 bp, synthetic construct; identical to SEQ ID NO: 187
  misc_feature 1..35: note = Probe
  source 1..35: mol_type = other DNA

SEQ ID NO: 36206 - DNA, 36 bp, synthetic construct; identical to SEQ ID NO: 188
  misc_feature 1..36: note = Probe
  source 1..36: mol_type = other DNA

SEQ ID NO: 36207 - DNA, 18 bp, synthetic construct
  misc_feature 1..18: note = Probe
  source 1..18: mol_type = other DNA
acgcgggaggcccgggtt

SEQ ID NO: 36208 - DNA, 20 bp, synthetic construct
  misc_feature 1..20: note = Probe
  source 1..20: mol_type = other DNA
acgcgggaggcccgggttcg

SEQ ID NO: 36209 - DNA, 34 bp, synthetic construct; identical to SEQ ID NO: 15849
  misc_feature 1..34: note = Probe
  source 1..34: mol_type = other DNA

SEQ ID NO: 36210 - DNA, 35 bp, synthetic construct; identical to SEQ ID NO: 15850
  misc_feature 1..35: note = Probe
  source 1..35: mol_type = other DNA

SEQ ID NO: 36211 - DNA, 33 bp, synthetic construct; identical to SEQ ID NO: 12608
  misc_feature 1..33: note = Probe
  source 1..33: mol_type = other DNA

SEQ ID NO: 36212 - DNA, 34 bp, synthetic construct; identical to SEQ ID NO: 2884
  misc_feature 1..34: note = Probe
  source 1..34: mol_type = other DNA

SEQ ID NO: 36213 - DNA, 35 bp, synthetic construct; identical to SEQ ID NO: 15863
  misc_feature 1..35: note = Probe
  source 1..35: mol_type = other DNA

SEQ ID NO: 36214 - DNA, 35 bp, synthetic construct; identical to SEQ ID NO: 193
  misc_feature 1..35: note = Probe
  source 1..35: mol_type = other DNA

SEQ ID NO: 36215 - DNA, 23 bp, synthetic construct
  misc_feature 1..23: note = Probe
  source 1..23: mol_type = other DNA
actacggatcagaagattccagg

SEQ ID NO: 36216 - DNA, 21 bp, synthetic construct
  misc_feature 1..21: note = Probe
  source 1..21: mol_type = other DNA
actccagatcagaaggttgcg

SEQ ID NO: 36217 - DNA, 23 bp, synthetic construct
  misc_feature 1..23: note = Probe
  source 1..23: mol_type = other DNA
actccagatcagaaggttgcgtg

SEQ ID NO: 36218 - DNA, 26 bp, synthetic construct
  misc_feature 1..26: note = Probe
  source 1..26: mol_type = other DNA
actcgaaatccaatgggggttccccg

SEQ ID NO: 36219 - DNA, 20 bp, synthetic construct
  misc_feature 1..20: note = Probe
  source 1..20: mol_type = other DNA
actctgaatccagcgatccg

SEQ ID NO: 36220 - DNA, 21 bp, synthetic construct
  misc_feature 1..21: note = Probe
  source 1..21: mol_type = other DNA
actctgaatccagcgatccga

SEQ ID NO: 36221 - DNA, 22 bp, synthetic construct
  misc_feature 1..22: note = Probe
  source 1..22: mol_type = other DNA
actctgaatccagcgatccgag

SEQ ID NO: 36222 - DNA, 41 bp, synthetic construct
  misc_feature 1..41: note = Probe
  source 1..41: mol_type = other DNA
actctgaatccagcgatccgagttcaaatctcggtggaacc

SEQ ID NO: 36223 - DNA, 41 bp, synthetic construct
  misc_feature 1..41: note = Probe
  source 1..41: mol_type = other DNA
actctgaatccagcgatccgagttcaagtctcggtggaacc

SEQ ID NO: 36224 - DNA, 32 bp, synthetic construct; identical to SEQ ID NO: 195
  misc_feature 1..32: note = Probe
  source 1..32: mol_type = other DNA

SEQ ID NO: 36225 - DNA, 34 bp, synthetic construct; identical to SEQ ID NO: 197
  misc_feature 1..34: note = Probe
  source 1..34: mol_type = other DNA

SEQ ID NO: 36226 - DNA, 50 bp, synthetic construct; identical to SEQ ID NO: 199
  misc_feature 1..50: note = Probe
  source 1..50: mol_type = other DNA

SEQ ID NO: 36227 - DNA, 22 bp, synthetic construct
  misc_feature 1..22: note = Probe
  source 1..22: mol_type = other DNA
actgcagatcaagaagtccccg

SEQ ID NO: 36228 - DNA, 23 bp, synthetic construct
  misc_feature 1..23: note = Probe
  source 1..23: mol_type = other DNA
actgcagatcaagaggtccccgg

SEQ ID NO: 36229 - DNA, 24 bp, synthetic construct
  misc_feature 1..24: note = Probe
  source 1..24: mol_type = other DNA
actgcagatcaagaggtccccggt

SEQ ID NO: 36230 - DNA, 20 bp, synthetic construct
  misc_feature 1..20: note = Probe
  source 1..20: mol_type = other DNA
actttgaatccagcaatccg

SEQ ID NO: 36231 - DNA, 22 bp, synthetic construct
  misc_feature 1..22: note = Probe
  source 1..22: mol_type = other DNA
actttgaatccagcaatccgag

SEQ ID NO: 36232 - DNA, 20 bp, synthetic construct
  misc_feature 1..20: note = Probe
  source 1..20: mol_type = other DNA
actttgaatccagcgatccg

SEQ ID NO: 36233 - DNA, 21 bp, synthetic construct
  misc_feature 1..21: note = Probe
  source 1..21: mol_type = other DNA
actttgaatccagcgatccga

SEQ ID NO: 36234 - DNA, 22 bp, synthetic construct
  misc_feature 1..22: note = Probe
  source 1..22: mol_type = other DNA
actttgaatccagcgatccgag

SEQ ID NO: 36235 - DNA, 30 bp, synthetic construct; identical to SEQ ID NO: 209
  misc_feature 1..30: note = Probe
  source 1..30: mol_type = other DNA

SEQ ID NO: 36236 - DNA, 50 bp, synthetic construct; identical to SEQ ID NO: 3039
  misc_feature 1..50: note = Probe
  source 1..50: mol_type = other DNA

SEQ ID NO: 36237 - DNA, 18 bp, synthetic construct
  misc_feature 1..18: note = Probe
  source 1..18: mol_type = other DNA
acttttaatctgagggtc

SEQ ID NO: 36238 - DNA, 20 bp, synthetic construct
  misc_feature 1..20: note = Probe
  source 1..20: mol_type = other DNA
acttttaatctgagggtcca

SEQ ID NO: 36239 - DNA, 21 bp, synthetic construct
  misc_feature 1..21: note = Probe
  source 1..21: mol_type = other DNA
acttttaatctgagggtccag

SEQ ID NO: 36240 - DNA, 22 bp, synthetic construct
  misc_feature 1..22: note = Probe
  source 1..22: mol_type = other DNA
acttttaatctgagggtccagg

SEQ ID NO: 36241 - DNA, 23 bp, synthetic construct
  misc_feature 1..23: note = Probe
  source 1..23: mol_type = other DNA
acttttaatctgagggtccaggg

SEQ ID NO: 36242 - DNA, 24 bp, synthetic construct
  misc_feature 1..24: note = Probe
  source 1..24: mol_type = other DNA
acttttaatctgagggtccagggt

SEQ ID NO: 36243 - DNA, 41 bp, synthetic construct
  misc_feature 1..41: note = Probe
  source 1..41: mol_type = other DNA
acttttaatctgagggtccagggttcaagtccctgttcggg

SEQ ID NO: 36244 - DNA, 50 bp, synthetic construct; identical to SEQ ID NO: 216
  misc_feature 1..50: note = Probe
  source 1..50: mol_type = other DNA

SEQ ID NO: 36245 - DNA, 46 bp, synthetic construct; identical to SEQ ID NO: 224
  misc_feature 1..46: note = Probe
  source 1..46: mol_type = other DNA

SEQ ID NO: 36246 - DNA, 33 bp, synthetic construct; identical to SEQ ID NO: 231
  misc_feature 1..33: note = Probe
  source 1..33: mol_type = other DNA

SEQ ID NO: 36247 - DNA, 50 bp, synthetic construct; identical to SEQ ID NO: 235
  misc_feature 1..50: note = Probe
  source 1..50: mol_type = other DNA

SEQ ID NO: 36248 - DNA, 29 bp, synthetic construct
  misc_feature 1..29: note = Probe
  source 1..29: mol_type = other DNA
agaccggggttcaattccccgacggggag

SEQ ID NO: 36249 - DNA, 22 bp, synthetic construct
  misc_feature 1..22: note = Probe
  source 1..22: mol_type = other DNA
agaccggggttcgattccccga

SEQ ID NO: 36250 - DNA, 23 bp, synthetic construct
  misc_feature 1..23: note = Probe
  source 1..23: mol_type = other DNA
agaccggggttcgattccccgac

SEQ ID NO: 36251 - DNA, 27 bp, synthetic construct
  misc_feature 1..27: note = Probe
  source 1..27: mol_type = other DNA
agaccggggttcgattccccgacgggg

SEQ ID NO: 36252 - DNA, 29 bp, synthetic construct
  misc_feature 1..29: note = Probe
  source 1..29: mol_type = other DNA
agaccggggttcgattccccgacggggag

SEQ ID NO: 36253 - DNA, 50 bp, synthetic construct; identical to SEQ ID NO: 16294
  misc_feature 1..50: note = Probe
  source 1..50: mol_type = other DNA

SEQ ID NO: 36254 - DNA, 29 bp, synthetic construct
  misc_feature 1..29: note = Probe
  source 1..29: mol_type = other DNA
agcagagtggcgcagcggaagcgtgctgg

SEQ ID NO: 36255 - DNA, 31 bp, synthetic construct; identical to SEQ ID NO: 275
  misc_feature 1..31: note = Probe
  source 1..31: mol_type = other DNA

SEQ ID NO: 36256 - DNA, 32 bp, synthetic construct; identical to SEQ ID NO: 276
  misc_feature 1..32: note = Probe
  source 1..32: mol_type = other DNA

SEQ ID NO: 36257 - DNA, 33 bp, synthetic construct; identical to SEQ ID NO: 277
  misc_feature 1..33: note = Probe
  source 1..33: mol_type = other DNA

SEQ ID NO: 36258 - DNA, 34 bp, synthetic construct; identical to SEQ ID NO: 278
  misc_feature 1..34: note = Probe
  source 1..34: mol_type = other DNA

SEQ ID NO: 36259 - DNA, 50 bp, synthetic construct; identical to SEQ ID NO: 285
  misc_feature 1..50: note = Probe
  source 1..50: mol_type = other DNA

SEQ ID NO: 36260 - DNA, 29 bp, synthetic construct
  misc_feature 1..29: note = Probe
  source 1..29: mol_type = other DNA
agcgatccgagttcaagtctcggtggaac

SEQ ID NO: 36261 - DNA, 50 bp, synthetic construct; identical to SEQ ID NO: 3312
  misc_feature 1..50: note = Probe
  source 1..50: mol_type = other DNA

SEQ ID NO: 36262 - DNA, 38 bp, synthetic construct
  misc_feature 1..38: note = Probe
  source 1..38: mol_type = other DNA
agcggaagcgtgctgggcccataacccagaggtcgatg

SEQ ID NO: 36263 - DNA, 50 bp, synthetic construct; identical to SEQ ID NO: 311
  misc_feature 1..50: note = Probe
  source 1..50: mol_type = other DNA

SEQ ID NO: 36264 - DNA, 31 bp, synthetic construct; identical to SEQ ID NO: 315
  misc_feature 1..31: note = Probe
  source 1..31: mol_type = other DNA

SEQ ID NO: 36265 - DNA, 29 bp, synthetic construct
  misc_feature 1..29: note = Probe
  source 1..29: mol_type = other DNA
aggattcggcgctctcaccgccgcggccc

SEQ ID NO: 36266 - DNA, 29 bp, synthetic construct
  misc_feature 1..29: note = Probe
  source 1..29: mol_type = other DNA
aggattcggcgctttcaccgccgcggccc

SEQ ID NO: 36267 - DNA, 30 bp, synthetic construct; identical to SEQ ID NO: 16667
  misc_feature 1..30: note = Probe
  source 1..30: mol_type = other DNA

SEQ ID NO: 36268 - DNA, 29 bp, synthetic construct
  misc_feature 1..29: note = Probe
  source 1..29: mol_type = other DNA
aggcggcccgggttcgactcccggtgtgg

SEQ ID NO: 36269 - DNA, 25 bp, synthetic construct
  misc_feature 1..25: note = Probe
  source 1..25: mol_type = other DNA
aggctccagtctcttcgggggcgtg

SEQ ID NO: 36270 - DNA, 27 bp, synthetic construct
  misc_feature 1..27: note = Probe
  source 1..27: mol_type = other DNA
agggatgggttcgattctcatagtcct

SEQ ID NO: 36271 - DNA, 28 bp, synthetic construct
  misc_feature 1..28: note = Probe
  source 1..28: mol_type = other DNA
agggattgtgggttcgagtcccatctgg

SEQ ID NO: 36272 - DNA, 29 bp, synthetic construct
  misc_feature 1..29: note = Probe
  source 1..29: mol_type = other DNA
agggtccagggttcaagtccctgttcagg

SEQ ID NO: 36273 - DNA, 29 bp, synthetic construct
  misc_feature 1..29: note = Probe
  source 1..29: mol_type = other DNA
agggtccagggttcaagtccctgttcggg

SEQ ID NO: 36274 - DNA, 50 bp, synthetic construct; identical to SEQ ID NO: 334
  misc_feature 1..50: note = Probe
  source 1..50: mol_type = other DNA

SEQ ID NO: 36275 - DNA, 24 bp, synthetic construct
  misc_feature 1..24: note = Probe
  source 1..24: mol_type = other DNA
aggtcccgggttcgatccccggca

SEQ ID NO: 36276 - DNA, 29 bp, synthetic construct
  misc_feature 1..29: note = Probe
  source 1..29: mol_type = other DNA
aggtcccgggttcgatccccggcatctcc

SEQ ID NO: 36277 - DNA, 28 bp, synthetic construct
  misc_feature 1..28: note = Probe
  source 1..28: mol_type = other DNA
aggtcgctggttcgattccggctcgaag

SEQ ID NO: 36278 - DNA, 22 bp, synthetic construct
  misc_feature 1..22: note = Probe
  source 1..22: mol_type = other DNA
agtatagtggtgagtgtccccg

SEQ ID NO: 36279 - DNA, 23 bp, synthetic construct
  misc_feature 1..23: note = Probe
  source 1..23: mol_type = other DNA
agtatagtggtgagtgtccccgt

SEQ ID NO: 36280 - DNA, 18 bp, synthetic construct
  misc_feature 1..18: note = Probe
  source 1..18: mol_type = other DNA
agtcggtagagcatcaga

SEQ ID NO: 36281 - DNA, 19 bp, synthetic construct
  misc_feature 1..19: note = Probe
  source 1..19: mol_type = other DNA
agtcggtagagcatcagac

SEQ ID NO: 36282 - DNA, 38 bp, synthetic construct
  misc_feature 1..38: note = Probe
  source 1..38: mol_type = other DNA
agtcggtagagcatgagactcttaatctcagggtcgtg

SEQ ID NO: 36283 - DNA, 18 bp, synthetic construct
  misc_feature 1..18: note = Probe
  source 1..18: mol_type = other DNA
agtcggtagagcatggga

SEQ ID NO: 36284 - DNA, 19 bp, synthetic construct
  misc_feature 1..19: note = Probe
  source 1..19: mol_type = other DNA
agtcggtagagcatgggac

SEQ ID NO: 36285 - DNA, 38 bp, synthetic construct; identical to SEQ ID NO: 355
  misc_feature 1..38: note = Probe
  source 1..38: mol_type = other DNA

SEQ ID NO: 36286 - DNA, 18 bp, synthetic construct
  misc_feature 1..18: note = Probe
  source 1..18: mol_type = other DNA
agtctcttcgggggcgtg

SEQ ID NO: 36287 - DNA, 36 bp, synthetic construct; identical to SEQ ID NO: 12756
  misc_feature 1..36: note = Probe
  source 1..36: mol_type = other DNA

SEQ ID NO: 36288 - DNA, 20 bp, synthetic construct
  misc_feature 1..20: note = Probe
  source 1..20: mol_type = other DNA
agtggggttttgcagtcctt

SEQ ID NO: 36289 - DNA, 21 bp, synthetic construct
  misc_feature 1..21: note = Probe
  source 1..21: mol_type = other DNA
agtggggttttgcagtcctta

SEQ ID NO: 36290 - DNA, 19 bp, synthetic construct
  misc_feature 1..19: note = Probe
  source 1..19: mol_type = other DNA
agtggtctaaggcgccaga

SEQ ID NO: 36291 - DNA, 18 bp, synthetic construct
  misc_feature 1..18: note = Probe
  source 1..18: mol_type = other DNA
agtggttaggattcggcg

SEQ ID NO: 36292 - DNA, 24 bp, synthetic construct
  misc_feature 1..24: note = Probe
  source 1..24: mol_type = other DNA
agtggttaggattcggcgctctca

SEQ ID NO: 36293 - DNA, 31 bp, synthetic construct; identical to SEQ ID NO: 16956
  misc_feature 1..31: note = Probe
  source 1..31: mol_type = other DNA

SEQ ID NO: 36294 - DNA, 36 bp, synthetic construct; identical to SEQ ID NO: 361
  misc_feature 1..36: note = Probe
  source 1..36: mol_type = other DNA

SEQ ID NO: 36295 - DNA, 37 bp, synthetic construct; identical to SEQ ID NO: 12778
  misc_feature 1..37: note = Probe
  source 1..37: mol_type = other DNA

SEQ ID NO: 36296 - DNA, 29 bp, synthetic construct
  misc_feature 1..29: note = Probe
  source 1..29: mol_type = other DNA
agtgtttgtgggtttaagtcccattggtc

SEQ ID NO: 36297 - DNA, 30 bp, synthetic construct; identical to SEQ ID NO: 3599
  misc_feature 1..30: note = Probe
  source 1..30: mol_type = other DNA

SEQ ID NO: 36298 - DNA, 31 bp, synthetic construct; identical to SEQ ID NO: 3600
  misc_feature 1..31: note = Probe
  source 1..31: mol_type = other DNA

SEQ ID NO: 36299 - DNA, 32 bp, synthetic construct; identical to SEQ ID NO: 16995
  misc_feature 1..32: note = Probe
  source 1..32: mol_type = other DNA

SEQ ID NO: 36300 - DNA, 20 bp, synthetic construct
  misc_feature 1..20: note = Probe
  source 1..20: mol_type = other DNA
agttcaaatctcggtgggac

SEQ ID NO: 36301 - DNA, 32 bp, synthetic construct; identical to SEQ ID NO: 3614
  misc_feature 1..32: note = Probe
  source 1..32: mol_type = other DNA

SEQ ID NO: 36302 - DNA, 50 bp, synthetic construct; identical to SEQ ID NO: 365
  misc_feature 1..50: note = Probe
  source 1..50: mol_type = other DNA

SEQ ID NO: 36303 - DNA, 28 bp, synthetic construct
  misc_feature 1..28: note = Probe
  source 1..28: mol_type = other DNA
atatcattggtcgtggttgtagtccgtg

SEQ ID NO: 36304 - DNA, 34 bp, synthetic construct; identical to SEQ ID NO: 374
  misc_feature 1..34: note = Probe
  source 1..34: mol_type = other DNA

SEQ ID NO: 36305 - DNA, 36 bp, synthetic construct; identical to SEQ ID NO: 17155
  misc_feature 1..36: note = Probe
  source 1..36: mol_type = other DNA

SEQ ID NO: 36306 - DNA, 34 bp, synthetic construct; identical to SEQ ID NO: 375
  misc_feature 1..34: note = Probe
  source 1..34: mol_type = other DNA

SEQ ID NO: 36307 - DNA, 36 bp, synthetic construct; identical to SEQ ID NO: 12805
  misc_feature 1..36: note = Probe
  source 1..36: mol_type = other DNA

SEQ ID NO: 36308 - DNA, 36 bp, synthetic construct; identical to SEQ ID NO: 17166
  misc_feature 1..36: note = Probe
  source 1..36: mol_type = other DNA

SEQ ID NO: 36309 - DNA, 24 bp, synthetic construct
  misc_feature 1..24: note = Probe
  source 1..24: mol_type = other DNA
atccaatggggtttccccgcacag

SEQ ID NO: 36310 - DNA, 21 bp, synthetic construct
  misc_feature 1..21: note = Probe
  source 1..21: mol_type = other DNA
atccattggggtctccccgcg

SEQ ID NO: 36311 - DNA, 21 bp, synthetic construct
  misc_feature 1..21: note = Probe
  source 1..21: mol_type = other DNA
atccattggggtttccccgcg

SEQ ID NO: 36312 - DNA, 23 bp, synthetic construct
  misc_feature 1..23: note = Probe
  source 1..23: mol_type = other DNA
atccattggggtttccccgcgca

SEQ ID NO: 36313 - DNA, 24 bp, synthetic construct
  misc_feature 1..24: note = Probe
  source 1..24: mol_type = other DNA
atccattggggtttccccgcgcag

SEQ ID NO: 36314 - DNA, 19 bp, synthetic construct
  misc_feature 1..19: note = Probe
  source 1..19: mol_type = other DNA
atccccggcacctccacca

SEQ ID NO: 36315 - DNA, 18 bp, synthetic construct
  misc_feature 1..18: note = Probe
  source 1..18: mol_type = other DNA
atcgatgcccgcatcctc

SEQ ID NO: 36316 - DNA, 19 bp, synthetic construct
  misc_feature 1..19: note = Probe
  source 1..19: mol_type = other DNA
atcgatgcccgcatcctcc

SEQ ID NO: 36317 - DNA, 33 bp, synthetic construct; identical to SEQ ID NO: 387
  misc_feature 1..33: note = Probe
  source 1..33: mol_type = other DNA

SEQ ID NO: 36318 - DNA, 20 bp, synthetic construct
  misc_feature 1..20: note = Probe
  source 1..20: mol_type = other DNA
atctaaaggtccctggttcg

SEQ ID NO: 36319 - DNA, 34 bp, synthetic construct
  misc_feature 1..34: note = Probe
  source 1..34: mol_type = other DNA
atctaaaggtccctggttcgatcccgggtttcgg

SEQ ID NO: 36320 - DNA, 34 bp, synthetic construct; identical to SEQ ID NO: 17371
  misc_feature 1..34: note = Probe
  source 1..34: mol_type = other DNA

SEQ ID NO: 36321 - DNA, 30 bp, synthetic construct; identical to SEQ ID NO: 12823
  misc_feature 1..30: note = Probe
  source 1..30: mol_type = other DNA

SEQ ID NO: 36322 - DNA, 27 bp, synthetic construct
  misc_feature 1..27: note = Probe
  source 1..27: mol_type = other DNA
atgggtggttcagtggtagaattctcg

SEQ ID NO: 36323 - DNA, 19 bp, synthetic construct
  misc_feature 1..19: note = Probe
  source 1..19: mol_type = other DNA
atggtctagcggttaggat

SEQ ID NO: 36324 - DNA, 20 bp, synthetic construct
  misc_feature 1..20: note = Probe
  source 1..20: mol_type = other DNA
atggtctagcggttaggatt

SEQ ID NO: 36325 - DNA, 22 bp, synthetic construct
  misc_feature 1..22: note = Probe
  source 1..22: mol_type = other DNA
atggtctagcggttaggattcc

SEQ ID NO: 36326 - DNA, 23 bp, synthetic construct
  misc_feature 1..23: note = Probe
  source 1..23: mol_type = other DNA
atggtctagcggttaggattcct

SEQ ID NO: 36327 - DNA, 24 bp, synthetic construct
  misc_feature 1..24: note = Probe
  source 1..24: mol_type = other DNA
atggtctagcggttaggattcctg

SEQ ID NO: 36328 - DNA, 50 bp, synthetic construct
  misc_feature 1..50: note = Probe
  source 1..50: mol_type = other DNA
atggttagcactctggactctgaatccagcgatccgagttcaaatctcgg

SEQ ID NO: 36329 - DNA, 20 bp, synthetic construct
  misc_feature 1..20: note = Probe
  source 1..20: mol_type = other DNA
attcccattcttgcgacccg

SEQ ID NO: 36330 - DNA, 21 bp, synthetic construct
  misc_feature 1..21: note = Probe
  source 1..21: mol_type = other DNA
attcccattcttgcgacccgg

SEQ ID NO: 36331 - DNA, 23 bp, synthetic construct
  misc_feature 1..23: note = Probe
  source 1..23: mol_type = other DNA
attccggatcagaagattgaggg

SEQ ID NO: 36332 - DNA, 24 bp, synthetic construct
  misc_feature 1..24: note = Probe
  source 1..24: mol_type = other DNA
attccggatcagaagattgagggt

SEQ ID NO: 36333 - DNA, 25 bp, synthetic construct
  misc_feature 1..25: note = Probe
  source 1..25: mol_type = other DNA
attccggatcagaagattgagggtt

SEQ ID NO: 36334 - DNA, 50 bp, synthetic construct; identical to SEQ ID NO: 3882
  misc_feature 1..50: note = Probe
  source 1..50: mol_type = other DNA

SEQ ID NO: 36335 - DNA, 23 bp, synthetic construct
  misc_feature 1..23: note = Probe
  source 1..23: mol_type = other DNA
attggtcgtggttgtagtccgtg

SEQ ID NO: 36336 - DNA, 27 bp, synthetic construct
  misc_feature 1..27: note = Probe
  source 1..27: mol_type = other DNA
attggtcgtggttgtagtccgtgcgag

SEQ ID NO: 36337 - DNA, 29 bp, synthetic construct
  misc_feature 1..29: note = Probe
  source 1..29: mol_type = other DNA
attggtcgtggttgtagtccgtgcgagaa

SEQ ID NO: 36338 - DNA, 30 bp, synthetic construct; identical to SEQ ID NO: 9429
  misc_feature 1..30: note = Probe
  source 1..30: mol_type = other DNA

SEQ ID NO: 36339 - DNA, 31 bp, synthetic construct; identical to SEQ ID NO: 426
  misc_feature 1..31: note = Probe
  source 1..31: mol_type = other DNA

SEQ ID NO: 36340 - DNA, 29 bp, synthetic construct
  misc_feature 1..29: note = Probe
  source 1..29: mol_type = other DNA
atttaggctccagtctcttcgggggcgtg

SEQ ID NO: 36341 - DNA, 50 bp, synthetic construct; identical to SEQ ID NO: 437
  misc_feature 1..50: note = Probe
  source 1..50: mol_type = other DNA

SEQ ID NO: 36342 - DNA, 50 bp, synthetic construct; identical to SEQ ID NO: 442
  misc_feature 1..50: note = Probe
  source 1..50: mol_type = other DNA

SEQ ID NO: 36343 - DNA, 50 bp, synthetic construct; identical to SEQ ID NO: 447
  misc_feature 1..50: note = Probe
  source 1..50: mol_type = other DNA

SEQ ID NO: 36344 - DNA, 30 bp, synthetic construct
  misc_feature 1..30: note = Probe
  source 1..30: mol_type = other DNA
caagcagttaacgcgggttcgattcccggg

SEQ ID NO: 36345 - DNA, 18 bp, synthetic construct
  misc_feature 1..18: note = Probe
  source 1..18: mol_type = other DNA
caagcagttgacccgggt

SEQ ID NO: 36346 - DNA, 36 bp, synthetic construct
  misc_feature 1..36: note = Probe
  source 1..36: mol_type = other DNA
caagcagttgacccgggttcgattcccggccaacgc

SEQ ID NO: 36347 - DNA, 21 bp, synthetic construct
  misc_feature 1..21: note = Probe
  source 1..21: mol_type = other DNA
caatccccggcacctccacca

SEQ ID NO: 36348 - DNA, 21 bp, synthetic construct
  misc_feature 1..21: note = Probe
  source 1..21: mol_type = other DNA
caatggggtttccccgcacag

SEQ ID NO: 36349 - DNA, 50 bp, synthetic construct; identical to SEQ ID NO: 462
  misc_feature 1..50: note = Probe
  source 1..50: mol_type = other DNA

SEQ ID NO: 36350 - DNA, 21 bp, synthetic construct
  misc_feature 1..21: note = Probe
  source 1..21: mol_type = other DNA
cacaagaactgctaactcatg

SEQ ID NO: 36351 - DNA, 50 bp, synthetic construct; identical to SEQ ID NO: 466
  misc_feature 1..50: note = Probe
  source 1..50: mol_type = other DNA

SEQ ID NO: 36352 - DNA, 19 bp, synthetic construct
  misc_feature 1..19: note = Probe
  source 1..19: mol_type = other DNA
cacacgcgaaaggtccccg

SEQ ID NO: 36353 - DNA, 20 bp, synthetic construct
  misc_feature 1..20: note = Probe
  source 1..20: mol_type = other DNA
cacacgcgaaaggtccccgg

SEQ ID NO: 36354 - DNA, 21 bp, synthetic construct
  misc_feature 1..21: note = Probe
  source 1..21: mol_type = other DNA
cacacgcgaaaggtccccggt

SEQ ID NO: 36355 - DNA, 18 bp, synthetic construct
  misc_feature 1..18: note = Probe
  source 1..18: mol_type = other DNA
cacgcagaaggtcctggg

SEQ ID NO: 36356 - DNA, 36 bp, synthetic construct; identical to SEQ ID NO: 29340
  misc_feature 1..36: note = Probe
  source 1..36: mol_type = other DNA

SEQ ID NO: 36357 - DNA, 37 bp, synthetic construct
  misc_feature 1..37: note = Probe
  source 1..37: mol_type = other DNA
cacgcagaaggtcctgggttcgagccccagtggaacc

SEQ ID NO: 36358 - DNA, 18 bp, synthetic construct
  misc_feature 1..18: note = Probe
  source 1..18: mol_type = other DNA
cacgcgaaaggtccccgg

SEQ ID NO: 36359 - DNA, 19 bp, synthetic construct
  misc_feature 1..19: note = Probe
  source 1..19: mol_type = other DNA
cacgcgaaaggtccccggt

SEQ ID NO: 36360 - DNA, 34 bp, synthetic construct; identical to SEQ ID NO: 4128
  misc_feature 1..34: note = Probe
  source 1..34: mol_type = other DNA

SEQ ID NO: 36361 - DNA, 35 bp, synthetic construct; identical to SEQ ID NO: 17774
  misc_feature 1..35: note = Probe
  source 1..35: mol_type = other DNA

SEQ ID NO: 36362 - DNA, 37 bp, synthetic construct; identical to SEQ ID NO: 478
  misc_feature 1..37: note = Probe
  source 1..37: mol_type = other DNA

SEQ ID NO: 36363 - DNA, 30 bp, synthetic construct; identical to SEQ ID NO: 479
  misc_feature 1..30: note = Probe
  source 1..30: mol_type = other DNA

SEQ ID NO: 36364 - DNA, 31 bp, synthetic construct; identical to SEQ ID NO: 480
  misc_feature 1..31: note = Probe
  source 1..31: mol_type = other DNA

SEQ ID NO: 36365 - DNA, 34 bp, synthetic construct; identical to SEQ ID NO: 483
  misc_feature 1..34: note = Probe
  source 1..34: mol_type = other DNA

SEQ ID NO: 36366 - DNA, 35 bp, synthetic construct; identical to SEQ ID NO: 484
  misc_feature 1..35: note = Probe
  source 1..35: mol_type = other DNA

SEQ ID NO: 36367 - DNA, 36 bp, synthetic construct; identical to SEQ ID NO: 485
  misc_feature 1..36: note = Probe
  source 1..36: mol_type = other DNA

SEQ ID NO: 36368 - DNA, 37 bp, synthetic construct; identical to SEQ ID NO: 486
  misc_feature 1..37: note = Probe
  source 1..37: mol_type = other DNA

SEQ ID NO: 36369 - DNA, 35 bp, synthetic construct
  misc_feature 1..35: note = Probe
  source 1..35: mol_type = other DNA
cacgcgggaggcccgggttcgattcccggcccatg

SEQ ID NO: 36370 - DNA, 28 bp, synthetic construct
  misc_feature 1..28: note = Probe
  source 1..28: mol_type = other DNA
cactgtaaagctaacttagcattaacct

SEQ ID NO: 36371 - DNA, 29 bp, synthetic construct
  misc_feature 1..29: note = Probe
  source 1..29: mol_type = other DNA
cactgtaaagctaacttagcattaacctt

SEQ ID NO: 36372 - DNA, 18 bp, synthetic construct
  misc_feature 1..18: note = Probe
  source 1..18: mol_type = other DNA
cagaagattctaggttcg

SEQ ID NO: 36373 - DNA, 31 bp, synthetic construct; identical to SEQ ID NO: 17836
  misc_feature 1..31: note = Probe
  source 1..31: mol_type = other DNA

SEQ ID NO: 36374 - DNA, 32 bp, synthetic construct; identical to SEQ ID NO: 17837
  misc_feature 1..32: note = Probe
  source 1..32: mol_type = other DNA

SEQ ID NO: 36375 - DNA, 33 bp, synthetic construct
  misc_feature 1..33: note = Probe
  source 1..33: mol_type = other DNA
cagaaggtcctgggttcgagccccagtggaacc

SEQ ID NO: 36376 - DNA, 34 bp, synthetic construct; identical to SEQ ID NO: 17838
  misc_feature 1..34: note = Probe
  source 1..34: mol_type = other DNA

SEQ ID NO: 36377 - DNA, 50 bp, synthetic construct; identical to SEQ ID NO: 514
  misc_feature 1..50: note = Probe
  source 1..50: mol_type = other DNA

SEQ ID NO: 36378 - DNA, 29 bp, synthetic construct
  misc_feature 1..29: note = Probe
  source 1..29: mol_type = other DNA
cagagaatagtttaaattagaatcttagc

SEQ ID NO: 36379 - DNA, 33 bp, synthetic construct; identical to SEQ ID NO: 522
  misc_feature 1..33: note = Probe
  source 1..33: mol_type = other DNA

SEQ ID NO: 36380 - DNA, 50 bp, synthetic construct; identical to SEQ ID NO: 526
  misc_feature 1..50: note = Probe
  source 1..50: mol_type = other DNA

SEQ ID NO: 36381 - DNA, 30 bp, synthetic construct; identical to SEQ ID NO: 9562
  misc_feature 1..30: note = Probe
  source 1..30: mol_type = other DNA

SEQ ID NO: 36382 - DNA, 31 bp, synthetic construct; identical to SEQ ID NO: 12889
  misc_feature 1..31: note = Probe
  source 1..31: mol_type = other DNA

SEQ ID NO: 36383 - DNA, 32 bp, synthetic construct; identical to SEQ ID NO: 17977
  misc_feature 1..32: note = Probe
  source 1..32: mol_type = other DNA

SEQ ID NO: 36384 - DNA, 28 bp, synthetic construct
  misc_feature 1..28: note = Probe
  source 1..28: mol_type = other DNA
cagggatgggttcgattctcatagtcct

SEQ ID NO: 36385 - DNA, 17 bp, synthetic construct
  misc_feature 1..17: note = Probe
  source 1..17: mol_type = other DNA
cagtcggtagagcatca

SEQ ID NO: 36386 - DNA, 18 bp, synthetic construct
  misc_feature 1..18: note = Probe
  source 1..18: mol_type = other DNA
cagtcggtagagcatcag

SEQ ID NO: 36387 - DNA, 32 bp, synthetic construct; identical to SEQ ID NO: 18036
  misc_feature 1..32: note = Probe
  source 1..32: mol_type = other DNA

SEQ ID NO: 36388 - DNA, 18 bp, synthetic construct
  misc_feature 1..18: note = Probe
  source 1..18: mol_type = other DNA
cataacccagaggtcgat

SEQ ID NO: 36389 - DNA, 19 bp, synthetic construct
  misc_feature 1..19: note = Probe
  source 1..19: mol_type = other DNA
cataacccagaggtcgatg

SEQ ID NO: 36390 - DNA, 20 bp, synthetic construct
  misc_feature 1..20: note = Probe
  source 1..20: mol_type = other DNA
cataacccagaggtcgatgg

SEQ ID NO: 36391 - DNA, 18 bp, synthetic construct
  misc_feature 1..18: note = Probe
  source 1..18: mol_type = other DNA
cataatctgaaggtcgtg

SEQ ID NO: 36392 - DNA, 20 bp, synthetic construct
  misc_feature 1..20: note = Probe
  source 1..20: mol_type = other DNA
cataatctgaaggtcgtgag

SEQ ID NO: 36393 - DNA, 24 bp, synthetic construct
  misc_feature 1..24: note = Probe
  source 1..24: mol_type = other DNA
catagtgtagcggttatcacgtct

SEQ ID NO: 36394 - DNA, 24 bp, synthetic construct
  misc_feature 1..24: note = Probe
  source 1..24: mol_type = other DNA
catagtgtagtggttatcacgtct

SEQ ID NO: 36395 - DNA, 26 bp, synthetic construct
  misc_feature 1..26: note = Probe
  source 1..26: mol_type = other DNA
catatggtctagcggttaggattcct

SEQ ID NO: 36396 - DNA, 28 bp, synthetic construct
  misc_feature 1..28: note = Probe
  source 1..28: mol_type = other DNA
catgggtggttcagtggtagaattctcg

SEQ ID NO: 36397 - DNA, 20 bp, synthetic construct
  misc_feature 1..20: note = Probe
  source 1..20: mol_type = other DNA
catggtctagcggttaggat

SEQ ID NO: 36398 - DNA, 21 bp, synthetic construct
  misc_feature 1..21: note = Probe
  source 1..21: mol_type = other DNA
catggtctagcggttaggatt

SEQ ID NO: 36399 - DNA, 23 bp, synthetic construct
  misc_feature 1..23: note = Probe
  source 1..23: mol_type = other DNA
catggtctagcggttaggattcc

SEQ ID NO: 36400 - DNA, 24 bp, synthetic construct
  misc_feature 1..24: note = Probe
  source 1..24: mol_type = other DNA
catggtctagcggttaggattcct

SEQ ID NO: 36401 - DNA, 25 bp, synthetic construct
  misc_feature 1..25: note = Probe
  source 1..25: mol_type = other DNA
catggtctagcggttaggattcctg

SEQ ID NO: 36402 - DNA, 18 bp, synthetic construct
  misc_feature 1..18: note = Probe
  source 1..18: mol_type = other DNA
cattggggtctccccgcg

SEQ ID NO: 36403 - DNA, 18 bp, synthetic construct
  misc_feature 1..18: note = Probe
  source 1..18: mol_type = other DNA
cattggggtttccccgcg

SEQ ID NO: 36404 - DNA, 20 bp, synthetic construct
  misc_feature 1..20: note = Probe
  source 1..20: mol_type = other DNA
cattggggtttccccgcgca

SEQ ID NO: 36405 - DNA, 21 bp, synthetic construct
  misc_feature 1..21: note = Probe
  source 1..21: mol_type = other DNA
cattggggtttccccgcgcag

SEQ ID NO: 36406 - DNA, 23 bp, synthetic construct
  misc_feature 1..23: note = Probe
  source 1..23: mol_type = other DNA
cattggggtttccccgcgcaggt

SEQ ID NO: 36407 - DNA, 46 bp, synthetic construct; identical to SEQ ID NO: 558
  misc_feature 1..46: note = Probe
  source 1..46: mol_type = other DNA

SEQ ID NO: 36408 - DNA, 27 bp, synthetic construct
  misc_feature 1..27: note = Probe
  source 1..27: mol_type = other DNA
ccacatggtctagcggttaggattcct

SEQ ID NO: 36409 - DNA, 18 bp, synthetic construct
  misc_feature 1..18: note = Probe
  source 1..18: mol_type = other DNA
ccacgcgggagacccggg

SEQ ID NO: 36410 - DNA, 18 bp, synthetic construct
  misc_feature 1..18: note = Probe
  source 1..18: mol_type = other DNA
ccacgcgggaggcccggg

SEQ ID NO: 36411 - DNA, 19 bp, synthetic construct
  misc_feature 1..19: note = Probe
  source 1..19: mol_type = other DNA
ccacgcgggaggcccgggt

SEQ ID NO: 36412 - DNA, 21 bp, synthetic construct
  misc_feature 1..21: note = Probe
  source 1..21: mol_type = other DNA
ccacgcgggaggcccgggttc

SEQ ID NO: 36413 - DNA, 22 bp, synthetic construct
  misc_feature 1..22: note = Probe
  source 1..22: mol_type = other DNA
ccacgcgggaggcccgggttcg

SEQ ID NO: 36414 - DNA, 36 bp, synthetic construct; identical to SEQ ID NO: 29824
  misc_feature 1..36: note = Probe
  source 1..36: mol_type = other DNA

SEQ ID NO: 36415 - DNA, 35 bp, synthetic construct
  misc_feature 1..35: note = Probe
  source 1..35: mol_type = other DNA
ccacgcgggaggcccgggttcgattcccggcccat

SEQ ID NO: 36416 - DNA, 36 bp, synthetic construct; identical to SEQ ID NO: 29831
  misc_feature 1..36: note = Probe
  source 1..36: mol_type = other DNA

SEQ ID NO: 36417 - DNA, 37 bp, synthetic construct
  misc_feature 1..37: note = Probe
  source 1..37: mol_type = other DNA
ccacgcgggaggcccgggttcgattcccggcccatgc

SEQ ID NO: 36418 - DNA, 31 bp, synthetic construct; identical to SEQ ID NO: 4561
  misc_feature 1..31: note = Probe
  source 1..31: mol_type = other DNA

SEQ ID NO: 36419 - DNA, 32 bp, synthetic construct
  misc_feature 1..32: note = Probe
  source 1..32: mol_type = other DNA
ccaggcggcccgggttcgactcccggtgtggg

SEQ ID NO: 36420 - DNA, 33 bp, synthetic construct; identical to SEQ ID NO: 18272
  misc_feature 1..33: note = Probe
  source 1..33: mol_type = other DNA

SEQ ID NO: 36421 - DNA, 34 bp, synthetic construct; identical to SEQ ID NO: 4562
  misc_feature 1..34: note = Probe
  source 1..34: mol_type = other DNA

SEQ ID NO: 36422 - DNA, 31 bp, synthetic construct; identical to SEQ ID NO: 18284
  misc_feature 1..31: note = Probe
  source 1..31: mol_type = other DNA

SEQ ID NO: 36423 - DNA, 33 bp, synthetic construct; identical to SEQ ID NO: 12926
  misc_feature 1..33: note = Probe
  source 1..33: mol_type = other DNA

SEQ ID NO: 36424 - DNA, 18 bp, synthetic construct
  misc_feature 1..18: note = Probe
  source 1..18: mol_type = other DNA
ccataacccagaggtcga

SEQ ID NO: 36425 - DNA, 19 bp, synthetic construct
  misc_feature 1..19: note = Probe
  source 1..19: mol_type = other DNA
ccataacccagaggtcgat

SEQ ID NO: 36426 - DNA, 20 bp, synthetic construct
  misc_feature 1..20: note = Probe
  source 1..20: mol_type = other DNA
ccataacccagaggtcgatg

SEQ ID NO: 36427 - DNA, 21 bp, synthetic construct
  misc_feature 1..21: note = Probe
  source 1..21: mol_type = other DNA
ccataacccagaggtcgatgg

SEQ ID NO: 36428 - DNA, 25 bp, synthetic construct
  misc_feature 1..25: note = Probe
  source 1..25: mol_type = other DNA
ccatagtgtagcggttatcacgtct

SEQ ID NO: 36429 - DNA, 25 bp, synthetic construct
  misc_feature 1..25: note = Probe
  source 1..25: mol_type = other DNA
ccatagtgtagtggttatcacgtct

SEQ ID NO: 36430 - DNA, 26 bp, synthetic construct
  misc_feature 1..26: note = Probe
  source 1..26: mol_type = other DNA
ccatagtgtagtggttatcacgtctg

SEQ ID NO: 36431 - DNA, 27 bp, synthetic construct
  misc_feature 1..27: note = Probe
  source 1..27: mol_type = other DNA
ccatatggtctagcggttaggattcct

SEQ ID NO: 36432 - DNA, 28 bp, synthetic construct
  misc_feature 1..28: note = Probe
  source 1..28: mol_type = other DNA
ccatatggtctagcggttaggattcctg

SEQ ID NO: 36433 - DNA, 18 bp, synthetic construct
  misc_feature 1..18: note = Probe
  source 1..18: mol_type = other DNA
ccattcttgcgacccggg

SEQ ID NO: 36434 - DNA, 27 bp, synthetic construct
  misc_feature 1..27: note = Probe
  source 1..27: mol_type = other DNA
cccacatggtctagcggttaggattcc

SEQ ID NO: 36435 - DNA, 28 bp, synthetic construct
  misc_feature 1..28: note = Probe
  source 1..28: mol_type = other DNA
cccacatggtctagcggttaggattcct

SEQ ID NO: 36436 - DNA, 29 bp, synthetic construct
  misc_feature 1..29: note = Probe
  source 1..29: mol_type = other DNA
cccacatggtctagcggttaggattcctg

SEQ ID NO: 36437 - DNA, 30 bp, synthetic construct; identical to SEQ ID NO: 9679
  misc_feature 1..30: note = Probe
  source 1..30: mol_type = other DNA

SEQ ID NO: 36438 - DNA, 32 bp, synthetic construct; identical to SEQ ID NO: 585
  misc_feature 1..32: note = Probe
  source 1..32: mol_type = other DNA

SEQ ID NO: 36439 - DNA, 33 bp, synthetic construct; identical to SEQ ID NO: 12940
  misc_feature 1..33: note = Probe
  source 1..33: mol_type = other DNA

SEQ ID NO: 36440 - DNA, 34 bp, synthetic construct; identical to SEQ ID NO: 18397
  misc_feature 1..34: note = Probe
  source 1..34: mol_type = other DNA

SEQ ID NO: 36441 - DNA, 35 bp, synthetic construct; identical to SEQ ID NO: 18398
  misc_feature 1..35: note = Probe
  source 1..35: mol_type = other DNA

SEQ ID NO: 36442 - DNA, 32 bp, synthetic construct; identical to SEQ ID NO: 12942
  misc_feature 1..32: note = Probe
  source 1..32: mol_type = other DNA

SEQ ID NO: 36443 - DNA, 34 bp, synthetic construct
  misc_feature 1..34: note = Probe
  source 1..34: mol_type = other DNA
cccaggtggcccgggttcgactcccggtatggga

SEQ ID NO: 36444 - DNA, 35 bp, synthetic construct
  misc_feature 1..35: note = Probe
  source 1..35: mol_type = other DNA
cccaggtggcccgggttcgactcccggtatgggaa

SEQ ID NO: 36445 - DNA, 18 bp, synthetic construct
  misc_feature 1..18: note = Probe
  source 1..18: mol_type = other DNA
cccataacccagaggtcg

SEQ ID NO: 36446 - DNA, 19 bp, synthetic construct
  misc_feature 1..19: note = Probe
  source 1..19: mol_type = other DNA
cccataacccagaggtcga

SEQ ID NO: 36447 - DNA, 20 bp, synthetic construct
  misc_feature 1..20: note = Probe
  source 1..20: mol_type = other DNA
cccataacccagaggtcgat

SEQ ID NO: 36448 - DNA, 21 bp, synthetic construct
  misc_feature 1..21: note = Probe
  source 1..21: mol_type = other DNA
cccataacccagaggtcgatg

SEQ ID NO: 36449 - DNA, 22 bp, synthetic construct
  misc_feature 1..22: note = Probe
  source 1..22: mol_type = other DNA
cccataacccagaggtcgatgg

SEQ ID NO: 36450 - DNA, 41 bp, synthetic construct
  misc_feature 1..41: note = Probe
  source 1..41: mol_type = other DNA
cccataacccagaggtcgatggatcgaaaccatcctctgct

SEQ ID NO: 36451 - DNA, 28 bp, synthetic construct
  misc_feature 1..28: note = Probe
  source 1..28: mol_type = other DNA
cccatatggtctagcggttaggattcct

SEQ ID NO: 36452 - DNA, 29 bp, synthetic construct
  misc_feature 1..29: note = Probe
  source 1..29: mol_type = other DNA
cccatatggtctagcggttaggattcctg

SEQ ID NO: 36453 - DNA, 30 bp, synthetic construct; identical to SEQ ID NO: 9682
  misc_feature 1..30: note = Probe
  source 1..30: mol_type = other DNA

SEQ ID NO: 36454 - DNA, 26 bp, synthetic construct
  misc_feature 1..26: note = Probe
  source 1..26: mol_type = other DNA
cccatggtgtaatggttagcactctg

SEQ ID NO: 36455 - DNA, 34 bp, synthetic construct; identical to SEQ ID NO: 604
  misc_feature 1..34: note = Probe
  source 1..34: mol_type = other DNA

SEQ ID NO: 36456 - DNA, 29 bp, synthetic construct
  misc_feature 1..29: note = Probe
  source 1..29: mol_type = other DNA
cccggatagctcagtcggtagagcatcag

SEQ ID NO: 36457 - DNA, 30 bp, synthetic construct; identical to SEQ ID NO: 615
  misc_feature 1..30: note = Probe
  source 1..30: mol_type = other DNA

SEQ ID NO: 36458 - DNA, 31 bp, synthetic construct; identical to SEQ ID NO: 616
  misc_feature 1..31: note = Probe
  source 1..31: mol_type = other DNA

SEQ ID NO: 36459 - DNA, 33 bp, synthetic construct; identical to SEQ ID NO: 618
  misc_feature 1..33: note = Probe
  source 1..33: mol_type = other DNA

SEQ ID NO: 36460 - DNA, 35 bp, synthetic construct; identical to SEQ ID NO: 620
  misc_feature 1..35: note = Probe
  source 1..35: mol_type = other DNA

SEQ ID NO: 36461 - DNA, 36 bp, synthetic construct; identical to SEQ ID NO: 12964
  misc_feature 1..36: note = Probe
  source 1..36: mol_type = other DNA

SEQ ID NO: 36462 - DNA, 28 bp, synthetic construct
  misc_feature 1..28: note = Probe
  source 1..28: mol_type = other DNA
cccggctagctcagtcggtagagcatga

SEQ ID NO: 36463 - DNA, 29 bp, synthetic construct
  misc_feature 1..29: note = Probe
  source 1..29: mol_type = other DNA
cccggctagctcagtcggtagagcatgag

SEQ ID NO: 36464 - DNA, 30 bp, synthetic construct; identical to SEQ ID NO: 4748
  misc_feature 1..30: note = Probe
  source 1..30: mol_type = other DNA

SEQ ID NO: 36465 - DNA, 28 bp, synthetic construct
  misc_feature 1..28: note = Probe
  source 1..28: mol_type = other DNA
cccggctagctcagtcggtagagcatgg

SEQ ID NO: 36466 - DNA, 30 bp, synthetic construct; identical to SEQ ID NO: 4750
  misc_feature 1..30: note = Probe
  source 1..30: mol_type = other DNA

SEQ ID NO: 36467 - DNA, 25 bp, synthetic construct
  misc_feature 1..25: note = Probe
  source 1..25: mol_type = other DNA
cccgggttcgatccccagcatctcc

SEQ ID NO: 36468 - DNA, 22 bp, synthetic construct
  misc_feature 1..22: note = Probe
  source 1..22: mol_type = other DNA
cccggtaatcgcataaaactta

SEQ ID NO: 36469 - DNA, 29 bp, synthetic construct
  misc_feature 1..29: note = Probe
  source 1..29: mol_type = other DNA
cccggtaatcgcataaaacttaaaacttt

SEQ ID NO: 36470 - DNA, 30 bp, synthetic construct
  misc_feature 1..30: note = Probe
  source 1..30: mol_type = other DNA
cccggtaatcgcataaaacttaaaacttta

SEQ ID NO: 36471 - DNA, 30 bp, synthetic construct; identical to SEQ ID NO: 12985
  misc_feature 1..30: note = Probe
  source 1..30: mol_type = other DNA

SEQ ID NO: 36472 - DNA, 30 bp, synthetic construct; identical to SEQ ID NO: 637
  misc_feature 1..30: note = Probe
  source 1..30: mol_type = other DNA

SEQ ID NO: 36473 - DNA, 32 bp, synthetic construct; identical to SEQ ID NO: 639
  misc_feature 1..32: note = Probe
  source 1..32: mol_type = other DNA

SEQ ID NO: 36474 - DNA, 33 bp, synthetic construct; identical to SEQ ID NO: 640
  misc_feature 1..33: note = Probe
  source 1..33: mol_type = other DNA

SEQ ID NO: 36475 - DNA, 34 bp, synthetic construct; identical to SEQ ID NO: 641
  misc_feature 1..34: note = Probe
  source 1..34: mol_type = other DNA

SEQ ID NO: 36476 - DNA, 50 bp, synthetic construct; identical to SEQ ID NO: 4772
  misc_feature 1..50: note = Probe
  source 1..50: mol_type = other DNA

SEQ ID NO: 36477 - DNA, 35 bp, synthetic construct; identical to SEQ ID NO: 646
  misc_feature 1..35: note = Probe
  source 1..35: mol_type = other DNA

SEQ ID NO: 36478 - DNA, 26 bp, synthetic construct
  misc_feature 1..26: note = Probe
  source 1..26: mol_type = other DNA
ccgagtggtctaaggcgccagactca

SEQ ID NO: 36479 - DNA, 18 bp, synthetic construct
  misc_feature 1..18: note = Probe
  source 1..18: mol_type = other DNA
ccgcagcaacctcggttc

SEQ ID NO: 36480 - DNA, 33 bp, synthetic construct; identical to SEQ ID NO: 4791
  misc_feature 1..33: note = Probe
  source 1..33: mol_type = other DNA

SEQ ID NO: 36481 - DNA, 32 bp, synthetic construct; identical to SEQ ID NO: 13005
  misc_feature 1..32: note = Probe
  source 1..32: mol_type = other DNA

SEQ ID NO: 36482 - DNA, 33 bp, synthetic construct; identical to SEQ ID NO: 13006
  misc_feature 1..33: note = Probe
  source 1..33: mol_type = other DNA

SEQ ID NO: 36483 - DNA, 34 bp, synthetic construct; identical to SEQ ID NO: 13007
  misc_feature 1..34: note = Probe
  source 1..34: mol_type = other DNA

SEQ ID NO: 36484 - DNA, 35 bp, synthetic construct; identical to SEQ ID NO: 13008
  misc_feature 1..35: note = Probe
  source 1..35: mol_type = other DNA

SEQ ID NO: 36485 - DNA, 26 bp, synthetic construct
  misc_feature 1..26: note = Probe
  source 1..26: mol_type = other DNA
ccgcctgtcacgcgggagaccggggt

SEQ ID NO: 36486 - DNA, 29 bp, synthetic construct
  misc_feature 1..29: note = Probe
  source 1..29: mol_type = other DNA
ccgcggcccgggttcgattcccggtcagg

SEQ ID NO: 36487 - DNA, 30 bp, synthetic construct; identical to SEQ ID NO: 18662
  misc_feature 1..30: note = Probe
  source 1..30: mol_type = other DNA

SEQ ID NO: 36488 - DNA, 31 bp, synthetic construct; identical to SEQ ID NO: 4807
  misc_feature 1..31: note = Probe
  source 1..31: mol_type = other DNA

SEQ ID NO: 36489 - DNA, 25 bp, synthetic construct
  misc_feature 1..25: note = Probe
  source 1..25: mol_type = other DNA
ccgctggtgtagtggtatcatgcaa

SEQ ID NO: 36490 - DNA, 28 bp, synthetic construct
  misc_feature 1..28: note = Probe
  source 1..28: mol_type = other DNA
ccggatagctcagtcggtagagcatcag

SEQ ID NO: 36491 - DNA, 29 bp, synthetic construct
  misc_feature 1..29: note = Probe
  source 1..29: mol_type = other DNA
ccggatagctcagtcggtagagcatcaga

SEQ ID NO: 36492 - DNA, 30 bp, synthetic construct; identical to SEQ ID NO: 668
  misc_feature 1..30: note = Probe
  source 1..30: mol_type = other DNA

SEQ ID NO: 36493 - DNA, 34 bp, synthetic construct; identical to SEQ ID NO: 672
  misc_feature 1..34: note = Probe
  source 1..34: mol_type = other DNA

SEQ ID NO: 36494 - DNA, 28 bp, synthetic construct
  misc_feature 1..28: note = Probe
  source 1..28: mol_type = other DNA
ccggctagctcagtcggtagagcatgag

SEQ ID NO: 36495 - DNA, 29 bp, synthetic construct
  misc_feature 1..29: note = Probe
  source 1..29: mol_type = other DNA
ccggctagctcagtcggtagagcatgaga

SEQ ID NO: 36496 - DNA, 30 bp, synthetic construct; identical to SEQ ID NO: 675
  misc_feature 1..30: note = Probe
  source 1..30: mol_type = other DNA

SEQ ID NO: 36497 - DNA, 28 bp, synthetic construct
  misc_feature 1..28: note = Probe
  source 1..28: mol_type = other DNA
ccggctagctcagtcggtagagcatggg

SEQ ID NO: 36498 - DNA, 29 bp, synthetic construct
  misc_feature 1..29: note = Probe
  source 1..29: mol_type = other DNA
ccggctagctcagtcggtagagcatggga

SEQ ID NO: 36499 - DNA, 30 bp, synthetic construct; identical to SEQ ID NO: 680
  misc_feature 1..30: note = Probe
  source 1..30: mol_type = other DNA

SEQ ID NO: 36500 - DNA, 29 bp, synthetic construct
  misc_feature 1..29: note = Probe
  source 1..29: mol_type = other DNA
ccgtgatcgtatagtggttagtactctgc

SEQ ID NO: 36501 - DNA, 19 bp, synthetic construct
  misc_feature 1..19: note = Probe
  source 1..19: mol_type = other DNA
cctcacacgcgaaaggtcc

SEQ ID NO: 36502 - DNA, 20 bp, synthetic construct
  misc_feature 1..20: note = Probe
  source 1..20: mol_type = other DNA
cctcacacgcgaaaggtccc

SEQ ID NO: 36503 - DNA, 21 bp, synthetic construct
  misc_feature 1..21: note = Probe
  source 1..21: mol_type = other DNA
cctcacacgcgaaaggtcccc

SEQ ID NO: 36504 - DNA, 22 bp, synthetic construct
  misc_feature 1..22: note = Probe
  source 1..22: mol_type = other DNA
cctcacacgcgaaaggtccccg

SEQ ID NO: 36505 - DNA, 23 bp, synthetic construct
  misc_feature 1..23: note = Probe
  source 1..23: mol_type = other DNA
cctcacacgcgaaaggtccccgg

SEQ ID NO: 36506 - DNA, 24 bp, synthetic construct
  misc_feature 1..24: note = Probe
  source 1..24: mol_type = other DNA
cctcacacgcgaaaggtccccggt

SEQ ID NO: 36507 - DNA, 18 bp, synthetic construct
  misc_feature 1..18: note = Probe
  source 1..18: mol_type = other DNA
cctcctcaaagcaataca

SEQ ID NO: 36508 - DNA, 21 bp, synthetic construct
  misc_feature 1..21: note = Probe
  source 1..21: mol_type = other DNA
cctcctcaaagcaatacactg

SEQ ID NO: 36509 - DNA, 22 bp, synthetic construct
  misc_feature 1..22: note = Probe
  source 1..22: mol_type = other DNA
cctcctcaaagcaatacactga

SEQ ID NO: 36510 - DNA, 50 bp, synthetic construct
  misc_feature 1..50: note = Probe
  source 1..50: mol_type = other DNA
cctcctcaaagcaatacactgaaaatgtttagacgggctcacatcacccc

SEQ ID NO: 36511 - DNA, 28 bp, synthetic construct
  misc_feature 1..28: note = Probe
  source 1..28: mol_type = other DNA
cctcgttagtatagtggtgagtatcccc

SEQ ID NO: 36512 - DNA, 29 bp, synthetic construct
  misc_feature 1..29: note = Probe
  source 1..29: mol_type = other DNA
cctcgttagtatagtggtgagtatccccg

SEQ ID NO: 36513 - DNA, 30 bp, synthetic construct; identical to SEQ ID NO: 18792
  misc_feature 1..30: note = Probe
  source 1..30: mol_type = other DNA

SEQ ID NO: 36514 - DNA, 21 bp, synthetic construct
  misc_feature 1..21: note = Probe
  source 1..21: mol_type = other DNA
cctgccacgcgggaggcccgg

SEQ ID NO: 36515 - DNA, 23 bp, synthetic construct
  misc_feature 1..23: note = Probe
  source 1..23: mol_type = other DNA
cctgccacgcgggaggcccgggt

SEQ ID NO: 36516 - DNA, 41 bp, synthetic construct
  misc_feature 1..41: note = Probe
  source 1..41: mol_type = other DNA
cctgccacgcgggaggcccgggttcgattcccggcccatgc

SEQ ID NO: 36517 - DNA, 29 bp, synthetic construct
  misc_feature 1..29: note = Probe
  source 1..29: mol_type = other DNA
cctggtggtctagtggttaggattcggcg

SEQ ID NO: 36518 - DNA, 21 bp, synthetic construct
  misc_feature 1..21: note = Probe
  source 1..21: mol_type = other DNA
cctgtcacgcgggagaccggg

SEQ ID NO: 36519 - DNA, 22 bp, synthetic construct
  misc_feature 1..22: note = Probe
  source 1..22: mol_type = other DNA
cctgtcacgcgggagaccgggg

SEQ ID NO: 36520 - DNA, 23 bp, synthetic construct
  misc_feature 1..23: note = Probe
  source 1..23: mol_type = other DNA
cctgtcacgcgggagaccggggt

SEQ ID NO: 36521 - DNA, 24 bp, synthetic construct
  misc_feature 1..24: note = Probe
  source 1..24: mol_type = other DNA
cctgtcacgcgggagaccggggtt

SEQ ID NO: 36522 - DNA, 38 bp, synthetic construct; identical to SEQ ID NO: 13078
  misc_feature 1..38: note = Probe
  source 1..38: mol_type = other DNA

SEQ ID NO: 36523 - DNA, 41 bp, synthetic construct
  misc_feature 1..41: note = Probe
  source 1..41: mol_type = other DNA
cctgtcacgcgggagaccggggttcaattccccgacgggga

SEQ ID NO: 36524 - DNA, 42 bp, synthetic construct
  misc_feature 1..42: note = Probe
  source 1..42: mol_type = other DNA
cctgtcacgcgggagaccggggttcaattccccgacggggag

SEQ ID NO: 36525 - DNA, 26 bp, synthetic construct
  misc_feature 1..26: note = Probe
  source 1..26: mol_type = other DNA
cctgtcacgcgggagaccggggttcg

SEQ ID NO: 36526 - DNA, 35 bp, synthetic construct; identical to SEQ ID NO: 13080
  misc_feature 1..35: note = Probe
  source 1..35: mol_type = other DNA

SEQ ID NO: 36527 - DNA, 36 bp, synthetic construct; identical to SEQ ID NO: 18828
  misc_feature 1..36: note = Probe
  source 1..36: mol_type = other DNA

SEQ ID NO: 36528 - DNA, 38 bp, synthetic construct; identical to SEQ ID NO: 13081
  misc_feature 1..38: note = Probe
  source 1..38: mol_type = other DNA

SEQ ID NO: 36529 - DNA, 41 bp, synthetic construct; identical to SEQ ID NO: 18829
  misc_feature 1..41: note = Probe
  source 1..41: mol_type = other DNA

SEQ ID NO: 36530 - DNA, 42 bp, synthetic construct; identical to SEQ ID NO: 706
  misc_feature 1..42: note = Probe
  source 1..42: mol_type = other DNA

SEQ ID NO: 36531 - DNA, 19 bp, synthetic construct
  misc_feature 1..19: note = Probe
  source 1..19: mol_type = other DNA
ccttccaagcagttgaccc

SEQ ID NO: 36532 - DNA, 20 bp, synthetic construct
  misc_feature 1..20: note = Probe
  source 1..20: mol_type = other DNA
ccttccaagcagttgacccg

SEQ ID NO: 36533 - DNA, 21 bp, synthetic construct
  misc_feature 1..21: note = Probe
  source 1..21: mol_type = other DNA
ccttccaagcagttgacccgg

SEQ ID NO: 36534 - DNA, 22 bp, synthetic construct
  misc_feature 1..22: note = Probe
  source 1..22: mol_type = other DNA
ccttccaagcagttgacccggg

SEQ ID NO: 36535 - DNA, 23 bp, synthetic construct
  misc_feature 1..23: note = Probe
  source 1..23: mol_type = other DNA
ccttccaagcagttgacccgggt

SEQ ID NO: 36536 - DNA, 24 bp, synthetic construct
  misc_feature 1..24: note = Probe
  source 1..24: mol_type = other DNA
ccttccaagcagttgacccgggtt

SEQ ID NO: 36537 - DNA, 41 bp, synthetic construct
  misc_feature 1..41: note = Probe
  source 1..41: mol_type = other DNA
ccttccaagcagttgacccgggttcgattcccggccaacgc

SEQ ID NO: 36538 - DNA, 22 bp, synthetic construct
  misc_feature 1..22: note = Probe
  source 1..22: mol_type = other DNA
cctttcaagcagttaacgcggg

SEQ ID NO: 36539 - DNA, 35 bp, synthetic construct
  misc_feature 1..35: note = Probe
  source 1..35: mol_type = other DNA
cctttcaagcagttaacgcgggttcgattcccggg

SEQ ID NO: 36540 - DNA, 31 bp, synthetic construct; identical to SEQ ID NO: 18940
  misc_feature 1..31: note = Probe
  source 1..31: mol_type = other DNA

SEQ ID NO: 36541 - DNA, 27 bp, synthetic construct
  misc_feature 1..27: note = Probe
  source 1..27: mol_type = other DNA
cgatccgagttcaaatctcggtgggac

SEQ ID NO: 36542 - DNA, 27 bp, synthetic construct
  misc_feature 1..27: note = Probe
  source 1..27: mol_type = other DNA
cgatccgagttcaagtctcggtggaac

SEQ ID NO: 36543 - DNA, 33 bp, synthetic construct; identical to SEQ ID NO: 13094
  misc_feature 1..33: note = Probe
  source 1..33: mol_type = other DNA

SEQ ID NO: 36544 - DNA, 34 bp, synthetic construct; identical to SEQ ID NO: 13095
  misc_feature 1..34: note = Probe
  source 1..34: mol_type = other DNA

SEQ ID NO: 36545 - DNA, 35 bp, synthetic construct; identical to SEQ ID NO: 13096
  misc_feature 1..35: note = Probe
  source 1..35: mol_type = other DNA

SEQ ID NO: 36546 - DNA, 36 bp, synthetic construct; identical to SEQ ID NO: 13097
  misc_feature 1..36: note = Probe
  source 1..36: mol_type = other DNA

SEQ ID NO: 36547 - DNA, 50 bp, synthetic construct; identical to SEQ ID NO: 4981
  misc_feature 1..50: note = Probe
  source 1..50: mol_type = other DNA

SEQ ID NO: 36548 - DNA, 32 bp, synthetic construct; identical to SEQ ID NO: 30351
  misc_feature 1..32: note = Probe
  source 1..32: mol_type = other DNA

SEQ ID NO: 36549 - DNA, 33 bp, synthetic construct; identical to SEQ ID NO: 13103
  misc_feature 1..33: note = Probe
  source 1..33: mol_type = other DNA

SEQ ID NO: 36550 - DNA, 25 bp, synthetic construct
  misc_feature 1..25: note = Probe
  source 1..25: mol_type = other DNA
cgcctgtcacgcgggagaccggggt

SEQ ID NO: 36551 - DNA, 29 bp, synthetic construct
  misc_feature 1..29: note = Probe
  source 1..29: mol_type = other DNA
cgcggcccgggttcgattcccggtcaggg

SEQ ID NO: 36552 - DNA, 30 bp, synthetic construct; identical to SEQ ID NO: 19131
  misc_feature 1..30: note = Probe
  source 1..30: mol_type = other DNA

SEQ ID NO: 36553 - DNA, 32 bp, synthetic construct; identical to SEQ ID NO: 727
  misc_feature 1..32: note = Probe
  source 1..32: mol_type = other DNA

SEQ ID NO: 36554 - DNA, 33 bp, synthetic construct; identical to SEQ ID NO: 13132
  misc_feature 1..33: note = Probe
  source 1..33: mol_type = other DNA

SEQ ID NO: 36555 - DNA, 34 bp, synthetic construct; identical to SEQ ID NO: 728
  misc_feature 1..34: note = Probe
  source 1..34: mol_type = other DNA

SEQ ID NO: 36556 - DNA, 35 bp, synthetic construct; identical to SEQ ID NO: 729
  misc_feature 1..35: note = Probe
  source 1..35: mol_type = other DNA

SEQ ID NO: 36557 - DNA, 28 bp, synthetic construct
  misc_feature 1..28: note = Probe
  source 1..28: mol_type = other DNA
cgcgggagaccggggttcgattccccga

SEQ ID NO: 36558 - DNA, 29 bp, synthetic construct
  misc_feature 1..29: note = Probe
  source 1..29: mol_type = other DNA
cgcgggagaccggggttcgattccccgac

SEQ ID NO: 36559 - DNA, 30 bp, synthetic construct; identical to SEQ ID NO: 730
  misc_feature 1..30: note = Probe
  source 1..30: mol_type = other DNA

SEQ ID NO: 36560 - DNA, 31 bp, synthetic construct; identical to SEQ ID NO: 731
  misc_feature 1..31: note = Probe
  source 1..31: mol_type = other DNA

SEQ ID NO: 36561 - DNA, 32 bp, synthetic construct; identical to SEQ ID NO: 732
  misc_feature 1..32: note = Probe
  source 1..32: mol_type = other DNA

SEQ ID NO: 36562 - DNA, 33 bp, synthetic construct; identical to SEQ ID NO: 733
  misc_feature 1..33: note = Probe
  source 1..33: mol_type = other DNA

SEQ ID NO: 36563 - DNA, 34 bp, synthetic construct; identical to SEQ ID NO: 734
  misc_feature 1..34: note = Probe
  source 1..34: mol_type = other DNA

SEQ ID NO: 36564 - DNA, 35 bp, synthetic construct; identical to SEQ ID NO: 735
  misc_feature 1..35: note = Probe
  source 1..35: mol_type = other DNA

SEQ ID NO: 36565 - DNA, 33 bp, synthetic construct; identical to SEQ ID NO: 19171
  misc_feature 1..33: note = Probe
  source 1..33: mol_type = other DNA

SEQ ID NO: 36566 - DNA, 34 bp, synthetic construct; identical to SEQ ID NO: 19172
  misc_feature 1..34: note = Probe
  source 1..34: mol_type = other DNA

SEQ ID NO: 36567 - DNA, 32 bp, synthetic construct; identical to SEQ ID NO: 19183
  misc_feature 1..32: note = Probe
  source 1..32: mol_type = other DNA

SEQ ID NO: 36568 - DNA, 33 bp, synthetic construct; identical to SEQ ID NO: 19184
  misc_feature 1..33: note = Probe
  source 1..33: mol_type = other DNA

SEQ ID NO: 36569 - DNA, 34 bp, synthetic construct; identical to SEQ ID NO: 19185
  misc_feature 1..34: note = Probe
  source 1..34: mol_type = other DNA

SEQ ID NO: 36570 - DNA, 21 bp, synthetic construct
  misc_feature 1..21: note = Probe
  source 1..21: mol_type = other DNA
cgctctcaccgccgcggcccg

SEQ ID NO: 36571 - DNA, 42 bp, synthetic construct; identical to SEQ ID NO: 19192
  misc_feature 1..42: note = Probe
  source 1..42: mol_type = other DNA

SEQ ID NO: 36572 - DNA, 34 bp, synthetic construct; identical to SEQ ID NO: 747
  misc_feature 1..34: note = Probe
  source 1..34: mol_type = other DNA

SEQ ID NO: 36573 - DNA, 37 bp, synthetic construct; identical to SEQ ID NO: 750
  misc_feature 1..37: note = Probe
  source 1..37: mol_type = other DNA

SEQ ID NO: 36574 - DNA, 20 bp, synthetic construct
  misc_feature 1..20: note = Probe
  source 1..20: mol_type = other DNA
cggagctggggattgtgggt

SEQ ID NO: 36575 - DNA, 28 bp, synthetic construct
  misc_feature 1..28: note = Probe
  source 1..28: mol_type = other DNA
cggatagctcagtcggtagagcatcaga

SEQ ID NO: 36576 - DNA, 33 bp, synthetic construct; identical to SEQ ID NO: 765
  misc_feature 1..33: note = Probe
  source 1..33: mol_type = other DNA

SEQ ID NO: 36577 - DNA, 18 bp, synthetic construct
  misc_feature 1..18: note = Probe
  source 1..18: mol_type = other DNA
cggatcagaagattccag

SEQ ID NO: 36578 - DNA, 19 bp, synthetic construct
  misc_feature 1..19: note = Probe
  source 1..19: mol_type = other DNA
cggatcagaagattccagg

SEQ ID NO: 36579 - DNA, 20 bp, synthetic construct
  misc_feature 1..20: note = Probe
  source 1..20: mol_type = other DNA
cggatcagaagattccaggt

SEQ ID NO: 36580 - DNA, 19 bp, synthetic construct
  misc_feature 1..19: note = Probe
  source 1..19: mol_type = other DNA
cggatcagaagattgaggg

SEQ ID NO: 36581 - DNA, 20 bp, synthetic construct
  misc_feature 1..20: note = Probe
  source 1..20: mol_type = other DNA
cggatcagaagattgagggt

SEQ ID NO: 36582 - DNA, 19 bp, synthetic construct
  misc_feature 1..19: note = Probe
  source 1..19: mol_type = other DNA
cggatcagaagattgcagg

SEQ ID NO: 36583 - DNA, 25 bp, synthetic construct
  misc_feature 1..25: note = Probe
  source 1..25: mol_type = other DNA
cggcccgggttcgactcccggtgtg

SEQ ID NO: 36584 - DNA, 28 bp, synthetic construct
  misc_feature 1..28: note = Probe
  source 1..28: mol_type = other DNA
cggcccgggttcgactcccggtgtggga

SEQ ID NO: 36585 - DNA, 28 bp, synthetic construct
  misc_feature 1..28: note = Probe
  source 1..28: mol_type = other DNA
cggcccgggttcgattcccggtcaggga

SEQ ID NO: 36586 - DNA, 25 bp, synthetic construct
  misc_feature 1..25: note = Probe
  source 1..25: mol_type = other DNA
cggctagctcagtcggtagagcatg

SEQ ID NO: 36587 - DNA, 28 bp, synthetic construct
  misc_feature 1..28: note = Probe
  source 1..28: mol_type = other DNA
cggctagctcagtcggtagagcatgaga

SEQ ID NO: 36588 - DNA, 29 bp, synthetic construct
  misc_feature 1..29: note = Probe
  source 1..29: mol_type = other DNA
cggctagctcagtcggtagagcatgagac

SEQ ID NO: 36589 - DNA, 26 bp, synthetic construct
  misc_feature 1..26: note = Probe
  source 1..26: mol_type = other DNA
cggctagctcagtcggtagagcatgg

SEQ ID NO: 36590 - DNA, 28 bp, synthetic construct
  misc_feature 1..28: note = Probe
  source 1..28: mol_type = other DNA
cggctagctcagtcggtagagcatggga

SEQ ID NO: 36591 - DNA, 29 bp, synthetic construct
  misc_feature 1..29: note = Probe
  source 1..29: mol_type = other DNA
cggctagctcagtcggtagagcatgggac

SEQ ID NO: 36592 - DNA, 30 bp, synthetic construct; identical to SEQ ID NO: 778
  misc_feature 1..30: note = Probe
  source 1..30: mol_type = other DNA

SEQ ID NO: 36593 - DNA, 30 bp, synthetic construct; identical to SEQ ID NO: 13204
  misc_feature 1..30: note = Probe
  source 1..30: mol_type = other DNA

SEQ ID NO: 36594 - DNA, 31 bp, synthetic construct; identical to SEQ ID NO: 13205
  misc_feature 1..31: note = Probe
  source 1..31: mol_type = other DNA

SEQ ID NO: 36595 - DNA, 32 bp, synthetic construct; identical to SEQ ID NO: 783
  misc_feature 1..32: note = Probe
  source 1..32: mol_type = other DNA

SEQ ID NO: 36596 - DNA, 33 bp, synthetic construct; identical to SEQ ID NO: 784
  misc_feature 1..33: note = Probe
  source 1..33: mol_type = other DNA

SEQ ID NO: 36597 - DNA, 27 bp, synthetic construct
  misc_feature 1..27: note = Probe
  source 1..27: mol_type = other DNA
cgggagaccggggttcgattccccgac

SEQ ID NO: 36598 - DNA, 29 bp, synthetic construct
  misc_feature 1..29: note = Probe
  source 1..29: mol_type = other DNA
cgggagaccggggttcgattccccgacgg

SEQ ID NO: 36599 - DNA, 30 bp, synthetic construct; identical to SEQ ID NO: 786
  misc_feature 1..30: note = Probe
  source 1..30: mol_type = other DNA

SEQ ID NO: 36600 - DNA, 31 bp, synthetic construct; identical to SEQ ID NO: 787
  misc_feature 1..31: note = Probe
  source 1..31: mol_type = other DNA

SEQ ID NO: 36601 - DNA, 32 bp, synthetic construct; identical to SEQ ID NO: 788
  misc_feature 1..32: note = Probe
  source 1..32: mol_type = other DNA

SEQ ID NO: 36602 - DNA, 33 bp, synthetic construct; identical to SEQ ID NO: 789
  misc_feature 1..33: note = Probe
  source 1..33: mol_type = other DNA

SEQ ID NO: 36603 - DNA, 31 bp, synthetic construct; identical to SEQ ID NO: 30520
  misc_feature 1..31: note = Probe
  source 1..31: mol_type = other DNA

SEQ ID NO: 36604 - DNA, 32 bp, synthetic construct; identical to SEQ ID NO: 19283
  misc_feature 1..32: note = Probe
  source 1..32: mol_type = other DNA

SEQ ID NO: 36605 - DNA, 31 bp, synthetic construct; identical to SEQ ID NO: 19290
  misc_feature 1..31: note = Probe
  source 1..31: mol_type = other DNA

SEQ ID NO: 36606 - DNA, 32 bp, synthetic construct
  misc_feature 1..32: note = Probe
  source 1..32: mol_type = other DNA
cgggaggcccgggttcgattcccggcccatgc

SEQ ID NO: 36607 - DNA, 25 bp, synthetic construct
  misc_feature 1..25: note = Probe
  source 1..25: mol_type = other DNA
cgttagtatagtggtgagtatcccc

SEQ ID NO: 36608 - DNA, 26 bp, synthetic construct
  misc_feature 1..26: note = Probe
  source 1..26: mol_type = other DNA
cgttagtatagtggtgagtatccccg

SEQ ID NO: 36609 - DNA, 18 bp, synthetic construct
  misc_feature 1..18: note = Probe
  source 1..18: mol_type = other DNA
cgttcaggtcgcagtctc

SEQ ID NO: 36610 - DNA, 20 bp, synthetic construct
  misc_feature 1..20: note = Probe
  source 1..20: mol_type = other DNA
cgttcaggtcgcagtctccc

SEQ ID NO: 36611 - DNA, 26 bp, synthetic construct
  misc_feature 1..26: note = Probe
  source 1..26: mol_type = other DNA
cgttcaggtcgcagtctcccctggag

SEQ ID NO: 36612 - DNA, 23 bp, synthetic construct
  misc_feature 1..23: note = Probe
  source 1..23: mol_type = other DNA
ctaacacgcgaaaggtccccggt

SEQ ID NO: 36613 - DNA, 20 bp, synthetic construct
  misc_feature 1..20: note = Probe
  source 1..20: mol_type = other DNA
ctaagccagggattgtgggt

SEQ ID NO: 36614 - DNA, 27 bp, synthetic construct
  misc_feature 1..27: note = Probe
  source 1..27: mol_type = other DNA
ctagaaatccattggggtctccccgcg

SEQ ID NO: 36615 - DNA, 30 bp, synthetic construct
  misc_feature 1..30: note = Probe
  source 1..30: mol_type = other DNA
ctagaaatccattggggtctccccgcgcag

SEQ ID NO: 36616 - DNA, 20 bp, synthetic construct
  misc_feature 1..20: note = Probe
  source 1..20: mol_type = other DNA
ctagtggttaggattcggcg

SEQ ID NO: 36617 - DNA, 38 bp, synthetic construct; identical to SEQ ID NO: 13244
  misc_feature 1..38: note = Probe
  source 1..38: mol_type = other DNA

SEQ ID NO: 36618 - DNA, 46 bp, synthetic construct; identical to SEQ ID NO: 809
  misc_feature 1..46: note = Probe
  source 1..46: mol_type = other DNA

SEQ ID NO: 36619 - DNA, 23 bp, synthetic construct
  misc_feature 1..23: note = Probe
  source 1..23: mol_type = other DNA
ctcacaagaactgctaactcatg

SEQ ID NO: 36620 - DNA, 30 bp, synthetic construct
  misc_feature 1..30: note = Probe
  source 1..30: mol_type = other DNA
ctcacaagaactgctaactcatgcccccat

SEQ ID NO: 36621 - DNA, 31 bp, synthetic construct
  misc_feature 1..31: note = Probe
  source 1..31: mol_type = other DNA
ctcacaagaactgctaactcatgcccccatg

SEQ ID NO: 36622 - DNA, 34 bp, synthetic construct
  misc_feature 1..34: note = Probe
  source 1..34: mol_type = other DNA
ctcacaagaactgctaactcatgcccccatgtct

SEQ ID NO: 36623 - DNA, 50 bp, synthetic construct; identical to SEQ ID NO: 813
  misc_feature 1..50: note = Probe
  source 1..50: mol_type = other DNA

SEQ ID NO: 36624 - DNA, 18 bp, synthetic construct
  misc_feature 1..18: note = Probe
  source 1..18: mol_type = other DNA
ctcacacgcgaaaggtcc

SEQ ID NO: 36625 - DNA, 19 bp, synthetic construct
  misc_feature 1..19: note = Probe
  source 1..19: mol_type = other DNA
ctcacacgcgaaaggtccc

SEQ ID NO: 36626 - DNA, 20 bp, synthetic construct
  misc_feature 1..20: note = Probe
  source 1..20: mol_type = other DNA
ctcacacgcgaaaggtcccc

SEQ ID NO: 36627 - DNA, 21 bp, synthetic construct
  misc_feature 1..21: note = Probe
  source 1..21: mol_type = other DNA
ctcacacgcgaaaggtccccg

SEQ ID NO: 36628 - DNA, 22 bp, synthetic construct
  misc_feature 1..22: note = Probe
  source 1..22: mol_type = other DNA
ctcacacgcgaaaggtccccgg

SEQ ID NO: 36629 - DNA, 23 bp, synthetic construct
  misc_feature 1..23: note = Probe
  source 1..23: mol_type = other DNA
ctcacacgcgaaaggtccccggt

SEQ ID NO: 36630 - DNA, 38 bp, synthetic construct
  misc_feature 1..38: note = Probe
  source 1..38: mol_type = other DNA
ctcaccgccgcggcccgggttcgattcccggtcaggga

SEQ ID NO: 36631 - DNA, 20 bp, synthetic construct
  misc_feature 1..20: note = Probe
  source 1..20: mol_type = other DNA
ctcataatctgaaggtcgtg

SEQ ID NO: 36632 - DNA, 21 bp, synthetic construct
  misc_feature 1..21: note = Probe
  source 1..21: mol_type = other DNA
ctcataatctgaaggtcgtga

SEQ ID NO: 36633 - DNA, 22 bp, synthetic construct
  misc_feature 1..22: note = Probe
  source 1..22: mol_type = other DNA
ctcataatctgaaggtcgtgag

SEQ ID NO: 36634 - DNA, 23 bp, synthetic construct
  misc_feature 1..23: note = Probe
  source 1..23: mol_type = other DNA
ctcataatctgaaggtcgtgagt

SEQ ID NO: 36635 - DNA, 22 bp, synthetic construct
  misc_feature 1..22: note = Probe
  source 1..22: mol_type = other DNA
ctccagtctcttcgggggcgtg

SEQ ID NO: 36636 - DNA, 23 bp, synthetic construct
  misc_feature 1..23: note = Probe
  source 1..23: mol_type = other DNA
ctccagtctcttcgggggcgtgg

SEQ ID NO: 36637 - DNA, 25 bp, synthetic construct
  misc_feature 1..25: note = Probe
  source 1..25: mol_type = other DNA
ctccagtctcttcgggggcgtgggt

SEQ ID NO: 36638 - DNA, 23 bp, synthetic construct
  misc_feature 1..23: note = Probe
  source 1..23: mol_type = other DNA
ctcctaagccagggattgtgggt

SEQ ID NO: 36639 - DNA, 25 bp, synthetic construct
  misc_feature 1..25: note = Probe
  source 1..25: mol_type = other DNA
ctcgaaatccaatgggggttccccg

SEQ ID NO: 36640 - DNA, 27 bp, synthetic construct
  misc_feature 1..27: note = Probe
  source 1..27: mol_type = other DNA
ctcgaaatccaatgggggttccccgcg

SEQ ID NO: 36641 - DNA, 29 bp, synthetic construct
  misc_feature 1..29: note = Probe
  source 1..29: mol_type = other DNA
ctcgaaatccaatgggggttccccgcgca

SEQ ID NO: 36642 - DNA, 30 bp, synthetic construct
  misc_feature 1..30: note = Probe
  source 1..30: mol_type = other DNA
ctcgaaatccaatgggggttccccgcgcag

SEQ ID NO: 36643 - DNA, 25 bp, synthetic construct
  misc_feature 1..25: note = Probe
  source 1..25: mol_type = other DNA
ctcgaaatccaatggggtctccccg

SEQ ID NO: 36644 - DNA, 27 bp, synthetic construct
  misc_feature 1..27: note = Probe
  source 1..27: mol_type = other DNA
ctcgaaatccaatggggtctccccgcg

SEQ ID NO: 36645 - DNA, 30 bp, synthetic construct
  misc_feature 1..30: note = Probe
  source 1..30: mol_type = other DNA
ctcgaaatccaatggggtctccccgcgcag

SEQ ID NO: 36646 - DNA, 32 bp, synthetic construct
  misc_feature 1..32: note = Probe
  source 1..32: mol_type = other DNA
ctcgaaatccaatggggtctccccgcgcaggt

SEQ ID NO: 36647 - DNA, 30 bp, synthetic construct
  misc_feature 1..30: note = Probe
  source 1..30: mol_type = other DNA
ctcgaaatccaatggggtttccccgcacag

SEQ ID NO: 36648 - DNA, 18 bp, synthetic construct
  misc_feature 1..18: note = Probe
  source 1..18: mol_type = other DNA
ctctcaccgccgcggccc

SEQ ID NO: 36649 - DNA, 19 bp, synthetic construct
  misc_feature 1..19: note = Probe
  source 1..19: mol_type = other DNA
ctctcaccgccgcggcccg

SEQ ID NO: 36650 - DNA, 20 bp, synthetic construct
  misc_feature 1..20: note = Probe
  source 1..20: mol_type = other DNA
ctctcaccgccgcggcccgg

SEQ ID NO: 36651 - DNA, 21 bp, synthetic construct
  misc_feature 1..21: note = Probe
  source 1..21: mol_type = other DNA
ctctcaccgccgcggcccggg

SEQ ID NO: 36652 - DNA, 23 bp, synthetic construct
  misc_feature 1..23: note = Probe
  source 1..23: mol_type = other DNA
ctctcaccgccgcggcccgggtt

SEQ ID NO: 36653 - DNA, 24 bp, synthetic construct
  misc_feature 1..24: note = Probe
  source 1..24: mol_type = other DNA
ctctcaccgccgcggcccgggttc

SEQ ID NO: 36654 - DNA, 25 bp, synthetic construct
  misc_feature 1..25: note = Probe
  source 1..25: mol_type = other DNA
ctctcaccgccgcggcccgggttcg

SEQ ID NO: 36655 - DNA, 28 bp, synthetic construct
  misc_feature 1..28: note = Probe
  source 1..28: mol_type = other DNA
ctctcaccgccgcggcccgggttcgatt

SEQ ID NO: 36656 - DNA, 41 bp, synthetic construct
  misc_feature 1..41: note = Probe
  source 1..41: mol_type = other DNA
ctctcaccgccgcggcccgggttcgattcccggtcagggaa

SEQ ID NO: 36657 - DNA, 18 bp, synthetic construct
  misc_feature 1..18: note = Probe
  source 1..18: mol_type = other DNA
ctctgaatccagcgatcc

SEQ ID NO: 36658 - DNA, 19 bp, synthetic construct
  misc_feature 1..19: note = Probe
  source 1..19: mol_type = other DNA
ctctgaatccagcgatccg

SEQ ID NO: 36659 - DNA, 20 bp, synthetic construct
  misc_feature 1..20: note = Probe
  source 1..20: mol_type = other DNA
ctctgaatccagcgatccga

SEQ ID NO: 36660 - DNA, 21 bp, synthetic construct
  misc_feature 1..21: note = Probe
  source 1..21: mol_type = other DNA
ctctgaatccagcgatccgag

SEQ ID NO: 36661 - DNA, 20 bp, synthetic construct
  misc_feature 1..20: note = Probe
  source 1..20: mol_type = other DNA
ctgccacgcgggaggcccgg

SEQ ID NO: 36662 - DNA, 22 bp, synthetic construct
  misc_feature 1..22: note = Probe
  source 1..22: mol_type = other DNA
ctgccacgcgggaggcccgggt

SEQ ID NO: 36663 - DNA, 38 bp, synthetic construct
  misc_feature 1..38: note = Probe
  source 1..38: mol_type = other DNA
ctgccacgcgggaggcccgggttcgattcccggcccat

SEQ ID NO: 36664 - DNA, 20 bp, synthetic construct
  misc_feature 1..20: note = Probe
  source 1..20: mol_type = other DNA
ctggtgcccgcgtgggttcg

SEQ ID NO: 36665 - DNA, 28 bp, synthetic construct
  misc_feature 1..28: note = Probe
  source 1..28: mol_type = other DNA
ctggtggtctagtggttaggattcggcg

SEQ ID NO: 36666 - DNA, 19 bp, synthetic construct
  misc_feature 1..19: note = Probe
  source 1..19: mol_type = other DNA
ctggtgtagtggtatcatg

SEQ ID NO: 36667 - DNA, 22 bp, synthetic construct
  misc_feature 1..22: note = Probe
  source 1..22: mol_type = other DNA
ctggtgtagtggtatcatgcaa

SEQ ID NO: 36668 - DNA, 23 bp, synthetic construct
  misc_feature 1..23: note = Probe
  source 1..23: mol_type = other DNA
ctggtgtagtggtatcatgcaag

SEQ ID NO: 36669 - DNA, 20 bp, synthetic construct
  misc_feature 1..20: note = Probe
  source 1..20: mol_type = other DNA
ctgtcacgcgggagaccggg

SEQ ID NO: 36670 - DNA, 21 bp, synthetic construct
  misc_feature 1..21: note = Probe
  source 1..21: mol_type = other DNA
ctgtcacgcgggagaccgggg

SEQ ID NO: 36671 - DNA, 22 bp, synthetic construct
  misc_feature 1..22: note = Probe
  source 1..22: mol_type = other DNA
ctgtcacgcgggagaccggggt

SEQ ID NO: 36672 - DNA, 23 bp, synthetic construct
  misc_feature 1..23: note = Probe
  source 1..23: mol_type = other DNA
ctgtcacgcgggagaccggggtt

SEQ ID NO: 36673 - DNA, 38 bp, synthetic construct; identical to SEQ ID NO: 13290
  misc_feature 1..38: note = Probe
  source 1..38: mol_type = other DNA

SEQ ID NO: 36674 - DNA, 41 bp, synthetic construct
  misc_feature 1..41: note = Probe
  source 1..41: mol_type = other DNA
ctgtcacgcgggagaccggggttcaattccccgacggggag

SEQ ID NO: 36675 - DNA, 25 bp, synthetic construct
  misc_feature 1..25: note = Probe
  source 1..25: mol_type = other DNA
ctgtcacgcgggagaccggggttcg

SEQ ID NO: 36676 - DNA, 28 bp, synthetic construct
  misc_feature 1..28: note = Probe
  source 1..28: mol_type = other DNA
ctgtcacgcgggagaccggggttcgatt

SEQ ID NO: 36677 - DNA, 29 bp, synthetic construct
  misc_feature 1..29: note = Probe
  source 1..29: mol_type = other DNA
ctgtcacgcgggagaccggggttcgattc

SEQ ID NO: 36678 - DNA, 34 bp, synthetic construct; identical to SEQ ID NO: 13292
  misc_feature 1..34: note = Probe
  source 1..34: mol_type = other DNA

SEQ ID NO: 36679 - DNA, 35 bp, synthetic construct; identical to SEQ ID NO: 19675
  misc_feature 1..35: note = Probe
  source 1..35: mol_type = other DNA

SEQ ID NO: 36680 - DNA, 36 bp, synthetic construct; identical to SEQ ID NO: 19676
  misc_feature 1..36: note = Probe
  source 1..36: mol_type = other DNA

SEQ ID NO: 36681 - DNA, 37 bp, synthetic construct; identical to SEQ ID NO: 13293
  misc_feature 1..37: note = Probe
  source 1..37: mol_type = other DNA

SEQ ID NO: 36682 - DNA, 38 bp, synthetic construct; identical to SEQ ID NO: 13294
  misc_feature 1..38: note = Probe
  source 1..38: mol_type = other DNA

SEQ ID NO: 36683 - DNA, 41 bp, synthetic construct
  misc_feature 1..41: note = Probe
  source 1..41: mol_type = other DNA
ctgtcacgcgggagaccggggttcgattccccgacggggag

SEQ ID NO: 36684 - DNA, 21 bp, synthetic construct
  misc_feature 1..21: note = Probe
  source 1..21: mol_type = other DNA
ctgttaaccgaaagattggtg

SEQ ID NO: 36685 - DNA, 19 bp, synthetic construct
  misc_feature 1..19: note = Probe
  source 1..19: mol_type = other DNA
ctgttaaccgaaaggttgg

SEQ ID NO: 36686 - DNA, 20 bp, synthetic construct
  misc_feature 1..20: note = Probe
  source 1..20: mol_type = other DNA
ctgttaaccgaaaggttggt

SEQ ID NO: 36687 - DNA, 21 bp, synthetic construct
  misc_feature 1..21: note = Probe
  source 1..21: mol_type = other DNA
ctgttaaccgaaaggttggtg

SEQ ID NO: 36688 - DNA, 22 bp, synthetic construct
  misc_feature 1..22: note = Probe
  source 1..22: mol_type = other DNA
ctgttaaccgaaaggttggtgg

SEQ ID NO: 36689 - DNA, 25 bp, synthetic construct
  misc_feature 1..25: note = Probe
  source 1..25: mol_type = other DNA
ctgttaaccgaaaggttggtggttc

SEQ ID NO: 36690 - DNA, 26 bp, synthetic construct
  misc_feature 1..26: note = Probe
  source 1..26: mol_type = other DNA
ctgttaaccgaaaggttggtggttcg

SEQ ID NO: 36691 - DNA, 41 bp, synthetic construct
  misc_feature 1..41: note = Probe
  source 1..41: mol_type = other DNA
ctgttaaccgaaaggttggtggttcgagcccacccagggac

SEQ ID NO: 36692 - DNA, 42 bp, synthetic construct
  misc_feature 1..42: note = Probe
  source 1..42: mol_type = other DNA
ctgttaaccgaaaggttggtggttcgagcccacccagggacg

SEQ ID NO: 36693 - DNA, 42 bp, synthetic construct
  misc_feature 1..42: note = Probe
  source 1..42: mol_type = other DNA
ctgttaaccgaaaggttggtggttcgatcccacccagggacg

SEQ ID NO: 36694 - DNA, 21 bp, synthetic construct
  misc_feature 1..21: note = Probe
  source 1..21: mol_type = other DNA
ctgttaactaaaaggttggtg

SEQ ID NO: 36695 - DNA, 20 bp, synthetic construct
  misc_feature 1..20: note = Probe
  source 1..20: mol_type = other DNA
ctgttaactaagtgtttgtg

SEQ ID NO: 36696 - DNA, 21 bp, synthetic construct
  misc_feature 1..21: note = Probe
  source 1..21: mol_type = other DNA
ctgttaactaagtgtttgtgg

SEQ ID NO: 36697 - DNA, 34 bp, synthetic construct
  misc_feature 1..34: note = Probe
  source 1..34: mol_type = other DNA
ctgttaactaagtgtttgtgggtttaagtcccat

SEQ ID NO: 36698 - DNA, 20 bp, synthetic construct
  misc_feature 1..20: note = Probe
  source 1..20: mol_type = other DNA
cttaaacccccttatttcta

SEQ ID NO: 36699 - DNA, 18 bp, synthetic construct
  misc_feature 1..18: note = Probe
  source 1..18: mol_type = other DNA
cttccaagcagttgaccc

SEQ ID NO: 36700 - DNA, 19 bp, synthetic construct
  misc_feature 1..19: note = Probe
  source 1..19: mol_type = other DNA
cttccaagcagttgacccg

SEQ ID NO: 36701 - DNA, 20 bp, synthetic construct
  misc_feature 1..20: note = Probe
  source 1..20: mol_type = other DNA
cttccaagcagttgacccgg

SEQ ID NO: 36702 - DNA, 21 bp, synthetic construct
  misc_feature 1..21: note = Probe
  source 1..21: mol_type = other DNA
cttccaagcagttgacccggg

SEQ ID NO: 36703 - DNA, 22 bp, synthetic construct
  misc_feature 1..22: note = Probe
  source 1..22: mol_type = other DNA
cttccaagcagttgacccgggt

SEQ ID NO: 36704 - DNA, 22 bp, synthetic construct
  misc_feature 1..22: note = Probe
  source 1..22: mol_type = other DNA
cttcgggtgcgagaggtcccgg

SEQ ID NO: 36705 - DNA, 23 bp, synthetic construct
  misc_feature 1..23: note = Probe
  source 1..23: mol_type = other DNA
cttcgggtgcgagaggtcccggg

SEQ ID NO: 36706 - DNA, 27 bp, synthetic construct
  misc_feature 1..27: note = Probe
  source 1..27: mol_type = other DNA
cttgaaatccaatggggtctccccgcg

SEQ ID NO: 36707 - DNA, 29 bp, synthetic construct
  misc_feature 1..29: note = Probe
  source 1..29: mol_type = other DNA
cttgaaatccaatggggtctccccgcgca

SEQ ID NO: 36708 - DNA, 30 bp, synthetic construct
  misc_feature 1..30: note = Probe
  source 1..30: mol_type = other DNA
cttgaaatccaatggggtctccccgcgcag

SEQ ID NO: 36709 - DNA, 30 bp, synthetic construct
  misc_feature 1..30: note = Probe
  source 1..30: mol_type = other DNA
cttgaaatccattggggtctccccgcgcag

SEQ ID NO: 36710 - DNA, 18 bp, synthetic construct
  misc_feature 1..18: note = Probe
  source 1..18: mol_type = other DNA
cttgtaaaccaggggtcg

SEQ ID NO: 36711 - DNA, 20 bp, synthetic construct
  misc_feature 1..20: note = Probe
  source 1..20: mol_type = other DNA
cttgtaaaccaggggtcgcg

SEQ ID NO: 36712 - DNA, 22 bp, synthetic construct
  misc_feature 1..22: note = Probe
  source 1..22: mol_type = other DNA
cttgtaaaccaggggtcgcgag

SEQ ID NO: 36713 - DNA, 17 bp, synthetic construct
  misc_feature 1..17: note = Probe
  source 1..17: mol_type = other DNA
ctttacacgcagaaggt

SEQ ID NO: 36714 - DNA, 22 bp, synthetic construct
  misc_feature 1..22: note = Probe
  source 1..22: mol_type = other DNA
ctttacacgcagaaggtcctgg

SEQ ID NO: 36715 - DNA, 23 bp, synthetic construct
  misc_feature 1..23: note = Probe
  source 1..23: mol_type = other DNA
ctttacacgcagaaggtcctggg

SEQ ID NO: 36716 - DNA, 24 bp, synthetic construct
  misc_feature 1..24: note = Probe
  source 1..24: mol_type = other DNA
ctttacacgcagaaggtcctgggt

SEQ ID NO: 36717 - DNA, 27 bp, synthetic construct
  misc_feature 1..27: note = Probe
  source 1..27: mol_type = other DNA
ctttacacgcagaaggtcctgggttcg

SEQ ID NO: 36718 - DNA, 29 bp, synthetic construct
  misc_feature 1..29: note = Probe
  source 1..29: mol_type = other DNA
ctttacacgcagaaggtcctgggttcgag

SEQ ID NO: 36719 - DNA, 41 bp, synthetic construct
  misc_feature 1..41: note = Probe
  source 1..41: mol_type = other DNA
ctttacacgcagaaggtcctgggttcgagccccagtggaac

SEQ ID NO: 36720 - DNA, 42 bp, synthetic construct
  misc_feature 1..42: note = Probe
  source 1..42: mol_type = other DNA
ctttacacgcagaaggtcctgggttcgagccccagtggaacc

SEQ ID NO: 36721 - DNA, 43 bp, synthetic construct
  misc_feature 1..43: note = Probe
  source 1..43: mol_type = other DNA
ctttacacgcagaaggtcctgggttcgagccccagtggaacca

SEQ ID NO: 36722 - DNA, 34 bp, synthetic construct
  misc_feature 1..34: note = Probe
  source 1..34: mol_type = other DNA
ctttcaagcagttaacgcgggttcgattcccggg

SEQ ID NO: 36723 - DNA, 19 bp, synthetic construct
  misc_feature 1..19: note = Probe
  source 1..19: mol_type = other DNA
ctttcaccgccgcggcccg

SEQ ID NO: 36724 - DNA, 20 bp, synthetic construct
  misc_feature 1..20: note = Probe
  source 1..20: mol_type = other DNA
ctttcaccgccgcggcccgg

SEQ ID NO: 36725 - DNA, 21 bp, synthetic construct
  misc_feature 1..21: note = Probe
  source 1..21: mol_type = other DNA
ctttcaccgccgcggcccggg

SEQ ID NO: 36726 - DNA, 21 bp, synthetic construct
  misc_feature 1..21: note = Probe
  source 1..21: mol_type = other DNA
ctttgaatccagcaatccgag

SEQ ID NO: 36727 - DNA, 19 bp, synthetic construct
  misc_feature 1..19: note = Probe
  source 1..19: mol_type = other DNA
ctttgaatccagcgatccg

SEQ ID NO: 36728 - DNA, 20 bp, synthetic construct
  misc_feature 1..20: note = Probe
  source 1..20: mol_type = other DNA
ctttgaatccagcgatccga

SEQ ID NO: 36729 - DNA, 21 bp, synthetic construct
  misc_feature 1..21: note = Probe
  source 1..21: mol_type = other DNA
ctttgaatccagcgatccgag

SEQ ID NO: 36730 - DNA, 21 bp, synthetic construct
  misc_feature 1..21: note = Probe
  source 1..21: mol_type = other DNA
ctttgcacgtatgaggccccg

SEQ ID NO: 36731 - DNA, 22 bp, synthetic construct
  misc_feature 1..22: note = Probe
  source 1..22: mol_type = other DNA
ctttgggtgcgagaggtcccgg

SEQ ID NO: 36732 - DNA, 23 bp, synthetic construct
  misc_feature 1..23: note = Probe
  source 1..23: mol_type = other DNA
ctttgggtgcgagaggtcccggg

SEQ ID NO: 36733 - DNA, 24 bp, synthetic construct
  misc_feature 1..24: note = Probe
  source 1..24: mol_type = other DNA
ctttgggtgcgagaggtcccgggt

SEQ ID NO: 36734 - DNA, 24 bp, synthetic construct
  misc_feature 1..24: note = Probe
  source 1..24: mol_type = other DNA
ctttgggtgctaatggtggagtta

SEQ ID NO: 36735 - DNA, 20 bp, synthetic construct
  misc_feature 1..20: note = Probe
  source 1..20: mol_type = other DNA
cttttaatctgagggtccag

SEQ ID NO: 36736 - DNA, 18 bp, synthetic construct
  misc_feature 1..18: note = Probe
  source 1..18: mol_type = other DNA
gaaaaagtcatggaggcc

SEQ ID NO: 36737 - DNA, 21 bp, synthetic construct
  misc_feature 1..21: note = Probe
  source 1..21: mol_type = other DNA
gaaaaagtcatggaggccatg

SEQ ID NO: 36738 - DNA, 27 bp, synthetic construct
  misc_feature 1..27: note = Probe
  source 1..27: mol_type = other DNA
gaaaaagtcatggaggccatggggttg

SEQ ID NO: 36739 - DNA, 50 bp, synthetic construct; identical to SEQ ID NO: 5419
  misc_feature 1..50: note = Probe
  source 1..50: mol_type = other DNA

SEQ ID NO: 36740 - DNA, 50 bp, synthetic construct; identical to SEQ ID NO: 5440
  misc_feature 1..50: note = Probe
  source 1..50: mol_type = other DNA

SEQ ID NO: 36741 - DNA, 28 bp, synthetic construct
  misc_feature 1..28: note = Probe
  source 1..28: mol_type = other DNA
gaagattgagggttcgagtcccttcgtg

SEQ ID NO: 36742 - DNA, 32 bp, synthetic construct; identical to SEQ ID NO: 5489
  misc_feature 1..32: note = Probe
  source 1..32: mol_type = other DNA

SEQ ID NO: 36743 - DNA, 50 bp, synthetic construct; identical to SEQ ID NO: 5505
  misc_feature 1..50: note = Probe
  source 1..50: mol_type = other DNA

SEQ ID NO: 36744 - DNA, 29 bp, synthetic construct
  misc_feature 1..29: note = Probe
  source 1..29: mol_type = other DNA
gacccagtggcctaatggataaggcatca

SEQ ID NO: 36745 - DNA, 30 bp, synthetic construct; identical to SEQ ID NO: 8599
  misc_feature 1..30: note = Probe
  source 1..30: mol_type = other DNA

SEQ ID NO: 36746 - DNA, 31 bp, synthetic construct; identical to SEQ ID NO: 904
  misc_feature 1..31: note = Probe
  source 1..31: mol_type = other DNA

SEQ ID NO: 36747 - DNA, 34 bp, synthetic construct; identical to SEQ ID NO: 907
  misc_feature 1..34: note = Probe
  source 1..34: mol_type = other DNA

SEQ ID NO: 36748 - DNA, 26 bp, synthetic construct
  misc_feature 1..26: note = Probe
  source 1..26: mol_type = other DNA
gaccggggttcgattccccgacgggg

SEQ ID NO: 36749 - DNA, 28 bp, synthetic construct
  misc_feature 1..28: note = Probe
  source 1..28: mol_type = other DNA
gaccggggttcgattccccgacggggag

SEQ ID NO: 36750 - DNA, 20 bp, synthetic construct
  misc_feature 1..20: note = Probe
  source 1..20: mol_type = other DNA
gactctgaatccagcgatcc

SEQ ID NO: 36751 - DNA, 21 bp, synthetic construct
  misc_feature 1..21: note = Probe
  source 1..21: mol_type = other DNA
gactctgaatccagcgatccg

SEQ ID NO: 36752 - DNA, 22 bp, synthetic construct
  misc_feature 1..22: note = Probe
  source 1..22: mol_type = other DNA
gactctgaatccagcgatccga

SEQ ID NO: 36753 - DNA, 23 bp, synthetic construct
  misc_feature 1..23: note = Probe
  source 1..23: mol_type = other DNA
gactctgaatccagcgatccgag

SEQ ID NO: 36754 - DNA, 41 bp, synthetic construct
  misc_feature 1..41: note = Probe
  source 1..41: mol_type = other DNA
gactctgaatccagcgatccgagttcaaatctcggtggaac

SEQ ID NO: 36755 - DNA, 42 bp, synthetic construct
  misc_feature 1..42: note = Probe
  source 1..42: mol_type = other DNA
gactctgaatccagcgatccgagttcaaatctcggtggaacc

SEQ ID NO: 36756 - DNA, 41 bp, synthetic construct
  misc_feature 1..41: note = Probe
  source 1..41: mol_type = other DNA
gactctgaatccagcgatccgagttcaagtctcggtggaac

SEQ ID NO: 36757 - DNA, 42 bp, synthetic construct
  misc_feature 1..42: note = Probe
  source 1..42: mol_type = other DNA
gactctgaatccagcgatccgagttcaagtctcggtggaacc

SEQ ID NO: 36758 - DNA, 41 bp, synthetic construct
  misc_feature 1..41: note = Probe
  source 1..41: mol_type = other DNA
gactctgaatccagcgatccgagttcgagtctcggtggaac

SEQ ID NO: 36759 - DNA, 23 bp, synthetic construct
  misc_feature 1..23: note = Probe
  source 1..23: mol_type = other DNA
gactttgaatccagcaatccgag

SEQ ID NO: 36760 - DNA, 18 bp, synthetic construct
  misc_feature 1..18: note = Probe
  source 1..18: mol_type = other DNA
gactttgaatccagcgat

SEQ ID NO: 36761 - DNA, 21 bp, synthetic construct
  misc_feature 1..21: note = Probe
  source 1..21: mol_type = other DNA
gactttgaatccagcgatccg

SEQ ID NO: 36762 - DNA, 22 bp, synthetic construct
  misc_feature 1..22: note = Probe
  source 1..22: mol_type = other DNA
gactttgaatccagcgatccga

SEQ ID NO: 36763 - DNA, 23 bp, synthetic construct
  misc_feature 1..23: note = Probe
  source 1..23: mol_type = other DNA
gactttgaatccagcgatccgag

SEQ ID NO: 36764 - DNA, 24 bp, synthetic construct
  misc_feature 1..24: note = Probe
  source 1..24: mol_type = other DNA
gactttgaatccagcgatccgagt

SEQ ID NO: 36765 - DNA, 41 bp, synthetic construct
  misc_feature 1..41: note = Probe
  source 1..41: mol_type = other DNA
gactttgaatccagcgatccgagttcaaatctcggtgggac

SEQ ID NO: 36766 - DNA, 42 bp, synthetic construct
  misc_feature 1..42: note = Probe
  source 1..42: mol_type = other DNA
gactttgaatccagcgatccgagttcaaatctcggtgggacc

SEQ ID NO: 36767 - DNA, 20 bp, synthetic construct
  misc_feature 1..20: note = Probe
  source 1..20: mol_type = other DNA
gagaaagctcacaagaactg

SEQ ID NO: 36768 - DNA, 22 bp, synthetic construct
  misc_feature 1..22: note = Probe
  source 1..22: mol_type = other DNA
gagaaagctcacaagaactgct

SEQ ID NO: 36769 - DNA, 23 bp, synthetic construct
  misc_feature 1..23: note = Probe
  source 1..23: mol_type = other DNA
gagaaagctcacaagaactgcta

SEQ ID NO: 36770 - DNA, 25 bp, synthetic construct
  misc_feature 1..25: note = Probe
  source 1..25: mol_type = other DNA
gagaaagctcacaagaactgctaac

SEQ ID NO: 36771 - DNA, 26 bp, synthetic construct
  misc_feature 1..26: note = Probe
  source 1..26: mol_type = other DNA
gagaaagctcacaagaactgctaact

SEQ ID NO: 36772 - DNA, 27 bp, synthetic construct
  misc_feature 1..27: note = Probe
  source 1..27: mol_type = other DNA
gagaaagctcacaagaactgctaactc

SEQ ID NO: 36773 - DNA, 30 bp, synthetic construct; identical to SEQ ID NO: 932
  misc_feature 1..30: note = Probe
  source 1..30: mol_type = other DNA

SEQ ID NO: 36774 - DNA, 36 bp, synthetic construct; identical to SEQ ID NO: 938
  misc_feature 1..36: note = Probe
  source 1..36: mol_type = other DNA

SEQ ID NO: 36775 - DNA, 38 bp, synthetic construct; identical to SEQ ID NO: 940
  misc_feature 1..38: note = Probe
  source 1..38: mol_type = other DNA

SEQ ID NO: 36776 - DNA, 41 bp, synthetic construct; identical to SEQ ID NO: 943
  misc_feature 1..41: note = Probe
  source 1..41: mol_type = other DNA

SEQ ID NO: 36777 - DNA, 45 bp, synthetic construct; identical to SEQ ID NO: 947
  misc_feature 1..45: note = Probe
  source 1..45: mol_type = other DNA

SEQ ID NO: 36778 - DNA, 50 bp, synthetic construct; identical to SEQ ID NO: 950
  misc_feature 1..50: note = Probe
  source 1..50: mol_type = other DNA

SEQ ID NO: 36779 - DNA, 30 bp, synthetic construct; identical to SEQ ID NO: 20160
  misc_feature 1..30: note = Probe
  source 1..30: mol_type = other DNA

SEQ ID NO: 36780 - DNA, 27 bp, synthetic construct
  misc_feature 1..27: note = Probe
  source 1..27: mol_type = other DNA
gagaccggggttcgattccccgacggg

SEQ ID NO: 36781 - DNA, 28 bp, synthetic construct
  misc_feature 1..28: note = Probe
  source 1..28: mol_type = other DNA
gagaccggggttcgattccccgacgggg

SEQ ID NO: 36782 - DNA, 29 bp, synthetic construct
  misc_feature 1..29: note = Probe
  source 1..29: mol_type = other DNA
gagaccggggttcgattccccgacgggga

SEQ ID NO: 36783 - DNA, 30 bp, synthetic construct; identical to SEQ ID NO: 957
  misc_feature 1..30: note = Probe
  source 1..30: mol_type = other DNA

SEQ ID NO: 36784 - DNA, 45 bp, synthetic construct; identical to SEQ ID NO: 964
  misc_feature 1..45: note = Probe
  source 1..45: mol_type = other DNA

SEQ ID NO: 36785 - DNA, 50 bp, synthetic construct; identical to SEQ ID NO: 965
  misc_feature 1..50: note = Probe
  source 1..50: mol_type = other DNA

SEQ ID NO: 36786 - DNA, 29 bp, synthetic construct
  misc_feature 1..29: note = Probe
  source 1..29: mol_type = other DNA
gaggccccgggttcgatccccggcatctc

SEQ ID NO: 36787 - DNA, 30 bp, synthetic construct
  misc_feature 1..30: note = Probe
  source 1..30: mol_type = other DNA
gaggccccgggttcgatccccggcatctcc

SEQ ID NO: 36788 - DNA, 18 bp, synthetic construct
  misc_feature 1..18: note = Probe
  source 1..18: mol_type = other DNA
gatcgaaaccatcctctg

SEQ ID NO: 36789 - DNA, 20 bp, synthetic construct
  misc_feature 1..20: note = Probe
  source 1..20: mol_type = other DNA
gatcgaaaccatcctctgct

SEQ ID NO: 36790 - DNA, 50 bp, synthetic construct; identical to SEQ ID NO: 977
  misc_feature 1..50: note = Probe
  source 1..50: mol_type = other DNA

SEQ ID NO: 36791 - DNA, 21 bp, synthetic construct
  misc_feature 1..21: note = Probe
  source 1..21: mol_type = other DNA
gattcccattcttgcgacccg

SEQ ID NO: 36792 - DNA, 22 bp, synthetic construct
  misc_feature 1..22: note = Probe
  source 1..22: mol_type = other DNA
gattcccattcttgcgacccgg

SEQ ID NO: 36793 - DNA, 34 bp, synthetic construct; identical to SEQ ID NO: 20528
  misc_feature 1..34: note = Probe
  source 1..34: mol_type = other DNA

SEQ ID NO: 36794 - DNA, 35 bp, synthetic construct; identical to SEQ ID NO: 13433
  misc_feature 1..35: note = Probe
  source 1..35: mol_type = other DNA

SEQ ID NO: 36795 - DNA, 29 bp, synthetic construct
  misc_feature 1..29: note = Probe
  source 1..29: mol_type = other DNA
gcactggtggttcagtggtagaattctcg

SEQ ID NO: 36796 - DNA, 32 bp, synthetic construct; identical to SEQ ID NO: 13438
  misc_feature 1..32: note = Probe
  source 1..32: mol_type = other DNA

SEQ ID NO: 36797 - DNA, 33 bp, synthetic construct; identical to SEQ ID NO: 13439
  misc_feature 1..33: note = Probe
  source 1..33: mol_type = other DNA

SEQ ID NO: 36798 - DNA, 35 bp, synthetic construct; identical to SEQ ID NO: 992
  misc_feature 1..35: note = Probe
  source 1..35: mol_type = other DNA

SEQ ID NO: 36799 - DNA, 50 bp, synthetic construct; identical to SEQ ID NO: 5851
  misc_feature 1..50: note = Probe
  source 1..50: mol_type = other DNA

SEQ ID NO: 36800 - DNA, 34 bp, synthetic construct
  misc_feature 1..34: note = Probe
  source 1..34: mol_type = other DNA
gcatgaggtcccgggttcgatccccagcatctcc

SEQ ID NO: 36801 - DNA, 28 bp, synthetic construct
  misc_feature 1..28: note = Probe
  source 1..28: mol_type = other DNA
gcatgggtggttcagtggtagaattctc

SEQ ID NO: 36802 - DNA, 29 bp, synthetic construct
  misc_feature 1..29: note = Probe
  source 1..29: mol_type = other DNA
gcatgggtggttcagtggtagaattctcg

SEQ ID NO: 36803 - DNA, 30 bp, synthetic construct; identical to SEQ ID NO: 1002
  misc_feature 1..30: note = Probe
  source 1..30: mol_type = other DNA

SEQ ID NO: 36804 - DNA, 31 bp, synthetic construct; identical to SEQ ID NO: 1003
  misc_feature 1..31: note = Probe
  source 1..31: mol_type = other DNA

SEQ ID NO: 36805 - DNA, 32 bp, synthetic construct; identical to SEQ ID NO: 1004
  misc_feature 1..32: note = Probe
  source 1..32: mol_type = other DNA

SEQ ID NO: 36806 - DNA, 33 bp, synthetic construct; identical to SEQ ID NO: 1005
  misc_feature 1..33: note = Probe
  source 1..33: mol_type = other DNA

SEQ ID NO: 36807 - DNA, 34 bp, synthetic construct; identical to SEQ ID NO: 1006
  misc_feature 1..34: note = Probe
  source 1..34: mol_type = other DNA

SEQ ID NO: 36808 - DNA, 35 bp, synthetic construct; identical to SEQ ID NO: 1007
  misc_feature 1..35: note = Probe
  source 1..35: mol_type = other DNA

SEQ ID NO: 36809 - DNA, 50 bp, synthetic construct; identical to SEQ ID NO: 1010
  misc_feature 1..50: note = Probe
  source 1..50: mol_type = other DNA

SEQ ID NO: 36810 - DNA, 50 bp, synthetic construct; identical to SEQ ID NO: 1012
  misc_feature 1..50: note = Probe
  source 1..50: mol_type = other DNA

SEQ ID NO: 36811 - DNA, 29 bp, synthetic construct
  misc_feature 1..29: note = Probe
  source 1..29: mol_type = other DNA
gcattggtggttcaatggtagaattctcg

SEQ ID NO: 36812 - DNA, 50 bp, synthetic construct; identical to SEQ ID NO: 25407
  misc_feature 1..50: note = Probe
  source 1..50: mol_type = other DNA

SEQ ID NO: 36813 - DNA, 38 bp, synthetic construct; identical to SEQ ID NO: 1014
  misc_feature 1..38: note = Probe
  source 1..38: mol_type = other DNA

SEQ ID NO: 36814 - DNA, 50 bp, synthetic construct; identical to SEQ ID NO: 1020
  misc_feature 1..50: note = Probe
  source 1..50: mol_type = other DNA

SEQ ID NO: 36815 - DNA, 50 bp, synthetic construct; identical to SEQ ID NO: 1024
  misc_feature 1..50: note = Probe
  source 1..50: mol_type = other DNA

SEQ ID NO: 36816 - DNA, 22 bp, synthetic construct
  misc_feature 1..22: note = Probe
  source 1..22: mol_type = other DNA
gcccataacccagaggtcgatg

SEQ ID NO: 36817 - DNA, 29 bp, synthetic construct
  misc_feature 1..29: note = Probe
  source 1..29: mol_type = other DNA
gccccagtggcctaatggataaggcattg

SEQ ID NO: 36818 - DNA, 26 bp, synthetic construct
  misc_feature 1..26: note = Probe
  source 1..26: mol_type = other DNA
gccccgggttcaatccccggcacctc

SEQ ID NO: 36819 - DNA, 27 bp, synthetic construct
  misc_feature 1..27: note = Probe
  source 1..27: mol_type = other DNA
gccccgggttcaatccccggcacctcc

SEQ ID NO: 36820 - DNA, 18 bp, synthetic construct
  misc_feature 1..18: note = Probe
  source 1..18: mol_type = other DNA
gcccggatagctcagtcg

SEQ ID NO: 36821 - DNA, 19 bp, synthetic construct
  misc_feature 1..19: note = Probe
  source 1..19: mol_type = other DNA
gcccggatagctcagtcgg

SEQ ID NO: 36822 - DNA, 20 bp, synthetic construct
  misc_feature 1..20: note = Probe
  source 1..20: mol_type = other DNA
gcccggatagctcagtcggt

SEQ ID NO: 36823 - DNA, 21 bp, synthetic construct
  misc_feature 1..21: note = Probe
  source 1..21: mol_type = other DNA
gcccggatagctcagtcggta

SEQ ID NO: 36824 - DNA, 22 bp, synthetic construct
  misc_feature 1..22: note = Probe
  source 1..22: mol_type = other DNA
gcccggatagctcagtcggtag

SEQ ID NO: 36825 - DNA, 24 bp, synthetic construct
  misc_feature 1..24: note = Probe
  source 1..24: mol_type = other DNA
gcccggatagctcagtcggtagag

SEQ ID NO: 36826 - DNA, 25 bp, synthetic construct
  misc_feature 1..25: note = Probe
  source 1..25: mol_type = other DNA
gcccggatagctcagtcggtagagc

SEQ ID NO: 36827 - DNA, 26 bp, synthetic construct
  misc_feature 1..26: note = Probe
  source 1..26: mol_type = other DNA
gcccggatagctcagtcggtagagca

SEQ ID NO: 36828 - DNA, 27 bp, synthetic construct
  misc_feature 1..27: note = Probe
  source 1..27: mol_type = other DNA
gcccggatagctcagtcggtagagcat

SEQ ID NO: 36829 - DNA, 28 bp, synthetic construct
  misc_feature 1..28: note = Probe
  source 1..28: mol_type = other DNA
gcccggatagctcagtcggtagagcatc

SEQ ID NO: 36830 - DNA, 29 bp, synthetic construct
  misc_feature 1..29: note = Probe
  source 1..29: mol_type = other DNA
gcccggatagctcagtcggtagagcatca

SEQ ID NO: 36831 - DNA, 30 bp, synthetic construct; identical to SEQ ID NO: 1038
  misc_feature 1..30: note = Probe
  source 1..30: mol_type = other DNA

SEQ ID NO: 36832 - DNA, 31 bp, synthetic construct; identical to SEQ ID NO: 1039
  misc_feature 1..31: note = Probe
  source 1..31: mol_type = other DNA

SEQ ID NO: 36833 - DNA, 32 bp, synthetic construct; identical to SEQ ID NO: 1040
  misc_feature 1..32: note = Probe
  source 1..32: mol_type = other DNA

SEQ ID NO: 36834 - DNA, 33 bp, synthetic construct; identical to SEQ ID NO: 1041
  misc_feature 1..33: note = Probe
  source 1..33: mol_type = other DNA

SEQ ID NO: 36835 - DNA, 34 bp, synthetic construct; identical to SEQ ID NO: 1042
  misc_feature 1..34: note = Probe
  source 1..34: mol_type = other DNA

SEQ ID NO: 36836 - DNA, 35 bp, synthetic construct; identical to SEQ ID NO: 1043
  misc_feature 1..35: note = Probe
  source 1..35: mol_type = other DNA

SEQ ID NO: 36837 - DNA, 36 bp, synthetic construct; identical to SEQ ID NO: 1044
  misc_feature 1..36: note = Probe
  source 1..36: mol_type = other DNA

SEQ ID NO: 36838 - DNA, 50 bp, synthetic construct; identical to SEQ ID NO: 1046
  misc_feature 1..50: note = Probe
  source 1..50: mol_type = other DNA

SEQ ID NO: 36839 - DNA, 18 bp, synthetic construct
  misc_feature 1..18: note = Probe
  source 1..18: mol_type = other DNA
gcccggctagctcagtcg

SEQ ID NO: 36840 - DNA, 32 bp, synthetic construct; identical to SEQ ID NO: 5994
  misc_feature 1..32: note = Probe
  source 1..32: mol_type = other DNA

SEQ ID NO: 36841 - DNA, 20 bp, synthetic construct
  misc_feature 1..20: note = Probe
  source 1..20: mol_type = other DNA
gcccggctagctcagtcggt

SEQ ID NO: 36842 - DNA, 22 bp, synthetic construct
  misc_feature 1..22: note = Probe
  source 1..22: mol_type = other DNA
gcccggctagctcagtcggtag

SEQ ID NO: 36843 - DNA, 23 bp, synthetic construct
  misc_feature 1..23: note = Probe
  source 1..23: mol_type = other DNA
gcccggctagctcagtcggtaga

SEQ ID NO: 36844 - DNA, 24 bp, synthetic construct
  misc_feature 1..24: note = Probe
  source 1..24: mol_type = other DNA
gcccggctagctcagtcggtagag

SEQ ID NO: 36845 - DNA, 25 bp, synthetic construct
  misc_feature 1..25: note = Probe
  source 1..25: mol_type = other DNA
gcccggctagctcagtcggtagagc

SEQ ID NO: 36846 - DNA, 26 bp, synthetic construct
  misc_feature 1..26: note = Probe
  source 1..26: mol_type = other DNA
gcccggctagctcagtcggtagagca

SEQ ID NO: 36847 - DNA, 27 bp, synthetic construct
  misc_feature 1..27: note = Probe
  source 1..27: mol_type = other DNA
gcccggctagctcagtcggtagagcat

SEQ ID NO: 36848 - DNA, 28 bp, synthetic construct
  misc_feature 1..28: note = Probe
  source 1..28: mol_type = other DNA
gcccggctagctcagtcggtagagcatg

SEQ ID NO: 36849 - DNA, 29 bp, synthetic construct
  misc_feature 1..29: note = Probe
  source 1..29: mol_type = other DNA
gcccggctagctcagtcggtagagcatga

SEQ ID NO: 36850 - DNA, 30 bp, synthetic construct; identical to SEQ ID NO: 1062
  misc_feature 1..30: note = Probe
  source 1..30: mol_type = other DNA

SEQ ID NO: 36851 - DNA, 31 bp, synthetic construct; identical to SEQ ID NO: 1063
  misc_feature 1..31: note = Probe
  source 1..31: mol_type = other DNA

SEQ ID NO: 36852 - DNA, 32 bp, synthetic construct; identical to SEQ ID NO: 1064
  misc_feature 1..32: note = Probe
  source 1..32: mol_type = other DNA

SEQ ID NO: 36853 - DNA, 34 bp, synthetic construct; identical to SEQ ID NO: 1066
  misc_feature 1..34: note = Probe
  source 1..34: mol_type = other DNA

SEQ ID NO: 36854 - DNA, 33 bp, synthetic construct; identical to SEQ ID NO: 1070
  misc_feature 1..33: note = Probe
  source 1..33: mol_type = other DNA

SEQ ID NO: 36855 - DNA, 34 bp, synthetic construct; identical to SEQ ID NO: 1071
  misc_feature 1..34: note = Probe
  source 1..34: mol_type = other DNA

SEQ ID NO: 36856 - DNA, 35 bp, synthetic construct; identical to SEQ ID NO: 1072
  misc_feature 1..35: note = Probe
  source 1..35: mol_type = other DNA

SEQ ID NO: 36857 - DNA, 36 bp, synthetic construct; identical to SEQ ID NO: 1073
  misc_feature 1..36: note = Probe
  source 1..36: mol_type = other DNA

SEQ ID NO: 36858 - DNA, 42 bp, synthetic construct; identical to SEQ ID NO: 1077
  misc_feature 1..42: note = Probe
  source 1..42: mol_type = other DNA

SEQ ID NO: 36859 - DNA, 50 bp, synthetic construct; identical to SEQ ID NO: 1078
  misc_feature 1..50: note = Probe
  source 1..50: mol_type = other DNA

SEQ ID NO: 36860 - DNA, 29 bp, synthetic construct
  misc_feature 1..29: note = Probe
  source 1..29: mol_type = other DNA
gcccggctagctcagtcggtagagcatgg

SEQ ID NO: 36861 - DNA, 30 bp, synthetic construct; identical to SEQ ID NO: 1080
  misc_feature 1..30: note = Probe
  source 1..30: mol_type = other DNA

SEQ ID NO: 36862 - DNA, 31 bp, synthetic construct; identical to SEQ ID NO: 1081
  misc_feature 1..31: note = Probe
  source 1..31: mol_type = other DNA

SEQ ID NO: 36863 - DNA, 32 bp, synthetic construct; identical to SEQ ID NO: 1082
  misc_feature 1..32: note = Probe
  source 1..32: mol_type = other DNA

SEQ ID NO: 36864 - DNA, 33 bp, synthetic construct; identical to SEQ ID NO: 1083
  misc_feature 1..33: note = Probe
  source 1..33: mol_type = other DNA

SEQ ID NO: 36865 - DNA, 34 bp, synthetic construct; identical to SEQ ID NO: 1084
  misc_feature 1..34: note = Probe
  source 1..34: mol_type = other DNA

SEQ ID NO: 36866 - DNA, 35 bp, synthetic construct; identical to SEQ ID NO: 1085
  misc_feature 1..35: note = Probe
  source 1..35: mol_type = other DNA

SEQ ID NO: 36867 - DNA, 36 bp, synthetic construct; identical to SEQ ID NO: 1086
  misc_feature 1..36: note = Probe
  source 1..36: mol_type = other DNA

SEQ ID NO: 36868 - DNA, 50 bp, synthetic construct; identical to SEQ ID NO: 1091
  misc_feature 1..50: note = Probe
  source 1..50: mol_type = other DNA

SEQ ID NO: 36869 - DNA, 50 bp, synthetic construct; identical to SEQ ID NO: 6007
  misc_feature 1..50: note = Probe
  source 1..50: mol_type = other DNA

SEQ ID NO: 36870 - DNA, 32 bp, synthetic construct; identical to SEQ ID NO: 6021
  misc_feature 1..32: note = Probe
  source 1..32: mol_type = other DNA

SEQ ID NO: 36871 - DNA, 30 bp, synthetic construct; identical to SEQ ID NO: 1105
  misc_feature 1..30: note = Probe
  source 1..30: mol_type = other DNA

SEQ ID NO: 36872 - DNA, 31 bp, synthetic construct; identical to SEQ ID NO: 1106
  misc_feature 1..31: note = Probe
  source 1..31: mol_type = other DNA

SEQ ID NO: 36873 - DNA, 34 bp, synthetic construct; identical to SEQ ID NO: 1109
  misc_feature 1..34: note = Probe
  source 1..34: mol_type = other DNA

SEQ ID NO: 36874 - DNA, 36 bp, synthetic construct; identical to SEQ ID NO: 1111
  misc_feature 1..36: note = Probe
  source 1..36: mol_type = other DNA

SEQ ID NO: 36875 - DNA, 21 bp, synthetic construct
  misc_feature 1..21: note = Probe
  source 1..21: mol_type = other DNA
gcctcacacgcgaaaggtccc

SEQ ID NO: 36876 - DNA, 22 bp, synthetic construct
  misc_feature 1..22: note = Probe
  source 1..22: mol_type = other DNA
gcctcacacgcgaaaggtcccc

SEQ ID NO: 36877 - DNA, 23 bp, synthetic construct
  misc_feature 1..23: note = Probe
  source 1..23: mol_type = other DNA
gcctcacacgcgaaaggtccccg

SEQ ID NO: 36878 - DNA, 24 bp, synthetic construct
  misc_feature 1..24: note = Probe
  source 1..24: mol_type = other DNA
gcctcacacgcgaaaggtccccgg

SEQ ID NO: 36879 - DNA, 25 bp, synthetic construct
  misc_feature 1..25: note = Probe
  source 1..25: mol_type = other DNA
gcctcacacgcgaaaggtccccggt

SEQ ID NO: 36880 - DNA, 41 bp, synthetic construct
  misc_feature 1..41: note = Probe
  source 1..41: mol_type = other DNA
gcctcacacgcgaaaggtccccggttcgaaaccgggcggaa

SEQ ID NO: 36881 - DNA, 42 bp, synthetic construct
  misc_feature 1..42: note = Probe
  source 1..42: mol_type = other DNA
gcctcacacgcgaaaggtccccggttcgaaaccgggcggaaa

SEQ ID NO: 36882 - DNA, 44 bp, synthetic construct
  misc_feature 1..44: note = Probe
  source 1..44: mol_type = other DNA
gcctcacacgcgaaaggtccccggttcgaaaccgggcggaaaca

SEQ ID NO: 36883 - DNA, 41 bp, synthetic construct
  misc_feature 1..41: note = Probe
  source 1..41: mol_type = other DNA
gcctcacacgcgaaaggtccccggttcgatcccgggcggaa

SEQ ID NO: 36884 - DNA, 42 bp, synthetic construct
  misc_feature 1..42: note = Probe
  source 1..42: mol_type = other DNA
gcctcacacgcgaaaggtccccggttcgatcccgggcggaaa

SEQ ID NO: 36885 - DNA, 25 bp, synthetic construct
  misc_feature 1..25: note = Probe
  source 1..25: mol_type = other DNA
gcctccggagctggggattgtgggt

SEQ ID NO: 36886 - DNA, 24 bp, synthetic construct
  misc_feature 1..24: note = Probe
  source 1..24: mol_type = other DNA
gcctcctaagccagggattgtggg

SEQ ID NO: 36887 - DNA, 25 bp, synthetic construct
  misc_feature 1..25: note = Probe
  source 1..25: mol_type = other DNA
gcctcctaagccagggattgtgggt

SEQ ID NO: 36888 - DNA, 41 bp, synthetic construct
  misc_feature 1..41: note = Probe
  source 1..41: mol_type = other DNA
gcctgccacgcgggaggcccgggttcgattcccggcccatg

SEQ ID NO: 36889 - DNA, 29 bp, synthetic construct
  misc_feature 1..29: note = Probe
  source 1..29: mol_type = other DNA
gcctggatagctcagtcggtagagcatca

SEQ ID NO: 36890 - DNA, 30 bp, synthetic construct; identical to SEQ ID NO: 10425
  misc_feature 1..30: note = Probe
  source 1..30: mol_type = other DNA

SEQ ID NO: 36891 - DNA, 31 bp, synthetic construct; identical to SEQ ID NO: 1115
  misc_feature 1..31: note = Probe
  source 1..31: mol_type = other DNA

SEQ ID NO: 36892 - DNA, 32 bp, synthetic construct; identical to SEQ ID NO: 1116
  misc_feature 1..32: note = Probe
  source 1..32: mol_type = other DNA

SEQ ID NO: 36893 - DNA, 33 bp, synthetic construct; identical to SEQ ID NO: 1117
  misc_feature 1..33: note = Probe
  source 1..33: mol_type = other DNA

SEQ ID NO: 36894 - DNA, 34 bp, synthetic construct; identical to SEQ ID NO: 6054
  misc_feature 1..34: note = Probe
  source 1..34: mol_type = other DNA

SEQ ID NO: 36895 - DNA, 50 bp, synthetic construct
  misc_feature 1..50: note = Probe
  source 1..50: mol_type = other DNA
gcctggatagctcagtcggtagagcatcagacttttaatctgagggtcca

SEQ ID NO: 36896 - DNA, 30 bp, synthetic construct
  misc_feature 1..30: note = Probe
  source 1..30: mol_type = other DNA
gcctggatagctcagttggtagagcatcag

SEQ ID NO: 36897 - DNA, 31 bp, synthetic construct; identical to SEQ ID NO: 1120
  misc_feature 1..31: note = Probe
  source 1..31: mol_type = other DNA

SEQ ID NO: 36898 - DNA, 32 bp, synthetic construct; identical to SEQ ID NO: 1121
  misc_feature 1..32: note = Probe
  source 1..32: mol_type = other DNA

SEQ ID NO: 36899 - DNA, 33 bp, synthetic construct; identical to SEQ ID NO: 1122
  misc_feature 1..33: note = Probe
  source 1..33: mol_type = other DNA

SEQ ID NO: 36900 - DNA, 50 bp, synthetic construct; identical to SEQ ID NO: 6055
  misc_feature 1..50: note = Probe
  source 1..50: mol_type = other DNA

SEQ ID NO: 36901 - DNA, 26 bp, synthetic construct
  misc_feature 1..26: note = Probe
  source 1..26: mol_type = other DNA
gcctgggtagctcagtcggtagagca

SEQ ID NO: 36902 - DNA, 29 bp, synthetic construct
  misc_feature 1..29: note = Probe
  source 1..29: mol_type = other DNA
gcctgggtagctcagtcggtagagcatca

SEQ ID NO: 36903 - DNA, 30 bp, synthetic construct
  misc_feature 1..30: note = Probe
  source 1..30: mol_type = other DNA
gcctgggtagctcagtcggtagagcatcag

SEQ ID NO: 36904 - DNA, 31 bp, synthetic construct; identical to SEQ ID NO: 1126
  misc_feature 1..31: note = Probe
  source 1..31: mol_type = other DNA

SEQ ID NO: 36905 - DNA, 32 bp, synthetic construct; identical to SEQ ID NO: 1127
  misc_feature 1..32: note = Probe
  source 1..32: mol_type = other DNA

SEQ ID NO: 36906 - DNA, 33 bp, synthetic construct; identical to SEQ ID NO: 1128
  misc_feature 1..33: note = Probe
  source 1..33: mol_type = other DNA

SEQ ID NO: 36907 - DNA, 50 bp, synthetic construct
  misc_feature 1..50: note = Probe
  source 1..50: mol_type = other DNA
gcctgggtagctcagtcggtagagcatcagacttttaatctgagggtcca

SEQ ID NO: 36908 - DNA, 24 bp, synthetic construct
  misc_feature 1..24: note = Probe
  source 1..24: mol_type = other DNA
gcctgtcacgcgggagaccggggt

SEQ ID NO: 36909 - DNA, 41 bp, synthetic construct; identical to SEQ ID NO: 13617
  misc_feature 1..41: note = Probe
  source 1..41: mol_type = other DNA

SEQ ID NO: 36910 - DNA, 42 bp, synthetic construct; identical to SEQ ID NO: 20956
  misc_feature 1..42: note = Probe
  source 1..42: mol_type = other DNA

SEQ ID NO: 36911 - DNA, 43 bp, synthetic construct
  misc_feature 1..43: note = Probe
  source 1..43: mol_type = other DNA
gcctgtcacgcgggagaccggggttcaattccccgacggggag

SEQ ID NO: 36912 - DNA, 27 bp, synthetic construct
  misc_feature 1..27: note = Probe
  source 1..27: mol_type = other DNA
gcctgtcacgcgggagaccggggttcg

SEQ ID NO: 36913 - DNA, 37 bp, synthetic construct; identical to SEQ ID NO: 20965
  misc_feature 1..37: note = Probe
  source 1..37: mol_type = other DNA

SEQ ID NO: 36914 - DNA, 41 bp, synthetic construct; identical to SEQ ID NO: 13622
  misc_feature 1..41: note = Probe
  source 1..41: mol_type = other DNA

SEQ ID NO: 36915 - DNA, 42 bp, synthetic construct; identical to SEQ ID NO: 20966
  misc_feature 1..42: note = Probe
  source 1..42: mol_type = other DNA

SEQ ID NO: 36916 - DNA, 43 bp, synthetic construct; identical to SEQ ID NO: 1132
  misc_feature 1..43: note = Probe
  source 1..43: mol_type = other DNA

SEQ ID NO: 36917 - DNA, 21 bp, synthetic construct
  misc_feature 1..21: note = Probe
  source 1..21: mol_type = other DNA
gccttccaagcagttgacccg

SEQ ID NO: 36918 - DNA, 22 bp, synthetic construct
  misc_feature 1..22: note = Probe
  source 1..22: mol_type = other DNA
gccttccaagcagttgacccgg

SEQ ID NO: 36919 - DNA, 23 bp, synthetic construct
  misc_feature 1..23: note = Probe
  source 1..23: mol_type = other DNA
gccttccaagcagttgacccggg

SEQ ID NO: 36920 - DNA, 19 bp, synthetic construct
  misc_feature 1..19: note = Probe
  source 1..19: mol_type = other DNA
gcgccgctggtgtagtggt

SEQ ID NO: 36921 - DNA, 20 bp, synthetic construct
  misc_feature 1..20: note = Probe
  source 1..20: mol_type = other DNA
gcgccgctggtgtagtggta

SEQ ID NO: 36922 - DNA, 21 bp, synthetic construct
  misc_feature 1..21: note = Probe
  source 1..21: mol_type = other DNA
gcgccgctggtgtagtggtat

SEQ ID NO: 36923 - DNA, 22 bp, synthetic construct
  misc_feature 1..22: note = Probe
  source 1..22: mol_type = other DNA
gcgccgctggtgtagtggtatc

SEQ ID NO: 36924 - DNA, 23 bp, synthetic construct
  misc_feature 1..23: note = Probe
  source 1..23: mol_type = other DNA
gcgccgctggtgtagtggtatca

SEQ ID NO: 36925 - DNA, 24 bp, synthetic construct
  misc_feature 1..24: note = Probe
  source 1..24: mol_type = other DNA
gcgccgctggtgtagtggtatcat

SEQ ID NO: 36926 - DNA, 25 bp, synthetic construct
  misc_feature 1..25: note = Probe
  source 1..25: mol_type = other DNA
gcgccgctggtgtagtggtatcatg

SEQ ID NO: 36927 - DNA, 26 bp, synthetic construct
  misc_feature 1..26: note = Probe
  source 1..26: mol_type = other DNA
gcgccgctggtgtagtggtatcatgc

SEQ ID NO: 36928 - DNA, 27 bp, synthetic construct
  misc_feature 1..27: note = Probe
  source 1..27: mol_type = other DNA
gcgccgctggtgtagtggtatcatgca

SEQ ID NO: 36929 - DNA, 28 bp, synthetic construct
  misc_feature 1..28: note = Probe
  source 1..28: mol_type = other DNA
gcgccgctggtgtagtggtatcatgcaa

SEQ ID NO: 36930 - DNA, 29 bp, synthetic construct
  misc_feature 1..29: note = Probe
  source 1..29: mol_type = other DNA
gcgccgctggtgtagtggtatcatgcaag

SEQ ID NO: 36931 - DNA, 30 bp, synthetic construct; identical to SEQ ID NO: 1149
  misc_feature 1..30: note = Probe
  source 1..30: mol_type = other DNA

SEQ ID NO: 36932 - DNA, 31 bp, synthetic construct; identical to SEQ ID NO: 1150
  misc_feature 1..31: note = Probe
  source 1..31: mol_type = other DNA

SEQ ID NO: 36933 - DNA, 32 bp, synthetic construct; identical to SEQ ID NO: 1151
  misc_feature 1..32: note = Probe
  source 1..32: mol_type = other DNA

SEQ ID NO: 36934 - DNA, 33 bp, synthetic construct; identical to SEQ ID NO: 1152
  misc_feature 1..33: note = Probe
  source 1..33: mol_type = other DNA

SEQ ID NO: 36935 - DNA, 34 bp, synthetic construct; identical to SEQ ID NO: 1153
  misc_feature 1..34: note = Probe
  source 1..34: mol_type = other DNA

SEQ ID NO: 36936 - DNA, 35 bp, synthetic construct; identical to SEQ ID NO: 1154
  misc_feature 1..35: note = Probe
  source 1..35: mol_type = other DNA

SEQ ID NO: 36937 - DNA, 36 bp, synthetic construct; identical to SEQ ID NO: 1155
  misc_feature 1..36: note = Probe
  source 1..36: mol_type = other DNA

SEQ ID NO: 36938 - DNA, 50 bp, synthetic construct; identical to SEQ ID NO: 1161
  misc_feature 1..50: note = Probe
  source 1..50: mol_type = other DNA

SEQ ID NO: 36939 - DNA, 37 bp, synthetic construct; identical to SEQ ID NO: 1164
  misc_feature 1..37: note = Probe
  source 1..37: mol_type = other DNA

SEQ ID NO: 36940 - DNA, 29 bp, synthetic construct
  misc_feature 1..29: note = Probe
  source 1..29: mol_type = other DNA
gcggcccgggttcgattcccggtcaggga

SEQ ID NO: 36941 - DNA, 31 bp, synthetic construct; identical to SEQ ID NO: 6105
  misc_feature 1..31: note = Probe
  source 1..31: mol_type = other DNA

SEQ ID NO: 36942 - DNA, 32 bp, synthetic construct; identical to SEQ ID NO: 6106
  misc_feature 1..32: note = Probe
  source 1..32: mol_type = other DNA

SEQ ID NO: 36943 - DNA, 34 bp, synthetic construct; identical to SEQ ID NO: 1167
  misc_feature 1..34: note = Probe
  source 1..34: mol_type = other DNA

SEQ ID NO: 36944 - DNA, 30 bp, synthetic construct; identical to SEQ ID NO: 1169
  misc_feature 1..30: note = Probe
  source 1..30: mol_type = other DNA

SEQ ID NO: 36945 - DNA, 31 bp, synthetic construct; identical to SEQ ID NO: 1170
  misc_feature 1..31: note = Probe
  source 1..31: mol_type = other DNA

SEQ ID NO: 36946 - DNA, 32 bp, synthetic construct; identical to SEQ ID NO: 1171
  misc_feature 1..32: note = Probe
  source 1..32: mol_type = other DNA

SEQ ID NO: 36947 - DNA, 33 bp, synthetic construct; identical to SEQ ID NO: 1172
  misc_feature 1..33: note = Probe
  source 1..33: mol_type = other DNA

SEQ ID NO: 36948 - DNA, 34 bp, synthetic construct; identical to SEQ ID NO: 1173
  misc_feature 1..34: note = Probe
  source 1..34: mol_type = other DNA

SEQ ID NO: 36949 - DNA, 32 bp, synthetic construct; identical to SEQ ID NO: 6129
  misc_feature 1..32: note = Probe
  source 1..32: mol_type = other DNA

SEQ ID NO: 36950 - DNA, 22 bp, synthetic construct
  misc_feature 1..22: note = Probe
  source 1..22: mol_type = other DNA
gcgttggtggtatagtggtaag

SEQ ID NO: 36951 - DNA, 24 bp, synthetic construct
  misc_feature 1..24: note = Probe
  source 1..24: mol_type = other DNA
gcgttggtggtatagtggtaagca

SEQ ID NO: 36952 - DNA, 25 bp, synthetic construct
  misc_feature 1..25: note = Probe
  source 1..25: mol_type = other DNA
gcgttggtggtatagtggtaagcat

SEQ ID NO: 36953 - DNA, 26 bp, synthetic construct
  misc_feature 1..26: note = Probe
  source 1..26: mol_type = other DNA
gcgttggtggtatagtggtaagcata

SEQ ID NO: 36954 - DNA, 27 bp, synthetic construct
  misc_feature 1..27: note = Probe
  source 1..27: mol_type = other DNA
gcgttggtggtatagtggtaagcatag

SEQ ID NO: 36955 - DNA, 28 bp, synthetic construct
  misc_feature 1..28: note = Probe
  source 1..28: mol_type = other DNA
gcgttggtggtatagtggtaagcatagc

SEQ ID NO: 36956 - DNA, 29 bp, synthetic construct
  misc_feature 1..29: note = Probe
  source 1..29: mol_type = other DNA
gcgttggtggtatagtggtaagcatagct

SEQ ID NO: 36957 - DNA, 30 bp, synthetic construct; identical to SEQ ID NO: 1183
  misc_feature 1..30: note = Probe
  source 1..30: mol_type = other DNA

SEQ ID NO: 36958 - DNA, 31 bp, synthetic construct; identical to SEQ ID NO: 1184
  misc_feature 1..31: note = Probe
  source 1..31: mol_type = other DNA

SEQ ID NO: 36959 - DNA, 32 bp, synthetic construct; identical to SEQ ID NO: 1185
  misc_feature 1..32: note = Probe
  source 1..32: mol_type = other DNA

SEQ ID NO: 36960 - DNA, 36 bp, synthetic construct; identical to SEQ ID NO: 1189
  misc_feature 1..36: note = Probe
  source 1..36: mol_type = other DNA

SEQ ID NO: 36961 - DNA, 50 bp, synthetic construct; identical to SEQ ID NO: 1192
  misc_feature 1..50: note = Probe
  source 1..50: mol_type = other DNA

SEQ ID NO: 36962 - DNA, 43 bp, synthetic construct; identical to SEQ ID NO: 6159
  misc_feature 1..43: note = Probe
  source 1..43: mol_type = other DNA

SEQ ID NO: 36963 - DNA, 44 bp, synthetic construct; identical to SEQ ID NO: 1194
  misc_feature 1..44: note = Probe
  source 1..44: mol_type = other DNA

SEQ ID NO: 36964 - DNA, 50 bp, synthetic construct; identical to SEQ ID NO: 1195
  misc_feature 1..50: note = Probe
  source 1..50: mol_type = other DNA

SEQ ID NO: 36965 - DNA, 50 bp, synthetic construct; identical to SEQ ID NO: 1197
  misc_feature 1..50: note = Probe
  source 1..50: mol_type = other DNA

SEQ ID NO: 36966 - DNA, 27 bp, synthetic construct
  misc_feature 1..27: note = Probe
  source 1..27: mol_type = other DNA
gcgttggtggtttagtggtagaattct

SEQ ID NO: 36967 - DNA, 29 bp, synthetic construct
  misc_feature 1..29: note = Probe
  source 1..29: mol_type = other DNA
gcgttggtggtttagtggtagaattctcg

SEQ ID NO: 36968 - DNA, 24 bp, synthetic construct
  misc_feature 1..24: note = Probe
  source 1..24: mol_type = other DNA
gctagctcagtcggtagagcatgg

SEQ ID NO: 36969 - DNA, 26 bp, synthetic construct
  misc_feature 1..26: note = Probe
  source 1..26: mol_type = other DNA
gctagctcagtcggtagagcatggga

SEQ ID NO: 36970 - DNA, 27 bp, synthetic construct
  misc_feature 1..27: note = Probe
  source 1..27: mol_type = other DNA
gctagctcagtcggtagagcatgggac

SEQ ID NO: 36971 - DNA, 24 bp, synthetic construct
  misc_feature 1..24: note = Probe
  source 1..24: mol_type = other DNA
gctcacaagaactgctaactcatg

SEQ ID NO: 36972 - DNA, 50 bp, synthetic construct; identical to SEQ ID NO: 1205
  misc_feature 1..50: note = Probe
  source 1..50: mol_type = other DNA

SEQ ID NO: 36973 - DNA, 20 bp, synthetic construct
  misc_feature 1..20: note = Probe
  source 1..20: mol_type = other DNA
gctctcaccgccgcggcccg

SEQ ID NO: 36974 - DNA, 41 bp, synthetic construct
  misc_feature 1..41: note = Probe
  source 1..41: mol_type = other DNA
gctctcaccgccgcggcccgggttcgattcccggtcaggga

SEQ ID NO: 36975 - DNA, 22 bp, synthetic construct
  misc_feature 1..22: note = Probe
  source 1..22: mol_type = other DNA
gctgttaaccgaaaggttggtg

SEQ ID NO: 36976 - DNA, 26 bp, synthetic construct
  misc_feature 1..26: note = Probe
  source 1..26: mol_type = other DNA
gctgttaaccgaaaggttggtggttc

SEQ ID NO: 36977 - DNA, 22 bp, synthetic construct
  misc_feature 1..22: note = Probe
  source 1..22: mol_type = other DNA
gctgttaactaaaaggttggtg

SEQ ID NO: 36978 - DNA, 21 bp, synthetic construct
  misc_feature 1..21: note = Probe
  source 1..21: mol_type = other DNA
gctgttaactaagtgtttgtg

SEQ ID NO: 36979 - DNA, 22 bp, synthetic construct
  misc_feature 1..22: note = Probe
  source 1..22: mol_type = other DNA
gctgttaactaagtgtttgtgg

SEQ ID NO: 36980 - DNA, 24 bp, synthetic construct
  misc_feature 1..24: note = Probe
  source 1..24: mol_type = other DNA
gcttagggtgcgagaggtcccggg

SEQ ID NO: 36981 - DNA, 24 bp, synthetic construct
  misc_feature 1..24: note = Probe
  source 1..24: mol_type = other DNA
gcttctgtagtgtagtggttatca

SEQ ID NO: 36982 - DNA, 28 bp, synthetic construct
  misc_feature 1..28: note = Probe
  source 1..28: mol_type = other DNA
gcttctgtagtgtagtggttatcacgtt

SEQ ID NO: 36983 - DNA, 29 bp, synthetic construct
  misc_feature 1..29: note = Probe
  source 1..29: mol_type = other DNA
gcttctgtagtgtagtggttatcacgttc

SEQ ID NO: 36984 - DNA, 30 bp, synthetic construct; identical to SEQ ID NO: 8646
  misc_feature 1..30: note = Probe
  source 1..30: mol_type = other DNA

SEQ ID NO: 36985 - DNA, 31 bp, synthetic construct; identical to SEQ ID NO: 1213
  misc_feature 1..31: note = Probe
  source 1..31: mol_type = other DNA

SEQ ID NO: 36986 - DNA, 33 bp, synthetic construct; identical to SEQ ID NO: 1215
  misc_feature 1..33: note = Probe
  source 1..33: mol_type = other DNA

SEQ ID NO: 36987 - DNA, 34 bp, synthetic construct; identical to SEQ ID NO: 1216
  misc_feature 1..34: note = Probe
  source 1..34: mol_type = other DNA

SEQ ID NO: 36988 - DNA, 50 bp, synthetic construct; identical to SEQ ID NO: 1219
  misc_feature 1..50: note = Probe
  source 1..50: mol_type = other DNA

SEQ ID NO: 36989 - DNA, 41 bp, synthetic construct
  misc_feature 1..41: note = Probe
  source 1..41: mol_type = other DNA
gctttacacgcagaaggtcctgggttcgagccccagtggaa

SEQ ID NO: 36990 - DNA, 42 bp, synthetic construct
  misc_feature 1..42: note = Probe
  source 1..42: mol_type = other DNA
gctttacacgcagaaggtcctgggttcgagccccagtggaac

SEQ ID NO: 36991 - DNA, 43 bp, synthetic construct
  misc_feature 1..43: note = Probe
  source 1..43: mol_type = other DNA
gctttacacgcagaaggtcctgggttcgagccccagtggaacc

SEQ ID NO: 36992 - DNA, 44 bp, synthetic construct
  misc_feature 1..44: note = Probe
  source 1..44: mol_type = other DNA
gctttacacgcagaaggtcctgggttcgagccccagtggaacca

SEQ ID NO: 36993 - DNA, 19 bp, synthetic construct
  misc_feature 1..19: note = Probe
  source 1..19: mol_type = other DNA
gctttgcacgtatgaggcc

SEQ ID NO: 36994 - DNA, 20 bp, synthetic construct
  misc_feature 1..20: note = Probe
  source 1..20: mol_type = other DNA
gctttgcacgtatgaggccc

SEQ ID NO: 36995 - DNA, 22 bp, synthetic construct
  misc_feature 1..22: note = Probe
  source 1..22: mol_type = other DNA
gctttgcacgtatgaggccccg

SEQ ID NO: 36996 - DNA, 25 bp, synthetic construct
  misc_feature 1..25: note = Probe
  source 1..25: mol_type = other DNA
gctttgcacgtatgaggccccgggt

SEQ ID NO: 36997 - DNA, 42 bp, synthetic construct
  misc_feature 1..42: note = Probe
  source 1..42: mol_type = other DNA
gctttgcacgtatgaggccccgggttcaatccccggcatctc

SEQ ID NO: 36998 - DNA, 43 bp, synthetic construct
  misc_feature 1..43: note = Probe
  source 1..43: mol_type = other DNA
gctttgcacgtatgaggccccgggttcaatccccggcatctcc

SEQ ID NO: 36999 - DNA, 44 bp, synthetic construct
  misc_feature 1..44: note = Probe
  source 1..44: mol_type = other DNA
gctttgcacgtatgaggccccgggttcaatccccggcatctcca

SEQ ID NO: 37000 - DNA, 22 bp, synthetic construct
  misc_feature 1..22: note = Probe
  source 1..22: mol_type = other DNA
gctttgggtgcgagaggtcccg

SEQ ID NO: 37001 - DNA, 24 bp, synthetic construct
  misc_feature 1..24: note = Probe
  source 1..24: mol_type = other DNA
gctttgggtgcgagaggtcccggg

SEQ ID NO: 37002 - DNA, 25 bp, synthetic construct
  misc_feature 1..25: note = Probe
  source 1..25: mol_type = other DNA
gctttgggtgcgagaggtcccgggt

SEQ ID NO: 37003 - DNA, 41 bp, synthetic construct; identical to SEQ ID NO: 6341
  misc_feature 1..41: note = Probe
  source 1..41: mol_type = other DNA

SEQ ID NO: 37004 - DNA, 28 bp, synthetic construct
  misc_feature 1..28: note = Probe
  source 1..28: mol_type = other DNA
ggagaccggggttcaattccccgacggg

SEQ ID NO: 37005 - DNA, 29 bp, synthetic construct
  misc_feature 1..29: note = Probe
  source 1..29: mol_type = other DNA
ggagaccggggttcaattccccgacgggg

SEQ ID NO: 37006 - DNA, 31 bp, synthetic construct; identical to SEQ ID NO: 1236
  misc_feature 1..31: note = Probe
  source 1..31: mol_type = other DNA

SEQ ID NO: 37007 - DNA, 27 bp, synthetic construct
  misc_feature 1..27: note = Probe
  source 1..27: mol_type = other DNA
ggagaccggggttcgattccccgacgg

SEQ ID NO: 37008 - DNA, 28 bp, synthetic construct
  misc_feature 1..28: note = Probe
  source 1..28: mol_type = other DNA
ggagaccggggttcgattccccgacggg

SEQ ID NO: 37009 - DNA, 29 bp, synthetic construct
  misc_feature 1..29: note = Probe
  source 1..29: mol_type = other DNA
ggagaccggggttcgattccccgacgggg

SEQ ID NO: 37010 - DNA, 30 bp, synthetic construct; identical to SEQ ID NO: 1241
  misc_feature 1..30: note = Probe
  source 1..30: mol_type = other DNA

SEQ ID NO: 37011 - DNA, 31 bp, synthetic construct; identical to SEQ ID NO: 1242
  misc_feature 1..31: note = Probe
  source 1..31: mol_type = other DNA

SEQ ID NO: 37012 - DNA, 24 bp, synthetic construct
  misc_feature 1..24: note = Probe
  source 1..24: mol_type = other DNA
ggattcggcgctctcaccgccgcg

SEQ ID NO: 37013 - DNA, 28 bp, synthetic construct
  misc_feature 1..28: note = Probe
  source 1..28: mol_type = other DNA
ggattcggcgctctcaccgccgcggccc

SEQ ID NO: 37014 - DNA, 28 bp, synthetic construct
  misc_feature 1..28: note = Probe
  source 1..28: mol_type = other DNA
ggattcggcgctttcaccgccgcggccc

SEQ ID NO: 37015 - DNA, 18 bp, synthetic construct
  misc_feature 1..18: note = Probe
  source 1..18: mol_type = other DNA
ggcccataacccagaggt

SEQ ID NO: 37016 - DNA, 20 bp, synthetic construct
  misc_feature 1..20: note = Probe
  source 1..20: mol_type = other DNA
ggcccataacccagaggtcg

SEQ ID NO: 37017 - DNA, 21 bp, synthetic construct
  misc_feature 1..21: note = Probe
  source 1..21: mol_type = other DNA
ggcccataacccagaggtcga

SEQ ID NO: 37018 - DNA, 22 bp, synthetic construct
  misc_feature 1..22: note = Probe
  source 1..22: mol_type = other DNA
ggcccataacccagaggtcgat

SEQ ID NO: 37019 - DNA, 23 bp, synthetic construct
  misc_feature 1..23: note = Probe
  source 1..23: mol_type = other DNA
ggcccataacccagaggtcgatg

SEQ ID NO: 37020 - DNA, 24 bp, synthetic construct
  misc_feature 1..24: note = Probe
  source 1..24: mol_type = other DNA
ggcccataacccagaggtcgatgg

SEQ ID NO: 37021 - DNA, 42 bp, synthetic construct
  misc_feature 1..42: note = Probe
  source 1..42: mol_type = other DNA
ggcccataacccagaggtcgatggatcgaaaccatcctctgc

SEQ ID NO: 37022 - DNA, 43 bp, synthetic construct
  misc_feature 1..43: note = Probe
  source 1..43: mol_type = other DNA
ggcccataacccagaggtcgatggatcgaaaccatcctctgct

SEQ ID NO: 37023 - DNA, 29 bp, synthetic construct
  misc_feature 1..29: note = Probe
  source 1..29: mol_type = other DNA
ggccccatggtgtaatggtcagcactctg

SEQ ID NO: 37024 - DNA, 24 bp, synthetic construct
  misc_feature 1..24: note = Probe
  source 1..24: mol_type = other DNA
ggccccatggtgtaatggttagca

SEQ ID NO: 37025 - DNA, 27 bp, synthetic construct
  misc_feature 1..27: note = Probe
  source 1..27: mol_type = other DNA
ggccccatggtgtaatggttagcactc

SEQ ID NO: 37026 - DNA, 28 bp, synthetic construct
  misc_feature 1..28: note = Probe
  source 1..28: mol_type = other DNA
ggccccatggtgtaatggttagcactct

SEQ ID NO: 37027 - DNA, 29 bp, synthetic construct
  misc_feature 1..29: note = Probe
  source 1..29: mol_type = other DNA
ggccccatggtgtaatggttagcactctg

SEQ ID NO: 37028 - DNA, 30 bp, synthetic construct; identical to SEQ ID NO: 8648
  misc_feature 1..30: note = Probe
  source 1..30: mol_type = other DNA

SEQ ID NO: 37029 - DNA, 31 bp, synthetic construct; identical to SEQ ID NO: 21540
  misc_feature 1..31: note = Probe
  source 1..31: mol_type = other DNA

SEQ ID NO: 37030 - DNA, 36 bp, synthetic construct; identical to SEQ ID NO: 1264
  misc_feature 1..36: note = Probe
  source 1..36: mol_type = other DNA

SEQ ID NO: 37031 - DNA, 50 bp, synthetic construct; identical to SEQ ID NO: 6427
  misc_feature 1..50: note = Probe
  source 1..50: mol_type = other DNA

SEQ ID NO: 37032 - DNA, 29 bp, synthetic construct
  misc_feature 1..29: note = Probe
  source 1..29: mol_type = other DNA
ggccctatagctcaggggttagagcactg

SEQ ID NO: 37033 - DNA, 30 bp, synthetic construct; identical to SEQ ID NO: 1267
  misc_feature 1..30: note = Probe
  source 1..30: mol_type = other DNA

SEQ ID NO: 37034 - DNA, 31 bp, synthetic construct; identical to SEQ ID NO: 1268
  misc_feature 1..31: note = Probe
  source 1..31: mol_type = other DNA

SEQ ID NO: 37035 - DNA, 18 bp, synthetic construct
  misc_feature 1..18: note = Probe
  source 1..18: mol_type = other DNA
ggccggttagctcagtcg

SEQ ID NO: 37036 - DNA, 21 bp, synthetic construct
  misc_feature 1..21: note = Probe
  source 1..21: mol_type = other DNA
ggccggttagctcagtcggct

SEQ ID NO: 37037 - DNA, 28 bp, synthetic construct
  misc_feature 1..28: note = Probe
  source 1..28: mol_type = other DNA
ggcggcccgggttcgactcccggtgtgg

SEQ ID NO: 37038 - DNA, 29 bp, synthetic construct
  misc_feature 1..29: note = Probe
  source 1..29: mol_type = other DNA
ggcggcccgggttcgactcccggtgtggg

SEQ ID NO: 37039 - DNA, 24 bp, synthetic construct
  misc_feature 1..24: note = Probe
  source 1..24: mol_type = other DNA
ggctagctcagtcggtagagcatg

SEQ ID NO: 37040 - DNA, 28 bp, synthetic construct
  misc_feature 1..28: note = Probe
  source 1..28: mol_type = other DNA
ggctagctcagtcggtagagcatgagac

SEQ ID NO: 37041 - DNA, 27 bp, synthetic construct
  misc_feature 1..27: note = Probe
  source 1..27: mol_type = other DNA
ggctagctcagtcggtagagcatggga

SEQ ID NO: 37042 - DNA, 28 bp, synthetic construct
  misc_feature 1..28: note = Probe
  source 1..28: mol_type = other DNA
ggctagctcagtcggtagagcatgggac

SEQ ID NO: 37043 - DNA, 30 bp, synthetic construct; identical to SEQ ID NO: 1292
  misc_feature 1..30: note = Probe
  source 1..30: mol_type = other DNA

SEQ ID NO: 37044 - DNA, 50 bp, synthetic construct; identical to SEQ ID NO: 1296
  misc_feature 1..50: note = Probe
  source 1..50: mol_type = other DNA

SEQ ID NO: 37045 - DNA, 29 bp, synthetic construct
  misc_feature 1..29: note = Probe
  source 1..29: mol_type = other DNA
ggctccatagctcagtggttagagcactg

SEQ ID NO: 37046 - DNA, 30 bp, synthetic construct; identical to SEQ ID NO: 13810
  misc_feature 1..30: note = Probe
  source 1..30: mol_type = other DNA

SEQ ID NO: 37047 - DNA, 31 bp, synthetic construct; identical to SEQ ID NO: 1298
  misc_feature 1..31: note = Probe
  source 1..31: mol_type = other DNA

SEQ ID NO: 37048 - DNA, 26 bp, synthetic construct
  misc_feature 1..26: note = Probe
  source 1..26: mol_type = other DNA
ggctccgtagcttagttggttaaagc

SEQ ID NO: 37049 - DNA, 30 bp, synthetic construct; identical to SEQ ID NO: 10704
  misc_feature 1..30: note = Probe
  source 1..30: mol_type = other DNA

SEQ ID NO: 37050 - DNA, 32 bp, synthetic construct; identical to SEQ ID NO: 1304
  misc_feature 1..32: note = Probe
  source 1..32: mol_type = other DNA

SEQ ID NO: 37051 - DNA, 33 bp, synthetic construct; identical to SEQ ID NO: 1306
  misc_feature 1..33: note = Probe
  source 1..33: mol_type = other DNA

SEQ ID NO: 37052 - DNA, 34 bp, synthetic construct; identical to SEQ ID NO: 6500
  misc_feature 1..34: note = Probe
  source 1..34: mol_type = other DNA

SEQ ID NO: 37053 - DNA, 34 bp, synthetic construct; identical to SEQ ID NO: 32308
  misc_feature 1..34: note = Probe
  source 1..34: mol_type = other DNA

SEQ ID NO: 37054 - DNA, 30 bp, synthetic construct; identical to SEQ ID NO: 8665
  misc_feature 1..30: note = Probe
  source 1..30: mol_type = other DNA

SEQ ID NO: 37055 - DNA, 27 bp, synthetic construct
  misc_feature 1..27: note = Probe
  source 1..27: mol_type = other DNA
ggctcgttggtctagtggtatgattct

SEQ ID NO: 37056 - DNA, 28 bp, synthetic construct
  misc_feature 1..28: note = Probe
  source 1..28: mol_type = other DNA
ggctcgttggtctagtggtatgattctc

SEQ ID NO: 37057 - DNA, 29 bp, synthetic construct
  misc_feature 1..29: note = Probe
  source 1..29: mol_type = other DNA
ggctcgttggtctagtggtatgattctcg

SEQ ID NO: 37058 - DNA, 30 bp, synthetic construct; identical to SEQ ID NO: 10725
  misc_feature 1..30: note = Probe
  source 1..30: mol_type = other DNA

SEQ ID NO: 37059 - DNA, 30 bp, synthetic construct; identical to SEQ ID NO: 10734
  misc_feature 1..30: note = Probe
  source 1..30: mol_type = other DNA

SEQ ID NO: 37060 - DNA, 32 bp, synthetic construct
  misc_feature 1..32: note = Probe
  source 1..32: mol_type = other DNA
ggctctgtggcgcaatggatagcgcattggac

SEQ ID NO: 37061 - DNA, 23 bp, synthetic construct
  misc_feature 1..23: note = Probe
  source 1..23: mol_type = other DNA
ggctgttaaccgaaaggttggtg

SEQ ID NO: 37062 - DNA, 29 bp, synthetic construct
  misc_feature 1..29: note = Probe
  source 1..29: mol_type = other DNA
gggagaccggggttcaattccccgacggg

SEQ ID NO: 37063 - DNA, 30 bp, synthetic construct; identical to SEQ ID NO: 1312
  misc_feature 1..30: note = Probe
  source 1..30: mol_type = other DNA

SEQ ID NO: 37064 - DNA, 32 bp, synthetic construct; identical to SEQ ID NO: 6509
  misc_feature 1..32: note = Probe
  source 1..32: mol_type = other DNA

SEQ ID NO: 37065 - DNA, 29 bp, synthetic construct
  misc_feature 1..29: note = Probe
  source 1..29: mol_type = other DNA
gggagaccggggttcgattccccgacggg

SEQ ID NO: 37066 - DNA, 30 bp, synthetic construct; identical to SEQ ID NO: 1315
  misc_feature 1..30: note = Probe
  source 1..30: mol_type = other DNA

SEQ ID NO: 37067 - DNA, 32 bp, synthetic construct; identical to SEQ ID NO: 1317
  misc_feature 1..32: note = Probe
  source 1..32: mol_type = other DNA

SEQ ID NO: 37068 - DNA, 30 bp, synthetic construct; identical to SEQ ID NO: 21761
  misc_feature 1..30: note = Probe
  source 1..30: mol_type = other DNA

SEQ ID NO: 37069 - DNA, 18 bp, synthetic construct
  misc_feature 1..18: note = Probe
  source 1..18: mol_type = other DNA
ggggatgtagctcagtgg

SEQ ID NO: 37070 - DNA, 19 bp, synthetic construct
  misc_feature 1..19: note = Probe
  source 1..19: mol_type = other DNA
ggggatgtagctcagtggt

SEQ ID NO: 37071 - DNA, 20 bp, synthetic construct
  misc_feature 1..20: note = Probe
  source 1..20: mol_type = other DNA
ggggatgtagctcagtggta

SEQ ID NO: 37072 - DNA, 21 bp, synthetic construct
  misc_feature 1..21: note = Probe
  source 1..21: mol_type = other DNA
ggggatgtagctcagtggtag

SEQ ID NO: 37073 - DNA, 22 bp, synthetic construct
  misc_feature 1..22: note = Probe
  source 1..22: mol_type = other DNA
ggggatgtagctcagtggtaga

SEQ ID NO: 37074 - DNA, 29 bp, synthetic construct
  misc_feature 1..29: note = Probe
  source 1..29: mol_type = other DNA
ggggatgtagctcagtggtagagcgcatg

SEQ ID NO: 37075 - DNA, 30 bp, synthetic construct; identical to SEQ ID NO: 1335
  misc_feature 1..30: note = Probe
  source 1..30: mol_type = other DNA

SEQ ID NO: 37076 - DNA, 23 bp, synthetic construct
  misc_feature 1..23: note = Probe
  source 1..23: mol_type = other DNA
gggggattagctcaaatggtaga

SEQ ID NO: 37077 - DNA, 25 bp, synthetic construct
  misc_feature 1..25: note = Probe
  source 1..25: mol_type = other DNA
gggggcatagctcagtggtagagca

SEQ ID NO: 37078 - DNA, 28 bp, synthetic construct
  misc_feature 1..28: note = Probe
  source 1..28: mol_type = other DNA
gggggcatagctcagtggtagagcattt

SEQ ID NO: 37079 - DNA, 29 bp, synthetic construct
  misc_feature 1..29: note = Probe
  source 1..29: mol_type = other DNA
gggggcatagctcagtggtagagcatttg

SEQ ID NO: 37080 - DNA, 30 bp, synthetic construct
  misc_feature 1..30: note = Probe
  source 1..30: mol_type = other DNA
gggggcatagctcagtggtagagcatttga

SEQ ID NO: 37081 - DNA, 32 bp, synthetic construct; identical to SEQ ID NO: 1351
  misc_feature 1..32: note = Probe
  source 1..32: mol_type = other DNA

SEQ ID NO: 37082 - DNA, 33 bp, synthetic construct; identical to SEQ ID NO: 1352
  misc_feature 1..33: note = Probe
  source 1..33: mol_type = other DNA

SEQ ID NO: 37083 - DNA, 34 bp, synthetic construct; identical to SEQ ID NO: 1353
  misc_feature 1..34: note = Probe
  source 1..34: mol_type = other DNA

SEQ ID NO: 37084 - DNA, 28 bp, synthetic construct
  misc_feature 1..28: note = Probe
  source 1..28: mol_type = other DNA
gggggtatagctcagcggtagagcgcgt

SEQ ID NO: 37085 - DNA, 29 bp, synthetic construct
  misc_feature 1..29: note = Probe
  source 1..29: mol_type = other DNA
gggggtatagctcagcggtagagcgcgtg

SEQ ID NO: 37086 - DNA, 30 bp, synthetic construct; identical to SEQ ID NO: 32419
  misc_feature 1..30: note = Probe
  source 1..30: mol_type = other DNA

SEQ ID NO: 37087 - DNA, 29 bp, synthetic construct
  misc_feature 1..29: note = Probe
  source 1..29: mol_type = other DNA
gggggtatagctcaggggtagagcacttg

SEQ ID NO: 37088 - DNA, 29 bp, synthetic construct
  misc_feature 1..29: note = Probe
  source 1..29: mol_type = other DNA
gggggtatagctcaggggtagagcatttg

SEQ ID NO: 37089 - DNA, 30 bp, synthetic construct; identical to SEQ ID NO: 21882
  misc_feature 1..30: note = Probe
  source 1..30: mol_type = other DNA

SEQ ID NO: 37090 - DNA, 30 bp, synthetic construct
  misc_feature 1..30: note = Probe
  source 1..30: mol_type = other DNA
gggggtatagctcaggtggtagagcatttg

SEQ ID NO: 37091 - DNA, 31 bp, synthetic construct; identical to SEQ ID NO: 21886
  misc_feature 1..31: note = Probe
  source 1..31: mol_type = other DNA

SEQ ID NO: 37092 - DNA, 30 bp, synthetic construct; identical to SEQ ID NO: 10810
  misc_feature 1..30: note = Probe
  source 1..30: mol_type = other DNA

SEQ ID NO: 37093 - DNA, 31 bp, synthetic construct; identical to SEQ ID NO: 21895
  misc_feature 1..31: note = Probe
  source 1..31: mol_type = other DNA

SEQ ID NO: 37094 - DNA, 33 bp, synthetic construct; identical to SEQ ID NO: 6590
  misc_feature 1..33: note = Probe
  source 1..33: mol_type = other DNA

SEQ ID NO: 37095 - DNA, 19 bp, synthetic construct
  misc_feature 1..19: note = Probe
  source 1..19: mol_type = other DNA
gggggtgtagctcagtggt

SEQ ID NO: 37096 - DNA, 21 bp, synthetic construct
  misc_feature 1..21: note = Probe
  source 1..21: mol_type = other DNA
gggggtgtagctcagtggtag

SEQ ID NO: 37097 - DNA, 22 bp, synthetic construct
  misc_feature 1..22: note = Probe
  source 1..22: mol_type = other DNA
gggggtgtagctcagtggtaga

SEQ ID NO: 37098 - DNA, 24 bp, synthetic construct
  misc_feature 1..24: note = Probe
  source 1..24: mol_type = other DNA
gggggtgtagctcagtggtagagc

SEQ ID NO: 37099 - DNA, 29 bp, synthetic construct
  misc_feature 1..29: note = Probe
  source 1..29: mol_type = other DNA
gggggtgtagctcagtggtagagcacatg

SEQ ID NO: 37100 - DNA, 30 bp, synthetic construct; identical to SEQ ID NO: 21919
  misc_feature 1..30: note = Probe
  source 1..30: mol_type = other DNA

SEQ ID NO: 37101 - DNA, 31 bp, synthetic construct; identical to SEQ ID NO: 6611
  misc_feature 1..31: note = Probe
  source 1..31: mol_type = other DNA

SEQ ID NO: 37102 - DNA, 32 bp, synthetic construct; identical to SEQ ID NO: 6612
  misc_feature 1..32: note = Probe
  source 1..32: mol_type = other DNA

SEQ ID NO: 37103 - DNA, 34 bp, synthetic construct
  misc_feature 1..34: note = Probe
  source 1..34: mol_type = other DNA
gggggtgtagctcagtggtagagcacatgctttg

SEQ ID NO: 37104 - DNA, 29 bp, synthetic construct
  misc_feature 1..29: note = Probe
  source 1..29: mol_type = other DNA
gggggtgtagctcagtggtagagcatttg

SEQ ID NO: 37105 - DNA, 28 bp, synthetic construct
  misc_feature 1..28: note = Probe
  source 1..28: mol_type = other DNA
gggggtgtagctcagtggtagagcgcgt

SEQ ID NO: 37106 - DNA, 29 bp, synthetic construct
  misc_feature 1..29: note = Probe
  source 1..29: mol_type = other DNA
gggggtgtagctcagtggtagagcgcgtg

SEQ ID NO: 37107 - DNA, 30 bp, synthetic construct; identical to SEQ ID NO: 1367
  misc_feature 1..30: note = Probe
  source 1..30: mol_type = other DNA

SEQ ID NO: 37108 - DNA, 28 bp, synthetic construct
  misc_feature 1..28: note = Probe
  source 1..28: mol_type = other DNA
gggtatagctcagcggtagagcgcgtgc

SEQ ID NO: 37109 - DNA, 37 bp, synthetic construct; identical to SEQ ID NO: 13895
  misc_feature 1..37: note = Probe
  source 1..37: mol_type = other DNA

SEQ ID NO: 37110 - DNA, 19 bp, synthetic construct
  misc_feature 1..19: note = Probe
  source 1..19: mol_type = other DNA
ggtagcgtggccgagcggt

SEQ ID NO: 37111 - DNA, 20 bp, synthetic construct
  misc_feature 1..20: note = Probe
  source 1..20: mol_type = other DNA
ggtagcgtggccgagcggtc

SEQ ID NO: 37112 - DNA, 22 bp, synthetic construct
  misc_feature 1..22: note = Probe
  source 1..22: mol_type = other DNA
ggtagcgtggccgagcggtcta

SEQ ID NO: 37113 - DNA, 24 bp, synthetic construct
  misc_feature 1..24: note = Probe
  source 1..24: mol_type = other DNA
ggtagcgtggccgagcggtctaag

SEQ ID NO: 37114 - DNA, 33 bp, synthetic construct; identical to SEQ ID NO: 6728
  misc_feature 1..33: note = Probe
  source 1..33: mol_type = other DNA

SEQ ID NO: 37115 - DNA, 33 bp, synthetic construct; identical to SEQ ID NO: 1407
  misc_feature 1..33: note = Probe
  source 1..33: mol_type = other DNA

SEQ ID NO: 37116 - DNA, 27 bp, synthetic construct
  misc_feature 1..27: note = Probe
  source 1..27: mol_type = other DNA
ggtcccatggtgtaatggttagcactc

SEQ ID NO: 37117 - DNA, 28 bp, synthetic construct
  misc_feature 1..28: note = Probe
  source 1..28: mol_type = other DNA
ggtcccatggtgtaatggttagcactct

SEQ ID NO: 37118 - DNA, 29 bp, synthetic construct
  misc_feature 1..29: note = Probe
  source 1..29: mol_type = other DNA
ggtcccatggtgtaatggttagcactctg

SEQ ID NO: 37119 - DNA, 30 bp, synthetic construct; identical to SEQ ID NO: 8706
  misc_feature 1..30: note = Probe
  source 1..30: mol_type = other DNA

SEQ ID NO: 37120 - DNA, 31 bp, synthetic construct; identical to SEQ ID NO: 22145
  misc_feature 1..31: note = Probe
  source 1..31: mol_type = other DNA

SEQ ID NO: 37121 - DNA, 50 bp, synthetic construct; identical to SEQ ID NO: 32589
  misc_feature 1..50: note = Probe
  source 1..50: mol_type = other DNA

SEQ ID NO: 37122 - DNA, 50 bp, synthetic construct; identical to SEQ ID NO: 1417
  misc_feature 1..50: note = Probe
  source 1..50: mol_type = other DNA

SEQ ID NO: 37123 - DNA, 23 bp, synthetic construct
  misc_feature 1..23: note = Probe
  source 1..23: mol_type = other DNA
ggtctagtggttaggattcggcg

SEQ ID NO: 37124 - DNA, 26 bp, synthetic construct
  misc_feature 1..26: note = Probe
  source 1..26: mol_type = other DNA
ggtggtctagtggttaggattcggcg

SEQ ID NO: 37125 - DNA, 25 bp, synthetic construct
  misc_feature 1..25: note = Probe
  source 1..25: mol_type = other DNA
ggtggtgtagtggtgagcacagctg

SEQ ID NO: 37126 - DNA, 20 bp, synthetic construct
  misc_feature 1..20: note = Probe
  source 1..20: mol_type = other DNA
ggtgtagtggtatcatgcaa

SEQ ID NO: 37127 - DNA, 20 bp, synthetic construct
  misc_feature 1..20: note = Probe
  source 1..20: mol_type = other DNA
ggttcaatccccggcacctc

SEQ ID NO: 37128 - DNA, 21 bp, synthetic construct
  misc_feature 1..21: note = Probe
  source 1..21: mol_type = other DNA
ggttcaatccccggcacctcc

SEQ ID NO: 37129 - DNA, 22 bp, synthetic construct
  misc_feature 1..22: note = Probe
  source 1..22: mol_type = other DNA
ggttcaatccccggcacctcca

SEQ ID NO: 37130 - DNA, 19 bp, synthetic construct
  misc_feature 1..19: note = Probe
  source 1..19: mol_type = other DNA
ggttccatagtgtagcggt

SEQ ID NO: 37131 - DNA, 23 bp, synthetic construct
  misc_feature 1..23: note = Probe
  source 1..23: mol_type = other DNA
ggttccatagtgtagcggttatc

SEQ ID NO: 37132 - DNA, 24 bp, synthetic construct
  misc_feature 1..24: note = Probe
  source 1..24: mol_type = other DNA
ggttccatagtgtagcggttatca

SEQ ID NO: 37133 - DNA, 25 bp, synthetic construct
  misc_feature 1..25: note = Probe
  source 1..25: mol_type = other DNA
ggttccatagtgtagcggttatcac

SEQ ID NO: 37134 - DNA, 28 bp, synthetic construct
  misc_feature 1..28: note = Probe
  source 1..28: mol_type = other DNA
ggttccatagtgtagcggttatcacgtc

SEQ ID NO: 37135 - DNA, 29 bp, synthetic construct
  misc_feature 1..29: note = Probe
  source 1..29: mol_type = other DNA
ggttccatagtgtagcggttatcacgtct

SEQ ID NO: 37136 - DNA, 30 bp, synthetic construct; identical to SEQ ID NO: 8720
  misc_feature 1..30: note = Probe
  source 1..30: mol_type = other DNA

SEQ ID NO: 37137 - DNA, 31 bp, synthetic construct; identical to SEQ ID NO: 1432
  misc_feature 1..31: note = Probe
  source 1..31: mol_type = other DNA

SEQ ID NO: 37138 - DNA, 34 bp, synthetic construct; identical to SEQ ID NO: 1435
  misc_feature 1..34: note = Probe
  source 1..34: mol_type = other DNA

SEQ ID NO: 37139 - DNA, 50 bp, synthetic construct; identical to SEQ ID NO: 6812
  misc_feature 1..50: note = Probe
  source 1..50: mol_type = other DNA

SEQ ID NO: 37140 - DNA, 23 bp, synthetic construct
  misc_feature 1..23: note = Probe
  source 1..23: mol_type = other DNA
ggttccatagtgtagtggttatc

SEQ ID NO: 37141 - DNA, 24 bp, synthetic construct
  misc_feature 1..24: note = Probe
  source 1..24: mol_type = other DNA
ggttccatagtgtagtggttatca

SEQ ID NO: 37142 - DNA, 25 bp, synthetic construct
  misc_feature 1..25: note = Probe
  source 1..25: mol_type = other DNA
ggttccatagtgtagtggttatcac

SEQ ID NO: 37143 - DNA, 28 bp, synthetic construct
  misc_feature 1..28: note = Probe
  source 1..28: mol_type = other DNA
ggttccatagtgtagtggttatcacatc

SEQ ID NO: 37144 - DNA, 29 bp, synthetic construct
  misc_feature 1..29: note = Probe
  source 1..29: mol_type = other DNA
ggttccatagtgtagtggttatcacatct

SEQ ID NO: 37145 - DNA, 30 bp, synthetic construct; identical to SEQ ID NO: 11085
  misc_feature 1..30: note = Probe
  source 1..30: mol_type = other DNA

SEQ ID NO: 37146 - DNA, 31 bp, synthetic construct; identical to SEQ ID NO: 1443
  misc_feature 1..31: note = Probe
  source 1..31: mol_type = other DNA

SEQ ID NO: 37147 - DNA, 33 bp, synthetic construct; identical to SEQ ID NO: 1445
  misc_feature 1..33: note = Probe
  source 1..33: mol_type = other DNA

SEQ ID NO: 37148 - DNA, 50 bp, synthetic construct; identical to SEQ ID NO: 13981
  misc_feature 1..50: note = Probe
  source 1..50: mol_type = other DNA

SEQ ID NO: 37149 - DNA, 28 bp, synthetic construct
  misc_feature 1..28: note = Probe
  source 1..28: mol_type = other DNA
ggttccatagtgtagtggttatcacgtc

SEQ ID NO: 37150 - DNA, 29 bp, synthetic construct
  misc_feature 1..29: note = Probe
  source 1..29: mol_type = other DNA
ggttccatagtgtagtggttatcacgtct

SEQ ID NO: 37151 - DNA, 30 bp, synthetic construct; identical to SEQ ID NO: 1451
  misc_feature 1..30: note = Probe
  source 1..30: mol_type = other DNA

SEQ ID NO: 37152 - DNA, 31 bp, synthetic construct; identical to SEQ ID NO: 1452
  misc_feature 1..31: note = Probe
  source 1..31: mol_type = other DNA

SEQ ID NO: 37153 - DNA, 32 bp, synthetic construct; identical to SEQ ID NO: 1453
  misc_feature 1..32: note = Probe
  source 1..32: mol_type = other DNA

SEQ ID NO: 37154 - DNA, 33 bp, synthetic construct; identical to SEQ ID NO: 1454
  misc_feature 1..33: note = Probe
  source 1..33: mol_type = other DNA

SEQ ID NO: 37155 - DNA, 34 bp, synthetic construct; identical to SEQ ID NO: 1455
  misc_feature 1..34: note = Probe
  source 1..34: mol_type = other DNA

SEQ ID NO: 37156 - DNA, 36 bp, synthetic construct; identical to SEQ ID NO: 1456
  misc_feature 1..36: note = Probe
  source 1..36: mol_type = other DNA

SEQ ID NO: 37157 - DNA, 50 bp, synthetic construct; identical to SEQ ID NO: 1457
  misc_feature 1..50: note = Probe
  source 1..50: mol_type = other DNA

SEQ ID NO: 37158 - DNA, 30 bp, synthetic construct; identical to SEQ ID NO: 6826
  misc_feature 1..30: note = Probe
  source 1..30: mol_type = other DNA

SEQ ID NO: 37159 - DNA, 50 bp, synthetic construct; identical to SEQ ID NO: 25533
  misc_feature 1..50: note = Probe
  source 1..50: mol_type = other DNA

SEQ ID NO: 37160 - DNA, 22 bp, synthetic construct
  misc_feature 1..22: note = Probe
  source 1..22: mol_type = other DNA
ggttcgaatcccaccgctgcca

SEQ ID NO: 37161 - DNA, 20 bp, synthetic construct
  misc_feature 1..20: note = Probe
  source 1..20: mol_type = other DNA
ggttcgagccccagtggaac

SEQ ID NO: 37162 - DNA, 21 bp, synthetic construct
  misc_feature 1..21: note = Probe
  source 1..21: mol_type = other DNA
ggttcgatccccagcatctcc

SEQ ID NO: 37163 - DNA, 20 bp, synthetic construct
  misc_feature 1..20: note = Probe
  source 1..20: mol_type = other DNA
ggttcgatccccagtacctc

SEQ ID NO: 37164 - DNA, 21 bp, synthetic construct
  misc_feature 1..21: note = Probe
  source 1..21: mol_type = other DNA
ggttcgatccccagtacctcc

SEQ ID NO: 37165 - DNA, 20 bp, synthetic construct
  misc_feature 1..20: note = Probe
  source 1..20: mol_type = other DNA
ggttcgatccccggcatctc

SEQ ID NO: 37166 - DNA, 21 bp, synthetic construct
  misc_feature 1..21: note = Probe
  source 1..21: mol_type = other DNA
ggttcgatccccggcatctcc

SEQ ID NO: 37167 - DNA, 20 bp, synthetic construct
  misc_feature 1..20: note = Probe
  source 1..20: mol_type = other DNA
ggttcgattctcatagtcct

SEQ ID NO: 37168 - DNA, 21 bp, synthetic construct
  misc_feature 1..21: note = Probe
  source 1..21: mol_type = other DNA
ggttcgattctcatagtccta

SEQ ID NO: 37169 - DNA, 22 bp, synthetic construct
  misc_feature 1..22: note = Probe
  source 1..22: mol_type = other DNA
ggttcgattctcatagtcctag

SEQ ID NO: 37170 - DNA, 20 bp, synthetic construct
  misc_feature 1..20: note = Probe
  source 1..20: mol_type = other DNA
gtaaaccaggggtcgcgagt

SEQ ID NO: 37171 - DNA, 34 bp, synthetic construct
  misc_feature 1..34: note = Probe
  source 1..34: mol_type = other DNA
gtatgaggtcccgggttcgatccccggcatctcc

SEQ ID NO: 37172 - DNA, 37 bp, synthetic construct
  misc_feature 1..37: note = Probe
  source 1..37: mol_type = other DNA
gtcacgcgggagaccggggttcaattccccgacgggg

SEQ ID NO: 37173 - DNA, 35 bp, synthetic construct; identical to SEQ ID NO: 14033
  misc_feature 1..35: note = Probe
  source 1..35: mol_type = other DNA

SEQ ID NO: 37174 - DNA, 36 bp, synthetic construct; identical to SEQ ID NO: 14034
  misc_feature 1..36: note = Probe
  source 1..36: mol_type = other DNA

SEQ ID NO: 37175 - DNA, 37 bp, synthetic construct; identical to SEQ ID NO: 14035
  misc_feature 1..37: note = Probe
  source 1..37: mol_type = other DNA

SEQ ID NO: 37176 - DNA, 28 bp, synthetic construct
  misc_feature 1..28: note = Probe
  source 1..28: mol_type = other DNA
gtcagaggttcaattcctcttcttaaca

SEQ ID NO: 37177 - DNA, 31 bp, synthetic construct; identical to SEQ ID NO: 6989
  misc_feature 1..31: note = Probe
  source 1..31: mol_type = other DNA

SEQ ID NO: 37178 - DNA, 23 bp, synthetic construct
  misc_feature 1..23: note = Probe
  source 1..23: mol_type = other DNA
gtcaggatggccgagtggtctaa

SEQ ID NO: 37179 - DNA, 24 bp, synthetic construct
  misc_feature 1..24: note = Probe
  source 1..24: mol_type = other DNA
gtcaggatggccgagtggtctaag

SEQ ID NO: 37180 - DNA, 25 bp, synthetic construct
  misc_feature 1..25: note = Probe
  source 1..25: mol_type = other DNA
gtcaggatggccgagtggtctaagg

SEQ ID NO: 37181 - DNA, 32 bp, synthetic construct; identical to SEQ ID NO: 14044
  misc_feature 1..32: note = Probe
  source 1..32: mol_type = other DNA

SEQ ID NO: 37182 - DNA, 27 bp, synthetic construct
  misc_feature 1..27: note = Probe
  source 1..27: mol_type = other DNA
gtccttgtagtataaactaatacacca

SEQ ID NO: 37183 - DNA, 28 bp, synthetic construct
  misc_feature 1..28: note = Probe
  source 1..28: mol_type = other DNA
gtccttgtagtataaactaatacaccag

SEQ ID NO: 37184 - DNA, 50 bp, synthetic construct; identical to SEQ ID NO: 1489
  misc_feature 1..50: note = Probe
  source 1..50: mol_type = other DNA

SEQ ID NO: 37185 - DNA, 20 bp, synthetic construct
  misc_feature 1..20: note = Probe
  source 1..20: mol_type = other DNA
gtctagcggttaggattcct

SEQ ID NO: 37186 - DNA, 50 bp, synthetic construct
  misc_feature 1..50: note = Probe
  source 1..50: mol_type = other DNA
gtctagcggttaggattcctggttttcacccaggtggcccgggttcgact

SEQ ID NO: 37187 - DNA, 28 bp, synthetic construct
  misc_feature 1..28: note = Probe
  source 1..28: mol_type = other DNA
gtctcataatctgaaggtcctgagttcg

SEQ ID NO: 37188 - DNA, 20 bp, synthetic construct
  misc_feature 1..20: note = Probe
  source 1..20: mol_type = other DNA
gtctcataatctgaaggtcg

SEQ ID NO: 37189 - DNA, 21 bp, synthetic construct
  misc_feature 1..21: note = Probe
  source 1..21: mol_type = other DNA
gtctcataatctgaaggtcgt

SEQ ID NO: 37190 - DNA, 22 bp, synthetic construct
  misc_feature 1..22: note = Probe
  source 1..22: mol_type = other DNA
gtctcataatctgaaggtcgtg

SEQ ID NO: 37191 - DNA, 23 bp, synthetic construct
  misc_feature 1..23: note = Probe
  source 1..23: mol_type = other DNA
gtctcataatctgaaggtcgtga

SEQ ID NO: 37192 - DNA, 24 bp, synthetic construct
  misc_feature 1..24: note = Probe
  source 1..24: mol_type = other DNA
gtctcataatctgaaggtcgtgag

SEQ ID NO: 37193 - DNA, 25 bp, synthetic construct
  misc_feature 1..25: note = Probe
  source 1..25: mol_type = other DNA
gtctcataatctgaaggtcgtgagt

SEQ ID NO: 37194 - DNA, 23 bp, synthetic construct
  misc_feature 1..23: note = Probe
  source 1..23: mol_type = other DNA
gtcttgtaaaccaggggtcgcga

SEQ ID NO: 37195 - DNA, 24 bp, synthetic construct
  misc_feature 1..24: note = Probe
  source 1..24: mol_type = other DNA
gtcttgtaaaccaggggtcgcgag

SEQ ID NO: 37196 - DNA, 32 bp, synthetic construct; identical to SEQ ID NO: 14072
  misc_feature 1..32: note = Probe
  source 1..32: mol_type = other DNA

SEQ ID NO: 37197 - DNA, 35 bp, synthetic construct; identical to SEQ ID NO: 14087
  misc_feature 1..35: note = Probe
  source 1..35: mol_type = other DNA

SEQ ID NO: 37198 - DNA, 25 bp, synthetic construct
  misc_feature 1..25: note = Probe
  source 1..25: mol_type = other DNA
gtggtctagtggttaggattcggcg

SEQ ID NO: 37199 - DNA, 35 bp, synthetic construct; identical to SEQ ID NO: 14107
  misc_feature 1..35: note = Probe
  source 1..35: mol_type = other DNA

SEQ ID NO: 37200 - DNA, 50 bp, synthetic construct
  misc_feature 1..50: note = Probe
  source 1..50: mol_type = other DNA
gtgtaatggttagcactctggactctgaatccagcgatccgagttcaaat

SEQ ID NO: 37201 - DNA, 29 bp, synthetic construct
  misc_feature 1..29: note = Probe
  source 1..29: mol_type = other DNA
gtgtttgtgggtttaagtcccattggtct

SEQ ID NO: 37202 - DNA, 30 bp, synthetic construct; identical to SEQ ID NO: 1519
  misc_feature 1..30: note = Probe
  source 1..30: mol_type = other DNA

SEQ ID NO: 37203 - DNA, 31 bp, synthetic construct; identical to SEQ ID NO: 22919
  misc_feature 1..31: note = Probe
  source 1..31: mol_type = other DNA

SEQ ID NO: 37204 - DNA, 19 bp, synthetic construct
  misc_feature 1..19: note = Probe
  source 1..19: mol_type = other DNA
gttaaccgaaaggttggtg

SEQ ID NO: 37205 - DNA, 24 bp, synthetic construct
  misc_feature 1..24: note = Probe
  source 1..24: mol_type = other DNA
gttagtatagtggtgagtatcccc

SEQ ID NO: 37206 - DNA, 25 bp, synthetic construct
  misc_feature 1..25: note = Probe
  source 1..25: mol_type = other DNA
gttagtatagtggtgagtatccccg

SEQ ID NO: 37207 - DNA, 18 bp, synthetic construct
  misc_feature 1..18: note = Probe
  source 1..18: mol_type = other DNA
gttcaatccccggcacct

SEQ ID NO: 37208 - DNA, 19 bp, synthetic construct
  misc_feature 1..19: note = Probe
  source 1..19: mol_type = other DNA
gttcaatccccggcacctc

SEQ ID NO: 37209 - DNA, 20 bp, synthetic construct
  misc_feature 1..20: note = Probe
  source 1..20: mol_type = other DNA
gttcaatccccggcacctcc

SEQ ID NO: 37210 - DNA, 24 bp, synthetic construct
  misc_feature 1..24: note = Probe
  source 1..24: mol_type = other DNA
gttcaatccccggcacctccacca

SEQ ID NO: 37211 - DNA, 18 bp, synthetic construct
  misc_feature 1..18: note = Probe
  source 1..18: mol_type = other DNA
gttcaggtcgcagtctcc

SEQ ID NO: 37212 - DNA, 19 bp, synthetic construct
  misc_feature 1..19: note = Probe
  source 1..19: mol_type = other DNA
gttcgatccccagtacctc

SEQ ID NO: 37213 - DNA, 20 bp, synthetic construct
  misc_feature 1..20: note = Probe
  source 1..20: mol_type = other DNA
gttcgatccccagtacctcc

SEQ ID NO: 37214 - DNA, 19 bp, synthetic construct
  misc_feature 1..19: note = Probe
  source 1..19: mol_type = other DNA
gttcgatccccggcacctc

SEQ ID NO: 37215 - DNA, 20 bp, synthetic construct
  misc_feature 1..20: note = Probe
  source 1..20: mol_type = other DNA
gttcgatccccggcacctcc

SEQ ID NO: 37216 - DNA, 19 bp, synthetic construct
  misc_feature 1..19: note = Probe
  source 1..19: mol_type = other DNA
gttcgatccccggcatctc

SEQ ID NO: 37217 - DNA, 20 bp, synthetic construct
  misc_feature 1..20: note = Probe
  source 1..20: mol_type = other DNA
gttcgatccccggcatctcc

SEQ ID NO: 37218 - DNA, 21 bp, synthetic construct
  misc_feature 1..21: note = Probe
  source 1..21: mol_type = other DNA
gttcgatcccgggtttcggca

SEQ ID NO: 37219 - DNA, 50 bp, synthetic construct; identical to SEQ ID NO: 1529
  misc_feature 1..50: note = Probe
  source 1..50: mol_type = other DNA

SEQ ID NO: 37220 - DNA, 31 bp, synthetic construct; identical to SEQ ID NO: 7206
  misc_feature 1..31: note = Probe
  source 1..31: mol_type = other DNA

SEQ ID NO: 37221 - DNA, 50 bp, synthetic construct; identical to SEQ ID NO: 7209
  misc_feature 1..50: note = Probe
  source 1..50: mol_type = other DNA

SEQ ID NO: 37222 - DNA, 34 bp, synthetic construct; identical to SEQ ID NO: 1538
  misc_feature 1..34: note = Probe
  source 1..34: mol_type = other DNA

SEQ ID NO: 37223 - DNA, 35 bp, synthetic construct; identical to SEQ ID NO: 1539
  misc_feature 1..35: note = Probe
  source 1..35: mol_type = other DNA

SEQ ID NO: 37224 - DNA, 36 bp, synthetic construct; identical to SEQ ID NO: 1540
  misc_feature 1..36: note = Probe
  source 1..36: mol_type = other DNA

SEQ ID NO: 37225 - DNA, 50 bp, synthetic construct; identical to SEQ ID NO: 7251
  misc_feature 1..50: note = Probe
  source 1..50: mol_type = other DNA

SEQ ID NO: 37226 - DNA, 23 bp, synthetic construct
  misc_feature 1..23: note = Probe
  source 1..23: mol_type = other DNA
gtttccgtagtgtagcggttatc

SEQ ID NO: 37227 - DNA, 24 bp, synthetic construct
  misc_feature 1..24: note = Probe
  source 1..24: mol_type = other DNA
gtttccgtagtgtagcggttatca

SEQ ID NO: 37228 - DNA, 28 bp, synthetic construct
  misc_feature 1..28: note = Probe
  source 1..28: mol_type = other DNA
gtttccgtagtgtagcggttatcacatt

SEQ ID NO: 37229 - DNA, 29 bp, synthetic construct
  misc_feature 1..29: note = Probe
  source 1..29: mol_type = other DNA
gtttccgtagtgtagcggttatcacattc

SEQ ID NO: 37230 - DNA, 30 bp, synthetic construct; identical to SEQ ID NO: 8769
  misc_feature 1..30: note = Probe
  source 1..30: mol_type = other DNA

SEQ ID NO: 37231 - DNA, 31 bp, synthetic construct; identical to SEQ ID NO: 1547
  misc_feature 1..31: note = Probe
  source 1..31: mol_type = other DNA

SEQ ID NO: 37232 - DNA, 33 bp, synthetic construct; identical to SEQ ID NO: 1549
  misc_feature 1..33: note = Probe
  source 1..33: mol_type = other DNA

SEQ ID NO: 37233 - DNA, 34 bp, synthetic construct; identical to SEQ ID NO: 1550
  misc_feature 1..34: note = Probe
  source 1..34: mol_type = other DNA

SEQ ID NO: 37234 - DNA, 50 bp, synthetic construct; identical to SEQ ID NO: 7255
  misc_feature 1..50: note = Probe
  source 1..50: mol_type = other DNA

SEQ ID NO: 37235 - DNA, 21 bp, synthetic construct
  misc_feature 1..21: note = Probe
  source 1..21: mol_type = other DNA
gtttccgtagtgtagtggtca

SEQ ID NO: 37236 - DNA, 23 bp, synthetic construct
  misc_feature 1..23: note = Probe
  source 1..23: mol_type = other DNA
gtttccgtagtgtagtggtcatc

SEQ ID NO: 37237 - DNA, 24 bp, synthetic construct
  misc_feature 1..24: note = Probe
  source 1..24: mol_type = other DNA
gtttccgtagtgtagtggtcatca

SEQ ID NO: 37238 - DNA, 28 bp, synthetic construct
  misc_feature 1..28: note = Probe
  source 1..28: mol_type = other DNA
gtttccgtagtgtagtggtcatcacgtt

SEQ ID NO: 37239 - DNA, 29 bp, synthetic construct
  misc_feature 1..29: note = Probe
  source 1..29: mol_type = other DNA
gtttccgtagtgtagtggtcatcacgttc

SEQ ID NO: 37240 - DNA, 30 bp, synthetic construct; identical to SEQ ID NO: 8772
  misc_feature 1..30: note = Probe
  source 1..30: mol_type = other DNA

SEQ ID NO: 37241 - DNA, 31 bp, synthetic construct; identical to SEQ ID NO: 1559
  misc_feature 1..31: note = Probe
  source 1..31: mol_type = other DNA

SEQ ID NO: 37242 - DNA, 32 bp, synthetic construct; identical to SEQ ID NO: 1560
  misc_feature 1..32: note = Probe
  source 1..32: mol_type = other DNA

SEQ ID NO: 37243 - DNA, 33 bp, synthetic construct; identical to SEQ ID NO: 1561
  misc_feature 1..33: note = Probe
  source 1..33: mol_type = other DNA

SEQ ID NO: 37244 - DNA, 50 bp, synthetic construct; identical to SEQ ID NO: 7277
  misc_feature 1..50: note = Probe
  source 1..50: mol_type = other DNA

SEQ ID NO: 37245 - DNA, 50 bp, synthetic construct; identical to SEQ ID NO: 1564
  misc_feature 1..50: note = Probe
  source 1..50: mol_type = other DNA

SEQ ID NO: 37246 - DNA, 23 bp, synthetic construct
  misc_feature 1..23: note = Probe
  source 1..23: mol_type = other DNA
gtttccgtagtgtagtggttatt

SEQ ID NO: 37247 - DNA, 29 bp, synthetic construct
  misc_feature 1..29: note = Probe
  source 1..29: mol_type = other DNA
gtttccgtggtgtagtggttatcacattc

SEQ ID NO: 37248 - DNA, 20 bp, synthetic construct
  misc_feature 1..20: note = Probe
  source 1..20: mol_type = other DNA
gttttcacccaggtggcccg

SEQ ID NO: 37249 - DNA, 42 bp, synthetic construct
  misc_feature 1..42: note = Probe
  source 1..42: mol_type = other DNA
gttttcacccaggtggcccgggttcgactcccggtatgggaa

SEQ ID NO: 37250 - DNA, 50 bp, synthetic construct; identical to SEQ ID NO: 1568
  misc_feature 1..50: note = Probe
  source 1..50: mol_type = other DNA

SEQ ID NO: 37251 - DNA, 50 bp, synthetic construct; identical to SEQ ID NO: 1569
  misc_feature 1..50: note = Probe
  source 1..50: mol_type = other DNA

SEQ ID NO: 37252 - DNA, 19 bp, synthetic construct
  misc_feature 1..19: note = Probe
  source 1..19: mol_type = other DNA
taagccagggattgtgggt

SEQ ID NO: 37253 - DNA, 17 bp, synthetic construct
  misc_feature 1..17: note = Probe
  source 1..17: mol_type = other DNA
taatggataaggcattg

SEQ ID NO: 37254 - DNA, 17 bp, synthetic construct
  misc_feature 1..17: note = Probe
  source 1..17: mol_type = other DNA
taatggtcagcactctg

SEQ ID NO: 37255 - DNA, 38 bp, synthetic construct
  misc_feature 1..38: note = Probe
  source 1..38: mol_type = other DNA
tacacgcagaaggtcctgggttcgagccccagtggaac

SEQ ID NO: 37256 - DNA, 18 bp, synthetic construct
  misc_feature 1..18: note = Probe
  source 1..18: mol_type = other DNA
tacctcctcaaagcaata

SEQ ID NO: 37257 - DNA, 50 bp, synthetic construct; identical to SEQ ID NO: 1579
  misc_feature 1..50: note = Probe
  source 1..50: mol_type = other DNA

SEQ ID NO: 37258 - DNA, 50 bp, synthetic construct; identical to SEQ ID NO: 1582
  misc_feature 1..50: note = Probe
  source 1..50: mol_type = other DNA

SEQ ID NO: 37259 - DNA, 49 bp, synthetic construct; identical to SEQ ID NO: 1585
  misc_feature 1..49: note = Probe
  source 1..49: mol_type = other DNA

SEQ ID NO: 37260 - DNA, 50 bp, synthetic construct; identical to SEQ ID NO: 1586
  misc_feature 1..50: note = Probe
  source 1..50: mol_type = other DNA

SEQ ID NO: 37261 - DNA, 29 bp, synthetic construct
  misc_feature 1..29: note = Probe
  source 1..29: mol_type = other DNA
taggatggggtgtgataggtggcacggag

SEQ ID NO: 37262 - DNA, 30 bp, synthetic construct; identical to SEQ ID NO: 1592
  misc_feature 1..30: note = Probe
  source 1..30: mol_type = other DNA

SEQ ID NO: 37263 - DNA, 49 bp, synthetic construct; identical to SEQ ID NO: 23495
  misc_feature 1..49: note = Probe
  source 1..49: mol_type = other DNA

SEQ ID NO: 37264 - DNA, 50 bp, synthetic construct; identical to SEQ ID NO: 23496
  misc_feature 1..50: note = Probe
  source 1..50: mol_type = other DNA

SEQ ID NO: 37265 - DNA, 24 bp, synthetic construct
  misc_feature 1..24: note = Probe
  source 1..24: mol_type = other DNA
tagtatagtggtgagtgtccccgt

SEQ ID NO: 37266 - DNA, 18 bp, synthetic construct
  misc_feature 1..18: note = Probe
  source 1..18: mol_type = other DNA
tagtggtatgattctcgc

SEQ ID NO: 37267 - DNA, 18 bp, synthetic construct
  misc_feature 1..18: note = Probe
  source 1..18: mol_type = other DNA
tagtggtcatcacgttcg

SEQ ID NO: 37268 - DNA, 19 bp, synthetic construct
  misc_feature 1..19: note = Probe
  source 1..19: mol_type = other DNA
tagtggtcatcacgttcgc

SEQ ID NO: 37269 - DNA, 19 bp, synthetic construct
  misc_feature 1..19: note = Probe
  source 1..19: mol_type = other DNA
tagtggttaggattcggcg

SEQ ID NO: 37270 - DNA, 20 bp, synthetic construct
  misc_feature 1..20: note = Probe
  source 1..20: mol_type = other DNA
tagtggttaggattcggcgc

SEQ ID NO: 37271 - DNA, 32 bp, synthetic construct; identical to SEQ ID NO: 23548
  misc_feature 1..32: note = Probe
  source 1..32: mol_type = other DNA

SEQ ID NO: 37272 - DNA, 37 bp, synthetic construct; identical to SEQ ID NO: 14220
  misc_feature 1..37: note = Probe
  source 1..37: mol_type = other DNA

SEQ ID NO: 37273 - DNA, 38 bp, synthetic construct; identical to SEQ ID NO: 14221
  misc_feature 1..38: note = Probe
  source 1..38: mol_type = other DNA

SEQ ID NO: 37274 - DNA, 19 bp, synthetic construct
  misc_feature 1..19: note = Probe
  source 1..19: mol_type = other DNA
tagtggttagtactctgcg

SEQ ID NO: 37275 - DNA, 17 bp, synthetic construct
  misc_feature 1..17: note = Probe
  source 1..17: mol_type = other DNA
tagtggttagtatcccc

SEQ ID NO: 37276 - DNA, 18 bp, synthetic construct
  misc_feature 1..18: note = Probe
  source 1..18: mol_type = other DNA
tagtggttagtatccccg

SEQ ID NO: 37277 - DNA, 18 bp, synthetic construct
  misc_feature 1..18: note = Probe
  source 1..18: mol_type = other DNA
tagtggttatcacgtctg

SEQ ID NO: 37278 - DNA, 42 bp, synthetic construct; identical to SEQ ID NO: 23565
  misc_feature 1..42: note = Probe
  source 1..42: mol_type = other DNA

SEQ ID NO: 37279 - DNA, 50 bp, synthetic construct; identical to SEQ ID NO: 1605
  misc_feature 1..50: note = Probe
  source 1..50: mol_type = other DNA

SEQ ID NO: 37280 - DNA, 18 bp, synthetic construct
  misc_feature 1..18: note = Probe
  source 1..18: mol_type = other DNA
tcaatccccagcacctcc

SEQ ID NO: 37281 - DNA, 18 bp, synthetic construct
  misc_feature 1..18: note = Probe
  source 1..18: mol_type = other DNA
tcaatccccggcacctcc

SEQ ID NO: 37282 - DNA, 19 bp, synthetic construct
  misc_feature 1..19: note = Probe
  source 1..19: mol_type = other DNA
tcaatccccggcacctcca

SEQ ID NO: 37283 - DNA, 22 bp, synthetic construct
  misc_feature 1..22: note = Probe
  source 1..22: mol_type = other DNA
tcaatccccggcacctccacca

SEQ ID NO: 37284 - DNA, 50 bp, synthetic construct; identical to SEQ ID NO: 1610
  misc_feature 1..50: note = Probe
  source 1..50: mol_type = other DNA

SEQ ID NO: 37285 - DNA, 18 bp, synthetic construct
  misc_feature 1..18: note = Probe
  source 1..18: mol_type = other DNA
tcacacgcgaaaggtccc

SEQ ID NO: 37286 - DNA, 20 bp, synthetic construct
  misc_feature 1..20: note = Probe
  source 1..20: mol_type = other DNA
tcacacgcgaaaggtccccg

SEQ ID NO: 37287 - DNA, 21 bp, synthetic construct
  misc_feature 1..21: note = Probe
  source 1..21: mol_type = other DNA
tcacacgcgaaaggtccccgg

SEQ ID NO: 37288 - DNA, 22 bp, synthetic construct
  misc_feature 1..22: note = Probe
  source 1..22: mol_type = other DNA
tcacacgcgaaaggtccccggt

SEQ ID NO: 37289 - DNA, 37 bp, synthetic construct
  misc_feature 1..37: note = Probe
  source 1..37: mol_type = other DNA
tcaccgccgcggcccgggttcgattcccggtcaggga

SEQ ID NO: 37290 - DNA, 18 bp, synthetic construct
  misc_feature 1..18: note = Probe
  source 1..18: mol_type = other DNA
tcacgcgggagaccgggg

SEQ ID NO: 37291 - DNA, 19 bp, synthetic construct
  misc_feature 1..19: note = Probe
  source 1..19: mol_type = other DNA
tcacgcgggagaccggggt

SEQ ID NO: 37292 - DNA, 35 bp, synthetic construct; identical to SEQ ID NO: 7687
  misc_feature 1..35: note = Probe
  source 1..35: mol_type = other DNA

SEQ ID NO: 37293 - DNA, 36 bp, synthetic construct; identical to SEQ ID NO: 1616
  misc_feature 1..36: note = Probe
  source 1..36: mol_type = other DNA

SEQ ID NO: 37294 - DNA, 37 bp, synthetic construct; identical to SEQ ID NO: 7688
  misc_feature 1..37: note = Probe
  source 1..37: mol_type = other DNA

SEQ ID NO: 37295 - DNA, 38 bp, synthetic construct; identical to SEQ ID NO: 1617
  misc_feature 1..38: note = Probe
  source 1..38: mol_type = other DNA

SEQ ID NO: 37296 - DNA, 32 bp, synthetic construct; identical to SEQ ID NO: 1618
  misc_feature 1..32: note = Probe
  source 1..32: mol_type = other DNA

SEQ ID NO: 37297 - DNA, 34 bp, synthetic construct; identical to SEQ ID NO: 1620
  misc_feature 1..34: note = Probe
  source 1..34: mol_type = other DNA

SEQ ID NO: 37298 - DNA, 35 bp, synthetic construct; identical to SEQ ID NO: 1621
  misc_feature 1..35: note = Probe
  source 1..35: mol_type = other DNA

SEQ ID NO: 37299 - DNA, 36 bp, synthetic construct; identical to SEQ ID NO: 1622
  misc_feature 1..36: note = Probe
  source 1..36: mol_type = other DNA

SEQ ID NO: 37300 - DNA, 37 bp, synthetic construct; identical to SEQ ID NO: 7698
  misc_feature 1..37: note = Probe
  source 1..37: mol_type = other DNA

SEQ ID NO: 37301 - DNA, 38 bp, synthetic construct; identical to SEQ ID NO: 1623
  misc_feature 1..38: note = Probe
  source 1..38: mol_type = other DNA

SEQ ID NO: 37302 - DNA, 18 bp, synthetic construct
  misc_feature 1..18: note = Probe
  source 1..18: mol_type = other DNA
tcagaagattccaggttc

SEQ ID NO: 37303 - DNA, 19 bp, synthetic construct
  misc_feature 1..19: note = Probe
  source 1..19: mol_type = other DNA
tcagaagattctaggttcg

SEQ ID NO: 37304 - DNA, 31 bp, synthetic construct; identical to SEQ ID NO: 23721
  misc_feature 1..31: note = Probe
  source 1..31: mol_type = other DNA

SEQ ID NO: 37305 - DNA, 18 bp, synthetic construct
  misc_feature 1..18: note = Probe
  source 1..18: mol_type = other DNA
tccaagcagttgacccgg

SEQ ID NO: 37306 - DNA, 23 bp, synthetic construct
  misc_feature 1..23: note = Probe
  source 1..23: mol_type = other DNA
tccaatggggtttccccgcacag

SEQ ID NO: 37307 - DNA, 18 bp, synthetic construct
  misc_feature 1..18: note = Probe
  source 1..18: mol_type = other DNA
tccagcgatccgagttca

SEQ ID NO: 37308 - DNA, 24 bp, synthetic construct
  misc_feature 1..24: note = Probe
  source 1..24: mol_type = other DNA
tccagcgatccgagttcaaatctc

SEQ ID NO: 37309 - DNA, 32 bp, synthetic construct; identical to SEQ ID NO: 23791
  misc_feature 1..32: note = Probe
  source 1..32: mol_type = other DNA

SEQ ID NO: 37310 - DNA, 33 bp, synthetic construct; identical to SEQ ID NO: 23792
  misc_feature 1..33: note = Probe
  source 1..33: mol_type = other DNA

SEQ ID NO: 37311 - DNA, 21 bp, synthetic construct
  misc_feature 1..21: note = Probe
  source 1..21: mol_type = other DNA
tccagtctcttcgggggcgtg

SEQ ID NO: 37312 - DNA, 26 bp, synthetic construct
  misc_feature 1..26: note = Probe
  source 1..26: mol_type = other DNA
tccatagtgtagtggttatcacgtct

SEQ ID NO: 37313 - DNA, 20 bp, synthetic construct
  misc_feature 1..20: note = Probe
  source 1..20: mol_type = other DNA
tccattggggtctccccgcg

SEQ ID NO: 37314 - DNA, 20 bp, synthetic construct
  misc_feature 1..20: note = Probe
  source 1..20: mol_type = other DNA
tccattggggtttccccgcg

SEQ ID NO: 37315 - DNA, 22 bp, synthetic construct
  misc_feature 1..22: note = Probe
  source 1..22: mol_type = other DNA
tccattggggtttccccgcgca

SEQ ID NO: 37316 - DNA, 23 bp, synthetic construct
  misc_feature 1..23: note = Probe
  source 1..23: mol_type = other DNA
tccattggggtttccccgcgcag

SEQ ID NO: 37317 - DNA, 24 bp, synthetic construct
  misc_feature 1..24: note = Probe
  source 1..24: mol_type = other DNA
tccattggggtttccccgcgcagg

SEQ ID NO: 37318 - DNA, 25 bp, synthetic construct
  misc_feature 1..25: note = Probe
  source 1..25: mol_type = other DNA
tccattggggtttccccgcgcaggt

SEQ ID NO: 37319 - DNA, 23 bp, synthetic construct
  misc_feature 1..23: note = Probe
  source 1..23: mol_type = other DNA
tcccacatggtctagcggttagg

SEQ ID NO: 37320 - DNA, 24 bp, synthetic construct
  misc_feature 1..24: note = Probe
  source 1..24: mol_type = other DNA
tcccacatggtctagcggttagga

SEQ ID NO: 37321 - DNA, 25 bp, synthetic construct
  misc_feature 1..25: note = Probe
  source 1..25: mol_type = other DNA
tcccacatggtctagcggttaggat

SEQ ID NO: 37322 - DNA, 26 bp, synthetic construct
  misc_feature 1..26: note = Probe
  source 1..26: mol_type = other DNA
tcccacatggtctagcggttaggatt

SEQ ID NO: 37323 - DNA, 27 bp, synthetic construct
  misc_feature 1..27: note = Probe
  source 1..27: mol_type = other DNA
tcccacatggtctagcggttaggattc

SEQ ID NO: 37324 - DNA, 28 bp, synthetic construct
  misc_feature 1..28: note = Probe
  source 1..28: mol_type = other DNA
tcccacatggtctagcggttaggattcc

SEQ ID NO: 37325 - DNA, 29 bp, synthetic construct
  misc_feature 1..29: note = Probe
  source 1..29: mol_type = other DNA
tcccacatggtctagcggttaggattcct

SEQ ID NO: 37326 - DNA, 30 bp, synthetic construct; identical to SEQ ID NO: 1643
  misc_feature 1..30: note = Probe
  source 1..30: mol_type = other DNA

SEQ ID NO: 37327 - DNA, 31 bp, synthetic construct; identical to SEQ ID NO: 1644
  misc_feature 1..31: note = Probe
  source 1..31: mol_type = other DNA

SEQ ID NO: 37328 - DNA, 32 bp, synthetic construct; identical to SEQ ID NO: 1645
  misc_feature 1..32: note = Probe
  source 1..32: mol_type = other DNA

SEQ ID NO: 37329 - DNA, 33 bp, synthetic construct; identical to SEQ ID NO: 1646
  misc_feature 1..33: note = Probe
  source 1..33: mol_type = other DNA

SEQ ID NO: 37330 - DNA, 34 bp, synthetic construct; identical to SEQ ID NO: 1647
  misc_feature 1..34: note = Probe
  source 1..34: mol_type = other DNA

SEQ ID NO: 37331 - DNA, 35 bp, synthetic construct; identical to SEQ ID NO: 1648
  misc_feature 1..35: note = Probe
  source 1..35: mol_type = other DNA

SEQ ID NO: 37332 - DNA, 36 bp, synthetic construct; identical to SEQ ID NO: 1649
  misc_feature 1..36: note = Probe
  source 1..36: mol_type = other DNA

SEQ ID NO: 37333 - DNA, 50 bp, synthetic construct; identical to SEQ ID NO: 7798
  misc_feature 1..50: note = Probe
  source 1..50: mol_type = other DNA

SEQ ID NO: 37334 - DNA, 25 bp, synthetic construct
  misc_feature 1..25: note = Probe
  source 1..25: mol_type = other DNA
tcccatatggtctagcggttaggat

SEQ ID NO: 37335 - DNA, 26 bp, synthetic construct
  misc_feature 1..26: note = Probe
  source 1..26: mol_type = other DNA
tcccatatggtctagcggttaggatt

SEQ ID NO: 37336 - DNA, 27 bp, synthetic construct
  misc_feature 1..27: note = Probe
  source 1..27: mol_type = other DNA
tcccatatggtctagcggttaggattc

SEQ ID NO: 37337 - DNA, 28 bp, synthetic construct
  misc_feature 1..28: note = Probe
  source 1..28: mol_type = other DNA
tcccatatggtctagcggttaggattcc

SEQ ID NO: 37338 - DNA, 29 bp, synthetic construct
  misc_feature 1..29: note = Probe
  source 1..29: mol_type = other DNA
tcccatatggtctagcggttaggattcct

SEQ ID NO: 37339 - DNA, 30 bp, synthetic construct; identical to SEQ ID NO: 1659
  misc_feature 1..30: note = Probe
  source 1..30: mol_type = other DNA

SEQ ID NO: 37340 - DNA, 31 bp, synthetic construct; identical to SEQ ID NO: 1660
  misc_feature 1..31: note = Probe
  source 1..31: mol_type = other DNA

SEQ ID NO: 37341 - DNA, 33 bp, synthetic construct; identical to SEQ ID NO: 1662
  misc_feature 1..33: note = Probe
  source 1..33: mol_type = other DNA

SEQ ID NO: 37342 - DNA, 34 bp, synthetic construct; identical to SEQ ID NO: 1663
  misc_feature 1..34: note = Probe
  source 1..34: mol_type = other DNA

SEQ ID NO: 37343 - DNA, 35 bp, synthetic construct; identical to SEQ ID NO: 1664
  misc_feature 1..35: note = Probe
  source 1..35: mol_type = other DNA

SEQ ID NO: 37344 - DNA, 36 bp, synthetic construct; identical to SEQ ID NO: 1665
  misc_feature 1..36: note = Probe
  source 1..36: mol_type = other DNA

SEQ ID NO: 37345 - DNA, 50 bp, synthetic construct; identical to SEQ ID NO: 7805
  misc_feature 1..50: note = Probe
  source 1..50: mol_type = other DNA

SEQ ID NO: 37346 - DNA, 17 bp, synthetic construct
  misc_feature 1..17: note = Probe
  source 1..17: mol_type = other DNA
tccccggcacctccacc

SEQ ID NO: 37347 - DNA, 18 bp, synthetic construct
  misc_feature 1..18: note = Probe
  source 1..18: mol_type = other DNA
tccccggcacctccacca

SEQ ID NO: 37348 - DNA, 31 bp, synthetic construct; identical to SEQ ID NO: 1671
  misc_feature 1..31: note = Probe
  source 1..31: mol_type = other DNA

SEQ ID NO: 37349 - DNA, 32 bp, synthetic construct; identical to SEQ ID NO: 1672
  misc_feature 1..32: note = Probe
  source 1..32: mol_type = other DNA

SEQ ID NO: 37350 - DNA, 33 bp, synthetic construct; identical to SEQ ID NO: 1673
  misc_feature 1..33: note = Probe
  source 1..33: mol_type = other DNA

SEQ ID NO: 37351 - DNA, 34 bp, synthetic construct; identical to SEQ ID NO: 1674
  misc_feature 1..34: note = Probe
  source 1..34: mol_type = other DNA

SEQ ID NO: 37352 - DNA, 35 bp, synthetic construct; identical to SEQ ID NO: 1675
  misc_feature 1..35: note = Probe
  source 1..35: mol_type = other DNA

SEQ ID NO: 37353 - DNA, 36 bp, synthetic construct; identical to SEQ ID NO: 1676
  misc_feature 1..36: note = Probe
  source 1..36: mol_type = other DNA

SEQ ID NO: 37354 - DNA, 49 bp, synthetic construct; identical to SEQ ID NO: 7858
  misc_feature 1..49: note = Probe
  source 1..49: mol_type = other DNA

SEQ ID NO: 37355 - DNA, 50 bp, synthetic construct; identical to SEQ ID NO: 1678
  misc_feature 1..50: note = Probe
  source 1..50: mol_type = other DNA

SEQ ID NO: 37356 - DNA, 31 bp, synthetic construct; identical to SEQ ID NO: 1679
  misc_feature 1..31: note = Probe
  source 1..31: mol_type = other DNA

SEQ ID NO: 37357 - DNA, 32 bp, synthetic construct; identical to SEQ ID NO: 1680
  misc_feature 1..32: note = Probe
  source 1..32: mol_type = other DNA

SEQ ID NO: 37358 - DNA, 33 bp, synthetic construct; identical to SEQ ID NO: 1681
  misc_feature 1..33: note = Probe
  source 1..33: mol_type = other DNA

SEQ ID NO: 37359 - DNA, 34 bp, synthetic construct; identical to SEQ ID NO: 1682
  misc_feature 1..34: note = Probe
  source 1..34: mol_type = other DNA

SEQ ID NO: 37360 - DNA, 35 bp, synthetic construct; identical to SEQ ID NO: 1683
  misc_feature 1..35: note = Probe
  source 1..35: mol_type = other DNA

SEQ ID NO: 37361 - DNA, 36 bp, synthetic construct; identical to SEQ ID NO: 1684
  misc_feature 1..36: note = Probe
  source 1..36: mol_type = other DNA

SEQ ID NO: 37362 - DNA, 37 bp, synthetic construct; identical to SEQ ID NO: 1685
  misc_feature 1..37: note = Probe
  source 1..37: mol_type = other DNA

SEQ ID NO: 37363 - DNA, 44 bp, synthetic construct; identical to SEQ ID NO: 7873
  misc_feature 1..44: note = Probe
  source 1..44: mol_type = other DNA

SEQ ID NO: 37364 - DNA, 46 bp, synthetic construct; identical to SEQ ID NO: 7875
  misc_feature 1..46: note = Probe
  source 1..46: mol_type = other DNA

SEQ ID NO: 37365 - DNA, 50 bp, synthetic construct; identical to SEQ ID NO: 1691
  misc_feature 1..50: note = Probe
  source 1..50: mol_type = other DNA

SEQ ID NO: 37366 - DNA, 33 bp, synthetic construct
  misc_feature 1..33: note = Probe
  source 1..33: mol_type = other DNA
tccgagaggtcccgggttcaaatcccggacgag

SEQ ID NO: 37367 - DNA, 34 bp, synthetic construct
  misc_feature 1..34: note = Probe
  source 1..34: mol_type = other DNA
tccgagaggtcccgggttcaaatcccggacgagc

SEQ ID NO: 37368 - DNA, 22 bp, synthetic construct
  misc_feature 1..22: note = Probe
  source 1..22: mol_type = other DNA
tcctcgttagtatagtggtgag

SEQ ID NO: 37369 - DNA, 23 bp, synthetic construct
  misc_feature 1..23: note = Probe
  source 1..23: mol_type = other DNA
tcctcgttagtatagtggtgagt

SEQ ID NO: 37370 - DNA, 25 bp, synthetic construct
  misc_feature 1..25: note = Probe
  source 1..25: mol_type = other DNA
tcctcgttagtatagtggtgagtat

SEQ ID NO: 37371 - DNA, 26 bp, synthetic construct
  misc_feature 1..26: note = Probe
  source 1..26: mol_type = other DNA
tcctcgttagtatagtggtgagtatc

SEQ ID NO: 37372 - DNA, 27 bp, synthetic construct
  misc_feature 1..27: note = Probe
  source 1..27: mol_type = other DNA
tcctcgttagtatagtggtgagtatcc

SEQ ID NO: 37373 - DNA, 28 bp, synthetic construct
  misc_feature 1..28: note = Probe
  source 1..28: mol_type = other DNA
tcctcgttagtatagtggtgagtatccc

SEQ ID NO: 37374 - DNA, 29 bp, synthetic construct
  misc_feature 1..29: note = Probe
  source 1..29: mol_type = other DNA
tcctcgttagtatagtggtgagtatcccc

SEQ ID NO: 37375 - DNA, 30 bp, synthetic construct; identical to SEQ ID NO: 1701
  misc_feature 1..30: note = Probe
  source 1..30: mol_type = other DNA

SEQ ID NO: 37376 - DNA, 31 bp, synthetic construct; identical to SEQ ID NO: 1702
  misc_feature 1..31: note = Probe
  source 1..31: mol_type = other DNA

SEQ ID NO: 37377 - DNA, 32 bp, synthetic construct; identical to SEQ ID NO: 1703
  misc_feature 1..32: note = Probe
  source 1..32: mol_type = other DNA

SEQ ID NO: 37378 - DNA, 33 bp, synthetic construct; identical to SEQ ID NO: 1704
  misc_feature 1..33: note = Probe
  source 1..33: mol_type = other DNA

SEQ ID NO: 37379 - DNA, 34 bp, synthetic construct; identical to SEQ ID NO: 1705
  misc_feature 1..34: note = Probe
  source 1..34: mol_type = other DNA

SEQ ID NO: 37380 - DNA, 35 bp, synthetic construct; identical to SEQ ID NO: 1706
  misc_feature 1..35: note = Probe
  source 1..35: mol_type = other DNA

SEQ ID NO: 37381 - DNA, 36 bp, synthetic construct; identical to SEQ ID NO: 1707
  misc_feature 1..36: note = Probe
  source 1..36: mol_type = other DNA

SEQ ID NO: 37382 - DNA, 50 bp, synthetic construct; identical to SEQ ID NO: 1711
  misc_feature 1..50: note = Probe
  source 1..50: mol_type = other DNA

SEQ ID NO: 37383 - DNA, 28 bp, synthetic construct
  misc_feature 1..28: note = Probe
  source 1..28: mol_type = other DNA
tcctcgttagtatagtggttagtatccc

SEQ ID NO: 37384 - DNA, 29 bp, synthetic construct
  misc_feature 1..29: note = Probe
  source 1..29: mol_type = other DNA
tcctcgttagtatagtggttagtatcccc

SEQ ID NO: 37385 - DNA, 30 bp, synthetic construct; identical to SEQ ID NO: 11933
  misc_feature 1..30: note = Probe
  source 1..30: mol_type = other DNA

SEQ ID NO: 37386 - DNA, 31 bp, synthetic construct
  misc_feature 1..31: note = Probe
  source 1..31: mol_type = other DNA
tcctcgttagtatagtggttagtatccccgc

SEQ ID NO: 37387 - DNA, 34 bp, synthetic construct; identical to SEQ ID NO: 1716
  misc_feature 1..34: note = Probe
  source 1..34: mol_type = other DNA

SEQ ID NO: 37388 - DNA, 50 bp, synthetic construct; identical to SEQ ID NO: 7930
  misc_feature 1..50: note = Probe
  source 1..50: mol_type = other DNA

SEQ ID NO: 37389 - DNA, 18 bp, synthetic construct
  misc_feature 1..18: note = Probe
  source 1..18: mol_type = other DNA
tcgatccccagtacctcc

SEQ ID NO: 37390 - DNA, 18 bp, synthetic construct
  misc_feature 1..18: note = Probe
  source 1..18: mol_type = other DNA
tcgatccccggcatctcc

SEQ ID NO: 37391 - DNA, 22 bp, synthetic construct
  misc_feature 1..22: note = Probe
  source 1..22: mol_type = other DNA
tcgggtgcgagaggtcccgggt

SEQ ID NO: 37392 - DNA, 18 bp, synthetic construct
  misc_feature 1..18: note = Probe
  source 1..18: mol_type = other DNA
tctcaccgccgcggcccg

SEQ ID NO: 37393 - DNA, 27 bp, synthetic construct
  misc_feature 1..27: note = Probe
  source 1..27: mol_type = other DNA
tctcataatctgaaggtcctgagttcg

SEQ ID NO: 37394 - DNA, 42 bp, synthetic construct
  misc_feature 1..42: note = Probe
  source 1..42: mol_type = other DNA
tctcataatctgaaggtcctgagttcgaacctcagagggggc

SEQ ID NO: 37395 - DNA, 43 bp, synthetic construct
  misc_feature 1..43: note = Probe
  source 1..43: mol_type = other DNA
tctcataatctgaaggtcctgagttcgaacctcagagggggca

SEQ ID NO: 37396 - DNA, 19 bp, synthetic construct
  misc_feature 1..19: note = Probe
  source 1..19: mol_type = other DNA
tctcataatctgaaggtcg

SEQ ID NO: 37397 - DNA, 21 bp, synthetic construct
  misc_feature 1..21: note = Probe
  source 1..21: mol_type = other DNA
tctcataatctgaaggtcgtg

SEQ ID NO: 37398 - DNA, 22 bp, synthetic construct
  misc_feature 1..22: note = Probe
  source 1..22: mol_type = other DNA
tctcataatctgaaggtcgtga

SEQ ID NO: 37399 - DNA, 23 bp, synthetic construct
  misc_feature 1..23: note = Probe
  source 1..23: mol_type = other DNA
tctcataatctgaaggtcgtgag

SEQ ID NO: 37400 - DNA, 24 bp, synthetic construct
  misc_feature 1..24: note = Probe
  source 1..24: mol_type = other DNA
tctcataatctgaaggtcgtgagt

SEQ ID NO: 37401 - DNA, 41 bp, synthetic construct
  misc_feature 1..41: note = Probe
  source 1..41: mol_type = other DNA
tctcataatctgaaggtcgtgagttcgagcctcacacgggg

SEQ ID NO: 37402 - DNA, 42 bp, synthetic construct
  misc_feature 1..42: note = Probe
  source 1..42: mol_type = other DNA
tctcataatctgaaggtcgtgagttcgagcctcacacggggc

SEQ ID NO: 37403 - DNA, 41 bp, synthetic construct
  misc_feature 1..41: note = Probe
  source 1..41: mol_type = other DNA
tctcataatctgaaggtcgtgagttcgatcctcacacgggg

SEQ ID NO: 37404 - DNA, 42 bp, synthetic construct
  misc_feature 1..42: note = Probe
  source 1..42: mol_type = other DNA
tctcataatctgaaggtcgtgagttcgatcctcacacggggc

SEQ ID NO: 37405 - DNA, 43 bp, synthetic construct
  misc_feature 1..43: note = Probe
  source 1..43: mol_type = other DNA
tctcataatctgaaggtcgtgagttcgatcctcacacggggca

SEQ ID NO: 37406 - DNA, 18 bp, synthetic construct
  misc_feature 1..18: note = Probe
  source 1..18: mol_type = other DNA
tctgaatccagcgatccg

SEQ ID NO: 37407 - DNA, 20 bp, synthetic construct
  misc_feature 1..20: note = Probe
  source 1..20: mol_type = other DNA
tctgaatccagcgatccgag

SEQ ID NO: 37408 - DNA, 33 bp, synthetic construct; identical to SEQ ID NO: 8013
  misc_feature 1..33: note = Probe
  source 1..33: mol_type = other DNA

SEQ ID NO: 37409 - DNA, 32 bp, synthetic construct; identical to SEQ ID NO: 24159
  misc_feature 1..32: note = Probe
  source 1..32: mol_type = other DNA

SEQ ID NO: 37410 - DNA, 18 bp, synthetic construct
  misc_feature 1..18: note = Probe
  source 1..18: mol_type = other DNA
tgaatccagcgatccgag

SEQ ID NO: 37411 - DNA, 30 bp, synthetic construct
  misc_feature 1..30: note = Probe
  source 1..30: mol_type = other DNA
tgaggccccgggttcgatccccggcatctc

SEQ ID NO: 37412 - DNA, 31 bp, synthetic construct
  misc_feature 1..31: note = Probe
  source 1..31: mol_type = other DNA
tgaggccccgggttcgatccccggcatctcc

SEQ ID NO: 37413 - DNA, 37 bp, synthetic construct
  misc_feature 1..37: note = Probe
  source 1..37: mol_type = other DNA
tgccacgcgggaggcccgggttcgattcccggcccat

SEQ ID NO: 37414 - DNA, 38 bp, synthetic construct
  misc_feature 1..38: note = Probe
  source 1..38: mol_type = other DNA
tgccacgcgggaggcccgggttcgattcccggcccatg

SEQ ID NO: 37415 - DNA, 18 bp, synthetic construct
  misc_feature 1..18: note = Probe
  source 1..18: mol_type = other DNA
tgcgagaggtcccgggtt

SEQ ID NO: 37416 - DNA, 33 bp, synthetic construct; identical to SEQ ID NO: 14385
  misc_feature 1..33: note = Probe
  source 1..33: mol_type = other DNA

SEQ ID NO: 37417 - DNA, 34 bp, synthetic construct; identical to SEQ ID NO: 24310
  misc_feature 1..34: note = Probe
  source 1..34: mol_type = other DNA

SEQ ID NO: 37418 - DNA, 35 bp, synthetic construct
  misc_feature 1..35: note = Probe
  source 1..35: mol_type = other DNA
tgcgagaggtcccgggttcaaatcccggacgagcc

SEQ ID NO: 37419 - DNA, 25 bp, synthetic construct
  misc_feature 1..25: note = Probe
  source 1..25: mol_type = other DNA
tgggtggttcagtggtagaattctc

SEQ ID NO: 37420 - DNA, 26 bp, synthetic construct
  misc_feature 1..26: note = Probe
  source 1..26: mol_type = other DNA
tgggtggttcagtggtagaattctcg

SEQ ID NO: 37421 - DNA, 27 bp, synthetic construct
  misc_feature 1..27: note = Probe
  source 1..27: mol_type = other DNA
tgggtggttcagtggtagaattctcgc

SEQ ID NO: 37422 - DNA, 22 bp, synthetic construct
  misc_feature 1..22: note = Probe
  source 1..22: mol_type = other DNA
tggtctagcggttaggattcct

SEQ ID NO: 37423 - DNA, 23 bp, synthetic construct
  misc_feature 1..23: note = Probe
  source 1..23: mol_type = other DNA
tggtctagcggttaggattcctg

SEQ ID NO: 37424 - DNA, 24 bp, synthetic construct
  misc_feature 1..24: note = Probe
  source 1..24: mol_type = other DNA
tggtctagcggttaggattcctgg

SEQ ID NO: 37425 - DNA, 24 bp, synthetic construct
  misc_feature 1..24: note = Probe
  source 1..24: mol_type = other DNA
tggtctagtggttaggattcggcg

SEQ ID NO: 37426 - DNA, 27 bp, synthetic construct
  misc_feature 1..27: note = Probe
  source 1..27: mol_type = other DNA
tggtggtctagtggttaggattcggcg

SEQ ID NO: 37427 - DNA, 21 bp, synthetic construct
  misc_feature 1..21: note = Probe
  source 1..21: mol_type = other DNA
tggtgtagtggtatcatgcaa

SEQ ID NO: 37428 - DNA, 18 bp, synthetic construct
  misc_feature 1..18: note = Probe
  source 1..18: mol_type = other DNA
tggttaggattcggcgct

SEQ ID NO: 37429 - DNA, 22 bp, synthetic construct
  misc_feature 1..22: note = Probe
  source 1..22: mol_type = other DNA
tggttaggattcggcgctctca

SEQ ID NO: 37430 - DNA, 34 bp, synthetic construct; identical to SEQ ID NO: 14437
  misc_feature 1..34: note = Probe
  source 1..34: mol_type = other DNA

SEQ ID NO: 37431 - DNA, 35 bp, synthetic construct; identical to SEQ ID NO: 24447
  misc_feature 1..35: note = Probe
  source 1..35: mol_type = other DNA

SEQ ID NO: 37432 - DNA, 35 bp, synthetic construct
  misc_feature 1..35: note = Probe
  source 1..35: mol_type = other DNA
tgtatgaggtcccgggttcgatccccggcatctcc

SEQ ID NO: 37433 - DNA, 36 bp, synthetic construct; identical to SEQ ID NO: 24495
  misc_feature 1..36: note = Probe
  source 1..36: mol_type = other DNA

SEQ ID NO: 37434 - DNA, 20 bp, synthetic construct
  misc_feature 1..20: note = Probe
  source 1..20: mol_type = other DNA
tgtcacgcgggagaccgggg

SEQ ID NO: 37435 - DNA, 21 bp, synthetic construct
  misc_feature 1..21: note = Probe
  source 1..21: mol_type = other DNA
tgtcacgcgggagaccggggt

SEQ ID NO: 37436 - DNA, 22 bp, synthetic construct
  misc_feature 1..22: note = Probe
  source 1..22: mol_type = other DNA
tgtcacgcgggagaccggggtt

SEQ ID NO: 37437 - DNA, 37 bp, synthetic construct; identical to SEQ ID NO: 14448
  misc_feature 1..37: note = Probe
  source 1..37: mol_type = other DNA

SEQ ID NO: 37438 - DNA, 38 bp, synthetic construct; identical to SEQ ID NO: 24509
  misc_feature 1..38: note = Probe
  source 1..38: mol_type = other DNA

SEQ ID NO: 37439 - DNA, 24 bp, synthetic construct
  misc_feature 1..24: note = Probe
  source 1..24: mol_type = other DNA
tgtcacgcgggagaccggggttcg

SEQ ID NO: 37440 - DNA, 36 bp, synthetic construct; identical to SEQ ID NO: 14453
  misc_feature 1..36: note = Probe
  source 1..36: mol_type = other DNA

SEQ ID NO: 37441 - DNA, 37 bp, synthetic construct; identical to SEQ ID NO: 14454
  misc_feature 1..37: note = Probe
  source 1..37: mol_type = other DNA

SEQ ID NO: 37442 - DNA, 38 bp, synthetic construct; identical to SEQ ID NO: 14455
  misc_feature 1..38: note = Probe
  source 1..38: mol_type = other DNA

SEQ ID NO: 37443 - DNA, 33 bp, synthetic construct
  misc_feature 1..33: note = Probe
  source 1..33: mol_type = other DNA
tgtgagaggtcccgggttcaaatcccggacgag

SEQ ID NO: 37444 - DNA, 20 bp, synthetic construct
  misc_feature 1..20: note = Probe
  source 1..20: mol_type = other DNA
tgttaaccgaaaggttggtg

SEQ ID NO: 37445 - DNA, 38 bp, synthetic construct; identical to SEQ ID NO: 24587
  misc_feature 1..38: note = Probe
  source 1..38: mol_type = other DNA

SEQ ID NO: 37446 - DNA, 39 bp, synthetic construct; identical to SEQ ID NO: 24588
  misc_feature 1..39: note = Probe
  source 1..39: mol_type = other DNA

SEQ ID NO: 37447 - DNA, 19 bp, synthetic construct
  misc_feature 1..19: note = Probe
  source 1..19: mol_type = other DNA
ttcaaatcacgtcggggtc

SEQ ID NO: 37448 - DNA, 18 bp, synthetic construct
  misc_feature 1..18: note = Probe
  source 1..18: mol_type = other DNA
ttcaatccccggcacctc

SEQ ID NO: 37449 - DNA, 19 bp, synthetic construct
  misc_feature 1..19: note = Probe
  source 1..19: mol_type = other DNA
ttcaatccccggcacctcc

SEQ ID NO: 37450 - DNA, 20 bp, synthetic construct
  misc_feature 1..20: note = Probe
  source 1..20: mol_type = other DNA
ttcaatccccggcacctcca

SEQ ID NO: 37451 - DNA, 23 bp, synthetic construct
  misc_feature 1..23: note = Probe
  source 1..23: mol_type = other DNA
ttcaatccccggcacctccacca

SEQ ID NO: 37452 - DNA, 18 bp, synthetic construct
  misc_feature 1..18: note = Probe
  source 1..18: mol_type = other DNA
ttccaagcagttgacccg

SEQ ID NO: 37453 - DNA, 19 bp, synthetic construct
  misc_feature 1..19: note = Probe
  source 1..19: mol_type = other DNA
ttccaagcagttgacccgg

SEQ ID NO: 37454 - DNA, 20 bp, synthetic construct
  misc_feature 1..20: note = Probe
  source 1..20: mol_type = other DNA
ttccaagcagttgacccggg

SEQ ID NO: 37455 - DNA, 19 bp, synthetic construct
  misc_feature 1..19: note = Probe
  source 1..19: mol_type = other DNA
ttcgaatcacgtcggggtc

SEQ ID NO: 37456 - DNA, 19 bp, synthetic construct
  misc_feature 1..19: note = Probe
  source 1..19: mol_type = other DNA
ttcgagccccagtggaacc

SEQ ID NO: 37457 - DNA, 20 bp, synthetic construct
  misc_feature 1..20: note = Probe
  source 1..20: mol_type = other DNA
ttcgagtcccggcggagtcg

SEQ ID NO: 37458 - DNA, 20 bp, synthetic construct
  misc_feature 1..20: note = Probe
  source 1..20: mol_type = other DNA
ttcgagtcccttcgtggtcg

SEQ ID NO: 37459 - DNA, 18 bp, synthetic construct
  misc_feature 1..18: note = Probe
  source 1..18: mol_type = other DNA
ttcgatccccagtacctc

SEQ ID NO: 37460 - DNA, 19 bp, synthetic construct
  misc_feature 1..19: note = Probe
  source 1..19: mol_type = other DNA
ttcgatccccagtacctcc

SEQ ID NO: 37461 - DNA, 18 bp, synthetic construct
  misc_feature 1..18: note = Probe
  source 1..18: mol_type = other DNA
ttcgatccccggcatctc

SEQ ID NO: 37462 - DNA, 19 bp, synthetic construct
  misc_feature 1..19: note = Probe
  source 1..19: mol_type = other DNA
ttcgatccccggcatctcc

SEQ ID NO: 37463 - DNA, 20 bp, synthetic construct
  misc_feature 1..20: note = Probe
  source 1..20: mol_type = other DNA
ttcgatccccggcatctcca

SEQ ID NO: 37464 - DNA, 42 bp, synthetic construct
  misc_feature 1..42: note = Probe
  source 1..42: mol_type = other DNA
tttacacgcagaaggtcctgggttcgagccccagtggaacca

SEQ ID NO: 37465 - DNA, 28 bp, synthetic construct
  misc_feature 1..28: note = Probe
  source 1..28: mol_type = other DNA
tttaggctccagtctcttcgggggcgtg

SEQ ID NO: 37466 - DNA, 41 bp, synthetic construct
  misc_feature 1..41: note = Probe
  source 1..41: mol_type = other DNA
ttttcacccaggcggcccgggttcgactcccggtgtgggaa

SEQ ID NO: 37467 - DNA, 28 bp, synthetic construct
  misc_feature 1..28: note = Probe
  source 1..28: mol_type = other DNA
aaaacatcagattgtgaatctgacaaca

SEQ ID NO: 37468 - DNA, 50 bp, synthetic construct; identical to SEQ ID NO: 1818
  misc_feature 1..50: note = Probe
  source 1..50: mol_type = other DNA

SEQ ID NO: 37469 - DNA, 50 bp, synthetic construct; identical to SEQ ID NO: 1830
  misc_feature 1..50: note = Probe
  source 1..50: mol_type = other DNA

SEQ ID NO: 37470 - DNA, 46 bp, synthetic construct
  misc_feature 1..46: note = Probe
  source 1..46: mol_type = other DNA
aaaagttggtggttcgagcccacccaggaacgcttgttcgagcttt

SEQ ID NO: 37471 - DNA, 50 bp, synthetic construct
  misc_feature 1..50: note = Probe
  source 1..50: mol_type = other DNA
aaaagttggtggttcgagcccacccaggaacgcttgttcgagcttttaaa

SEQ ID NO: 37472 - DNA, 50 bp, synthetic construct; identical to SEQ ID NO: 1846
  misc_feature 1..50: note = Probe
  source 1..50: mol_type = other DNA

SEQ ID NO: 37473 - DNA, 27 bp, synthetic construct
  misc_feature 1..27: note = Probe
  source 1..27: mol_type = other DNA
aaacatcagattgtgaatctgacaaca

SEQ ID NO: 37474 - DNA, 26 bp, synthetic construct
  misc_feature 1..26: note = Probe
  source 1..26: mol_type = other DNA
aaaccatttcataactttgtcaaagt

SEQ ID NO: 37475 - DNA, 50 bp, synthetic construct; identical to SEQ ID NO: 1871
  misc_feature 1..50: note = Probe
  source 1..50: mol_type = other DNA

SEQ ID NO: 37476 - DNA, 35 bp, synthetic construct; identical to SEQ ID NO: 1876
  misc_feature 1..35: note = Probe
  source 1..35: mol_type = other DNA

SEQ ID NO: 37477 - DNA, 27 bp, synthetic construct
  misc_feature 1..27: note = Probe
  source 1..27: mol_type = other DNA
aaacctagccccaaacccactccacct

SEQ ID NO: 37478 - DNA, 45 bp, synthetic construct; identical to SEQ ID NO: 1883
  misc_feature 1..45: note = Probe
  source 1..45: mol_type = other DNA

SEQ ID NO: 37479 - DNA, 50 bp, synthetic construct; identical to SEQ ID NO: 1885
  misc_feature 1..50: note = Probe
  source 1..50: mol_type = other DNA

SEQ ID NO: 37480 - DNA, 50 bp, synthetic construct; identical to SEQ ID NO: 1890
  misc_feature 1..50: note = Probe
  source 1..50: mol_type = other DNA

SEQ ID NO: 37481 - DNA, 34 bp, synthetic construct; identical to SEQ ID NO: 1893
  misc_feature 1..34: note = Probe
  source 1..34: mol_type = other DNA

SEQ ID NO: 37482 - DNA, 35 bp, synthetic construct; identical to SEQ ID NO: 1894
  misc_feature 1..35: note = Probe
  source 1..35: mol_type = other DNA

SEQ ID NO: 37483 - DNA, 38 bp, synthetic construct; identical to SEQ ID NO: 1895
  misc_feature 1..38: note = Probe
  source 1..38: mol_type = other DNA

SEQ ID NO: 37484 - DNA, 41 bp, synthetic construct; identical to SEQ ID NO: 1898
  misc_feature 1..41: note = Probe
  source 1..41: mol_type = other DNA

SEQ ID NO: 37485 - DNA, 17 bp, synthetic construct
  misc_feature 1..17: note = Probe
  source 1..17: mol_type = other DNA
aaagacaccccccacag

SEQ ID NO: 37486 - DNA, 27 bp, synthetic construct
  misc_feature 1..27: note = Probe
  source 1..27: mol_type = other DNA
aaagacaccccccacagtttatgtagc

SEQ ID NO: 37487 - DNA, 28 bp, synthetic construct
  misc_feature 1..28: note = Probe
  source 1..28: mol_type = other DNA
aaagacaccccccacagtttatgtagct

SEQ ID NO: 37488 - DNA, 29 bp, synthetic construct
  misc_feature 1..29: note = Probe
  source 1..29: mol_type = other DNA
aaagacaccccccacagtttatgtagctt

SEQ ID NO: 37489 - DNA, 30 bp, synthetic construct; identical to SEQ ID NO: 1907
  misc_feature 1..30: note = Probe
  source 1..30: mol_type = other DNA

SEQ ID NO: 37490 - DNA, 31 bp, synthetic construct; identical to SEQ ID NO: 14583
  misc_feature 1..31: note = Probe
  source 1..31: mol_type = other DNA

SEQ ID NO: 37491 - DNA, 32 bp, synthetic construct; identical to SEQ ID NO: 1908
  misc_feature 1..32: note = Probe
  source 1..32: mol_type = other DNA

SEQ ID NO: 37492 - DNA, 33 bp, synthetic construct; identical to SEQ ID NO: 1909
  misc_feature 1..33: note = Probe
  source 1..33: mol_type = other DNA

SEQ ID NO: 37493 - DNA, 34 bp, synthetic construct; identical to SEQ ID NO: 14586
  misc_feature 1..34: note = Probe
  source 1..34: mol_type = other DNA

SEQ ID NO: 37494 - DNA, 35 bp, synthetic construct; identical to SEQ ID NO: 1910
  misc_feature 1..35: note = Probe
  source 1..35: mol_type = other DNA

SEQ ID NO: 37495 - DNA, 36 bp, synthetic construct; identical to SEQ ID NO: 1911
  misc_feature 1..36: note = Probe
  source 1..36: mol_type = other DNA

SEQ ID NO: 37496 - DNA, 39 bp, synthetic construct; identical to SEQ ID NO: 1914
  misc_feature 1..39: note = Probe
  source 1..39: mol_type = other DNA

SEQ ID NO: 37497 - DNA, 50 bp, synthetic construct; identical to SEQ ID NO: 1918
  misc_feature 1..50: note = Probe
  source 1..50: mol_type = other DNA

SEQ ID NO: 37498 - DNA, 33 bp, synthetic construct; identical to SEQ ID NO: 1926
  misc_feature 1..33: note = Probe
  source 1..33: mol_type = other DNA

SEQ ID NO: 37499 - DNA, 34 bp, synthetic construct; identical to SEQ ID NO: 1927
  misc_feature 1..34: note = Probe
  source 1..34: mol_type = other DNA

SEQ ID NO: 37500 - DNA, 36 bp, synthetic construct; identical to SEQ ID NO: 1929
  misc_feature 1..36: note = Probe
  source 1..36: mol_type = other DNA

SEQ ID NO: 37501 - DNA, 37 bp, synthetic construct; identical to SEQ ID NO: 1930
  misc_feature 1..37: note = Probe
  source 1..37: mol_type = other DNA

SEQ ID NO: 37502 - DNA, 50 bp, synthetic construct; identical to SEQ ID NO: 1962
  misc_feature 1..50: note = Probe
  source 1..50: mol_type = other DNA

SEQ ID NO: 37503 - DNA, 27 bp, synthetic construct
  misc_feature 1..27: note = Probe
  source 1..27: mol_type = other DNA
aaagctcacaagaactgctaactcatg

SEQ ID NO: 37504 - DNA, 30 bp, synthetic construct; identical to SEQ ID NO: 26093
  misc_feature 1..30: note = Probe
  source 1..30: mol_type = other DNA

SEQ ID NO: 37505 - DNA, 29 bp, synthetic construct
  misc_feature 1..29: note = Probe
  source 1..29: mol_type = other DNA
aaaggtccccggttcgaaaccgggcggaa

SEQ ID NO: 37506 - DNA, 30 bp, synthetic construct; identical to SEQ ID NO: 14636
  misc_feature 1..30: note = Probe
  source 1..30: mol_type = other DNA

SEQ ID NO: 37507 - DNA, 30 bp, synthetic construct; identical to SEQ ID NO: 14640
  misc_feature 1..30: note = Probe
  source 1..30: mol_type = other DNA

SEQ ID NO: 37508 - DNA, 30 bp, synthetic construct; identical to SEQ ID NO: 12470
  misc_feature 1..30: note = Probe
  source 1..30: mol_type = other DNA

SEQ ID NO: 37509 - DNA, 46 bp, synthetic construct
  misc_feature 1..46: note = Probe
  source 1..46: mol_type = other DNA
aaaggttggtggttcgagcccacccagggacgcctctttgagcttt

SEQ ID NO: 37510 - DNA, 45 bp, synthetic construct
  misc_feature 1..45: note = Probe
  source 1..45: mol_type = other DNA
aaaggttggtggttcgagcccacccagggacgcgtggtgactttt

SEQ ID NO: 37511 - DNA, 50 bp, synthetic construct
  misc_feature 1..50: note = Probe
  source 1..50: mol_type = other DNA
aaaggttggtggttcgagcccacccagggacgcttgtttgagcttttaaa

SEQ ID NO: 37512 - DNA, 46 bp, synthetic construct
  misc_feature 1..46: note = Probe
  source 1..46: mol_type = other DNA
aaaggttggtggttcgagcccacccagggacggtcagtgcttcttt

SEQ ID NO: 37513 - DNA, 50 bp, synthetic construct; identical to SEQ ID NO: 1989
  misc_feature 1..50: note = Probe
  source 1..50: mol_type = other DNA

SEQ ID NO: 37514 - DNA, 33 bp, synthetic construct; identical to SEQ ID NO: 26122
  misc_feature 1..33: note = Probe
  source 1..33: mol_type = other DNA

SEQ ID NO: 37515 - DNA, 50 bp, synthetic construct; identical to SEQ ID NO: 26127
  misc_feature 1..50: note = Probe
  source 1..50: mol_type = other DNA

SEQ ID NO: 37516 - DNA, 20 bp, synthetic construct
  misc_feature 1..20: note = Probe
  source 1..20: mol_type = other DNA
aaatagctcagttgggagag

SEQ ID NO: 37517 - DNA, 36 bp, synthetic construct; identical to SEQ ID NO: 2000
  misc_feature 1..36: note = Probe
  source 1..36: mol_type = other DNA

SEQ ID NO: 37518 - DNA, 37 bp, synthetic construct; identical to SEQ ID NO: 2001
  misc_feature 1..37: note = Probe
  source 1..37: mol_type = other DNA

SEQ ID NO: 37519 - DNA, 38 bp, synthetic construct; identical to SEQ ID NO: 2002
  misc_feature 1..38: note = Probe
  source 1..38: mol_type = other DNA

SEQ ID NO: 37520 - DNA, 50 bp, synthetic construct; identical to SEQ ID NO: 36
  misc_feature 1..50: note = Probe
  source 1..50: mol_type = other DNA

SEQ ID NO: 37521 - DNA, 39 bp, synthetic construct; identical to SEQ ID NO: 2009
  misc_feature 1..39: note = Probe
  source 1..39: mol_type = other DNA

SEQ ID NO: 37522 - DNA, 49 bp, synthetic construct; identical to SEQ ID NO: 2012
  misc_feature 1..49: note = Probe
  source 1..49: mol_type = other DNA

SEQ ID NO: 37523 - DNA, 50 bp, synthetic construct; identical to SEQ ID NO: 2013
  misc_feature 1..50: note = Probe
  source 1..50: mol_type = other DNA

SEQ ID NO: 37524 - DNA, 23 bp, synthetic construct
  misc_feature 1..23: note = Probe
  source 1..23: mol_type = other DNA
aacaatggcacggcaaggggctc

SEQ ID NO: 37525 - DNA, 18 bp, synthetic construct
  misc_feature 1..18: note = Probe
  source 1..18: mol_type = other DNA
aacacaaagcacccaact

SEQ ID NO: 37526 - DNA, 20 bp, synthetic construct
  misc_feature 1..20: note = Probe
  source 1..20: mol_type = other DNA
aacacaaagcacccaactta

SEQ ID NO: 37527 - DNA, 22 bp, synthetic construct
  misc_feature 1..22: note = Probe
  source 1..22: mol_type = other DNA
aacacaaagcacccaacttaca

SEQ ID NO: 37528 - DNA, 25 bp, synthetic construct
  misc_feature 1..25: note = Probe
  source 1..25: mol_type = other DNA
aacacaaagcacccaacttacactt

SEQ ID NO: 37529 - DNA, 26 bp, synthetic construct
  misc_feature 1..26: note = Probe
  source 1..26: mol_type = other DNA
aacacaaagcacccaacttacactta

SEQ ID NO: 37530 - DNA, 27 bp, synthetic construct
  misc_feature 1..27: note = Probe
  source 1..27: mol_type = other DNA
aacacaaagcacccaacttacacttag

SEQ ID NO: 37531 - DNA, 30 bp, synthetic construct; identical to SEQ ID NO: 2027
  misc_feature 1..30: note = Probe
  source 1..30: mol_type = other DNA

SEQ ID NO: 37532 - DNA, 31 bp, synthetic construct; identical to SEQ ID NO: 2028
  misc_feature 1..31: note = Probe
  source 1..31: mol_type = other DNA

SEQ ID NO: 37533 - DNA, 32 bp, synthetic construct; identical to SEQ ID NO: 2029
  misc_feature 1..32: note = Probe
  source 1..32: mol_type = other DNA

SEQ ID NO: 37534 - DNA, 33 bp, synthetic construct; identical to SEQ ID NO: 2030
  misc_feature 1..33: note = Probe
  source 1..33: mol_type = other DNA

SEQ ID NO: 37535 - DNA, 34 bp, synthetic construct
  misc_feature 1..34: note = Probe
  source 1..34: mol_type = other DNA
aacacaaagcacccaacttacacttaggagattt

SEQ ID NO: 37536 - DNA, 36 bp, synthetic construct; identical to SEQ ID NO: 2031
  misc_feature 1..36: note = Probe
  source 1..36: mol_type = other DNA

SEQ ID NO: 37537 - DNA, 37 bp, synthetic construct; identical to SEQ ID NO: 2032
  misc_feature 1..37: note = Probe
  source 1..37: mol_type = other DNA

SEQ ID NO: 37538 - DNA, 20 bp, synthetic construct
  misc_feature 1..20: note = Probe
  source 1..20: mol_type = other DNA
aacacctctttacagtgaaa

SEQ ID NO: 37539 - DNA, 21 bp, synthetic construct
  misc_feature 1..21: note = Probe
  source 1..21: mol_type = other DNA
aacacctctttacagtgaaat

SEQ ID NO: 37540 - DNA, 19 bp, synthetic construct
  misc_feature 1..19: note = Probe
  source 1..19: mol_type = other DNA
aacacgcgaaaggtccccg

SEQ ID NO: 37541 - DNA, 20 bp, synthetic construct
  misc_feature 1..20: note = Probe
  source 1..20: mol_type = other DNA
aacacgcgaaaggtccccgg

SEQ ID NO: 37542 - DNA, 21 bp, synthetic construct
  misc_feature 1..21: note = Probe
  source 1..21: mol_type = other DNA
aacacgcgaaaggtccccggt

SEQ ID NO: 37543 - DNA, 31 bp, synthetic construct; identical to SEQ ID NO: 2039
  misc_feature 1..31: note = Probe
  source 1..31: mol_type = other DNA

SEQ ID NO: 37544 - DNA, 36 bp, synthetic construct; identical to SEQ ID NO: 26201
  misc_feature 1..36: note = Probe
  source 1..36: mol_type = other DNA

SEQ ID NO: 37545 - DNA, 28 bp, synthetic construct
  misc_feature 1..28: note = Probe
  source 1..28: mol_type = other DNA
aacagctaaggactgcaaaaccccactc

SEQ ID NO: 37546 - DNA, 29 bp, synthetic construct
  misc_feature 1..29: note = Probe
  source 1..29: mol_type = other DNA
aacagctaaggactgcaaaaccccactct

SEQ ID NO: 37547 - DNA, 29 bp, synthetic construct
  misc_feature 1..29: note = Probe
  source 1..29: mol_type = other DNA
aacagctatccattggtcttaggccccaa

SEQ ID NO: 37548 - DNA, 50 bp, synthetic construct; identical to SEQ ID NO: 2044
  misc_feature 1..50: note = Probe
  source 1..50: mol_type = other DNA

SEQ ID NO: 37549 - DNA, 33 bp, synthetic construct; identical to SEQ ID NO: 2047
  misc_feature 1..33: note = Probe
  source 1..33: mol_type = other DNA

SEQ ID NO: 37550 - DNA, 39 bp, synthetic construct; identical to SEQ ID NO: 2051
  misc_feature 1..39: note = Probe
  source 1..39: mol_type = other DNA

SEQ ID NO: 37551 - DNA, 29 bp, synthetic construct
  misc_feature 1..29: note = Probe
  source 1..29: mol_type = other DNA
aaccaaaacatcagattgtgaatctgaca

SEQ ID NO: 37552 - DNA, 32 bp, synthetic construct; identical to SEQ ID NO: 2065
  misc_feature 1..32: note = Probe
  source 1..32: mol_type = other DNA

SEQ ID NO: 37553 - DNA, 35 bp, synthetic construct; identical to SEQ ID NO: 14768
  misc_feature 1..35: note = Probe
  source 1..35: mol_type = other DNA

SEQ ID NO: 37554 - DNA, 49 bp, synthetic construct; identical to SEQ ID NO: 46
  misc_feature 1..49: note = Probe
  source 1..49: mol_type = other DNA

SEQ ID NO: 37555 - DNA, 18 bp, synthetic construct
  misc_feature 1..18: note = Probe
  source 1..18: mol_type = other DNA
aaccaacacctctttaca

SEQ ID NO: 37556 - DNA, 21 bp, synthetic construct
  misc_feature 1..21: note = Probe
  source 1..21: mol_type = other DNA
aaccaacacctctttacagtg

SEQ ID NO: 37557 - DNA, 25 bp, synthetic construct
  misc_feature 1..25: note = Probe
  source 1..25: mol_type = other DNA
aaccaacacctctttacagtgaaat

SEQ ID NO: 37558 - DNA, 39 bp, synthetic construct; identical to SEQ ID NO: 2079
  misc_feature 1..39: note = Probe
  source 1..39: mol_type = other DNA

SEQ ID NO: 37559 - DNA, 39 bp, synthetic construct; identical to SEQ ID NO: 2080
  misc_feature 1..39: note = Probe
  source 1..39: mol_type = other DNA

SEQ ID NO: 37560 - DNA, 23 bp, synthetic construct
  misc_feature 1..23: note = Probe
  source 1..23: mol_type = other DNA
aaccgagcgtccaagctctttcc

SEQ ID NO: 37561 - DNA, 24 bp, synthetic construct
  misc_feature 1..24: note = Probe
  source 1..24: mol_type = other DNA
aaccgagcgtccaagctctttcca

SEQ ID NO: 37562 - DNA, 25 bp, synthetic construct
  misc_feature 1..25: note = Probe
  source 1..25: mol_type = other DNA
aaccgagcgtccaagctctttccat

SEQ ID NO: 37563 - DNA, 26 bp, synthetic construct
  misc_feature 1..26: note = Probe
  source 1..26: mol_type = other DNA
aaccgagcgtccaagctctttccatt

SEQ ID NO: 37564 - DNA, 27 bp, synthetic construct
  misc_feature 1..27: note = Probe
  source 1..27: mol_type = other DNA
aaccgagcgtccaagctctttccattt

SEQ ID NO: 37565 - DNA, 28 bp, synthetic construct
  misc_feature 1..28: note = Probe
  source 1..28: mol_type = other DNA
aaccgagcgtccaagctctttccatttt

SEQ ID NO: 37566 - DNA, 29 bp, synthetic construct
  misc_feature 1..29: note = Probe
  source 1..29: mol_type = other DNA
aaccgagcgtccaagctctttccattttt

SEQ ID NO: 37567 - DNA, 33 bp, synthetic construct; identical to SEQ ID NO: 2103
  misc_feature 1..33: note = Probe
  source 1..33: mol_type = other DNA

SEQ ID NO: 37568 - DNA, 34 bp, synthetic construct; identical to SEQ ID NO: 2104
  misc_feature 1..34: note = Probe
  source 1..34: mol_type = other DNA

SEQ ID NO: 37569 - DNA, 18 bp, synthetic construct
  misc_feature 1..18: note = Probe
  source 1..18: mol_type = other DNA
aaccgggcggaaacacct

SEQ ID NO: 37570 - DNA, 20 bp, synthetic construct
  misc_feature 1..20: note = Probe
  source 1..20: mol_type = other DNA
aaccgggcggaaacacgttt

SEQ ID NO: 37571 - DNA, 26 bp, synthetic construct
  misc_feature 1..26: note = Probe
  source 1..26: mol_type = other DNA
aacctagccccaaacccactccacct

SEQ ID NO: 37572 - DNA, 26 bp, synthetic construct
  misc_feature 1..26: note = Probe
  source 1..26: mol_type = other DNA
aacctcagagggggcagctgccattt

SEQ ID NO: 37573 - DNA, 50 bp, synthetic construct; identical to SEQ ID NO: 2121
  misc_feature 1..50: note = Probe
  source 1..50: mol_type = other DNA

SEQ ID NO: 37574 - DNA, 50 bp, synthetic construct; identical to SEQ ID NO: 2125
  misc_feature 1..50: note = Probe
  source 1..50: mol_type = other DNA

SEQ ID NO: 37575 - DNA, 21 bp, synthetic construct
  misc_feature 1..21: note = Probe
  source 1..21: mol_type = other DNA
aacgcgggttcgattcccggg

SEQ ID NO: 37576 - DNA, 33 bp, synthetic construct; identical to SEQ ID NO: 2142
  misc_feature 1..33: note = Probe
  source 1..33: mol_type = other DNA

SEQ ID NO: 37577 - DNA, 34 bp, synthetic construct; identical to SEQ ID NO: 2143
  misc_feature 1..34: note = Probe
  source 1..34: mol_type = other DNA

SEQ ID NO: 37578 - DNA, 35 bp, synthetic construct; identical to SEQ ID NO: 2144
  misc_feature 1..35: note = Probe
  source 1..35: mol_type = other DNA

SEQ ID NO: 37579 - DNA, 36 bp, synthetic construct; identical to SEQ ID NO: 2145
  misc_feature 1..36: note = Probe
  source 1..36: mol_type = other DNA

SEQ ID NO: 37580 - DNA, 37 bp, synthetic construct; identical to SEQ ID NO: 2146
  misc_feature 1..37: note = Probe
  source 1..37: mol_type = other DNA

SEQ ID NO: 37581 - DNA, 38 bp, synthetic construct; identical to SEQ ID NO: 2147
  misc_feature 1..38: note = Probe
  source 1..38: mol_type = other DNA

SEQ ID NO: 37582 - DNA, 24 bp, synthetic construct
  misc_feature 1..24: note = Probe
  source 1..24: mol_type = other DNA
aactgctaactcatgcccccatgt

SEQ ID NO: 37583 - DNA, 42 bp, synthetic construct; identical to SEQ ID NO: 2161
  misc_feature 1..42: note = Probe
  source 1..42: mol_type = other DNA

SEQ ID NO: 37584 - DNA, 46 bp, synthetic construct; identical to SEQ ID NO: 2165
  misc_feature 1..46: note = Probe
  source 1..46: mol_type = other DNA

SEQ ID NO: 37585 - DNA, 50 bp, synthetic construct; identical to SEQ ID NO: 2167
  misc_feature 1..50: note = Probe
  source 1..50: mol_type = other DNA

SEQ ID NO: 37586 - DNA, 38 bp, synthetic construct; identical to SEQ ID NO: 61
  misc_feature 1..38: note = Probe
  source 1..38: mol_type = other DNA

SEQ ID NO: 37587 - DNA, 50 bp, synthetic construct; identical to SEQ ID NO: 2180
  misc_feature 1..50: note = Probe
  source 1..50: mol_type = other DNA

SEQ ID NO: 37588 - DNA, 20 bp, synthetic construct
  misc_feature 1..20: note = Probe
  source 1..20: mol_type = other DNA
aacttaacttgaccgctctg

SEQ ID NO: 37589 - DNA, 24 bp, synthetic construct
  misc_feature 1..24: note = Probe
  source 1..24: mol_type = other DNA
aacttaacttgaccgctctgagct

SEQ ID NO: 37590 - DNA, 22 bp, synthetic construct
  misc_feature 1..22: note = Probe
  source 1..22: mol_type = other DNA
aacttacacttaggagatttca

SEQ ID NO: 37591 - DNA, 23 bp, synthetic construct
  misc_feature 1..23: note = Probe
  source 1..23: mol_type = other DNA
aacttacacttaggagatttcaa

SEQ ID NO: 37592 - DNA, 36 bp, synthetic construct; identical to SEQ ID NO: 2188
  misc_feature 1..36: note = Probe
  source 1..36: mol_type = other DNA

SEQ ID NO: 37593 - DNA, 38 bp, synthetic construct; identical to SEQ ID NO: 2190
  misc_feature 1..38: note = Probe
  source 1..38: mol_type = other DNA

SEQ ID NO: 37594 - DNA, 44 bp, synthetic construct; identical to SEQ ID NO: 2194
  misc_feature 1..44: note = Probe
  source 1..44: mol_type = other DNA

SEQ ID NO: 37595 - DNA, 45 bp, synthetic construct; identical to SEQ ID NO: 2195
  misc_feature 1..45: note = Probe
  source 1..45: mol_type = other DNA

SEQ ID NO: 37596 - DNA, 46 bp, synthetic construct; identical to SEQ ID NO: 2196
  misc_feature 1..46: note = Probe
  source 1..46: mol_type = other DNA

SEQ ID NO: 37597 - DNA, 50 bp, synthetic construct; identical to SEQ ID NO: 2197
  misc_feature 1..50: note = Probe
  source 1..50: mol_type = other DNA

SEQ ID NO: 37598 - DNA, 45 bp, synthetic construct; identical to SEQ ID NO: 2203
  misc_feature 1..45: note = Probe
  source 1..45: mol_type = other DNA

SEQ ID NO: 37599 - DNA, 31 bp, synthetic construct; identical to SEQ ID NO: 65
  misc_feature 1..31: note = Probe
  source 1..31: mol_type = other DNA

SEQ ID NO: 37600 - DNA, 32 bp, synthetic construct; identical to SEQ ID NO: 2206
  misc_feature 1..32: note = Probe
  source 1..32: mol_type = other DNA

SEQ ID NO: 37601 - DNA, 33 bp, synthetic construct; identical to SEQ ID NO: 2207
  misc_feature 1..33: note = Probe
  source 1..33: mol_type = other DNA

SEQ ID NO: 37602 - DNA, 34 bp, synthetic construct; identical to SEQ ID NO: 2208
  misc_feature 1..34: note = Probe
  source 1..34: mol_type = other DNA

SEQ ID NO: 37603 - DNA, 35 bp, synthetic construct; identical to SEQ ID NO: 2209
  misc_feature 1..35: note = Probe
  source 1..35: mol_type = other DNA

SEQ ID NO: 37604 - DNA, 36 bp, synthetic construct; identical to SEQ ID NO: 2210
  misc_feature 1..36: note = Probe
  source 1..36: mol_type = other DNA

SEQ ID NO: 37605 - DNA, 37 bp, synthetic construct; identical to SEQ ID NO: 2211
  misc_feature 1..37: note = Probe
  source 1..37: mol_type = other DNA

SEQ ID NO: 37606 - DNA, 18 bp, synthetic construct
  misc_feature 1..18: note = Probe
  source 1..18: mol_type = other DNA
aagaactgctaactcatg

SEQ ID NO: 37607 - DNA, 50 bp, synthetic construct; identical to SEQ ID NO: 2230
  misc_feature 1..50: note = Probe
  source 1..50: mol_type = other DNA

SEQ ID NO: 37608 - DNA, 31 bp, synthetic construct; identical to SEQ ID NO: 2232
  misc_feature 1..31: note = Probe
  source 1..31: mol_type = other DNA

SEQ ID NO: 37609 - DNA, 32 bp, synthetic construct; identical to SEQ ID NO: 2233
  misc_feature 1..32: note = Probe
  source 1..32: mol_type = other DNA

SEQ ID NO: 37610 - DNA, 27 bp, synthetic construct
  misc_feature 1..27: note = Probe
  source 1..27: mol_type = other DNA
aagacaccccccacagtttatgtagct

SEQ ID NO: 37611 - DNA, 29 bp, synthetic construct
  misc_feature 1..29: note = Probe
  source 1..29: mol_type = other DNA
aagacaccccccacagtttatgtagctta

SEQ ID NO: 37612 - DNA, 31 bp, synthetic construct; identical to SEQ ID NO: 2236
  misc_feature 1..31: note = Probe
  source 1..31: mol_type = other DNA

SEQ ID NO: 37613 - DNA, 32 bp, synthetic construct; identical to SEQ ID NO: 2237
  misc_feature 1..32: note = Probe
  source 1..32: mol_type = other DNA

SEQ ID NO: 37614 - DNA, 33 bp, synthetic construct; identical to SEQ ID NO: 2238
  misc_feature 1..33: note = Probe
  source 1..33: mol_type = other DNA

SEQ ID NO: 37615 - DNA, 34 bp, synthetic construct; identical to SEQ ID NO: 2239
  misc_feature 1..34: note = Probe
  source 1..34: mol_type = other DNA

SEQ ID NO: 37616 - DNA, 31 bp, synthetic construct; identical to SEQ ID NO: 2247
  misc_feature 1..31: note = Probe
  source 1..31: mol_type = other DNA

SEQ ID NO: 37617 - DNA, 30 bp, synthetic construct; identical to SEQ ID NO: 2251
  misc_feature 1..30: note = Probe
  source 1..30: mol_type = other DNA

SEQ ID NO: 37618 - DNA, 39 bp, synthetic construct; identical to SEQ ID NO: 15014
  misc_feature 1..39: note = Probe
  source 1..39: mol_type = other DNA

SEQ ID NO: 37619 - DNA, 30 bp, synthetic construct; identical to SEQ ID NO: 26502
  misc_feature 1..30: note = Probe
  source 1..30: mol_type = other DNA

SEQ ID NO: 37620 - DNA, 32 bp, synthetic construct; identical to SEQ ID NO: 2257
  misc_feature 1..32: note = Probe
  source 1..32: mol_type = other DNA

SEQ ID NO: 37621 - DNA, 33 bp, synthetic construct; identical to SEQ ID NO: 2258
  misc_feature 1..33: note = Probe
  source 1..33: mol_type = other DNA

SEQ ID NO: 37622 - DNA, 34 bp, synthetic construct; identical to SEQ ID NO: 2259
  misc_feature 1..34: note = Probe
  source 1..34: mol_type = other DNA

SEQ ID NO: 37623 - DNA, 35 bp, synthetic construct; identical to SEQ ID NO: 15025
  misc_feature 1..35: note = Probe
  source 1..35: mol_type = other DNA

SEQ ID NO: 37624 - DNA, 36 bp, synthetic construct; identical to SEQ ID NO: 2260
  misc_feature 1..36: note = Probe
  source 1..36: mol_type = other DNA

SEQ ID NO: 37625 - DNA, 31 bp, synthetic construct
  misc_feature 1..31: note = Probe
  source 1..31: mol_type = other DNA
aagattctaggttcgactcctggctggctcg

SEQ ID NO: 37626 - DNA, 28 bp, synthetic construct
  misc_feature 1..28: note = Probe
  source 1..28: mol_type = other DNA
aagattgagggttcgagtcccttcgtgg

SEQ ID NO: 37627 - DNA, 30 bp, synthetic construct
  misc_feature 1..30: note = Probe
  source 1..30: mol_type = other DNA
aagattgagggttcgagtcccttcgtggtc

SEQ ID NO: 37628 - DNA, 37 bp, synthetic construct
  misc_feature 1..37: note = Probe
  source 1..37: mol_type = other DNA
aagattgagggttcgagtcccttcgtggtcgtcgttt

SEQ ID NO: 37629 - DNA, 34 bp, synthetic construct; identical to SEQ ID NO: 2266
  misc_feature 1..34: note = Probe
  source 1..34: mol_type = other DNA

SEQ ID NO: 37630 - DNA, 50 bp, synthetic construct
  misc_feature 1..50: note = Probe
  source 1..50: mol_type = other DNA
aagattgagggttcgagtcccttcgtggtcgttgccatgttaacgttttc

SEQ ID NO: 37631 - DNA, 35 bp, synthetic construct; identical to SEQ ID NO: 77
  misc_feature 1..35: note = Probe
  source 1..35: mol_type = other DNA

SEQ ID NO: 37632 - DNA, 50 bp, synthetic construct; identical to SEQ ID NO: 2271
  misc_feature 1..50: note = Probe
  source 1..50: mol_type = other DNA

SEQ ID NO: 37633 - DNA, 30 bp, synthetic construct; identical to SEQ ID NO: 2277
  misc_feature 1..30: note = Probe
  source 1..30: mol_type = other DNA

SEQ ID NO: 37634 - DNA, 50 bp, synthetic construct; identical to SEQ ID NO: 2283
  misc_feature 1..50: note = Probe
  source 1..50: mol_type = other DNA

SEQ ID NO: 37635 - DNA, 50 bp, synthetic construct
  misc_feature 1..50: note = Probe
  source 1..50: mol_type = other DNA
aagcaggcttataggtggccccatggtgtaatggttagcactctggactt

SEQ ID NO: 37636 - DNA, 34 bp, synthetic construct
  misc_feature 1..34: note = Probe
  source 1..34: mol_type = other DNA
aagcagttgacccgggttcgattcccggccaacg

SEQ ID NO: 37637 - DNA, 35 bp, synthetic construct
  misc_feature 1..35: note = Probe
  source 1..35: mol_type = other DNA
aagcagttgacccgggttcgattcccggccaacgc

SEQ ID NO: 37638 - DNA, 32 bp, synthetic construct
  misc_feature 1..32: note = Probe
  source 1..32: mol_type = other DNA
aagcatagctgccttccaagcagttgacccgg

SEQ ID NO: 37639 - DNA, 50 bp, synthetic construct; identical to SEQ ID NO: 2291
  misc_feature 1..50: note = Probe
  source 1..50: mol_type = other DNA

SEQ ID NO: 37640 - DNA, 50 bp, synthetic construct
  misc_feature 1..50: note = Probe
  source 1..50: mol_type = other DNA
aagccagggattgtgggttcgagtcccatctggggtggcctgtgactttt

SEQ ID NO: 37641 - DNA, 30 bp, synthetic construct; identical to SEQ ID NO: 15091
  misc_feature 1..30: note = Probe
  source 1..30: mol_type = other DNA

SEQ ID NO: 37642 - DNA, 28 bp, synthetic construct
  misc_feature 1..28: note = Probe
  source 1..28: mol_type = other DNA
aagctatcgggcccataccccgaaaatg

SEQ ID NO: 37643 - DNA, 29 bp, synthetic construct
  misc_feature 1..29: note = Probe
  source 1..29: mol_type = other DNA
aagctatcgggcccataccccgaaaatgt

SEQ ID NO: 37644 - DNA, 30 bp, synthetic construct; identical to SEQ ID NO: 2306
  misc_feature 1..30: note = Probe
  source 1..30: mol_type = other DNA

SEQ ID NO: 37645 - DNA, 31 bp, synthetic construct; identical to SEQ ID NO: 2307
  misc_feature 1..31: note = Probe
  source 1..31: mol_type = other DNA

SEQ ID NO: 37646 - DNA, 32 bp, synthetic construct; identical to SEQ ID NO: 2308
  misc_feature 1..32: note = Probe
  source 1..32: mol_type = other DNA

SEQ ID NO: 37647 - DNA, 34 bp, synthetic construct; identical to SEQ ID NO: 2310
  misc_feature 1..34: note = Probe
  source 1..34: mol_type = other DNA

SEQ ID NO: 37648 - DNA, 35 bp, synthetic construct; identical to SEQ ID NO: 2311
  misc_feature 1..35: note = Probe
  source 1..35: mol_type = other DNA

SEQ ID NO: 37649 - DNA, 50 bp, synthetic construct; identical to SEQ ID NO: 80
  misc_feature 1..50: note = Probe
  source 1..50: mol_type = other DNA

SEQ ID NO: 37650 - DNA, 26 bp, synthetic construct
  misc_feature 1..26: note = Probe
  source 1..26: mol_type = other DNA
aagctcacaagaactgctaactcatg

SEQ ID NO: 37651 - DNA, 50 bp, synthetic construct
  misc_feature 1..50: note = Probe
  source 1..50: mol_type = other DNA
aaggaggccggttagctcagttggttagagcgtggtgctaataacgccaa

SEQ ID NO: 37652 - DNA, 29 bp, synthetic construct
  misc_feature 1..29: note = Probe
  source 1..29: mol_type = other DNA
aagggcttagcttaattaaagtggctgat

SEQ ID NO: 37653 - DNA, 50 bp, synthetic construct
  misc_feature 1..50: note = Probe
  source 1..50: mol_type = other DNA
aagggcttagcttaattaaagtggctgatttgcgttcagttgatgcagag

SEQ ID NO: 37654 - DNA, 32 bp, synthetic construct; identical to SEQ ID NO: 2344
  misc_feature 1..32: note = Probe
  source 1..32: mol_type = other DNA

SEQ ID NO: 37655 - DNA, 50 bp, synthetic construct; identical to SEQ ID NO: 2358
  misc_feature 1..50: note = Probe
  source 1..50: mol_type = other DNA

SEQ ID NO: 37656 - DNA, 28 bp, synthetic construct
  misc_feature 1..28: note = Probe
  source 1..28: mol_type = other DNA
aaggtccccggttcgaaaccgggcggaa

SEQ ID NO: 37657 - DNA, 38 bp, synthetic construct
  misc_feature 1..38: note = Probe
  source 1..38: mol_type = other DNA
aaggtccccggttcgaaactgggcggaaacagaggttt

SEQ ID NO: 37658 - DNA, 21 bp, synthetic construct
  misc_feature 1..21: note = Probe
  source 1..21: mol_type = other DNA
aaggtccctggttcaatcccg

SEQ ID NO: 37659 - DNA, 29 bp, synthetic construct
  misc_feature 1..29: note = Probe
  source 1..29: mol_type = other DNA
aaggtccctggttcaatcccgggtttcgg

SEQ ID NO: 37660 - DNA, 21 bp, synthetic construct
  misc_feature 1..21: note = Probe
  source 1..21: mol_type = other DNA
aaggtccctggttcgatcccg

SEQ ID NO: 37661 - DNA, 28 bp, synthetic construct
  misc_feature 1..28: note = Probe
  source 1..28: mol_type = other DNA
aaggtccctggttcgatcccgggtttcg

SEQ ID NO: 37662 - DNA, 30 bp, synthetic construct
  misc_feature 1..30: note = Probe
  source 1..30: mol_type = other DNA
aaggtccctggttcgatcccgggtttcggc

SEQ ID NO: 37663 - DNA, 34 bp, synthetic construct
  misc_feature 1..34: note = Probe
  source 1..34: mol_type = other DNA
aaggtccctggttcgatcccgggtttcggcactt

SEQ ID NO: 37664 - DNA, 34 bp, synthetic construct
  misc_feature 1..34: note = Probe
  source 1..34: mol_type = other DNA
aaggtccctggttcgatcccgggtttcggcagct

SEQ ID NO: 37665 - DNA, 34 bp, synthetic construct
  misc_feature 1..34: note = Probe
  source 1..34: mol_type = other DNA
aaggtccctggttcgatcccgggtttcggcaggg

SEQ ID NO: 37666 - DNA, 34 bp, synthetic construct
  misc_feature 1..34: note = Probe
  source 1..34: mol_type = other DNA
aaggtcctgagttcgaacctcagagggggcagct

SEQ ID NO: 37667 - DNA, 41 bp, synthetic construct; identical to SEQ ID NO: 15147
  misc_feature 1..41: note = Probe
  source 1..41: mol_type = other DNA

SEQ ID NO: 37668 - DNA, 21 bp, synthetic construct
  misc_feature 1..21: note = Probe
  source 1..21: mol_type = other DNA
aaggtcctgggttcgagcccc

SEQ ID NO: 37669 - DNA, 28 bp, synthetic construct
  misc_feature 1..28: note = Probe
  source 1..28: mol_type = other DNA
aaggtcctgggttcgagccccagtggaa

SEQ ID NO: 37670 - DNA, 31 bp, synthetic construct; identical to SEQ ID NO: 15149
  misc_feature 1..31: note = Probe
  source 1..31: mol_type = other DNA

SEQ ID NO: 37671 - DNA, 34 bp, synthetic construct; identical to SEQ ID NO: 2360
  misc_feature 1..34: note = Probe
  source 1..34: mol_type = other DNA

SEQ ID NO: 37672 - DNA, 42 bp, synthetic construct
  misc_feature 1..42: note = Probe
  source 1..42: mol_type = other DNA
aaggtcgtgagttcgagcctcacacggggcagtctaacgttt

SEQ ID NO: 37673 - DNA, 34 bp, synthetic construct; identical to SEQ ID NO: 15156
  misc_feature 1..34: note = Probe
  source 1..34: mol_type = other DNA

SEQ ID NO: 37674 - DNA, 31 bp, synthetic construct
  misc_feature 1..31: note = Probe
  source 1..31: mol_type = other DNA
aaggttccgggttcgagtcccggcggagtcg

SEQ ID NO: 37675 - DNA, 30 bp, synthetic construct
  misc_feature 1..30: note = Probe
  source 1..30: mol_type = other DNA
aaggttgcgtgttcaagtcacgtcggggtc

SEQ ID NO: 37676 - DNA, 31 bp, synthetic construct
  misc_feature 1..31: note = Probe
  source 1..31: mol_type = other DNA
aaggttgtgggttcgagtcccaccagagtcg

SEQ ID NO: 37677 - DNA, 35 bp, synthetic construct
  misc_feature 1..35: note = Probe
  source 1..35: mol_type = other DNA
aaggttgtgggttcgagtcccaccagagtcgcttt

SEQ ID NO: 37678 - DNA, 36 bp, synthetic construct; identical to SEQ ID NO: 26646
  misc_feature 1..36: note = Probe
  source 1..36: mol_type = other DNA

SEQ ID NO: 37679 - DNA, 24 bp, synthetic construct
  misc_feature 1..24: note = Probe
  source 1..24: mol_type = other DNA
aagtgtactggaaagtgcacttgg

SEQ ID NO: 37680 - DNA, 25 bp, synthetic construct
  misc_feature 1..25: note = Probe
  source 1..25: mol_type = other DNA
aagtgtactggaaagtgcacttgga

SEQ ID NO: 37681 - DNA, 26 bp, synthetic construct
  misc_feature 1..26: note = Probe
  source 1..26: mol_type = other DNA
aagtgtactggaaagtgcacttggac

SEQ ID NO: 37682 - DNA, 27 bp, synthetic construct
  misc_feature 1..27: note = Probe
  source 1..27: mol_type = other DNA
aagtgtactggaaagtgcacttggacg

SEQ ID NO: 37683 - DNA, 28 bp, synthetic construct
  misc_feature 1..28: note = Probe
  source 1..28: mol_type = other DNA
aagtgtactggaaagtgcacttggacga

SEQ ID NO: 37684 - DNA, 29 bp, synthetic construct
  misc_feature 1..29: note = Probe
  source 1..29: mol_type = other DNA
aagtgtactggaaagtgcacttggacgaa

SEQ ID NO: 37685 - DNA, 30 bp, synthetic construct; identical to SEQ ID NO: 2379
  misc_feature 1..30: note = Probe
  source 1..30: mol_type = other DNA

SEQ ID NO: 37686 - DNA, 31 bp, synthetic construct; identical to SEQ ID NO: 2380
  misc_feature 1..31: note = Probe
  source 1..31: mol_type = other DNA

SEQ ID NO: 37687 - DNA, 32 bp, synthetic construct; identical to SEQ ID NO: 2381
  misc_feature 1..32: note = Probe
  source 1..32: mol_type = other DNA

SEQ ID NO: 37688 - DNA, 33 bp, synthetic construct; identical to SEQ ID NO: 2382
  misc_feature 1..33: note = Probe
  source 1..33: mol_type = other DNA

SEQ ID NO: 37689 - DNA, 34 bp, synthetic construct; identical to SEQ ID NO: 2383
  misc_feature 1..34: note = Probe
  source 1..34: mol_type = other DNA

SEQ ID NO: 37690 - DNA, 35 bp, synthetic construct; identical to SEQ ID NO: 2384
  misc_feature 1..35: note = Probe
  source 1..35: mol_type = other DNA

SEQ ID NO: 37691 - DNA, 36 bp, synthetic construct; identical to SEQ ID NO: 2385
  misc_feature 1..36: note = Probe
  source 1..36: mol_type = other DNA

SEQ ID NO: 37692 - DNA, 37 bp, synthetic construct; identical to SEQ ID NO: 2386
  misc_feature 1..37: note = Probe
  source 1..37: mol_type = other DNA

SEQ ID NO: 37693 - DNA, 30 bp, synthetic construct; identical to SEQ ID NO: 2390
  misc_feature 1..30: note = Probe
  source 1..30: mol_type = other DNA

SEQ ID NO: 37694 - DNA, 31 bp, synthetic construct; identical to SEQ ID NO: 86
  misc_feature 1..31: note = Probe
  source 1..31: mol_type = other DNA

SEQ ID NO: 37695 - DNA, 32 bp, synthetic construct; identical to SEQ ID NO: 2391
  misc_feature 1..32: note = Probe
  source 1..32: mol_type = other DNA

SEQ ID NO: 37696 - DNA, 33 bp, synthetic construct; identical to SEQ ID NO: 15194
  misc_feature 1..33: note = Probe
  source 1..33: mol_type = other DNA

SEQ ID NO: 37697 - DNA, 35 bp, synthetic construct
  misc_feature 1..35: note = Probe
  source 1..35: mol_type = other DNA
aagttccctggtggtctagtggttaggattcggcg

SEQ ID NO: 37698 - DNA, 45 bp, synthetic construct
  misc_feature 1..45: note = Probe
  source 1..45: mol_type = other DNA
aagttggtggttcgagcccacccaggaacgcttgttcgagctttt

SEQ ID NO: 37699 - DNA, 50 bp, synthetic construct; identical to SEQ ID NO: 2411
  misc_feature 1..50: note = Probe
  source 1..50: mol_type = other DNA

SEQ ID NO: 37700 - DNA, 50 bp, synthetic construct; identical to SEQ ID NO: 2414
  misc_feature 1..50: note = Probe
  source 1..50: mol_type = other DNA

SEQ ID NO: 37701 - DNA, 49 bp, synthetic construct; identical to SEQ ID NO: 2416
  misc_feature 1..49: note = Probe
  source 1..49: mol_type = other DNA

SEQ ID NO: 37702 - DNA, 50 bp, synthetic construct; identical to SEQ ID NO: 2417
  misc_feature 1..50: note = Probe
  source 1..50: mol_type = other DNA

SEQ ID NO: 37703 - DNA, 19 bp, synthetic construct
  misc_feature 1..19: note = Probe
  source 1..19: mol_type = other DNA
aatagctcagttgggagag

SEQ ID NO: 37704 - DNA, 30 bp, synthetic construct; identical to SEQ ID NO: 2424
  misc_feature 1..30: note = Probe
  source 1..30: mol_type = other DNA

SEQ ID NO: 37705 - DNA, 50 bp, synthetic construct; identical to SEQ ID NO: 2425
  misc_feature 1..50: note = Probe
  source 1..50: mol_type = other DNA

SEQ ID NO: 37706 - DNA, 30 bp, synthetic construct; identical to SEQ ID NO: 15218
  misc_feature 1..30: note = Probe
  source 1..30: mol_type = other DNA

SEQ ID NO: 37707 - DNA, 35 bp, synthetic construct
  misc_feature 1..35: note = Probe
  source 1..35: mol_type = other DNA
aatccagcaatccgagttcgaatctcggtgggacc

SEQ ID NO: 37708 - DNA, 36 bp, synthetic construct; identical to SEQ ID NO: 93
  misc_feature 1..36: note = Probe
  source 1..36: mol_type = other DNA

SEQ ID NO: 37709 - DNA, 38 bp, synthetic construct; identical to SEQ ID NO: 2435
  misc_feature 1..38: note = Probe
  source 1..38: mol_type = other DNA

SEQ ID NO: 37710 - DNA, 38 bp, synthetic construct; identical to SEQ ID NO: 2437
  misc_feature 1..38: note = Probe
  source 1..38: mol_type = other DNA

SEQ ID NO: 37711 - DNA, 35 bp, synthetic construct; identical to SEQ ID NO: 94
  misc_feature 1..35: note = Probe
  source 1..35: mol_type = other DNA

SEQ ID NO: 37712 - DNA, 36 bp, synthetic construct; identical to SEQ ID NO: 95
  misc_feature 1..36: note = Probe
  source 1..36: mol_type = other DNA

SEQ ID NO: 37713 - DNA, 33 bp, synthetic construct
  misc_feature 1..33: note = Probe
  source 1..33: mol_type = other DNA
aatccagcgatccgagttcaagtctcggtggaa

SEQ ID NO: 37714 - DNA, 34 bp, synthetic construct
  misc_feature 1..34: note = Probe
  source 1..34: mol_type = other DNA
aatccagcgatccgagttcaagtctcggtggaac

SEQ ID NO: 37715 - DNA, 36 bp, synthetic construct; identical to SEQ ID NO: 15234
  misc_feature 1..36: note = Probe
  source 1..36: mol_type = other DNA

SEQ ID NO: 37716 - DNA, 39 bp, synthetic construct; identical to SEQ ID NO: 15236
  misc_feature 1..39: note = Probe
  source 1..39: mol_type = other DNA

SEQ ID NO: 37717 - DNA, 31 bp, synthetic construct
  misc_feature 1..31: note = Probe
  source 1..31: mol_type = other DNA
aatcccacttctgacagagctcaattacttt

SEQ ID NO: 37718 - DNA, 34 bp, synthetic construct
  misc_feature 1..34: note = Probe
  source 1..34: mol_type = other DNA
aatcccatcctcgtcggctgcatagcaagccttt

SEQ ID NO: 37719 - DNA, 19 bp, synthetic construct
  misc_feature 1..19: note = Probe
  source 1..19: mol_type = other DNA
aatcctatatatcttaatg

SEQ ID NO: 37720 - DNA, 50 bp, synthetic construct; identical to SEQ ID NO: 101
  misc_feature 1..50: note = Probe
  source 1..50: mol_type = other DNA

SEQ ID NO: 37721 - DNA, 33 bp, synthetic construct; identical to SEQ ID NO: 102
  misc_feature 1..33: note = Probe
  source 1..33: mol_type = other DNA

SEQ ID NO: 37722 - DNA, 34 bp, synthetic construct; identical to SEQ ID NO: 103
  misc_feature 1..34: note = Probe
  source 1..34: mol_type = other DNA

SEQ ID NO: 37723 - DNA, 36 bp, synthetic construct; identical to SEQ ID NO: 2466
  misc_feature 1..36: note = Probe
  source 1..36: mol_type = other DNA

SEQ ID NO: 37724 - DNA, 37 bp, synthetic construct; identical to SEQ ID NO: 2467
  misc_feature 1..37: note = Probe
  source 1..37: mol_type = other DNA

SEQ ID NO: 37725 - DNA, 38 bp, synthetic construct; identical to SEQ ID NO: 2468
  misc_feature 1..38: note = Probe
  source 1..38: mol_type = other DNA

SEQ ID NO: 37726 - DNA, 34 bp, synthetic construct
  misc_feature 1..34: note = Probe
  source 1..34: mol_type = other DNA
aatctcggtggtaccttggtgtctgctggccttt

SEQ ID NO: 37727 - DNA, 18 bp, synthetic construct
  misc_feature 1..18: note = Probe
  source 1..18: mol_type = other DNA
aatctgaaggtcctgagt

SEQ ID NO: 37728 - DNA, 46 bp, synthetic construct; identical to SEQ ID NO: 2473
  misc_feature 1..46: note = Probe
  source 1..46: mol_type = other DNA

SEQ ID NO: 37729 - DNA, 37 bp, synthetic construct; identical to SEQ ID NO: 2478
  misc_feature 1..37: note = Probe
  source 1..37: mol_type = other DNA

SEQ ID NO: 37730 - DNA, 50 bp, synthetic construct; identical to SEQ ID NO: 2483
  misc_feature 1..50: note = Probe
  source 1..50: mol_type = other DNA

SEQ ID NO: 37731 - DNA, 20 bp, synthetic construct
  misc_feature 1..20: note = Probe
  source 1..20: mol_type = other DNA
aatgccccaactaaatacta

SEQ ID NO: 37732 - DNA, 22 bp, synthetic construct
  misc_feature 1..22: note = Probe
  source 1..22: mol_type = other DNA
aatgccccaactaaatactacc

SEQ ID NO: 37733 - DNA, 23 bp, synthetic construct
  misc_feature 1..23: note = Probe
  source 1..23: mol_type = other DNA
aatgccccaactaaatactaccg

SEQ ID NO: 37734 - DNA, 24 bp, synthetic construct
  misc_feature 1..24: note = Probe
  source 1..24: mol_type = other DNA
aatgccccaactaaatactaccgt

SEQ ID NO: 37735 - DNA, 25 bp, synthetic construct
  misc_feature 1..25: note = Probe
  source 1..25: mol_type = other DNA
aatgccccaactaaatactaccgta

SEQ ID NO: 37736 - DNA, 26 bp, synthetic construct
  misc_feature 1..26: note = Probe
  source 1..26: mol_type = other DNA
aatgccccaactaaatactaccgtat

SEQ ID NO: 37737 - DNA, 27 bp, synthetic construct
  misc_feature 1..27: note = Probe
  source 1..27: mol_type = other DNA
aatgccccaactaaatactaccgtatg

SEQ ID NO: 37738 - DNA, 28 bp, synthetic construct
  misc_feature 1..28: note = Probe
  source 1..28: mol_type = other DNA
aatgccccaactaaatactaccgtatgg

SEQ ID NO: 37739 - DNA, 29 bp, synthetic construct
  misc_feature 1..29: note = Probe
  source 1..29: mol_type = other DNA
aatgccccaactaaatactaccgtatggc

SEQ ID NO: 37740 - DNA, 31 bp, synthetic construct
  misc_feature 1..31: note = Probe
  source 1..31: mol_type = other DNA
aatggaggcgtgggttcgaatcccacttctg

SEQ ID NO: 37741 - DNA, 21 bp, synthetic construct
  misc_feature 1..21: note = Probe
  source 1..21: mol_type = other DNA
aatggataacgcgtctgacta

SEQ ID NO: 37742 - DNA, 26 bp, synthetic construct
  misc_feature 1..26: note = Probe
  source 1..26: mol_type = other DNA
aatggataacgcgtctgactacggat

SEQ ID NO: 37743 - DNA, 18 bp, synthetic construct
  misc_feature 1..18: note = Probe
  source 1..18: mol_type = other DNA
aatggataaggcatcagc

SEQ ID NO: 37744 - DNA, 17 bp, synthetic construct
  misc_feature 1..17: note = Probe
  source 1..17: mol_type = other DNA
aatggataaggcattgg

SEQ ID NO: 37745 - DNA, 39 bp, synthetic construct
  misc_feature 1..39: note = Probe
  source 1..39: mol_type = other DNA
aatggataaggcattggcctcctaagccagggattgtgg

SEQ ID NO: 37746 - DNA, 17 bp, synthetic construct
  misc_feature 1..17: note = Probe
  source 1..17: mol_type = other DNA
aatggataaggcgtctg

SEQ ID NO: 37747 - DNA, 29 bp, synthetic construct
  misc_feature 1..29: note = Probe
  source 1..29: mol_type = other DNA
aatggcttggtttttccttccccttgtta

SEQ ID NO: 37748 - DNA, 31 bp, synthetic construct
  misc_feature 1..31: note = Probe
  source 1..31: mol_type = other DNA
aatgtcgttagtctaggctgtcagctcttcc

SEQ ID NO: 37749 - DNA, 22 bp, synthetic construct
  misc_feature 1..22: note = Probe
  source 1..22: mol_type = other DNA
aatgttggttatacccttcccg

SEQ ID NO: 37750 - DNA, 38 bp, synthetic construct; identical to SEQ ID NO: 2503
  misc_feature 1..38: note = Probe
  source 1..38: mol_type = other DNA

SEQ ID NO: 37751 - DNA, 38 bp, synthetic construct; identical to SEQ ID NO: 15309
  misc_feature 1..38: note = Probe
  source 1..38: mol_type = other DNA

SEQ ID NO: 37752 - DNA, 38 bp, synthetic construct; identical to SEQ ID NO: 2508
  misc_feature 1..38: note = Probe
  source 1..38: mol_type = other DNA

SEQ ID NO: 37753 - DNA, 31 bp, synthetic construct; identical to SEQ ID NO: 15317
  misc_feature 1..31: note = Probe
  source 1..31: mol_type = other DNA

SEQ ID NO: 37754 - DNA, 50 bp, synthetic construct
  misc_feature 1..50: note = Probe
  source 1..50: mol_type = other DNA
aattctcgcctgccacgcgggaggcccgggttcgattcccggcccatgca

SEQ ID NO: 37755 - DNA, 45 bp, synthetic construct; identical to SEQ ID NO: 2521
  misc_feature 1..45: note = Probe
  source 1..45: mol_type = other DNA

SEQ ID NO: 37756 - DNA, 50 bp, synthetic construct; identical to SEQ ID NO: 2525
  misc_feature 1..50: note = Probe
  source 1..50: mol_type = other DNA

SEQ ID NO: 37757 - DNA, 19 bp, synthetic construct
  misc_feature 1..19: note = Probe
  source 1..19: mol_type = other DNA
acaacagaggcttacgacc

SEQ ID NO: 37758 - DNA, 20 bp, synthetic construct
  misc_feature 1..20: note = Probe
  source 1..20: mol_type = other DNA
acaacagaggcttacgaccc

SEQ ID NO: 37759 - DNA, 22 bp, synthetic construct
  misc_feature 1..22: note = Probe
  source 1..22: mol_type = other DNA
acaacagaggcttacgacccct

SEQ ID NO: 37760 - DNA, 24 bp, synthetic construct
  misc_feature 1..24: note = Probe
  source 1..24: mol_type = other DNA
acaacagaggcttacgacccctta

SEQ ID NO: 37761 - DNA, 25 bp, synthetic construct
  misc_feature 1..25: note = Probe
  source 1..25: mol_type = other DNA
acaacagaggcttacgaccccttat

SEQ ID NO: 37762 - DNA, 26 bp, synthetic construct
  misc_feature 1..26: note = Probe
  source 1..26: mol_type = other DNA
acaacagaggcttacgaccccttatt

SEQ ID NO: 37763 - DNA, 27 bp, synthetic construct
  misc_feature 1..27: note = Probe
  source 1..27: mol_type = other DNA
acaacagaggcttacgaccccttattt

SEQ ID NO: 37764 - DNA, 29 bp, synthetic construct
  misc_feature 1..29: note = Probe
  source 1..29: mol_type = other DNA
acaacagaggcttacgaccccttatttac

SEQ ID NO: 37765 - DNA, 31 bp, synthetic construct; identical to SEQ ID NO: 2563
  misc_feature 1..31: note = Probe
  source 1..31: mol_type = other DNA

SEQ ID NO: 37766 - DNA, 32 bp, synthetic construct; identical to SEQ ID NO: 2564
  misc_feature 1..32: note = Probe
  source 1..32: mol_type = other DNA

SEQ ID NO: 37767 - DNA, 33 bp, synthetic construct; identical to SEQ ID NO: 2565
  misc_feature 1..33: note = Probe
  source 1..33: mol_type = other DNA

SEQ ID NO: 37768 - DNA, 34 bp, synthetic construct; identical to SEQ ID NO: 2566
  misc_feature 1..34: note = Probe
  source 1..34: mol_type = other DNA

SEQ ID NO: 37769 - DNA, 35 bp, synthetic construct; identical to SEQ ID NO: 2567
  misc_feature 1..35: note = Probe
  source 1..35: mol_type = other DNA

SEQ ID NO: 37770 - DNA, 36 bp, synthetic construct; identical to SEQ ID NO: 2568
  misc_feature 1..36: note = Probe
  source 1..36: mol_type = other DNA

SEQ ID NO: 37771 - DNA, 38 bp, synthetic construct; identical to SEQ ID NO: 2570
  misc_feature 1..38: note = Probe
  source 1..38: mol_type = other DNA

SEQ ID NO: 37772 - DNA, 20 bp, synthetic construct
  misc_feature 1..20: note = Probe
  source 1..20: mol_type = other DNA
acaagaactgctaactcatg

SEQ ID NO: 37773 - DNA, 50 bp, synthetic construct; identical to SEQ ID NO: 2588
  misc_feature 1..50: note = Probe
  source 1..50: mol_type = other DNA

SEQ ID NO: 37774 - DNA, 20 bp, synthetic construct
  misc_feature 1..20: note = Probe
  source 1..20: mol_type = other DNA
acaagtggttacccttctta

SEQ ID NO: 37775 - DNA, 26 bp, synthetic construct
  misc_feature 1..26: note = Probe
  source 1..26: mol_type = other DNA
acaagtggttacccttcttacgtctt

SEQ ID NO: 37776 - DNA, 22 bp, synthetic construct
  misc_feature 1..22: note = Probe
  source 1..22: mol_type = other DNA
acaatggcacggcaaggggagt

SEQ ID NO: 37777 - DNA, 22 bp, synthetic construct
  misc_feature 1..22: note = Probe
  source 1..22: mol_type = other DNA
acaatggcacggcaaggggctc

SEQ ID NO: 37778 - DNA, 20 bp, synthetic construct
  misc_feature 1..20: note = Probe
  source 1..20: mol_type = other DNA
acacactaaaaaatcccttt

SEQ ID NO: 37779 - DNA, 23 bp, synthetic construct
  misc_feature 1..23: note = Probe
  source 1..23: mol_type = other DNA
acacctcagaaggtctcactttt

SEQ ID NO: 37780 - DNA, 20 bp, synthetic construct
  misc_feature 1..20: note = Probe
  source 1..20: mol_type = other DNA
acacctctttacagtgaaat

SEQ ID NO: 37781 - DNA, 21 bp, synthetic construct
  misc_feature 1..21: note = Probe
  source 1..21: mol_type = other DNA
acacgcagaaggtcctgggtt

SEQ ID NO: 37782 - DNA, 42 bp, synthetic construct; identical to SEQ ID NO: 15405
  misc_feature 1..42: note = Probe
  source 1..42: mol_type = other DNA

SEQ ID NO: 37783 - DNA, 30 bp, synthetic construct
  misc_feature 1..30: note = Probe
  source 1..30: mol_type = other DNA
acacgcagaaggtcctgggttcgagcccca

SEQ ID NO: 37784 - DNA, 31 bp, synthetic construct; identical to SEQ ID NO: 27006
  misc_feature 1..31: note = Probe
  source 1..31: mol_type = other DNA

SEQ ID NO: 37785 - DNA, 42 bp, synthetic construct; identical to SEQ ID NO: 2613
  misc_feature 1..42: note = Probe
  source 1..42: mol_type = other DNA

SEQ ID NO: 37786 - DNA, 42 bp, synthetic construct; identical to SEQ ID NO: 15410
  misc_feature 1..42: note = Probe
  source 1..42: mol_type = other DNA

SEQ ID NO: 37787 - DNA, 20 bp, synthetic construct
  misc_feature 1..20: note = Probe
  source 1..20: mol_type = other DNA
acacgcgaaaagtccccggt

SEQ ID NO: 37788 - DNA, 21 bp, synthetic construct
  misc_feature 1..21: note = Probe
  source 1..21: mol_type = other DNA
acacgcgaaaggtccccggtt

SEQ ID NO: 37789 - DNA, 22 bp, synthetic construct
  misc_feature 1..22: note = Probe
  source 1..22: mol_type = other DNA
acacgcgaaaggtccccggttc

SEQ ID NO: 37790 - DNA, 23 bp, synthetic construct
  misc_feature 1..23: note = Probe
  source 1..23: mol_type = other DNA
acacgcgaaaggtccccggttcg

SEQ ID NO: 37791 - DNA, 36 bp, synthetic construct; identical to SEQ ID NO: 12531
  misc_feature 1..36: note = Probe
  source 1..36: mol_type = other DNA

SEQ ID NO: 37792 - DNA, 37 bp, synthetic construct
  misc_feature 1..37: note = Probe
  source 1..37: mol_type = other DNA
acacgcgaaaggtccccggttcgaaaccgggcggaaa

SEQ ID NO: 37793 - DNA, 36 bp, synthetic construct
  misc_feature 1..36: note = Probe
  source 1..36: mol_type = other DNA
acacgcgaaaggtccccggttcgatcccgggcggaa

SEQ ID NO: 37794 - DNA, 42 bp, synthetic construct
  misc_feature 1..42: note = Probe
  source 1..42: mol_type = other DNA
acacgcgaaaggtccccggttcgatcccgggcggaaacaggt

SEQ ID NO: 37795 - DNA, 20 bp, synthetic construct
  misc_feature 1..20: note = Probe
  source 1..20: mol_type = other DNA
acacgcgaaaggtccctgga

SEQ ID NO: 37796 - DNA, 20 bp, synthetic construct
  misc_feature 1..20: note = Probe
  source 1..20: mol_type = other DNA
acacgcgaaaggtcctcggg

SEQ ID NO: 37797 - DNA, 49 bp, synthetic construct
  misc_feature 1..49: note = Probe
  source 1..49: mol_type = other DNA
acacgcgggacacccgggttcaattcccggtcaaggcaagaggttcttt

SEQ ID NO: 37798 - DNA, 50 bp, synthetic construct
  misc_feature 1..50: note = Probe
  source 1..50: mol_type = other DNA
acacgcgggacacccgggttcaattcccggtcaaggcaagaggttctttt

SEQ ID NO: 37799 - DNA, 19 bp, synthetic construct
  misc_feature 1..19: note = Probe
  source 1..19: mol_type = other DNA
acacggggcacaataattt

SEQ ID NO: 37800 - DNA, 44 bp, synthetic construct; identical to SEQ ID NO: 2618
  misc_feature 1..44: note = Probe
  source 1..44: mol_type = other DNA

SEQ ID NO: 37801 - DNA, 45 bp, synthetic construct; identical to SEQ ID NO: 2619
  misc_feature 1..45: note = Probe
  source 1..45: mol_type = other DNA

SEQ ID NO: 37802 - DNA, 46 bp, synthetic construct; identical to SEQ ID NO: 2620
  misc_feature 1..46: note = Probe
  source 1..46: mol_type = other DNA

SEQ ID NO: 37803 - DNA, 50 bp, synthetic construct; identical to SEQ ID NO: 2621
  misc_feature 1..50: note = Probe
  source 1..50: mol_type = other DNA

SEQ ID NO: 37804 - DNA, 31 bp, synthetic construct; identical to SEQ ID NO: 2625
  misc_feature 1..31: note = Probe
  source 1..31: mol_type = other DNA

SEQ ID NO: 37805 - DNA, 41 bp, synthetic construct; identical to SEQ ID NO: 2633
  misc_feature 1..41: note = Probe
  source 1..41: mol_type = other DNA

SEQ ID NO: 37806 - DNA, 20 bp, synthetic construct
  misc_feature 1..20: note = Probe
  source 1..20: mol_type = other DNA
acagagcgtagtttcgtttt

SEQ ID NO: 37807 - DNA, 18 bp, synthetic construct
  misc_feature 1..18: note = Probe
  source 1..18: mol_type = other DNA
acagagctcaattacttt

SEQ ID NO: 37808 - DNA, 30 bp, synthetic construct; identical to SEQ ID NO: 2640
  misc_feature 1..30: note = Probe
  source 1..30: mol_type = other DNA

SEQ ID NO: 37809 - DNA, 28 bp, synthetic construct
  misc_feature 1..28: note = Probe
  source 1..28: mol_type = other DNA
acagctatccattggtcttaggccccaa

SEQ ID NO: 37810 - DNA, 49 bp, synthetic construct; identical to SEQ ID NO: 2643
  misc_feature 1..49: note = Probe
  source 1..49: mol_type = other DNA

SEQ ID NO: 37811 - DNA, 50 bp, synthetic construct; identical to SEQ ID NO: 2644
  misc_feature 1..50: note = Probe
  source 1..50: mol_type = other DNA

SEQ ID NO: 37812 - DNA, 32 bp, synthetic construct; identical to SEQ ID NO: 15463
  misc_feature 1..32: note = Probe
  source 1..32: mol_type = other DNA

SEQ ID NO: 37813 - DNA, 28 bp, synthetic construct
  misc_feature 1..28: note = Probe
  source 1..28: mol_type = other DNA
acagtcagaggttcaattcctcttctta

SEQ ID NO: 37814 - DNA, 31 bp, synthetic construct; identical to SEQ ID NO: 2654
  misc_feature 1..31: note = Probe
  source 1..31: mol_type = other DNA

SEQ ID NO: 37815 - DNA, 34 bp, synthetic construct; identical to SEQ ID NO: 2656
  misc_feature 1..34: note = Probe
  source 1..34: mol_type = other DNA

SEQ ID NO: 37816 - DNA, 34 bp, synthetic construct
  misc_feature 1..34: note = Probe
  source 1..34: mol_type = other DNA
acagtggctcgttggtctaggggtatgattctcg

SEQ ID NO: 37817 - DNA, 28 bp, synthetic construct
  misc_feature 1..28: note = Probe
  source 1..28: mol_type = other DNA
acatacccatggccaacctcctactcct

SEQ ID NO: 37818 - DNA, 29 bp, synthetic construct
  misc_feature 1..29: note = Probe
  source 1..29: mol_type = other DNA
acatacccatggccaacctcctactcctc

SEQ ID NO: 37819 - DNA, 30 bp, synthetic construct; identical to SEQ ID NO: 2668
  misc_feature 1..30: note = Probe
  source 1..30: mol_type = other DNA

SEQ ID NO: 37820 - DNA, 18 bp, synthetic construct
  misc_feature 1..18: note = Probe
  source 1..18: mol_type = other DNA
acatatgtccgcgtgggt

SEQ ID NO: 37821 - DNA, 50 bp, synthetic construct; identical to SEQ ID NO: 2685
  misc_feature 1..50: note = Probe
  source 1..50: mol_type = other DNA

SEQ ID NO: 37822 - DNA, 24 bp, synthetic construct
  misc_feature 1..24: note = Probe
  source 1..24: mol_type = other DNA
acatggtctagcggttaggattcc

SEQ ID NO: 37823 - DNA, 25 bp, synthetic construct
  misc_feature 1..25: note = Probe
  source 1..25: mol_type = other DNA
acatggtctagcggttaggattcct

SEQ ID NO: 37824 - DNA, 28 bp, synthetic construct
  misc_feature 1..28: note = Probe
  source 1..28: mol_type = other DNA
accaaaacatcagattgtgaatctgaca

SEQ ID NO: 37825 - DNA, 31 bp, synthetic construct; identical to SEQ ID NO: 2695
  misc_feature 1..31: note = Probe
  source 1..31: mol_type = other DNA

SEQ ID NO: 37826 - DNA, 20 bp, synthetic construct
  misc_feature 1..20: note = Probe
  source 1..20: mol_type = other DNA
accaacacctctttacagtg

SEQ ID NO: 37827 - DNA, 24 bp, synthetic construct
  misc_feature 1..24: note = Probe
  source 1..24: mol_type = other DNA
accaacacctctttacagtgaaat

SEQ ID NO: 37828 - DNA, 36 bp, synthetic construct; identical to SEQ ID NO: 2718
  misc_feature 1..36: note = Probe
  source 1..36: mol_type = other DNA

SEQ ID NO: 37829 - DNA, 37 bp, synthetic construct; identical to SEQ ID NO: 2719
  misc_feature 1..37: note = Probe
  source 1..37: mol_type = other DNA

SEQ ID NO: 37830 - DNA, 38 bp, synthetic construct; identical to SEQ ID NO: 2720
  misc_feature 1..38: note = Probe
  source 1..38: mol_type = other DNA

SEQ ID NO: 37831 - DNA, 38 bp, synthetic construct; identical to SEQ ID NO: 2727
  misc_feature 1..38: note = Probe
  source 1..38: mol_type = other DNA

SEQ ID NO: 37832 - DNA, 50 bp, synthetic construct; identical to SEQ ID NO: 2749
  misc_feature 1..50: note = Probe
  source 1..50: mol_type = other DNA

SEQ ID NO: 37833 - DNA, 31 bp, synthetic construct
  misc_feature 1..31: note = Probe
  source 1..31: mol_type = other DNA
acccagatagctcagtcagtagagcatcaga

SEQ ID NO: 37834 - DNA, 37 bp, synthetic construct; identical to SEQ ID NO: 151
  misc_feature 1..37: note = Probe
  source 1..37: mol_type = other DNA

SEQ ID NO: 37835 - DNA, 39 bp, synthetic construct; identical to SEQ ID NO: 2764
  misc_feature 1..39: note = Probe
  source 1..39: mol_type = other DNA

SEQ ID NO: 37836 - DNA, 25 bp, synthetic construct
  misc_feature 1..25: note = Probe
  source 1..25: mol_type = other DNA
acccagggacggtcagtgcttcttt

SEQ ID NO: 37837 - DNA, 39 bp, synthetic construct; identical to SEQ ID NO: 2766
  misc_feature 1..39: note = Probe
  source 1..39: mol_type = other DNA

SEQ ID NO: 37838 - DNA, 38 bp, synthetic construct; identical to SEQ ID NO: 2773
  misc_feature 1..38: note = Probe
  source 1..38: mol_type = other DNA

SEQ ID NO: 37839 - DNA, 25 bp, synthetic construct
  misc_feature 1..25: note = Probe
  source 1..25: mol_type = other DNA
acccgggttcgattcccggccaacg

SEQ ID NO: 37840 - DNA, 26 bp, synthetic construct
  misc_feature 1..26: note = Probe
  source 1..26: mol_type = other DNA
acccgggttcgattcccggccaacgc

SEQ ID NO: 37841 - DNA, 22 bp, synthetic construct
  misc_feature 1..22: note = Probe
  source 1..22: mol_type = other DNA
accctgtggtctagtggttagg

SEQ ID NO: 37842 - DNA, 26 bp, synthetic construct
  misc_feature 1..26: note = Probe
  source 1..26: mol_type = other DNA
accgagcgtccaagctctttccattt

SEQ ID NO: 37843 - DNA, 27 bp, synthetic construct
  misc_feature 1..27: note = Probe
  source 1..27: mol_type = other DNA
accgagcgtccaagctctttccatttt

SEQ ID NO: 37844 - DNA, 35 bp, synthetic construct
  misc_feature 1..35: note = Probe
  source 1..35: mol_type = other DNA
accgccgcggcccgggttcgattcccggccaggga

SEQ ID NO: 37845 - DNA, 36 bp, synthetic construct; identical to SEQ ID NO: 12559
  misc_feature 1..36: note = Probe
  source 1..36: mol_type = other DNA

SEQ ID NO: 37846 - DNA, 37 bp, synthetic construct; identical to SEQ ID NO: 2792
  misc_feature 1..37: note = Probe
  source 1..37: mol_type = other DNA

SEQ ID NO: 37847 - DNA, 37 bp, synthetic construct; identical to SEQ ID NO: 2793
  misc_feature 1..37: note = Probe
  source 1..37: mol_type = other DNA

SEQ ID NO: 37848 - DNA, 38 bp, synthetic construct; identical to SEQ ID NO: 15664
  misc_feature 1..38: note = Probe
  source 1..38: mol_type = other DNA

SEQ ID NO: 37849 - DNA, 39 bp, synthetic construct; identical to SEQ ID NO: 2794
  misc_feature 1..39: note = Probe
  source 1..39: mol_type = other DNA

SEQ ID NO: 37850 - DNA, 37 bp, synthetic construct; identical to SEQ ID NO: 2796
  misc_feature 1..37: note = Probe
  source 1..37: mol_type = other DNA

SEQ ID NO: 37851 - DNA, 31 bp, synthetic construct
  misc_feature 1..31: note = Probe
  source 1..31: mol_type = other DNA
accgctgccacacctcagaaggtctcacttt

SEQ ID NO: 37852 - DNA, 32 bp, synthetic construct; identical to SEQ ID NO: 15681
  misc_feature 1..32: note = Probe
  source 1..32: mol_type = other DNA

SEQ ID NO: 37853 - DNA, 25 bp, synthetic construct
  misc_feature 1..25: note = Probe
  source 1..25: mol_type = other DNA
accgctgccagggttgctgtctttt

SEQ ID NO: 37854 - DNA, 32 bp, synthetic construct; identical to SEQ ID NO: 2803
  misc_feature 1..32: note = Probe
  source 1..32: mol_type = other DNA

SEQ ID NO: 37855 - DNA, 33 bp, synthetic construct; identical to SEQ ID NO: 2804
  misc_feature 1..33: note = Probe
  source 1..33: mol_type = other DNA

SEQ ID NO: 37856 - DNA, 34 bp, synthetic construct; identical to SEQ ID NO: 2805
  misc_feature 1..34: note = Probe
  source 1..34: mol_type = other DNA

SEQ ID NO: 37857 - DNA, 50 bp, synthetic construct
  misc_feature 1..50: note = Probe
  source 1..50: mol_type = other DNA
accggagcgttggtggtatagtggtaagcatagctgccttccaagcagtt

SEQ ID NO: 37858 - DNA, 18 bp, synthetic construct
  misc_feature 1..18: note = Probe
  source 1..18: mol_type = other DNA
accggggttcgattcccc

SEQ ID NO: 37859 - DNA, 21 bp, synthetic construct
  misc_feature 1..21: note = Probe
  source 1..21: mol_type = other DNA
accggggttcgattccccgac

SEQ ID NO: 37860 - DNA, 22 bp, synthetic construct
  misc_feature 1..22: note = Probe
  source 1..22: mol_type = other DNA
accggggttcgattccccgacg

SEQ ID NO: 37861 - DNA, 23 bp, synthetic construct
  misc_feature 1..23: note = Probe
  source 1..23: mol_type = other DNA
accggggttcgattccccgacgg

SEQ ID NO: 37862 - DNA, 26 bp, synthetic construct
  misc_feature 1..26: note = Probe
  source 1..26: mol_type = other DNA
accggggttcgattccccgacgggga

SEQ ID NO: 37863 - DNA, 28 bp, synthetic construct
  misc_feature 1..28: note = Probe
  source 1..28: mol_type = other DNA
accggggttcgattccccgacggggaga

SEQ ID NO: 37864 - DNA, 28 bp, synthetic construct
  misc_feature 1..28: note = Probe
  source 1..28: mol_type = other DNA
accggggttcgattccccgacggggagg

SEQ ID NO: 37865 - DNA, 30 bp, synthetic construct; identical to SEQ ID NO: 2811
  misc_feature 1..30: note = Probe
  source 1..30: mol_type = other DNA

SEQ ID NO: 37866 - DNA, 42 bp, synthetic construct
  misc_feature 1..42: note = Probe
  source 1..42: mol_type = other DNA
accggggttcgattccccgacggggaggcacagtaattgttt

SEQ ID NO: 37867 - DNA, 50 bp, synthetic construct; identical to SEQ ID NO: 2815
  misc_feature 1..50: note = Probe
  source 1..50: mol_type = other DNA

SEQ ID NO: 37868 - DNA, 18 bp, synthetic construct
  misc_feature 1..18: note = Probe
  source 1..18: mol_type = other DNA
acctattctcaaacttta

SEQ ID NO: 37869 - DNA, 19 bp, synthetic construct
  misc_feature 1..19: note = Probe
  source 1..19: mol_type = other DNA
acctattctcaaactttaa

SEQ ID NO: 37870 - DNA, 20 bp, synthetic construct
  misc_feature 1..20: note = Probe
  source 1..20: mol_type = other DNA
acctattctcaaactttaaa

SEQ ID NO: 37871 - DNA, 21 bp, synthetic construct
  misc_feature 1..21: note = Probe
  source 1..21: mol_type = other DNA
acctattctcaaactttaaat

SEQ ID NO: 37872 - DNA, 22 bp, synthetic construct
  misc_feature 1..22: note = Probe
  source 1..22: mol_type = other DNA
acctattctcaaactttaaatg

SEQ ID NO: 37873 - DNA, 23 bp, synthetic construct
  misc_feature 1..23: note = Probe
  source 1..23: mol_type = other DNA
acctattctcaaactttaaatgg

SEQ ID NO: 37874 - DNA, 24 bp, synthetic construct
  misc_feature 1..24: note = Probe
  source 1..24: mol_type = other DNA
acctattctcaaactttaaatggg

SEQ ID NO: 37875 - DNA, 25 bp, synthetic construct
  misc_feature 1..25: note = Probe
  source 1..25: mol_type = other DNA
acctattctcaaactttaaatgggc

SEQ ID NO: 37876 - DNA, 26 bp, synthetic construct
  misc_feature 1..26: note = Probe
  source 1..26: mol_type = other DNA
acctattctcaaactttaaatgggca

SEQ ID NO: 37877 - DNA, 27 bp, synthetic construct
  misc_feature 1..27: note = Probe
  source 1..27: mol_type = other DNA
acctattctcaaactttaaatgggcaa

SEQ ID NO: 37878 - DNA, 28 bp, synthetic construct
  misc_feature 1..28: note = Probe
  source 1..28: mol_type = other DNA
acctattctcaaactttaaatgggcaag

SEQ ID NO: 37879 - DNA, 29 bp, synthetic construct
  misc_feature 1..29: note = Probe
  source 1..29: mol_type = other DNA
acctattctcaaactttaaatgggcaaga

SEQ ID NO: 37880 - DNA, 30 bp, synthetic construct; identical to SEQ ID NO: 27232
  misc_feature 1..30: note = Probe
  source 1..30: mol_type = other DNA

SEQ ID NO: 37881 - DNA, 31 bp, synthetic construct; identical to SEQ ID NO: 15733
  misc_feature 1..31: note = Probe
  source 1..31: mol_type = other DNA

SEQ ID NO: 37882 - DNA, 32 bp, synthetic construct; identical to SEQ ID NO: 2827
  misc_feature 1..32: note = Probe
  source 1..32: mol_type = other DNA

SEQ ID NO: 37883 - DNA, 33 bp, synthetic construct; identical to SEQ ID NO: 2828
  misc_feature 1..33: note = Probe
  source 1..33: mol_type = other DNA

SEQ ID NO: 37884 - DNA, 34 bp, synthetic construct; identical to SEQ ID NO: 15736
  misc_feature 1..34: note = Probe
  source 1..34: mol_type = other DNA

SEQ ID NO: 37885 - DNA, 35 bp, synthetic construct; identical to SEQ ID NO: 15737
  misc_feature 1..35: note = Probe
  source 1..35: mol_type = other DNA

SEQ ID NO: 37886 - DNA, 36 bp, synthetic construct; identical to SEQ ID NO: 2829
  misc_feature 1..36: note = Probe
  source 1..36: mol_type = other DNA

SEQ ID NO: 37887 - DNA, 37 bp, synthetic construct; identical to SEQ ID NO: 2830
  misc_feature 1..37: note = Probe
  source 1..37: mol_type = other DNA

SEQ ID NO: 37888 - DNA, 38 bp, synthetic construct; identical to SEQ ID NO: 15740
  misc_feature 1..38: note = Probe
  source 1..38: mol_type = other DNA

SEQ ID NO: 37889 - DNA, 41 bp, synthetic construct
  misc_feature 1..41: note = Probe
  source 1..41: mol_type = other DNA
acctattctcaaactttaaatgggcaagaagcccagctagc

SEQ ID NO: 37890 - DNA, 42 bp, synthetic construct
  misc_feature 1..42: note = Probe
  source 1..42: mol_type = other DNA
acctattctcaaactttaaatgggcaagaagcccagctagct

SEQ ID NO: 37891 - DNA, 20 bp, synthetic construct
  misc_feature 1..20: note = Probe
  source 1..20: mol_type = other DNA
acctcagaaggtctcacttt

SEQ ID NO: 37892 - DNA, 21 bp, synthetic construct
  misc_feature 1..21: note = Probe
  source 1..21: mol_type = other DNA
acctcagaaggtctcactttt

SEQ ID NO: 37893 - DNA, 22 bp, synthetic construct
  misc_feature 1..22: note = Probe
  source 1..22: mol_type = other DNA
acctcagaaggtctcacttttc

SEQ ID NO: 37894 - DNA, 29 bp, synthetic construct
  misc_feature 1..29: note = Probe
  source 1..29: mol_type = other DNA
acctcagaaggtctcacttttctatccat

SEQ ID NO: 37895 - DNA, 25 bp, synthetic construct
  misc_feature 1..25: note = Probe
  source 1..25: mol_type = other DNA
acctcagagggggcagctgccattt

SEQ ID NO: 37896 - DNA, 50 bp, synthetic construct; identical to SEQ ID NO: 2840
  misc_feature 1..50: note = Probe
  source 1..50: mol_type = other DNA

SEQ ID NO: 37897 - DNA, 50 bp, synthetic construct; identical to SEQ ID NO: 2841
  misc_feature 1..50: note = Probe
  source 1..50: mol_type = other DNA

SEQ ID NO: 37898 - DNA, 36 bp, synthetic construct; identical to SEQ ID NO: 15773
  misc_feature 1..36: note = Probe
  source 1..36: mol_type = other DNA

SEQ ID NO: 37899 - DNA, 50 bp, synthetic construct; identical to SEQ ID NO: 2843
  misc_feature 1..50: note = Probe
  source 1..50: mol_type = other DNA

SEQ ID NO: 37900 - DNA, 18 bp, synthetic construct
  misc_feature 1..18: note = Probe
  source 1..18: mol_type = other DNA
acgcagaaggtcctgggt

SEQ ID NO: 37901 - DNA, 38 bp, synthetic construct; identical to SEQ ID NO: 167
  misc_feature 1..38: note = Probe
  source 1..38: mol_type = other DNA

SEQ ID NO: 37902 - DNA, 20 bp, synthetic construct
  misc_feature 1..20: note = Probe
  source 1..20: mol_type = other DNA
acgcgaaaggtccccggttc

SEQ ID NO: 37903 - DNA, 34 bp, synthetic construct; identical to SEQ ID NO: 12585
  misc_feature 1..34: note = Probe
  source 1..34: mol_type = other DNA

SEQ ID NO: 37904 - DNA, 34 bp, synthetic construct; identical to SEQ ID NO: 15796
  misc_feature 1..34: note = Probe
  source 1..34: mol_type = other DNA

SEQ ID NO: 37905 - DNA, 34 bp, synthetic construct; identical to SEQ ID NO: 15804
  misc_feature 1..34: note = Probe
  source 1..34: mol_type = other DNA

SEQ ID NO: 37906 - DNA, 35 bp, synthetic construct
  misc_feature 1..35: note = Probe
  source 1..35: mol_type = other DNA
acgcgggagacccgggttcaattcccggccaatgc

SEQ ID NO: 37907 - DNA, 28 bp, synthetic construct
  misc_feature 1..28: note = Probe
  source 1..28: mol_type = other DNA
acgcgggagaccggggttcaattccccg

SEQ ID NO: 37908 - DNA, 30 bp, synthetic construct; identical to SEQ ID NO: 12588
  misc_feature 1..30: note = Probe
  source 1..30: mol_type = other DNA

SEQ ID NO: 37909 - DNA, 31 bp, synthetic construct; identical to SEQ ID NO: 176
  misc_feature 1..31: note = Probe
  source 1..31: mol_type = other DNA

SEQ ID NO: 37910 - DNA, 37 bp, synthetic construct; identical to SEQ ID NO: 2859
  misc_feature 1..37: note = Probe
  source 1..37: mol_type = other DNA

SEQ ID NO: 37911 - DNA, 21 bp, synthetic construct
  misc_feature 1..21: note = Probe
  source 1..21: mol_type = other DNA
acgcgggagaccggggttcga

SEQ ID NO: 37912 - DNA, 22 bp, synthetic construct
  misc_feature 1..22: note = Probe
  source 1..22: mol_type = other DNA
acgcgggagaccggggttcgat

SEQ ID NO: 37913 - DNA, 29 bp, synthetic construct
  misc_feature 1..29: note = Probe
  source 1..29: mol_type = other DNA
acgcgggagaccggggttcgattccccaa

SEQ ID NO: 37914 - DNA, 33 bp, synthetic construct; identical to SEQ ID NO: 15821
  misc_feature 1..33: note = Probe
  source 1..33: mol_type = other DNA

SEQ ID NO: 37915 - DNA, 36 bp, synthetic construct; identical to SEQ ID NO: 15822
  misc_feature 1..36: note = Probe
  source 1..36: mol_type = other DNA

SEQ ID NO: 37916 - DNA, 37 bp, synthetic construct; identical to SEQ ID NO: 2865
  misc_feature 1..37: note = Probe
  source 1..37: mol_type = other DNA

SEQ ID NO: 37917 - DNA, 45 bp, synthetic construct
  misc_feature 1..45: note = Probe
  source 1..45: mol_type = other DNA
acgcgggagaccggggttcgattccccgacggggagaaaagttgc

SEQ ID NO: 37918 - DNA, 46 bp, synthetic construct
  misc_feature 1..46: note = Probe
  source 1..46: mol_type = other DNA
acgcgggagaccggggttcgattccccgacggggagaaaagttgct

SEQ ID NO: 37919 - DNA, 50 bp, synthetic construct; identical to SEQ ID NO: 15827
  misc_feature 1..50: note = Probe
  source 1..50: mol_type = other DNA

SEQ ID NO: 37920 - DNA, 45 bp, synthetic construct
  misc_feature 1..45: note = Probe
  source 1..45: mol_type = other DNA
acgcgggagaccggggttcgattccccgacggggagacgaagcag

SEQ ID NO: 37921 - DNA, 50 bp, synthetic construct
  misc_feature 1..50: note = Probe
  source 1..50: mol_type = other DNA
acgcgggagaccggggttcgattccccgacggggagacgaagcagttgct

SEQ ID NO: 37922 - DNA, 45 bp, synthetic construct
  misc_feature 1..45: note = Probe
  source 1..45: mol_type = other DNA
acgcgggagaccggggttcgattccccgacggggagagtactagc

SEQ ID NO: 37923 - DNA, 50 bp, synthetic construct
  misc_feature 1..50: note = Probe
  source 1..50: mol_type = other DNA
acgcgggagaccggggttcgattccccgacggggagagtactagcagttt

SEQ ID NO: 37924 - DNA, 37 bp, synthetic construct; identical to SEQ ID NO: 2872
  misc_feature 1..37: note = Probe
  source 1..37: mol_type = other DNA

SEQ ID NO: 37925 - DNA, 39 bp, synthetic construct; identical to SEQ ID NO: 15834
  misc_feature 1..39: note = Probe
  source 1..39: mol_type = other DNA

SEQ ID NO: 37926 - DNA, 42 bp, synthetic construct
  misc_feature 1..42: note = Probe
  source 1..42: mol_type = other DNA
acgcgggagaccggggttcgattccccgacggggaggaggct

SEQ ID NO: 37927 - DNA, 45 bp, synthetic construct
  misc_feature 1..45: note = Probe
  source 1..45: mol_type = other DNA
acgcgggagaccggggttcgattccccgacggggaggaggcttaa

SEQ ID NO: 37928 - DNA, 46 bp, synthetic construct
  misc_feature 1..46: note = Probe
  source 1..46: mol_type = other DNA
acgcgggagaccggggttcgattccccgacggggaggaggcttaaa

SEQ ID NO: 37929 - DNA, 49 bp, synthetic construct
  misc_feature 1..49: note = Probe
  source 1..49: mol_type = other DNA
acgcgggagaccggggttcgattccccgacggggaggaggcttaaactt

SEQ ID NO: 37930 - DNA, 50 bp, synthetic construct
  misc_feature 1..50: note = Probe
  source 1..50: mol_type = other DNA
acgcgggagaccggggttcgattccccgacggggaggaggcttaaacttt

SEQ ID NO: 37931 - DNA, 46 bp, synthetic construct
  misc_feature 1..46: note = Probe
  source 1..46: mol_type = other DNA
acgcgggagaccggggttcgattccccgacggggaggcacagtaat

SEQ ID NO: 37932 - DNA, 50 bp, synthetic construct; identical to SEQ ID NO: 15840
  misc_feature 1..50: note = Probe
  source 1..50: mol_type = other DNA

SEQ ID NO: 37933 - DNA, 41 bp, synthetic construct
  misc_feature 1..41: note = Probe
  source 1..41: mol_type = other DNA
acgcgggagaccggggttcgattccccgacggggaggcagc

SEQ ID NO: 37934 - DNA, 42 bp, synthetic construct
  misc_feature 1..42: note = Probe
  source 1..42: mol_type = other DNA
acgcgggagaccggggttcgattccccgacggggaggcagcc

SEQ ID NO: 37935 - DNA, 45 bp, synthetic construct
  misc_feature 1..45: note = Probe
  source 1..45: mol_type = other DNA
acgcgggagaccggggttcgattccccgacggggaggcagccgtg

SEQ ID NO: 37936 - DNA, 50 bp, synthetic construct
  misc_feature 1..50: note = Probe
  source 1..50: mol_type = other DNA
acgcgggagaccggggttcgattccccgacggggaggcagccgtgctttt

SEQ ID NO: 37937 - DNA, 50 bp, synthetic construct
  misc_feature 1..50: note = Probe
  source 1..50: mol_type = other DNA
acgcgggagaccggggttcgattccccgacggggaggccaagtacgtttt

SEQ ID NO: 37938 - DNA, 41 bp, synthetic construct; identical to SEQ ID NO: 15842
  misc_feature 1..41: note = Probe
  source 1..41: mol_type = other DNA

SEQ ID NO: 37939 - DNA, 42 bp, synthetic construct
  misc_feature 1..42: note = Probe
  source 1..42: mol_type = other DNA
acgcgggagaccggggttcgattccccgacggggaggccggg

SEQ ID NO: 37940 - DNA, 44 bp, synthetic construct
  misc_feature 1..44: note = Probe
  source 1..44: mol_type = other DNA
acgcgggagaccggggttcgattccccgacggggaggccgggta

SEQ ID NO: 37941 - DNA, 45 bp, synthetic construct
  misc_feature 1..45: note = Probe
  source 1..45: mol_type = other DNA
acgcgggagaccggggttcgattccccgacggggaggccgggtac

SEQ ID NO: 37942 - DNA, 50 bp, synthetic construct; identical to SEQ ID NO: 2878
  misc_feature 1..50: note = Probe
  source 1..50: mol_type = other DNA

SEQ ID NO: 37943 - DNA, 26 bp, synthetic construct
  misc_feature 1..26: note = Probe
  source 1..26: mol_type = other DNA
acgcgggaggcccgggttcgattccc

SEQ ID NO: 37944 - DNA, 30 bp, synthetic construct; identical to SEQ ID NO: 15846
  misc_feature 1..30: note = Probe
  source 1..30: mol_type = other DNA

SEQ ID NO: 37945 - DNA, 33 bp, synthetic construct; identical to SEQ ID NO: 15848
  misc_feature 1..33: note = Probe
  source 1..33: mol_type = other DNA

SEQ ID NO: 37946 - DNA, 36 bp, synthetic construct; identical to SEQ ID NO: 2880
  misc_feature 1..36: note = Probe
  source 1..36: mol_type = other DNA

SEQ ID NO: 37947 - DNA, 39 bp, synthetic construct; identical to SEQ ID NO: 2882
  misc_feature 1..39: note = Probe
  source 1..39: mol_type = other DNA

SEQ ID NO: 37948 - DNA, 50 bp, synthetic construct
  misc_feature 1..50: note = Probe
  source 1..50: mol_type = other DNA
acgcgggaggcccgggttcgattcccggccaatgcacgagtacagttttc

SEQ ID NO: 37949 - DNA, 39 bp, synthetic construct; identical to SEQ ID NO: 2883
  misc_feature 1..39: note = Probe
  source 1..39: mol_type = other DNA

SEQ ID NO: 37950 - DNA, 36 bp, synthetic construct; identical to SEQ ID NO: 15864
  misc_feature 1..36: note = Probe
  source 1..36: mol_type = other DNA

SEQ ID NO: 37951 - DNA, 39 bp, synthetic construct; identical to SEQ ID NO: 2886
  misc_feature 1..39: note = Probe
  source 1..39: mol_type = other DNA

SEQ ID NO: 37952 - DNA, 26 bp, synthetic construct
  misc_feature 1..26: note = Probe
  source 1..26: mol_type = other DNA
acgcgtgggttcgaatcccatcctcg

SEQ ID NO: 37953 - DNA, 27 bp, synthetic construct
  misc_feature 1..27: note = Probe
  source 1..27: mol_type = other DNA
acgcgtgggttcgaatcccatcctcgt

SEQ ID NO: 37954 - DNA, 32 bp, synthetic construct
  misc_feature 1..32: note = Probe
  source 1..32: mol_type = other DNA
acgcgttggtggtatagtggtgagcatagctg

SEQ ID NO: 37955 - DNA, 20 bp, synthetic construct
  misc_feature 1..20: note = Probe
  source 1..20: mol_type = other DNA
acggcgtgattcataccttt

SEQ ID NO: 37956 - DNA, 38 bp, synthetic construct; identical to SEQ ID NO: 15872
  misc_feature 1..38: note = Probe
  source 1..38: mol_type = other DNA

SEQ ID NO: 37957 - DNA, 39 bp, synthetic construct
  misc_feature 1..39: note = Probe
  source 1..39: mol_type = other DNA
acggcttgtcctcgttagtatagtggtgagtatccccgc

SEQ ID NO: 37958 - DNA, 37 bp, synthetic construct; identical to SEQ ID NO: 15876
  misc_feature 1..37: note = Probe
  source 1..37: mol_type = other DNA

SEQ ID NO: 37959 - DNA, 42 bp, synthetic construct; identical to SEQ ID NO: 15879
  misc_feature 1..42: note = Probe
  source 1..42: mol_type = other DNA

SEQ ID NO: 37960 - DNA, 43 bp, synthetic construct; identical to SEQ ID NO: 15880
  misc_feature 1..43: note = Probe
  source 1..43: mol_type = other DNA

SEQ ID NO: 37961 - DNA, 50 bp, synthetic construct; identical to SEQ ID NO: 15881
  misc_feature 1..50: note = Probe
  source 1..50: mol_type = other DNA

SEQ ID NO: 37962 - DNA, 28 bp, synthetic construct
  misc_feature 1..28: note = Probe
  source 1..28: mol_type = other DNA
acgggctcacatcaccccataaacaaat

SEQ ID NO: 37963 - DNA, 50 bp, synthetic construct
  misc_feature 1..50: note = Probe
  source 1..50: mol_type = other DNA
acgggggtgtagctcagtggtagagcgcgtgcttagcatgcacgaggccc

SEQ ID NO: 37964 - DNA, 18 bp, synthetic construct
  misc_feature 1..18: note = Probe
  source 1..18: mol_type = other DNA
acgggtccccggtagctc

SEQ ID NO: 37965 - DNA, 50 bp, synthetic construct
  misc_feature 1..50: note = Probe
  source 1..50: mol_type = other DNA
acgtcccttcgatagctcagctggtagagcggaggactgtagctacttcc

SEQ ID NO: 37966 - DNA, 24 bp, synthetic construct
  misc_feature 1..24: note = Probe
  source 1..24: mol_type = other DNA
acgtgggttcgaatcccatcctcg

SEQ ID NO: 37967 - DNA, 24 bp, synthetic construct
  misc_feature 1..24: note = Probe
  source 1..24: mol_type = other DNA
acgttgggcgcgggttgtaacttt

SEQ ID NO: 37968 - DNA, 25 bp, synthetic construct
  misc_feature 1..25: note = Probe
  source 1..25: mol_type = other DNA
acgttgggcgcgggttgtaactttt

SEQ ID NO: 37969 - DNA, 34 bp, synthetic construct; identical to SEQ ID NO: 192
  misc_feature 1..34: note = Probe
  source 1..34: mol_type = other DNA

SEQ ID NO: 37970 - DNA, 36 bp, synthetic construct; identical to SEQ ID NO: 2894
  misc_feature 1..36: note = Probe
  source 1..36: mol_type = other DNA

SEQ ID NO: 37971 - DNA, 37 bp, synthetic construct; identical to SEQ ID NO: 2895
  misc_feature 1..37: note = Probe
  source 1..37: mol_type = other DNA

SEQ ID NO: 37972 - DNA, 38 bp, synthetic construct; identical to SEQ ID NO: 2896
  misc_feature 1..38: note = Probe
  source 1..38: mol_type = other DNA

SEQ ID NO: 37973 - DNA, 41 bp, synthetic construct; identical to SEQ ID NO: 2899
  misc_feature 1..41: note = Probe
  source 1..41: mol_type = other DNA

SEQ ID NO: 37974 - DNA, 21 bp, synthetic construct
  misc_feature 1..21: note = Probe
  source 1..21: mol_type = other DNA
actacggatcagaagattcca

SEQ ID NO: 37975 - DNA, 22 bp, synthetic construct
  misc_feature 1..22: note = Probe
  source 1..22: mol_type = other DNA
actacggatcagaagattccag

SEQ ID NO: 37976 - DNA, 24 bp, synthetic construct
  misc_feature 1..24: note = Probe
  source 1..24: mol_type = other DNA
actacggatcagaagattccaggt

SEQ ID NO: 37977 - DNA, 41 bp, synthetic construct
  misc_feature 1..41: note = Probe
  source 1..41: mol_type = other DNA
actacggatcagaagattccaggttcgactcctggctggct

SEQ ID NO: 37978 - DNA, 46 bp, synthetic construct
  misc_feature 1..46: note = Probe
  source 1..46: mol_type = other DNA
actacggatcagaagattccaggttcgactcctggctggctcggtg

SEQ ID NO: 37979 - DNA, 22 bp, synthetic construct
  misc_feature 1..22: note = Probe
  source 1..22: mol_type = other DNA
actacggatcagaagattctag

SEQ ID NO: 37980 - DNA, 23 bp, synthetic construct
  misc_feature 1..23: note = Probe
  source 1..23: mol_type = other DNA
actacggatcagaagattctagg

SEQ ID NO: 37981 - DNA, 24 bp, synthetic construct
  misc_feature 1..24: note = Probe
  source 1..24: mol_type = other DNA
actacggatcagaagattctaggt

SEQ ID NO: 37982 - DNA, 27 bp, synthetic construct
  misc_feature 1..27: note = Probe
  source 1..27: mol_type = other DNA
actacggatcagaagattctaggttcg

SEQ ID NO: 37983 - DNA, 41 bp, synthetic construct
  misc_feature 1..41: note = Probe
  source 1..41: mol_type = other DNA
actacggatcagaagattctaggttcgactcctggctggct

SEQ ID NO: 37984 - DNA, 46 bp, synthetic construct
  misc_feature 1..46: note = Probe
  source 1..46: mol_type = other DNA
actacggatcagaagattctaggttcgactcctggctggctcgcga

SEQ ID NO: 37985 - DNA, 28 bp, synthetic construct
  misc_feature 1..28: note = Probe
  source 1..28: mol_type = other DNA
actagaaatccattggggtctccccgcg

SEQ ID NO: 37986 - DNA, 30 bp, synthetic construct
  misc_feature 1..30: note = Probe
  source 1..30: mol_type = other DNA
actagaaatccattggggtctccccgcgca

SEQ ID NO: 37987 - DNA, 31 bp, synthetic construct
  misc_feature 1..31: note = Probe
  source 1..31: mol_type = other DNA
actagaaatccattggggtctccccgcgcag

SEQ ID NO: 37988 - DNA, 21 bp, synthetic construct
  misc_feature 1..21: note = Probe
  source 1..21: mol_type = other DNA
actcaagctaagcttcctccg

SEQ ID NO: 37989 - DNA, 18 bp, synthetic construct
  misc_feature 1..18: note = Probe
  source 1..18: mol_type = other DNA
actcaagcttggcttcct

SEQ ID NO: 37990 - DNA, 33 bp, synthetic construct; identical to SEQ ID NO: 2909
  misc_feature 1..33: note = Probe
  source 1..33: mol_type = other DNA

SEQ ID NO: 37991 - DNA, 34 bp, synthetic construct; identical to SEQ ID NO: 2910
  misc_feature 1..34: note = Probe
  source 1..34: mol_type = other DNA

SEQ ID NO: 37992 - DNA, 35 bp, synthetic construct; identical to SEQ ID NO: 2911
  misc_feature 1..35: note = Probe
  source 1..35: mol_type = other DNA

SEQ ID NO: 37993 - DNA, 36 bp, synthetic construct; identical to SEQ ID NO: 2912
  misc_feature 1..36: note = Probe
  source 1..36: mol_type = other DNA

SEQ ID NO: 37994 - DNA, 37 bp, synthetic construct; identical to SEQ ID NO: 2913
  misc_feature 1..37: note = Probe
  source 1..37: mol_type = other DNA

SEQ ID NO: 37995 - DNA, 38 bp, synthetic construct; identical to SEQ ID NO: 2914
  misc_feature 1..38: note = Probe
  source 1..38: mol_type = other DNA

SEQ ID NO: 37996 - DNA, 42 bp, synthetic construct; identical to SEQ ID NO: 15934
  misc_feature 1..42: note = Probe
  source 1..42: mol_type = other DNA

SEQ ID NO: 37997 - DNA, 45 bp, synthetic construct
  misc_feature 1..45: note = Probe
  source 1..45: mol_type = other DNA
actcatgcccccatgtctaacaacatggctttctcaacttttaaa

SEQ ID NO: 37998 - DNA, 35 bp, synthetic construct; identical to SEQ ID NO: 2917
  misc_feature 1..35: note = Probe
  source 1..35: mol_type = other DNA

SEQ ID NO: 37999 - DNA, 18 bp, synthetic construct
  misc_feature 1..18: note = Probe
  source 1..18: mol_type = other DNA
actccagatcagaaggct

SEQ ID NO: 38000 - DNA, 19 bp, synthetic construct
  misc_feature 1..19: note = Probe
  source 1..19: mol_type = other DNA
actccagatcagaaggttg

SEQ ID NO: 38001 - DNA, 22 bp, synthetic construct
  misc_feature 1..22: note = Probe
  source 1..22: mol_type = other DNA
actccagatcagaaggttgcgt

SEQ ID NO: 38002 - DNA, 24 bp, synthetic construct
  misc_feature 1..24: note = Probe
  source 1..24: mol_type = other DNA
actccagatcagaaggttgcgtgt

SEQ ID NO: 38003 - DNA, 25 bp, synthetic construct
  misc_feature 1..25: note = Probe
  source 1..25: mol_type = other DNA
actccagatcagaaggttgcgtgtt

SEQ ID NO: 38004 - DNA, 28 bp, synthetic construct
  misc_feature 1..28: note = Probe
  source 1..28: mol_type = other DNA
actcctggctggctcgcgatgtctgttt

SEQ ID NO: 38005 - DNA, 29 bp, synthetic construct
  misc_feature 1..29: note = Probe
  source 1..29: mol_type = other DNA
actcctggctggctcgcgatgtctgtttt

SEQ ID NO: 38006 - DNA, 32 bp, synthetic construct
  misc_feature 1..32: note = Probe
  source 1..32: mol_type = other DNA
actcctggctggctcgcttgtgctctcacttt

SEQ ID NO: 38007 - DNA, 33 bp, synthetic construct
  misc_feature 1..33: note = Probe
  source 1..33: mol_type = other DNA
actcctggctggctcgcttgtgctctcactttt

SEQ ID NO: 38008 - DNA, 33 bp, synthetic construct
  misc_feature 1..33: note = Probe
  source 1..33: mol_type = other DNA
actcgaaatccaatgggggttccccgcgcaggt

SEQ ID NO: 38009 - DNA, 26 bp, synthetic construct
  misc_feature 1..26: note = Probe
  source 1..26: mol_type = other DNA
actcgaaatccaatggggtctccccg

SEQ ID NO: 38010 - DNA, 31 bp, synthetic construct
  misc_feature 1..31: note = Probe
  source 1..31: mol_type = other DNA
actcgaaatccaatggggtttccccgcacag

SEQ ID NO: 38011 - DNA, 18 bp, synthetic construct
  misc_feature 1..18: note = Probe
  source 1..18: mol_type = other DNA
actctgaatccagcgatc

SEQ ID NO: 38012 - DNA, 19 bp, synthetic construct
  misc_feature 1..19: note = Probe
  source 1..19: mol_type = other DNA
actctgaatccagcgatcc

SEQ ID NO: 38013 - DNA, 39 bp, synthetic construct
  misc_feature 1..39: note = Probe
  source 1..39: mol_type = other DNA
actctgaatccagcgatccgagttcaaatctcggtggaa

SEQ ID NO: 38014 - DNA, 45 bp, synthetic construct
  misc_feature 1..45: note = Probe
  source 1..45: mol_type = other DNA
actctgaatccagcgatccgagttcaaatctcggtggaacctgca

SEQ ID NO: 38015 - DNA, 39 bp, synthetic construct
  misc_feature 1..39: note = Probe
  source 1..39: mol_type = other DNA
actctgaatccagcgatccgagttcaagtctcggtggaa

SEQ ID NO: 38016 - DNA, 42 bp, synthetic construct
  misc_feature 1..42: note = Probe
  source 1..42: mol_type = other DNA
actctgaatccagcgatccgagttcaagtctcggtggaacct

SEQ ID NO: 38017 - DNA, 45 bp, synthetic construct
  misc_feature 1..45: note = Probe
  source 1..45: mol_type = other DNA
actctgaatccagcgatccgagttcaagtctcggtggaacctgct

SEQ ID NO: 38018 - DNA, 45 bp, synthetic construct
  misc_feature 1..45: note = Probe
  source 1..45: mol_type = other DNA
actctgaatccagcgatccgagttcgagtctcggtggaacctttg

SEQ ID NO: 38019 - DNA, 22 bp, synthetic construct
  misc_feature 1..22: note = Probe
  source 1..22: mol_type = other DNA
actctgaatccggtaatccgag

SEQ ID NO: 38020 - DNA, 20 bp, synthetic construct
  misc_feature 1..20: note = Probe
  source 1..20: mol_type = other DNA
actcttaatcccagggtcgt

SEQ ID NO: 38021 - DNA, 21 bp, synthetic construct
  misc_feature 1..21: note = Probe
  source 1..21: mol_type = other DNA
actcttaatcccagggtcgtg

SEQ ID NO: 38022 - DNA, 22 bp, synthetic construct
  misc_feature 1..22: note = Probe
  source 1..22: mol_type = other DNA
actcttaatcccagggtcgtgg

SEQ ID NO: 38023 - DNA, 46 bp, synthetic construct
  misc_feature 1..46: note = Probe
  source 1..46: mol_type = other DNA
actcttaatcccagggtcgtgggttcgagccccacgttgggcgggt

SEQ ID NO: 38024 - DNA, 19 bp, synthetic construct
  misc_feature 1..19: note = Probe
  source 1..19: mol_type = other DNA
actcttaatctcagggtcg

SEQ ID NO: 38025 - DNA, 20 bp, synthetic construct
  misc_feature 1..20: note = Probe
  source 1..20: mol_type = other DNA
actcttaatctcagggtcgt

SEQ ID NO: 38026 - DNA, 21 bp, synthetic construct
  misc_feature 1..21: note = Probe
  source 1..21: mol_type = other DNA
actcttaatctcagggtcgtg

SEQ ID NO: 38027 - DNA, 22 bp, synthetic construct
  misc_feature 1..22: note = Probe
  source 1..22: mol_type = other DNA
actcttaatctcagggtcgtgg

SEQ ID NO: 38028 - DNA, 23 bp, synthetic construct
  misc_feature 1..23: note = Probe
  source 1..23: mol_type = other DNA
actcttaatctcagggtcgtggg

SEQ ID NO: 38029 - DNA, 24 bp, synthetic construct
  misc_feature 1..24: note = Probe
  source 1..24: mol_type = other DNA
actcttaatctcagggtcgtgggt

SEQ ID NO: 38030 - DNA, 26 bp, synthetic construct
  misc_feature 1..26: note = Probe
  source 1..26: mol_type = other DNA
actcttaatctcagggtcgtgggttc

SEQ ID NO: 38031 - DNA, 41 bp, synthetic construct
  misc_feature 1..41: note = Probe
  source 1..41: mol_type = other DNA
actcttaatctcagggtcgtgggttcgagccccacgttggg

SEQ ID NO: 38032 - DNA, 42 bp, synthetic construct
  misc_feature 1..42: note = Probe
  source 1..42: mol_type = other DNA
actcttaatctcagggtcgtgggttcgagccccacgttgggc

SEQ ID NO: 38033 - DNA, 50 bp, synthetic construct
  misc_feature 1..50: note = Probe
  source 1..50: mol_type = other DNA
actcttaatctcagggtcgtgggttcgagccccacgttgggcgattcctt

SEQ ID NO: 38034 - DNA, 46 bp, synthetic construct
  misc_feature 1..46: note = Probe
  source 1..46: mol_type = other DNA
actcttaatctcagggtcgtgggttcgagccccacgttgggcgctg

SEQ ID NO: 38035 - DNA, 49 bp, synthetic construct
  misc_feature 1..49: note = Probe
  source 1..49: mol_type = other DNA
actcttaatctcagggtcgtgggttcgagccccacgttgggcgctgtgt

SEQ ID NO: 38036 - DNA, 50 bp, synthetic construct
  misc_feature 1..50: note = Probe
  source 1..50: mol_type = other DNA
actcttaatctcagggtcgtgggttcgagccccacgttgggcgctgtgtt

SEQ ID NO: 38037 - DNA, 46 bp, synthetic construct
  misc_feature 1..46: note = Probe
  source 1..46: mol_type = other DNA
actcttaatctcagggtcgtgggttcgagccccacgttgggcggca

SEQ ID NO: 38038 - DNA, 50 bp, synthetic construct
  misc_feature 1..50: note = Probe
  source 1..50: mol_type = other DNA
actcttaatctcagggtcgtgggttcgagccccacgttgggcggcaactg

SEQ ID NO: 38039 - DNA, 33 bp, synthetic construct; identical to SEQ ID NO: 196
  misc_feature 1..33: note = Probe
  source 1..33: mol_type = other DNA

SEQ ID NO: 38040 - DNA, 42 bp, synthetic construct; identical to SEQ ID NO: 2937
  misc_feature 1..42: note = Probe
  source 1..42: mol_type = other DNA

SEQ ID NO: 38041 - DNA, 43 bp, synthetic construct; identical to SEQ ID NO: 2938
  misc_feature 1..43: note = Probe
  source 1..43: mol_type = other DNA

SEQ ID NO: 38042 - DNA, 44 bp, synthetic construct; identical to SEQ ID NO: 2939
  misc_feature 1..44: note = Probe
  source 1..44: mol_type = other DNA

SEQ ID NO: 38043 - DNA, 45 bp, synthetic construct; identical to SEQ ID NO: 2940
  misc_feature 1..45: note = Probe
  source 1..45: mol_type = other DNA

SEQ ID NO: 38044 - DNA, 18 bp, synthetic construct
  misc_feature 1..18: note = Probe
  source 1..18: mol_type = other DNA
actgaagatctaaaggtc

SEQ ID NO: 38045 - DNA, 20 bp, synthetic construct
  misc_feature 1..20: note = Probe
  source 1..20: mol_type = other DNA
actgaagatctaaaggtccc

SEQ ID NO: 38046 - DNA, 21 bp, synthetic construct
  misc_feature 1..21: note = Probe
  source 1..21: mol_type = other DNA
actgaagatctaaaggtccct

SEQ ID NO: 38047 - DNA, 22 bp, synthetic construct
  misc_feature 1..22: note = Probe
  source 1..22: mol_type = other DNA
actgaagatctaaaggtccctg

SEQ ID NO: 38048 - DNA, 23 bp, synthetic construct
  misc_feature 1..23: note = Probe
  source 1..23: mol_type = other DNA
actgaagatctaaaggtccctgg

SEQ ID NO: 38049 - DNA, 20 bp, synthetic construct
  misc_feature 1..20: note = Probe
  source 1..20: mol_type = other DNA
actgcagatcaagaggtccc

SEQ ID NO: 38050 - DNA, 21 bp, synthetic construct
  misc_feature 1..21: note = Probe
  source 1..21: mol_type = other DNA
actgcagatcaagaggtcccc

SEQ ID NO: 38051 - DNA, 22 bp, synthetic construct
  misc_feature 1..22: note = Probe
  source 1..22: mol_type = other DNA
actgcagatcaagaggtccccg

SEQ ID NO: 38052 - DNA, 22 bp, synthetic construct
  misc_feature 1..22: note = Probe
  source 1..22: mol_type = other DNA
actgcagatcaagaggtccctg

SEQ ID NO: 38053 - DNA, 23 bp, synthetic construct
  misc_feature 1..23: note = Probe
  source 1..23: mol_type = other DNA
actgcagatcaagaggtccctgg

SEQ ID NO: 38054 - DNA, 45 bp, synthetic construct; identical to SEQ ID NO: 2955
  misc_feature 1..45: note = Probe
  source 1..45: mol_type = other DNA

SEQ ID NO: 38055 - DNA, 46 bp, synthetic construct; identical to SEQ ID NO: 2956
  misc_feature 1..46: note = Probe
  source 1..46: mol_type = other DNA

SEQ ID NO: 38056 - DNA, 46 bp, synthetic construct; identical to SEQ ID NO: 2970
  misc_feature 1..46: note = Probe
  source 1..46: mol_type = other DNA

SEQ ID NO: 38057 - DNA, 19 bp, synthetic construct
  misc_feature 1..19: note = Probe
  source 1..19: mol_type = other DNA
acttaacttgaccgctctg

SEQ ID NO: 38058 - DNA, 20 bp, synthetic construct
  misc_feature 1..20: note = Probe
  source 1..20: mol_type = other DNA
acttaacttgaccgctctga

SEQ ID NO: 38059 - DNA, 23 bp, synthetic construct
  misc_feature 1..23: note = Probe
  source 1..23: mol_type = other DNA
acttaacttgaccgctctgagct

SEQ ID NO: 38060 - DNA, 21 bp, synthetic construct
  misc_feature 1..21: note = Probe
  source 1..21: mol_type = other DNA
acttacacttaggagatttca

SEQ ID NO: 38061 - DNA, 22 bp, synthetic construct
  misc_feature 1..22: note = Probe
  source 1..22: mol_type = other DNA
acttacacttaggagatttcaa

SEQ ID NO: 38062 - DNA, 37 bp, synthetic construct; identical to SEQ ID NO: 2984
  misc_feature 1..37: note = Probe
  source 1..37: mol_type = other DNA

SEQ ID NO: 38063 - DNA, 43 bp, synthetic construct; identical to SEQ ID NO: 2989
  misc_feature 1..43: note = Probe
  source 1..43: mol_type = other DNA

SEQ ID NO: 38064 - DNA, 44 bp, synthetic construct; identical to SEQ ID NO: 2990
  misc_feature 1..44: note = Probe
  source 1..44: mol_type = other DNA

SEQ ID NO: 38065 - DNA, 45 bp, synthetic construct; identical to SEQ ID NO: 2991
  misc_feature 1..45: note = Probe
  source 1..45: mol_type = other DNA

SEQ ID NO: 38066 - DNA, 46 bp, synthetic construct
  misc_feature 1..46: note = Probe
  source 1..46: mol_type = other DNA
acttacacttaggagatttcaacttaacttgaccgctctgagctaa

SEQ ID NO: 38067 - DNA, 50 bp, synthetic construct; identical to SEQ ID NO: 201
  misc_feature 1..50: note = Probe
  source 1..50: mol_type = other DNA

SEQ ID NO: 38068 - DNA, 37 bp, synthetic construct; identical to SEQ ID NO: 3004
  misc_feature 1..37: note = Probe
  source 1..37: mol_type = other DNA

SEQ ID NO: 38069 - DNA, 38 bp, synthetic construct; identical to SEQ ID NO: 3005
  misc_feature 1..38: note = Probe
  source 1..38: mol_type = other DNA

SEQ ID NO: 38070 - DNA, 39 bp, synthetic construct; identical to SEQ ID NO: 3006
  misc_feature 1..39: note = Probe
  source 1..39: mol_type = other DNA

SEQ ID NO: 38071 - DNA, 21 bp, synthetic construct
  misc_feature 1..21: note = Probe
  source 1..21: mol_type = other DNA
acttccaattaactagttttg

SEQ ID NO: 38072 - DNA, 22 bp, synthetic construct
  misc_feature 1..22: note = Probe
  source 1..22: mol_type = other DNA
acttccaattaactagttttga

SEQ ID NO: 38073 - DNA, 43 bp, synthetic construct; identical to SEQ ID NO: 3009
  misc_feature 1..43: note = Probe
  source 1..43: mol_type = other DNA

SEQ ID NO: 38074 - DNA, 44 bp, synthetic construct; identical to SEQ ID NO: 3010
  misc_feature 1..44: note = Probe
  source 1..44: mol_type = other DNA

SEQ ID NO: 38075 - DNA, 46 bp, synthetic construct
  misc_feature 1..46: note = Probe
  source 1..46: mol_type = other DNA
acttcggatcagaagattgcaggttcgagtcctgccgcggtcgaag

SEQ ID NO: 38076 - DNA, 21 bp, synthetic construct
  misc_feature 1..21: note = Probe
  source 1..21: mol_type = other DNA
acttctgacacaactatctta

SEQ ID NO: 38077 - DNA, 23 bp, synthetic construct
  misc_feature 1..23: note = Probe
  source 1..23: mol_type = other DNA
acttctgacacaactatcttatt

SEQ ID NO: 38078 - DNA, 23 bp, synthetic construct
  misc_feature 1..23: note = Probe
  source 1..23: mol_type = other DNA
acttctgacacagcctgatcttt

SEQ ID NO: 38079 - DNA, 18 bp, synthetic construct
  misc_feature 1..18: note = Probe
  source 1..18: mol_type = other DNA
acttctgacacatacttt

SEQ ID NO: 38080 - DNA, 25 bp, synthetic construct
  misc_feature 1..25: note = Probe
  source 1..25: mol_type = other DNA
acttctgacagagctcaattacttt

SEQ ID NO: 38081 - DNA, 28 bp, synthetic construct
  misc_feature 1..28: note = Probe
  source 1..28: mol_type = other DNA
acttgaaatccattggggtctccccgcg

SEQ ID NO: 38082 - DNA, 30 bp, synthetic construct
  misc_feature 1..30: note = Probe
  source 1..30: mol_type = other DNA
acttgaaatccattggggtctccccgcgca

SEQ ID NO: 38083 - DNA, 31 bp, synthetic construct
  misc_feature 1..31: note = Probe
  source 1..31: mol_type = other DNA
acttgaaatccattggggtctccccgcgcag

SEQ ID NO: 38084 - DNA, 31 bp, synthetic construct
  misc_feature 1..31: note = Probe
  source 1..31: mol_type = other DNA
acttgaaatccattggggtttccccgcgcag

SEQ ID NO: 38085 - DNA, 20 bp, synthetic construct
  misc_feature 1..20: note = Probe
  source 1..20: mol_type = other DNA
acttgctggggtggcggttt

SEQ ID NO: 38086 - DNA, 33 bp, synthetic construct; identical to SEQ ID NO: 3015
  misc_feature 1..33: note = Probe
  source 1..33: mol_type = other DNA

SEQ ID NO: 38087 - DNA, 35 bp, synthetic construct; identical to SEQ ID NO: 3016
  misc_feature 1..35: note = Probe
  source 1..35: mol_type = other DNA

SEQ ID NO: 38088 - DNA, 36 bp, synthetic construct; identical to SEQ ID NO: 16031
  misc_feature 1..36: note = Probe
  source 1..36: mol_type = other DNA

SEQ ID NO: 38089 - DNA, 38 bp, synthetic construct; identical to SEQ ID NO: 3018
  misc_feature 1..38: note = Probe
  source 1..38: mol_type = other DNA

SEQ ID NO: 38090 - DNA, 21 bp, synthetic construct
  misc_feature 1..21: note = Probe
  source 1..21: mol_type = other DNA
actttgaatccagcaatccga

SEQ ID NO: 38091 - DNA, 23 bp, synthetic construct
  misc_feature 1..23: note = Probe
  source 1..23: mol_type = other DNA
actttgaatccagcaatccgagt

SEQ ID NO: 38092 - DNA, 18 bp, synthetic construct
  misc_feature 1..18: note = Probe
  source 1..18: mol_type = other DNA
actttgaatccagcgatc

SEQ ID NO: 38093 - DNA, 23 bp, synthetic construct
  misc_feature 1..23: note = Probe
  source 1..23: mol_type = other DNA
actttgaatccagcgatccgagt

SEQ ID NO: 38094 - DNA, 42 bp, synthetic construct
  misc_feature 1..42: note = Probe
  source 1..42: mol_type = other DNA
actttgaatccagcgatccgagttcaaatctcggtgggacct

SEQ ID NO: 38095 - DNA, 45 bp, synthetic construct
  misc_feature 1..45: note = Probe
  source 1..45: mol_type = other DNA
actttgaatccagcgatccgagttcaaatctcggtgggacctcac

SEQ ID NO: 38096 - DNA, 50 bp, synthetic construct; identical to SEQ ID NO: 3033
  misc_feature 1..50: note = Probe
  source 1..50: mol_type = other DNA

SEQ ID NO: 38097 - DNA, 31 bp, synthetic construct; identical to SEQ ID NO: 210
  misc_feature 1..31: note = Probe
  source 1..31: mol_type = other DNA

SEQ ID NO: 38098 - DNA, 32 bp, synthetic construct; identical to SEQ ID NO: 211
  misc_feature 1..32: note = Probe
  source 1..32: mol_type = other DNA

SEQ ID NO: 38099 - DNA, 33 bp, synthetic construct; identical to SEQ ID NO: 3035
  misc_feature 1..33: note = Probe
  source 1..33: mol_type = other DNA

SEQ ID NO: 38100 - DNA, 34 bp, synthetic construct; identical to SEQ ID NO: 212
  misc_feature 1..34: note = Probe
  source 1..34: mol_type = other DNA

SEQ ID NO: 38101 - DNA, 17 bp, synthetic construct
  misc_feature 1..17: note = Probe
  source 1..17: mol_type = other DNA
acttttaatctgagggt

SEQ ID NO: 38102 - DNA, 26 bp, synthetic construct
  misc_feature 1..26: note = Probe
  source 1..26: mol_type = other DNA
acttttaatctgagggtccagggttc

SEQ ID NO: 38103 - DNA, 27 bp, synthetic construct
  misc_feature 1..27: note = Probe
  source 1..27: mol_type = other DNA
acttttaatctgagggtccagggttca

SEQ ID NO: 38104 - DNA, 46 bp, synthetic construct
  misc_feature 1..46: note = Probe
  source 1..46: mol_type = other DNA
acttttaatctgagggtccagggttcaagtccctgtccaggcgcta

SEQ ID NO: 38105 - DNA, 46 bp, synthetic construct
  misc_feature 1..46: note = Probe
  source 1..46: mol_type = other DNA
acttttaatctgagggtccagggttcaagtccctgttcaggcatgt

SEQ ID NO: 38106 - DNA, 46 bp, synthetic construct
  misc_feature 1..46: note = Probe
  source 1..46: mol_type = other DNA
acttttaatctgagggtccagggttcaagtccctgttcaggcgaac

SEQ ID NO: 38107 - DNA, 42 bp, synthetic construct
  misc_feature 1..42: note = Probe
  source 1..42: mol_type = other DNA
acttttaatctgagggtccagggttcaagtccctgttcgggc

SEQ ID NO: 38108 - DNA, 46 bp, synthetic construct
  misc_feature 1..46: note = Probe
  source 1..46: mol_type = other DNA
acttttaatctgagggtccagggttcaagtccctgttcgggcggca

SEQ ID NO: 38109 - DNA, 50 bp, synthetic construct
  misc_feature 1..50: note = Probe
  source 1..50: mol_type = other DNA
acttttaatctgagggtccagggttcaagtccctgttcgggcggcatgtc

SEQ ID NO: 38110 - DNA, 50 bp, synthetic construct
  misc_feature 1..50: note = Probe
  source 1..50: mol_type = other DNA
acttttaatctgagggtccagggttcaagtccctgttcgggcggtatctt

SEQ ID NO: 38111 - DNA, 50 bp, synthetic construct
  misc_feature 1..50: note = Probe
  source 1..50: mol_type = other DNA
acttttaatctgagggtccagggttcaagtccctgttcgggcgtcttgtt

SEQ ID NO: 38112 - DNA, 29 bp, synthetic construct
  misc_feature 1..29: note = Probe
  source 1..29: mol_type = other DNA
agaaagctcacaagaactgctaactcatg

SEQ ID NO: 38113 - DNA, 50 bp, synthetic construct; identical to SEQ ID NO: 3052
  misc_feature 1..50: note = Probe
  source 1..50: mol_type = other DNA

SEQ ID NO: 38114 - DNA, 23 bp, synthetic construct
  misc_feature 1..23: note = Probe
  source 1..23: mol_type = other DNA
agaaccaacacctctttacagtg

SEQ ID NO: 38115 - DNA, 27 bp, synthetic construct
  misc_feature 1..27: note = Probe
  source 1..27: mol_type = other DNA
agaaccaacacctctttacagtgaaat

SEQ ID NO: 38116 - DNA, 45 bp, synthetic construct; identical to SEQ ID NO: 223
  misc_feature 1..45: note = Probe
  source 1..45: mol_type = other DNA

SEQ ID NO: 38117 - DNA, 50 bp, synthetic construct; identical to SEQ ID NO: 3070
  misc_feature 1..50: note = Probe
  source 1..50: mol_type = other DNA

SEQ ID NO: 38118 - DNA, 29 bp, synthetic construct
  misc_feature 1..29: note = Probe
  source 1..29: mol_type = other DNA
agaagattgagggttcgagtcccttcgtg

SEQ ID NO: 38119 - DNA, 30 bp, synthetic construct; identical to SEQ ID NO: 16111
  misc_feature 1..30: note = Probe
  source 1..30: mol_type = other DNA

SEQ ID NO: 38120 - DNA, 31 bp, synthetic construct; identical to SEQ ID NO: 230
  misc_feature 1..31: note = Probe
  source 1..31: mol_type = other DNA

SEQ ID NO: 38121 - DNA, 36 bp, synthetic construct; identical to SEQ ID NO: 3082
  misc_feature 1..36: note = Probe
  source 1..36: mol_type = other DNA

SEQ ID NO: 38122 - DNA, 50 bp, synthetic construct
  misc_feature 1..50: note = Probe
  source 1..50: mol_type = other DNA
agaagattgagggttcgagtcccttcgtggtcgttgccatgttaacgttt

SEQ ID NO: 38123 - DNA, 31 bp, synthetic construct; identical to SEQ ID NO: 3091
  misc_feature 1..31: note = Probe
  source 1..31: mol_type = other DNA

SEQ ID NO: 38124 - DNA, 31 bp, synthetic construct; identical to SEQ ID NO: 12641
  misc_feature 1..31: note = Probe
  source 1..31: mol_type = other DNA

SEQ ID NO: 38125 - DNA, 36 bp, synthetic construct; identical to SEQ ID NO: 3096
  misc_feature 1..36: note = Probe
  source 1..36: mol_type = other DNA

SEQ ID NO: 38126 - DNA, 29 bp, synthetic construct
  misc_feature 1..29: note = Probe
  source 1..29: mol_type = other DNA
agaatcttagctttgggtgctaatggtgg

SEQ ID NO: 38127 - DNA, 34 bp, synthetic construct; identical to SEQ ID NO: 3098
  misc_feature 1..34: note = Probe
  source 1..34: mol_type = other DNA

SEQ ID NO: 38128 - DNA, 29 bp, synthetic construct
  misc_feature 1..29: note = Probe
  source 1..29: mol_type = other DNA
agacccgaggtagggctttggctgtgggg

SEQ ID NO: 38129 - DNA, 29 bp, synthetic construct
  misc_feature 1..29: note = Probe
  source 1..29: mol_type = other DNA
agacccttttggatgttcgcaaccccttt

SEQ ID NO: 38130 - DNA, 23 bp, synthetic construct
  misc_feature 1..23: note = Probe
  source 1..23: mol_type = other DNA
agaccggggttcaattccccgac

SEQ ID NO: 38131 - DNA, 27 bp, synthetic construct
  misc_feature 1..27: note = Probe
  source 1..27: mol_type = other DNA
agaccggggttcaattccccgacgggg

SEQ ID NO: 38132 - DNA, 26 bp, synthetic construct
  misc_feature 1..26: note = Probe
  source 1..26: mol_type = other DNA
agaccggggttcgattccccgacggg

SEQ ID NO: 38133 - DNA, 28 bp, synthetic construct
  misc_feature 1..28: note = Probe
  source 1..28: mol_type = other DNA
agaccggggttcgattccccgacgggga

SEQ ID NO: 38134 - DNA, 30 bp, synthetic construct; identical to SEQ ID NO: 3114
  misc_feature 1..30: note = Probe
  source 1..30: mol_type = other DNA

SEQ ID NO: 38135 - DNA, 32 bp, synthetic construct; identical to SEQ ID NO: 3122
  misc_feature 1..32: note = Probe
  source 1..32: mol_type = other DNA

SEQ ID NO: 38136 - DNA, 20 bp, synthetic construct
  misc_feature 1..20: note = Probe
  source 1..20: mol_type = other DNA
agacgggctcacatcacccc

SEQ ID NO: 38137 - DNA, 21 bp, synthetic construct
  misc_feature 1..21: note = Probe
  source 1..21: mol_type = other DNA
agacgggctcacatcacccca

SEQ ID NO: 38138 - DNA, 22 bp, synthetic construct
  misc_feature 1..22: note = Probe
  source 1..22: mol_type = other DNA
agacgggctcacatcaccccat

SEQ ID NO: 38139 - DNA, 23 bp, synthetic construct
  misc_feature 1..23: note = Probe
  source 1..23: mol_type = other DNA
agacgggctcacatcaccccata

SEQ ID NO: 38140 - DNA, 26 bp, synthetic construct
  misc_feature 1..26: note = Probe
  source 1..26: mol_type = other DNA
agacgggctcacatcaccccataaac

SEQ ID NO: 38141 - DNA, 27 bp, synthetic construct
  misc_feature 1..27: note = Probe
  source 1..27: mol_type = other DNA
agacgggctcacatcaccccataaaca

SEQ ID NO: 38142 - DNA, 29 bp, synthetic construct
  misc_feature 1..29: note = Probe
  source 1..29: mol_type = other DNA
agacgggctcacatcaccccataaacaaa

SEQ ID NO: 38143 - DNA, 30 bp, synthetic construct; identical to SEQ ID NO: 3135
  misc_feature 1..30: note = Probe
  source 1..30: mol_type = other DNA

SEQ ID NO: 38144 - DNA, 45 bp, synthetic construct
  misc_feature 1..45: note = Probe
  source 1..45: mol_type = other DNA
agagaaattcaaaggttgtgggttcgagtcccaccagagtcgctt

SEQ ID NO: 38145 - DNA, 29 bp, synthetic construct
  misc_feature 1..29: note = Probe
  source 1..29: mol_type = other DNA
agagaaccaacacctctttacagtgaaat

SEQ ID NO: 38146 - DNA, 50 bp, synthetic construct
  misc_feature 1..50: note = Probe
  source 1..50: mol_type = other DNA
agagcaatgccgaggttgtgagttcgagcctcacctggagcaagaccctt

SEQ ID NO: 38147 - DNA, 34 bp, synthetic construct; identical to SEQ ID NO: 16204
  misc_feature 1..34: note = Probe
  source 1..34: mol_type = other DNA

SEQ ID NO: 38148 - DNA, 34 bp, synthetic construct; identical to SEQ ID NO: 16211
  misc_feature 1..34: note = Probe
  source 1..34: mol_type = other DNA

SEQ ID NO: 38149 - DNA, 50 bp, synthetic construct; identical to SEQ ID NO: 3146
  misc_feature 1..50: note = Probe
  source 1..50: mol_type = other DNA

SEQ ID NO: 38150 - DNA, 50 bp, synthetic construct
  misc_feature 1..50: note = Probe
  source 1..50: mol_type = other DNA
agagcgcatgcttagcatgcatgaggtcccgggttcgatccccagcatct

SEQ ID NO: 38151 - DNA, 50 bp, synthetic construct
  misc_feature 1..50: note = Probe
  source 1..50: mol_type = other DNA
agagcgcatgcttcgcatgtacgaggtccctggttcaatccctggtacct

SEQ ID NO: 38152 - DNA, 36 bp, synthetic construct; identical to SEQ ID NO: 16229
  misc_feature 1..36: note = Probe
  source 1..36: mol_type = other DNA

SEQ ID NO: 38153 - DNA, 37 bp, synthetic construct; identical to SEQ ID NO: 16230
  misc_feature 1..37: note = Probe
  source 1..37: mol_type = other DNA

SEQ ID NO: 38154 - DNA, 29 bp, synthetic construct
  misc_feature 1..29: note = Probe
  source 1..29: mol_type = other DNA
agaggagttgtttttcctggcaaaaacct

SEQ ID NO: 38155 - DNA, 33 bp, synthetic construct; identical to SEQ ID NO: 27660
  misc_feature 1..33: note = Probe
  source 1..33: mol_type = other DNA

SEQ ID NO: 38156 - DNA, 34 bp, synthetic construct; identical to SEQ ID NO: 27661
  misc_feature 1..34: note = Probe
  source 1..34: mol_type = other DNA

SEQ ID NO: 38157 - DNA, 20 bp, synthetic construct
  misc_feature 1..20: note = Probe
  source 1..20: mol_type = other DNA
agagggggcagctgccattt

SEQ ID NO: 38158 - DNA, 21 bp, synthetic construct
  misc_feature 1..21: note = Probe
  source 1..21: mol_type = other DNA
agagggggcagctgccatttt

SEQ ID NO: 38159 - DNA, 32 bp, synthetic construct
  misc_feature 1..32: note = Probe
  source 1..32: mol_type = other DNA
agagggggtatagctcagtggtagagcatttg

SEQ ID NO: 38160 - DNA, 30 bp, synthetic construct; identical to SEQ ID NO: 16236
  misc_feature 1..30: note = Probe
  source 1..30: mol_type = other DNA

SEQ ID NO: 38161 - DNA, 30 bp, synthetic construct; identical to SEQ ID NO: 16238
  misc_feature 1..30: note = Probe
  source 1..30: mol_type = other DNA

SEQ ID NO: 38162 - DNA, 31 bp, synthetic construct; identical to SEQ ID NO: 16239
  misc_feature 1..31: note = Probe
  source 1..31: mol_type = other DNA

SEQ ID NO: 38163 - DNA, 38 bp, synthetic construct; identical to SEQ ID NO: 3157
  misc_feature 1..38: note = Probe
  source 1..38: mol_type = other DNA

SEQ ID NO: 38164 - DNA, 33 bp, synthetic construct
  misc_feature 1..33: note = Probe
  source 1..33: mol_type = other DNA
agatcctgggttcgactcccagcggggccttgg

SEQ ID NO: 38165 - DNA, 28 bp, synthetic construct
  misc_feature 1..28: note = Probe
  source 1..28: mol_type = other DNA
agatgaaaacctttttccaaggacaaat

SEQ ID NO: 38166 - DNA, 34 bp, synthetic construct; identical to SEQ ID NO: 16282
  misc_feature 1..34: note = Probe
  source 1..34: mol_type = other DNA

SEQ ID NO: 38167 - DNA, 31 bp, synthetic construct; identical to SEQ ID NO: 3175
  misc_feature 1..31: note = Probe
  source 1..31: mol_type = other DNA

SEQ ID NO: 38168 - DNA, 32 bp, synthetic construct; identical to SEQ ID NO: 3176
  misc_feature 1..32: note = Probe
  source 1..32: mol_type = other DNA

SEQ ID NO: 38169 - DNA, 35 bp, synthetic construct; identical to SEQ ID NO: 3179
  misc_feature 1..35: note = Probe
  source 1..35: mol_type = other DNA

SEQ ID NO: 38170 - DNA, 24 bp, synthetic construct
  misc_feature 1..24: note = Probe
  source 1..24: mol_type = other DNA
agattgagggttcgagtcccttcg

SEQ ID NO: 38171 - DNA, 27 bp, synthetic construct
  misc_feature 1..27: note = Probe
  source 1..27: mol_type = other DNA
agattgagggttcgagtcccttcgtgg

SEQ ID NO: 38172 - DNA, 28 bp, synthetic construct
  misc_feature 1..28: note = Probe
  source 1..28: mol_type = other DNA
agattgagggttcgagtcccttcgtggt

SEQ ID NO: 38173 - DNA, 29 bp, synthetic construct
  misc_feature 1..29: note = Probe
  source 1..29: mol_type = other DNA
agattgagggttcgagtcccttcgtggtc

SEQ ID NO: 38174 - DNA, 30 bp, synthetic construct; identical to SEQ ID NO: 9106
  misc_feature 1..30: note = Probe
  source 1..30: mol_type = other DNA

SEQ ID NO: 38175 - DNA, 33 bp, synthetic construct; identical to SEQ ID NO: 3191
  misc_feature 1..33: note = Probe
  source 1..33: mol_type = other DNA

SEQ ID NO: 38176 - DNA, 50 bp, synthetic construct
  misc_feature 1..50: note = Probe
  source 1..50: mol_type = other DNA
agattgagggttcgagtcccttcgtggtcgttgccatgttaacgttttct

SEQ ID NO: 38177 - DNA, 36 bp, synthetic construct
  misc_feature 1..36: note = Probe
  source 1..36: mol_type = other DNA
agattggtggttcgagcccacccagggacgcttatt

SEQ ID NO: 38178 - DNA, 27 bp, synthetic construct
  misc_feature 1..27: note = Probe
  source 1..27: mol_type = other DNA
agatttcaacttaacttgaccgctctg

SEQ ID NO: 38179 - DNA, 28 bp, synthetic construct
  misc_feature 1..28: note = Probe
  source 1..28: mol_type = other DNA
agatttcaacttaacttgaccgctctga

SEQ ID NO: 38180 - DNA, 30 bp, synthetic construct; identical to SEQ ID NO: 3214
  misc_feature 1..30: note = Probe
  source 1..30: mol_type = other DNA

SEQ ID NO: 38181 - DNA, 31 bp, synthetic construct; identical to SEQ ID NO: 3215
  misc_feature 1..31: note = Probe
  source 1..31: mol_type = other DNA

SEQ ID NO: 38182 - DNA, 34 bp, synthetic construct; identical to SEQ ID NO: 3219
  misc_feature 1..34: note = Probe
  source 1..34: mol_type = other DNA

SEQ ID NO: 38183 - DNA, 34 bp, synthetic construct; identical to SEQ ID NO: 3221
  misc_feature 1..34: note = Probe
  source 1..34: mol_type = other DNA

SEQ ID NO: 38184 - DNA, 50 bp, synthetic construct; identical to SEQ ID NO: 3229
  misc_feature 1..50: note = Probe
  source 1..50: mol_type = other DNA

SEQ ID NO: 38185 - DNA, 50 bp, synthetic construct
  misc_feature 1..50: note = Probe
  source 1..50: mol_type = other DNA
agcaatgccgaggttgtgagttcgagcctcacctggagcaagaccctttt

SEQ ID NO: 38186 - DNA, 29 bp, synthetic construct
  misc_feature 1..29: note = Probe
  source 1..29: mol_type = other DNA
agcacccaacttacacttaggagatttca

SEQ ID NO: 38187 - DNA, 45 bp, synthetic construct; identical to SEQ ID NO: 3248
  misc_feature 1..45: note = Probe
  source 1..45: mol_type = other DNA

SEQ ID NO: 38188 - DNA, 50 bp, synthetic construct; identical to SEQ ID NO: 3251
  misc_feature 1..50: note = Probe
  source 1..50: mol_type = other DNA

SEQ ID NO: 38189 - DNA, 30 bp, synthetic construct; identical to SEQ ID NO: 270
  misc_feature 1..30: note = Probe
  source 1..30: mol_type = other DNA

SEQ ID NO: 38190 - DNA, 50 bp, synthetic construct; identical to SEQ ID NO: 272
  misc_feature 1..50: note = Probe
  source 1..50: mol_type = other DNA

SEQ ID NO: 38191 - DNA, 33 bp, synthetic construct; identical to SEQ ID NO: 12675
  misc_feature 1..33: note = Probe
  source 1..33: mol_type = other DNA

SEQ ID NO: 38192 - DNA, 27 bp, synthetic construct
  misc_feature 1..27: note = Probe
  source 1..27: mol_type = other DNA
agcacttccacaagtacatttccttat

SEQ ID NO: 38193 - DNA, 28 bp, synthetic construct
  misc_feature 1..28: note = Probe
  source 1..28: mol_type = other DNA
agcagagtggcgcagcggaagcgtgctg

SEQ ID NO: 38194 - DNA, 30 bp, synthetic construct; identical to SEQ ID NO: 8539
  misc_feature 1..30: note = Probe
  source 1..30: mol_type = other DNA

SEQ ID NO: 38195 - DNA, 49 bp, synthetic construct
  misc_feature 1..49: note = Probe
  source 1..49: mol_type = other DNA
agcagagtggcgcagcggaagcgtgctgggcccataacccagaggtcga

SEQ ID NO: 38196 - DNA, 50 bp, synthetic construct; identical to SEQ ID NO: 3258
  misc_feature 1..50: note = Probe
  source 1..50: mol_type = other DNA

SEQ ID NO: 38197 - DNA, 21 bp, synthetic construct
  misc_feature 1..21: note = Probe
  source 1..21: mol_type = other DNA
agcagggttgtttccgtagtg

SEQ ID NO: 38198 - DNA, 42 bp, synthetic construct
  misc_feature 1..42: note = Probe
  source 1..42: mol_type = other DNA
agcagttaacgcgggttcgattcccgggtaacgaaacgtttt

SEQ ID NO: 38199 - DNA, 36 bp, synthetic construct; identical to SEQ ID NO: 27773
  misc_feature 1..36: note = Probe
  source 1..36: mol_type = other DNA

SEQ ID NO: 38200 - DNA, 34 bp, synthetic construct
  misc_feature 1..34: note = Probe
  source 1..34: mol_type = other DNA
agcagttgacccgggttcgattcccggccaacgc

SEQ ID NO: 38201 - DNA, 30 bp, synthetic construct; identical to SEQ ID NO: 3263
  misc_feature 1..30: note = Probe
  source 1..30: mol_type = other DNA

SEQ ID NO: 38202 - DNA, 31 bp, synthetic construct; identical to SEQ ID NO: 12686
  misc_feature 1..31: note = Probe
  source 1..31: mol_type = other DNA

SEQ ID NO: 38203 - DNA, 50 bp, synthetic construct; identical to SEQ ID NO: 3264
  misc_feature 1..50: note = Probe
  source 1..50: mol_type = other DNA

SEQ ID NO: 38204 - DNA, 35 bp, synthetic construct; identical to SEQ ID NO: 280
  misc_feature 1..35: note = Probe
  source 1..35: mol_type = other DNA

SEQ ID NO: 38205 - DNA, 36 bp, synthetic construct; identical to SEQ ID NO: 281
  misc_feature 1..36: note = Probe
  source 1..36: mol_type = other DNA

SEQ ID NO: 38206 - DNA, 50 bp, synthetic construct; identical to SEQ ID NO: 3281
  misc_feature 1..50: note = Probe
  source 1..50: mol_type = other DNA

SEQ ID NO: 38207 - DNA, 30 bp, synthetic construct; identical to SEQ ID NO: 9139
  misc_feature 1..30: note = Probe
  source 1..30: mol_type = other DNA

SEQ ID NO: 38208 - DNA, 50 bp, synthetic construct
  misc_feature 1..50: note = Probe
  source 1..50: mol_type = other DNA
agccagcagagtggcgcagcggaagcgtgctgggcccataacccagaggt

SEQ ID NO: 38209 - DNA, 50 bp, synthetic construct
  misc_feature 1..50: note = Probe
  source 1..50: mol_type = other DNA
agccagggattgtgggttcgagtcccatctggggtggcctgtgacttttg

SEQ ID NO: 38210 - DNA, 27 bp, synthetic construct
  misc_feature 1..27: note = Probe
  source 1..27: mol_type = other DNA
agcccacccagggacgcgctctccttt

SEQ ID NO: 38211 - DNA, 30 bp, synthetic construct
  misc_feature 1..30: note = Probe
  source 1..30: mol_type = other DNA
agcccacccagggacggtcagtgcttcttt

SEQ ID NO: 38212 - DNA, 21 bp, synthetic construct
  misc_feature 1..21: note = Probe
  source 1..21: mol_type = other DNA
agccccaaacccactccacct

SEQ ID NO: 38213 - DNA, 37 bp, synthetic construct; identical to SEQ ID NO: 16430
  misc_feature 1..37: note = Probe
  source 1..37: mol_type = other DNA

SEQ ID NO: 38214 - DNA, 50 bp, synthetic construct; identical to SEQ ID NO: 3296
  misc_feature 1..50: note = Probe
  source 1..50: mol_type = other DNA

SEQ ID NO: 38215 - DNA, 36 bp, synthetic construct; identical to SEQ ID NO: 27802
  misc_feature 1..36: note = Probe
  source 1..36: mol_type = other DNA

SEQ ID NO: 38216 - DNA, 27 bp, synthetic construct
  misc_feature 1..27: note = Probe
  source 1..27: mol_type = other DNA
agcctcacacggggcagtctaacgttt

SEQ ID NO: 38217 - DNA, 37 bp, synthetic construct
  misc_feature 1..37: note = Probe
  source 1..37: mol_type = other DNA
agcctggatagctcagtcggtagagcatcagactttt

SEQ ID NO: 38218 - DNA, 29 bp, synthetic construct
  misc_feature 1..29: note = Probe
  source 1..29: mol_type = other DNA
agcgatccgagttcaaatctcggtggaac

SEQ ID NO: 38219 - DNA, 30 bp, synthetic construct; identical to SEQ ID NO: 16462
  misc_feature 1..30: note = Probe
  source 1..30: mol_type = other DNA

SEQ ID NO: 38220 - DNA, 34 bp, synthetic construct; identical to SEQ ID NO: 3303
  misc_feature 1..34: note = Probe
  source 1..34: mol_type = other DNA

SEQ ID NO: 38221 - DNA, 29 bp, synthetic construct
  misc_feature 1..29: note = Probe
  source 1..29: mol_type = other DNA
agcgatccgagttcaaatctcggtgggac

SEQ ID NO: 38222 - DNA, 34 bp, synthetic construct; identical to SEQ ID NO: 3306
  misc_feature 1..34: note = Probe
  source 1..34: mol_type = other DNA

SEQ ID NO: 38223 - DNA, 30 bp, synthetic construct
  misc_feature 1..30: note = Probe
  source 1..30: mol_type = other DNA
agcgatccgagttcaagtctcggtggaacc

SEQ ID NO: 38224 - DNA, 50 bp, synthetic construct
  misc_feature 1..50: note = Probe
  source 1..50: mol_type = other DNA
agcgcatgcttcgcatgtacgaggtccctggttcaatccctggtacctcc

SEQ ID NO: 38225 - DNA, 29 bp, synthetic construct
  misc_feature 1..29: note = Probe
  source 1..29: mol_type = other DNA
agcgccgctggtgtagtggtatcatgcaa

SEQ ID NO: 38226 - DNA, 30 bp, synthetic construct; identical to SEQ ID NO: 16478
  misc_feature 1..30: note = Probe
  source 1..30: mol_type = other DNA

SEQ ID NO: 38227 - DNA, 35 bp, synthetic construct
  misc_feature 1..35: note = Probe
  source 1..35: mol_type = other DNA
agcggaagcgtgctgggcccataacccagaggtcg

SEQ ID NO: 38228 - DNA, 27 bp, synthetic construct
  misc_feature 1..27: note = Probe
  source 1..27: mol_type = other DNA
agcgtgctgctactaatgccagggtcg

SEQ ID NO: 38229 - DNA, 30 bp, synthetic construct
  misc_feature 1..30: note = Probe
  source 1..30: mol_type = other DNA
agcgttggtggtatagtggtaagcatagct

SEQ ID NO: 38230 - DNA, 31 bp, synthetic construct
  misc_feature 1..31: note = Probe
  source 1..31: mol_type = other DNA
agcgttggtggtatagtggtaagcatagctg

SEQ ID NO: 38231 - DNA, 26 bp, synthetic construct
  misc_feature 1..26: note = Probe
  source 1..26: mol_type = other DNA
agctaaataagctatcgggcccatac

SEQ ID NO: 38232 - DNA, 50 bp, synthetic construct; identical to SEQ ID NO: 3325
  misc_feature 1..50: note = Probe
  source 1..50: mol_type = other DNA

SEQ ID NO: 38233 - DNA, 34 bp, synthetic construct
  misc_feature 1..34: note = Probe
  source 1..34: mol_type = other DNA
agctaagcttcctccgcggtggggattctggtct

SEQ ID NO: 38234 - DNA, 21 bp, synthetic construct
  misc_feature 1..21: note = Probe
  source 1..21: mol_type = other DNA
agctatcgggcccataccccg

SEQ ID NO: 38235 - DNA, 24 bp, synthetic construct
  misc_feature 1..24: note = Probe
  source 1..24: mol_type = other DNA
agctatcgggcccataccccgaaa

SEQ ID NO: 38236 - DNA, 29 bp, synthetic construct
  misc_feature 1..29: note = Probe
  source 1..29: mol_type = other DNA
agctatcgggcccataccccgaaaatgtt

SEQ ID NO: 38237 - DNA, 30 bp, synthetic construct; identical to SEQ ID NO: 3337
  misc_feature 1..30: note = Probe
  source 1..30: mol_type = other DNA

SEQ ID NO: 38238 - DNA, 31 bp, synthetic construct; identical to SEQ ID NO: 3338
  misc_feature 1..31: note = Probe
  source 1..31: mol_type = other DNA

SEQ ID NO: 38239 - DNA, 33 bp, synthetic construct; identical to SEQ ID NO: 3340
  misc_feature 1..33: note = Probe
  source 1..33: mol_type = other DNA

SEQ ID NO: 38240 - DNA, 34 bp, synthetic construct; identical to SEQ ID NO: 3341
  misc_feature 1..34: note = Probe
  source 1..34: mol_type = other DNA

SEQ ID NO: 38241 - DNA, 50 bp, synthetic construct; identical to SEQ ID NO: 303
  misc_feature 1..50: note = Probe
  source 1..50: mol_type = other DNA

SEQ ID NO: 38242 - DNA, 25 bp, synthetic construct
  misc_feature 1..25: note = Probe
  source 1..25: mol_type = other DNA
agctcacaagaactgctaactcatg

SEQ ID NO: 38243 - DNA, 28 bp, synthetic construct
  misc_feature 1..28: note = Probe
  source 1..28: mol_type = other DNA
agctcagtcggtagagcatcagactttt

SEQ ID NO: 38244 - DNA, 50 bp, synthetic construct; identical to SEQ ID NO: 3374
  misc_feature 1..50: note = Probe
  source 1..50: mol_type = other DNA

SEQ ID NO: 38245 - DNA, 34 bp, synthetic construct; identical to SEQ ID NO: 12717
  misc_feature 1..34: note = Probe
  source 1..34: mol_type = other DNA

SEQ ID NO: 38246 - DNA, 18 bp, synthetic construct
  misc_feature 1..18: note = Probe
  source 1..18: mol_type = other DNA
agctggtagagcggagga

SEQ ID NO: 38247 - DNA, 21 bp, synthetic construct
  misc_feature 1..21: note = Probe
  source 1..21: mol_type = other DNA
agctggtagagcggaggactg

SEQ ID NO: 38248 - DNA, 24 bp, synthetic construct
  misc_feature 1..24: note = Probe
  source 1..24: mol_type = other DNA
agctggtagagcggaggactgtag

SEQ ID NO: 38249 - DNA, 42 bp, synthetic construct; identical to SEQ ID NO: 12719
  misc_feature 1..42: note = Probe
  source 1..42: mol_type = other DNA

SEQ ID NO: 38250 - DNA, 33 bp, synthetic construct; identical to SEQ ID NO: 16593
  misc_feature 1..33: note = Probe
  source 1..33: mol_type = other DNA

SEQ ID NO: 38251 - DNA, 35 bp, synthetic construct; identical to SEQ ID NO: 16595
  misc_feature 1..35: note = Probe
  source 1..35: mol_type = other DNA

SEQ ID NO: 38252 - DNA, 31 bp, synthetic construct; identical to SEQ ID NO: 3387
  misc_feature 1..31: note = Probe
  source 1..31: mol_type = other DNA

SEQ ID NO: 38253 - DNA, 32 bp, synthetic construct; identical to SEQ ID NO: 3388
  misc_feature 1..32: note = Probe
  source 1..32: mol_type = other DNA

SEQ ID NO: 38254 - DNA, 33 bp, synthetic construct; identical to SEQ ID NO: 3389
  misc_feature 1..33: note = Probe
  source 1..33: mol_type = other DNA

SEQ ID NO: 38255 - DNA, 34 bp, synthetic construct; identical to SEQ ID NO: 3390
  misc_feature 1..34: note = Probe
  source 1..34: mol_type = other DNA

SEQ ID NO: 38256 - DNA, 35 bp, synthetic construct; identical to SEQ ID NO: 3391
  misc_feature 1..35: note = Probe
  source 1..35: mol_type = other DNA

SEQ ID NO: 38257 - DNA, 31 bp, synthetic construct
  misc_feature 1..31: note = Probe
  source 1..31: mol_type = other DNA
aggacctcgtggcgcaacggtagcgcgtctg

SEQ ID NO: 38258 - DNA, 33 bp, synthetic construct; identical to SEQ ID NO: 3413
  misc_feature 1..33: note = Probe
  source 1..33: mol_type = other DNA

SEQ ID NO: 38259 - DNA, 34 bp, synthetic construct; identical to SEQ ID NO: 3414
  misc_feature 1..34: note = Probe
  source 1..34: mol_type = other DNA

SEQ ID NO: 38260 - DNA, 21 bp, synthetic construct
  misc_feature 1..21: note = Probe
  source 1..21: mol_type = other DNA
aggatggccgagcggtctaag

SEQ ID NO: 38261 - DNA, 21 bp, synthetic construct
  misc_feature 1..21: note = Probe
  source 1..21: mol_type = other DNA
aggatggccgagtggtctaag

SEQ ID NO: 38262 - DNA, 30 bp, synthetic construct; identical to SEQ ID NO: 16665
  misc_feature 1..30: note = Probe
  source 1..30: mol_type = other DNA

SEQ ID NO: 38263 - DNA, 30 bp, synthetic construct; identical to SEQ ID NO: 16666
  misc_feature 1..30: note = Probe
  source 1..30: mol_type = other DNA

SEQ ID NO: 38264 - DNA, 28 bp, synthetic construct
  misc_feature 1..28: note = Probe
  source 1..28: mol_type = other DNA
aggccccgggttcaatccccggcacctc

SEQ ID NO: 38265 - DNA, 29 bp, synthetic construct
  misc_feature 1..29: note = Probe
  source 1..29: mol_type = other DNA
aggccccgggttcaatccccggcacctcc

SEQ ID NO: 38266 - DNA, 28 bp, synthetic construct
  misc_feature 1..28: note = Probe
  source 1..28: mol_type = other DNA
aggccccgggttcgatccccggcatctc

SEQ ID NO: 38267 - DNA, 33 bp, synthetic construct; identical to SEQ ID NO: 16671
  misc_feature 1..33: note = Probe
  source 1..33: mol_type = other DNA

SEQ ID NO: 38268 - DNA, 22 bp, synthetic construct
  misc_feature 1..22: note = Probe
  source 1..22: mol_type = other DNA
aggcccgggttcgattcccggc

SEQ ID NO: 38269 - DNA, 27 bp, synthetic construct
  misc_feature 1..27: note = Probe
  source 1..27: mol_type = other DNA
aggcccgggttcgattcccggcccatg

SEQ ID NO: 38270 - DNA, 35 bp, synthetic construct
  misc_feature 1..35: note = Probe
  source 1..35: mol_type = other DNA
aggcgcccggctagctcagtcggtagagcatggga

SEQ ID NO: 38271 - DNA, 50 bp, synthetic construct; identical to SEQ ID NO: 27977
  misc_feature 1..50: note = Probe
  source 1..50: mol_type = other DNA

SEQ ID NO: 38272 - DNA, 30 bp, synthetic construct; identical to SEQ ID NO: 3426
  misc_feature 1..30: note = Probe
  source 1..30: mol_type = other DNA

SEQ ID NO: 38273 - DNA, 31 bp, synthetic construct; identical to SEQ ID NO: 325
  misc_feature 1..31: note = Probe
  source 1..31: mol_type = other DNA

SEQ ID NO: 38274 - DNA, 32 bp, synthetic construct; identical to SEQ ID NO: 326
  misc_feature 1..32: note = Probe
  source 1..32: mol_type = other DNA

SEQ ID NO: 38275 - DNA, 50 bp, synthetic construct
  misc_feature 1..50: note = Probe
  source 1..50: mol_type = other DNA
aggcggccggttagctcagttggttagagcgtggtgctaataacgccaag

SEQ ID NO: 38276 - DNA, 26 bp, synthetic construct
  misc_feature 1..26: note = Probe
  source 1..26: mol_type = other DNA
aggcgtgggttcgaatcccacttctg

SEQ ID NO: 38277 - DNA, 25 bp, synthetic construct
  misc_feature 1..25: note = Probe
  source 1..25: mol_type = other DNA
aggctaaatcctatatatcttaatg

SEQ ID NO: 38278 - DNA, 36 bp, synthetic construct; identical to SEQ ID NO: 16690
  misc_feature 1..36: note = Probe
  source 1..36: mol_type = other DNA

SEQ ID NO: 38279 - DNA, 41 bp, synthetic construct; identical to SEQ ID NO: 16694
  misc_feature 1..41: note = Probe
  source 1..41: mol_type = other DNA

SEQ ID NO: 38280 - DNA, 42 bp, synthetic construct; identical to SEQ ID NO: 16695
  misc_feature 1..42: note = Probe
  source 1..42: mol_type = other DNA

SEQ ID NO: 38281 - DNA, 50 bp, synthetic construct
  misc_feature 1..50: note = Probe
  source 1..50: mol_type = other DNA
agggagcccggatagctcagtcggtagagcatcagacttttaatctgagg

SEQ ID NO: 38282 - DNA, 22 bp, synthetic construct
  misc_feature 1..22: note = Probe
  source 1..22: mol_type = other DNA
agggaggttatgattaactttt

SEQ ID NO: 38283 - DNA, 50 bp, synthetic construct
  misc_feature 1..50: note = Probe
  source 1..50: mol_type = other DNA
agggaggttccatggtgtaatggttagcactctggactctgaatccagcg

SEQ ID NO: 38284 - DNA, 27 bp, synthetic construct
  misc_feature 1..27: note = Probe
  source 1..27: mol_type = other DNA
agggattgtgggttcgagtcccatctg

SEQ ID NO: 38285 - DNA, 30 bp, synthetic construct; identical to SEQ ID NO: 16707
  misc_feature 1..30: note = Probe
  source 1..30: mol_type = other DNA

SEQ ID NO: 38286 - DNA, 32 bp, synthetic construct; identical to SEQ ID NO: 3436
  misc_feature 1..32: note = Probe
  source 1..32: mol_type = other DNA

SEQ ID NO: 38287 - DNA, 34 bp, synthetic construct
  misc_feature 1..34: note = Probe
  source 1..34: mol_type = other DNA
agggcctggatagctcagttggtagaacatcaga

SEQ ID NO: 38288 - DNA, 38 bp, synthetic construct
  misc_feature 1..38: note = Probe
  source 1..38: mol_type = other DNA
agggcctggatagctcagttggtagaacatcagacttt

SEQ ID NO: 38289 - DNA, 41 bp, synthetic construct; identical to SEQ ID NO: 16717
  misc_feature 1..41: note = Probe
  source 1..41: mol_type = other DNA

SEQ ID NO: 38290 - DNA, 50 bp, synthetic construct
  misc_feature 1..50: note = Probe
  source 1..50: mol_type = other DNA
aggggcccggatagctcagtcggtagagcatcagacttttaatctgaggg

SEQ ID NO: 38291 - DNA, 17 bp, synthetic construct
  misc_feature 1..17: note = Probe
  source 1..17: mol_type = other DNA
aggggtatgattctcgc

SEQ ID NO: 38292 - DNA, 18 bp, synthetic construct
  misc_feature 1..18: note = Probe
  source 1..18: mol_type = other DNA
aggggtatgattctcgct

SEQ ID NO: 38293 - DNA, 50 bp, synthetic construct
  misc_feature 1..50: note = Probe
  source 1..50: mol_type = other DNA
aggggtcctttcgatagctcagttggtagagcggaggactgtaggttcat

SEQ ID NO: 38294 - DNA, 18 bp, synthetic construct
  misc_feature 1..18: note = Probe
  source 1..18: mol_type = other DNA
aggggttagagcactggt

SEQ ID NO: 38295 - DNA, 29 bp, synthetic construct
  misc_feature 1..29: note = Probe
  source 1..29: mol_type = other DNA
agggtccagggttcaagtccctgtccagg

SEQ ID NO: 38296 - DNA, 28 bp, synthetic construct
  misc_feature 1..28: note = Probe
  source 1..28: mol_type = other DNA
agggtccagggttcaagtccctgttcag

SEQ ID NO: 38297 - DNA, 30 bp, synthetic construct
  misc_feature 1..30: note = Probe
  source 1..30: mol_type = other DNA
agggtccagggttcaagtccctgttcaggc

SEQ ID NO: 38298 - DNA, 31 bp, synthetic construct
  misc_feature 1..31: note = Probe
  source 1..31: mol_type = other DNA
agggtccagggttcaagtccctgttcaggcg

SEQ ID NO: 38299 - DNA, 34 bp, synthetic construct
  misc_feature 1..34: note = Probe
  source 1..34: mol_type = other DNA
agggtccagggttcaagtccctgttcaggcgaac

SEQ ID NO: 38300 - DNA, 28 bp, synthetic construct
  misc_feature 1..28: note = Probe
  source 1..28: mol_type = other DNA
agggtccagggttcaagtccctgttcgg

SEQ ID NO: 38301 - DNA, 31 bp, synthetic construct
  misc_feature 1..31: note = Probe
  source 1..31: mol_type = other DNA
agggtccagggttcaagtccctgttcgggcg

SEQ ID NO: 38302 - DNA, 34 bp, synthetic construct; identical to SEQ ID NO: 16728
  misc_feature 1..34: note = Probe
  source 1..34: mol_type = other DNA

SEQ ID NO: 38303 - DNA, 30 bp, synthetic construct; identical to SEQ ID NO: 9182
  misc_feature 1..30: note = Probe
  source 1..30: mol_type = other DNA

SEQ ID NO: 38304 - DNA, 31 bp, synthetic construct; identical to SEQ ID NO: 333
  misc_feature 1..31: note = Probe
  source 1..31: mol_type = other DNA

SEQ ID NO: 38305 - DNA, 34 bp, synthetic construct; identical to SEQ ID NO: 3445
  misc_feature 1..34: note = Probe
  source 1..34: mol_type = other DNA

SEQ ID NO: 38306 - DNA, 18 bp, synthetic construct
  misc_feature 1..18: note = Probe
  source 1..18: mol_type = other DNA
agggtgtgcgtgtttttt

SEQ ID NO: 38307 - DNA, 18 bp, synthetic construct
  misc_feature 1..18: note = Probe
  source 1..18: mol_type = other DNA
agggttgtttccgtagtg

SEQ ID NO: 38308 - DNA, 28 bp, synthetic construct
  misc_feature 1..28: note = Probe
  source 1..28: mol_type = other DNA
aggtagcgggatcgatgcccgcattctc

SEQ ID NO: 38309 - DNA, 29 bp, synthetic construct
  misc_feature 1..29: note = Probe
  source 1..29: mol_type = other DNA
aggtagcgggatcgatgcccgcattctcc

SEQ ID NO: 38310 - DNA, 34 bp, synthetic construct
  misc_feature 1..34: note = Probe
  source 1..34: mol_type = other DNA
aggtagcgggatcgatgcccgcattctccagttt

SEQ ID NO: 38311 - DNA, 24 bp, synthetic construct
  misc_feature 1..24: note = Probe
  source 1..24: mol_type = other DNA
aggtcagctaaataagctatcggg

SEQ ID NO: 38312 - DNA, 30 bp, synthetic construct; identical to SEQ ID NO: 3454
  misc_feature 1..30: note = Probe
  source 1..30: mol_type = other DNA

SEQ ID NO: 38313 - DNA, 31 bp, synthetic construct; identical to SEQ ID NO: 3455
  misc_feature 1..31: note = Probe
  source 1..31: mol_type = other DNA

SEQ ID NO: 38314 - DNA, 45 bp, synthetic construct; identical to SEQ ID NO: 3469
  misc_feature 1..45: note = Probe
  source 1..45: mol_type = other DNA

SEQ ID NO: 38315 - DNA, 50 bp, synthetic construct; identical to SEQ ID NO: 3474
  misc_feature 1..50: note = Probe
  source 1..50: mol_type = other DNA

SEQ ID NO: 38316 - DNA, 37 bp, synthetic construct
  misc_feature 1..37: note = Probe
  source 1..37: mol_type = other DNA
aggtccccggttcgaaactgggcggaaacagaggttt

SEQ ID NO: 38317 - DNA, 27 bp, synthetic construct
  misc_feature 1..27: note = Probe
  source 1..27: mol_type = other DNA
aggtcccgggttcaaatcccggacgag

SEQ ID NO: 38318 - DNA, 29 bp, synthetic construct
  misc_feature 1..29: note = Probe
  source 1..29: mol_type = other DNA
aggtcccgggttcaaatcccggacgagcc

SEQ ID NO: 38319 - DNA, 33 bp, synthetic construct; identical to SEQ ID NO: 16757
  misc_feature 1..33: note = Probe
  source 1..33: mol_type = other DNA

SEQ ID NO: 38320 - DNA, 36 bp, synthetic construct
  misc_feature 1..36: note = Probe
  source 1..36: mol_type = other DNA
aggtcccgggttcaaatcccggacgagcccctcttt

SEQ ID NO: 38321 - DNA, 28 bp, synthetic construct
  misc_feature 1..28: note = Probe
  source 1..28: mol_type = other DNA
aggtcccgggttcgatccccagcatctc

SEQ ID NO: 38322 - DNA, 29 bp, synthetic construct
  misc_feature 1..29: note = Probe
  source 1..29: mol_type = other DNA
aggtcccgggttcgatccccagcatctcc

SEQ ID NO: 38323 - DNA, 33 bp, synthetic construct; identical to SEQ ID NO: 3476
  misc_feature 1..33: note = Probe
  source 1..33: mol_type = other DNA

SEQ ID NO: 38324 - DNA, 36 bp, synthetic construct
  misc_feature 1..36: note = Probe
  source 1..36: mol_type = other DNA
aggtcccgggttcgatccccagcatctccagtgttt

SEQ ID NO: 38325 - DNA, 37 bp, synthetic construct
  misc_feature 1..37: note = Probe
  source 1..37: mol_type = other DNA
aggtcccgggttcgatccccagcatctccagtgtttt

SEQ ID NO: 38326 - DNA, 28 bp, synthetic construct
  misc_feature 1..28: note = Probe
  source 1..28: mol_type = other DNA
aggtcccgggttcgatccccggcatctc

SEQ ID NO: 38327 - DNA, 30 bp, synthetic construct
  misc_feature 1..30: note = Probe
  source 1..30: mol_type = other DNA
aggtcccgggttcgatccccggcatctcca

SEQ ID NO: 38328 - DNA, 34 bp, synthetic construct; identical to SEQ ID NO: 16763
  misc_feature 1..34: note = Probe
  source 1..34: mol_type = other DNA

SEQ ID NO: 38329 - DNA, 35 bp, synthetic construct
  misc_feature 1..35: note = Probe
  source 1..35: mol_type = other DNA
aggtccctcctcgttagtatagtggtgagtatccc

SEQ ID NO: 38330 - DNA, 36 bp, synthetic construct; identical to SEQ ID NO: 28079
  misc_feature 1..36: note = Probe
  source 1..36: mol_type = other DNA

SEQ ID NO: 38331 - DNA, 37 bp, synthetic construct
  misc_feature 1..37: note = Probe
  source 1..37: mol_type = other DNA
aggtccctcctcgttagtatagtggtgagtatccccg

SEQ ID NO: 38332 - DNA, 38 bp, synthetic construct
  misc_feature 1..38: note = Probe
  source 1..38: mol_type = other DNA
aggtccctcctcgttagtatagtggtgagtatccccgc

SEQ ID NO: 38333 - DNA, 41 bp, synthetic construct
  misc_feature 1..41: note = Probe
  source 1..41: mol_type = other DNA
aggtccctcctcgttagtatagtggtgagtatccccgcctg

SEQ ID NO: 38334 - DNA, 42 bp, synthetic construct; identical to SEQ ID NO: 16765
  misc_feature 1..42: note = Probe
  source 1..42: mol_type = other DNA

SEQ ID NO: 38335 - DNA, 43 bp, synthetic construct
  misc_feature 1..43: note = Probe
  source 1..43: mol_type = other DNA
aggtccctcctcgttagtatagtggtgagtatccccgcctgtc

SEQ ID NO: 38336 - DNA, 50 bp, synthetic construct
  misc_feature 1..50: note = Probe
  source 1..50: mol_type = other DNA
aggtccctcctcgttagtatagtggtgagtatccccgcctgtcacgcggg

SEQ ID NO: 38337 - DNA, 41 bp, synthetic construct; identical to SEQ ID NO: 16770
  misc_feature 1..41: note = Probe
  source 1..41: mol_type = other DNA

SEQ ID NO: 38338 - DNA, 35 bp, synthetic construct
  misc_feature 1..35: note = Probe
  source 1..35: mol_type = other DNA
aggtcctgggttcaatccccaatacctccaggttt

SEQ ID NO: 38339 - DNA, 28 bp, synthetic construct
  misc_feature 1..28: note = Probe
  source 1..28: mol_type = other DNA
aggtcctgggttcgagccccagtggaac

SEQ ID NO: 38340 - DNA, 33 bp, synthetic construct; identical to SEQ ID NO: 3478
  misc_feature 1..33: note = Probe
  source 1..33: mol_type = other DNA

SEQ ID NO: 38341 - DNA, 27 bp, synthetic construct
  misc_feature 1..27: note = Probe
  source 1..27: mol_type = other DNA
aggtcgatggatcgaaaccatcctctg

SEQ ID NO: 38342 - DNA, 28 bp, synthetic construct
  misc_feature 1..28: note = Probe
  source 1..28: mol_type = other DNA
aggtcgctggttcgaatccggctcgaag

SEQ ID NO: 38343 - DNA, 26 bp, synthetic construct
  misc_feature 1..26: note = Probe
  source 1..26: mol_type = other DNA
aggtcgctggttcgattccggctcga

SEQ ID NO: 38344 - DNA, 29 bp, synthetic construct
  misc_feature 1..29: note = Probe
  source 1..29: mol_type = other DNA
aggtcgctggttcgattccggctcgaagg

SEQ ID NO: 38345 - DNA, 45 bp, synthetic construct
  misc_feature 1..45: note = Probe
  source 1..45: mol_type = other DNA
aggtcgctggttcgattccggctcgaaggacttcgtctgtaattt

SEQ ID NO: 38346 - DNA, 46 bp, synthetic construct
  misc_feature 1..46: note = Probe
  source 1..46: mol_type = other DNA
aggtcgctggttcgattccggctcgaaggacttcgtctgtaatttt

SEQ ID NO: 38347 - DNA, 45 bp, synthetic construct
  misc_feature 1..45: note = Probe
  source 1..45: mol_type = other DNA
aggtcgctggttcgattccggctcgaaggagacaagtgcggtttt

SEQ ID NO: 38348 - DNA, 17 bp, synthetic construct
  misc_feature 1..17: note = Probe
  source 1..17: mol_type = other DNA
aggtgcctcgttagcgc

SEQ ID NO: 38349 - DNA, 29 bp, synthetic construct
  misc_feature 1..29: note = Probe
  source 1..29: mol_type = other DNA
aggtggcccgggttcgactcccggtatgg

SEQ ID NO: 38350 - DNA, 30 bp, synthetic construct; identical to SEQ ID NO: 16804
  misc_feature 1..30: note = Probe
  source 1..30: mol_type = other DNA

SEQ ID NO: 38351 - DNA, 31 bp, synthetic construct; identical to SEQ ID NO: 12739
  misc_feature 1..31: note = Probe
  source 1..31: mol_type = other DNA

SEQ ID NO: 38352 - DNA, 35 bp, synthetic construct; identical to SEQ ID NO: 3490
  misc_feature 1..35: note = Probe
  source 1..35: mol_type = other DNA

SEQ ID NO: 38353 - DNA, 50 bp, synthetic construct
  misc_feature 1..50: note = Probe
  source 1..50: mol_type = other DNA
aggtggccggttagctcagttggttagagcgtggtgctaataacgccaag

SEQ ID NO: 38354 - DNA, 50 bp, synthetic construct; identical to SEQ ID NO: 16816
  misc_feature 1..50: note = Probe
  source 1..50: mol_type = other DNA

SEQ ID NO: 38355 - DNA, 30 bp, synthetic construct; identical to SEQ ID NO: 16821
  misc_feature 1..30: note = Probe
  source 1..30: mol_type = other DNA

SEQ ID NO: 38356 - DNA, 42 bp, synthetic construct
  misc_feature 1..42: note = Probe
  source 1..42: mol_type = other DNA
aggttggtggttcgatcccacccagggacggaagtcgcattt

SEQ ID NO: 38357 - DNA, 34 bp, synthetic construct
  misc_feature 1..34: note = Probe
  source 1..34: mol_type = other DNA
aggttgtgagttcgatcctcacctggagcacttt

SEQ ID NO: 38358 - DNA, 35 bp, synthetic construct
  misc_feature 1..35: note = Probe
  source 1..35: mol_type = other DNA
aggttgtgagttcgatcctcacctggagcactttt

SEQ ID NO: 38359 - DNA, 32 bp, synthetic construct
  misc_feature 1..32: note = Probe
  source 1..32: mol_type = other DNA
aggtttcgatccccgtacgggcctttggcttt

SEQ ID NO: 38360 - DNA, 21 bp, synthetic construct
  misc_feature 1..21: note = Probe
  source 1..21: mol_type = other DNA
agtaaacaggagatcctgggt

SEQ ID NO: 38361 - DNA, 43 bp, synthetic construct
  misc_feature 1..43: note = Probe
  source 1..43: mol_type = other DNA
agtaaacaggagatcctgggttcgactcccagcggggccttgg

SEQ ID NO: 38362 - DNA, 18 bp, synthetic construct
  misc_feature 1..18: note = Probe
  source 1..18: mol_type = other DNA
agtaaggtcagctaaata

SEQ ID NO: 38363 - DNA, 22 bp, synthetic construct
  misc_feature 1..22: note = Probe
  source 1..22: mol_type = other DNA
agtaaggtcagctaaataagct

SEQ ID NO: 38364 - DNA, 27 bp, synthetic construct
  misc_feature 1..27: note = Probe
  source 1..27: mol_type = other DNA
agtaaggtcagctaaataagctatcgg

SEQ ID NO: 38365 - DNA, 28 bp, synthetic construct
  misc_feature 1..28: note = Probe
  source 1..28: mol_type = other DNA
agtaaggtcagctaaataagctatcggg

SEQ ID NO: 38366 - DNA, 29 bp, synthetic construct
  misc_feature 1..29: note = Probe
  source 1..29: mol_type = other DNA
agtaaggtcagctaaataagctatcgggc

SEQ ID NO: 38367 - DNA, 30 bp, synthetic construct; identical to SEQ ID NO: 3514
  misc_feature 1..30: note = Probe
  source 1..30: mol_type = other DNA

SEQ ID NO: 38368 - DNA, 31 bp, synthetic construct; identical to SEQ ID NO: 3515
  misc_feature 1..31: note = Probe
  source 1..31: mol_type = other DNA

SEQ ID NO: 38369 - DNA, 32 bp, synthetic construct; identical to SEQ ID NO: 3516
  misc_feature 1..32: note = Probe
  source 1..32: mol_type = other DNA

SEQ ID NO: 38370 - DNA, 33 bp, synthetic construct; identical to SEQ ID NO: 3517
  misc_feature 1..33: note = Probe
  source 1..33: mol_type = other DNA

SEQ ID NO: 38371 - DNA, 34 bp, synthetic construct; identical to SEQ ID NO: 3518
  misc_feature 1..34: note = Probe
  source 1..34: mol_type = other DNA

SEQ ID NO: 38372 - DNA, 35 bp, synthetic construct; identical to SEQ ID NO: 3519
  misc_feature 1..35: note = Probe
  source 1..35: mol_type = other DNA

SEQ ID NO: 38373 - DNA, 36 bp, synthetic construct; identical to SEQ ID NO: 3520
  misc_feature 1..36: note = Probe
  source 1..36: mol_type = other DNA

SEQ ID NO: 38374 - DNA, 37 bp, synthetic construct; identical to SEQ ID NO: 3521
  misc_feature 1..37: note = Probe
  source 1..37: mol_type = other DNA

SEQ ID NO: 38375 - DNA, 38 bp, synthetic construct; identical to SEQ ID NO: 3522
  misc_feature 1..38: note = Probe
  source 1..38: mol_type = other DNA

SEQ ID NO: 38376 - DNA, 41 bp, synthetic construct; identical to SEQ ID NO: 3525
  misc_feature 1..41: note = Probe
  source 1..41: mol_type = other DNA

SEQ ID NO: 38377 - DNA, 42 bp, synthetic construct; identical to SEQ ID NO: 3526
  misc_feature 1..42: note = Probe
  source 1..42: mol_type = other DNA

SEQ ID NO: 38378 - DNA, 43 bp, synthetic construct; identical to SEQ ID NO: 3527
  misc_feature 1..43: note = Probe
  source 1..43: mol_type = other DNA

SEQ ID NO: 38379 - DNA, 44 bp, synthetic construct; identical to SEQ ID NO: 3528
  misc_feature 1..44: note = Probe
  source 1..44: mol_type = other DNA

SEQ ID NO: 38380 - DNA, 45 bp, synthetic construct; identical to SEQ ID NO: 3529
  misc_feature 1..45: note = Probe
  source 1..45: mol_type = other DNA

SEQ ID NO: 38381 - DNA, 46 bp, synthetic construct; identical to SEQ ID NO: 3530
  misc_feature 1..46: note = Probe
  source 1..46: mol_type = other DNA

SEQ ID NO: 38382 - DNA, 50 bp, synthetic construct; identical to SEQ ID NO: 3534
  misc_feature 1..50: note = Probe
  source 1..50: mol_type = other DNA

SEQ ID NO: 38383 - DNA, 50 bp, synthetic construct; identical to SEQ ID NO: 337
  misc_feature 1..50: note = Probe
  source 1..50: mol_type = other DNA

SEQ ID NO: 38384 - DNA, 30 bp, synthetic construct
  misc_feature 1..30: note = Probe
  source 1..30: mol_type = other DNA
agtactagcagttttgaaacttctatcttt

SEQ ID NO: 38385 - DNA, 17 bp, synthetic construct
  misc_feature 1..17: note = Probe
  source 1..17: mol_type = other DNA
agtatagtggtgagtat

SEQ ID NO: 38386 - DNA, 18 bp, synthetic construct
  misc_feature 1..18: note = Probe
  source 1..18: mol_type = other DNA
agtatagtggtgagtatc

SEQ ID NO: 38387 - DNA, 20 bp, synthetic construct
  misc_feature 1..20: note = Probe
  source 1..20: mol_type = other DNA
agtatagtggtgagtatccc

SEQ ID NO: 38388 - DNA, 21 bp, synthetic construct
  misc_feature 1..21: note = Probe
  source 1..21: mol_type = other DNA
agtatagtggtgagtatcccc

SEQ ID NO: 38389 - DNA, 22 bp, synthetic construct
  misc_feature 1..22: note = Probe
  source 1..22: mol_type = other DNA
agtatagtggtgagtatccccg

SEQ ID NO: 38390 - DNA, 23 bp, synthetic construct
  misc_feature 1..23: note = Probe
  source 1..23: mol_type = other DNA
agtatagtggtgagtatccccgc

SEQ ID NO: 38391 - DNA, 20 bp, synthetic construct
  misc_feature 1..20: note = Probe
  source 1..20: mol_type = other DNA
agtatagtggtgagtgtccc

SEQ ID NO: 38392 - DNA, 21 bp, synthetic construct
  misc_feature 1..21: note = Probe
  source 1..21: mol_type = other DNA
agtatagtggttagtatcccc

SEQ ID NO: 38393 - DNA, 22 bp, synthetic construct
  misc_feature 1..22: note = Probe
  source 1..22: mol_type = other DNA
agtatagtggttagtatccccg

SEQ ID NO: 38394 - DNA, 30 bp, synthetic construct; identical to SEQ ID NO: 12745
  misc_feature 1..30: note = Probe
  source 1..30: mol_type = other DNA

SEQ ID NO: 38395 - DNA, 50 bp, synthetic construct; identical to SEQ ID NO: 3540
  misc_feature 1..50: note = Probe
  source 1..50: mol_type = other DNA

SEQ ID NO: 38396 - DNA, 50 bp, synthetic construct; identical to SEQ ID NO: 3541
  misc_feature 1..50: note = Probe
  source 1..50: mol_type = other DNA

SEQ ID NO: 38397 - DNA, 26 bp, synthetic construct
  misc_feature 1..26: note = Probe
  source 1..26: mol_type = other DNA
agtcagaggttcaattcctcttctta

SEQ ID NO: 38398 - DNA, 29 bp, synthetic construct
  misc_feature 1..29: note = Probe
  source 1..29: mol_type = other DNA
agtcagaggttcaattcctcttcttaaca

SEQ ID NO: 38399 - DNA, 32 bp, synthetic construct; identical to SEQ ID NO: 3546
  misc_feature 1..32: note = Probe
  source 1..32: mol_type = other DNA

SEQ ID NO: 38400 - DNA, 33 bp, synthetic construct
  misc_feature 1..33: note = Probe
  source 1..33: mol_type = other DNA
agtcccttcgtggtcgttgccatgttaacgttt

SEQ ID NO: 38401 - DNA, 19 bp, synthetic construct
  misc_feature 1..19: note = Probe
  source 1..19: mol_type = other DNA
agtccgtgcgagaataatg

SEQ ID NO: 38402 - DNA, 23 bp, synthetic construct
  misc_feature 1..23: note = Probe
  source 1..23: mol_type = other DNA
agtcggtagagcatcagactttt

SEQ ID NO: 38403 - DNA, 41 bp, synthetic construct
  misc_feature 1..41: note = Probe
  source 1..41: mol_type = other DNA
agtcggtagagcatcagacttttaatctgagggtccagggt

SEQ ID NO: 38404 - DNA, 18 bp, synthetic construct
  misc_feature 1..18: note = Probe
  source 1..18: mol_type = other DNA
agtcggtagagcatgaga

SEQ ID NO: 38405 - DNA, 19 bp, synthetic construct
  misc_feature 1..19: note = Probe
  source 1..19: mol_type = other DNA
agtcggtagagcatgagac

SEQ ID NO: 38406 - DNA, 28 bp, synthetic construct
  misc_feature 1..28: note = Probe
  source 1..28: mol_type = other DNA
agtcggtagagcatgagactcttaatct

SEQ ID NO: 38407 - DNA, 34 bp, synthetic construct
  misc_feature 1..34: note = Probe
  source 1..34: mol_type = other DNA
agtcggtagagcatgagactcttaatctcagggt

SEQ ID NO: 38408 - DNA, 36 bp, synthetic construct; identical to SEQ ID NO: 346
  misc_feature 1..36: note = Probe
  source 1..36: mol_type = other DNA

SEQ ID NO: 38409 - DNA, 39 bp, synthetic construct; identical to SEQ ID NO: 347
  misc_feature 1..39: note = Probe
  source 1..39: mol_type = other DNA

SEQ ID NO: 38410 - DNA, 41 bp, synthetic construct; identical to SEQ ID NO: 3557
  misc_feature 1..41: note = Probe
  source 1..41: mol_type = other DNA

SEQ ID NO: 38411 - DNA, 36 bp, synthetic construct; identical to SEQ ID NO: 354
  misc_feature 1..36: note = Probe
  source 1..36: mol_type = other DNA

SEQ ID NO: 38412 - DNA, 30 bp, synthetic construct
  misc_feature 1..30: note = Probe
  source 1..30: mol_type = other DNA
agtcggtagagcatgggactcttaatctca

SEQ ID NO: 38413 - DNA, 22 bp, synthetic construct
  misc_feature 1..22: note = Probe
  source 1..22: mol_type = other DNA
agtctaggctgtcagctcttcc

SEQ ID NO: 38414 - DNA, 20 bp, synthetic construct
  misc_feature 1..20: note = Probe
  source 1..20: mol_type = other DNA
agtctcataatctgaaggtc

SEQ ID NO: 38415 - DNA, 23 bp, synthetic construct
  misc_feature 1..23: note = Probe
  source 1..23: mol_type = other DNA
agtctcataatctgaaggtcctg

SEQ ID NO: 38416 - DNA, 25 bp, synthetic construct
  misc_feature 1..25: note = Probe
  source 1..25: mol_type = other DNA
agtctcataatctgaaggtcctgag

SEQ ID NO: 38417 - DNA, 23 bp, synthetic construct
  misc_feature 1..23: note = Probe
  source 1..23: mol_type = other DNA
agtctcataatctgaaggtcgtg

SEQ ID NO: 38418 - DNA, 26 bp, synthetic construct
  misc_feature 1..26: note = Probe
  source 1..26: mol_type = other DNA
agtctcataatctgaaggtcgtgagt

SEQ ID NO: 38419 - DNA, 43 bp, synthetic construct; identical to SEQ ID NO: 3569
  misc_feature 1..43: note = Probe
  source 1..43: mol_type = other DNA

SEQ ID NO: 38420 - DNA, 29 bp, synthetic construct
  misc_feature 1..29: note = Probe
  source 1..29: mol_type = other DNA
agtggaaccacggcgtgattcataccttt

SEQ ID NO: 38421 - DNA, 37 bp, synthetic construct
  misc_feature 1..37: note = Probe
  source 1..37: mol_type = other DNA
agtggctcgccgtgatcgtatagtggttagtactctg

SEQ ID NO: 38422 - DNA, 36 bp, synthetic construct; identical to SEQ ID NO: 16927
  misc_feature 1..36: note = Probe
  source 1..36: mol_type = other DNA

SEQ ID NO: 38423 - DNA, 18 bp, synthetic construct
  misc_feature 1..18: note = Probe
  source 1..18: mol_type = other DNA
agtggtagaattctcgcc

SEQ ID NO: 38424 - DNA, 20 bp, synthetic construct
  misc_feature 1..20: note = Probe
  source 1..20: mol_type = other DNA
agtggtagaattctcgcctc

SEQ ID NO: 38425 - DNA, 20 bp, synthetic construct
  misc_feature 1..20: note = Probe
  source 1..20: mol_type = other DNA
agtggtagaattctcgcctg

SEQ ID NO: 38426 - DNA, 20 bp, synthetic construct
  misc_feature 1..20: note = Probe
  source 1..20: mol_type = other DNA
agtggtagagcatttgactg

SEQ ID NO: 38427 - DNA, 25 bp, synthetic construct
  misc_feature 1..25: note = Probe
  source 1..25: mol_type = other DNA
agtggtagagcatttgactgcagat

SEQ ID NO: 38428 - DNA, 35 bp, synthetic construct
  misc_feature 1..35: note = Probe
  source 1..35: mol_type = other DNA
agtggtagagcgcatgctttgcatgtatgaggcct

SEQ ID NO: 38429 - DNA, 36 bp, synthetic construct; identical to SEQ ID NO: 16938
  misc_feature 1..36: note = Probe
  source 1..36: mol_type = other DNA

SEQ ID NO: 38430 - DNA, 18 bp, synthetic construct
  misc_feature 1..18: note = Probe
  source 1..18: mol_type = other DNA
agtggtcatcacgttcgc

SEQ ID NO: 38431 - DNA, 21 bp, synthetic construct
  misc_feature 1..21: note = Probe
  source 1..21: mol_type = other DNA
agtggtctaaggcgccagact

SEQ ID NO: 38432 - DNA, 23 bp, synthetic construct
  misc_feature 1..23: note = Probe
  source 1..23: mol_type = other DNA
agtggtctagtggttaggattca

SEQ ID NO: 38433 - DNA, 17 bp, synthetic construct
  misc_feature 1..17: note = Probe
  source 1..17: mol_type = other DNA
agtggtgagtatccccg

SEQ ID NO: 38434 - DNA, 18 bp, synthetic construct
  misc_feature 1..18: note = Probe
  source 1..18: mol_type = other DNA
agtggtgagtatccccgc

SEQ ID NO: 38435 - DNA, 24 bp, synthetic construct
  misc_feature 1..24: note = Probe
  source 1..24: mol_type = other DNA
agtggtgagtatccccgcctgtca

SEQ ID NO: 38436 - DNA, 35 bp, synthetic construct; identical to SEQ ID NO: 16948
  misc_feature 1..35: note = Probe
  source 1..35: mol_type = other DNA

SEQ ID NO: 38437 - DNA, 36 bp, synthetic construct; identical to SEQ ID NO: 12765
  misc_feature 1..36: note = Probe
  source 1..36: mol_type = other DNA

SEQ ID NO: 38438 - DNA, 37 bp, synthetic construct; identical to SEQ ID NO: 12766
  misc_feature 1..37: note = Probe
  source 1..37: mol_type = other DNA

SEQ ID NO: 38439 - DNA, 17 bp, synthetic construct
  misc_feature 1..17: note = Probe
  source 1..17: mol_type = other DNA
agtggttacccttctta

SEQ ID NO: 38440 - DNA, 22 bp, synthetic construct
  misc_feature 1..22: note = Probe
  source 1..22: mol_type = other DNA
agtggttacccttcttacgtct

SEQ ID NO: 38441 - DNA, 23 bp, synthetic construct
  misc_feature 1..23: note = Probe
  source 1..23: mol_type = other DNA
agtggttacccttcttacgtctt

SEQ ID NO: 38442 - DNA, 33 bp, synthetic construct; identical to SEQ ID NO: 16958
  misc_feature 1..33: note = Probe
  source 1..33: mol_type = other DNA

SEQ ID NO: 38443 - DNA, 18 bp, synthetic construct
  misc_feature 1..18: note = Probe
  source 1..18: mol_type = other DNA
agtggttagtactctgcg

SEQ ID NO: 38444 - DNA, 18 bp, synthetic construct
  misc_feature 1..18: note = Probe
  source 1..18: mol_type = other DNA
agtggttatcacgttcgc

SEQ ID NO: 38445 - DNA, 41 bp, synthetic construct; identical to SEQ ID NO: 16968
  misc_feature 1..41: note = Probe
  source 1..41: mol_type = other DNA

SEQ ID NO: 38446 - DNA, 21 bp, synthetic construct
  misc_feature 1..21: note = Probe
  source 1..21: mol_type = other DNA
agtgtagtggttatcacgtct

SEQ ID NO: 38447 - DNA, 21 bp, synthetic construct
  misc_feature 1..21: note = Probe
  source 1..21: mol_type = other DNA
agtgtagtggttatcacgttc

SEQ ID NO: 38448 - DNA, 23 bp, synthetic construct
  misc_feature 1..23: note = Probe
  source 1..23: mol_type = other DNA
agtgtagtggttatcacgttcgc

SEQ ID NO: 38449 - DNA, 18 bp, synthetic construct
  misc_feature 1..18: note = Probe
  source 1..18: mol_type = other DNA
agtgtgtcaggatggccg

SEQ ID NO: 38450 - DNA, 34 bp, synthetic construct; identical to SEQ ID NO: 3601
  misc_feature 1..34: note = Probe
  source 1..34: mol_type = other DNA

SEQ ID NO: 38451 - DNA, 41 bp, synthetic construct; identical to SEQ ID NO: 3608
  misc_feature 1..41: note = Probe
  source 1..41: mol_type = other DNA

SEQ ID NO: 38452 - DNA, 50 bp, synthetic construct
  misc_feature 1..50: note = Probe
  source 1..50: mol_type = other DNA
agttaccagaatggccgagtggttaaggcgttggacttaagatccaatgg

SEQ ID NO: 38453 - DNA, 20 bp, synthetic construct
  misc_feature 1..20: note = Probe
  source 1..20: mol_type = other DNA
agttcaaatctcggtggaac

SEQ ID NO: 38454 - DNA, 31 bp, synthetic construct
  misc_feature 1..31: note = Probe
  source 1..31: mol_type = other DNA
agttcaattctcgctggggcctgtgtgtttt

SEQ ID NO: 38455 - DNA, 21 bp, synthetic construct
  misc_feature 1..21: note = Probe
  source 1..21: mol_type = other DNA
agttcgaacctcagagggggc

SEQ ID NO: 38456 - DNA, 22 bp, synthetic construct
  misc_feature 1..22: note = Probe
  source 1..22: mol_type = other DNA
agttcgaacctcagagggggca

SEQ ID NO: 38457 - DNA, 34 bp, synthetic construct
  misc_feature 1..34: note = Probe
  source 1..34: mol_type = other DNA
agttcgaacctcagagggggcaaggcgtctgttt

SEQ ID NO: 38458 - DNA, 31 bp, synthetic construct
  misc_feature 1..31: note = Probe
  source 1..31: mol_type = other DNA
agttcgaacctcagagggggcagctgccatt

SEQ ID NO: 38459 - DNA, 32 bp, synthetic construct
  misc_feature 1..32: note = Probe
  source 1..32: mol_type = other DNA
agttcgaacctcagagggggcagctgccattt

SEQ ID NO: 38460 - DNA, 33 bp, synthetic construct
  misc_feature 1..33: note = Probe
  source 1..33: mol_type = other DNA
agttcgaacctcagagggggcagctgccatttt

SEQ ID NO: 38461 - DNA, 33 bp, synthetic construct
  misc_feature 1..33: note = Probe
  source 1..33: mol_type = other DNA
agttcgagcctcacacggggcagtctaacgttt

SEQ ID NO: 38462 - DNA, 31 bp, synthetic construct
  misc_feature 1..31: note = Probe
  source 1..31: mol_type = other DNA
agttcgagcctcacctggagcaagacccttt

SEQ ID NO: 38463 - DNA, 30 bp, synthetic construct
  misc_feature 1..30: note = Probe
  source 1..30: mol_type = other DNA
agttcgatcctcacacggggcacaataatt

SEQ ID NO: 38464 - DNA, 31 bp, synthetic construct
  misc_feature 1..31: note = Probe
  source 1..31: mol_type = other DNA
agttcgatcctcacacggggcacaataattt

SEQ ID NO: 38465 - DNA, 32 bp, synthetic construct
  misc_feature 1..32: note = Probe
  source 1..32: mol_type = other DNA
agttcgatcctcacacggggcacaataatttt

SEQ ID NO: 38466 - DNA, 35 bp, synthetic construct; identical to SEQ ID NO: 3616
  misc_feature 1..35: note = Probe
  source 1..35: mol_type = other DNA

SEQ ID NO: 38467 - DNA, 18 bp, synthetic construct
  misc_feature 1..18: note = Probe
  source 1..18: mol_type = other DNA
agttggtagagcatcaga

SEQ ID NO: 38468 - DNA, 21 bp, synthetic construct
  misc_feature 1..21: note = Probe
  source 1..21: mol_type = other DNA
agttggtagagcggaggactg

SEQ ID NO: 38469 - DNA, 18 bp, synthetic construct
  misc_feature 1..18: note = Probe
  source 1..18: mol_type = other DNA
agttggttaaagcgcctg

SEQ ID NO: 38470 - DNA, 36 bp, synthetic construct
  misc_feature 1..36: note = Probe
  source 1..36: mol_type = other DNA
agttggttagagcgtgctgctactaatgccagggtc

SEQ ID NO: 38471 - DNA, 37 bp, synthetic construct
  misc_feature 1..37: note = Probe
  source 1..37: mol_type = other DNA
agttggttagagcgtgctgctactaatgccagggtcg

SEQ ID NO: 38472 - DNA, 31 bp, synthetic construct; identical to SEQ ID NO: 17021
  misc_feature 1..31: note = Probe
  source 1..31: mol_type = other DNA

SEQ ID NO: 38473 - DNA, 24 bp, synthetic construct
  misc_feature 1..24: note = Probe
  source 1..24: mol_type = other DNA
agtttttctggtggattacgcacc

SEQ ID NO: 38474 - DNA, 50 bp, synthetic construct; identical to SEQ ID NO: 3624
  misc_feature 1..50: note = Probe
  source 1..50: mol_type = other DNA

SEQ ID NO: 38475 - DNA, 30 bp, synthetic construct; identical to SEQ ID NO: 3625
  misc_feature 1..30: note = Probe
  source 1..30: mol_type = other DNA

SEQ ID NO: 38476 - DNA, 29 bp, synthetic construct
  misc_feature 1..29: note = Probe
  source 1..29: mol_type = other DNA
ataaccatgcacactactataaccaccct

SEQ ID NO: 38477 - DNA, 30 bp, synthetic construct; identical to SEQ ID NO: 3631
  misc_feature 1..30: note = Probe
  source 1..30: mol_type = other DNA

SEQ ID NO: 38478 - DNA, 18 bp, synthetic construct
  misc_feature 1..18: note = Probe
  source 1..18: mol_type = other DNA
ataacccagaggtcgatg

SEQ ID NO: 38479 - DNA, 19 bp, synthetic construct
  misc_feature 1..19: note = Probe
  source 1..19: mol_type = other DNA
ataacccagaggtcgatgg

SEQ ID NO: 38480 - DNA, 42 bp, synthetic construct; identical to SEQ ID NO: 3634
  misc_feature 1..42: note = Probe
  source 1..42: mol_type = other DNA

SEQ ID NO: 38481 - DNA, 33 bp, synthetic construct; identical to SEQ ID NO: 17058
  misc_feature 1..33: note = Probe
  source 1..33: mol_type = other DNA

SEQ ID NO: 38482 - DNA, 36 bp, synthetic construct; identical to SEQ ID NO: 17060
  misc_feature 1..36: note = Probe
  source 1..36: mol_type = other DNA

SEQ ID NO: 38483 - DNA, 34 bp, synthetic construct; identical to SEQ ID NO: 3647
  misc_feature 1..34: note = Probe
  source 1..34: mol_type = other DNA

SEQ ID NO: 38484 - DNA, 50 bp, synthetic construct; identical to SEQ ID NO: 3652
  misc_feature 1..50: note = Probe
  source 1..50: mol_type = other DNA

SEQ ID NO: 38485 - DNA, 20 bp, synthetic construct
  misc_feature 1..20: note = Probe
  source 1..20: mol_type = other DNA
ataatcatatttaccaaatg

SEQ ID NO: 38486 - DNA, 17 bp, synthetic construct
  misc_feature 1..17: note = Probe
  source 1..17: mol_type = other DNA
ataatctgaaggtcctg

SEQ ID NO: 38487 - DNA, 18 bp, synthetic construct
  misc_feature 1..18: note = Probe
  source 1..18: mol_type = other DNA
ataatctgaaggtcctga

SEQ ID NO: 38488 - DNA, 20 bp, synthetic construct
  misc_feature 1..20: note = Probe
  source 1..20: mol_type = other DNA
ataatctgaaggtcctgagt

SEQ ID NO: 38489 - DNA, 18 bp, synthetic construct
  misc_feature 1..18: note = Probe
  source 1..18: mol_type = other DNA
ataatctgaaggtcgtga

SEQ ID NO: 38490 - DNA, 20 bp, synthetic construct
  misc_feature 1..20: note = Probe
  source 1..20: mol_type = other DNA
ataatctgaaggtcgtgagt

SEQ ID NO: 38491 - DNA, 38 bp, synthetic construct
  misc_feature 1..38: note = Probe
  source 1..38: mol_type = other DNA
ataatctgaaggtcgtgagttcgagcctcacacggggc

SEQ ID NO: 38492 - DNA, 31 bp, synthetic construct; identical to SEQ ID NO: 17084
  misc_feature 1..31: note = Probe
  source 1..31: mol_type = other DNA

SEQ ID NO: 38493 - DNA, 50 bp, synthetic construct; identical to SEQ ID NO: 28366
  misc_feature 1..50: note = Probe
  source 1..50: mol_type = other DNA

SEQ ID NO: 38494 - DNA, 46 bp, synthetic construct; identical to SEQ ID NO: 3655
  misc_feature 1..46: note = Probe
  source 1..46: mol_type = other DNA

SEQ ID NO: 38495 - DNA, 50 bp, synthetic construct; identical to SEQ ID NO: 3657
  misc_feature 1..50: note = Probe
  source 1..50: mol_type = other DNA

SEQ ID NO: 38496 - DNA, 33 bp, synthetic construct; identical to SEQ ID NO: 3663
  misc_feature 1..33: note = Probe
  source 1..33: mol_type = other DNA

SEQ ID NO: 38497 - DNA, 41 bp, synthetic construct; identical to SEQ ID NO: 3670
  misc_feature 1..41: note = Probe
  source 1..41: mol_type = other DNA

SEQ ID NO: 38498 - DNA, 42 bp, synthetic construct; identical to SEQ ID NO: 3671
  misc_feature 1..42: note = Probe
  source 1..42: mol_type = other DNA

SEQ ID NO: 38499 - DNA, 43 bp, synthetic construct; identical to SEQ ID NO: 28403
  misc_feature 1..43: note = Probe
  source 1..43: mol_type = other DNA

SEQ ID NO: 38500 - DNA, 18 bp, synthetic construct
  misc_feature 1..18: note = Probe
  source 1..18: mol_type = other DNA
atagctcaggggttagag

SEQ ID NO: 38501 - DNA, 18 bp, synthetic construct
  misc_feature 1..18: note = Probe
  source 1..18: mol_type = other DNA
atagctcagtcggtagag

SEQ ID NO: 38502 - DNA, 20 bp, synthetic construct
  misc_feature 1..20: note = Probe
  source 1..20: mol_type = other DNA
atagctcagtcggtagagca

SEQ ID NO: 38503 - DNA, 22 bp, synthetic construct
  misc_feature 1..22: note = Probe
  source 1..22: mol_type = other DNA
atagctcagtcggtagagcatc

SEQ ID NO: 38504 - DNA, 30 bp, synthetic construct; identical to SEQ ID NO: 12797
  misc_feature 1..30: note = Probe
  source 1..30: mol_type = other DNA

SEQ ID NO: 38505 - DNA, 31 bp, synthetic construct; identical to SEQ ID NO: 12798
  misc_feature 1..31: note = Probe
  source 1..31: mol_type = other DNA

SEQ ID NO: 38506 - DNA, 50 bp, synthetic construct
  misc_feature 1..50: note = Probe
  source 1..50: mol_type = other DNA
atagctcagtcggtagagcatcagacttttaatctgagggtccagggttc

SEQ ID NO: 38507 - DNA, 17 bp, synthetic construct
  misc_feature 1..17: note = Probe
  source 1..17: mol_type = other DNA
atagctcagttgggaga

SEQ ID NO: 38508 - DNA, 18 bp, synthetic construct
  misc_feature 1..18: note = Probe
  source 1..18: mol_type = other DNA
atagctcagttgggagag

SEQ ID NO: 38509 - DNA, 17 bp, synthetic construct
  misc_feature 1..17: note = Probe
  source 1..17: mol_type = other DNA
ataggtattaaggtttt

SEQ ID NO: 38510 - DNA, 18 bp, synthetic construct
  misc_feature 1..18: note = Probe
  source 1..18: mol_type = other DNA
ataggtttggtcctagcc

SEQ ID NO: 38511 - DNA, 23 bp, synthetic construct
  misc_feature 1..23: note = Probe
  source 1..23: mol_type = other DNA
ataggtttggtcctagcctttct

SEQ ID NO: 38512 - DNA, 29 bp, synthetic construct
  misc_feature 1..29: note = Probe
  source 1..29: mol_type = other DNA
ataggtttggtcctagcctttctattagc

SEQ ID NO: 38513 - DNA, 18 bp, synthetic construct
  misc_feature 1..18: note = Probe
  source 1..18: mol_type = other DNA
atagtggtaagcatagct

SEQ ID NO: 38514 - DNA, 19 bp, synthetic construct
  misc_feature 1..19: note = Probe
  source 1..19: mol_type = other DNA
atagtggtaagcatagctg

SEQ ID NO: 38515 - DNA, 19 bp, synthetic construct
  misc_feature 1..19: note = Probe
  source 1..19: mol_type = other DNA
atagtggtgagcatagctg

SEQ ID NO: 38516 - DNA, 18 bp, synthetic construct
  misc_feature 1..18: note = Probe
  source 1..18: mol_type = other DNA
atagtggtgagtatcccc

SEQ ID NO: 38517 - DNA, 18 bp, synthetic construct
  misc_feature 1..18: note = Probe
  source 1..18: mol_type = other DNA
atagtggttagcatagct

SEQ ID NO: 38518 - DNA, 18 bp, synthetic construct
  misc_feature 1..18: note = Probe
  source 1..18: mol_type = other DNA
atagtggttagtactctg

SEQ ID NO: 38519 - DNA, 23 bp, synthetic construct
  misc_feature 1..23: note = Probe
  source 1..23: mol_type = other DNA
atagtgtagtggttatcacgtct

SEQ ID NO: 38520 - DNA, 30 bp, synthetic construct; identical to SEQ ID NO: 3694
  misc_feature 1..30: note = Probe
  source 1..30: mol_type = other DNA

SEQ ID NO: 38521 - DNA, 32 bp, synthetic construct; identical to SEQ ID NO: 17140
  misc_feature 1..32: note = Probe
  source 1..32: mol_type = other DNA

SEQ ID NO: 38522 - DNA, 34 bp, synthetic construct; identical to SEQ ID NO: 12800
  misc_feature 1..34: note = Probe
  source 1..34: mol_type = other DNA

SEQ ID NO: 38523 - DNA, 36 bp, synthetic construct; identical to SEQ ID NO: 372
  misc_feature 1..36: note = Probe
  source 1..36: mol_type = other DNA

SEQ ID NO: 38524 - DNA, 39 bp, synthetic construct; identical to SEQ ID NO: 3695
  misc_feature 1..39: note = Probe
  source 1..39: mol_type = other DNA

SEQ ID NO: 38525 - DNA, 29 bp, synthetic construct
  misc_feature 1..29: note = Probe
  source 1..29: mol_type = other DNA
atatccaaccttcagctatagggtggaga

SEQ ID NO: 38526 - DNA, 25 bp, synthetic construct
  misc_feature 1..25: note = Probe
  source 1..25: mol_type = other DNA
atatggtctagcggttaggattcct

SEQ ID NO: 38527 - DNA, 32 bp, synthetic construct
  misc_feature 1..32: note = Probe
  source 1..32: mol_type = other DNA
atatgtccgcgtgggttcgaaccccactcctg

SEQ ID NO: 38528 - DNA, 50 bp, synthetic construct; identical to SEQ ID NO: 3698
  misc_feature 1..50: note = Probe
  source 1..50: mol_type = other DNA

SEQ ID NO: 38529 - DNA, 39 bp, synthetic construct; identical to SEQ ID NO: 17152
  misc_feature 1..39: note = Probe
  source 1..39: mol_type = other DNA

SEQ ID NO: 38530 - DNA, 39 bp, synthetic construct; identical to SEQ ID NO: 3707
  misc_feature 1..39: note = Probe
  source 1..39: mol_type = other DNA

SEQ ID NO: 38531 - DNA, 18 bp, synthetic construct
  misc_feature 1..18: note = Probe
  source 1..18: mol_type = other DNA
atcagaagattgagggtt

SEQ ID NO: 38532 - DNA, 34 bp, synthetic construct; identical to SEQ ID NO: 12806
  misc_feature 1..34: note = Probe
  source 1..34: mol_type = other DNA

SEQ ID NO: 38533 - DNA, 35 bp, synthetic construct
  misc_feature 1..35: note = Probe
  source 1..35: mol_type = other DNA
atcagaagattgagggttcgagtcccttcgtggtc

SEQ ID NO: 38534 - DNA, 35 bp, synthetic construct
  misc_feature 1..35: note = Probe
  source 1..35: mol_type = other DNA
atcagaaggttgcgtgttcaagtcacgtcggggtc

SEQ ID NO: 38535 - DNA, 30 bp, synthetic construct; identical to SEQ ID NO: 8552
  misc_feature 1..30: note = Probe
  source 1..30: mol_type = other DNA

SEQ ID NO: 38536 - DNA, 27 bp, synthetic construct
  misc_feature 1..27: note = Probe
  source 1..27: mol_type = other DNA
atccaaccttcagctatagggtggaga

SEQ ID NO: 38537 - DNA, 21 bp, synthetic construct
  misc_feature 1..21: note = Probe
  source 1..21: mol_type = other DNA
atccaatggggtctccccgcg

SEQ ID NO: 38538 - DNA, 24 bp, synthetic construct
  misc_feature 1..24: note = Probe
  source 1..24: mol_type = other DNA
atccaatggggtctccccgcgcag

SEQ ID NO: 38539 - DNA, 26 bp, synthetic construct
  misc_feature 1..26: note = Probe
  source 1..26: mol_type = other DNA
atccaatggggtctccccgcgcaggt

SEQ ID NO: 38540 - DNA, 26 bp, synthetic construct
  misc_feature 1..26: note = Probe
  source 1..26: mol_type = other DNA
atccaatggggtttccccgcacaggt

SEQ ID NO: 38541 - DNA, 18 bp, synthetic construct
  misc_feature 1..18: note = Probe
  source 1..18: mol_type = other DNA
atccagcgatccgagttc

SEQ ID NO: 38542 - DNA, 34 bp, synthetic construct; identical to SEQ ID NO: 17194
  misc_feature 1..34: note = Probe
  source 1..34: mol_type = other DNA

SEQ ID NO: 38543 - DNA, 33 bp, synthetic construct
  misc_feature 1..33: note = Probe
  source 1..33: mol_type = other DNA
atccagcgatccgagttcaaatctcggtgggac

SEQ ID NO: 38544 - DNA, 34 bp, synthetic construct; identical to SEQ ID NO: 17199
  misc_feature 1..34: note = Probe
  source 1..34: mol_type = other DNA

SEQ ID NO: 38545 - DNA, 35 bp, synthetic construct; identical to SEQ ID NO: 380
  misc_feature 1..35: note = Probe
  source 1..35: mol_type = other DNA

SEQ ID NO: 38546 - DNA, 38 bp, synthetic construct; identical to SEQ ID NO: 3724
  misc_feature 1..38: note = Probe
  source 1..38: mol_type = other DNA

SEQ ID NO: 38547 - DNA, 33 bp, synthetic construct
  misc_feature 1..33: note = Probe
  source 1..33: mol_type = other DNA
atccagcgatccgagttcaagtctcggtggaac

SEQ ID NO: 38548 - DNA, 34 bp, synthetic construct
  misc_feature 1..34: note = Probe
  source 1..34: mol_type = other DNA
atccagcgatccgagttcaagtctcggtggaacc

SEQ ID NO: 38549 - DNA, 38 bp, synthetic construct; identical to SEQ ID NO: 17204
  misc_feature 1..38: note = Probe
  source 1..38: mol_type = other DNA

SEQ ID NO: 38550 - DNA, 18 bp, synthetic construct
  misc_feature 1..18: note = Probe
  source 1..18: mol_type = other DNA
atccaggtgccccctccc

SEQ ID NO: 38551 - DNA, 23 bp, synthetic construct
  misc_feature 1..23: note = Probe
  source 1..23: mol_type = other DNA
atccattggggtctccccgcgca

SEQ ID NO: 38552 - DNA, 24 bp, synthetic construct
  misc_feature 1..24: note = Probe
  source 1..24: mol_type = other DNA
atccattggggtctccccgcgcag

SEQ ID NO: 38553 - DNA, 26 bp, synthetic construct
  misc_feature 1..26: note = Probe
  source 1..26: mol_type = other DNA
atccattggggtctccccgcgcaggt

SEQ ID NO: 38554 - DNA, 25 bp, synthetic construct
  misc_feature 1..25: note = Probe
  source 1..25: mol_type = other DNA
atccattggggtttccccgcgcagg

SEQ ID NO: 38555 - DNA, 26 bp, synthetic construct
  misc_feature 1..26: note = Probe
  source 1..26: mol_type = other DNA
atccattggggtttccccgcgcaggt

SEQ ID NO: 38556 - DNA, 50 bp, synthetic construct; identical to SEQ ID NO: 28512
  misc_feature 1..50: note = Probe
  source 1..50: mol_type = other DNA

SEQ ID NO: 38557 - DNA, 18 bp, synthetic construct
  misc_feature 1..18: note = Probe
  source 1..18: mol_type = other DNA
atcccaccgctgccacac

SEQ ID NO: 38558 - DNA, 23 bp, synthetic construct
  misc_feature 1..23: note = Probe
  source 1..23: mol_type = other DNA
atcccacttctgacacatacttt

SEQ ID NO: 38559 - DNA, 18 bp, synthetic construct
  misc_feature 1..18: note = Probe
  source 1..18: mol_type = other DNA
atcccagcggtgcctccg

SEQ ID NO: 38560 - DNA, 50 bp, synthetic construct; identical to SEQ ID NO: 3740
  misc_feature 1..50: note = Probe
  source 1..50: mol_type = other DNA

SEQ ID NO: 38561 - DNA, 50 bp, synthetic construct
  misc_feature 1..50: note = Probe
  source 1..50: mol_type = other DNA
atccccgcctgtcacgcgggagaccggggttcgattccccgacggggagg

SEQ ID NO: 38562 - DNA, 18 bp, synthetic construct
  misc_feature 1..18: note = Probe
  source 1..18: mol_type = other DNA
atcccggacgagccccct

SEQ ID NO: 38563 - DNA, 50 bp, synthetic construct
  misc_feature 1..50: note = Probe
  source 1..50: mol_type = other DNA
atccggccggttagctcagttggttagagcgtggtgctaataacgccaag

SEQ ID NO: 38564 - DNA, 18 bp, synthetic construct
  misc_feature 1..18: note = Probe
  source 1..18: mol_type = other DNA
atccggctcgaaggacga

SEQ ID NO: 38565 - DNA, 18 bp, synthetic construct
  misc_feature 1..18: note = Probe
  source 1..18: mol_type = other DNA
atccgggtgccccctcaa

SEQ ID NO: 38566 - DNA, 18 bp, synthetic construct
  misc_feature 1..18: note = Probe
  source 1..18: mol_type = other DNA
atccgggtgccccctctg

SEQ ID NO: 38567 - DNA, 18 bp, synthetic construct
  misc_feature 1..18: note = Probe
  source 1..18: mol_type = other DNA
atcctaaaatgttttcag

SEQ ID NO: 38568 - DNA, 31 bp, synthetic construct
  misc_feature 1..31: note = Probe
  source 1..31: mol_type = other DNA
atcctgggttcgactcccagcggggccttgg

SEQ ID NO: 38569 - DNA, 34 bp, synthetic construct
  misc_feature 1..34: note = Probe
  source 1..34: mol_type = other DNA
atccttaggtcgctggttcgaatccggctcgaag

SEQ ID NO: 38570 - DNA, 35 bp, synthetic construct
  misc_feature 1..35: note = Probe
  source 1..35: mol_type = other DNA
atccttaggtcgctggttcgaatccggctcggagg

SEQ ID NO: 38571 - DNA, 34 bp, synthetic construct; identical to SEQ ID NO: 17307
  misc_feature 1..34: note = Probe
  source 1..34: mol_type = other DNA

SEQ ID NO: 38572 - DNA, 49 bp, synthetic construct
  misc_feature 1..49: note = Probe
  source 1..49: mol_type = other DNA
atccttaggtcgctggttcgattccggctcgaaggaagtgcccgatgct

SEQ ID NO: 38573 - DNA, 50 bp, synthetic construct; identical to SEQ ID NO: 17308
  misc_feature 1..50: note = Probe
  source 1..50: mol_type = other DNA

SEQ ID NO: 38574 - DNA, 50 bp, synthetic construct; identical to SEQ ID NO: 3753
  misc_feature 1..50: note = Probe
  source 1..50: mol_type = other DNA

SEQ ID NO: 38575 - DNA, 50 bp, synthetic construct
  misc_feature 1..50: note = Probe
  source 1..50: mol_type = other DNA
atccttaggtcgctggttcgattccggctcgaaggagacaagtgcggttt

SEQ ID NO: 38576 - DNA, 50 bp, synthetic construct
  misc_feature 1..50: note = Probe
  source 1..50: mol_type = other DNA
atccttaggtcgctggttcgattccggctcgaaggagacgctgctgtttt

SEQ ID NO: 38577 - DNA, 50 bp, synthetic construct
  misc_feature 1..50: note = Probe
  source 1..50: mol_type = other DNA
atccttaggtcgctggttcgattccggctcgaaggagctgccgtattctt

SEQ ID NO: 38578 - DNA, 32 bp, synthetic construct
  misc_feature 1..32: note = Probe
  source 1..32: mol_type = other DNA
atcgaaaccatcctctgctaggtgcctgtttt

SEQ ID NO: 38579 - DNA, 30 bp, synthetic construct
  misc_feature 1..30: note = Probe
  source 1..30: mol_type = other DNA
atcgaaaccatcctctgctatcggagtttt

SEQ ID NO: 38580 - DNA, 31 bp, synthetic construct
  misc_feature 1..31: note = Probe
  source 1..31: mol_type = other DNA
atcgaaaccatcctctgctatcggagttttt

SEQ ID NO: 38581 - DNA, 32 bp, synthetic construct
  misc_feature 1..32: note = Probe
  source 1..32: mol_type = other DNA
atcgaaaccatcctctgctatcggagtttttt

SEQ ID NO: 38582 - DNA, 20 bp, synthetic construct
  misc_feature 1..20: note = Probe
  source 1..20: mol_type = other DNA
atcgatgcccgcatcctcca

SEQ ID NO: 38583 - DNA, 29 bp, synthetic construct
  misc_feature 1..29: note = Probe
  source 1..29: mol_type = other DNA
atcgatgcccgcatcctccactcagcttt

SEQ ID NO: 38584 - DNA, 24 bp, synthetic construct
  misc_feature 1..24: note = Probe
  source 1..24: mol_type = other DNA
atcgatgcccgcatcctccagttt

SEQ ID NO: 38585 - DNA, 24 bp, synthetic construct
  misc_feature 1..24: note = Probe
  source 1..24: mol_type = other DNA
atcgatgcccgcattctccagttt

SEQ ID NO: 38586 - DNA, 50 bp, synthetic construct; identical to SEQ ID NO: 3759
  misc_feature 1..50: note = Probe
  source 1..50: mol_type = other DNA

SEQ ID NO: 38587 - DNA, 35 bp, synthetic construct; identical to SEQ ID NO: 17338
  misc_feature 1..35: note = Probe
  source 1..35: mol_type = other DNA

SEQ ID NO: 38588 - DNA, 36 bp, synthetic construct; identical to SEQ ID NO: 17339
  misc_feature 1..36: note = Probe
  source 1..36: mol_type = other DNA

SEQ ID NO: 38589 - DNA, 38 bp, synthetic construct; identical to SEQ ID NO: 17341
  misc_feature 1..38: note = Probe
  source 1..38: mol_type = other DNA

SEQ ID NO: 38590 - DNA, 39 bp, synthetic construct; identical to SEQ ID NO: 28682
  misc_feature 1..39: note = Probe
  source 1..39: mol_type = other DNA

SEQ ID NO: 38591 - DNA, 50 bp, synthetic construct
  misc_feature 1..50: note = Probe
  source 1..50: mol_type = other DNA
atcggtgcatgggtggttcagtggtagaattctcgcctgccacgcgggag

SEQ ID NO: 38592 - DNA, 20 bp, synthetic construct
  misc_feature 1..20: note = Probe
  source 1..20: mol_type = other DNA
atcggttagcgcgcggtact

SEQ ID NO: 38593 - DNA, 18 bp, synthetic construct
  misc_feature 1..18: note = Probe
  source 1..18: mol_type = other DNA
atcgtatagtggttagta

SEQ ID NO: 38594 - DNA, 19 bp, synthetic construct
  misc_feature 1..19: note = Probe
  source 1..19: mol_type = other DNA
atcgtatagtggttagtac

SEQ ID NO: 38595 - DNA, 20 bp, synthetic construct
  misc_feature 1..20: note = Probe
  source 1..20: mol_type = other DNA
atcgtatagtggttagtact

SEQ ID NO: 38596 - DNA, 21 bp, synthetic construct
  misc_feature 1..21: note = Probe
  source 1..21: mol_type = other DNA
atcgtatagtggttagtactc

SEQ ID NO: 38597 - DNA, 22 bp, synthetic construct
  misc_feature 1..22: note = Probe
  source 1..22: mol_type = other DNA
atcgtatagtggttagtactct

SEQ ID NO: 38598 - DNA, 23 bp, synthetic construct
  misc_feature 1..23: note = Probe
  source 1..23: mol_type = other DNA
atcgtatagtggttagtactctg

SEQ ID NO: 38599 - DNA, 24 bp, synthetic construct
  misc_feature 1..24: note = Probe
  source 1..24: mol_type = other DNA
atcgtatagtggttagtactctgc

SEQ ID NO: 38600 - DNA, 35 bp, synthetic construct; identical to SEQ ID NO: 3765
  misc_feature 1..35: note = Probe
  source 1..35: mol_type = other DNA

SEQ ID NO: 38601 - DNA, 36 bp, synthetic construct; identical to SEQ ID NO: 3766
  misc_feature 1..36: note = Probe
  source 1..36: mol_type = other DNA

SEQ ID NO: 38602 - DNA, 38 bp, synthetic construct; identical to SEQ ID NO: 17349
  misc_feature 1..38: note = Probe
  source 1..38: mol_type = other DNA

SEQ ID NO: 38603 - DNA, 18 bp, synthetic construct
  misc_feature 1..18: note = Probe
  source 1..18: mol_type = other DNA
atctaaaggtccctggtt

SEQ ID NO: 38604 - DNA, 34 bp, synthetic construct
  misc_feature 1..34: note = Probe
  source 1..34: mol_type = other DNA
atctaaaggtccctggttcaatcccgggtttcgg

SEQ ID NO: 38605 - DNA, 33 bp, synthetic construct; identical to SEQ ID NO: 3772
  misc_feature 1..33: note = Probe
  source 1..33: mol_type = other DNA

SEQ ID NO: 38606 - DNA, 36 bp, synthetic construct; identical to SEQ ID NO: 393
  misc_feature 1..36: note = Probe
  source 1..36: mol_type = other DNA

SEQ ID NO: 38607 - DNA, 39 bp, synthetic construct; identical to SEQ ID NO: 3774
  misc_feature 1..39: note = Probe
  source 1..39: mol_type = other DNA

SEQ ID NO: 38608 - DNA, 17 bp, synthetic construct
  misc_feature 1..17: note = Probe
  source 1..17: mol_type = other DNA
atctgaaggtcctgagt

SEQ ID NO: 38609 - DNA, 20 bp, synthetic construct
  misc_feature 1..20: note = Probe
  source 1..20: mol_type = other DNA
atctgaaggtcctgagttcg

SEQ ID NO: 38610 - DNA, 34 bp, synthetic construct
  misc_feature 1..34: note = Probe
  source 1..34: mol_type = other DNA
atctgaaggtcgtgagttcgagcctcacacgggg

SEQ ID NO: 38611 - DNA, 35 bp, synthetic construct
  misc_feature 1..35: note = Probe
  source 1..35: mol_type = other DNA
atctgaaggtcgtgagttcgagcctcacacggggc

SEQ ID NO: 38612 - DNA, 36 bp, synthetic construct; identical to SEQ ID NO: 28719
  misc_feature 1..36: note = Probe
  source 1..36: mol_type = other DNA

SEQ ID NO: 38613 - DNA, 36 bp, synthetic construct; identical to SEQ ID NO: 17365
  misc_feature 1..36: note = Probe
  source 1..36: mol_type = other DNA

SEQ ID NO: 38614 - DNA, 39 bp, synthetic construct; identical to SEQ ID NO: 3783
  misc_feature 1..39: note = Probe
  source 1..39: mol_type = other DNA

SEQ ID NO: 38615 - DNA, 45 bp, synthetic construct; identical to SEQ ID NO: 3784
  misc_feature 1..45: note = Probe
  source 1..45: mol_type = other DNA

SEQ ID NO: 38616 - DNA, 38 bp, synthetic construct; identical to SEQ ID NO: 3792
  misc_feature 1..38: note = Probe
  source 1..38: mol_type = other DNA

SEQ ID NO: 38617 - DNA, 36 bp, synthetic construct; identical to SEQ ID NO: 25049
  misc_feature 1..36: note = Probe
  source 1..36: mol_type = other DNA

SEQ ID NO: 38618 - DNA, 39 bp, synthetic construct; identical to SEQ ID NO: 3794
  misc_feature 1..39: note = Probe
  source 1..39: mol_type = other DNA

SEQ ID NO: 38619 - DNA, 50 bp, synthetic construct; identical to SEQ ID NO: 3797
  misc_feature 1..50: note = Probe
  source 1..50: mol_type = other DNA

SEQ ID NO: 38620 - DNA, 26 bp, synthetic construct
  misc_feature 1..26: note = Probe
  source 1..26: mol_type = other DNA
atgaaaacctttttccaaggacaaat

SEQ ID NO: 38621 - DNA, 30 bp, synthetic construct; identical to SEQ ID NO: 17384
  misc_feature 1..30: note = Probe
  source 1..30: mol_type = other DNA

SEQ ID NO: 38622 - DNA, 30 bp, synthetic construct; identical to SEQ ID NO: 17385
  misc_feature 1..30: note = Probe
  source 1..30: mol_type = other DNA

SEQ ID NO: 38623 - DNA, 31 bp, synthetic construct; identical to SEQ ID NO: 3801
  misc_feature 1..31: note = Probe
  source 1..31: mol_type = other DNA

SEQ ID NO: 38624 - DNA, 30 bp, synthetic construct; identical to SEQ ID NO: 17387
  misc_feature 1..30: note = Probe
  source 1..30: mol_type = other DNA

SEQ ID NO: 38625 - DNA, 31 bp, synthetic construct; identical to SEQ ID NO: 3802
  misc_feature 1..31: note = Probe
  source 1..31: mol_type = other DNA

SEQ ID NO: 38626 - DNA, 31 bp, synthetic construct; identical to SEQ ID NO: 3804
  misc_feature 1..31: note = Probe
  source 1..31: mol_type = other DNA

SEQ ID NO: 38627 - DNA, 30 bp, synthetic construct; identical to SEQ ID NO: 3807
  misc_feature 1..30: note = Probe
  source 1..30: mol_type = other DNA

SEQ ID NO: 38628 - DNA, 24 bp, synthetic construct
  misc_feature 1..24: note = Probe
  source 1..24: mol_type = other DNA
atgccccaactaaatactaccgta

SEQ ID NO: 38629 - DNA, 28 bp, synthetic construct
  misc_feature 1..28: note = Probe
  source 1..28: mol_type = other DNA
atgccccaactaaatactaccgtatggc

SEQ ID NO: 38630 - DNA, 29 bp, synthetic construct
  misc_feature 1..29: note = Probe
  source 1..29: mol_type = other DNA
atgcccccatgtctaacaacatggctttc

SEQ ID NO: 38631 - DNA, 30 bp, synthetic construct; identical to SEQ ID NO: 3818
  misc_feature 1..30: note = Probe
  source 1..30: mol_type = other DNA

SEQ ID NO: 38632 - DNA, 31 bp, synthetic construct; identical to SEQ ID NO: 3819
  misc_feature 1..31: note = Probe
  source 1..31: mol_type = other DNA

SEQ ID NO: 38633 - DNA, 32 bp, synthetic construct; identical to SEQ ID NO: 3820
  misc_feature 1..32: note = Probe
  source 1..32: mol_type = other DNA

SEQ ID NO: 38634 - DNA, 33 bp, synthetic construct; identical to SEQ ID NO: 3821
  misc_feature 1..33: note = Probe
  source 1..33: mol_type = other DNA

SEQ ID NO: 38635 - DNA, 34 bp, synthetic construct; identical to SEQ ID NO: 3822
  misc_feature 1..34: note = Probe
  source 1..34: mol_type = other DNA

SEQ ID NO: 38636 - DNA, 35 bp, synthetic construct; identical to SEQ ID NO: 3823
  misc_feature 1..35: note = Probe
  source 1..35: mol_type = other DNA

SEQ ID NO: 38637 - DNA, 30 bp, synthetic construct; identical to SEQ ID NO: 3825
  misc_feature 1..30: note = Probe
  source 1..30: mol_type = other DNA

SEQ ID NO: 38638 - DNA, 34 bp, synthetic construct; identical to SEQ ID NO: 17434
  misc_feature 1..34: note = Probe
  source 1..34: mol_type = other DNA

SEQ ID NO: 38639 - DNA, 27 bp, synthetic construct
  misc_feature 1..27: note = Probe
  source 1..27: mol_type = other DNA
atggcacatgcagcgcaagtaggtcta

SEQ ID NO: 38640 - DNA, 29 bp, synthetic construct
  misc_feature 1..29: note = Probe
  source 1..29: mol_type = other DNA
atggcacatgcagcgcaagtaggtctaca

SEQ ID NO: 38641 - DNA, 30 bp, synthetic construct; identical to SEQ ID NO: 3841
  misc_feature 1..30: note = Probe
  source 1..30: mol_type = other DNA

SEQ ID NO: 38642 - DNA, 43 bp, synthetic construct; identical to SEQ ID NO: 28839
  misc_feature 1..43: note = Probe
  source 1..43: mol_type = other DNA

SEQ ID NO: 38643 - DNA, 50 bp, synthetic construct; identical to SEQ ID NO: 28840
  misc_feature 1..50: note = Probe
  source 1..50: mol_type = other DNA

SEQ ID NO: 38644 - DNA, 21 bp, synthetic construct
  misc_feature 1..21: note = Probe
  source 1..21: mol_type = other DNA
atggtctagcggttaggattc

SEQ ID NO: 38645 - DNA, 20 bp, synthetic construct
  misc_feature 1..20: note = Probe
  source 1..20: mol_type = other DNA
atggttagcactctggactc

SEQ ID NO: 38646 - DNA, 34 bp, synthetic construct
  misc_feature 1..34: note = Probe
  source 1..34: mol_type = other DNA
atggttagcactctggactctgaatccagcgatc

SEQ ID NO: 38647 - DNA, 36 bp, synthetic construct; identical to SEQ ID NO: 17470
  misc_feature 1..36: note = Probe
  source 1..36: mol_type = other DNA

SEQ ID NO: 38648 - DNA, 50 bp, synthetic construct
  misc_feature 1..50: note = Probe
  source 1..50: mol_type = other DNA
atggttagcactctggactctgaatccagcgatccgagttcaagtctcgg

SEQ ID NO: 38649 - DNA, 36 bp, synthetic construct; identical to SEQ ID NO: 28906
  misc_feature 1..36: note = Probe
  source 1..36: mol_type = other DNA

SEQ ID NO: 38650 - DNA, 18 bp, synthetic construct
  misc_feature 1..18: note = Probe
  source 1..18: mol_type = other DNA
atgtatatatcctcttcc

SEQ ID NO: 38651 - DNA, 30 bp, synthetic construct; identical to SEQ ID NO: 9409
  misc_feature 1..30: note = Probe
  source 1..30: mol_type = other DNA

SEQ ID NO: 38652 - DNA, 18 bp, synthetic construct
  misc_feature 1..18: note = Probe
  source 1..18: mol_type = other DNA
atgtggtggcttactttt

SEQ ID NO: 38653 - DNA, 35 bp, synthetic construct; identical to SEQ ID NO: 3866
  misc_feature 1..35: note = Probe
  source 1..35: mol_type = other DNA

SEQ ID NO: 38654 - DNA, 36 bp, synthetic construct; identical to SEQ ID NO: 3867
  misc_feature 1..36: note = Probe
  source 1..36: mol_type = other DNA

SEQ ID NO: 38655 - DNA, 37 bp, synthetic construct; identical to SEQ ID NO: 3868
  misc_feature 1..37: note = Probe
  source 1..37: mol_type = other DNA

SEQ ID NO: 38656 - DNA, 38 bp, synthetic construct; identical to SEQ ID NO: 3869
  misc_feature 1..38: note = Probe
  source 1..38: mol_type = other DNA

SEQ ID NO: 38657 - DNA, 33 bp, synthetic construct; identical to SEQ ID NO: 3873
  misc_feature 1..33: note = Probe
  source 1..33: mol_type = other DNA

SEQ ID NO: 38658 - DNA, 27 bp, synthetic construct
  misc_feature 1..27: note = Probe
  source 1..27: mol_type = other DNA
attaaggctccagtctcttcgggggcg

SEQ ID NO: 38659 - DNA, 29 bp, synthetic construct
  misc_feature 1..29: note = Probe
  source 1..29: mol_type = other DNA
attaaggctccagtctcttcgggggcgtg

SEQ ID NO: 38660 - DNA, 30 bp, synthetic construct; identical to SEQ ID NO: 3877
  misc_feature 1..30: note = Probe
  source 1..30: mol_type = other DNA

SEQ ID NO: 38661 - DNA, 50 bp, synthetic construct; identical to SEQ ID NO: 420
  misc_feature 1..50: note = Probe
  source 1..50: mol_type = other DNA

SEQ ID NO: 38662 - DNA, 50 bp, synthetic construct; identical to SEQ ID NO: 421
  misc_feature 1..50: note = Probe
  source 1..50: mol_type = other DNA

SEQ ID NO: 38663 - DNA, 36 bp, synthetic construct; identical to SEQ ID NO: 17518
  misc_feature 1..36: note = Probe
  source 1..36: mol_type = other DNA

SEQ ID NO: 38664 - DNA, 45 bp, synthetic construct; identical to SEQ ID NO: 28985
  misc_feature 1..45: note = Probe
  source 1..45: mol_type = other DNA

SEQ ID NO: 38665 - DNA, 46 bp, synthetic construct; identical to SEQ ID NO: 28986
  misc_feature 1..46: note = Probe
  source 1..46: mol_type = other DNA

SEQ ID NO: 38666 - DNA, 22 bp, synthetic construct
  misc_feature 1..22: note = Probe
  source 1..22: mol_type = other DNA
attcccattcttgcgacccggg

SEQ ID NO: 38667 - DNA, 32 bp, synthetic construct
  misc_feature 1..32: note = Probe
  source 1..32: mol_type = other DNA
attcccattcttgcgacccgggttcgattccc

SEQ ID NO: 38668 - DNA, 37 bp, synthetic construct
  misc_feature 1..37: note = Probe
  source 1..37: mol_type = other DNA
attcccattcttgcgacccgggttcgattcccgggcg

SEQ ID NO: 38669 - DNA, 38 bp, synthetic construct
  misc_feature 1..38: note = Probe
  source 1..38: mol_type = other DNA
attcccattcttgcgacccgggttcgattcccgggcgg

SEQ ID NO: 38670 - DNA, 42 bp, synthetic construct
  misc_feature 1..42: note = Probe
  source 1..42: mol_type = other DNA
attcccattcttgcgacccgggttcgattcccgggcggcgca

SEQ ID NO: 38671 - DNA, 45 bp, synthetic construct; identical to SEQ ID NO: 17522
  misc_feature 1..45: note = Probe
  source 1..45: mol_type = other DNA

SEQ ID NO: 38672 - DNA, 49 bp, synthetic construct
  misc_feature 1..49: note = Probe
  source 1..49: mol_type = other DNA
attcccattcttgcgacccgggttcgattcccgggcggcgcacttagtt

SEQ ID NO: 38673 - DNA, 50 bp, synthetic construct
  misc_feature 1..50: note = Probe
  source 1..50: mol_type = other DNA
attcccattcttgcgacccgggttcgattcccgggcggcgcacttagttt

SEQ ID NO: 38674 - DNA, 45 bp, synthetic construct
  misc_feature 1..45: note = Probe
  source 1..45: mol_type = other DNA
attcccattcttgcgacccgggttcgattcccgggcggcgcatag

SEQ ID NO: 38675 - DNA, 46 bp, synthetic construct
  misc_feature 1..46: note = Probe
  source 1..46: mol_type = other DNA
attcccattcttgcgacccgggttcgattcccgggcggcgcatagg

SEQ ID NO: 38676 - DNA, 50 bp, synthetic construct
  misc_feature 1..50: note = Probe
  source 1..50: mol_type = other DNA
attcccattcttgcgacccgggttcgattcccgggcggcgcataggcgtt

SEQ ID NO: 38677 - DNA, 22 bp, synthetic construct
  misc_feature 1..22: note = Probe
  source 1..22: mol_type = other DNA
attccggatcagaagattgagg

SEQ ID NO: 38678 - DNA, 50 bp, synthetic construct
  misc_feature 1..50: note = Probe
  source 1..50: mol_type = other DNA
attccggatcagaagattgagggttcgagtcccttcgtggtcgtcgtttt

SEQ ID NO: 38679 - DNA, 46 bp, synthetic construct
  misc_feature 1..46: note = Probe
  source 1..46: mol_type = other DNA
attccggatcagaagattgagggttcgagtcccttcgtggtcgttg

SEQ ID NO: 38680 - DNA, 50 bp, synthetic construct
  misc_feature 1..50: note = Probe
  source 1..50: mol_type = other DNA
attccggatcagaagattgagggttcgagtcccttcgtggtcgttgccat

SEQ ID NO: 38681 - DNA, 31 bp, synthetic construct
  misc_feature 1..31: note = Probe
  source 1..31: mol_type = other DNA
attccggctcgaaggaagtgcccgatgcttt

SEQ ID NO: 38682 - DNA, 39 bp, synthetic construct
  misc_feature 1..39: note = Probe
  source 1..39: mol_type = other DNA
attcctggttttcacccaggcggcccgggttcgactccc

SEQ ID NO: 38683 - DNA, 44 bp, synthetic construct
  misc_feature 1..44: note = Probe
  source 1..44: mol_type = other DNA
attcctggttttcacccaggcggcccgggttcgactcccggtgt

SEQ ID NO: 38684 - DNA, 45 bp, synthetic construct
  misc_feature 1..45: note = Probe
  source 1..45: mol_type = other DNA
attcctggttttcacccaggcggcccgggttcgactcccggtgtg

SEQ ID NO: 38685 - DNA, 46 bp, synthetic construct
  misc_feature 1..46: note = Probe
  source 1..46: mol_type = other DNA
attcctggttttcacccaggcggcccgggttcgactcccggtgtgg

SEQ ID NO: 38686 - DNA, 50 bp, synthetic construct; identical to SEQ ID NO: 3883
  misc_feature 1..50: note = Probe
  source 1..50: mol_type = other DNA

SEQ ID NO: 38687 - DNA, 50 bp, synthetic construct
  misc_feature 1..50: note = Probe
  source 1..50: mol_type = other DNA
attcctggttttcacccaggtggcccgggttcgactcccggtatgggaac

SEQ ID NO: 38688 - DNA, 37 bp, synthetic construct; identical to SEQ ID NO: 3888
  misc_feature 1..37: note = Probe
  source 1..37: mol_type = other DNA

SEQ ID NO: 38689 - DNA, 50 bp, synthetic construct; identical to SEQ ID NO: 29019
  misc_feature 1..50: note = Probe
  source 1..50: mol_type = other DNA

SEQ ID NO: 38690 - DNA, 50 bp, synthetic construct; identical to SEQ ID NO: 29020
  misc_feature 1..50: note = Probe
  source 1..50: mol_type = other DNA

SEQ ID NO: 38691 - DNA, 50 bp, synthetic construct; identical to SEQ ID NO: 29021
  misc_feature 1..50: note = Probe
  source 1..50: mol_type = other DNA

SEQ ID NO: 38692 - DNA, 31 bp, synthetic construct
  misc_feature 1..31: note = Probe
  source 1..31: mol_type = other DNA
attctcaaactttaaatgggcaagaagccca

SEQ ID NO: 38693 - DNA, 33 bp, synthetic construct
  misc_feature 1..33: note = Probe
  source 1..33: mol_type = other DNA
attctcaaactttaaatgggcaagaagcccagc

SEQ ID NO: 38694 - DNA, 38 bp, synthetic construct; identical to SEQ ID NO: 3893
  misc_feature 1..38: note = Probe
  source 1..38: mol_type = other DNA

SEQ ID NO: 38695 - DNA, 34 bp, synthetic construct; identical to SEQ ID NO: 17542
  misc_feature 1..34: note = Probe
  source 1..34: mol_type = other DNA

SEQ ID NO: 38696 - DNA, 38 bp, synthetic construct; identical to SEQ ID NO: 3895
  misc_feature 1..38: note = Probe
  source 1..38: mol_type = other DNA

SEQ ID NO: 38697 - DNA, 39 bp, synthetic construct; identical to SEQ ID NO: 3896
  misc_feature 1..39: note = Probe
  source 1..39: mol_type = other DNA

SEQ ID NO: 38698 - DNA, 50 bp, synthetic construct; identical to SEQ ID NO: 3900
  misc_feature 1..50: note = Probe
  source 1..50: mol_type = other DNA

SEQ ID NO: 38699 - DNA, 36 bp, synthetic construct
  misc_feature 1..36: note = Probe
  source 1..36: mol_type = other DNA
attgagggttcgagtcccttcgtggtcggaacgttt

SEQ ID NO: 38700 - DNA, 44 bp, synthetic construct; identical to SEQ ID NO: 3906
  misc_feature 1..44: note = Probe
  source 1..44: mol_type = other DNA

SEQ ID NO: 38701 - DNA, 50 bp, synthetic construct
  misc_feature 1..50: note = Probe
  source 1..50: mol_type = other DNA
attggactgtaaatctaaagacaggggttaggcctctttttaccagctcc

SEQ ID NO: 38702 - DNA, 25 bp, synthetic construct
  misc_feature 1..25: note = Probe
  source 1..25: mol_type = other DNA
attggtcgtggttgtagtccgtgcg

SEQ ID NO: 38703 - DNA, 28 bp, synthetic construct
  misc_feature 1..28: note = Probe
  source 1..28: mol_type = other DNA
attggtcgtggttgtagtccgtgcgaga

SEQ ID NO: 38704 - DNA, 34 bp, synthetic construct; identical to SEQ ID NO: 3911
  misc_feature 1..34: note = Probe
  source 1..34: mol_type = other DNA

SEQ ID NO: 38705 - DNA, 26 bp, synthetic construct
  misc_feature 1..26: note = Probe
  source 1..26: mol_type = other DNA
attggtggttcagtggtagaattctc

SEQ ID NO: 38706 - DNA, 27 bp, synthetic construct
  misc_feature 1..27: note = Probe
  source 1..27: mol_type = other DNA
attggtggttcagtggtagaattctcg

SEQ ID NO: 38707 - DNA, 28 bp, synthetic construct
  misc_feature 1..28: note = Probe
  source 1..28: mol_type = other DNA
attggtggttcagtggtagaattctcgc

SEQ ID NO: 38708 - DNA, 35 bp, synthetic construct; identical to SEQ ID NO: 3927
  misc_feature 1..35: note = Probe
  source 1..35: mol_type = other DNA

SEQ ID NO: 38709 - DNA, 38 bp, synthetic construct
  misc_feature 1..38: note = Probe
  source 1..38: mol_type = other DNA
attgtgaatctgacaacagaggcttacgaccccttatt

SEQ ID NO: 38710 - DNA, 45 bp, synthetic construct; identical to SEQ ID NO: 3932
  misc_feature 1..45: note = Probe
  source 1..45: mol_type = other DNA

SEQ ID NO: 38711 - DNA, 50 bp, synthetic construct
  misc_feature 1..50: note = Probe
  source 1..50: mol_type = other DNA
atttaggctccagtctcttcggaggcgtgggttcgaatcccaccgctgcc

SEQ ID NO: 38712 - DNA, 27 bp, synthetic construct
  misc_feature 1..27: note = Probe
  source 1..27: mol_type = other DNA
atttaggctccagtctcttcgggggcg

SEQ ID NO: 38713 - DNA, 29 bp, synthetic construct
  misc_feature 1..29: note = Probe
  source 1..29: mol_type = other DNA
atttcaacttaacttgaccgctctgagct

SEQ ID NO: 38714 - DNA, 29 bp, synthetic construct
  misc_feature 1..29: note = Probe
  source 1..29: mol_type = other DNA
caaaacatcagattgtgaatctgacaaca

SEQ ID NO: 38715 - DNA, 45 bp, synthetic construct; identical to SEQ ID NO: 435
  misc_feature 1..45: note = Probe
  source 1..45: mol_type = other DNA

SEQ ID NO: 38716 - DNA, 50 bp, synthetic construct; identical to SEQ ID NO: 3958
  misc_feature 1..50: note = Probe
  source 1..50: mol_type = other DNA

SEQ ID NO: 38717 - DNA, 24 bp, synthetic construct
  misc_feature 1..24: note = Probe
  source 1..24: mol_type = other DNA
caaactttaaatgggcaagaagcc

SEQ ID NO: 38718 - DNA, 25 bp, synthetic construct
  misc_feature 1..25: note = Probe
  source 1..25: mol_type = other DNA
caaactttaaatgggcaagaagccc

SEQ ID NO: 38719 - DNA, 26 bp, synthetic construct
  misc_feature 1..26: note = Probe
  source 1..26: mol_type = other DNA
caaactttaaatgggcaagaagccca

SEQ ID NO: 38720 - DNA, 27 bp, synthetic construct
  misc_feature 1..27: note = Probe
  source 1..27: mol_type = other DNA
caaactttaaatgggcaagaagcccag

SEQ ID NO: 38721 - DNA, 28 bp, synthetic construct
  misc_feature 1..28: note = Probe
  source 1..28: mol_type = other DNA
caaactttaaatgggcaagaagcccagc

SEQ ID NO: 38722 - DNA, 29 bp, synthetic construct
  misc_feature 1..29: note = Probe
  source 1..29: mol_type = other DNA
caaactttaaatgggcaagaagcccagct

SEQ ID NO: 38723 - DNA, 30 bp, synthetic construct; identical to SEQ ID NO: 17613
  misc_feature 1..30: note = Probe
  source 1..30: mol_type = other DNA

SEQ ID NO: 38724 - DNA, 31 bp, synthetic construct; identical to SEQ ID NO: 3960
  misc_feature 1..31: note = Probe
  source 1..31: mol_type = other DNA

SEQ ID NO: 38725 - DNA, 32 bp, synthetic construct; identical to SEQ ID NO: 17615
  misc_feature 1..32: note = Probe
  source 1..32: mol_type = other DNA

SEQ ID NO: 38726 - DNA, 33 bp, synthetic construct; identical to SEQ ID NO: 3961
  misc_feature 1..33: note = Probe
  source 1..33: mol_type = other DNA

SEQ ID NO: 38727 - DNA, 50 bp, synthetic construct; identical to SEQ ID NO: 3965
  misc_feature 1..50: note = Probe
  source 1..50: mol_type = other DNA

SEQ ID NO: 38728 - DNA, 23 bp, synthetic construct
  misc_feature 1..23: note = Probe
  source 1..23: mol_type = other DNA
caaatcagccgacgtttgctttt

SEQ ID NO: 38729 - DNA, 32 bp, synthetic construct; identical to SEQ ID NO: 4003
  misc_feature 1..32: note = Probe
  source 1..32: mol_type = other DNA

SEQ ID NO: 38730 - DNA, 27 bp, synthetic construct
  misc_feature 1..27: note = Probe
  source 1..27: mol_type = other DNA
caaccgagcgtccaagctctttccatt

SEQ ID NO: 38731 - DNA, 28 bp, synthetic construct
  misc_feature 1..28: note = Probe
  source 1..28: mol_type = other DNA
caaccgagcgtccaagctctttccattt

SEQ ID NO: 38732 - DNA, 29 bp, synthetic construct
  misc_feature 1..29: note = Probe
  source 1..29: mol_type = other DNA
caaccgagcgtccaagctctttccatttt

SEQ ID NO: 38733 - DNA, 30 bp, synthetic construct; identical to SEQ ID NO: 17662
  misc_feature 1..30: note = Probe
  source 1..30: mol_type = other DNA

SEQ ID NO: 38734 - DNA, 26 bp, synthetic construct
  misc_feature 1..26: note = Probe
  source 1..26: mol_type = other DNA
caacctcggttcgaatccgagtcacg

SEQ ID NO: 38735 - DNA, 32 bp, synthetic construct; identical to SEQ ID NO: 4008
  misc_feature 1..32: note = Probe
  source 1..32: mol_type = other DNA

SEQ ID NO: 38736 - DNA, 32 bp, synthetic construct; identical to SEQ ID NO: 4010
  misc_feature 1..32: note = Probe
  source 1..32: mol_type = other DNA

SEQ ID NO: 38737 - DNA, 34 bp, synthetic construct
  misc_feature 1..34: note = Probe
  source 1..34: mol_type = other DNA
caacgatggtttttcatatcattggtcgtggttg

SEQ ID NO: 38738 - DNA, 20 bp, synthetic construct
  misc_feature 1..20: note = Probe
  source 1..20: mol_type = other DNA
caactatcttattctccttt

SEQ ID NO: 38739 - DNA, 21 bp, synthetic construct
  misc_feature 1..21: note = Probe
  source 1..21: mol_type = other DNA
caacttaacttgaccgctctg

SEQ ID NO: 38740 - DNA, 25 bp, synthetic construct
  misc_feature 1..25: note = Probe
  source 1..25: mol_type = other DNA
caacttaacttgaccgctctgagct

SEQ ID NO: 38741 - DNA, 45 bp, synthetic construct; identical to SEQ ID NO: 4031
  misc_feature 1..45: note = Probe
  source 1..45: mol_type = other DNA

SEQ ID NO: 38742 - DNA, 46 bp, synthetic construct; identical to SEQ ID NO: 4032
  misc_feature 1..46: note = Probe
  source 1..46: mol_type = other DNA

SEQ ID NO: 38743 - DNA, 50 bp, synthetic construct; identical to SEQ ID NO: 4034
  misc_feature 1..50: note = Probe
  source 1..50: mol_type = other DNA

SEQ ID NO: 38744 - DNA, 19 bp, synthetic construct
  misc_feature 1..19: note = Probe
  source 1..19: mol_type = other DNA
caagaactgctaactcatg

SEQ ID NO: 38745 - DNA, 45 bp, synthetic construct; identical to SEQ ID NO: 451
  misc_feature 1..45: note = Probe
  source 1..45: mol_type = other DNA

SEQ ID NO: 38746 - DNA, 49 bp, synthetic construct; identical to SEQ ID NO: 4043
  misc_feature 1..49: note = Probe
  source 1..49: mol_type = other DNA

SEQ ID NO: 38747 - DNA, 50 bp, synthetic construct; identical to SEQ ID NO: 4044
  misc_feature 1..50: note = Probe
  source 1..50: mol_type = other DNA

SEQ ID NO: 38748 - DNA, 31 bp, synthetic construct
  misc_feature 1..31: note = Probe
  source 1..31: mol_type = other DNA
caagacccttttggatgttcgcaaccccttt

SEQ ID NO: 38749 - DNA, 44 bp, synthetic construct
  misc_feature 1..44: note = Probe
  source 1..44: mol_type = other DNA
caagcagttaacgcgggttcgattcccgggtaacgaaacgtttt

SEQ ID NO: 38750 - DNA, 31 bp, synthetic construct; identical to SEQ ID NO: 457
  misc_feature 1..31: note = Probe
  source 1..31: mol_type = other DNA

SEQ ID NO: 38751 - DNA, 32 bp, synthetic construct
  misc_feature 1..32: note = Probe
  source 1..32: mol_type = other DNA
caagcagttgacccgggttcgattcccggcca

SEQ ID NO: 38752 - DNA, 34 bp, synthetic construct
  misc_feature 1..34: note = Probe
  source 1..34: mol_type = other DNA
caagcagttgacccgggttcgattcccggccaac

SEQ ID NO: 38753 - DNA, 35 bp, synthetic construct
  misc_feature 1..35: note = Probe
  source 1..35: mol_type = other DNA
caagcagttgacccgggttcgattcccggccaacg

SEQ ID NO: 38754 - DNA, 32 bp, synthetic construct
  misc_feature 1..32: note = Probe
  source 1..32: mol_type = other DNA
caagtgatggtttccctctggcagttctcaag

SEQ ID NO: 38755 - DNA, 25 bp, synthetic construct
  misc_feature 1..25: note = Probe
  source 1..25: mol_type = other DNA
caagtggttacccttcttacgtctt

SEQ ID NO: 38756 - DNA, 32 bp, synthetic construct
  misc_feature 1..32: note = Probe
  source 1..32: mol_type = other DNA
caagttgttttatcctatctgcccaatactat

SEQ ID NO: 38757 - DNA, 50 bp, synthetic construct; identical to SEQ ID NO: 4055
  misc_feature 1..50: note = Probe
  source 1..50: mol_type = other DNA

SEQ ID NO: 38758 - DNA, 23 bp, synthetic construct
  misc_feature 1..23: note = Probe
  source 1..23: mol_type = other DNA
caatccccaatacctccaggttt

SEQ ID NO: 38759 - DNA, 32 bp, synthetic construct; identical to SEQ ID NO: 17735
  misc_feature 1..32: note = Probe
  source 1..32: mol_type = other DNA

SEQ ID NO: 38760 - DNA, 33 bp, synthetic construct; identical to SEQ ID NO: 17736
  misc_feature 1..33: note = Probe
  source 1..33: mol_type = other DNA

SEQ ID NO: 38761 - DNA, 50 bp, synthetic construct
  misc_feature 1..50: note = Probe
  source 1..50: mol_type = other DNA
caatgccgaggttgtgagttcgagcctcacctggagcaagacccttttgg

SEQ ID NO: 38762 - DNA, 29 bp, synthetic construct
  misc_feature 1..29: note = Probe
  source 1..29: mol_type = other DNA
caatggaggcgtgggttcgaatcccactt

SEQ ID NO: 38763 - DNA, 32 bp, synthetic construct
  misc_feature 1..32: note = Probe
  source 1..32: mol_type = other DNA
caatggaggcgtgggttcgaatcccacttctg

SEQ ID NO: 38764 - DNA, 33 bp, synthetic construct
  misc_feature 1..33: note = Probe
  source 1..33: mol_type = other DNA
caatggaggcgtgggttcgaatcccacttctga

SEQ ID NO: 38765 - DNA, 34 bp, synthetic construct
  misc_feature 1..34: note = Probe
  source 1..34: mol_type = other DNA
caatggaggcgtgggttcgaatcccacttctgac

SEQ ID NO: 38766 - DNA, 35 bp, synthetic construct
  misc_feature 1..35: note = Probe
  source 1..35: mol_type = other DNA
caatggaggcgtgggttcgaatcccacttctgaca

SEQ ID NO: 38767 - DNA, 18 bp, synthetic construct
  misc_feature 1..18: note = Probe
  source 1..18: mol_type = other DNA
caatggataacgcgtctg

SEQ ID NO: 38768 - DNA, 27 bp, synthetic construct
  misc_feature 1..27: note = Probe
  source 1..27: mol_type = other DNA
caatggataacgcgtctgactacggat

SEQ ID NO: 38769 - DNA, 18 bp, synthetic construct
  misc_feature 1..18: note = Probe
  source 1..18: mol_type = other DNA
caatggatagcgcattgg

SEQ ID NO: 38770 - DNA, 21 bp, synthetic construct
  misc_feature 1..21: note = Probe
  source 1..21: mol_type = other DNA
caatggcacggcaaggggctc

SEQ ID NO: 38771 - DNA, 18 bp, synthetic construct
  misc_feature 1..18: note = Probe
  source 1..18: mol_type = other DNA
caatggggtctccccgcg

SEQ ID NO: 38772 - DNA, 22 bp, synthetic construct
  misc_feature 1..22: note = Probe
  source 1..22: mol_type = other DNA
caatggggtctccccgcgcagg

SEQ ID NO: 38773 - DNA, 23 bp, synthetic construct
  misc_feature 1..23: note = Probe
  source 1..23: mol_type = other DNA
caatggggtctccccgcgcaggt

SEQ ID NO: 38774 - DNA, 23 bp, synthetic construct
  misc_feature 1..23: note = Probe
  source 1..23: mol_type = other DNA
caatggggtttccccgcacaggt

SEQ ID NO: 38775 - DNA, 32 bp, synthetic construct
  misc_feature 1..32: note = Probe
  source 1..32: mol_type = other DNA
caatgtcgttagtctaggctgtcagctcttcc

SEQ ID NO: 38776 - DNA, 39 bp, synthetic construct; identical to SEQ ID NO: 4061
  misc_feature 1..39: note = Probe
  source 1..39: mol_type = other DNA

SEQ ID NO: 38777 - DNA, 21 bp, synthetic construct
  misc_feature 1..21: note = Probe
  source 1..21: mol_type = other DNA
caattcccggtcagggaacca

SEQ ID NO: 38778 - DNA, 34 bp, synthetic construct; identical to SEQ ID NO: 4076
  misc_feature 1..34: note = Probe
  source 1..34: mol_type = other DNA

SEQ ID NO: 38779 - DNA, 24 bp, synthetic construct
  misc_feature 1..24: note = Probe
  source 1..24: mol_type = other DNA
cacacctcagaaggtctcactttt

SEQ ID NO: 38780 - DNA, 18 bp, synthetic construct
  misc_feature 1..18: note = Probe
  source 1..18: mol_type = other DNA
cacacgcgaaaggtcccc

SEQ ID NO: 38781 - DNA, 20 bp, synthetic construct
  misc_feature 1..20: note = Probe
  source 1..20: mol_type = other DNA
cacacggggcacaataattt

SEQ ID NO: 38782 - DNA, 17 bp, synthetic construct
  misc_feature 1..17: note = Probe
  source 1..17: mol_type = other DNA
cacatcaccccataaac

SEQ ID NO: 38783 - DNA, 18 bp, synthetic construct
  misc_feature 1..18: note = Probe
  source 1..18: mol_type = other DNA
cacatcaccccataaaca

SEQ ID NO: 38784 - DNA, 21 bp, synthetic construct
  misc_feature 1..21: note = Probe
  source 1..21: mol_type = other DNA
cacatcaccccataaacaaat

SEQ ID NO: 38785 - DNA, 39 bp, synthetic construct
  misc_feature 1..39: note = Probe
  source 1..39: mol_type = other DNA
cacatctggggcattggtggttcagtggtagaattctcg

SEQ ID NO: 38786 - DNA, 26 bp, synthetic construct
  misc_feature 1..26: note = Probe
  source 1..26: mol_type = other DNA
cacatggtctagcggttaggattcct

SEQ ID NO: 38787 - DNA, 49 bp, synthetic construct; identical to SEQ ID NO: 4113
  misc_feature 1..49: note = Probe
  source 1..49: mol_type = other DNA

SEQ ID NO: 38788 - DNA, 50 bp, synthetic construct; identical to SEQ ID NO: 4114
  misc_feature 1..50: note = Probe
  source 1..50: mol_type = other DNA

SEQ ID NO: 38789 - DNA, 34 bp, synthetic construct
  misc_feature 1..34: note = Probe
  source 1..34: mol_type = other DNA
cacccaggcggcccgggttcgactcccggtgtgg

SEQ ID NO: 38790 - DNA, 22 bp, synthetic construct
  misc_feature 1..22: note = Probe
  source 1..22: mol_type = other DNA
cacctcagaaggtctcactttt

SEQ ID NO: 38791 - DNA, 19 bp, synthetic construct
  misc_feature 1..19: note = Probe
  source 1..19: mol_type = other DNA
cacgcagaaggtcctgggt

SEQ ID NO: 38792 - DNA, 41 bp, synthetic construct; identical to SEQ ID NO: 4122
  misc_feature 1..41: note = Probe
  source 1..41: mol_type = other DNA

SEQ ID NO: 38793 - DNA, 20 bp, synthetic construct
  misc_feature 1..20: note = Probe
  source 1..20: mol_type = other DNA
cacgcgaaaggtccccggtt

SEQ ID NO: 38794 - DNA, 35 bp, synthetic construct
  misc_feature 1..35: note = Probe
  source 1..35: mol_type = other DNA
cacgcgaaaggtccccggttcgaaaccgggcggaa

SEQ ID NO: 38795 - DNA, 17 bp, synthetic construct
  misc_feature 1..17: note = Probe
  source 1..17: mol_type = other DNA
cacgcgggagacccggg

SEQ ID NO: 38796 - DNA, 35 bp, synthetic construct
  misc_feature 1..35: note = Probe
  source 1..35: mol_type = other DNA
cacgcgggagacccgggttcaattcccggccaatg

SEQ ID NO: 38797 - DNA, 36 bp, synthetic construct; identical to SEQ ID NO: 29343
  misc_feature 1..36: note = Probe
  source 1..36: mol_type = other DNA

SEQ ID NO: 38798 - DNA, 18 bp, synthetic construct
  misc_feature 1..18: note = Probe
  source 1..18: mol_type = other DNA
cacgcgggagaccggggt

SEQ ID NO: 38799 - DNA, 36 bp, synthetic construct; identical to SEQ ID NO: 477
  misc_feature 1..36: note = Probe
  source 1..36: mol_type = other DNA

SEQ ID NO: 38800 - DNA, 30 bp, synthetic construct
  misc_feature 1..30: note = Probe
  source 1..30: mol_type = other DNA
cacgcgggagaccggggttcgattccccaa

SEQ ID NO: 38801 - DNA, 34 bp, synthetic construct
  misc_feature 1..34: note = Probe
  source 1..34: mol_type = other DNA
cacgcgggagaccggggttcgattccccaacggg

SEQ ID NO: 38802 - DNA, 35 bp, synthetic construct
  misc_feature 1..35: note = Probe
  source 1..35: mol_type = other DNA
cacgcgggagaccggggttcgattccccaacgggg

SEQ ID NO: 38803 - DNA, 37 bp, synthetic construct
  misc_feature 1..37: note = Probe
  source 1..37: mol_type = other DNA
cacgcgggagaccggggttcgattccccaacggggag

SEQ ID NO: 38804 - DNA, 32 bp, synthetic construct; identical to SEQ ID NO: 481
  misc_feature 1..32: note = Probe
  source 1..32: mol_type = other DNA

SEQ ID NO: 38805 - DNA, 33 bp, synthetic construct; identical to SEQ ID NO: 482
  misc_feature 1..33: note = Probe
  source 1..33: mol_type = other DNA

SEQ ID NO: 38806 - DNA, 38 bp, synthetic construct; identical to SEQ ID NO: 4137
  misc_feature 1..38: note = Probe
  source 1..38: mol_type = other DNA

SEQ ID NO: 38807 - DNA, 46 bp, synthetic construct; identical to SEQ ID NO: 4141
  misc_feature 1..46: note = Probe
  source 1..46: mol_type = other DNA

SEQ ID NO: 38808 - DNA, 50 bp, synthetic construct; identical to SEQ ID NO: 4143
  misc_feature 1..50: note = Probe
  source 1..50: mol_type = other DNA

SEQ ID NO: 38809 - DNA, 38 bp, synthetic construct; identical to SEQ ID NO: 4149
  misc_feature 1..38: note = Probe
  source 1..38: mol_type = other DNA

SEQ ID NO: 38810 - DNA, 50 bp, synthetic construct; identical to SEQ ID NO: 4162
  misc_feature 1..50: note = Probe
  source 1..50: mol_type = other DNA

SEQ ID NO: 38811 - DNA, 45 bp, synthetic construct
  misc_feature 1..45: note = Probe
  source 1..45: mol_type = other DNA
cacgcgggagaccggggttcgattccccgacggggaggccgggta

SEQ ID NO: 38812 - DNA, 50 bp, synthetic construct; identical to SEQ ID NO: 4170
  misc_feature 1..50: note = Probe
  source 1..50: mol_type = other DNA

SEQ ID NO: 38813 - DNA, 32 bp, synthetic construct
  misc_feature 1..32: note = Probe
  source 1..32: mol_type = other DNA
cacgcgggaggcccgggttcgattcccggcca

SEQ ID NO: 38814 - DNA, 34 bp, synthetic construct
  misc_feature 1..34: note = Probe
  source 1..34: mol_type = other DNA
cacgcgggaggcccgggttcgattcccggccaat

SEQ ID NO: 38815 - DNA, 35 bp, synthetic construct
  misc_feature 1..35: note = Probe
  source 1..35: mol_type = other DNA
cacgcgggaggcccgggttcgattcccggccaatg

SEQ ID NO: 38816 - DNA, 36 bp, synthetic construct; identical to SEQ ID NO: 29355
  misc_feature 1..36: note = Probe
  source 1..36: mol_type = other DNA

SEQ ID NO: 38817 - DNA, 34 bp, synthetic construct
  misc_feature 1..34: note = Probe
  source 1..34: mol_type = other DNA
cacgcgggaggcccgggttcgattcccggcccat

SEQ ID NO: 38818 - DNA, 36 bp, synthetic construct; identical to SEQ ID NO: 29362
  misc_feature 1..36: note = Probe
  source 1..36: mol_type = other DNA

SEQ ID NO: 38819 - DNA, 21 bp, synthetic construct
  misc_feature 1..21: note = Probe
  source 1..21: mol_type = other DNA
cacggcgtgattcataccttt

SEQ ID NO: 38820 - DNA, 45 bp, synthetic construct
  misc_feature 1..45: note = Probe
  source 1..45: mol_type = other DNA
cactgaaaatgtttagacgggctcacatcaccccataaacaaata

SEQ ID NO: 38821 - DNA, 30 bp, synthetic construct; identical to SEQ ID NO: 493
  misc_feature 1..30: note = Probe
  source 1..30: mol_type = other DNA

SEQ ID NO: 38822 - DNA, 32 bp, synthetic construct; identical to SEQ ID NO: 495
  misc_feature 1..32: note = Probe
  source 1..32: mol_type = other DNA

SEQ ID NO: 38823 - DNA, 50 bp, synthetic construct; identical to SEQ ID NO: 502
  misc_feature 1..50: note = Probe
  source 1..50: mol_type = other DNA

SEQ ID NO: 38824 - DNA, 38 bp, synthetic construct; identical to SEQ ID NO: 4203
  misc_feature 1..38: note = Probe
  source 1..38: mol_type = other DNA

SEQ ID NO: 38825 - DNA, 20 bp, synthetic construct
  misc_feature 1..20: note = Probe
  source 1..20: mol_type = other DNA
cagaagattctaggttcgac

SEQ ID NO: 38826 - DNA, 37 bp, synthetic construct; identical to SEQ ID NO: 4222
  misc_feature 1..37: note = Probe
  source 1..37: mol_type = other DNA

SEQ ID NO: 38827 - DNA, 30 bp, synthetic construct; identical to SEQ ID NO: 519
  misc_feature 1..30: note = Probe
  source 1..30: mol_type = other DNA

SEQ ID NO: 38828 - DNA, 31 bp, synthetic construct; identical to SEQ ID NO: 520
  misc_feature 1..31: note = Probe
  source 1..31: mol_type = other DNA

SEQ ID NO: 38829 - DNA, 34 bp, synthetic construct; identical to SEQ ID NO: 523
  misc_feature 1..34: note = Probe
  source 1..34: mol_type = other DNA

SEQ ID NO: 38830 - DNA, 35 bp, synthetic construct; identical to SEQ ID NO: 4232
  misc_feature 1..35: note = Probe
  source 1..35: mol_type = other DNA

SEQ ID NO: 38831 - DNA, 37 bp, synthetic construct; identical to SEQ ID NO: 4234
  misc_feature 1..37: note = Probe
  source 1..37: mol_type = other DNA

SEQ ID NO: 38832 - DNA, 50 bp, synthetic construct; identical to SEQ ID NO: 4242
  misc_feature 1..50: note = Probe
  source 1..50: mol_type = other DNA

SEQ ID NO: 38833 - DNA, 21 bp, synthetic construct
  misc_feature 1..21: note = Probe
  source 1..21: mol_type = other DNA
cagagggggcagctgccattt

SEQ ID NO: 38834 - DNA, 26 bp, synthetic construct
  misc_feature 1..26: note = Probe
  source 1..26: mol_type = other DNA
cagagtgtagcttaacacaaagcacc

SEQ ID NO: 38835 - DNA, 27 bp, synthetic construct
  misc_feature 1..27: note = Probe
  source 1..27: mol_type = other DNA
cagagtgtagcttaacacaaagcaccc

SEQ ID NO: 38836 - DNA, 28 bp, synthetic construct
  misc_feature 1..28: note = Probe
  source 1..28: mol_type = other DNA
cagagtgtagcttaacacaaagcaccca

SEQ ID NO: 38837 - DNA, 29 bp, synthetic construct
  misc_feature 1..29: note = Probe
  source 1..29: mol_type = other DNA
cagagtgtagcttaacacaaagcacccaa

SEQ ID NO: 38838 - DNA, 30 bp, synthetic construct; identical to SEQ ID NO: 4262
  misc_feature 1..30: note = Probe
  source 1..30: mol_type = other DNA

SEQ ID NO: 38839 - DNA, 31 bp, synthetic construct; identical to SEQ ID NO: 4263
  misc_feature 1..31: note = Probe
  source 1..31: mol_type = other DNA

SEQ ID NO: 38840 - DNA, 32 bp, synthetic construct; identical to SEQ ID NO: 4264
  misc_feature 1..32: note = Probe
  source 1..32: mol_type = other DNA

SEQ ID NO: 38841 - DNA, 33 bp, synthetic construct; identical to SEQ ID NO: 4265
  misc_feature 1..33: note = Probe
  source 1..33: mol_type = other DNA

SEQ ID NO: 38842 - DNA, 34 bp, synthetic construct; identical to SEQ ID NO: 4266
  misc_feature 1..34: note = Probe
  source 1..34: mol_type = other DNA

SEQ ID NO: 38843 - DNA, 35 bp, synthetic construct; identical to SEQ ID NO: 4267
  misc_feature 1..35: note = Probe
  source 1..35: mol_type = other DNA

SEQ ID NO: 38844 - DNA, 36 bp, synthetic construct; identical to SEQ ID NO: 4268
  misc_feature 1..36: note = Probe
  source 1..36: mol_type = other DNA

SEQ ID NO: 38845 - DNA, 37 bp, synthetic construct; identical to SEQ ID NO: 4269
  misc_feature 1..37: note = Probe
  source 1..37: mol_type = other DNA

SEQ ID NO: 38846 - DNA, 38 bp, synthetic construct; identical to SEQ ID NO: 4270
  misc_feature 1..38: note = Probe
  source 1..38: mol_type = other DNA

SEQ ID NO: 38847 - DNA, 41 bp, synthetic construct; identical to SEQ ID NO: 4273
  misc_feature 1..41: note = Probe
  source 1..41: mol_type = other DNA

SEQ ID NO: 38848 - DNA, 42 bp, synthetic construct; identical to SEQ ID NO: 4274
  misc_feature 1..42: note = Probe
  source 1..42: mol_type = other DNA

SEQ ID NO: 38849 - DNA, 43 bp, synthetic construct; identical to SEQ ID NO: 4275
  misc_feature 1..43: note = Probe
  source 1..43: mol_type = other DNA

SEQ ID NO: 38850 - DNA, 44 bp, synthetic construct; identical to SEQ ID NO: 4276
  misc_feature 1..44: note = Probe
  source 1..44: mol_type = other DNA

SEQ ID NO: 38851 - DNA, 45 bp, synthetic construct; identical to SEQ ID NO: 4277
  misc_feature 1..45: note = Probe
  source 1..45: mol_type = other DNA

SEQ ID NO: 38852 - DNA, 46 bp, synthetic construct; identical to SEQ ID NO: 4278
  misc_feature 1..46: note = Probe
  source 1..46: mol_type = other DNA

SEQ ID NO: 38853 - DNA, 50 bp, synthetic construct; identical to SEQ ID NO: 4281
  misc_feature 1..50: note = Probe
  source 1..50: mol_type = other DNA

SEQ ID NO: 38854 - DNA, 18 bp, synthetic construct
  misc_feature 1..18: note = Probe
  source 1..18: mol_type = other DNA
cagatcaagaggtccccg

SEQ ID NO: 38855 - DNA, 50 bp, synthetic construct; identical to SEQ ID NO: 4284
  misc_feature 1..50: note = Probe
  source 1..50: mol_type = other DNA

SEQ ID NO: 38856 - DNA, 29 bp, synthetic construct
  misc_feature 1..29: note = Probe
  source 1..29: mol_type = other DNA
cagcaacctcggttcgaatccgagtcacg

SEQ ID NO: 38857 - DNA, 30 bp, synthetic construct; identical to SEQ ID NO: 17915
  misc_feature 1..30: note = Probe
  source 1..30: mol_type = other DNA

SEQ ID NO: 38858 - DNA, 35 bp, synthetic construct; identical to SEQ ID NO: 4288
  misc_feature 1..35: note = Probe
  source 1..35: mol_type = other DNA

SEQ ID NO: 38859 - DNA, 35 bp, synthetic construct; identical to SEQ ID NO: 4290
  misc_feature 1..35: note = Probe
  source 1..35: mol_type = other DNA

SEQ ID NO: 38860 - DNA, 18 bp, synthetic construct
  misc_feature 1..18: note = Probe
  source 1..18: mol_type = other DNA
cagcacgccctcccattt

SEQ ID NO: 38861 - DNA, 28 bp, synthetic construct
  misc_feature 1..28: note = Probe
  source 1..28: mol_type = other DNA
cagcacttccacaagtacatttccttat

SEQ ID NO: 38862 - DNA, 35 bp, synthetic construct; identical to SEQ ID NO: 4293
  misc_feature 1..35: note = Probe
  source 1..35: mol_type = other DNA

SEQ ID NO: 38863 - DNA, 30 bp, synthetic construct
  misc_feature 1..30: note = Probe
  source 1..30: mol_type = other DNA
cagcgatccgagttcaagtctcggtggaac

SEQ ID NO: 38864 - DNA, 50 bp, synthetic construct; identical to SEQ ID NO: 532
  misc_feature 1..50: note = Probe
  source 1..50: mol_type = other DNA

SEQ ID NO: 38865 - DNA, 34 bp, synthetic construct; identical to SEQ ID NO: 4335
  misc_feature 1..34: note = Probe
  source 1..34: mol_type = other DNA

SEQ ID NO: 38866 - DNA, 35 bp, synthetic construct; identical to SEQ ID NO: 4336
  misc_feature 1..35: note = Probe
  source 1..35: mol_type = other DNA

SEQ ID NO: 38867 - DNA, 36 bp, synthetic construct; identical to SEQ ID NO: 4337
  misc_feature 1..36: note = Probe
  source 1..36: mol_type = other DNA

SEQ ID NO: 38868 - DNA, 31 bp, synthetic construct; identical to SEQ ID NO: 17966
  misc_feature 1..31: note = Probe
  source 1..31: mol_type = other DNA

SEQ ID NO: 38869 - DNA, 34 bp, synthetic construct
  misc_feature 1..34: note = Probe
  source 1..34: mol_type = other DNA
caggagatcctgggttcgactcccagcggggcct

SEQ ID NO: 38870 - DNA, 33 bp, synthetic construct; identical to SEQ ID NO: 4339
  misc_feature 1..33: note = Probe
  source 1..33: mol_type = other DNA

SEQ ID NO: 38871 - DNA, 39 bp, synthetic construct
  misc_feature 1..39: note = Probe
  source 1..39: mol_type = other DNA
cagggcctggatagctcagttggtagaacatcagacttt

SEQ ID NO: 38872 - DNA, 41 bp, synthetic construct
  misc_feature 1..41: note = Probe
  source 1..41: mol_type = other DNA
cagggcctggatagctcagttggtagaacatcagactttta

SEQ ID NO: 38873 - DNA, 30 bp, synthetic construct; identical to SEQ ID NO: 17999
  misc_feature 1..30: note = Probe
  source 1..30: mol_type = other DNA

SEQ ID NO: 38874 - DNA, 31 bp, synthetic construct; identical to SEQ ID NO: 18000
  misc_feature 1..31: note = Probe
  source 1..31: mol_type = other DNA

SEQ ID NO: 38875 - DNA, 32 bp, synthetic construct
  misc_feature 1..32: note = Probe
  source 1..32: mol_type = other DNA
caggtggcccgggttcgactcccggtatggga

SEQ ID NO: 38876 - DNA, 33 bp, synthetic construct; identical to SEQ ID NO: 18001
  misc_feature 1..33: note = Probe
  source 1..33: mol_type = other DNA

SEQ ID NO: 38877 - DNA, 27 bp, synthetic construct
  misc_feature 1..27: note = Probe
  source 1..27: mol_type = other DNA
cagtcagaggttcaattcctcttctta

SEQ ID NO: 38878 - DNA, 30 bp, synthetic construct; identical to SEQ ID NO: 4358
  misc_feature 1..30: note = Probe
  source 1..30: mol_type = other DNA

SEQ ID NO: 38879 - DNA, 33 bp, synthetic construct; identical to SEQ ID NO: 4360
  misc_feature 1..33: note = Probe
  source 1..33: mol_type = other DNA

SEQ ID NO: 38880 - DNA, 18 bp, synthetic construct
  misc_feature 1..18: note = Probe
  source 1..18: mol_type = other DNA
cagtcggtagagcatgag

SEQ ID NO: 38881 - DNA, 17 bp, synthetic construct
  misc_feature 1..17: note = Probe
  source 1..17: mol_type = other DNA
cagtcggtagagcatgg

SEQ ID NO: 38882 - DNA, 27 bp, synthetic construct
  misc_feature 1..27: note = Probe
  source 1..27: mol_type = other DNA
cagtctcataatctgaaggtcctgagt

SEQ ID NO: 38883 - DNA, 30 bp, synthetic construct
  misc_feature 1..30: note = Probe
  source 1..30: mol_type = other DNA
cagtggaaccacggcgtgattcataccttt

SEQ ID NO: 38884 - DNA, 18 bp, synthetic construct
  misc_feature 1..18: note = Probe
  source 1..18: mol_type = other DNA
cagtggtagaattctcgc

SEQ ID NO: 38885 - DNA, 20 bp, synthetic construct
  misc_feature 1..20: note = Probe
  source 1..20: mol_type = other DNA
cagtggtagaattctcgcct

SEQ ID NO: 38886 - DNA, 21 bp, synthetic construct
  misc_feature 1..21: note = Probe
  source 1..21: mol_type = other DNA
cagtggtagaattctcgcctc

SEQ ID NO: 38887 - DNA, 22 bp, synthetic construct
  misc_feature 1..22: note = Probe
  source 1..22: mol_type = other DNA
cagtggtagaattctcgcctcc

SEQ ID NO: 38888 - DNA, 21 bp, synthetic construct
  misc_feature 1..21: note = Probe
  source 1..21: mol_type = other DNA
cagtggtagaattctcgcctg

SEQ ID NO: 38889 - DNA, 22 bp, synthetic construct
  misc_feature 1..22: note = Probe
  source 1..22: mol_type = other DNA
cagtggtagaattctcgcctgc

SEQ ID NO: 38890 - DNA, 18 bp, synthetic construct
  misc_feature 1..18: note = Probe
  source 1..18: mol_type = other DNA
cagtggtagagcatttga

SEQ ID NO: 38891 - DNA, 23 bp, synthetic construct
  misc_feature 1..23: note = Probe
  source 1..23: mol_type = other DNA
cagttgacccgggttcgattccc

SEQ ID NO: 38892 - DNA, 27 bp, synthetic construct
  misc_feature 1..27: note = Probe
  source 1..27: mol_type = other DNA
cagttgacccgggttcgattcccggcc

SEQ ID NO: 38893 - DNA, 32 bp, synthetic construct
  misc_feature 1..32: note = Probe
  source 1..32: mol_type = other DNA
cagttgacccgggttcgattcccggccaacgc

SEQ ID NO: 38894 - DNA, 36 bp, synthetic construct; identical to SEQ ID NO: 4381
  misc_feature 1..36: note = Probe
  source 1..36: mol_type = other DNA

SEQ ID NO: 38895 - DNA, 50 bp, synthetic construct; identical to SEQ ID NO: 538
  misc_feature 1..50: note = Probe
  source 1..50: mol_type = other DNA

SEQ ID NO: 38896 - DNA, 17 bp, synthetic construct
  misc_feature 1..17: note = Probe
  source 1..17: mol_type = other DNA
cagttggtagagcatca

SEQ ID NO: 38897 - DNA, 18 bp, synthetic construct
  misc_feature 1..18: note = Probe
  source 1..18: mol_type = other DNA
cagttggtagagcatcag

SEQ ID NO: 38898 - DNA, 32 bp, synthetic construct
  misc_feature 1..32: note = Probe
  source 1..32: mol_type = other DNA
cagttttccttcctgtcccgtacggtttttct

SEQ ID NO: 38899 - DNA, 45 bp, synthetic construct; identical to SEQ ID NO: 4385
  misc_feature 1..45: note = Probe
  source 1..45: mol_type = other DNA

SEQ ID NO: 38900 - DNA, 46 bp, synthetic construct; identical to SEQ ID NO: 4386
  misc_feature 1..46: note = Probe
  source 1..46: mol_type = other DNA

SEQ ID NO: 38901 - DNA, 50 bp, synthetic construct; identical to SEQ ID NO: 4387
  misc_feature 1..50: note = Probe
  source 1..50: mol_type = other DNA

SEQ ID NO: 38902 - DNA, 17 bp, synthetic construct
  misc_feature 1..17: note = Probe
  source 1..17: mol_type = other DNA
cataacccagaggtcga

SEQ ID NO: 38903 - DNA, 18 bp, synthetic construct
  misc_feature 1..18: note = Probe
  source 1..18: mol_type = other DNA
cataatctgaaggtcctg

SEQ ID NO: 38904 - DNA, 19 bp, synthetic construct
  misc_feature 1..19: note = Probe
  source 1..19: mol_type = other DNA
cataatctgaaggtcctga

SEQ ID NO: 38905 - DNA, 20 bp, synthetic construct
  misc_feature 1..20: note = Probe
  source 1..20: mol_type = other DNA
cataatctgaaggtcctgag

SEQ ID NO: 38906 - DNA, 21 bp, synthetic construct
  misc_feature 1..21: note = Probe
  source 1..21: mol_type = other DNA
cataatctgaaggtcctgagt

SEQ ID NO: 38907 - DNA, 21 bp, synthetic construct
  misc_feature 1..21: note = Probe
  source 1..21: mol_type = other DNA
cataatctgaaggtcgtgagt

SEQ ID NO: 38908 - DNA, 24 bp, synthetic construct
  misc_feature 1..24: note = Probe
  source 1..24: mol_type = other DNA
catagctcaggggttagagcactg

SEQ ID NO: 38909 - DNA, 50 bp, synthetic construct
  misc_feature 1..50: note = Probe
  source 1..50: mol_type = other DNA
catagctgccttccaagcagttgacccgggttcgattcccggccaacgca

SEQ ID NO: 38910 - DNA, 29 bp, synthetic construct
  misc_feature 1..29: note = Probe
  source 1..29: mol_type = other DNA
catatcattggtcgtggttgtagtccgtg

SEQ ID NO: 38911 - DNA, 31 bp, synthetic construct; identical to SEQ ID NO: 540
  misc_feature 1..31: note = Probe
  source 1..31: mol_type = other DNA

SEQ ID NO: 38912 - DNA, 50 bp, synthetic construct; identical to SEQ ID NO: 4406
  misc_feature 1..50: note = Probe
  source 1..50: mol_type = other DNA

SEQ ID NO: 38913 - DNA, 37 bp, synthetic construct
  misc_feature 1..37: note = Probe
  source 1..37: mol_type = other DNA
catctggggcattggtggttcagtggtagaattctcg

SEQ ID NO: 38914 - DNA, 23 bp, synthetic construct
  misc_feature 1..23: note = Probe
  source 1..23: mol_type = other DNA
catctggggtggcctgtgacttt

SEQ ID NO: 38915 - DNA, 50 bp, synthetic construct
  misc_feature 1..50: note = Probe
  source 1..50: mol_type = other DNA
catgagactcttaatctcagggtcgtgggttcgagccccacgttgggcgt

SEQ ID NO: 38916 - DNA, 41 bp, synthetic construct
  misc_feature 1..41: note = Probe
  source 1..41: mol_type = other DNA
catgaggtcccgggttcgatccccagcatctccagtgtttt

SEQ ID NO: 38917 - DNA, 27 bp, synthetic construct
  misc_feature 1..27: note = Probe
  source 1..27: mol_type = other DNA
catgcccccatgtctaacaacatggct

SEQ ID NO: 38918 - DNA, 28 bp, synthetic construct
  misc_feature 1..28: note = Probe
  source 1..28: mol_type = other DNA
catgcccccatgtctaacaacatggctt

SEQ ID NO: 38919 - DNA, 29 bp, synthetic construct
  misc_feature 1..29: note = Probe
  source 1..29: mol_type = other DNA
catgcccccatgtctaacaacatggcttt

SEQ ID NO: 38920 - DNA, 30 bp, synthetic construct; identical to SEQ ID NO: 4433
  misc_feature 1..30: note = Probe
  source 1..30: mol_type = other DNA

SEQ ID NO: 38921 - DNA, 31 bp, synthetic construct; identical to SEQ ID NO: 4434
  misc_feature 1..31: note = Probe
  source 1..31: mol_type = other DNA

SEQ ID NO: 38922 - DNA, 32 bp, synthetic construct; identical to SEQ ID NO: 4435
  misc_feature 1..32: note = Probe
  source 1..32: mol_type = other DNA

SEQ ID NO: 38923 - DNA, 33 bp, synthetic construct; identical to SEQ ID NO: 4436
  misc_feature 1..33: note = Probe
  source 1..33: mol_type = other DNA

SEQ ID NO: 38924 - DNA, 34 bp, synthetic construct; identical to SEQ ID NO: 4437
  misc_feature 1..34: note = Probe
  source 1..34: mol_type = other DNA

SEQ ID NO: 38925 - DNA, 35 bp, synthetic construct; identical to SEQ ID NO: 4438
  misc_feature 1..35: note = Probe
  source 1..35: mol_type = other DNA

SEQ ID NO: 38926 - DNA, 36 bp, synthetic construct; identical to SEQ ID NO: 4439
  misc_feature 1..36: note = Probe
  source 1..36: mol_type = other DNA

SEQ ID NO: 38927 - DNA, 37 bp, synthetic construct; identical to SEQ ID NO: 18101
  misc_feature 1..37: note = Probe
  source 1..37: mol_type = other DNA

SEQ ID NO: 38928 - DNA, 39 bp, synthetic construct; identical to SEQ ID NO: 18103
  misc_feature 1..39: note = Probe
  source 1..39: mol_type = other DNA

SEQ ID NO: 38929 - DNA, 27 bp, synthetic construct
  misc_feature 1..27: note = Probe
  source 1..27: mol_type = other DNA
catgggtggttcagtggtagaattctc

SEQ ID NO: 38930 - DNA, 29 bp, synthetic construct
  misc_feature 1..29: note = Probe
  source 1..29: mol_type = other DNA
catgggtggttcagtggtagaattctcgc

SEQ ID NO: 38931 - DNA, 22 bp, synthetic construct
  misc_feature 1..22: note = Probe
  source 1..22: mol_type = other DNA
catggtctagcggttaggattc

SEQ ID NO: 38932 - DNA, 32 bp, synthetic construct; identical to SEQ ID NO: 4447
  misc_feature 1..32: note = Probe
  source 1..32: mol_type = other DNA

SEQ ID NO: 38933 - DNA, 50 bp, synthetic construct; identical to SEQ ID NO: 4448
  misc_feature 1..50: note = Probe
  source 1..50: mol_type = other DNA

SEQ ID NO: 38934 - DNA, 34 bp, synthetic construct; identical to SEQ ID NO: 18117
  misc_feature 1..34: note = Probe
  source 1..34: mol_type = other DNA

SEQ ID NO: 38935 - DNA, 35 bp, synthetic construct
  misc_feature 1..35: note = Probe
  source 1..35: mol_type = other DNA
cattcttgcgacccgggttcgattcccgggcggcg

SEQ ID NO: 38936 - DNA, 50 bp, synthetic construct; identical to SEQ ID NO: 4456
  misc_feature 1..50: note = Probe
  source 1..50: mol_type = other DNA

SEQ ID NO: 38937 - DNA, 20 bp, synthetic construct
  misc_feature 1..20: note = Probe
  source 1..20: mol_type = other DNA
cattggggtctccccgcgca

SEQ ID NO: 38938 - DNA, 21 bp, synthetic construct
  misc_feature 1..21: note = Probe
  source 1..21: mol_type = other DNA
cattggggtctccccgcgcag

SEQ ID NO: 38939 - DNA, 22 bp, synthetic construct
  misc_feature 1..22: note = Probe
  source 1..22: mol_type = other DNA
cattggggtctccccgcgcagg

SEQ ID NO: 38940 - DNA, 23 bp, synthetic construct
  misc_feature 1..23: note = Probe
  source 1..23: mol_type = other DNA
cattggggtctccccgcgcaggt

SEQ ID NO: 38941 - DNA, 22 bp, synthetic construct
  misc_feature 1..22: note = Probe
  source 1..22: mol_type = other DNA
cattggggtttccccgcgcagg

SEQ ID NO: 38942 - DNA, 28 bp, synthetic construct
  misc_feature 1..28: note = Probe
  source 1..28: mol_type = other DNA
cattggtggttcagtggtagaattctcg

SEQ ID NO: 38943 - DNA, 30 bp, synthetic construct; identical to SEQ ID NO: 4473
  misc_feature 1..30: note = Probe
  source 1..30: mol_type = other DNA

SEQ ID NO: 38944 - DNA, 50 bp, synthetic construct; identical to SEQ ID NO: 4482
  misc_feature 1..50: note = Probe
  source 1..50: mol_type = other DNA

SEQ ID NO: 38945 - DNA, 29 bp, synthetic construct
  misc_feature 1..29: note = Probe
  source 1..29: mol_type = other DNA
ccaaagacaccccccacagtttatgtagc

SEQ ID NO: 38946 - DNA, 30 bp, synthetic construct; identical to SEQ ID NO: 18159
  misc_feature 1..30: note = Probe
  source 1..30: mol_type = other DNA

SEQ ID NO: 38947 - DNA, 32 bp, synthetic construct; identical to SEQ ID NO: 18161
  misc_feature 1..32: note = Probe
  source 1..32: mol_type = other DNA

SEQ ID NO: 38948 - DNA, 33 bp, synthetic construct; identical to SEQ ID NO: 18162
  misc_feature 1..33: note = Probe
  source 1..33: mol_type = other DNA

SEQ ID NO: 38949 - DNA, 34 bp, synthetic construct; identical to SEQ ID NO: 18163
  misc_feature 1..34: note = Probe
  source 1..34: mol_type = other DNA

SEQ ID NO: 38950 - DNA, 35 bp, synthetic construct; identical to SEQ ID NO: 18164
  misc_feature 1..35: note = Probe
  source 1..35: mol_type = other DNA

SEQ ID NO: 38951 - DNA, 37 bp, synthetic construct; identical to SEQ ID NO: 18166
  misc_feature 1..37: note = Probe
  source 1..37: mol_type = other DNA

SEQ ID NO: 38952 - DNA, 38 bp, synthetic construct; identical to SEQ ID NO: 18167
  misc_feature 1..38: note = Probe
  source 1..38: mol_type = other DNA

SEQ ID NO: 38953 - DNA, 50 bp, synthetic construct; identical to SEQ ID NO: 4485
  misc_feature 1..50: note = Probe
  source 1..50: mol_type = other DNA

SEQ ID NO: 38954 - DNA, 19 bp, synthetic construct
  misc_feature 1..19: note = Probe
  source 1..19: mol_type = other DNA
ccaacacctctttacagtg

SEQ ID NO: 38955 - DNA, 23 bp, synthetic construct
  misc_feature 1..23: note = Probe
  source 1..23: mol_type = other DNA
ccaacacctctttacagtgaaat

SEQ ID NO: 38956 - DNA, 50 bp, synthetic construct; identical to SEQ ID NO: 4510
  misc_feature 1..50: note = Probe
  source 1..50: mol_type = other DNA

SEQ ID NO: 38957 - DNA, 18 bp, synthetic construct
  misc_feature 1..18: note = Probe
  source 1..18: mol_type = other DNA
ccaagcagttgacccggg

SEQ ID NO: 38958 - DNA, 37 bp, synthetic construct
  misc_feature 1..37: note = Probe
  source 1..37: mol_type = other DNA
ccaagcagttgacccgggttcgattcccggccaacgc

SEQ ID NO: 38959 - DNA, 41 bp, synthetic construct; identical to SEQ ID NO: 18195
  misc_feature 1..41: note = Probe
  source 1..41: mol_type = other DNA

SEQ ID NO: 38960 - DNA, 33 bp, synthetic construct
  misc_feature 1..33: note = Probe
  source 1..33: mol_type = other DNA
ccaagtgatggtttccctctggcagttctcaag

SEQ ID NO: 38961 - DNA, 33 bp, synthetic construct
  misc_feature 1..33: note = Probe
  source 1..33: mol_type = other DNA
ccaagttgttttatcctatctgcccaatactat

SEQ ID NO: 38962 - DNA, 21 bp, synthetic construct
  misc_feature 1..21: note = Probe
  source 1..21: mol_type = other DNA
ccaatgcacgagtacagtttt

SEQ ID NO: 38963 - DNA, 22 bp, synthetic construct
  misc_feature 1..22: note = Probe
  source 1..22: mol_type = other DNA
ccaatggggtttccccgcacag

SEQ ID NO: 38964 - DNA, 25 bp, synthetic construct
  misc_feature 1..25: note = Probe
  source 1..25: mol_type = other DNA
ccacacctcagaaggtctcactttt

SEQ ID NO: 38965 - DNA, 26 bp, synthetic construct
  misc_feature 1..26: note = Probe
  source 1..26: mol_type = other DNA
ccacatggtctagcggttaggattcc

SEQ ID NO: 38966 - DNA, 28 bp, synthetic construct
  misc_feature 1..28: note = Probe
  source 1..28: mol_type = other DNA
ccacatggtctagcggttaggattcctg

SEQ ID NO: 38967 - DNA, 33 bp, synthetic construct
  misc_feature 1..33: note = Probe
  source 1..33: mol_type = other DNA
ccaccgctgccacacctcagaaggtctcacttt

SEQ ID NO: 38968 - DNA, 34 bp, synthetic construct; identical to SEQ ID NO: 18231
  misc_feature 1..34: note = Probe
  source 1..34: mol_type = other DNA

SEQ ID NO: 38969 - DNA, 32 bp, synthetic construct
  misc_feature 1..32: note = Probe
  source 1..32: mol_type = other DNA
ccacgagggttctcaccttctctctccgattt

SEQ ID NO: 38970 - DNA, 36 bp, synthetic construct; identical to SEQ ID NO: 29823
  misc_feature 1..36: note = Probe
  source 1..36: mol_type = other DNA

SEQ ID NO: 38971 - DNA, 37 bp, synthetic construct
  misc_feature 1..37: note = Probe
  source 1..37: mol_type = other DNA
ccacgcgggagacccgggttcaattcccggccaatgc

SEQ ID NO: 38972 - DNA, 50 bp, synthetic construct
  misc_feature 1..50: note = Probe
  source 1..50: mol_type = other DNA
ccacgcgggagacccgggtttaattcccggtcaagataagaggtattttt

SEQ ID NO: 38973 - DNA, 20 bp, synthetic construct
  misc_feature 1..20: note = Probe
  source 1..20: mol_type = other DNA
ccacgcgggaggcccgggtt

SEQ ID NO: 38974 - DNA, 28 bp, synthetic construct
  misc_feature 1..28: note = Probe
  source 1..28: mol_type = other DNA
ccacgcgggaggcccgggttcgattccc

SEQ ID NO: 38975 - DNA, 32 bp, synthetic construct
  misc_feature 1..32: note = Probe
  source 1..32: mol_type = other DNA
ccacgcgggaggcccgggttcgattcccggcc

SEQ ID NO: 38976 - DNA, 33 bp, synthetic construct
  misc_feature 1..33: note = Probe
  source 1..33: mol_type = other DNA
ccacgcgggaggcccgggttcgattcccggcca

SEQ ID NO: 38977 - DNA, 35 bp, synthetic construct
  misc_feature 1..35: note = Probe
  source 1..35: mol_type = other DNA
ccacgcgggaggcccgggttcgattcccggccaat

SEQ ID NO: 38978 - DNA, 37 bp, synthetic construct
  misc_feature 1..37: note = Probe
  source 1..37: mol_type = other DNA
ccacgcgggaggcccgggttcgattcccggccaatgc

SEQ ID NO: 38979 - DNA, 50 bp, synthetic construct
  misc_feature 1..50: note = Probe
  source 1..50: mol_type = other DNA
ccacgcgggaggcccgggttcgattcccggccaatgcaacgatgacgttt

SEQ ID NO: 38980 - DNA, 50 bp, synthetic construct
  misc_feature 1..50: note = Probe
  source 1..50: mol_type = other DNA
ccacgcgggaggcccgggttcgattcccggccaatgcaagttttgacttc

SEQ ID NO: 38981 - DNA, 49 bp, synthetic construct
  misc_feature 1..49: note = Probe
  source 1..49: mol_type = other DNA
ccacgcgggaggcccgggttcgattcccggccaatgcacgagtacagtt

SEQ ID NO: 38982 - DNA, 50 bp, synthetic construct
  misc_feature 1..50: note = Probe
  source 1..50: mol_type = other DNA
ccacgcgggaggcccgggttcgattcccggccaatgcacgagtacagttt

SEQ ID NO: 38983 - DNA, 34 bp, synthetic construct
  misc_feature 1..34: note = Probe
  source 1..34: mol_type = other DNA
ccacgcgggaggcccgggttcgattcccggccca

SEQ ID NO: 38984 - DNA, 41 bp, synthetic construct; identical to SEQ ID NO: 4534
  misc_feature 1..41: note = Probe
  source 1..41: mol_type = other DNA

SEQ ID NO: 38985 - DNA, 22 bp, synthetic construct
  misc_feature 1..22: note = Probe
  source 1..22: mol_type = other DNA
ccacggcgtgattcataccttt

SEQ ID NO: 38986 - DNA, 23 bp, synthetic construct
  misc_feature 1..23: note = Probe
  source 1..23: mol_type = other DNA
ccacggcgtgattcatacctttt

SEQ ID NO: 38987 - DNA, 35 bp, synthetic construct; identical to SEQ ID NO: 4558
  misc_feature 1..35: note = Probe
  source 1..35: mol_type = other DNA

SEQ ID NO: 38988 - DNA, 36 bp, synthetic construct; identical to SEQ ID NO: 4559
  misc_feature 1..36: note = Probe
  source 1..36: mol_type = other DNA

SEQ ID NO: 38989 - DNA, 37 bp, synthetic construct; identical to SEQ ID NO: 4560
  misc_feature 1..37: note = Probe
  source 1..37: mol_type = other DNA

SEQ ID NO: 38990 - DNA, 46 bp, synthetic construct
  misc_feature 1..46: note = Probe
  source 1..46: mol_type = other DNA
ccagggattgtgggttcgagtcccatctggggtggcctgtgacttt

SEQ ID NO: 38991 - DNA, 50 bp, synthetic construct
  misc_feature 1..50: note = Probe
  source 1..50: mol_type = other DNA
ccagggattgtgggttcgagtcccatctggggtggcctgtgacttttgtc

SEQ ID NO: 38992 - DNA, 32 bp, synthetic construct
  misc_feature 1..32: note = Probe
  source 1..32: mol_type = other DNA
ccaggtggcccgggttcgactcccggtatggg

SEQ ID NO: 38993 - DNA, 34 bp, synthetic construct; identical to SEQ ID NO: 18285
  misc_feature 1..34: note = Probe
  source 1..34: mol_type = other DNA

SEQ ID NO: 38994 - DNA, 37 bp, synthetic construct; identical to SEQ ID NO: 4571
  misc_feature 1..37: note = Probe
  source 1..37: mol_type = other DNA

SEQ ID NO: 38995 - DNA, 20 bp, synthetic construct
  misc_feature 1..20: note = Probe
  source 1..20: mol_type = other DNA
ccagtctcttcgggggcgtg

SEQ ID NO: 38996 - DNA, 31 bp, synthetic construct
  misc_feature 1..31: note = Probe
  source 1..31: mol_type = other DNA
ccagtggaaccacggcgtgattcataccttt

SEQ ID NO: 38997 - DNA, 50 bp, synthetic construct; identical to SEQ ID NO: 4574
  misc_feature 1..50: note = Probe
  source 1..50: mol_type = other DNA

SEQ ID NO: 38998 - DNA, 33 bp, synthetic construct
  misc_feature 1..33: note = Probe
  source 1..33: mol_type = other DNA
ccagttttccttcctgtcccgtacggtttttct

SEQ ID NO: 38999 - DNA, 22 bp, synthetic construct
  misc_feature 1..22: note = Probe
  source 1..22: mol_type = other DNA
ccataacccagaggtcgatgga

SEQ ID NO: 39000 - DNA, 44 bp, synthetic construct; identical to SEQ ID NO: 4575
  misc_feature 1..44: note = Probe
  source 1..44: mol_type = other DNA

SEQ ID NO: 39001 - DNA, 50 bp, synthetic construct
  misc_feature 1..50: note = Probe
  source 1..50: mol_type = other DNA
ccataacccagaggtcgatggatcgaaaccatcctctgctaggtgcctgt

SEQ ID NO: 39002 - DNA, 24 bp, synthetic construct
  misc_feature 1..24: note = Probe
  source 1..24: mol_type = other DNA
ccatagtgtagtggttatcacgtc

SEQ ID NO: 39003 - DNA, 27 bp, synthetic construct
  misc_feature 1..27: note = Probe
  source 1..27: mol_type = other DNA
ccatagtgtagtggttatcacgtctgc

SEQ ID NO: 39004 - DNA, 23 bp, synthetic construct
  misc_feature 1..23: note = Probe
  source 1..23: mol_type = other DNA
ccatcctctgctatcggagtttt

SEQ ID NO: 39005 - DNA, 24 bp, synthetic construct
  misc_feature 1..24: note = Probe
  source 1..24: mol_type = other DNA
ccatctggggtggcctgtgacttt

SEQ ID NO: 39006 - DNA, 25 bp, synthetic construct
  misc_feature 1..25: note = Probe
  source 1..25: mol_type = other DNA
ccatggtgtaatggttagcactctg

SEQ ID NO: 39007 - DNA, 34 bp, synthetic construct
  misc_feature 1..34: note = Probe
  source 1..34: mol_type = other DNA
ccattcttgcgacccgggttcgattcccgggcgg

SEQ ID NO: 39008 - DNA, 35 bp, synthetic construct
  misc_feature 1..35: note = Probe
  source 1..35: mol_type = other DNA
ccattcttgcgacccgggttcgattcccgggcggc

SEQ ID NO: 39009 - DNA, 36 bp, synthetic construct; identical to SEQ ID NO: 29866
  misc_feature 1..36: note = Probe
  source 1..36: mol_type = other DNA

SEQ ID NO: 39010 - DNA, 38 bp, synthetic construct
  misc_feature 1..38: note = Probe
  source 1..38: mol_type = other DNA
ccattcttgcgacccgggttcgattcccgggcggcgca

SEQ ID NO: 39011 - DNA, 41 bp, synthetic construct; identical to SEQ ID NO: 4587
  misc_feature 1..41: note = Probe
  source 1..41: mol_type = other DNA

SEQ ID NO: 39012 - DNA, 22 bp, synthetic construct
  misc_feature 1..22: note = Probe
  source 1..22: mol_type = other DNA
ccattggggtctccccgcgcag

SEQ ID NO: 39013 - DNA, 24 bp, synthetic construct
  misc_feature 1..24: note = Probe
  source 1..24: mol_type = other DNA
ccattggggtctccccgcgcaggt

SEQ ID NO: 39014 - DNA, 22 bp, synthetic construct
  misc_feature 1..22: note = Probe
  source 1..22: mol_type = other DNA
ccattggggtttccccgcgcag

SEQ ID NO: 39015 - DNA, 24 bp, synthetic construct
  misc_feature 1..24: note = Probe
  source 1..24: mol_type = other DNA
ccattggggtttccccgcgcaggt

SEQ ID NO: 39016 - DNA, 18 bp, synthetic construct
  misc_feature 1..18: note = Probe
  source 1..18: mol_type = other DNA
cccaaacccactccacct

SEQ ID NO: 39017 - DNA, 30 bp, synthetic construct; identical to SEQ ID NO: 18324
  misc_feature 1..30: note = Probe
  source 1..30: mol_type = other DNA

SEQ ID NO: 39018 - DNA, 31 bp, synthetic construct; identical to SEQ ID NO: 4596
  misc_feature 1..31: note = Probe
  source 1..31: mol_type = other DNA

SEQ ID NO: 39019 - DNA, 32 bp, synthetic construct; identical to SEQ ID NO: 18326
  misc_feature 1..32: note = Probe
  source 1..32: mol_type = other DNA

SEQ ID NO: 39020 - DNA, 33 bp, synthetic construct; identical to SEQ ID NO: 18327
  misc_feature 1..33: note = Probe
  source 1..33: mol_type = other DNA

SEQ ID NO: 39021 - DNA, 34 bp, synthetic construct
  misc_feature 1..34: note = Probe
  source 1..34: mol_type = other DNA
cccaaagacaccccccacagtttatgtagcttac

SEQ ID NO: 39022 - DNA, 35 bp, synthetic construct; identical to SEQ ID NO: 18328
  misc_feature 1..35: note = Probe
  source 1..35: mol_type = other DNA

SEQ ID NO: 39023 - DNA, 36 bp, synthetic construct; identical to SEQ ID NO: 18329
  misc_feature 1..36: note = Probe
  source 1..36: mol_type = other DNA

SEQ ID NO: 39024 - DNA, 50 bp, synthetic construct; identical to SEQ ID NO: 4613
  misc_feature 1..50: note = Probe
  source 1..50: mol_type = other DNA

SEQ ID NO: 39025 - DNA, 30 bp, synthetic construct; identical to SEQ ID NO: 4619
  misc_feature 1..30: note = Probe
  source 1..30: mol_type = other DNA

SEQ ID NO: 39026 - DNA, 33 bp, synthetic construct; identical to SEQ ID NO: 581
  misc_feature 1..33: note = Probe
  source 1..33: mol_type = other DNA

SEQ ID NO: 39027 - DNA, 24 bp, synthetic construct
  misc_feature 1..24: note = Probe
  source 1..24: mol_type = other DNA
cccaccactgccagtggtacgttt

SEQ ID NO: 39028 - DNA, 24 bp, synthetic construct
  misc_feature 1..24: note = Probe
  source 1..24: mol_type = other DNA
cccacccaagaacagggtttgtta

SEQ ID NO: 39029 - DNA, 27 bp, synthetic construct
  misc_feature 1..27: note = Probe
  source 1..27: mol_type = other DNA
cccacccagggacgcgtggtgactttt

SEQ ID NO: 39030 - DNA, 28 bp, synthetic construct
  misc_feature 1..28: note = Probe
  source 1..28: mol_type = other DNA
cccacccagggacggtcagtgcttcttt

SEQ ID NO: 39031 - DNA, 34 bp, synthetic construct; identical to SEQ ID NO: 4627
  misc_feature 1..34: note = Probe
  source 1..34: mol_type = other DNA

SEQ ID NO: 39032 - DNA, 35 bp, synthetic construct; identical to SEQ ID NO: 18382
  misc_feature 1..35: note = Probe
  source 1..35: mol_type = other DNA

SEQ ID NO: 39033 - DNA, 25 bp, synthetic construct
  misc_feature 1..25: note = Probe
  source 1..25: mol_type = other DNA
cccaccgctgccaggctggagtttt

SEQ ID NO: 39034 - DNA, 30 bp, synthetic construct
  misc_feature 1..30: note = Probe
  source 1..30: mol_type = other DNA
cccagcacttccacaagtacatttccttat

SEQ ID NO: 39035 - DNA, 20 bp, synthetic construct
  misc_feature 1..20: note = Probe
  source 1..20: mol_type = other DNA
cccagcatctccagtgtttt

SEQ ID NO: 39036 - DNA, 24 bp, synthetic construct
  misc_feature 1..24: note = Probe
  source 1..24: mol_type = other DNA
cccagggacggtcagtgcttcttt

SEQ ID NO: 39037 - DNA, 25 bp, synthetic construct
  misc_feature 1..25: note = Probe
  source 1..25: mol_type = other DNA
cccagggacggtcagtgcttctttt

SEQ ID NO: 39038 - DNA, 33 bp, synthetic construct; identical to SEQ ID NO: 18405
  misc_feature 1..33: note = Probe
  source 1..33: mol_type = other DNA

SEQ ID NO: 39039 - DNA, 23 bp, synthetic construct
  misc_feature 1..23: note = Probe
  source 1..23: mol_type = other DNA
cccataacccagaggtcgatgga

SEQ ID NO: 39040 - DNA, 45 bp, synthetic construct
  misc_feature 1..45: note = Probe
  source 1..45: mol_type = other DNA
cccataacccagaggtcgatggatcgaaaccatcctctgctaggg

SEQ ID NO: 39041 - DNA, 45 bp, synthetic construct; identical to SEQ ID NO: 18409
  misc_feature 1..45: note = Probe
  source 1..45: mol_type = other DNA

SEQ ID NO: 39042 - DNA, 50 bp, synthetic construct
  misc_feature 1..50: note = Probe
  source 1..50: mol_type = other DNA
cccataacccagaggtcgatggatcgaaaccatcctctgctaggtccttt

SEQ ID NO: 39043 - DNA, 50 bp, synthetic construct
  misc_feature 1..50: note = Probe
  source 1..50: mol_type = other DNA
cccataacccagaggtcgatggatcgaaaccatcctctgctaggtgcctg

SEQ ID NO: 39044 - DNA, 50 bp, synthetic construct
  misc_feature 1..50: note = Probe
  source 1..50: mol_type = other DNA
cccataacccagaggtcgatggatcgaaaccatcctctgctatagactcc

SEQ ID NO: 39045 - DNA, 45 bp, synthetic construct
  misc_feature 1..45: note = Probe
  source 1..45: mol_type = other DNA
cccataacccagaggtcgatggatcgaaaccatcctctgctatcg

SEQ ID NO: 39046 - DNA, 50 bp, synthetic construct
  misc_feature 1..50: note = Probe
  source 1..50: mol_type = other DNA
cccataacccagaggtcgatggatcgaaaccatcctctgctatcggagtt

SEQ ID NO: 39047 - DNA, 45 bp, synthetic construct
  misc_feature 1..45: note = Probe
  source 1..45: mol_type = other DNA
cccataacccagaggtcgatggatcgaaaccatcctctgctattt

SEQ ID NO: 39048 - DNA, 21 bp, synthetic construct
  misc_feature 1..21: note = Probe
  source 1..21: mol_type = other DNA
cccataacccagaggttgatg

SEQ ID NO: 39049 - DNA, 20 bp, synthetic construct
  misc_feature 1..20: note = Probe
  source 1..20: mol_type = other DNA
cccataccccgaaaatgttg

SEQ ID NO: 39050 - DNA, 32 bp, synthetic construct; identical to SEQ ID NO: 4640
  misc_feature 1..32: note = Probe
  source 1..32: mol_type = other DNA

SEQ ID NO: 39051 - DNA, 43 bp, synthetic construct; identical to SEQ ID NO: 4644
  misc_feature 1..43: note = Probe
  source 1..43: mol_type = other DNA

SEQ ID NO: 39052 - DNA, 24 bp, synthetic construct
  misc_feature 1..24: note = Probe
  source 1..24: mol_type = other DNA
cccatgcagcacgccctcccattt

SEQ ID NO: 39053 - DNA, 25 bp, synthetic construct
  misc_feature 1..25: note = Probe
  source 1..25: mol_type = other DNA
cccatgcagcacgccctcccatttt

SEQ ID NO: 39054 - DNA, 37 bp, synthetic construct; identical to SEQ ID NO: 599
  misc_feature 1..37: note = Probe
  source 1..37: mol_type = other DNA

SEQ ID NO: 39055 - DNA, 42 bp, synthetic construct; identical to SEQ ID NO: 4656
  misc_feature 1..42: note = Probe
  source 1..42: mol_type = other DNA

SEQ ID NO: 39056 - DNA, 20 bp, synthetic construct
  misc_feature 1..20: note = Probe
  source 1..20: mol_type = other DNA
cccattggggtctccccgcg

SEQ ID NO: 39057 - DNA, 22 bp, synthetic construct
  misc_feature 1..22: note = Probe
  source 1..22: mol_type = other DNA
cccattggggtctccccgcgca

SEQ ID NO: 39058 - DNA, 23 bp, synthetic construct
  misc_feature 1..23: note = Probe
  source 1..23: mol_type = other DNA
cccattggggtctccccgcgcag

SEQ ID NO: 39059 - DNA, 25 bp, synthetic construct
  misc_feature 1..25: note = Probe
  source 1..25: mol_type = other DNA
cccattggggtctccccgcgcaggt

SEQ ID NO: 39060 - DNA, 29 bp, synthetic construct
  misc_feature 1..29: note = Probe
  source 1..29: mol_type = other DNA
ccccaaaaattttggtgcaactccaaata

SEQ ID NO: 39061 - DNA, 35 bp, synthetic construct; identical to SEQ ID NO: 18441
  misc_feature 1..35: note = Probe
  source 1..35: mol_type = other DNA

SEQ ID NO: 39062 - DNA, 38 bp, synthetic construct; identical to SEQ ID NO: 4673
  misc_feature 1..38: note = Probe
  source 1..38: mol_type = other DNA

SEQ ID NO: 39063 - DNA, 22 bp, synthetic construct
  misc_feature 1..22: note = Probe
  source 1..22: mol_type = other DNA
ccccatgtctaacaacatggct

SEQ ID NO: 39064 - DNA, 31 bp, synthetic construct; identical to SEQ ID NO: 4684
  misc_feature 1..31: note = Probe
  source 1..31: mol_type = other DNA

SEQ ID NO: 39065 - DNA, 23 bp, synthetic construct
  misc_feature 1..23: note = Probe
  source 1..23: mol_type = other DNA
cccccatgtctaacaacatggct

SEQ ID NO: 39066 - DNA, 24 bp, synthetic construct
  misc_feature 1..24: note = Probe
  source 1..24: mol_type = other DNA
cccccatgtctaacaacatggctt

SEQ ID NO: 39067 - DNA, 25 bp, synthetic construct
  misc_feature 1..25: note = Probe
  source 1..25: mol_type = other DNA
cccccatgtctaacaacatggcttt

SEQ ID NO: 39068 - DNA, 26 bp, synthetic construct
  misc_feature 1..26: note = Probe
  source 1..26: mol_type = other DNA
cccccatgtctaacaacatggctttc

SEQ ID NO: 39069 - DNA, 27 bp, synthetic construct
  misc_feature 1..27: note = Probe
  source 1..27: mol_type = other DNA
cccccatgtctaacaacatggctttct

SEQ ID NO: 39070 - DNA, 28 bp, synthetic construct
  misc_feature 1..28: note = Probe
  source 1..28: mol_type = other DNA
cccccatgtctaacaacatggctttctc

SEQ ID NO: 39071 - DNA, 29 bp, synthetic construct
  misc_feature 1..29: note = Probe
  source 1..29: mol_type = other DNA
cccccatgtctaacaacatggctttctca

SEQ ID NO: 39072 - DNA, 31 bp, synthetic construct; identical to SEQ ID NO: 4695
  misc_feature 1..31: note = Probe
  source 1..31: mol_type = other DNA

SEQ ID NO: 39073 - DNA, 32 bp, synthetic construct; identical to SEQ ID NO: 4696
  misc_feature 1..32: note = Probe
  source 1..32: mol_type = other DNA

SEQ ID NO: 39074 - DNA, 30 bp, synthetic construct; identical to SEQ ID NO: 18484
  misc_feature 1..30: note = Probe
  source 1..30: mol_type = other DNA

SEQ ID NO: 39075 - DNA, 34 bp, synthetic construct
  misc_feature 1..34: note = Probe
  source 1..34: mol_type = other DNA
ccccgcacaggttcgaatcctgttcgtgacgggt

SEQ ID NO: 39076 - DNA, 50 bp, synthetic construct; identical to SEQ ID NO: 4704
  misc_feature 1..50: note = Probe
  source 1..50: mol_type = other DNA

SEQ ID NO: 39077 - DNA, 30 bp, synthetic construct
  misc_feature 1..30: note = Probe
  source 1..30: mol_type = other DNA
ccccgggttcaatccccggcatctccagac

SEQ ID NO: 39078 - DNA, 33 bp, synthetic construct
  misc_feature 1..33: note = Probe
  source 1..33: mol_type = other DNA
ccccgggttcaatccccggcatctccagacttt

SEQ ID NO: 39079 - DNA, 34 bp, synthetic construct
  misc_feature 1..34: note = Probe
  source 1..34: mol_type = other DNA
ccccgggttcaatccccggcatctccagactttt

SEQ ID NO: 39080 - DNA, 30 bp, synthetic construct; identical to SEQ ID NO: 4721
  misc_feature 1..30: note = Probe
  source 1..30: mol_type = other DNA

SEQ ID NO: 39081 - DNA, 26 bp, synthetic construct
  misc_feature 1..26: note = Probe
  source 1..26: mol_type = other DNA
cccctggcggtctagtggttaggatt

SEQ ID NO: 39082 - DNA, 28 bp, synthetic construct
  misc_feature 1..28: note = Probe
  source 1..28: mol_type = other DNA
cccctggcggtctagtggttaggattcg

SEQ ID NO: 39083 - DNA, 29 bp, synthetic construct
  misc_feature 1..29: note = Probe
  source 1..29: mol_type = other DNA
cccctggcggtctagtggttaggattcgg

SEQ ID NO: 39084 - DNA, 31 bp, synthetic construct; identical to SEQ ID NO: 18512
  misc_feature 1..31: note = Probe
  source 1..31: mol_type = other DNA

SEQ ID NO: 39085 - DNA, 50 bp, synthetic construct; identical to SEQ ID NO: 4737
  misc_feature 1..50: note = Probe
  source 1..50: mol_type = other DNA

SEQ ID NO: 39086 - DNA, 28 bp, synthetic construct
  misc_feature 1..28: note = Probe
  source 1..28: mol_type = other DNA
cccgcgcaggttcaaatcctgctcacag

SEQ ID NO: 39087 - DNA, 28 bp, synthetic construct
  misc_feature 1..28: note = Probe
  source 1..28: mol_type = other DNA
cccggatagctcagtcggtagagcatca

SEQ ID NO: 39088 - DNA, 34 bp, synthetic construct; identical to SEQ ID NO: 619
  misc_feature 1..34: note = Probe
  source 1..34: mol_type = other DNA

SEQ ID NO: 39089 - DNA, 50 bp, synthetic construct
  misc_feature 1..50: note = Probe
  source 1..50: mol_type = other DNA
cccggatagctcagtcggtagagcatcagacttttaatctgagggtccag

SEQ ID NO: 39090 - DNA, 31 bp, synthetic construct; identical to SEQ ID NO: 621
  misc_feature 1..31: note = Probe
  source 1..31: mol_type = other DNA

SEQ ID NO: 39091 - DNA, 29 bp, synthetic construct
  misc_feature 1..29: note = Probe
  source 1..29: mol_type = other DNA
cccggctagctcagtcggtagagcatggg

SEQ ID NO: 39092 - DNA, 31 bp, synthetic construct; identical to SEQ ID NO: 626
  misc_feature 1..31: note = Probe
  source 1..31: mol_type = other DNA

SEQ ID NO: 39093 - DNA, 17 bp, synthetic construct
  misc_feature 1..17: note = Probe
  source 1..17: mol_type = other DNA
cccgggttcgatcccca

SEQ ID NO: 39094 - DNA, 18 bp, synthetic construct
  misc_feature 1..18: note = Probe
  source 1..18: mol_type = other DNA
cccgggttcgatccccag

SEQ ID NO: 39095 - DNA, 24 bp, synthetic construct
  misc_feature 1..24: note = Probe
  source 1..24: mol_type = other DNA
cccgggttcgatccccagcatctc

SEQ ID NO: 39096 - DNA, 26 bp, synthetic construct
  misc_feature 1..26: note = Probe
  source 1..26: mol_type = other DNA
cccgggttcgatccccagcatctcca

SEQ ID NO: 39097 - DNA, 33 bp, synthetic construct
  misc_feature 1..33: note = Probe
  source 1..33: mol_type = other DNA
cccgggttcgatccccagcatctccagtgtttt

SEQ ID NO: 39098 - DNA, 50 bp, synthetic construct; identical to SEQ ID NO: 632
  misc_feature 1..50: note = Probe
  source 1..50: mol_type = other DNA

SEQ ID NO: 39099 - DNA, 21 bp, synthetic construct
  misc_feature 1..21: note = Probe
  source 1..21: mol_type = other DNA
cccgtaacccagaggtcaatg

SEQ ID NO: 39100 - DNA, 32 bp, synthetic construct
  misc_feature 1..32: note = Probe
  source 1..32: mol_type = other DNA
ccctcctcgttagtatagtggtgagtatcccc

SEQ ID NO: 39101 - DNA, 18 bp, synthetic construct
  misc_feature 1..18: note = Probe
  source 1..18: mol_type = other DNA
ccctcgtggctactgttt

SEQ ID NO: 39102 - DNA, 19 bp, synthetic construct
  misc_feature 1..19: note = Probe
  source 1..19: mol_type = other DNA
ccctctggcagttctcaag

SEQ ID NO: 39103 - DNA, 28 bp, synthetic construct
  misc_feature 1..28: note = Probe
  source 1..28: mol_type = other DNA
ccctctgtgctccggagttacctcgttt

SEQ ID NO: 39104 - DNA, 30 bp, synthetic construct
  misc_feature 1..30: note = Probe
  source 1..30: mol_type = other DNA
ccctggcggtctagtggttaggattcggcg

SEQ ID NO: 39105 - DNA, 27 bp, synthetic construct
  misc_feature 1..27: note = Probe
  source 1..27: mol_type = other DNA
ccctggtggtctagtggctaggattcg

SEQ ID NO: 39106 - DNA, 28 bp, synthetic construct
  misc_feature 1..28: note = Probe
  source 1..28: mol_type = other DNA
ccctggtggtctagtggctaggattcgg

SEQ ID NO: 39107 - DNA, 25 bp, synthetic construct
  misc_feature 1..25: note = Probe
  source 1..25: mol_type = other DNA
ccctggtggtctagtggttaggatt

SEQ ID NO: 39108 - DNA, 26 bp, synthetic construct
  misc_feature 1..26: note = Probe
  source 1..26: mol_type = other DNA
ccctggtggtctagtggttaggattc

SEQ ID NO: 39109 - DNA, 27 bp, synthetic construct
  misc_feature 1..27: note = Probe
  source 1..27: mol_type = other DNA
ccctggtggtctagtggttaggattcg

SEQ ID NO: 39110 - DNA, 28 bp, synthetic construct
  misc_feature 1..28: note = Probe
  source 1..28: mol_type = other DNA
ccctggtggtctagtggttaggattcgg

SEQ ID NO: 39111 - DNA, 29 bp, synthetic construct
  misc_feature 1..29: note = Probe
  source 1..29: mol_type = other DNA
ccctggtggtctagtggttaggattcggc

SEQ ID NO: 39112 - DNA, 31 bp, synthetic construct; identical to SEQ ID NO: 638
  misc_feature 1..31: note = Probe
  source 1..31: mol_type = other DNA

SEQ ID NO: 39113 - DNA, 30 bp, synthetic construct
  misc_feature 1..30: note = Probe
  source 1..30: mol_type = other DNA
ccctggttcaatccctggtacctccatttt

SEQ ID NO: 39114 - DNA, 26 bp, synthetic construct
  misc_feature 1..26: note = Probe
  source 1..26: mol_type = other DNA
ccctgtgttgagcacatgtttccttt

SEQ ID NO: 39115 - DNA, 34 bp, synthetic construct; identical to SEQ ID NO: 4784
  misc_feature 1..34: note = Probe
  source 1..34: mol_type = other DNA

SEQ ID NO: 39116 - DNA, 32 bp, synthetic construct
  misc_feature 1..32: note = Probe
  source 1..32: mol_type = other DNA
ccgagaggtcccgggttcaaatcccggacgag

SEQ ID NO: 39117 - DNA, 17 bp, synthetic construct
  misc_feature 1..17: note = Probe
  source 1..17: mol_type = other DNA
ccgcagcaacctcggtt

SEQ ID NO: 39118 - DNA, 32 bp, synthetic construct; identical to SEQ ID NO: 4790
  misc_feature 1..32: note = Probe
  source 1..32: mol_type = other DNA

SEQ ID NO: 39119 - DNA, 34 bp, synthetic construct
  misc_feature 1..34: note = Probe
  source 1..34: mol_type = other DNA
ccgcagcaacctcggttcgaatccgagtcacggc

SEQ ID NO: 39120 - DNA, 35 bp, synthetic construct; identical to SEQ ID NO: 18619
  misc_feature 1..35: note = Probe
  source 1..35: mol_type = other DNA

SEQ ID NO: 39121 - DNA, 38 bp, synthetic construct; identical to SEQ ID NO: 4794
  misc_feature 1..38: note = Probe
  source 1..38: mol_type = other DNA

SEQ ID NO: 39122 - DNA, 38 bp, synthetic construct; identical to SEQ ID NO: 4796
  misc_feature 1..38: note = Probe
  source 1..38: mol_type = other DNA

SEQ ID NO: 39123 - DNA, 36 bp, synthetic construct; identical to SEQ ID NO: 4797
  misc_feature 1..36: note = Probe
  source 1..36: mol_type = other DNA

SEQ ID NO: 39124 - DNA, 36 bp, synthetic construct; identical to SEQ ID NO: 4798
  misc_feature 1..36: note = Probe
  source 1..36: mol_type = other DNA

SEQ ID NO: 39125 - DNA, 36 bp, synthetic construct; identical to SEQ ID NO: 4800
  misc_feature 1..36: note = Probe
  source 1..36: mol_type = other DNA

SEQ ID NO: 39126 - DNA, 38 bp, synthetic construct; identical to SEQ ID NO: 4802
  misc_feature 1..38: note = Probe
  source 1..38: mol_type = other DNA

SEQ ID NO: 39127 - DNA, 27 bp, synthetic construct
  misc_feature 1..27: note = Probe
  source 1..27: mol_type = other DNA
ccgcctgtcacgcgggagaccggggtt

SEQ ID NO: 39128 - DNA, 26 bp, synthetic construct
  misc_feature 1..26: note = Probe
  source 1..26: mol_type = other DNA
ccgcgcaggttcaaatcctgctcaca

SEQ ID NO: 39129 - DNA, 27 bp, synthetic construct
  misc_feature 1..27: note = Probe
  source 1..27: mol_type = other DNA
ccgcgcaggttcaaatcctgctcacag

SEQ ID NO: 39130 - DNA, 32 bp, synthetic construct; identical to SEQ ID NO: 4808
  misc_feature 1..32: note = Probe
  source 1..32: mol_type = other DNA

SEQ ID NO: 39131 - DNA, 35 bp, synthetic construct; identical to SEQ ID NO: 4812
  misc_feature 1..35: note = Probe
  source 1..35: mol_type = other DNA

SEQ ID NO: 39132 - DNA, 30 bp, synthetic construct
  misc_feature 1..30: note = Probe
  source 1..30: mol_type = other DNA
ccgctgccacacctcagaaggtctcacttt

SEQ ID NO: 39133 - DNA, 31 bp, synthetic construct; identical to SEQ ID NO: 18674
  misc_feature 1..31: note = Probe
  source 1..31: mol_type = other DNA

SEQ ID NO: 39134 - DNA, 31 bp, synthetic construct; identical to SEQ ID NO: 4817
  misc_feature 1..31: note = Probe
  source 1..31: mol_type = other DNA

SEQ ID NO: 39135 - DNA, 32 bp, synthetic construct; identical to SEQ ID NO: 4818
  misc_feature 1..32: note = Probe
  source 1..32: mol_type = other DNA

SEQ ID NO: 39136 - DNA, 33 bp, synthetic construct; identical to SEQ ID NO: 671
  misc_feature 1..33: note = Probe
  source 1..33: mol_type = other DNA

SEQ ID NO: 39137 - DNA, 50 bp, synthetic construct
  misc_feature 1..50: note = Probe
  source 1..50: mol_type = other DNA
ccggatagctcagtcggtagagcatcagacttttaatctgagggtccagg

SEQ ID NO: 39138 - DNA, 27 bp, synthetic construct
  misc_feature 1..27: note = Probe
  source 1..27: mol_type = other DNA
ccggctagctcagtcggtagagcatga

SEQ ID NO: 39139 - DNA, 27 bp, synthetic construct
  misc_feature 1..27: note = Probe
  source 1..27: mol_type = other DNA
ccggctagctcagtcggtagagcatgg

SEQ ID NO: 39140 - DNA, 31 bp, synthetic construct; identical to SEQ ID NO: 681
  misc_feature 1..31: note = Probe
  source 1..31: mol_type = other DNA

SEQ ID NO: 39141 - DNA, 29 bp, synthetic construct
  misc_feature 1..29: note = Probe
  source 1..29: mol_type = other DNA
ccggggttcgattccccgacggggaggca

SEQ ID NO: 39142 - DNA, 32 bp, synthetic construct
  misc_feature 1..32: note = Probe
  source 1..32: mol_type = other DNA
ccgggttcgatccccagcatctccagtgtttt

SEQ ID NO: 39143 - DNA, 50 bp, synthetic construct; identical to SEQ ID NO: 685
  misc_feature 1..50: note = Probe
  source 1..50: mol_type = other DNA

SEQ ID NO: 39144 - DNA, 25 bp, synthetic construct
  misc_feature 1..25: note = Probe
  source 1..25: mol_type = other DNA
ccgtagtgtagtggtcatcacgttc

SEQ ID NO: 39145 - DNA, 27 bp, synthetic construct
  misc_feature 1..27: note = Probe
  source 1..27: mol_type = other DNA
ccgtagtgtagtggtcatcacgttcgc

SEQ ID NO: 39146 - DNA, 24 bp, synthetic construct
  misc_feature 1..24: note = Probe
  source 1..24: mol_type = other DNA
ccgtagtgtagtggttatcacgtt

SEQ ID NO: 39147 - DNA, 25 bp, synthetic construct
  misc_feature 1..25: note = Probe
  source 1..25: mol_type = other DNA
ccgtagtgtagtggttatcacgttc

SEQ ID NO: 39148 - DNA, 26 bp, synthetic construct
  misc_feature 1..26: note = Probe
  source 1..26: mol_type = other DNA
ccgtagtgtagtggttatcacgttcg

SEQ ID NO: 39149 - DNA, 27 bp, synthetic construct
  misc_feature 1..27: note = Probe
  source 1..27: mol_type = other DNA
ccgtagtgtagtggttatcacgttcgc

SEQ ID NO: 39150 - DNA, 28 bp, synthetic construct
  misc_feature 1..28: note = Probe
  source 1..28: mol_type = other DNA
ccgtagtgtagtggttatcacgttcgcc

SEQ ID NO: 39151 - DNA, 50 bp, synthetic construct; identical to SEQ ID NO: 4842
  misc_feature 1..50: note = Probe
  source 1..50: mol_type = other DNA

SEQ ID NO: 39152 - DNA, 30 bp, synthetic construct; identical to SEQ ID NO: 4843
  misc_feature 1..30: note = Probe
  source 1..30: mol_type = other DNA

SEQ ID NO: 39153 - DNA, 36 bp, synthetic construct; identical to SEQ ID NO: 18750
  misc_feature 1..36: note = Probe
  source 1..36: mol_type = other DNA

SEQ ID NO: 39154 - DNA, 50 bp, synthetic construct; identical to SEQ ID NO: 4847
  misc_feature 1..50: note = Probe
  source 1..50: mol_type = other DNA

SEQ ID NO: 39155 - DNA, 30 bp, synthetic construct
  misc_feature 1..30: note = Probe
  source 1..30: mol_type = other DNA
ccgtagtgtagtggttattatgttcgcctc

SEQ ID NO: 39156 - DNA, 21 bp, synthetic construct
  misc_feature 1..21: note = Probe
  source 1..21: mol_type = other DNA
ccgtgatcgtatagtggttag

SEQ ID NO: 39157 - DNA, 24 bp, synthetic construct
  misc_feature 1..24: note = Probe
  source 1..24: mol_type = other DNA
ccgtgatcgtatagtggttagtac

SEQ ID NO: 39158 - DNA, 25 bp, synthetic construct
  misc_feature 1..25: note = Probe
  source 1..25: mol_type = other DNA
ccgtgatcgtatagtggttagtact

SEQ ID NO: 39159 - DNA, 26 bp, synthetic construct
  misc_feature 1..26: note = Probe
  source 1..26: mol_type = other DNA
ccgtgatcgtatagtggttagtactc

SEQ ID NO: 39160 - DNA, 27 bp, synthetic construct
  misc_feature 1..27: note = Probe
  source 1..27: mol_type = other DNA
ccgtgatcgtatagtggttagtactct

SEQ ID NO: 39161 - DNA, 28 bp, synthetic construct
  misc_feature 1..28: note = Probe
  source 1..28: mol_type = other DNA
ccgtgatcgtatagtggttagtactctg

SEQ ID NO: 39162 - DNA, 30 bp, synthetic construct; identical to SEQ ID NO: 8580
  misc_feature 1..30: note = Probe
  source 1..30: mol_type = other DNA

SEQ ID NO: 39163 - DNA, 28 bp, synthetic construct
  misc_feature 1..28: note = Probe
  source 1..28: mol_type = other DNA
ccgtggcttagttggttaaagcgcctgt

SEQ ID NO: 39164 - DNA, 20 bp, synthetic construct
  misc_feature 1..20: note = Probe
  source 1..20: mol_type = other DNA
ccgtgtttcccccacgcttt

SEQ ID NO: 39165 - DNA, 21 bp, synthetic construct
  misc_feature 1..21: note = Probe
  source 1..21: mol_type = other DNA
ccgtgtttcccccacgctttt

SEQ ID NO: 39166 - DNA, 50 bp, synthetic construct; identical to SEQ ID NO: 4855
  misc_feature 1..50: note = Probe
  source 1..50: mol_type = other DNA

SEQ ID NO: 39167 - DNA, 22 bp, synthetic construct
  misc_feature 1..22: note = Probe
  source 1..22: mol_type = other DNA
cctaacacgcgaaaggtccccg

SEQ ID NO: 39168 - DNA, 23 bp, synthetic construct
  misc_feature 1..23: note = Probe
  source 1..23: mol_type = other DNA
cctaacacgcgaaaggtccccgg

SEQ ID NO: 39169 - DNA, 24 bp, synthetic construct
  misc_feature 1..24: note = Probe
  source 1..24: mol_type = other DNA
cctaacacgcgaaaggtccccggt

SEQ ID NO: 39170 - DNA, 21 bp, synthetic construct
  misc_feature 1..21: note = Probe
  source 1..21: mol_type = other DNA
cctaagccagggattgtgggt

SEQ ID NO: 39171 - DNA, 17 bp, synthetic construct
  misc_feature 1..17: note = Probe
  source 1..17: mol_type = other DNA
cctattctcaaacttta

SEQ ID NO: 39172 - DNA, 32 bp, synthetic construct
  misc_feature 1..32: note = Probe
  source 1..32: mol_type = other DNA
cctattctcaaactttaaatgggcaagaagcc

SEQ ID NO: 39173 - DNA, 33 bp, synthetic construct
  misc_feature 1..33: note = Probe
  source 1..33: mol_type = other DNA
cctattctcaaactttaaatgggcaagaagccc

SEQ ID NO: 39174 - DNA, 34 bp, synthetic construct
  misc_feature 1..34: note = Probe
  source 1..34: mol_type = other DNA
cctattctcaaactttaaatgggcaagaagccca

SEQ ID NO: 39175 - DNA, 36 bp, synthetic construct
  misc_feature 1..36: note = Probe
  source 1..36: mol_type = other DNA
cctattctcaaactttaaatgggcaagaagcccagc

SEQ ID NO: 39176 - DNA, 38 bp, synthetic construct
  misc_feature 1..38: note = Probe
  source 1..38: mol_type = other DNA
cctattctcaaactttaaatgggcaagaagcccagcta

SEQ ID NO: 39177 - DNA, 50 bp, synthetic construct; identical to SEQ ID NO: 691
  misc_feature 1..50: note = Probe
  source 1..50: mol_type = other DNA

SEQ ID NO: 39178 - DNA, 31 bp, synthetic construct
  misc_feature 1..31: note = Probe
  source 1..31: mol_type = other DNA
cctcaaccgagcgtccaagctctttccattt

SEQ ID NO: 39179 - DNA, 18 bp, synthetic construct
  misc_feature 1..18: note = Probe
  source 1..18: mol_type = other DNA
cctcacacgcgaaaggtc

SEQ ID NO: 39180 - DNA, 41 bp, synthetic construct
  misc_feature 1..41: note = Probe
  source 1..41: mol_type = other DNA
cctcacacgcgaaaggtccccggttcgaaaccgggcggaaa

SEQ ID NO: 39181 - DNA, 42 bp, synthetic construct
  misc_feature 1..42: note = Probe
  source 1..42: mol_type = other DNA
cctcacacgcgaaaggtccccggttcgaaaccgggcggaaac

SEQ ID NO: 39182 - DNA, 46 bp, synthetic construct
  misc_feature 1..46: note = Probe
  source 1..46: mol_type = other DNA
cctcacacgcgaaaggtccccggttcgaaaccgggcggaaacacct

SEQ ID NO: 39183 - DNA, 50 bp, synthetic construct
  misc_feature 1..50: note = Probe
  source 1..50: mol_type = other DNA
cctcacacgcgaaaggtccccggttcgaaaccgggcggaaacacctcctt

SEQ ID NO: 39184 - DNA, 41 bp, synthetic construct
  misc_feature 1..41: note = Probe
  source 1..41: mol_type = other DNA
cctcacacgcgaaaggtccccggttcgatcccgggcggaaa

SEQ ID NO: 39185 - DNA, 42 bp, synthetic construct
  misc_feature 1..42: note = Probe
  source 1..42: mol_type = other DNA
cctcacacgcgaaaggtccccggttcgatcccgggcggaaac

SEQ ID NO: 39186 - DNA, 46 bp, synthetic construct
  misc_feature 1..46: note = Probe
  source 1..46: mol_type = other DNA
cctcacacgcgaaaggtccccggttcgatcccgggcggaaacaggt

SEQ ID NO: 39187 - DNA, 23 bp, synthetic construct
  misc_feature 1..23: note = Probe
  source 1..23: mol_type = other DNA
cctcacacggggcacaataattt

SEQ ID NO: 39188 - DNA, 25 bp, synthetic construct
  misc_feature 1..25: note = Probe
  source 1..25: mol_type = other DNA
cctcacacggggcagtctaacgttt

SEQ ID NO: 39189 - DNA, 23 bp, synthetic construct
  misc_feature 1..23: note = Probe
  source 1..23: mol_type = other DNA
cctcacctggagcaagacccttt

SEQ ID NO: 39190 - DNA, 20 bp, synthetic construct
  misc_feature 1..20: note = Probe
  source 1..20: mol_type = other DNA
cctcagaaggtctcactttt

SEQ ID NO: 39191 - DNA, 24 bp, synthetic construct
  misc_feature 1..24: note = Probe
  source 1..24: mol_type = other DNA
cctcagagggggcagctgccattt

SEQ ID NO: 39192 - DNA, 25 bp, synthetic construct
  misc_feature 1..25: note = Probe
  source 1..25: mol_type = other DNA
cctcagagggggcagctgccatttt

SEQ ID NO: 39193 - DNA, 24 bp, synthetic construct
  misc_feature 1..24: note = Probe
  source 1..24: mol_type = other DNA
cctccagagtcgcatgttgcattt

SEQ ID NO: 39194 - DNA, 41 bp, synthetic construct
  misc_feature 1..41: note = Probe
  source 1..41: mol_type = other DNA
cctcccacgcgggagacccgggttcaattcccggccaatgc

SEQ ID NO: 39195 - DNA, 45 bp, synthetic construct
  misc_feature 1..45: note = Probe
  source 1..45: mol_type = other DNA
cctcccacgcgggagacccgggttcaattcccggccaatgcaaaa

SEQ ID NO: 39196 - DNA, 50 bp, synthetic construct
  misc_feature 1..50: note = Probe
  source 1..50: mol_type = other DNA
cctcccacgcgggagacccgggttcaattcccggccaatgcaaaagggtc

SEQ ID NO: 39197 - DNA, 45 bp, synthetic construct
  misc_feature 1..45: note = Probe
  source 1..45: mol_type = other DNA
cctcccatgcgggagacccgggttcaattcccggccactgcacgt

SEQ ID NO: 39198 - DNA, 46 bp, synthetic construct
  misc_feature 1..46: note = Probe
  source 1..46: mol_type = other DNA
cctccggagctggggattgtgggttcgagtcccatctgggtcgcgt

SEQ ID NO: 39199 - DNA, 31 bp, synthetic construct
  misc_feature 1..31: note = Probe
  source 1..31: mol_type = other DNA
cctcctcgttagtatagtggtgagtatcccc

SEQ ID NO: 39200 - DNA, 22 bp, synthetic construct
  misc_feature 1..22: note = Probe
  source 1..22: mol_type = other DNA
cctcgcagcttcgctgcgtgag

SEQ ID NO: 39201 - DNA, 27 bp, synthetic construct
  misc_feature 1..27: note = Probe
  source 1..27: mol_type = other DNA
cctcgttagtatagtggtgagtatccc

SEQ ID NO: 39202 - DNA, 34 bp, synthetic construct; identical to SEQ ID NO: 694
  misc_feature 1..34: note = Probe
  source 1..34: mol_type = other DNA

SEQ ID NO: 39203 - DNA, 28 bp, synthetic construct
  misc_feature 1..28: note = Probe
  source 1..28: mol_type = other DNA
cctcgttagtatagtggttagtatcccc

SEQ ID NO: 39204 - DNA, 29 bp, synthetic construct
  misc_feature 1..29: note = Probe
  source 1..29: mol_type = other DNA
cctcgttagtatagtggttagtatccccg

SEQ ID NO: 39205 - DNA, 18 bp, synthetic construct
  misc_feature 1..18: note = Probe
  source 1..18: mol_type = other DNA
cctctggcagttctcaag

SEQ ID NO: 39206 - DNA, 27 bp, synthetic construct
  misc_feature 1..27: note = Probe
  source 1..27: mol_type = other DNA
cctctgtgctccggagttacctcgttt

SEQ ID NO: 39207 - DNA, 36 bp, synthetic construct
  misc_feature 1..36: note = Probe
  source 1..36: mol_type = other DNA
cctgagttcgaacctcagagggggcagctgccattt

SEQ ID NO: 39208 - DNA, 18 bp, synthetic construct
  misc_feature 1..18: note = Probe
  source 1..18: mol_type = other DNA
cctgccacgcgggaggcc

SEQ ID NO: 39209 - DNA, 22 bp, synthetic construct
  misc_feature 1..22: note = Probe
  source 1..22: mol_type = other DNA
cctgccacgcgggaggcccggg

SEQ ID NO: 39210 - DNA, 32 bp, synthetic construct
  misc_feature 1..32: note = Probe
  source 1..32: mol_type = other DNA
cctgccacgcgggaggcccgggttcgattccc

SEQ ID NO: 39211 - DNA, 36 bp, synthetic construct
  misc_feature 1..36: note = Probe
  source 1..36: mol_type = other DNA
cctgccacgcgggaggcccgggttcgattcccggcc

SEQ ID NO: 39212 - DNA, 39 bp, synthetic construct
  misc_feature 1..39: note = Probe
  source 1..39: mol_type = other DNA
cctgccacgcgggaggcccgggttcgattcccggccaat

SEQ ID NO: 39213 - DNA, 41 bp, synthetic construct
  misc_feature 1..41: note = Probe
  source 1..41: mol_type = other DNA
cctgccacgcgggaggcccgggttcgattcccggccaatgc

SEQ ID NO: 39214 - DNA, 45 bp, synthetic construct
  misc_feature 1..45: note = Probe
  source 1..45: mol_type = other DNA
cctgccacgcgggaggcccgggttcgattcccggccaatgcaagt

SEQ ID NO: 39215 - DNA, 46 bp, synthetic construct
  misc_feature 1..46: note = Probe
  source 1..46: mol_type = other DNA
cctgccacgcgggaggcccgggttcgattcccggccaatgcaagtt

SEQ ID NO: 39216 - DNA, 50 bp, synthetic construct
  misc_feature 1..50: note = Probe
  source 1..50: mol_type = other DNA
cctgccacgcgggaggcccgggttcgattcccggccaatgcaagttttga

SEQ ID NO: 39217 - DNA, 45 bp, synthetic construct
  misc_feature 1..45: note = Probe
  source 1..45: mol_type = other DNA
cctgccacgcgggaggcccgggttcgattcccggccaatgcacga

SEQ ID NO: 39218 - DNA, 46 bp, synthetic construct
  misc_feature 1..46: note = Probe
  source 1..46: mol_type = other DNA
cctgccacgcgggaggcccgggttcgattcccggccaatgcacgag

SEQ ID NO: 39219 - DNA, 50 bp, synthetic construct
  misc_feature 1..50: note = Probe
  source 1..50: mol_type = other DNA
cctgccacgcgggaggcccgggttcgattcccggccaatgcacgagtaca

SEQ ID NO: 39220 - DNA, 45 bp, synthetic construct
  misc_feature 1..45: note = Probe
  source 1..45: mol_type = other DNA
cctgccacgcgggaggcccgggttcgattcccggccaatgcactt

SEQ ID NO: 39221 - DNA, 46 bp, synthetic construct
  misc_feature 1..46: note = Probe
  source 1..46: mol_type = other DNA
cctgccacgcgggaggcccgggttcgattcccggccaatgcacttt

SEQ ID NO: 39222 - DNA, 50 bp, synthetic construct
  misc_feature 1..50: note = Probe
  source 1..50: mol_type = other DNA
cctgccacgcgggaggcccgggttcgattcccggccaatgcactttcatt

SEQ ID NO: 39223 - DNA, 45 bp, synthetic construct
  misc_feature 1..45: note = Probe
  source 1..45: mol_type = other DNA
cctgccacgcgggaggcccgggttcgattcccggccaatgcagca

SEQ ID NO: 39224 - DNA, 50 bp, synthetic construct
  misc_feature 1..50: note = Probe
  source 1..50: mol_type = other DNA
cctgccacgcgggaggcccgggttcgattcccggccaatgcagcagcaga

SEQ ID NO: 39225 - DNA, 50 bp, synthetic construct
  misc_feature 1..50: note = Probe
  source 1..50: mol_type = other DNA
cctgccacgcgggaggcccgggttcgattcccggccaatgcagcagctga

SEQ ID NO: 39226 - DNA, 39 bp, synthetic construct
  misc_feature 1..39: note = Probe
  source 1..39: mol_type = other DNA
cctgccacgcgggaggcccgggttcgattcccggcccat

SEQ ID NO: 39227 - DNA, 42 bp, synthetic construct
  misc_feature 1..42: note = Probe
  source 1..42: mol_type = other DNA
cctgccacgcgggaggcccgggttcgattcccggcccatgca

SEQ ID NO: 39228 - DNA, 45 bp, synthetic construct
  misc_feature 1..45: note = Probe
  source 1..45: mol_type = other DNA
cctgccacgcgggaggcccgggttcgattcccggcccatgcagca

SEQ ID NO: 39229 - DNA, 50 bp, synthetic construct
  misc_feature 1..50: note = Probe
  source 1..50: mol_type = other DNA
cctgccacgcgggaggcccgggttcgattcccggcccatgcagcacgaaa

SEQ ID NO: 39230 - DNA, 50 bp, synthetic construct
  misc_feature 1..50: note = Probe
  source 1..50: mol_type = other DNA
cctgccacgcgggaggcccgggttcgattcccggcccatgcagcacgccc

SEQ ID NO: 39231 - DNA, 25 bp, synthetic construct
  misc_feature 1..25: note = Probe
  source 1..25: mol_type = other DNA
cctggctggctcgcgatgtctgttt

SEQ ID NO: 39232 - DNA, 29 bp, synthetic construct
  misc_feature 1..29: note = Probe
  source 1..29: mol_type = other DNA
cctggctggctcgcttgtgctctcacttt

SEQ ID NO: 39233 - DNA, 26 bp, synthetic construct
  misc_feature 1..26: note = Probe
  source 1..26: mol_type = other DNA
cctggtggtctagtggctaggattcg

SEQ ID NO: 39234 - DNA, 27 bp, synthetic construct
  misc_feature 1..27: note = Probe
  source 1..27: mol_type = other DNA
cctggtggtctagtggctaggattcgg

SEQ ID NO: 39235 - DNA, 24 bp, synthetic construct
  misc_feature 1..24: note = Probe
  source 1..24: mol_type = other DNA
cctggtggtctagtggttaggatt

SEQ ID NO: 39236 - DNA, 26 bp, synthetic construct
  misc_feature 1..26: note = Probe
  source 1..26: mol_type = other DNA
cctggtggtctagtggttaggattcg

SEQ ID NO: 39237 - DNA, 27 bp, synthetic construct
  misc_feature 1..27: note = Probe
  source 1..27: mol_type = other DNA
cctggtggtctagtggttaggattcgg

SEQ ID NO: 39238 - DNA, 50 bp, synthetic construct
  misc_feature 1..50: note = Probe
  source 1..50: mol_type = other DNA
cctggttttcacccaggcggcccgggttcgactcccggtgtgggaacgcc

SEQ ID NO: 39239 - DNA, 18 bp, synthetic construct
  misc_feature 1..18: note = Probe
  source 1..18: mol_type = other DNA
cctgtcacgcgggagacc

SEQ ID NO: 39240 - DNA, 25 bp, synthetic construct
  misc_feature 1..25: note = Probe
  source 1..25: mol_type = other DNA
cctgtcacgcgggagaccggggttc

SEQ ID NO: 39241 - DNA, 35 bp, synthetic construct
  misc_feature 1..35: note = Probe
  source 1..35: mol_type = other DNA
cctgtcacgcgggagaccggggttcaattccccga

SEQ ID NO: 39242 - DNA, 36 bp, synthetic construct
  misc_feature 1..36: note = Probe
  source 1..36: mol_type = other DNA
cctgtcacgcgggagaccggggttcaattccccgac

SEQ ID NO: 39243 - DNA, 43 bp, synthetic construct
  misc_feature 1..43: note = Probe
  source 1..43: mol_type = other DNA
cctgtcacgcgggagaccggggttcaattccccgacggggagg

SEQ ID NO: 39244 - DNA, 45 bp, synthetic construct; identical to SEQ ID NO: 4880
  misc_feature 1..45: note = Probe
  source 1..45: mol_type = other DNA

SEQ ID NO: 39245 - DNA, 50 bp, synthetic construct; identical to SEQ ID NO: 4881
  misc_feature 1..50: note = Probe
  source 1..50: mol_type = other DNA

SEQ ID NO: 39246 - DNA, 27 bp, synthetic construct
  misc_feature 1..27: note = Probe
  source 1..27: mol_type = other DNA
cctgtcacgcgggagaccggggttcga

SEQ ID NO: 39247 - DNA, 29 bp, synthetic construct
  misc_feature 1..29: note = Probe
  source 1..29: mol_type = other DNA
cctgtcacgcgggagaccggggttcgatt

SEQ ID NO: 39248 - DNA, 33 bp, synthetic construct
  misc_feature 1..33: note = Probe
  source 1..33: mol_type = other DNA
cctgtcacgcgggagaccggggttcgattcccc

SEQ ID NO: 39249 - DNA, 34 bp, synthetic construct
  misc_feature 1..34: note = Probe
  source 1..34: mol_type = other DNA
cctgtcacgcgggagaccggggttcgattcccca

SEQ ID NO: 39250 - DNA, 35 bp, synthetic construct
  misc_feature 1..35: note = Probe
  source 1..35: mol_type = other DNA
cctgtcacgcgggagaccggggttcgattccccaa

SEQ ID NO: 39251 - DNA, 41 bp, synthetic construct
  misc_feature 1..41: note = Probe
  source 1..41: mol_type = other DNA
cctgtcacgcgggagaccggggttcgattccccaacgggga

SEQ ID NO: 39252 - DNA, 42 bp, synthetic construct
  misc_feature 1..42: note = Probe
  source 1..42: mol_type = other DNA
cctgtcacgcgggagaccggggttcgattccccaacggggag

SEQ ID NO: 39253 - DNA, 45 bp, synthetic construct
  misc_feature 1..45: note = Probe
  source 1..45: mol_type = other DNA
cctgtcacgcgggagaccggggttcgattccccaacggggaggct

SEQ ID NO: 39254 - DNA, 50 bp, synthetic construct
  misc_feature 1..50: note = Probe
  source 1..50: mol_type = other DNA
cctgtcacgcgggagaccggggttcgattccccaacggggaggctaataa

SEQ ID NO: 39255 - DNA, 34 bp, synthetic construct
  misc_feature 1..34: note = Probe
  source 1..34: mol_type = other DNA
cctgtcacgcgggagaccggggttcgattccccg

SEQ ID NO: 39256 - DNA, 37 bp, synthetic construct
  misc_feature 1..37: note = Probe
  source 1..37: mol_type = other DNA
cctgtcacgcgggagaccggggttcgattccccgacg

SEQ ID NO: 39257 - DNA, 43 bp, synthetic construct; identical to SEQ ID NO: 18830
  misc_feature 1..43: note = Probe
  source 1..43: mol_type = other DNA

SEQ ID NO: 39258 - DNA, 45 bp, synthetic construct; identical to SEQ ID NO: 4883
  misc_feature 1..45: note = Probe
  source 1..45: mol_type = other DNA

SEQ ID NO: 39259 - DNA, 46 bp, synthetic construct
  misc_feature 1..46: note = Probe
  source 1..46: mol_type = other DNA
cctgtcacgcgggagaccggggttcgattccccgacggggagaaaa

SEQ ID NO: 39260 - DNA, 50 bp, synthetic construct; identical to SEQ ID NO: 18832
  misc_feature 1..50: note = Probe
  source 1..50: mol_type = other DNA

SEQ ID NO: 39261 - DNA, 45 bp, synthetic construct; identical to SEQ ID NO: 4885
  misc_feature 1..45: note = Probe
  source 1..45: mol_type = other DNA

SEQ ID NO: 39262 - DNA, 46 bp, synthetic construct
  misc_feature 1..46: note = Probe
  source 1..46: mol_type = other DNA
cctgtcacgcgggagaccggggttcgattccccgacggggagagta

SEQ ID NO: 39263 - DNA, 50 bp, synthetic construct
  misc_feature 1..50: note = Probe
  source 1..50: mol_type = other DNA
cctgtcacgcgggagaccggggttcgattccccgacggggagagtactag

SEQ ID NO: 39264 - DNA, 43 bp, synthetic construct; identical to SEQ ID NO: 18834
  misc_feature 1..43: note = Probe
  source 1..43: mol_type = other DNA

SEQ ID NO: 39265 - DNA, 45 bp, synthetic construct
  misc_feature 1..45: note = Probe
  source 1..45: mol_type = other DNA
cctgtcacgcgggagaccggggttcgattccccgacggggaggag

SEQ ID NO: 39266 - DNA, 46 bp, synthetic construct
  misc_feature 1..46: note = Probe
  source 1..46: mol_type = other DNA
cctgtcacgcgggagaccggggttcgattccccgacggggaggagg

SEQ ID NO: 39267 - DNA, 50 bp, synthetic construct
  misc_feature 1..50: note = Probe
  source 1..50: mol_type = other DNA
cctgtcacgcgggagaccggggttcgattccccgacggggaggaggctta

SEQ ID NO: 39268 - DNA, 45 bp, synthetic construct; identical to SEQ ID NO: 4886
  misc_feature 1..45: note = Probe
  source 1..45: mol_type = other DNA

SEQ ID NO: 39269 - DNA, 46 bp, synthetic construct
  misc_feature 1..46: note = Probe
  source 1..46: mol_type = other DNA
cctgtcacgcgggagaccggggttcgattccccgacggggaggcac

SEQ ID NO: 39270 - DNA, 50 bp, synthetic construct; identical to SEQ ID NO: 4889
  misc_feature 1..50: note = Probe
  source 1..50: mol_type = other DNA

SEQ ID NO: 39271 - DNA, 46 bp, synthetic construct
  misc_feature 1..46: note = Probe
  source 1..46: mol_type = other DNA
cctgtcacgcgggagaccggggttcgattccccgacggggaggcag

SEQ ID NO: 39272 - DNA, 50 bp, synthetic construct; identical to SEQ ID NO: 18839
  misc_feature 1..50: note = Probe
  source 1..50: mol_type = other DNA

SEQ ID NO: 39273 - DNA, 45 bp, synthetic construct; identical to SEQ ID NO: 4890
  misc_feature 1..45: note = Probe
  source 1..45: mol_type = other DNA

SEQ ID NO: 39274 - DNA, 46 bp, synthetic construct
  misc_feature 1..46: note = Probe
  source 1..46: mol_type = other DNA
cctgtcacgcgggagaccggggttcgattccccgacggggaggcca

SEQ ID NO: 39275 - DNA, 50 bp, synthetic construct; identical to SEQ ID NO: 18841
  misc_feature 1..50: note = Probe
  source 1..50: mol_type = other DNA

SEQ ID NO: 39276 - DNA, 46 bp, synthetic construct
  misc_feature 1..46: note = Probe
  source 1..46: mol_type = other DNA
cctgtcacgcgggagaccggggttcgattccccgacggggaggccg

SEQ ID NO: 39277 - DNA, 50 bp, synthetic construct; identical to SEQ ID NO: 4891
  misc_feature 1..50: note = Probe
  source 1..50: mol_type = other DNA

SEQ ID NO: 39278 - DNA, 17 bp, synthetic construct
  misc_feature 1..17: note = Probe
  source 1..17: mol_type = other DNA
cctgttggcttactttt

SEQ ID NO: 39279 - DNA, 18 bp, synthetic construct
  misc_feature 1..18: note = Probe
  source 1..18: mol_type = other DNA
ccttccaagcagttgacc

SEQ ID NO: 39280 - DNA, 25 bp, synthetic construct
  misc_feature 1..25: note = Probe
  source 1..25: mol_type = other DNA
ccttccaagcagttgacccgggttc

SEQ ID NO: 39281 - DNA, 32 bp, synthetic construct
  misc_feature 1..32: note = Probe
  source 1..32: mol_type = other DNA
ccttccaagcagttgacccgggttcgattccc

SEQ ID NO: 39282 - DNA, 33 bp, synthetic construct
  misc_feature 1..33: note = Probe
  source 1..33: mol_type = other DNA
ccttccaagcagttgacccgggttcgattcccg

SEQ ID NO: 39283 - DNA, 34 bp, synthetic construct
  misc_feature 1..34: note = Probe
  source 1..34: mol_type = other DNA
ccttccaagcagttgacccgggttcgattcccgg

SEQ ID NO: 39284 - DNA, 36 bp, synthetic construct
  misc_feature 1..36: note = Probe
  source 1..36: mol_type = other DNA
ccttccaagcagttgacccgggttcgattcccggcc

SEQ ID NO: 39285 - DNA, 37 bp, synthetic construct
  misc_feature 1..37: note = Probe
  source 1..37: mol_type = other DNA
ccttccaagcagttgacccgggttcgattcccggcca

SEQ ID NO: 39286 - DNA, 38 bp, synthetic construct
  misc_feature 1..38: note = Probe
  source 1..38: mol_type = other DNA
ccttccaagcagttgacccgggttcgattcccggccaa

SEQ ID NO: 39287 - DNA, 49 bp, synthetic construct
  misc_feature 1..49: note = Probe
  source 1..49: mol_type = other DNA
ccttccaagcagttgacccgggttcgattcccggccaacgcaagggttt

SEQ ID NO: 39288 - DNA, 50 bp, synthetic construct
  misc_feature 1..50: note = Probe
  source 1..50: mol_type = other DNA
ccttccaagcagttgacccgggttcgattcccggccaacgcaagggtttt

SEQ ID NO: 39289 - DNA, 45 bp, synthetic construct
  misc_feature 1..45: note = Probe
  source 1..45: mol_type = other DNA
ccttccaagcagttgacccgggttcgattcccggccaacgcaagt

SEQ ID NO: 39290 - DNA, 49 bp, synthetic construct
  misc_feature 1..49: note = Probe
  source 1..49: mol_type = other DNA
ccttccaagcagttgacccgggttcgattcccggccaacgcaagtcgtt

SEQ ID NO: 39291 - DNA, 50 bp, synthetic construct
  misc_feature 1..50: note = Probe
  source 1..50: mol_type = other DNA
ccttccaagcagttgacccgggttcgattcccggccaacgcaagtcgttt

SEQ ID NO: 39292 - DNA, 45 bp, synthetic construct
  misc_feature 1..45: note = Probe
  source 1..45: mol_type = other DNA
ccttccaagcagttgacccgggttcgattcccggccaacgcagcg

SEQ ID NO: 39293 - DNA, 50 bp, synthetic construct
  misc_feature 1..50: note = Probe
  source 1..50: mol_type = other DNA
ccttccaagcagttgacccgggttcgattcccggccaacgcagcgggcgg

SEQ ID NO: 39294 - DNA, 45 bp, synthetic construct
  misc_feature 1..45: note = Probe
  source 1..45: mol_type = other DNA
ccttccaagcagttgacccgggttcgattcccggccaacgcagtg

SEQ ID NO: 39295 - DNA, 50 bp, synthetic construct
  misc_feature 1..50: note = Probe
  source 1..50: mol_type = other DNA
ccttccaagcagttgacccgggttcgattcccggccaacgcagtgtcagt

SEQ ID NO: 39296 - DNA, 45 bp, synthetic construct
  misc_feature 1..45: note = Probe
  source 1..45: mol_type = other DNA
ccttccaagcagttgacccgggttcgattcccggccaacgcatgc

SEQ ID NO: 39297 - DNA, 50 bp, synthetic construct
  misc_feature 1..50: note = Probe
  source 1..50: mol_type = other DNA
ccttccaagcagttgacccgggttcgattcccggccaacgcatgcggtac

SEQ ID NO: 39298 - DNA, 25 bp, synthetic construct
  misc_feature 1..25: note = Probe
  source 1..25: mol_type = other DNA
ccttcctgtcccgtacggtttttct

SEQ ID NO: 39299 - DNA, 25 bp, synthetic construct
  misc_feature 1..25: note = Probe
  source 1..25: mol_type = other DNA
ccttcgttggctctgcctgccaact

SEQ ID NO: 39300 - DNA, 28 bp, synthetic construct
  misc_feature 1..28: note = Probe
  source 1..28: mol_type = other DNA
ccttggtggtctagtggctaggattcgg

SEQ ID NO: 39301 - DNA, 21 bp, synthetic construct
  misc_feature 1..21: note = Probe
  source 1..21: mol_type = other DNA
cctttcaagcagttaacgcgg

SEQ ID NO: 39302 - DNA, 23 bp, synthetic construct
  misc_feature 1..23: note = Probe
  source 1..23: mol_type = other DNA
cctttcaagcagttaacgcgggt

SEQ ID NO: 39303 - DNA, 29 bp, synthetic construct
  misc_feature 1..29: note = Probe
  source 1..29: mol_type = other DNA
cctttcaagcagttaacgcgggttcgatt

SEQ ID NO: 39304 - DNA, 34 bp, synthetic construct
  misc_feature 1..34: note = Probe
  source 1..34: mol_type = other DNA
cctttcaagcagttaacgcgggttcgattcccgg

SEQ ID NO: 39305 - DNA, 50 bp, synthetic construct
  misc_feature 1..50: note = Probe
  source 1..50: mol_type = other DNA
cctttcaagcagttaacgcgggttcgattcccgggtaacgaaacgttttt

SEQ ID NO: 39306 - DNA, 50 bp, synthetic construct; identical to SEQ ID NO: 4905
  misc_feature 1..50: note = Probe
  source 1..50: mol_type = other DNA

SEQ ID NO: 39307 - DNA, 24 bp, synthetic construct
  misc_feature 1..24: note = Probe
  source 1..24: mol_type = other DNA
ccttttttcccggcggcgggagaa

SEQ ID NO: 39308 - DNA, 28 bp, synthetic construct
  misc_feature 1..28: note = Probe
  source 1..28: mol_type = other DNA
cgaaaccatcctctgctatcggagtttt

SEQ ID NO: 39309 - DNA, 29 bp, synthetic construct
  misc_feature 1..29: note = Probe
  source 1..29: mol_type = other DNA
cgaaaccatcctctgctatcggagttttt

SEQ ID NO: 39310 - DNA, 30 bp, synthetic construct
  misc_feature 1..30: note = Probe
  source 1..30: mol_type = other DNA
cgaaaccatcctctgctatcggagtttttt

SEQ ID NO: 39311 - DNA, 18 bp, synthetic construct
  misc_feature 1..18: note = Probe
  source 1..18: mol_type = other DNA
cgaaaggtccccggttcg

SEQ ID NO: 39312 - DNA, 31 bp, synthetic construct
  misc_feature 1..31: note = Probe
  source 1..31: mol_type = other DNA
cgaaaggtccccggttcgaaaccgggcggaa

SEQ ID NO: 39313 - DNA, 28 bp, synthetic construct
  misc_feature 1..28: note = Probe
  source 1..28: mol_type = other DNA
cgaacctcagagggggcagctgccattt

SEQ ID NO: 39314 - DNA, 28 bp, synthetic construct
  misc_feature 1..28: note = Probe
  source 1..28: mol_type = other DNA
cgaagaagcagcttcaaacctgccgggg

SEQ ID NO: 39315 - DNA, 30 bp, synthetic construct; identical to SEQ ID NO: 4930
  misc_feature 1..30: note = Probe
  source 1..30: mol_type = other DNA

SEQ ID NO: 39316 - DNA, 34 bp, synthetic construct; identical to SEQ ID NO: 4934
  misc_feature 1..34: note = Probe
  source 1..34: mol_type = other DNA

SEQ ID NO: 39317 - DNA, 21 bp, synthetic construct
  misc_feature 1..21: note = Probe
  source 1..21: mol_type = other DNA
cgaatcccagcggtgcctccg

SEQ ID NO: 39318 - DNA, 35 bp, synthetic construct
  misc_feature 1..35: note = Probe
  source 1..35: mol_type = other DNA
cgaatcccatcctcgtcgatgtggtggcttacttt

SEQ ID NO: 39319 - DNA, 37 bp, synthetic construct; identical to SEQ ID NO: 4944
  misc_feature 1..37: note = Probe
  source 1..37: mol_type = other DNA

SEQ ID NO: 39320 - DNA, 30 bp, synthetic construct; identical to SEQ ID NO: 18938
  misc_feature 1..30: note = Probe
  source 1..30: mol_type = other DNA

SEQ ID NO: 39321 - DNA, 32 bp, synthetic construct; identical to SEQ ID NO: 18941
  misc_feature 1..32: note = Probe
  source 1..32: mol_type = other DNA

SEQ ID NO: 39322 - DNA, 33 bp, synthetic construct
  misc_feature 1..33: note = Probe
  source 1..33: mol_type = other DNA
cgagaggtcccgggttcaaatcccggacgagcc

SEQ ID NO: 39323 - DNA, 37 bp, synthetic construct
  misc_feature 1..37: note = Probe
  source 1..37: mol_type = other DNA
cgagccccagtggaaccacggcgtgattcataccttt

SEQ ID NO: 39324 - DNA, 29 bp, synthetic construct
  misc_feature 1..29: note = Probe
  source 1..29: mol_type = other DNA
cgagcctcacacggggcagtctaacgttt

SEQ ID NO: 39325 - DNA, 23 bp, synthetic construct
  misc_feature 1..23: note = Probe
  source 1..23: mol_type = other DNA
cgaggtccctggttcaatccctg

SEQ ID NO: 39326 - DNA, 18 bp, synthetic construct
  misc_feature 1..18: note = Probe
  source 1..18: mol_type = other DNA
cgagtcccttcgtggtcg

SEQ ID NO: 39327 - DNA, 24 bp, synthetic construct
  misc_feature 1..24: note = Probe
  source 1..24: mol_type = other DNA
cgagtcccttcgtggtcgtcgttt

SEQ ID NO: 39328 - DNA, 21 bp, synthetic construct
  misc_feature 1..21: note = Probe
  source 1..21: mol_type = other DNA
cgagtggtctaaggcgccaga

SEQ ID NO: 39329 - DNA, 21 bp, synthetic construct
  misc_feature 1..21: note = Probe
  source 1..21: mol_type = other DNA
cgatccccagtacctccaggc

SEQ ID NO: 39330 - DNA, 21 bp, synthetic construct
  misc_feature 1..21: note = Probe
  source 1..21: mol_type = other DNA
cgatccccggcatctccattg

SEQ ID NO: 39331 - DNA, 27 bp, synthetic construct
  misc_feature 1..27: note = Probe
  source 1..27: mol_type = other DNA
cgatccgagttcaaatctcggtggaac

SEQ ID NO: 39332 - DNA, 28 bp, synthetic construct
  misc_feature 1..28: note = Probe
  source 1..28: mol_type = other DNA
cgatccgagttcaaatctcggtggaacc

SEQ ID NO: 39333 - DNA, 32 bp, synthetic construct; identical to SEQ ID NO: 4954
  misc_feature 1..32: note = Probe
  source 1..32: mol_type = other DNA

SEQ ID NO: 39334 - DNA, 32 bp, synthetic construct
  misc_feature 1..32: note = Probe
  source 1..32: mol_type = other DNA
cgatccgagttcaaatctcggtgggacctcac

SEQ ID NO: 39335 - DNA, 28 bp, synthetic construct
  misc_feature 1..28: note = Probe
  source 1..28: mol_type = other DNA
cgatccgagttcaagtctcggtggaacc

SEQ ID NO: 39336 - DNA, 21 bp, synthetic construct
  misc_feature 1..21: note = Probe
  source 1..21: mol_type = other DNA
cgattccccgacggggaggca

SEQ ID NO: 39337 - DNA, 21 bp, synthetic construct
  misc_feature 1..21: note = Probe
  source 1..21: mol_type = other DNA
cgattcccggtcagggaacaa

SEQ ID NO: 39338 - DNA, 21 bp, synthetic construct
  misc_feature 1..21: note = Probe
  source 1..21: mol_type = other DNA
cgattcccggtcatggaacca

SEQ ID NO: 39339 - DNA, 21 bp, synthetic construct
  misc_feature 1..21: note = Probe
  source 1..21: mol_type = other DNA
cgattcctggtcagggaacca

SEQ ID NO: 39340 - DNA, 26 bp, synthetic construct
  misc_feature 1..26: note = Probe
  source 1..26: mol_type = other DNA
cgcagaaggtcctgggttcgagcccc

SEQ ID NO: 39341 - DNA, 32 bp, synthetic construct; identical to SEQ ID NO: 4969
  misc_feature 1..32: note = Probe
  source 1..32: mol_type = other DNA

SEQ ID NO: 39342 - DNA, 37 bp, synthetic construct; identical to SEQ ID NO: 4972
  misc_feature 1..37: note = Probe
  source 1..37: mol_type = other DNA

SEQ ID NO: 39343 - DNA, 37 bp, synthetic construct; identical to SEQ ID NO: 4973
  misc_feature 1..37: note = Probe
  source 1..37: mol_type = other DNA

SEQ ID NO: 39344 - DNA, 50 bp, synthetic construct
  misc_feature 1..50: note = Probe
  source 1..50: mol_type = other DNA
cgcatgcttcgcatgtacgaggtccctggttcaatccctggtacctccat

SEQ ID NO: 39345 - DNA, 30 bp, synthetic construct
  misc_feature 1..30: note = Probe
  source 1..30: mol_type = other DNA
cgcattggtggttcagtggtagaattctcg

SEQ ID NO: 39346 - DNA, 32 bp, synthetic construct
  misc_feature 1..32: note = Probe
  source 1..32: mol_type = other DNA
cgcccggctagctcagtcggtagagcatggga

SEQ ID NO: 39347 - DNA, 31 bp, synthetic construct; identical to SEQ ID NO: 19061
  misc_feature 1..31: note = Probe
  source 1..31: mol_type = other DNA

SEQ ID NO: 39348 - DNA, 34 bp, synthetic construct; identical to SEQ ID NO: 19062
  misc_feature 1..34: note = Probe
  source 1..34: mol_type = other DNA

SEQ ID NO: 39349 - DNA, 37 bp, synthetic construct; identical to SEQ ID NO: 4990
  misc_feature 1..37: note = Probe
  source 1..37: mol_type = other DNA

SEQ ID NO: 39350 - DNA, 27 bp, synthetic construct
  misc_feature 1..27: note = Probe
  source 1..27: mol_type = other DNA
cgccgctggtgtagtggtatcatgcaa

SEQ ID NO: 39351 - DNA, 30 bp, synthetic construct; identical to SEQ ID NO: 9798
  misc_feature 1..30: note = Probe
  source 1..30: mol_type = other DNA

SEQ ID NO: 39352 - DNA, 31 bp, synthetic construct; identical to SEQ ID NO: 19077
  misc_feature 1..31: note = Probe
  source 1..31: mol_type = other DNA

SEQ ID NO: 39353 - DNA, 32 bp, synthetic construct; identical to SEQ ID NO: 4998
  misc_feature 1..32: note = Probe
  source 1..32: mol_type = other DNA

SEQ ID NO: 39354 - DNA, 35 bp, synthetic construct; identical to SEQ ID NO: 5001
  misc_feature 1..35: note = Probe
  source 1..35: mol_type = other DNA

SEQ ID NO: 39355 - DNA, 36 bp, synthetic construct; identical to SEQ ID NO: 5002
  misc_feature 1..36: note = Probe
  source 1..36: mol_type = other DNA

SEQ ID NO: 39356 - DNA, 27 bp, synthetic construct
  misc_feature 1..27: note = Probe
  source 1..27: mol_type = other DNA
cgcctgtcacgcgggagaccggggttc

SEQ ID NO: 39357 - DNA, 50 bp, synthetic construct; identical to SEQ ID NO: 5005
  misc_feature 1..50: note = Probe
  source 1..50: mol_type = other DNA

SEQ ID NO: 39358 - DNA, 44 bp, synthetic construct; identical to SEQ ID NO: 5006
  misc_feature 1..44: note = Probe
  source 1..44: mol_type = other DNA

SEQ ID NO: 39359 - DNA, 50 bp, synthetic construct; identical to SEQ ID NO: 5007
  misc_feature 1..50: note = Probe
  source 1..50: mol_type = other DNA

SEQ ID NO: 39360 - DNA, 33 bp, synthetic construct; identical to SEQ ID NO: 13125
  misc_feature 1..33: note = Probe
  source 1..33: mol_type = other DNA

SEQ ID NO: 39361 - DNA, 33 bp, synthetic construct; identical to SEQ ID NO: 19126
  misc_feature 1..33: note = Probe
  source 1..33: mol_type = other DNA

SEQ ID NO: 39362 - DNA, 23 bp, synthetic construct
  misc_feature 1..23: note = Probe
  source 1..23: mol_type = other DNA
cgcgcaggttcaaatcctgctca

SEQ ID NO: 39363 - DNA, 24 bp, synthetic construct
  misc_feature 1..24: note = Probe
  source 1..24: mol_type = other DNA
cgcgcaggttcaaatcctgctcac

SEQ ID NO: 39364 - DNA, 25 bp, synthetic construct
  misc_feature 1..25: note = Probe
  source 1..25: mol_type = other DNA
cgcgcaggttcaaatcctgctcaca

SEQ ID NO: 39365 - DNA, 26 bp, synthetic construct
  misc_feature 1..26: note = Probe
  source 1..26: mol_type = other DNA
cgcgcaggttcaaatcctgctcacag

SEQ ID NO: 39366 - DNA, 32 bp, synthetic construct
  misc_feature 1..32: note = Probe
  source 1..32: mol_type = other DNA
cgcgcattggtggttcagtggtagaattctcg

SEQ ID NO: 39367 - DNA, 35 bp, synthetic construct; identical to SEQ ID NO: 30388
  misc_feature 1..35: note = Probe
  source 1..35: mol_type = other DNA

SEQ ID NO: 39368 - DNA, 28 bp, synthetic construct
  misc_feature 1..28: note = Probe
  source 1..28: mol_type = other DNA
cgcggcccgggttcgattcccggtcagg

SEQ ID NO: 39369 - DNA, 31 bp, synthetic construct; identical to SEQ ID NO: 19132
  misc_feature 1..31: note = Probe
  source 1..31: mol_type = other DNA

SEQ ID NO: 39370 - DNA, 34 bp, synthetic construct; identical to SEQ ID NO: 5022
  misc_feature 1..34: note = Probe
  source 1..34: mol_type = other DNA

SEQ ID NO: 39371 - DNA, 32 bp, synthetic construct; identical to SEQ ID NO: 19140
  misc_feature 1..32: note = Probe
  source 1..32: mol_type = other DNA

SEQ ID NO: 39372 - DNA, 33 bp, synthetic construct
  misc_feature 1..33: note = Probe
  source 1..33: mol_type = other DNA
cgcgggagacccgggttcaattcccggccaatg

SEQ ID NO: 39373 - DNA, 34 bp, synthetic construct
  misc_feature 1..34: note = Probe
  source 1..34: mol_type = other DNA
cgcgggagacccgggttcaattcccggccaatgc

SEQ ID NO: 39374 - DNA, 28 bp, synthetic construct
  misc_feature 1..28: note = Probe
  source 1..28: mol_type = other DNA
cgcgggagaccggggttcaattccccga

SEQ ID NO: 39375 - DNA, 29 bp, synthetic construct
  misc_feature 1..29: note = Probe
  source 1..29: mol_type = other DNA
cgcgggagaccggggttcaattccccgac

SEQ ID NO: 39376 - DNA, 31 bp, synthetic construct; identical to SEQ ID NO: 5024
  misc_feature 1..31: note = Probe
  source 1..31: mol_type = other DNA

SEQ ID NO: 39377 - DNA, 36 bp, synthetic construct; identical to SEQ ID NO: 5025
  misc_feature 1..36: note = Probe
  source 1..36: mol_type = other DNA

SEQ ID NO: 39378 - DNA, 38 bp, synthetic construct; identical to SEQ ID NO: 5026
  misc_feature 1..38: note = Probe
  source 1..38: mol_type = other DNA

SEQ ID NO: 39379 - DNA, 22 bp, synthetic construct
  misc_feature 1..22: note = Probe
  source 1..22: mol_type = other DNA
cgcgggagaccggggttcgatt

SEQ ID NO: 39380 - DNA, 26 bp, synthetic construct
  misc_feature 1..26: note = Probe
  source 1..26: mol_type = other DNA
cgcgggagaccggggttcgattcccc

SEQ ID NO: 39381 - DNA, 27 bp, synthetic construct
  misc_feature 1..27: note = Probe
  source 1..27: mol_type = other DNA
cgcgggagaccggggttcgattcccca

SEQ ID NO: 39382 - DNA, 28 bp, synthetic construct
  misc_feature 1..28: note = Probe
  source 1..28: mol_type = other DNA
cgcgggagaccggggttcgattccccaa

SEQ ID NO: 39383 - DNA, 32 bp, synthetic construct; identical to SEQ ID NO: 13137
  misc_feature 1..32: note = Probe
  source 1..32: mol_type = other DNA

SEQ ID NO: 39384 - DNA, 33 bp, synthetic construct; identical to SEQ ID NO: 19149
  misc_feature 1..33: note = Probe
  source 1..33: mol_type = other DNA

SEQ ID NO: 39385 - DNA, 35 bp, synthetic construct; identical to SEQ ID NO: 19150
  misc_feature 1..35: note = Probe
  source 1..35: mol_type = other DNA

SEQ ID NO: 39386 - DNA, 27 bp, synthetic construct
  misc_feature 1..27: note = Probe
  source 1..27: mol_type = other DNA
cgcgggagaccggggttcgattccccg

SEQ ID NO: 39387 - DNA, 36 bp, synthetic construct; identical to SEQ ID NO: 5028
  misc_feature 1..36: note = Probe
  source 1..36: mol_type = other DNA

SEQ ID NO: 39388 - DNA, 45 bp, synthetic construct
  misc_feature 1..45: note = Probe
  source 1..45: mol_type = other DNA
cgcgggagaccggggttcgattccccgacggggagaaaagttgct

SEQ ID NO: 39389 - DNA, 36 bp, synthetic construct; identical to SEQ ID NO: 5034
  misc_feature 1..36: note = Probe
  source 1..36: mol_type = other DNA

SEQ ID NO: 39390 - DNA, 38 bp, synthetic construct; identical to SEQ ID NO: 19162
  misc_feature 1..38: note = Probe
  source 1..38: mol_type = other DNA

SEQ ID NO: 39391 - DNA, 45 bp, synthetic construct
  misc_feature 1..45: note = Probe
  source 1..45: mol_type = other DNA
cgcgggagaccggggttcgattccccgacggggaggaggcttaaa

SEQ ID NO: 39392 - DNA, 50 bp, synthetic construct
  misc_feature 1..50: note = Probe
  source 1..50: mol_type = other DNA
cgcgggagaccggggttcgattccccgacggggaggaggcttaaactttt

SEQ ID NO: 39393 - DNA, 38 bp, synthetic construct; identical to SEQ ID NO: 5037
  misc_feature 1..38: note = Probe
  source 1..38: mol_type = other DNA

SEQ ID NO: 39394 - DNA, 41 bp, synthetic construct; identical to SEQ ID NO: 19169
  misc_feature 1..41: note = Probe
  source 1..41: mol_type = other DNA

SEQ ID NO: 39395 - DNA, 50 bp, synthetic construct
  misc_feature 1..50: note = Probe
  source 1..50: mol_type = other DNA
cgcgggagaccggggttcgattccccgacggggaggccgggtactttcgt

SEQ ID NO: 39396 - DNA, 32 bp, synthetic construct; identical to SEQ ID NO: 19170
  misc_feature 1..32: note = Probe
  source 1..32: mol_type = other DNA

SEQ ID NO: 39397 - DNA, 35 bp, synthetic construct; identical to SEQ ID NO: 13149
  misc_feature 1..35: note = Probe
  source 1..35: mol_type = other DNA

SEQ ID NO: 39398 - DNA, 35 bp, synthetic construct; identical to SEQ ID NO: 13150
  misc_feature 1..35: note = Probe
  source 1..35: mol_type = other DNA

SEQ ID NO: 39399 - DNA, 34 bp, synthetic construct
  misc_feature 1..34: note = Probe
  source 1..34: mol_type = other DNA
cgcggtggggattctggtctccaatggaggcgtg

SEQ ID NO: 39400 - DNA, 50 bp, synthetic construct
  misc_feature 1..50: note = Probe
  source 1..50: mol_type = other DNA
cgcggtggggattctggtctccaatggaggcgtgggttcgaatcccactt

SEQ ID NO: 39401 - DNA, 50 bp, synthetic construct
  misc_feature 1..50: note = Probe
  source 1..50: mol_type = other DNA
cgcgtcagtctcataatctgaaggtcctgagttcgaacctcagagggggc

SEQ ID NO: 39402 - DNA, 25 bp, synthetic construct
  misc_feature 1..25: note = Probe
  source 1..25: mol_type = other DNA
cgcgtgggttcgaatcccatcctcg

SEQ ID NO: 39403 - DNA, 26 bp, synthetic construct
  misc_feature 1..26: note = Probe
  source 1..26: mol_type = other DNA
cgcgtgggttcgaatcccatcctcgt

SEQ ID NO: 39404 - DNA, 27 bp, synthetic construct
  misc_feature 1..27: note = Probe
  source 1..27: mol_type = other DNA
cgcgtgggttcgaatcccatcctcgtc

SEQ ID NO: 39405 - DNA, 30 bp, synthetic construct
  misc_feature 1..30: note = Probe
  source 1..30: mol_type = other DNA
cgcgttggtggtatagtggtgagcatagct

SEQ ID NO: 39406 - DNA, 31 bp, synthetic construct
  misc_feature 1..31: note = Probe
  source 1..31: mol_type = other DNA
cgcgttggtggtatagtggtgagcatagctg

SEQ ID NO: 39407 - DNA, 50 bp, synthetic construct
  misc_feature 1..50: note = Probe
  source 1..50: mol_type = other DNA
cgctctcaccgccgcggcccgggttcgattcccggtcaggaaagtaagcc

SEQ ID NO: 39408 - DNA, 41 bp, synthetic construct
  misc_feature 1..41: note = Probe
  source 1..41: mol_type = other DNA
cgctctcaccgccgcggcccgggttcgattcccggtcaggg

SEQ ID NO: 39409 - DNA, 43 bp, synthetic construct
  misc_feature 1..43: note = Probe
  source 1..43: mol_type = other DNA
cgctctcaccgccgcggcccgggttcgattcccggtcagggaa

SEQ ID NO: 39410 - DNA, 44 bp, synthetic construct
  misc_feature 1..44: note = Probe
  source 1..44: mol_type = other DNA
cgctctcaccgccgcggcccgggttcgattcccggtcagggaaa

SEQ ID NO: 39411 - DNA, 46 bp, synthetic construct; identical to SEQ ID NO: 30418
  misc_feature 1..46: note = Probe
  source 1..46: mol_type = other DNA

SEQ ID NO: 39412 - DNA, 50 bp, synthetic construct
  misc_feature 1..50: note = Probe
  source 1..50: mol_type = other DNA
cgctctcaccgccgcggcccgggttcgattcccggtcagggaaagagtaa

SEQ ID NO: 39413 - DNA, 44 bp, synthetic construct
  misc_feature 1..44: note = Probe
  source 1..44: mol_type = other DNA
cgctctcaccgccgcggcccgggttcgattcccggtcagggaag

SEQ ID NO: 39414 - DNA, 45 bp, synthetic construct
  misc_feature 1..45: note = Probe
  source 1..45: mol_type = other DNA
cgctctcaccgccgcggcccgggttcgattcccggtcagggaagc

SEQ ID NO: 39415 - DNA, 46 bp, synthetic construct; identical to SEQ ID NO: 19193
  misc_feature 1..46: note = Probe
  source 1..46: mol_type = other DNA

SEQ ID NO: 39416 - DNA, 50 bp, synthetic construct
  misc_feature 1..50: note = Probe
  source 1..50: mol_type = other DNA
cgctctcaccgccgcggcccgggttcgattcccggtcagggaagccttcc

SEQ ID NO: 39417 - DNA, 46 bp, synthetic construct; identical to SEQ ID NO: 19194
  misc_feature 1..46: note = Probe
  source 1..46: mol_type = other DNA

SEQ ID NO: 39418 - DNA, 49 bp, synthetic construct
  misc_feature 1..49: note = Probe
  source 1..49: mol_type = other DNA
cgctctcaccgccgcggcccgggttcgattcccggtcagggaagtcttg

SEQ ID NO: 39419 - DNA, 50 bp, synthetic construct
  misc_feature 1..50: note = Probe
  source 1..50: mol_type = other DNA
cgctctcaccgccgcggcccgggttcgattcccggtcagggaagtcttgt

SEQ ID NO: 39420 - DNA, 44 bp, synthetic construct
  misc_feature 1..44: note = Probe
  source 1..44: mol_type = other DNA
cgctctcaccgccgcggcccgggttcgattcccggtcagggaat

SEQ ID NO: 39421 - DNA, 46 bp, synthetic construct; identical to SEQ ID NO: 30420
  misc_feature 1..46: note = Probe
  source 1..46: mol_type = other DNA

SEQ ID NO: 39422 - DNA, 49 bp, synthetic construct
  misc_feature 1..49: note = Probe
  source 1..49: mol_type = other DNA
cgctctcaccgccgcggcccgggttcgattcccggtcagggaatgaggt

SEQ ID NO: 39423 - DNA, 50 bp, synthetic construct
  misc_feature 1..50: note = Probe
  source 1..50: mol_type = other DNA
cgctctcaccgccgcggcccgggttcgattcccggtcagggaatgaggtt

SEQ ID NO: 39424 - DNA, 29 bp, synthetic construct
  misc_feature 1..29: note = Probe
  source 1..29: mol_type = other DNA
cgctgccacacctcagaaggtctcacttt

SEQ ID NO: 39425 - DNA, 30 bp, synthetic construct; identical to SEQ ID NO: 19196
  misc_feature 1..30: note = Probe
  source 1..30: mol_type = other DNA

SEQ ID NO: 39426 - DNA, 42 bp, synthetic construct
  misc_feature 1..42: note = Probe
  source 1..42: mol_type = other DNA
cgctttcaccgccgcggcccgggttcgattcccggtcaggga

SEQ ID NO: 39427 - DNA, 49 bp, synthetic construct
  misc_feature 1..49: note = Probe
  source 1..49: mol_type = other DNA
cgctttcaccgccgcggcccgggttcgattcccggtcagggaagtttgc

SEQ ID NO: 39428 - DNA, 50 bp, synthetic construct
  misc_feature 1..50: note = Probe
  source 1..50: mol_type = other DNA
cgctttcaccgccgcggcccgggttcgattcccggtcagggaagtttgct

SEQ ID NO: 39429 - DNA, 46 bp, synthetic construct
  misc_feature 1..46: note = Probe
  source 1..46: mol_type = other DNA
cgctttcaccgccgcggcccgggttcgattcccggtcagggaattg

SEQ ID NO: 39430 - DNA, 50 bp, synthetic construct
  misc_feature 1..50: note = Probe
  source 1..50: mol_type = other DNA
cgctttcaccgccgcggcccgggttcgattcccggtcagggaattgtttt

SEQ ID NO: 39431 - DNA, 25 bp, synthetic construct
  misc_feature 1..25: note = Probe
  source 1..25: mol_type = other DNA
cggaaacacactaaaaaatcccttt

SEQ ID NO: 39432 - DNA, 26 bp, synthetic construct
  misc_feature 1..26: note = Probe
  source 1..26: mol_type = other DNA
cggaaacacactaaaaaatccctttt

SEQ ID NO: 39433 - DNA, 19 bp, synthetic construct
  misc_feature 1..19: note = Probe
  source 1..19: mol_type = other DNA
cggaagcgggtgctcttat

SEQ ID NO: 39434 - DNA, 20 bp, synthetic construct
  misc_feature 1..20: note = Probe
  source 1..20: mol_type = other DNA
cggaagcgggtgctcttatt

SEQ ID NO: 39435 - DNA, 21 bp, synthetic construct
  misc_feature 1..21: note = Probe
  source 1..21: mol_type = other DNA
cggaagcgggtgctcttattt

SEQ ID NO: 39436 - DNA, 22 bp, synthetic construct
  misc_feature 1..22: note = Probe
  source 1..22: mol_type = other DNA
cggaagcgggtgctcttatttt

SEQ ID NO: 39437 - DNA, 18 bp, synthetic construct
  misc_feature 1..18: note = Probe
  source 1..18: mol_type = other DNA
cggaagcgtgctgggccc

SEQ ID NO: 39438 - DNA, 35 bp, synthetic construct; identical to SEQ ID NO: 748
  misc_feature 1..35: note = Probe
  source 1..35: mol_type = other DNA

SEQ ID NO: 39439 - DNA, 36 bp, synthetic construct; identical to SEQ ID NO: 749
  misc_feature 1..36: note = Probe
  source 1..36: mol_type = other DNA

SEQ ID NO: 39440 - DNA, 38 bp, synthetic construct; identical to SEQ ID NO: 751
  misc_feature 1..38: note = Probe
  source 1..38: mol_type = other DNA

SEQ ID NO: 39441 - DNA, 30 bp, synthetic construct; identical to SEQ ID NO: 5060
  misc_feature 1..30: note = Probe
  source 1..30: mol_type = other DNA

SEQ ID NO: 39442 - DNA, 31 bp, synthetic construct; identical to SEQ ID NO: 5061
  misc_feature 1..31: note = Probe
  source 1..31: mol_type = other DNA

SEQ ID NO: 39443 - DNA, 18 bp, synthetic construct
  misc_feature 1..18: note = Probe
  source 1..18: mol_type = other DNA
cggagctggggattgtgg

SEQ ID NO: 39444 - DNA, 27 bp, synthetic construct
  misc_feature 1..27: note = Probe
  source 1..27: mol_type = other DNA
cggatagctcagtcggtagagcatcag

SEQ ID NO: 39445 - DNA, 29 bp, synthetic construct
  misc_feature 1..29: note = Probe
  source 1..29: mol_type = other DNA
cggatagctcagtcggtagagcatcagac

SEQ ID NO: 39446 - DNA, 32 bp, synthetic construct; identical to SEQ ID NO: 764
  misc_feature 1..32: note = Probe
  source 1..32: mol_type = other DNA

SEQ ID NO: 39447 - DNA, 34 bp, synthetic construct; identical to SEQ ID NO: 13180
  misc_feature 1..34: note = Probe
  source 1..34: mol_type = other DNA

SEQ ID NO: 39448 - DNA, 18 bp, synthetic construct
  misc_feature 1..18: note = Probe
  source 1..18: mol_type = other DNA
cggatcagaagattgagg

SEQ ID NO: 39449 - DNA, 35 bp, synthetic construct
  misc_feature 1..35: note = Probe
  source 1..35: mol_type = other DNA
cggatcagaagattgagggttcgagtcccttcgtg

SEQ ID NO: 39450 - DNA, 18 bp, synthetic construct
  misc_feature 1..18: note = Probe
  source 1..18: mol_type = other DNA
cggatcagaagattgcag

SEQ ID NO: 39451 - DNA, 33 bp, synthetic construct
  misc_feature 1..33: note = Probe
  source 1..33: mol_type = other DNA
cggatggaggcgtgggttcgaatcccacttctg

SEQ ID NO: 39452 - DNA, 34 bp, synthetic construct
  misc_feature 1..34: note = Probe
  source 1..34: mol_type = other DNA
cggatggaggcgtgggttcgaatcccacttctga

SEQ ID NO: 39453 - DNA, 35 bp, synthetic construct
  misc_feature 1..35: note = Probe
  source 1..35: mol_type = other DNA
cggatggaggcgtgggttcgaatcccacttctgac

SEQ ID NO: 39454 - DNA, 23 bp, synthetic construct
  misc_feature 1..23: note = Probe
  source 1..23: mol_type = other DNA
cggcccgggttcgactcccggtg

SEQ ID NO: 39455 - DNA, 26 bp, synthetic construct
  misc_feature 1..26: note = Probe
  source 1..26: mol_type = other DNA
cggcccgggttcgactcccggtgtgg

SEQ ID NO: 39456 - DNA, 27 bp, synthetic construct
  misc_feature 1..27: note = Probe
  source 1..27: mol_type = other DNA
cggcccgggttcgactcccggtgtggg

SEQ ID NO: 39457 - DNA, 22 bp, synthetic construct
  misc_feature 1..22: note = Probe
  source 1..22: mol_type = other DNA
cggcccgggttcgattcccggt

SEQ ID NO: 39458 - DNA, 23 bp, synthetic construct
  misc_feature 1..23: note = Probe
  source 1..23: mol_type = other DNA
cggcccgggttcgattcccggtc

SEQ ID NO: 39459 - DNA, 26 bp, synthetic construct
  misc_feature 1..26: note = Probe
  source 1..26: mol_type = other DNA
cggcccgggttcgattcccggtcagg

SEQ ID NO: 39460 - DNA, 27 bp, synthetic construct
  misc_feature 1..27: note = Probe
  source 1..27: mol_type = other DNA
cggcccgggttcgattcccggtcaggg

SEQ ID NO: 39461 - DNA, 29 bp, synthetic construct
  misc_feature 1..29: note = Probe
  source 1..29: mol_type = other DNA
cggcccgggttcgattcccggtcagggaa

SEQ ID NO: 39462 - DNA, 37 bp, synthetic construct
  misc_feature 1..37: note = Probe
  source 1..37: mol_type = other DNA
cggcccgggttcgattcccggtcagggaatgaggttt

SEQ ID NO: 39463 - DNA, 38 bp, synthetic construct
  misc_feature 1..38: note = Probe
  source 1..38: mol_type = other DNA
cggcccgggttcgattcccggtcagggaatgaggtttt

SEQ ID NO: 39464 - DNA, 32 bp, synthetic construct; identical to SEQ ID NO: 5074
  misc_feature 1..32: note = Probe
  source 1..32: mol_type = other DNA

SEQ ID NO: 39465 - DNA, 26 bp, synthetic construct
  misc_feature 1..26: note = Probe
  source 1..26: mol_type = other DNA
cggctagctcagtcggtagagcatga

SEQ ID NO: 39466 - DNA, 27 bp, synthetic construct
  misc_feature 1..27: note = Probe
  source 1..27: mol_type = other DNA
cggctagctcagtcggtagagcatgag

SEQ ID NO: 39467 - DNA, 30 bp, synthetic construct; identical to SEQ ID NO: 771
  misc_feature 1..30: note = Probe
  source 1..30: mol_type = other DNA

SEQ ID NO: 39468 - DNA, 31 bp, synthetic construct; identical to SEQ ID NO: 772
  misc_feature 1..31: note = Probe
  source 1..31: mol_type = other DNA

SEQ ID NO: 39469 - DNA, 27 bp, synthetic construct
  misc_feature 1..27: note = Probe
  source 1..27: mol_type = other DNA
cggctagctcagtcggtagagcatggg

SEQ ID NO: 39470 - DNA, 31 bp, synthetic construct; identical to SEQ ID NO: 779
  misc_feature 1..31: note = Probe
  source 1..31: mol_type = other DNA

SEQ ID NO: 39471 - DNA, 31 bp, synthetic construct
  misc_feature 1..31: note = Probe
  source 1..31: mol_type = other DNA
cgggagacccgggttcaattcccggccaatg

SEQ ID NO: 39472 - DNA, 32 bp, synthetic construct
  misc_feature 1..32: note = Probe
  source 1..32: mol_type = other DNA
cgggagacccgggttcaattcccggccaatgc

SEQ ID NO: 39473 - DNA, 34 bp, synthetic construct; identical to SEQ ID NO: 19251
  misc_feature 1..34: note = Probe
  source 1..34: mol_type = other DNA

SEQ ID NO: 39474 - DNA, 36 bp, synthetic construct; identical to SEQ ID NO: 5077
  misc_feature 1..36: note = Probe
  source 1..36: mol_type = other DNA

SEQ ID NO: 39475 - DNA, 31 bp, synthetic construct
  misc_feature 1..31: note = Probe
  source 1..31: mol_type = other DNA
cgggagaccggggttcgattccccaacgggg

SEQ ID NO: 39476 - DNA, 33 bp, synthetic construct
  misc_feature 1..33: note = Probe
  source 1..33: mol_type = other DNA
cgggagaccggggttcgattccccaacggggag

SEQ ID NO: 39477 - DNA, 26 bp, synthetic construct
  misc_feature 1..26: note = Probe
  source 1..26: mol_type = other DNA
cgggagaccggggttcgattccccga

SEQ ID NO: 39478 - DNA, 34 bp, synthetic construct; identical to SEQ ID NO: 5079
  misc_feature 1..34: note = Probe
  source 1..34: mol_type = other DNA

SEQ ID NO: 39479 - DNA, 34 bp, synthetic construct; identical to SEQ ID NO: 5082
  misc_feature 1..34: note = Probe
  source 1..34: mol_type = other DNA

SEQ ID NO: 39480 - DNA, 36 bp, synthetic construct; identical to SEQ ID NO: 5084
  misc_feature 1..36: note = Probe
  source 1..36: mol_type = other DNA

SEQ ID NO: 39481 - DNA, 42 bp, synthetic construct; identical to SEQ ID NO: 19280
  misc_feature 1..42: note = Probe
  source 1..42: mol_type = other DNA

SEQ ID NO: 39482 - DNA, 43 bp, synthetic construct; identical to SEQ ID NO: 19281
  misc_feature 1..43: note = Probe
  source 1..43: mol_type = other DNA

SEQ ID NO: 39483 - DNA, 44 bp, synthetic construct; identical to SEQ ID NO: 19282
  misc_feature 1..44: note = Probe
  source 1..44: mol_type = other DNA

SEQ ID NO: 39484 - DNA, 30 bp, synthetic construct; identical to SEQ ID NO: 19289
  misc_feature 1..30: note = Probe
  source 1..30: mol_type = other DNA

SEQ ID NO: 39485 - DNA, 33 bp, synthetic construct; identical to SEQ ID NO: 5087
  misc_feature 1..33: note = Probe
  source 1..33: mol_type = other DNA

SEQ ID NO: 39486 - DNA, 36 bp, synthetic construct; identical to SEQ ID NO: 19294
  misc_feature 1..36: note = Probe
  source 1..36: mol_type = other DNA

SEQ ID NO: 39487 - DNA, 27 bp, synthetic construct
  misc_feature 1..27: note = Probe
  source 1..27: mol_type = other DNA
cgggctcacatcaccccataaacaaat

SEQ ID NO: 39488 - DNA, 28 bp, synthetic construct
  misc_feature 1..28: note = Probe
  source 1..28: mol_type = other DNA
cggggttcgattccccgacggggaggca

SEQ ID NO: 39489 - DNA, 34 bp, synthetic construct; identical to SEQ ID NO: 790
  misc_feature 1..34: note = Probe
  source 1..34: mol_type = other DNA

SEQ ID NO: 39490 - DNA, 50 bp, synthetic construct; identical to SEQ ID NO: 791
  misc_feature 1..50: note = Probe
  source 1..50: mol_type = other DNA

SEQ ID NO: 39491 - DNA, 31 bp, synthetic construct
  misc_feature 1..31: note = Probe
  source 1..31: mol_type = other DNA
cggtcctcgttagtatagtggtgagtatccc

SEQ ID NO: 39492 - DNA, 32 bp, synthetic construct
  misc_feature 1..32: note = Probe
  source 1..32: mol_type = other DNA
cggtcctcgttagtatagtggtgagtatcccc

SEQ ID NO: 39493 - DNA, 33 bp, synthetic construct
  misc_feature 1..33: note = Probe
  source 1..33: mol_type = other DNA
cggtcctcgttagtatagtggtgagtatccccg

SEQ ID NO: 39494 - DNA, 28 bp, synthetic construct
  misc_feature 1..28: note = Probe
  source 1..28: mol_type = other DNA
cggtgcctccgtgtttcccccacgcttt

SEQ ID NO: 39495 - DNA, 29 bp, synthetic construct
  misc_feature 1..29: note = Probe
  source 1..29: mol_type = other DNA
cggtgcctccgtgtttcccccacgctttt

SEQ ID NO: 39496 - DNA, 20 bp, synthetic construct
  misc_feature 1..20: note = Probe
  source 1..20: mol_type = other DNA
cggtggggattctggtctcc

SEQ ID NO: 39497 - DNA, 27 bp, synthetic construct
  misc_feature 1..27: note = Probe
  source 1..27: mol_type = other DNA
cggtggggattctggtctccaatggag

SEQ ID NO: 39498 - DNA, 32 bp, synthetic construct
  misc_feature 1..32: note = Probe
  source 1..32: mol_type = other DNA
cggttcctcgttagtatagtggtgagtatccc

SEQ ID NO: 39499 - DNA, 33 bp, synthetic construct
  misc_feature 1..33: note = Probe
  source 1..33: mol_type = other DNA
cggttcctcgttagtatagtggtgagtatcccc

SEQ ID NO: 39500 - DNA, 34 bp, synthetic construct
  misc_feature 1..34: note = Probe
  source 1..34: mol_type = other DNA
cggttcctcgttagtatagtggtgagtatccccg

SEQ ID NO: 39501 - DNA, 21 bp, synthetic construct
  misc_feature 1..21: note = Probe
  source 1..21: mol_type = other DNA
cgtaaacaggagatcctgggt

SEQ ID NO: 39502 - DNA, 24 bp, synthetic construct
  misc_feature 1..24: note = Probe
  source 1..24: mol_type = other DNA
cgtagtgtagtggtcatcacgttc

SEQ ID NO: 39503 - DNA, 18 bp, synthetic construct
  misc_feature 1..18: note = Probe
  source 1..18: mol_type = other DNA
cgtagtgtagtggttatc

SEQ ID NO: 39504 - DNA, 21 bp, synthetic construct
  misc_feature 1..21: note = Probe
  source 1..21: mol_type = other DNA
cgtagtgtagtggttatcacg

SEQ ID NO: 39505 - DNA, 23 bp, synthetic construct
  misc_feature 1..23: note = Probe
  source 1..23: mol_type = other DNA
cgtagtgtagtggttatcacgtt

SEQ ID NO: 39506 - DNA, 24 bp, synthetic construct
  misc_feature 1..24: note = Probe
  source 1..24: mol_type = other DNA
cgtagtgtagtggttatcacgttc

SEQ ID NO: 39507 - DNA, 25 bp, synthetic construct
  misc_feature 1..25: note = Probe
  source 1..25: mol_type = other DNA
cgtagtgtagtggttatcacgttcg

SEQ ID NO: 39508 - DNA, 26 bp, synthetic construct
  misc_feature 1..26: note = Probe
  source 1..26: mol_type = other DNA
cgtagtgtagtggttatcacgttcgc

SEQ ID NO: 39509 - DNA, 27 bp, synthetic construct
  misc_feature 1..27: note = Probe
  source 1..27: mol_type = other DNA
cgtagtgtagtggttatcacgttcgcc

SEQ ID NO: 39510 - DNA, 28 bp, synthetic construct
  misc_feature 1..28: note = Probe
  source 1..28: mol_type = other DNA
cgtagtgtagtggttatcacgttcgcct

SEQ ID NO: 39511 - DNA, 50 bp, synthetic construct; identical to SEQ ID NO: 5112
  misc_feature 1..50: note = Probe
  source 1..50: mol_type = other DNA

SEQ ID NO: 39512 - DNA, 50 bp, synthetic construct; identical to SEQ ID NO: 5113
  misc_feature 1..50: note = Probe
  source 1..50: mol_type = other DNA

SEQ ID NO: 39513 - DNA, 17 bp, synthetic construct
  misc_feature 1..17: note = Probe
  source 1..17: mol_type = other DNA
cgtatagtggttagtac

SEQ ID NO: 39514 - DNA, 18 bp, synthetic construct
  misc_feature 1..18: note = Probe
  source 1..18: mol_type = other DNA
cgtatagtggttagtact

SEQ ID NO: 39515 - DNA, 21 bp, synthetic construct
  misc_feature 1..21: note = Probe
  source 1..21: mol_type = other DNA
cgtatagtggttagtactctg

SEQ ID NO: 39516 - DNA, 23 bp, synthetic construct
  misc_feature 1..23: note = Probe
  source 1..23: mol_type = other DNA
cgtatagtggttagtactctgcg

SEQ ID NO: 39517 - DNA, 34 bp, synthetic construct
  misc_feature 1..34: note = Probe
  source 1..34: mol_type = other DNA
cgtatgaggccccgggttcaatccccggcatctc

SEQ ID NO: 39518 - DNA, 36 bp, synthetic construct
  misc_feature 1..36: note = Probe
  source 1..36: mol_type = other DNA
cgtatgaggccccgggttcaatccccggcatctcca

SEQ ID NO: 39519 - DNA, 39 bp, synthetic construct; identical to SEQ ID NO: 19362
  misc_feature 1..39: note = Probe
  source 1..39: mol_type = other DNA

SEQ ID NO: 39520 - DNA, 18 bp, synthetic construct
  misc_feature 1..18: note = Probe
  source 1..18: mol_type = other DNA
cgtcagtctcataatctg

SEQ ID NO: 39521 - DNA, 20 bp, synthetic construct
  misc_feature 1..20: note = Probe
  source 1..20: mol_type = other DNA
cgtccaagctctttccattt

SEQ ID NO: 39522 - DNA, 21 bp, synthetic construct
  misc_feature 1..21: note = Probe
  source 1..21: mol_type = other DNA
cgtccaagctctttccatttt

SEQ ID NO: 39523 - DNA, 23 bp, synthetic construct
  misc_feature 1..23: note = Probe
  source 1..23: mol_type = other DNA
cgtgatcgtatagtggttagtac

SEQ ID NO: 39524 - DNA, 24 bp, synthetic construct
  misc_feature 1..24: note = Probe
  source 1..24: mol_type = other DNA
cgtgatcgtatagtggttagtact

SEQ ID NO: 39525 - DNA, 27 bp, synthetic construct
  misc_feature 1..27: note = Probe
  source 1..27: mol_type = other DNA
cgtgatcgtatagtggttagtactctg

SEQ ID NO: 39526 - DNA, 28 bp, synthetic construct
  misc_feature 1..28: note = Probe
  source 1..28: mol_type = other DNA
cgtgatcgtatagtggttagtactctgc

SEQ ID NO: 39527 - DNA, 24 bp, synthetic construct
  misc_feature 1..24: note = Probe
  source 1..24: mol_type = other DNA
cgtgctgctactaatgccagggtc

SEQ ID NO: 39528 - DNA, 25 bp, synthetic construct
  misc_feature 1..25: note = Probe
  source 1..25: mol_type = other DNA
cgtgctgctactaatgccagggtcg

SEQ ID NO: 39529 - DNA, 50 bp, synthetic construct
  misc_feature 1..50: note = Probe
  source 1..50: mol_type = other DNA
cgtggcaatccttaggtcgctggttcgattccggctcgaaggacttcgtc

SEQ ID NO: 39530 - DNA, 28 bp, synthetic construct
  misc_feature 1..28: note = Probe
  source 1..28: mol_type = other DNA
cgtggttgtagtccgtgcgagaataatg

SEQ ID NO: 39531 - DNA, 21 bp, synthetic construct
  misc_feature 1..21: note = Probe
  source 1..21: mol_type = other DNA
cgtgttgaggattctggtctc

SEQ ID NO: 39532 - DNA, 18 bp, synthetic construct
  misc_feature 1..18: note = Probe
  source 1..18: mol_type = other DNA
cgttagtatagtggtgag

SEQ ID NO: 39533 - DNA, 22 bp, synthetic construct
  misc_feature 1..22: note = Probe
  source 1..22: mol_type = other DNA
cgttcaggtcgcagtctcccct

SEQ ID NO: 39534 - DNA, 23 bp, synthetic construct
  misc_feature 1..23: note = Probe
  source 1..23: mol_type = other DNA
cgttgggcgcgggttgtaacttt

SEQ ID NO: 39535 - DNA, 24 bp, synthetic construct
  misc_feature 1..24: note = Probe
  source 1..24: mol_type = other DNA
cgttgggcgcgggttgtaactttt

SEQ ID NO: 39536 - DNA, 25 bp, synthetic construct
  misc_feature 1..25: note = Probe
  source 1..25: mol_type = other DNA
cgttggtctaggggtatgattctcg

SEQ ID NO: 39537 - DNA, 28 bp, synthetic construct
  misc_feature 1..28: note = Probe
  source 1..28: mol_type = other DNA
cgttggtggtatagtggtaagcatagct

SEQ ID NO: 39538 - DNA, 29 bp, synthetic construct
  misc_feature 1..29: note = Probe
  source 1..29: mol_type = other DNA
cgttggtggtatagtggtaagcatagctg

SEQ ID NO: 39539 - DNA, 28 bp, synthetic construct
  misc_feature 1..28: note = Probe
  source 1..28: mol_type = other DNA
cgttggtggtatagtggtgagcatagct

SEQ ID NO: 39540 - DNA, 29 bp, synthetic construct
  misc_feature 1..29: note = Probe
  source 1..29: mol_type = other DNA
cgttggtggtatagtggtgagcatagctg

SEQ ID NO: 39541 - DNA, 29 bp, synthetic construct
  misc_feature 1..29: note = Probe
  source 1..29: mol_type = other DNA
cgttggtggtatagtggttagcatagctg

SEQ ID NO: 39542 - DNA, 30 bp, synthetic construct; identical to SEQ ID NO: 5141
  misc_feature 1..30: note = Probe
  source 1..30: mol_type = other DNA

SEQ ID NO: 39543 - DNA, 31 bp, synthetic construct; identical to SEQ ID NO: 5142
  misc_feature 1..31: note = Probe
  source 1..31: mol_type = other DNA

SEQ ID NO: 39544 - DNA, 32 bp, synthetic construct; identical to SEQ ID NO: 5143
  misc_feature 1..32: note = Probe
  source 1..32: mol_type = other DNA

SEQ ID NO: 39545 - DNA, 33 bp, synthetic construct; identical to SEQ ID NO: 5144
  misc_feature 1..33: note = Probe
  source 1..33: mol_type = other DNA

SEQ ID NO: 39546 - DNA, 34 bp, synthetic construct; identical to SEQ ID NO: 5145
  misc_feature 1..34: note = Probe
  source 1..34: mol_type = other DNA

SEQ ID NO: 39547 - DNA, 35 bp, synthetic construct; identical to SEQ ID NO: 5146
  misc_feature 1..35: note = Probe
  source 1..35: mol_type = other DNA

SEQ ID NO: 39548 - DNA, 36 bp, synthetic construct; identical to SEQ ID NO: 5147
  misc_feature 1..36: note = Probe
  source 1..36: mol_type = other DNA

SEQ ID NO: 39549 - DNA, 37 bp, synthetic construct; identical to SEQ ID NO: 5148
  misc_feature 1..37: note = Probe
  source 1..37: mol_type = other DNA

SEQ ID NO: 39550 - DNA, 22 bp, synthetic construct
  misc_feature 1..22: note = Probe
  source 1..22: mol_type = other DNA
ctaaatcctatatatcttaatg

SEQ ID NO: 39551 - DNA, 19 bp, synthetic construct
  misc_feature 1..19: note = Probe
  source 1..19: mol_type = other DNA
ctaacacgcgaaaggtccc

SEQ ID NO: 39552 - DNA, 20 bp, synthetic construct
  misc_feature 1..20: note = Probe
  source 1..20: mol_type = other DNA
ctaacacgcgaaaggtcccc

SEQ ID NO: 39553 - DNA, 21 bp, synthetic construct
  misc_feature 1..21: note = Probe
  source 1..21: mol_type = other DNA
ctaacacgcgaaaggtccccg

SEQ ID NO: 39554 - DNA, 22 bp, synthetic construct
  misc_feature 1..22: note = Probe
  source 1..22: mol_type = other DNA
ctaacacgcgaaaggtccccgg

SEQ ID NO: 39555 - DNA, 21 bp, synthetic construct
  misc_feature 1..21: note = Probe
  source 1..21: mol_type = other DNA
ctaacacgcgaaaggtccctg

SEQ ID NO: 39556 - DNA, 22 bp, synthetic construct
  misc_feature 1..22: note = Probe
  source 1..22: mol_type = other DNA
ctaacacgcgaaaggtccctgg

SEQ ID NO: 39557 - DNA, 37 bp, synthetic construct; identical to SEQ ID NO: 5162
  misc_feature 1..37: note = Probe
  source 1..37: mol_type = other DNA

SEQ ID NO: 39558 - DNA, 42 bp, synthetic construct; identical to SEQ ID NO: 5167
  misc_feature 1..42: note = Probe
  source 1..42: mol_type = other DNA

SEQ ID NO: 39559 - DNA, 50 bp, synthetic construct; identical to SEQ ID NO: 5168
  misc_feature 1..50: note = Probe
  source 1..50: mol_type = other DNA

SEQ ID NO: 39560 - DNA, 17 bp, synthetic construct
  misc_feature 1..17: note = Probe
  source 1..17: mol_type = other DNA
ctaagccagggattgtg

SEQ ID NO: 39561 - DNA, 42 bp, synthetic construct
  misc_feature 1..42: note = Probe
  source 1..42: mol_type = other DNA
ctaagccagggattgtgggttcgagtcccacctggggtgtcg

SEQ ID NO: 39562 - DNA, 42 bp, synthetic construct; identical to SEQ ID NO: 30715
  misc_feature 1..42: note = Probe
  source 1..42: mol_type = other DNA

SEQ ID NO: 39563 - DNA, 34 bp, synthetic construct; identical to SEQ ID NO: 13235
  misc_feature 1..34: note = Probe
  source 1..34: mol_type = other DNA

SEQ ID NO: 39564 - DNA, 38 bp, synthetic construct; identical to SEQ ID NO: 5173
  misc_feature 1..38: note = Probe
  source 1..38: mol_type = other DNA

SEQ ID NO: 39565 - DNA, 19 bp, synthetic construct
  misc_feature 1..19: note = Probe
  source 1..19: mol_type = other DNA
ctaataacgccaaggtcgc

SEQ ID NO: 39566 - DNA, 21 bp, synthetic construct
  misc_feature 1..21: note = Probe
  source 1..21: mol_type = other DNA
ctaataacgccaaggtcgcgg

SEQ ID NO: 39567 - DNA, 22 bp, synthetic construct
  misc_feature 1..22: note = Probe
  source 1..22: mol_type = other DNA
ctaataacgccaaggtcgcggg

SEQ ID NO: 39568 - DNA, 23 bp, synthetic construct
  misc_feature 1..23: note = Probe
  source 1..23: mol_type = other DNA
ctaataacgccaaggtcgcgggt

SEQ ID NO: 39569 - DNA, 24 bp, synthetic construct
  misc_feature 1..24: note = Probe
  source 1..24: mol_type = other DNA
ctaataacgccaaggtcgcgggtt

SEQ ID NO: 39570 - DNA, 25 bp, synthetic construct
  misc_feature 1..25: note = Probe
  source 1..25: mol_type = other DNA
ctaataacgccaaggtcgcgggttc

SEQ ID NO: 39571 - DNA, 26 bp, synthetic construct
  misc_feature 1..26: note = Probe
  source 1..26: mol_type = other DNA
ctaataacgccaaggtcgcgggttcg

SEQ ID NO: 39572 - DNA, 35 bp, synthetic construct
  misc_feature 1..35: note = Probe
  source 1..35: mol_type = other DNA
ctaataacgccaaggtcgcgggttcgatccccgta

SEQ ID NO: 39573 - DNA, 50 bp, synthetic construct
  misc_feature 1..50: note = Probe
  source 1..50: mol_type = other DNA
ctaataacgccaaggtcgcgggttcgatccccgtacgggccaactttgtt

SEQ ID NO: 39574 - DNA, 50 bp, synthetic construct
  misc_feature 1..50: note = Probe
  source 1..50: mol_type = other DNA
ctaataacgccaaggtcgcgggttcgatccccgtacgggccacaggcttt

SEQ ID NO: 39575 - DNA, 45 bp, synthetic construct
  misc_feature 1..45: note = Probe
  source 1..45: mol_type = other DNA
ctaataacgccaaggtcgcgggttcgatccccgtacgggccacga

SEQ ID NO: 39576 - DNA, 50 bp, synthetic construct
  misc_feature 1..50: note = Probe
  source 1..50: mol_type = other DNA
ctaataacgccaaggtcgcgggttcgatccccgtacgggccacgagggtt

SEQ ID NO: 39577 - DNA, 45 bp, synthetic construct
  misc_feature 1..45: note = Probe
  source 1..45: mol_type = other DNA
ctaataacgccaaggtcgcgggttcgatccccgtacgggccactg

SEQ ID NO: 39578 - DNA, 50 bp, synthetic construct
  misc_feature 1..50: note = Probe
  source 1..50: mol_type = other DNA
ctaataacgccaaggtcgcgggttcgatccccgtacgggccactggatgc

SEQ ID NO: 39579 - DNA, 45 bp, synthetic construct
  misc_feature 1..45: note = Probe
  source 1..45: mol_type = other DNA
ctaataacgccaaggtcgcgggttcgatccccgtacgggccagga

SEQ ID NO: 39580 - DNA, 50 bp, synthetic construct
  misc_feature 1..50: note = Probe
  source 1..50: mol_type = other DNA
ctaataacgccaaggtcgcgggttcgatccccgtacgggccaggattgaa

SEQ ID NO: 39581 - DNA, 45 bp, synthetic construct
  misc_feature 1..45: note = Probe
  source 1..45: mol_type = other DNA
ctaataacgccaaggtcgcgggttcgatccccgtacgggccaggc

SEQ ID NO: 39582 - DNA, 50 bp, synthetic construct
  misc_feature 1..50: note = Probe
  source 1..50: mol_type = other DNA
ctaataacgccaaggtcgcgggttcgatccccgtacgggccaggctaact

SEQ ID NO: 39583 - DNA, 45 bp, synthetic construct
  misc_feature 1..45: note = Probe
  source 1..45: mol_type = other DNA
ctaataacgccaaggtcgcgggttcgatccccgtactggccaagt

SEQ ID NO: 39584 - DNA, 50 bp, synthetic construct
  misc_feature 1..50: note = Probe
  source 1..50: mol_type = other DNA
ctaataacgccaaggtcgcgggttcgatccccgtactggccaagtattct

SEQ ID NO: 39585 - DNA, 45 bp, synthetic construct
  misc_feature 1..45: note = Probe
  source 1..45: mol_type = other DNA
ctaataacgccaaggtcgcgggttcgatccccgtactggccacgt

SEQ ID NO: 39586 - DNA, 50 bp, synthetic construct
  misc_feature 1..50: note = Probe
  source 1..50: mol_type = other DNA
ctaataacgccaaggtcgcgggttcgatccccgtactggccacgtatttt

SEQ ID NO: 39587 - DNA, 22 bp, synthetic construct
  misc_feature 1..22: note = Probe
  source 1..22: mol_type = other DNA
ctaataacgctaaggtcgcggg

SEQ ID NO: 39588 - DNA, 23 bp, synthetic construct
  misc_feature 1..23: note = Probe
  source 1..23: mol_type = other DNA
ctaataacgctaaggtcgcgggt

SEQ ID NO: 39589 - DNA, 18 bp, synthetic construct
  misc_feature 1..18: note = Probe
  source 1..18: mol_type = other DNA
ctaatggataaggcactg

SEQ ID NO: 39590 - DNA, 36 bp, synthetic construct
  misc_feature 1..36: note = Probe
  source 1..36: mol_type = other DNA
ctaatggtggagttaaagactttttctctgatttgt

SEQ ID NO: 39591 - DNA, 41 bp, synthetic construct; identical to SEQ ID NO: 5177
  misc_feature 1..41: note = Probe
  source 1..41: mol_type = other DNA

SEQ ID NO: 39592 - DNA, 21 bp, synthetic construct
  misc_feature 1..21: note = Probe
  source 1..21: mol_type = other DNA
ctacggatcagaagattccag

SEQ ID NO: 39593 - DNA, 22 bp, synthetic construct
  misc_feature 1..22: note = Probe
  source 1..22: mol_type = other DNA
ctacggatcagaagattccagg

SEQ ID NO: 39594 - DNA, 21 bp, synthetic construct
  misc_feature 1..21: note = Probe
  source 1..21: mol_type = other DNA
ctacggatcagaagattctag

SEQ ID NO: 39595 - DNA, 20 bp, synthetic construct
  misc_feature 1..20: note = Probe
  source 1..20: mol_type = other DNA
ctagaaatccattggggtct

SEQ ID NO: 39596 - DNA, 25 bp, synthetic construct
  misc_feature 1..25: note = Probe
  source 1..25: mol_type = other DNA
ctagaaatccattggggtctccccg

SEQ ID NO: 39597 - DNA, 29 bp, synthetic construct
  misc_feature 1..29: note = Probe
  source 1..29: mol_type = other DNA
ctagaaatccattggggtctccccgcgca

SEQ ID NO: 39598 - DNA, 31 bp, synthetic construct
  misc_feature 1..31: note = Probe
  source 1..31: mol_type = other DNA
ctagaaatccattggggtctccccgcgcagg

SEQ ID NO: 39599 - DNA, 30 bp, synthetic construct
  misc_feature 1..30: note = Probe
  source 1..30: mol_type = other DNA
ctagaaatccattggggtttccccgcgcag

SEQ ID NO: 39600 - DNA, 18 bp, synthetic construct
  misc_feature 1..18: note = Probe
  source 1..18: mol_type = other DNA
ctagcggttaggattcct

SEQ ID NO: 39601 - DNA, 18 bp, synthetic construct
  misc_feature 1..18: note = Probe
  source 1..18: mol_type = other DNA
ctagctcagtcggtagag

SEQ ID NO: 39602 - DNA, 20 bp, synthetic construct
  misc_feature 1..20: note = Probe
  source 1..20: mol_type = other DNA
ctagctcagtcggtagagca

SEQ ID NO: 39603 - DNA, 22 bp, synthetic construct
  misc_feature 1..22: note = Probe
  source 1..22: mol_type = other DNA
ctagctcagtcggtagagcatg

SEQ ID NO: 39604 - DNA, 23 bp, synthetic construct
  misc_feature 1..23: note = Probe
  source 1..23: mol_type = other DNA
ctagctcagtcggtagagcatga

SEQ ID NO: 39605 - DNA, 23 bp, synthetic construct
  misc_feature 1..23: note = Probe
  source 1..23: mol_type = other DNA
ctagctcagtcggtagagcatgg

SEQ ID NO: 39606 - DNA, 17 bp, synthetic construct
  misc_feature 1..17: note = Probe
  source 1..17: mol_type = other DNA
ctaggggtatgattctc

SEQ ID NO: 39607 - DNA, 18 bp, synthetic construct
  misc_feature 1..18: note = Probe
  source 1..18: mol_type = other DNA
ctaggggtatgattctcg

SEQ ID NO: 39608 - DNA, 22 bp, synthetic construct
  misc_feature 1..22: note = Probe
  source 1..22: mol_type = other DNA
ctagtaaacaggagatcctggg

SEQ ID NO: 39609 - DNA, 45 bp, synthetic construct
  misc_feature 1..45: note = Probe
  source 1..45: mol_type = other DNA
ctagtaaacaggagatcctgggttcgactcccagcggggccttgg

SEQ ID NO: 39610 - DNA, 17 bp, synthetic construct
  misc_feature 1..17: note = Probe
  source 1..17: mol_type = other DNA
ctagtggctaggattcg

SEQ ID NO: 39611 - DNA, 18 bp, synthetic construct
  misc_feature 1..18: note = Probe
  source 1..18: mol_type = other DNA
ctagtggttaggattcgg

SEQ ID NO: 39612 - DNA, 50 bp, synthetic construct; identical to SEQ ID NO: 5202
  misc_feature 1..50: note = Probe
  source 1..50: mol_type = other DNA

SEQ ID NO: 39613 - DNA, 24 bp, synthetic construct
  misc_feature 1..24: note = Probe
  source 1..24: mol_type = other DNA
ctcacacgcgaaaggtccccggtt

SEQ ID NO: 39614 - DNA, 25 bp, synthetic construct
  misc_feature 1..25: note = Probe
  source 1..25: mol_type = other DNA
ctcacacgcgaaaggtccccggttc

SEQ ID NO: 39615 - DNA, 45 bp, synthetic construct
  misc_feature 1..45: note = Probe
  source 1..45: mol_type = other DNA
ctcacacgcgaaaggtccccggttcgaaaccgggcagaagcaacc

SEQ ID NO: 39616 - DNA, 42 bp, synthetic construct
  misc_feature 1..42: note = Probe
  source 1..42: mol_type = other DNA
ctcacacgcgaaaggtccccggttcgaaaccgggcggaaaca

SEQ ID NO: 39617 - DNA, 45 bp, synthetic construct
  misc_feature 1..45: note = Probe
  source 1..45: mol_type = other DNA
ctcacacgcgaaaggtccccggttcgaaaccgggcggaaacacct

SEQ ID NO: 39618 - DNA, 45 bp, synthetic construct
  misc_feature 1..45: note = Probe
  source 1..45: mol_type = other DNA
ctcacacgcgaaaggtccccggttcgatcccgggcggaaacaggt

SEQ ID NO: 39619 - DNA, 22 bp, synthetic construct
  misc_feature 1..22: note = Probe
  source 1..22: mol_type = other DNA
ctcacacggggcacaataattt

SEQ ID NO: 39620 - DNA, 20 bp, synthetic construct
  misc_feature 1..20: note = Probe
  source 1..20: mol_type = other DNA
ctcacatcaccccataaaca

SEQ ID NO: 39621 - DNA, 23 bp, synthetic construct
  misc_feature 1..23: note = Probe
  source 1..23: mol_type = other DNA
ctcacatcaccccataaacaaat

SEQ ID NO: 39622 - DNA, 36 bp, synthetic construct; identical to SEQ ID NO: 25293
  misc_feature 1..36: note = Probe
  source 1..36: mol_type = other DNA

SEQ ID NO: 39623 - DNA, 37 bp, synthetic construct
  misc_feature 1..37: note = Probe
  source 1..37: mol_type = other DNA
ctcaccgccgcggcccgggttcgattcccggtcaggg

SEQ ID NO: 39624 - DNA, 42 bp, synthetic construct; identical to SEQ ID NO: 19507
  misc_feature 1..42: note = Probe
  source 1..42: mol_type = other DNA

SEQ ID NO: 39625 - DNA, 42 bp, synthetic construct; identical to SEQ ID NO: 19508
  misc_feature 1..42: note = Probe
  source 1..42: mol_type = other DNA

SEQ ID NO: 39626 - DNA, 23 bp, synthetic construct
  misc_feature 1..23: note = Probe
  source 1..23: mol_type = other DNA
ctcagagggggcagctgccattt

SEQ ID NO: 39627 - DNA, 32 bp, synthetic construct; identical to SEQ ID NO: 816
  misc_feature 1..32: note = Probe
  source 1..32: mol_type = other DNA

SEQ ID NO: 39628 - DNA, 18 bp, synthetic construct
  misc_feature 1..18: note = Probe
  source 1..18: mol_type = other DNA
ctcagtcggtagagcatg

SEQ ID NO: 39629 - DNA, 17 bp, synthetic construct
  misc_feature 1..17: note = Probe
  source 1..17: mol_type = other DNA
ctcataatctgaaggtc

SEQ ID NO: 39630 - DNA, 20 bp, synthetic construct
  misc_feature 1..20: note = Probe
  source 1..20: mol_type = other DNA
ctcataatctgaaggtcctg

SEQ ID NO: 39631 - DNA, 21 bp, synthetic construct
  misc_feature 1..21: note = Probe
  source 1..21: mol_type = other DNA
ctcataatctgaaggtcctga

SEQ ID NO: 39632 - DNA, 22 bp, synthetic construct
  misc_feature 1..22: note = Probe
  source 1..22: mol_type = other DNA
ctcataatctgaaggtcctgag

SEQ ID NO: 39633 - DNA, 23 bp, synthetic construct
  misc_feature 1..23: note = Probe
  source 1..23: mol_type = other DNA
ctcataatctgaaggtcctgagt

SEQ ID NO: 39634 - DNA, 45 bp, synthetic construct
  misc_feature 1..45: note = Probe
  source 1..45: mol_type = other DNA
ctcataatctgaaggtcctgagttcgaacctcagagggggcagct

SEQ ID NO: 39635 - DNA, 18 bp, synthetic construct
  misc_feature 1..18: note = Probe
  source 1..18: mol_type = other DNA
ctcataatctgaaggtcg

SEQ ID NO: 39636 - DNA, 41 bp, synthetic construct
  misc_feature 1..41: note = Probe
  source 1..41: mol_type = other DNA
ctcataatctgaaggtcgtgagttcgagcctcacacggggc

SEQ ID NO: 39637 - DNA, 50 bp, synthetic construct
  misc_feature 1..50: note = Probe
  source 1..50: mol_type = other DNA
ctcataatctgaaggtcgtgagttcgagcctcacacggggcagtctaacg

SEQ ID NO: 39638 - DNA, 45 bp, synthetic construct
  misc_feature 1..45: note = Probe
  source 1..45: mol_type = other DNA
ctcataatctgaaggtcgtgagttcgatcctcacacggggcacaa

SEQ ID NO: 39639 - DNA, 50 bp, synthetic construct
  misc_feature 1..50: note = Probe
  source 1..50: mol_type = other DNA
ctcataatctgaaggtcgtgagttcgatcctcacacggggcacaataatt

SEQ ID NO: 39640 - DNA, 33 bp, synthetic construct; identical to SEQ ID NO: 5239
  misc_feature 1..33: note = Probe
  source 1..33: mol_type = other DNA

SEQ ID NO: 39641 - DNA, 34 bp, synthetic construct; identical to SEQ ID NO: 5240
  misc_feature 1..34: note = Probe
  source 1..34: mol_type = other DNA

SEQ ID NO: 39642 - DNA, 35 bp, synthetic construct; identical to SEQ ID NO: 5241
  misc_feature 1..35: note = Probe
  source 1..35: mol_type = other DNA

SEQ ID NO: 39643 - DNA, 37 bp, synthetic construct; identical to SEQ ID NO: 5243
  misc_feature 1..37: note = Probe
  source 1..37: mol_type = other DNA

SEQ ID NO: 39644 - DNA, 38 bp, synthetic construct; identical to SEQ ID NO: 5244
  misc_feature 1..38: note = Probe
  source 1..38: mol_type = other DNA

SEQ ID NO: 39645 - DNA, 34 bp, synthetic construct; identical to SEQ ID NO: 5247
  misc_feature 1..34: note = Probe
  source 1..34: mol_type = other DNA

SEQ ID NO: 39646 - DNA, 22 bp, synthetic construct
  misc_feature 1..22: note = Probe
  source 1..22: mol_type = other DNA
ctccagatcagaaggttgcgtg

SEQ ID NO: 39647 - DNA, 22 bp, synthetic construct
  misc_feature 1..22: note = Probe
  source 1..22: mol_type = other DNA
ctccagtctcttcggaggcgtg

SEQ ID NO: 39648 - DNA, 20 bp, synthetic construct
  misc_feature 1..20: note = Probe
  source 1..20: mol_type = other DNA
ctccagtctcttcgggggcg

SEQ ID NO: 39649 - DNA, 24 bp, synthetic construct
  misc_feature 1..24: note = Probe
  source 1..24: mol_type = other DNA
ctccagtctcttcgggggcgtggg

SEQ ID NO: 39650 - DNA, 50 bp, synthetic construct; identical to SEQ ID NO: 5249
  misc_feature 1..50: note = Probe
  source 1..50: mol_type = other DNA

SEQ ID NO: 39651 - DNA, 27 bp, synthetic construct
  misc_feature 1..27: note = Probe
  source 1..27: mol_type = other DNA
ctccatagctcaggggttagagcactg

SEQ ID NO: 39652 - DNA, 27 bp, synthetic construct
  misc_feature 1..27: note = Probe
  source 1..27: mol_type = other DNA
ctccatagctcagtggttagagcactg

SEQ ID NO: 39653 - DNA, 39 bp, synthetic construct
  misc_feature 1..39: note = Probe
  source 1..39: mol_type = other DNA
ctcccacgcgggagacccgggttcaattcccggccaatg

SEQ ID NO: 39654 - DNA, 18 bp, synthetic construct
  misc_feature 1..18: note = Probe
  source 1..18: mol_type = other DNA
ctcccgccttttttcccg

SEQ ID NO: 39655 - DNA, 24 bp, synthetic construct
  misc_feature 1..24: note = Probe
  source 1..24: mol_type = other DNA
ctcccgccttttttcccggcggcg

SEQ ID NO: 39656 - DNA, 26 bp, synthetic construct
  misc_feature 1..26: note = Probe
  source 1..26: mol_type = other DNA
ctcccgccttttttcccggcggcggg

SEQ ID NO: 39657 - DNA, 27 bp, synthetic construct
  misc_feature 1..27: note = Probe
  source 1..27: mol_type = other DNA
ctcccgccttttttcccggcggcggga

SEQ ID NO: 39658 - DNA, 28 bp, synthetic construct
  misc_feature 1..28: note = Probe
  source 1..28: mol_type = other DNA
ctcccgccttttttcccggcggcgggag

SEQ ID NO: 39659 - DNA, 30 bp, synthetic construct; identical to SEQ ID NO: 5265
  misc_feature 1..30: note = Probe
  source 1..30: mol_type = other DNA

SEQ ID NO: 39660 - DNA, 29 bp, synthetic construct
  misc_feature 1..29: note = Probe
  source 1..29: mol_type = other DNA
ctccctggtggtctagtggttaggattcg

SEQ ID NO: 39661 - DNA, 30 bp, synthetic construct; identical to SEQ ID NO: 9905
  misc_feature 1..30: note = Probe
  source 1..30: mol_type = other DNA

SEQ ID NO: 39662 - DNA, 32 bp, synthetic construct
  misc_feature 1..32: note = Probe
  source 1..32: mol_type = other DNA
ctccctggtggtctagtggttaggattcggcg

SEQ ID NO: 39663 - DNA, 20 bp, synthetic construct
  misc_feature 1..20: note = Probe
  source 1..20: mol_type = other DNA
ctcctaagccagggattgtg

SEQ ID NO: 39664 - DNA, 45 bp, synthetic construct
  misc_feature 1..45: note = Probe
  source 1..45: mol_type = other DNA
ctcctaagccagggattgtgggttcgagtcccacccggggtaaag

SEQ ID NO: 39665 - DNA, 45 bp, synthetic construct
  misc_feature 1..45: note = Probe
  source 1..45: mol_type = other DNA
ctcctaagccagggattgtgggttcgagtcccacctggggtgtcg

SEQ ID NO: 39666 - DNA, 30 bp, synthetic construct
  misc_feature 1..30: note = Probe
  source 1..30: mol_type = other DNA
ctcctcgttagtatagtggtgagtatcccc

SEQ ID NO: 39667 - DNA, 31 bp, synthetic construct
  misc_feature 1..31: note = Probe
  source 1..31: mol_type = other DNA
ctcctcgttagtatagtggtgagtatccccg

SEQ ID NO: 39668 - DNA, 30 bp, synthetic construct
  misc_feature 1..30: note = Probe
  source 1..30: mol_type = other DNA
ctcctcgttagtatagtggttagtatcccc

SEQ ID NO: 39669 - DNA, 31 bp, synthetic construct
  misc_feature 1..31: note = Probe
  source 1..31: mol_type = other DNA
ctcctcgttagtatagtggttagtatccccg

SEQ ID NO: 39670 - DNA, 27 bp, synthetic construct
  misc_feature 1..27: note = Probe
  source 1..27: mol_type = other DNA
ctcctggctggctcgcgatgtctgttt

SEQ ID NO: 39671 - DNA, 28 bp, synthetic construct
  misc_feature 1..28: note = Probe
  source 1..28: mol_type = other DNA
ctcctggctggctcgcgatgtctgtttt

SEQ ID NO: 39672 - DNA, 31 bp, synthetic construct
  misc_feature 1..31: note = Probe
  source 1..31: mol_type = other DNA
ctcctggctggctcgcttgtgctctcacttt

SEQ ID NO: 39673 - DNA, 31 bp, synthetic construct
  misc_feature 1..31: note = Probe
  source 1..31: mol_type = other DNA
ctcgaaatccaatgggggttccccgcgcagg

SEQ ID NO: 39674 - DNA, 26 bp, synthetic construct
  misc_feature 1..26: note = Probe
  source 1..26: mol_type = other DNA
ctcgaaatccaatggggtctccccgc

SEQ ID NO: 39675 - DNA, 29 bp, synthetic construct
  misc_feature 1..29: note = Probe
  source 1..29: mol_type = other DNA
ctcgaaatccaatggggtctccccgcgca

SEQ ID NO: 39676 - DNA, 31 bp, synthetic construct
  misc_feature 1..31: note = Probe
  source 1..31: mol_type = other DNA
ctcgaaatccaatggggtctccccgcgcagg

SEQ ID NO: 39677 - DNA, 50 bp, synthetic construct
  misc_feature 1..50: note = Probe
  source 1..50: mol_type = other DNA
ctcgaaatccaatggggtctccccgcgcaggttcgaatcctgctcacagc

SEQ ID NO: 39678 - DNA, 25 bp, synthetic construct
  misc_feature 1..25: note = Probe
  source 1..25: mol_type = other DNA
ctcgaaggacttcgtctgtaatttt

SEQ ID NO: 39679 - DNA, 34 bp, synthetic construct
  misc_feature 1..34: note = Probe
  source 1..34: mol_type = other DNA
ctcgattcccgcccaacgcatcgggcggaccttt

SEQ ID NO: 39680 - DNA, 32 bp, synthetic construct
  misc_feature 1..32: note = Probe
  source 1..32: mol_type = other DNA
ctcgccgtgatcgtatagtggttagtactctg

SEQ ID NO: 39681 - DNA, 22 bp, synthetic construct
  misc_feature 1..22: note = Probe
  source 1..22: mol_type = other DNA
ctcgtaaacaggagatcctggg

SEQ ID NO: 39682 - DNA, 45 bp, synthetic construct
  misc_feature 1..45: note = Probe
  source 1..45: mol_type = other DNA
ctcgtaaacaggagatcctgggttcgaatcccagcggggccttag

SEQ ID NO: 39683 - DNA, 24 bp, synthetic construct
  misc_feature 1..24: note = Probe
  source 1..24: mol_type = other DNA
ctcgtcgatgtggtggcttacttt

SEQ ID NO: 39684 - DNA, 27 bp, synthetic construct
  misc_feature 1..27: note = Probe
  source 1..27: mol_type = other DNA
ctcgttagtatagtggtgagtatcccc

SEQ ID NO: 39685 - DNA, 28 bp, synthetic construct
  misc_feature 1..28: note = Probe
  source 1..28: mol_type = other DNA
ctcgttagtatagtggtgagtatccccg

SEQ ID NO: 39686 - DNA, 27 bp, synthetic construct
  misc_feature 1..27: note = Probe
  source 1..27: mol_type = other DNA
ctcgttggtctaggggtatgattctcg

SEQ ID NO: 39687 - DNA, 22 bp, synthetic construct
  misc_feature 1..22: note = Probe
  source 1..22: mol_type = other DNA
ctctcaccgccgcggcccgggt

SEQ ID NO: 39688 - DNA, 27 bp, synthetic construct
  misc_feature 1..27: note = Probe
  source 1..27: mol_type = other DNA
ctctcaccgccgcggcccgggttcgat

SEQ ID NO: 39689 - DNA, 29 bp, synthetic construct
  misc_feature 1..29: note = Probe
  source 1..29: mol_type = other DNA
ctctcaccgccgcggcccgggttcgattc

SEQ ID NO: 39690 - DNA, 31 bp, synthetic construct
  misc_feature 1..31: note = Probe
  source 1..31: mol_type = other DNA
ctctcaccgccgcggcccgggttcgattccc

SEQ ID NO: 39691 - DNA, 32 bp, synthetic construct
  misc_feature 1..32: note = Probe
  source 1..32: mol_type = other DNA
ctctcaccgccgcggcccgggttcgattcccg

SEQ ID NO: 39692 - DNA, 33 bp, synthetic construct
  misc_feature 1..33: note = Probe
  source 1..33: mol_type = other DNA
ctctcaccgccgcggcccgggttcgattcccgg

SEQ ID NO: 39693 - DNA, 34 bp, synthetic construct
  misc_feature 1..34: note = Probe
  source 1..34: mol_type = other DNA
ctctcaccgccgcggcccgggttcgattcccggt

SEQ ID NO: 39694 - DNA, 36 bp, synthetic construct; identical to SEQ ID NO: 30907
  misc_feature 1..36: note = Probe
  source 1..36: mol_type = other DNA

SEQ ID NO: 39695 - DNA, 37 bp, synthetic construct
  misc_feature 1..37: note = Probe
  source 1..37: mol_type = other DNA
ctctcaccgccgcggcccgggttcgattcccggtcag

SEQ ID NO: 39696 - DNA, 38 bp, synthetic construct
  misc_feature 1..38: note = Probe
  source 1..38: mol_type = other DNA
ctctcaccgccgcggcccgggttcgattcccggtcagg

SEQ ID NO: 39697 - DNA, 39 bp, synthetic construct
  misc_feature 1..39: note = Probe
  source 1..39: mol_type = other DNA
ctctcaccgccgcggcccgggttcgattcccggtcagga

SEQ ID NO: 39698 - DNA, 41 bp, synthetic construct
  misc_feature 1..41: note = Probe
  source 1..41: mol_type = other DNA
ctctcaccgccgcggcccgggttcgattcccggtcaggaaa

SEQ ID NO: 39699 - DNA, 50 bp, synthetic construct
  misc_feature 1..50: note = Probe
  source 1..50: mol_type = other DNA
ctctcaccgccgcggcccgggttcgattcccggtcaggaaagtaagccgt

SEQ ID NO: 39700 - DNA, 42 bp, synthetic construct
  misc_feature 1..42: note = Probe
  source 1..42: mol_type = other DNA
ctctcaccgccgcggcccgggttcgattcccggtcagggaaa

SEQ ID NO: 39701 - DNA, 44 bp, synthetic construct; identical to SEQ ID NO: 30908
  misc_feature 1..44: note = Probe
  source 1..44: mol_type = other DNA

SEQ ID NO: 39702 - DNA, 46 bp, synthetic construct
  misc_feature 1..46: note = Probe
  source 1..46: mol_type = other DNA
ctctcaccgccgcggcccgggttcgattcccggtcagggaaagagt

SEQ ID NO: 39703 - DNA, 50 bp, synthetic construct
  misc_feature 1..50: note = Probe
  source 1..50: mol_type = other DNA
ctctcaccgccgcggcccgggttcgattcccggtcagggaaagagtaaca

SEQ ID NO: 39704 - DNA, 42 bp, synthetic construct
  misc_feature 1..42: note = Probe
  source 1..42: mol_type = other DNA
ctctcaccgccgcggcccgggttcgattcccggtcagggaag

SEQ ID NO: 39705 - DNA, 44 bp, synthetic construct; identical to SEQ ID NO: 19591
  misc_feature 1..44: note = Probe
  source 1..44: mol_type = other DNA

SEQ ID NO: 39706 - DNA, 45 bp, synthetic construct
  misc_feature 1..45: note = Probe
  source 1..45: mol_type = other DNA
ctctcaccgccgcggcccgggttcgattcccggtcagggaagcct

SEQ ID NO: 39707 - DNA, 46 bp, synthetic construct
  misc_feature 1..46: note = Probe
  source 1..46: mol_type = other DNA
ctctcaccgccgcggcccgggttcgattcccggtcagggaagcctt

SEQ ID NO: 39708 - DNA, 50 bp, synthetic construct
  misc_feature 1..50: note = Probe
  source 1..50: mol_type = other DNA
ctctcaccgccgcggcccgggttcgattcccggtcagggaagccttcctt

SEQ ID NO: 39709 - DNA, 44 bp, synthetic construct; identical to SEQ ID NO: 19592
  misc_feature 1..44: note = Probe
  source 1..44: mol_type = other DNA

SEQ ID NO: 39710 - DNA, 45 bp, synthetic construct
  misc_feature 1..45: note = Probe
  source 1..45: mol_type = other DNA
ctctcaccgccgcggcccgggttcgattcccggtcagggaagtct

SEQ ID NO: 39711 - DNA, 46 bp, synthetic construct
  misc_feature 1..46: note = Probe
  source 1..46: mol_type = other DNA
ctctcaccgccgcggcccgggttcgattcccggtcagggaagtctt

SEQ ID NO: 39712 - DNA, 50 bp, synthetic construct
  misc_feature 1..50: note = Probe
  source 1..50: mol_type = other DNA
ctctcaccgccgcggcccgggttcgattcccggtcagggaagtcttgttt

SEQ ID NO: 39713 - DNA, 42 bp, synthetic construct
  misc_feature 1..42: note = Probe
  source 1..42: mol_type = other DNA
ctctcaccgccgcggcccgggttcgattcccggtcagggaat

SEQ ID NO: 39714 - DNA, 44 bp, synthetic construct; identical to SEQ ID NO: 30910
  misc_feature 1..44: note = Probe
  source 1..44: mol_type = other DNA

SEQ ID NO: 39715 - DNA, 45 bp, synthetic construct
  misc_feature 1..45: note = Probe
  source 1..45: mol_type = other DNA
ctctcaccgccgcggcccgggttcgattcccggtcagggaatgag

SEQ ID NO: 39716 - DNA, 46 bp, synthetic construct
  misc_feature 1..46: note = Probe
  source 1..46: mol_type = other DNA
ctctcaccgccgcggcccgggttcgattcccggtcagggaatgagg

SEQ ID NO: 39717 - DNA, 50 bp, synthetic construct
  misc_feature 1..50: note = Probe
  source 1..50: mol_type = other DNA
ctctcaccgccgcggcccgggttcgattcccggtcagggaatgaggtttt

SEQ ID NO: 39718 - DNA, 22 bp, synthetic construct
  misc_feature 1..22: note = Probe
  source 1..22: mol_type = other DNA
ctctgaatccagcgatccgagt

SEQ ID NO: 39719 - DNA, 31 bp, synthetic construct
  misc_feature 1..31: note = Probe
  source 1..31: mol_type = other DNA
ctctgaatccagcgatccgagttcaaatctc

SEQ ID NO: 39720 - DNA, 41 bp, synthetic construct
  misc_feature 1..41: note = Probe
  source 1..41: mol_type = other DNA
ctctgaatccagcgatccgagttcaaatctcggtggaacct

SEQ ID NO: 39721 - DNA, 44 bp, synthetic construct; identical to SEQ ID NO: 5275
  misc_feature 1..44: note = Probe
  source 1..44: mol_type = other DNA

SEQ ID NO: 39722 - DNA, 17 bp, synthetic construct
  misc_feature 1..17: note = Probe
  source 1..17: mol_type = other DNA
ctctggcagttctcaag

SEQ ID NO: 39723 - DNA, 20 bp, synthetic construct
  misc_feature 1..20: note = Probe
  source 1..20: mol_type = other DNA
ctcttaatcccagggtcgtg

SEQ ID NO: 39724 - DNA, 21 bp, synthetic construct
  misc_feature 1..21: note = Probe
  source 1..21: mol_type = other DNA
ctcttaatcccagggtcgtgg

SEQ ID NO: 39725 - DNA, 45 bp, synthetic construct
  misc_feature 1..45: note = Probe
  source 1..45: mol_type = other DNA
ctcttaatcccagggtcgtgggttcgagccccacgttgggcgggt

SEQ ID NO: 39726 - DNA, 50 bp, synthetic construct
  misc_feature 1..50: note = Probe
  source 1..50: mol_type = other DNA
ctcttaatcccagggtcgtgggttcgagccccacgttgggcgggtttgtt

SEQ ID NO: 39727 - DNA, 20 bp, synthetic construct
  misc_feature 1..20: note = Probe
  source 1..20: mol_type = other DNA
ctcttaatctcagggtcgtg

SEQ ID NO: 39728 - DNA, 21 bp, synthetic construct
  misc_feature 1..21: note = Probe
  source 1..21: mol_type = other DNA
ctcttaatctcagggtcgtgg

SEQ ID NO: 39729 - DNA, 22 bp, synthetic construct
  misc_feature 1..22: note = Probe
  source 1..22: mol_type = other DNA
ctcttaatctcagggtcgtggg

SEQ ID NO: 39730 - DNA, 23 bp, synthetic construct
  misc_feature 1..23: note = Probe
  source 1..23: mol_type = other DNA
ctcttaatctcagggtcgtgggt

SEQ ID NO: 39731 - DNA, 50 bp, synthetic construct
  misc_feature 1..50: note = Probe
  source 1..50: mol_type = other DNA
ctcttaatctcagggtcgtgggttcgagccccacgttgggcgattccttt

SEQ ID NO: 39732 - DNA, 50 bp, synthetic construct
  misc_feature 1..50: note = Probe
  source 1..50: mol_type = other DNA
ctcttaatctcagggtcgtgggttcgagccccacgttgggcgctctggtt

SEQ ID NO: 39733 - DNA, 45 bp, synthetic construct
  misc_feature 1..45: note = Probe
  source 1..45: mol_type = other DNA
ctcttaatctcagggtcgtgggttcgagccccacgttgggcgctg

SEQ ID NO: 39734 - DNA, 50 bp, synthetic construct
  misc_feature 1..50: note = Probe
  source 1..50: mol_type = other DNA
ctcttaatctcagggtcgtgggttcgagccccacgttgggcgctgtgttt

SEQ ID NO: 39735 - DNA, 45 bp, synthetic construct
  misc_feature 1..45: note = Probe
  source 1..45: mol_type = other DNA
ctcttaatctcagggtcgtgggttcgagccccacgttgggcggca

SEQ ID NO: 39736 - DNA, 50 bp, synthetic construct
  misc_feature 1..50: note = Probe
  source 1..50: mol_type = other DNA
ctcttaatctcagggtcgtgggttcgagccccacgttgggcggcaactgg

SEQ ID NO: 39737 - DNA, 50 bp, synthetic construct
  misc_feature 1..50: note = Probe
  source 1..50: mol_type = other DNA
ctcttaatctcagggtcgtgggttcgagccccacgttgggcgtaatttcg

SEQ ID NO: 39738 - DNA, 50 bp, synthetic construct; identical to SEQ ID NO: 5278
  misc_feature 1..50: note = Probe
  source 1..50: mol_type = other DNA

SEQ ID NO: 39739 - DNA, 42 bp, synthetic construct; identical to SEQ ID NO: 5280
  misc_feature 1..42: note = Probe
  source 1..42: mol_type = other DNA

SEQ ID NO: 39740 - DNA, 43 bp, synthetic construct; identical to SEQ ID NO: 5281
  misc_feature 1..43: note = Probe
  source 1..43: mol_type = other DNA

SEQ ID NO: 39741 - DNA, 44 bp, synthetic construct; identical to SEQ ID NO: 5282
  misc_feature 1..44: note = Probe
  source 1..44: mol_type = other DNA

SEQ ID NO: 39742 - DNA, 21 bp, synthetic construct
  misc_feature 1..21: note = Probe
  source 1..21: mol_type = other DNA
ctgaagatctaaaggtccctg

SEQ ID NO: 39743 - DNA, 22 bp, synthetic construct
  misc_feature 1..22: note = Probe
  source 1..22: mol_type = other DNA
ctgaagatctaaaggtccctgg

SEQ ID NO: 39744 - DNA, 50 bp, synthetic construct
  misc_feature 1..50: note = Probe
  source 1..50: mol_type = other DNA
ctgaaggcattcaaaggttccgggttcgagtcccggcggagtcgtaacgc

SEQ ID NO: 39745 - DNA, 20 bp, synthetic construct
  misc_feature 1..20: note = Probe
  source 1..20: mol_type = other DNA
ctgaatccagcgatccgagt

SEQ ID NO: 39746 - DNA, 36 bp, synthetic construct; identical to SEQ ID NO: 5300
  misc_feature 1..36: note = Probe
  source 1..36: mol_type = other DNA

SEQ ID NO: 39747 - DNA, 32 bp, synthetic construct; identical to SEQ ID NO: 5303
  misc_feature 1..32: note = Probe
  source 1..32: mol_type = other DNA

SEQ ID NO: 39748 - DNA, 21 bp, synthetic construct
  misc_feature 1..21: note = Probe
  source 1..21: mol_type = other DNA
ctgataacaccaaggtcgcgg

SEQ ID NO: 39749 - DNA, 22 bp, synthetic construct
  misc_feature 1..22: note = Probe
  source 1..22: mol_type = other DNA
ctgataacaccaaggtcgcggg

SEQ ID NO: 39750 - DNA, 23 bp, synthetic construct
  misc_feature 1..23: note = Probe
  source 1..23: mol_type = other DNA
ctgataacaccaaggtcgcgggc

SEQ ID NO: 39751 - DNA, 30 bp, synthetic construct
  misc_feature 1..30: note = Probe
  source 1..30: mol_type = other DNA
ctgcagctagctcagtcggtagagcatgag

SEQ ID NO: 39752 - DNA, 31 bp, synthetic construct; identical to SEQ ID NO: 19621
  misc_feature 1..31: note = Probe
  source 1..31: mol_type = other DNA

SEQ ID NO: 39753 - DNA, 32 bp, synthetic construct; identical to SEQ ID NO: 19622
  misc_feature 1..32: note = Probe
  source 1..32: mol_type = other DNA

SEQ ID NO: 39754 - DNA, 28 bp, synthetic construct
  misc_feature 1..28: note = Probe
  source 1..28: mol_type = other DNA
ctgccacacctcagaaggtctcactttt

SEQ ID NO: 39755 - DNA, 21 bp, synthetic construct
  misc_feature 1..21: note = Probe
  source 1..21: mol_type = other DNA
ctgccacgcgggaggcccggg

SEQ ID NO: 39756 - DNA, 35 bp, synthetic construct
  misc_feature 1..35: note = Probe
  source 1..35: mol_type = other DNA
ctgccacgcgggaggcccgggttcgattcccggcc

SEQ ID NO: 39757 - DNA, 38 bp, synthetic construct
  misc_feature 1..38: note = Probe
  source 1..38: mol_type = other DNA
ctgccacgcgggaggcccgggttcgattcccggccaat

SEQ ID NO: 39758 - DNA, 41 bp, synthetic construct
  misc_feature 1..41: note = Probe
  source 1..41: mol_type = other DNA
ctgccacgcgggaggcccgggttcgattcccggccaatgca

SEQ ID NO: 39759 - DNA, 50 bp, synthetic construct
  misc_feature 1..50: note = Probe
  source 1..50: mol_type = other DNA
ctgccacgcgggaggcccgggttcgattcccggccaatgcaacgatgacg

SEQ ID NO: 39760 - DNA, 50 bp, synthetic construct
  misc_feature 1..50: note = Probe
  source 1..50: mol_type = other DNA
ctgccacgcgggaggcccgggttcgattcccggccaatgcaagttttgac

SEQ ID NO: 39761 - DNA, 50 bp, synthetic construct
  misc_feature 1..50: note = Probe
  source 1..50: mol_type = other DNA
ctgccacgcgggaggcccgggttcgattcccggccaatgcacgagtacag

SEQ ID NO: 39762 - DNA, 50 bp, synthetic construct
  misc_feature 1..50: note = Probe
  source 1..50: mol_type = other DNA
ctgccacgcgggaggcccgggttcgattcccggccaatgcactttcattt

SEQ ID NO: 39763 - DNA, 50 bp, synthetic construct
  misc_feature 1..50: note = Probe
  source 1..50: mol_type = other DNA
ctgccacgcgggaggcccgggttcgattcccggccaatgcagcagctgaa

SEQ ID NO: 39764 - DNA, 41 bp, synthetic construct
  misc_feature 1..41: note = Probe
  source 1..41: mol_type = other DNA
ctgccacgcgggaggcccgggttcgattcccggcccatgca

SEQ ID NO: 39765 - DNA, 44 bp, synthetic construct
  misc_feature 1..44: note = Probe
  source 1..44: mol_type = other DNA
ctgccacgcgggaggcccgggttcgattcccggcccatgcagca

SEQ ID NO: 39766 - DNA, 50 bp, synthetic construct
  misc_feature 1..50: note = Probe
  source 1..50: mol_type = other DNA
ctgccacgcgggaggcccgggttcgattcccggcccatgcagcacgccct

SEQ ID NO: 39767 - DNA, 30 bp, synthetic construct; identical to SEQ ID NO: 5308
  misc_feature 1..30: note = Probe
  source 1..30: mol_type = other DNA

SEQ ID NO: 39768 - DNA, 21 bp, synthetic construct
  misc_feature 1..21: note = Probe
  source 1..21: mol_type = other DNA
ctgctaactcatgcccccatg

SEQ ID NO: 39769 - DNA, 45 bp, synthetic construct; identical to SEQ ID NO: 5323
  misc_feature 1..45: note = Probe
  source 1..45: mol_type = other DNA

SEQ ID NO: 39770 - DNA, 18 bp, synthetic construct
  misc_feature 1..18: note = Probe
  source 1..18: mol_type = other DNA
ctgctaatccattgtgct

SEQ ID NO: 39771 - DNA, 50 bp, synthetic construct
  misc_feature 1..50: note = Probe
  source 1..50: mol_type = other DNA
ctgctaatccattgtgctttgcacgcgtgggttcgaatcccatcctcgtc

SEQ ID NO: 39772 - DNA, 24 bp, synthetic construct
  misc_feature 1..24: note = Probe
  source 1..24: mol_type = other DNA
ctggaaagtgcacttggacgaacc

SEQ ID NO: 39773 - DNA, 30 bp, synthetic construct
  misc_feature 1..30: note = Probe
  source 1..30: mol_type = other DNA
ctggatgccatagtggggcccttcacttac

SEQ ID NO: 39774 - DNA, 24 bp, synthetic construct
  misc_feature 1..24: note = Probe
  source 1..24: mol_type = other DNA
ctggctggctcgcgatgtctgttt

SEQ ID NO: 39775 - DNA, 25 bp, synthetic construct
  misc_feature 1..25: note = Probe
  source 1..25: mol_type = other DNA
ctggctggctcgcgatgtctgtttt

SEQ ID NO: 39776 - DNA, 28 bp, synthetic construct
  misc_feature 1..28: note = Probe
  source 1..28: mol_type = other DNA
ctggctggctcgcttgtgctctcacttt

SEQ ID NO: 39777 - DNA, 32 bp, synthetic construct; identical to SEQ ID NO: 5327
  misc_feature 1..32: note = Probe
  source 1..32: mol_type = other DNA

SEQ ID NO: 39778 - DNA, 21 bp, synthetic construct
  misc_feature 1..21: note = Probe
  source 1..21: mol_type = other DNA
ctggggcctgcttccgtcttt

SEQ ID NO: 39779 - DNA, 25 bp, synthetic construct
  misc_feature 1..25: note = Probe
  source 1..25: mol_type = other DNA
ctggtggtctagtggctaggattcg

SEQ ID NO: 39780 - DNA, 25 bp, synthetic construct
  misc_feature 1..25: note = Probe
  source 1..25: mol_type = other DNA
ctggtggtctagtggttaggattcg

SEQ ID NO: 39781 - DNA, 26 bp, synthetic construct
  misc_feature 1..26: note = Probe
  source 1..26: mol_type = other DNA
ctggtggtctagtggttaggattcgg

SEQ ID NO: 39782 - DNA, 20 bp, synthetic construct
  misc_feature 1..20: note = Probe
  source 1..20: mol_type = other DNA
ctggtgtagtggtatcatgc

SEQ ID NO: 39783 - DNA, 25 bp, synthetic construct
  misc_feature 1..25: note = Probe
  source 1..25: mol_type = other DNA
ctgtagtgtagtggttatcacgttc

SEQ ID NO: 39784 - DNA, 24 bp, synthetic construct
  misc_feature 1..24: note = Probe
  source 1..24: mol_type = other DNA
ctgtcacgcgggagaccggggttc

SEQ ID NO: 39785 - DNA, 25 bp, synthetic construct
  misc_feature 1..25: note = Probe
  source 1..25: mol_type = other DNA
ctgtcacgcgggagaccggggttca

SEQ ID NO: 39786 - DNA, 34 bp, synthetic construct
  misc_feature 1..34: note = Probe
  source 1..34: mol_type = other DNA
ctgtcacgcgggagaccggggttcaattccccga

SEQ ID NO: 39787 - DNA, 35 bp, synthetic construct
  misc_feature 1..35: note = Probe
  source 1..35: mol_type = other DNA
ctgtcacgcgggagaccggggttcaattccccgac

SEQ ID NO: 39788 - DNA, 37 bp, synthetic construct; identical to SEQ ID NO: 19671
  misc_feature 1..37: note = Probe
  source 1..37: mol_type = other DNA

SEQ ID NO: 39789 - DNA, 42 bp, synthetic construct
  misc_feature 1..42: note = Probe
  source 1..42: mol_type = other DNA
ctgtcacgcgggagaccggggttcaattccccgacggggagg

SEQ ID NO: 39790 - DNA, 44 bp, synthetic construct; identical to SEQ ID NO: 5338
  misc_feature 1..44: note = Probe
  source 1..44: mol_type = other DNA

SEQ ID NO: 39791 - DNA, 50 bp, synthetic construct
  misc_feature 1..50: note = Probe
  source 1..50: mol_type = other DNA
ctgtcacgcgggagaccggggttcaattccccgacggggaggtgtgtagc

SEQ ID NO: 39792 - DNA, 26 bp, synthetic construct
  misc_feature 1..26: note = Probe
  source 1..26: mol_type = other DNA
ctgtcacgcgggagaccggggttcga

SEQ ID NO: 39793 - DNA, 27 bp, synthetic construct
  misc_feature 1..27: note = Probe
  source 1..27: mol_type = other DNA
ctgtcacgcgggagaccggggttcgat

SEQ ID NO: 39794 - DNA, 33 bp, synthetic construct
  misc_feature 1..33: note = Probe
  source 1..33: mol_type = other DNA
ctgtcacgcgggagaccggggttcgattcccca

SEQ ID NO: 39795 - DNA, 34 bp, synthetic construct
  misc_feature 1..34: note = Probe
  source 1..34: mol_type = other DNA
ctgtcacgcgggagaccggggttcgattccccaa

SEQ ID NO: 39796 - DNA, 41 bp, synthetic construct
  misc_feature 1..41: note = Probe
  source 1..41: mol_type = other DNA
ctgtcacgcgggagaccggggttcgattccccaacggggag

SEQ ID NO: 39797 - DNA, 50 bp, synthetic construct
  misc_feature 1..50: note = Probe
  source 1..50: mol_type = other DNA
ctgtcacgcgggagaccggggttcgattccccaacggggaggctaataat

SEQ ID NO: 39798 - DNA, 33 bp, synthetic construct
  misc_feature 1..33: note = Probe
  source 1..33: mol_type = other DNA
ctgtcacgcgggagaccggggttcgattccccg

SEQ ID NO: 39799 - DNA, 42 bp, synthetic construct; identical to SEQ ID NO: 19677
  misc_feature 1..42: note = Probe
  source 1..42: mol_type = other DNA

SEQ ID NO: 39800 - DNA, 44 bp, synthetic construct; identical to SEQ ID NO: 19678
  misc_feature 1..44: note = Probe
  source 1..44: mol_type = other DNA

SEQ ID NO: 39801 - DNA, 45 bp, synthetic construct
  misc_feature 1..45: note = Probe
  source 1..45: mol_type = other DNA
ctgtcacgcgggagaccggggttcgattccccgacggggagaaaa

SEQ ID NO: 39802 - DNA, 46 bp, synthetic construct
  misc_feature 1..46: note = Probe
  source 1..46: mol_type = other DNA
ctgtcacgcgggagaccggggttcgattccccgacggggagaaaag

SEQ ID NO: 39803 - DNA, 50 bp, synthetic construct
  misc_feature 1..50: note = Probe
  source 1..50: mol_type = other DNA
ctgtcacgcgggagaccggggttcgattccccgacggggagaaaagttgc

SEQ ID NO: 39804 - DNA, 44 bp, synthetic construct; identical to SEQ ID NO: 19679
  misc_feature 1..44: note = Probe
  source 1..44: mol_type = other DNA

SEQ ID NO: 39805 - DNA, 45 bp, synthetic construct
  misc_feature 1..45: note = Probe
  source 1..45: mol_type = other DNA
ctgtcacgcgggagaccggggttcgattccccgacggggagacga

SEQ ID NO: 39806 - DNA, 50 bp, synthetic construct
  misc_feature 1..50: note = Probe
  source 1..50: mol_type = other DNA
ctgtcacgcgggagaccggggttcgattccccgacggggagacgaagcag

SEQ ID NO: 39807 - DNA, 44 bp, synthetic construct; identical to SEQ ID NO: 5339
  misc_feature 1..44: note = Probe
  source 1..44: mol_type = other DNA

SEQ ID NO: 39808 - DNA, 50 bp, synthetic construct
  misc_feature 1..50: note = Probe
  source 1..50: mol_type = other DNA
ctgtcacgcgggagaccggggttcgattccccgacggggagagtactagc

SEQ ID NO: 39809 - DNA, 42 bp, synthetic construct; identical to SEQ ID NO: 19681
  misc_feature 1..42: note = Probe
  source 1..42: mol_type = other DNA

SEQ ID NO: 39810 - DNA, 45 bp, synthetic construct
  misc_feature 1..45: note = Probe
  source 1..45: mol_type = other DNA
ctgtcacgcgggagaccggggttcgattccccgacggggaggagg

SEQ ID NO: 39811 - DNA, 50 bp, synthetic construct
  misc_feature 1..50: note = Probe
  source 1..50: mol_type = other DNA
ctgtcacgcgggagaccggggttcgattccccgacggggaggaggcttaa

SEQ ID NO: 39812 - DNA, 44 bp, synthetic construct; identical to SEQ ID NO: 5340
  misc_feature 1..44: note = Probe
  source 1..44: mol_type = other DNA

SEQ ID NO: 39813 - DNA, 45 bp, synthetic construct
  misc_feature 1..45: note = Probe
  source 1..45: mol_type = other DNA
ctgtcacgcgggagaccggggttcgattccccgacggggaggcac

SEQ ID NO: 39814 - DNA, 49 bp, synthetic construct
  misc_feature 1..49: note = Probe
  source 1..49: mol_type = other DNA
ctgtcacgcgggagaccggggttcgattccccgacggggaggcacagta

SEQ ID NO: 39815 - DNA, 50 bp, synthetic construct; identical to SEQ ID NO: 5341
  misc_feature 1..50: note = Probe
  source 1..50: mol_type = other DNA

SEQ ID NO: 39816 - DNA, 46 bp, synthetic construct
  misc_feature 1..46: note = Probe
  source 1..46: mol_type = other DNA
ctgtcacgcgggagaccggggttcgattccccgacggggaggcagc

SEQ ID NO: 39817 - DNA, 50 bp, synthetic construct
  misc_feature 1..50: note = Probe
  source 1..50: mol_type = other DNA
ctgtcacgcgggagaccggggttcgattccccgacggggaggcagccgtg

SEQ ID NO: 39818 - DNA, 44 bp, synthetic construct; identical to SEQ ID NO: 19684
  misc_feature 1..44: note = Probe
  source 1..44: mol_type = other DNA

SEQ ID NO: 39819 - DNA, 45 bp, synthetic construct
  misc_feature 1..45: note = Probe
  source 1..45: mol_type = other DNA
ctgtcacgcgggagaccggggttcgattccccgacggggaggcca

SEQ ID NO: 39820 - DNA, 46 bp, synthetic construct
  misc_feature 1..46: note = Probe
  source 1..46: mol_type = other DNA
ctgtcacgcgggagaccggggttcgattccccgacggggaggccaa

SEQ ID NO: 39821 - DNA, 50 bp, synthetic construct
  misc_feature 1..50: note = Probe
  source 1..50: mol_type = other DNA
ctgtcacgcgggagaccggggttcgattccccgacggggaggccaagtac

SEQ ID NO: 39822 - DNA, 45 bp, synthetic construct
  misc_feature 1..45: note = Probe
  source 1..45: mol_type = other DNA
ctgtcacgcgggagaccggggttcgattccccgacggggaggccg

SEQ ID NO: 39823 - DNA, 46 bp, synthetic construct
  misc_feature 1..46: note = Probe
  source 1..46: mol_type = other DNA
ctgtcacgcgggagaccggggttcgattccccgacggggaggccgg

SEQ ID NO: 39824 - DNA, 50 bp, synthetic construct
  misc_feature 1..50: note = Probe
  source 1..50: mol_type = other DNA
ctgtcacgcgggagaccggggttcgattccccgacggggaggccgggtac

SEQ ID NO: 39825 - DNA, 23 bp, synthetic construct
  misc_feature 1..23: note = Probe
  source 1..23: mol_type = other DNA
ctgtgctccggagttacctcgtt

SEQ ID NO: 39826 - DNA, 24 bp, synthetic construct
  misc_feature 1..24: note = Probe
  source 1..24: mol_type = other DNA
ctgtgctccggagttacctcgttt

SEQ ID NO: 39827 - DNA, 25 bp, synthetic construct
  misc_feature 1..25: note = Probe
  source 1..25: mol_type = other DNA
ctgtgctccggagttacctcgtttt

SEQ ID NO: 39828 - DNA, 21 bp, synthetic construct
  misc_feature 1..21: note = Probe
  source 1..21: mol_type = other DNA
ctgttaaccgaaaagttggtg

SEQ ID NO: 39829 - DNA, 22 bp, synthetic construct
  misc_feature 1..22: note = Probe
  source 1..22: mol_type = other DNA
ctgttaaccgaaagattggtgg

SEQ ID NO: 39830 - DNA, 21 bp, synthetic construct
  misc_feature 1..21: note = Probe
  source 1..21: mol_type = other DNA
ctgttaaccgaaagcttggtg

SEQ ID NO: 39831 - DNA, 22 bp, synthetic construct
  misc_feature 1..22: note = Probe
  source 1..22: mol_type = other DNA
ctgttaaccgaaagcttggtgg

SEQ ID NO: 39832 - DNA, 17 bp, synthetic construct
  misc_feature 1..17: note = Probe
  source 1..17: mol_type = other DNA
ctgttaaccgaaaggtt

SEQ ID NO: 39833 - DNA, 18 bp, synthetic construct
  misc_feature 1..18: note = Probe
  source 1..18: mol_type = other DNA
ctgttaaccgaaaggttg

SEQ ID NO: 39834 - DNA, 24 bp, synthetic construct
  misc_feature 1..24: note = Probe
  source 1..24: mol_type = other DNA
ctgttaaccgaaaggttggtggtt

SEQ ID NO: 39835 - DNA, 34 bp, synthetic construct
  misc_feature 1..34: note = Probe
  source 1..34: mol_type = other DNA
ctgttaaccgaaaggttggtggttcgagcccacc

SEQ ID NO: 39836 - DNA, 38 bp, synthetic construct
  misc_feature 1..38: note = Probe
  source 1..38: mol_type = other DNA
ctgttaaccgaaaggttggtggttcgagcccacccagg

SEQ ID NO: 39837 - DNA, 45 bp, synthetic construct
  misc_feature 1..45: note = Probe
  source 1..45: mol_type = other DNA
ctgttaaccgaaaggttggtggttcgagcccacccagggacgcct

SEQ ID NO: 39838 - DNA, 49 bp, synthetic construct
  misc_feature 1..49: note = Probe
  source 1..49: mol_type = other DNA
ctgttaaccgaaaggttggtggttcgagcccacccagggacgcctcttt

SEQ ID NO: 39839 - DNA, 50 bp, synthetic construct
  misc_feature 1..50: note = Probe
  source 1..50: mol_type = other DNA
ctgttaaccgaaaggttggtggttcgagcccacccagggacgcctctttg

SEQ ID NO: 39840 - DNA, 49 bp, synthetic construct
  misc_feature 1..49: note = Probe
  source 1..49: mol_type = other DNA
ctgttaaccgaaaggttggtggttcgagcccacccagggacgcgctctc

SEQ ID NO: 39841 - DNA, 50 bp, synthetic construct
  misc_feature 1..50: note = Probe
  source 1..50: mol_type = other DNA
ctgttaaccgaaaggttggtggttcgagcccacccagggacgcgctctcc

SEQ ID NO: 39842 - DNA, 45 bp, synthetic construct
  misc_feature 1..45: note = Probe
  source 1..45: mol_type = other DNA
ctgttaaccgaaaggttggtggttcgagcccacccagggacgcgt

SEQ ID NO: 39843 - DNA, 49 bp, synthetic construct
  misc_feature 1..49: note = Probe
  source 1..49: mol_type = other DNA
ctgttaaccgaaaggttggtggttcgagcccacccagggacgcgtggtg

SEQ ID NO: 39844 - DNA, 50 bp, synthetic construct
  misc_feature 1..50: note = Probe
  source 1..50: mol_type = other DNA
ctgttaaccgaaaggttggtggttcgagcccacccagggacgcgtggtga

SEQ ID NO: 39845 - DNA, 45 bp, synthetic construct
  misc_feature 1..45: note = Probe
  source 1..45: mol_type = other DNA
ctgttaaccgaaaggttggtggttcgagcccacccagggacgcta

SEQ ID NO: 39846 - DNA, 50 bp, synthetic construct
  misc_feature 1..50: note = Probe
  source 1..50: mol_type = other DNA
ctgttaaccgaaaggttggtggttcgagcccacccagggacgctatgacc

SEQ ID NO: 39847 - DNA, 50 bp, synthetic construct
  misc_feature 1..50: note = Probe
  source 1..50: mol_type = other DNA
ctgttaaccgaaaggttggtggttcgagcccacccagggacggctgaaat

SEQ ID NO: 39848 - DNA, 21 bp, synthetic construct
  misc_feature 1..21: note = Probe
  source 1..21: mol_type = other DNA
ctgttaaccggaaagttggtg

SEQ ID NO: 39849 - DNA, 45 bp, synthetic construct; identical to SEQ ID NO: 5346
  misc_feature 1..45: note = Probe
  source 1..45: mol_type = other DNA

SEQ ID NO: 39850 - DNA, 21 bp, synthetic construct
  misc_feature 1..21: note = Probe
  source 1..21: mol_type = other DNA
ctgttaactgaaaggttagtg

SEQ ID NO: 39851 - DNA, 21 bp, synthetic construct
  misc_feature 1..21: note = Probe
  source 1..21: mol_type = other DNA
ctgttaactgaaaggttggtg

SEQ ID NO: 39852 - DNA, 45 bp, synthetic construct; identical to SEQ ID NO: 5355
  misc_feature 1..45: note = Probe
  source 1..45: mol_type = other DNA

SEQ ID NO: 39853 - DNA, 22 bp, synthetic construct
  misc_feature 1..22: note = Probe
  source 1..22: mol_type = other DNA
cttaaacccccttatttctagg

SEQ ID NO: 39854 - DNA, 23 bp, synthetic construct
  misc_feature 1..23: note = Probe
  source 1..23: mol_type = other DNA
cttaaacccccttatttctagga

SEQ ID NO: 39855 - DNA, 50 bp, synthetic construct; identical to SEQ ID NO: 849
  misc_feature 1..50: note = Probe
  source 1..50: mol_type = other DNA

SEQ ID NO: 39856 - DNA, 18 bp, synthetic construct
  misc_feature 1..18: note = Probe
  source 1..18: mol_type = other DNA
cttaacttgaccgctctg

SEQ ID NO: 39857 - DNA, 22 bp, synthetic construct
  misc_feature 1..22: note = Probe
  source 1..22: mol_type = other DNA
cttaacttgaccgctctgagct

SEQ ID NO: 39858 - DNA, 18 bp, synthetic construct
  misc_feature 1..18: note = Probe
  source 1..18: mol_type = other DNA
cttaatcccagggtcgtg

SEQ ID NO: 39859 - DNA, 18 bp, synthetic construct
  misc_feature 1..18: note = Probe
  source 1..18: mol_type = other DNA
cttaatctcagggtcgtg

SEQ ID NO: 39860 - DNA, 20 bp, synthetic construct
  misc_feature 1..20: note = Probe
  source 1..20: mol_type = other DNA
cttacacttaggagatttca

SEQ ID NO: 39861 - DNA, 21 bp, synthetic construct
  misc_feature 1..21: note = Probe
  source 1..21: mol_type = other DNA
cttacacttaggagatttcaa

SEQ ID NO: 39862 - DNA, 42 bp, synthetic construct; identical to SEQ ID NO: 5371
  misc_feature 1..42: note = Probe
  source 1..42: mol_type = other DNA

SEQ ID NO: 39863 - DNA, 43 bp, synthetic construct; identical to SEQ ID NO: 5372
  misc_feature 1..43: note = Probe
  source 1..43: mol_type = other DNA

SEQ ID NO: 39864 - DNA, 44 bp, synthetic construct; identical to SEQ ID NO: 5373
  misc_feature 1..44: note = Probe
  source 1..44: mol_type = other DNA

SEQ ID NO: 39865 - DNA, 50 bp, synthetic construct
  misc_feature 1..50: note = Probe
  source 1..50: mol_type = other DNA
cttagcatgcacgaggtcctgggttcaatccccaatacctccaggttttg

SEQ ID NO: 39866 - DNA, 42 bp, synthetic construct
  misc_feature 1..42: note = Probe
  source 1..42: mol_type = other DNA
cttagcatgcacgaggtcctgggttcgatccccagtacctcc

SEQ ID NO: 39867 - DNA, 50 bp, synthetic construct
  misc_feature 1..50: note = Probe
  source 1..50: mol_type = other DNA
cttagcatgcatgaggtcccgggttcgatccccagcatctccagtgtttt

SEQ ID NO: 39868 - DNA, 50 bp, synthetic construct; identical to SEQ ID NO: 850
  misc_feature 1..50: note = Probe
  source 1..50: mol_type = other DNA

SEQ ID NO: 39869 - DNA, 36 bp, synthetic construct; identical to SEQ ID NO: 5390
  misc_feature 1..36: note = Probe
  source 1..36: mol_type = other DNA

SEQ ID NO: 39870 - DNA, 37 bp, synthetic construct; identical to SEQ ID NO: 5391
  misc_feature 1..37: note = Probe
  source 1..37: mol_type = other DNA

SEQ ID NO: 39871 - DNA, 22 bp, synthetic construct
  misc_feature 1..22: note = Probe
  source 1..22: mol_type = other DNA
cttaggatgcgagaggtcccgg

SEQ ID NO: 39872 - DNA, 23 bp, synthetic construct
  misc_feature 1..23: note = Probe
  source 1..23: mol_type = other DNA
cttaggatgcgagaggtcccggg

SEQ ID NO: 39873 - DNA, 21 bp, synthetic construct
  misc_feature 1..21: note = Probe
  source 1..21: mol_type = other DNA
cttagggtgcgagaggtcccg

SEQ ID NO: 39874 - DNA, 22 bp, synthetic construct
  misc_feature 1..22: note = Probe
  source 1..22: mol_type = other DNA
cttagggtgcgagaggtcccgg

SEQ ID NO: 39875 - DNA, 23 bp, synthetic construct
  misc_feature 1..23: note = Probe
  source 1..23: mol_type = other DNA
cttagggtgcgagaggtcccggg

SEQ ID NO: 39876 - DNA, 24 bp, synthetic construct
  misc_feature 1..24: note = Probe
  source 1..24: mol_type = other DNA
cttagggtgcgagaggtcccgggt

SEQ ID NO: 39877 - DNA, 41 bp, synthetic construct
  misc_feature 1..41: note = Probe
  source 1..41: mol_type = other DNA
cttagggtgcgagaggtcccgggttcaaatcccggacgagc

SEQ ID NO: 39878 - DNA, 50 bp, synthetic construct
  misc_feature 1..50: note = Probe
  source 1..50: mol_type = other DNA
cttagggtgcgagaggtcccgggttcaaatcccggacgagcccggctttt

SEQ ID NO: 39879 - DNA, 31 bp, synthetic construct; identical to SEQ ID NO: 19739
  misc_feature 1..31: note = Probe
  source 1..31: mol_type = other DNA

SEQ ID NO: 39880 - DNA, 20 bp, synthetic construct
  misc_feature 1..20: note = Probe
  source 1..20: mol_type = other DNA
cttcaaacctgccggggctt

SEQ ID NO: 39881 - DNA, 23 bp, synthetic construct
  misc_feature 1..23: note = Probe
  source 1..23: mol_type = other DNA
cttcaaacctgccggggcttctc

SEQ ID NO: 39882 - DNA, 31 bp, synthetic construct
  misc_feature 1..31: note = Probe
  source 1..31: mol_type = other DNA
cttccaagcagttgacccgggttcgattccc

SEQ ID NO: 39883 - DNA, 44 bp, synthetic construct
  misc_feature 1..44: note = Probe
  source 1..44: mol_type = other DNA
cttccaagcagttgacccgggttcgattcccggccaacgcaagt

SEQ ID NO: 39884 - DNA, 50 bp, synthetic construct
  misc_feature 1..50: note = Probe
  source 1..50: mol_type = other DNA
cttccaagcagttgacccgggttcgattcccggccaacgcaagtcgtttt

SEQ ID NO: 39885 - DNA, 44 bp, synthetic construct; identical to SEQ ID NO: 19748
  misc_feature 1..44: note = Probe
  source 1..44: mol_type = other DNA

SEQ ID NO: 39886 - DNA, 50 bp, synthetic construct
  misc_feature 1..50: note = Probe
  source 1..50: mol_type = other DNA
cttccaagcagttgacccgggttcgattcccggccaacgcagtgtcagtt

SEQ ID NO: 39887 - DNA, 21 bp, synthetic construct
  misc_feature 1..21: note = Probe
  source 1..21: mol_type = other DNA
cttccaattaactagttttga

SEQ ID NO: 39888 - DNA, 43 bp, synthetic construct; identical to SEQ ID NO: 5395
  misc_feature 1..43: note = Probe
  source 1..43: mol_type = other DNA

SEQ ID NO: 39889 - DNA, 50 bp, synthetic construct
  misc_feature 1..50: note = Probe
  source 1..50: mol_type = other DNA
cttcgcatgtatgaggtcccgggttcgatccccggcatctccaagttgtt

SEQ ID NO: 39890 - DNA, 20 bp, synthetic construct
  misc_feature 1..20: note = Probe
  source 1..20: mol_type = other DNA
cttcgggtgcgagaggtccc

SEQ ID NO: 39891 - DNA, 21 bp, synthetic construct
  misc_feature 1..21: note = Probe
  source 1..21: mol_type = other DNA
cttcgggtgcgagaggtcccg

SEQ ID NO: 39892 - DNA, 24 bp, synthetic construct
  misc_feature 1..24: note = Probe
  source 1..24: mol_type = other DNA
cttcgggtgcgagaggtcccgggt

SEQ ID NO: 39893 - DNA, 41 bp, synthetic construct
  misc_feature 1..41: note = Probe
  source 1..41: mol_type = other DNA
cttcgggtgcgagaggtcccgggttcaaatcccggacgagc

SEQ ID NO: 39894 - DNA, 46 bp, synthetic construct
  misc_feature 1..46: note = Probe
  source 1..46: mol_type = other DNA
cttcgggtgcgagaggtcccgggttcaaatcccggacgagccctcc

SEQ ID NO: 39895 - DNA, 50 bp, synthetic construct
  misc_feature 1..50: note = Probe
  source 1..50: mol_type = other DNA
cttcgggtgcgagaggtcccgggttcaaatcccggacgagccctccttta

SEQ ID NO: 39896 - DNA, 24 bp, synthetic construct
  misc_feature 1..24: note = Probe
  source 1..24: mol_type = other DNA
cttctgacagagctcaattacttt

SEQ ID NO: 39897 - DNA, 18 bp, synthetic construct
  misc_feature 1..18: note = Probe
  source 1..18: mol_type = other DNA
cttgaaatccaatggggt

SEQ ID NO: 39898 - DNA, 20 bp, synthetic construct
  misc_feature 1..20: note = Probe
  source 1..20: mol_type = other DNA
cttgaaatccattggggtct

SEQ ID NO: 39899 - DNA, 27 bp, synthetic construct
  misc_feature 1..27: note = Probe
  source 1..27: mol_type = other DNA
cttgaaatccattggggtctccccgcg

SEQ ID NO: 39900 - DNA, 29 bp, synthetic construct
  misc_feature 1..29: note = Probe
  source 1..29: mol_type = other DNA
cttgaaatccattggggtctccccgcgca

SEQ ID NO: 39901 - DNA, 31 bp, synthetic construct
  misc_feature 1..31: note = Probe
  source 1..31: mol_type = other DNA
cttgaaatccattggggtctccccgcgcagg

SEQ ID NO: 39902 - DNA, 27 bp, synthetic construct
  misc_feature 1..27: note = Probe
  source 1..27: mol_type = other DNA
cttgaaatccattggggtttccccgcg

SEQ ID NO: 39903 - DNA, 29 bp, synthetic construct
  misc_feature 1..29: note = Probe
  source 1..29: mol_type = other DNA
cttgaaatccattggggtttccccgcgca

SEQ ID NO: 39904 - DNA, 30 bp, synthetic construct
  misc_feature 1..30: note = Probe
  source 1..30: mol_type = other DNA
cttgaaatccattggggtttccccgcgcag

SEQ ID NO: 39905 - DNA, 31 bp, synthetic construct; identical to SEQ ID NO: 19754
  misc_feature 1..31: note = Probe
  source 1..31: mol_type = other DNA

SEQ ID NO: 39906 - DNA, 22 bp, synthetic construct
  misc_feature 1..22: note = Probe
  source 1..22: mol_type = other DNA
cttgtaaacaggagatcctggg

SEQ ID NO: 39907 - DNA, 21 bp, synthetic construct
  misc_feature 1..21: note = Probe
  source 1..21: mol_type = other DNA
cttgtaaaccaggggtcgcga

SEQ ID NO: 39908 - DNA, 45 bp, synthetic construct
  misc_feature 1..45: note = Probe
  source 1..45: mol_type = other DNA
cttgtaaaccaggggtcgcgagttcaaatctcgctggggcctcgg

SEQ ID NO: 39909 - DNA, 45 bp, synthetic construct
  misc_feature 1..45: note = Probe
  source 1..45: mol_type = other DNA
cttgtaaaccaggggtcgcgagttcaattctcgctggggcctgtg

SEQ ID NO: 39910 - DNA, 50 bp, synthetic construct
  misc_feature 1..50: note = Probe
  source 1..50: mol_type = other DNA
cttgtaaaccaggggtcgcgagttcaattctcgctggggcctgtgtgttt

SEQ ID NO: 39911 - DNA, 18 bp, synthetic construct
  misc_feature 1..18: note = Probe
  source 1..18: mol_type = other DNA
ctttacacgcagaaggtc

SEQ ID NO: 39912 - DNA, 19 bp, synthetic construct
  misc_feature 1..19: note = Probe
  source 1..19: mol_type = other DNA
ctttacacgcagaaggtcc

SEQ ID NO: 39913 - DNA, 20 bp, synthetic construct
  misc_feature 1..20: note = Probe
  source 1..20: mol_type = other DNA
ctttacacgcagaaggtcct

SEQ ID NO: 39914 - DNA, 46 bp, synthetic construct
  misc_feature 1..46: note = Probe
  source 1..46: mol_type = other DNA
ctttacacgcagaaggtcctgggttcaagccccagtggaaccatgg

SEQ ID NO: 39915 - DNA, 33 bp, synthetic construct
  misc_feature 1..33: note = Probe
  source 1..33: mol_type = other DNA
ctttacacgcagaaggtcctgggttcgagcccc

SEQ ID NO: 39916 - DNA, 34 bp, synthetic construct
  misc_feature 1..34: note = Probe
  source 1..34: mol_type = other DNA
ctttacacgcagaaggtcctgggttcgagcccca

SEQ ID NO: 39917 - DNA, 35 bp, synthetic construct
  misc_feature 1..35: note = Probe
  source 1..35: mol_type = other DNA
ctttacacgcagaaggtcctgggttcgagccccag

SEQ ID NO: 39918 - DNA, 45 bp, synthetic construct
  misc_feature 1..45: note = Probe
  source 1..45: mol_type = other DNA
ctttacacgcagaaggtcctgggttcgagccccagtggaaccacg

SEQ ID NO: 39919 - DNA, 46 bp, synthetic construct; identical to SEQ ID NO: 5397
  misc_feature 1..46: note = Probe
  source 1..46: mol_type = other DNA

SEQ ID NO: 39920 - DNA, 50 bp, synthetic construct
  misc_feature 1..50: note = Probe
  source 1..50: mol_type = other DNA
ctttacacgcagaaggtcctgggttcgagccccagtggaaccacggcgtg

SEQ ID NO: 39921 - DNA, 46 bp, synthetic construct
  misc_feature 1..46: note = Probe
  source 1..46: mol_type = other DNA
ctttacacgcagaaggtcctgggttcgagccccagtggaaccatag

SEQ ID NO: 39922 - DNA, 49 bp, synthetic construct
  misc_feature 1..49: note = Probe
  source 1..49: mol_type = other DNA
ctttacacgcagaaggtcctgggttcgagccccagtggaaccatagccg

SEQ ID NO: 39923 - DNA, 50 bp, synthetic construct
  misc_feature 1..50: note = Probe
  source 1..50: mol_type = other DNA
ctttacacgcagaaggtcctgggttcgagccccagtggaaccatagccgt

SEQ ID NO: 39924 - DNA, 49 bp, synthetic construct
  misc_feature 1..49: note = Probe
  source 1..49: mol_type = other DNA
ctttacacgcagaaggtcctgggttcgagccccagtggaaccatgagat

SEQ ID NO: 39925 - DNA, 50 bp, synthetic construct
  misc_feature 1..50: note = Probe
  source 1..50: mol_type = other DNA
ctttacacgcagaaggtcctgggttcgagccccagtggaaccatgagatg

SEQ ID NO: 39926 - DNA, 32 bp, synthetic construct
  misc_feature 1..32: note = Probe
  source 1..32: mol_type = other DNA
ctttacagtcagaggttcaattcctcttctta

SEQ ID NO: 39927 - DNA, 35 bp, synthetic construct; identical to SEQ ID NO: 19762
  misc_feature 1..35: note = Probe
  source 1..35: mol_type = other DNA

SEQ ID NO: 39928 - DNA, 38 bp, synthetic construct; identical to SEQ ID NO: 5400
  misc_feature 1..38: note = Probe
  source 1..38: mol_type = other DNA

SEQ ID NO: 39929 - DNA, 50 bp, synthetic construct
  misc_feature 1..50: note = Probe
  source 1..50: mol_type = other DNA
ctttcaagcagttaacgcgggttcgattcccgggtaacgaaacgtttttg

SEQ ID NO: 39930 - DNA, 41 bp, synthetic construct
  misc_feature 1..41: note = Probe
  source 1..41: mol_type = other DNA
ctttcaccgccgcggcccgggttcgattcccggtcagggaa

SEQ ID NO: 39931 - DNA, 49 bp, synthetic construct
  misc_feature 1..49: note = Probe
  source 1..49: mol_type = other DNA
ctttcaccgccgcggcccgggttcgattcccggtcagggaagtttgctt

SEQ ID NO: 39932 - DNA, 50 bp, synthetic construct
  misc_feature 1..50: note = Probe
  source 1..50: mol_type = other DNA
ctttcaccgccgcggcccgggttcgattcccggtcagggaagtttgcttt

SEQ ID NO: 39933 - DNA, 44 bp, synthetic construct
  misc_feature 1..44: note = Probe
  source 1..44: mol_type = other DNA
ctttcaccgccgcggcccgggttcgattcccggtcagggaattg

SEQ ID NO: 39934 - DNA, 49 bp, synthetic construct
  misc_feature 1..49: note = Probe
  source 1..49: mol_type = other DNA
ctttcaccgccgcggcccgggttcgattcccggtcagggaattgtttta

SEQ ID NO: 39935 - DNA, 50 bp, synthetic construct
  misc_feature 1..50: note = Probe
  source 1..50: mol_type = other DNA
ctttcaccgccgcggcccgggttcgattcccggtcagggaattgttttac

SEQ ID NO: 39936 - DNA, 22 bp, synthetic construct
  misc_feature 1..22: note = Probe
  source 1..22: mol_type = other DNA
ctttgaatccagcgatccgagt

SEQ ID NO: 39937 - DNA, 24 bp, synthetic construct
  misc_feature 1..24: note = Probe
  source 1..24: mol_type = other DNA
ctttgatagagtaaataataggag

SEQ ID NO: 39938 - DNA, 50 bp, synthetic construct; identical to SEQ ID NO: 5404
  misc_feature 1..50: note = Probe
  source 1..50: mol_type = other DNA

SEQ ID NO: 39939 - DNA, 29 bp, synthetic construct
  misc_feature 1..29: note = Probe
  source 1..29: mol_type = other DNA
ctttgcacgcgtgggttcgaatcccatcc

SEQ ID NO: 39940 - DNA, 31 bp, synthetic construct
  misc_feature 1..31: note = Probe
  source 1..31: mol_type = other DNA
ctttgcacgcgtgggttcgaatcccatcctc

SEQ ID NO: 39941 - DNA, 34 bp, synthetic construct
  misc_feature 1..34: note = Probe
  source 1..34: mol_type = other DNA
ctttgcacgcgtgggttcgaatcccatcctcgtc

SEQ ID NO: 39942 - DNA, 20 bp, synthetic construct
  misc_feature 1..20: note = Probe
  source 1..20: mol_type = other DNA
ctttgcacgtatgaggcccc

SEQ ID NO: 39943 - DNA, 22 bp, synthetic construct
  misc_feature 1..22: note = Probe
  source 1..22: mol_type = other DNA
ctttgcacgtatgaggccccgg

SEQ ID NO: 39944 - DNA, 46 bp, synthetic construct
  misc_feature 1..46: note = Probe
  source 1..46: mol_type = other DNA
ctttgcacgtatgaggccccgggttcaatccccggcatctccagac

SEQ ID NO: 39945 - DNA, 50 bp, synthetic construct
  misc_feature 1..50: note = Probe
  source 1..50: mol_type = other DNA
ctttgcacgtatgaggccccgggttcaatccccggcatctccagactttt

SEQ ID NO: 39946 - DNA, 21 bp, synthetic construct
  misc_feature 1..21: note = Probe
  source 1..21: mol_type = other DNA
ctttgcatgtatgaggcctcg

SEQ ID NO: 39947 - DNA, 32 bp, synthetic construct; identical to SEQ ID NO: 19773
  misc_feature 1..32: note = Probe
  source 1..32: mol_type = other DNA

SEQ ID NO: 39948 - DNA, 20 bp, synthetic construct
  misc_feature 1..20: note = Probe
  source 1..20: mol_type = other DNA
ctttgggtgcgagaggtccc

SEQ ID NO: 39949 - DNA, 21 bp, synthetic construct
  misc_feature 1..21: note = Probe
  source 1..21: mol_type = other DNA
ctttgggtgcgagaggtcccg

SEQ ID NO: 39950 - DNA, 41 bp, synthetic construct
  misc_feature 1..41: note = Probe
  source 1..41: mol_type = other DNA
ctttgggtgcgagaggtcccgggttcaaatcccggacgagc

SEQ ID NO: 39951 - DNA, 46 bp, synthetic construct
  misc_feature 1..46: note = Probe
  source 1..46: mol_type = other DNA
ctttgggtgcgagaggtcccgggttcaaatcccggacgagccccct

SEQ ID NO: 39952 - DNA, 50 bp, synthetic construct
  misc_feature 1..50: note = Probe
  source 1..50: mol_type = other DNA
ctttgggtgcgagaggtcccgggttcaaatcccggacgagcccgcttttt

SEQ ID NO: 39953 - DNA, 50 bp, synthetic construct; identical to SEQ ID NO: 5408
  misc_feature 1..50: note = Probe
  source 1..50: mol_type = other DNA

SEQ ID NO: 39954 - DNA, 21 bp, synthetic construct
  misc_feature 1..21: note = Probe
  source 1..21: mol_type = other DNA
cttttaatctgagggtccagg

SEQ ID NO: 39955 - DNA, 23 bp, synthetic construct
  misc_feature 1..23: note = Probe
  source 1..23: mol_type = other DNA
cttttaatctgagggtccagggt

SEQ ID NO: 39956 - DNA, 45 bp, synthetic construct
  misc_feature 1..45: note = Probe
  source 1..45: mol_type = other DNA
cttttaatctgagggtccagggttcaagtccctgttcaggcgaac

SEQ ID NO: 39957 - DNA, 45 bp, synthetic construct
  misc_feature 1..45: note = Probe
  source 1..45: mol_type = other DNA
cttttaatctgagggtccagggttcaagtccctgttcgggcggca

SEQ ID NO: 39958 - DNA, 50 bp, synthetic construct
  misc_feature 1..50: note = Probe
  source 1..50: mol_type = other DNA
cttttaatctgagggtccagggttcaagtccctgttcgggcggtatcttt

SEQ ID NO: 39959 - DNA, 23 bp, synthetic construct
  misc_feature 1..23: note = Probe
  source 1..23: mol_type = other DNA
ctttttcaccccgctgttgctct

SEQ ID NO: 39960 - DNA, 28 bp, synthetic construct
  misc_feature 1..28: note = Probe
  source 1..28: mol_type = other DNA
gaaaaagtcatggaggccatggggttgg

SEQ ID NO: 39961 - DNA, 30 bp, synthetic construct; identical to SEQ ID NO: 13310
  misc_feature 1..30: note = Probe
  source 1..30: mol_type = other DNA

SEQ ID NO: 39962 - DNA, 41 bp, synthetic construct; identical to SEQ ID NO: 5428
  misc_feature 1..41: note = Probe
  source 1..41: mol_type = other DNA

SEQ ID NO: 39963 - DNA, 42 bp, synthetic construct; identical to SEQ ID NO: 5429
  misc_feature 1..42: note = Probe
  source 1..42: mol_type = other DNA

SEQ ID NO: 39964 - DNA, 43 bp, synthetic construct; identical to SEQ ID NO: 19815
  misc_feature 1..43: note = Probe
  source 1..43: mol_type = other DNA

SEQ ID NO: 39965 - DNA, 34 bp, synthetic construct; identical to SEQ ID NO: 19838
  misc_feature 1..34: note = Probe
  source 1..34: mol_type = other DNA

SEQ ID NO: 39966 - DNA, 26 bp, synthetic construct
  misc_feature 1..26: note = Probe
  source 1..26: mol_type = other DNA
gaaccaacacctctttacagtgaaat

SEQ ID NO: 39967 - DNA, 45 bp, synthetic construct; identical to SEQ ID NO: 5469
  misc_feature 1..45: note = Probe
  source 1..45: mol_type = other DNA

SEQ ID NO: 39968 - DNA, 50 bp, synthetic construct; identical to SEQ ID NO: 5472
  misc_feature 1..50: note = Probe
  source 1..50: mol_type = other DNA

SEQ ID NO: 39969 - DNA, 32 bp, synthetic construct; identical to SEQ ID NO: 5480
  misc_feature 1..32: note = Probe
  source 1..32: mol_type = other DNA

SEQ ID NO: 39970 - DNA, 33 bp, synthetic construct; identical to SEQ ID NO: 5481
  misc_feature 1..33: note = Probe
  source 1..33: mol_type = other DNA

SEQ ID NO: 39971 - DNA, 34 bp, synthetic construct; identical to SEQ ID NO: 5482
  misc_feature 1..34: note = Probe
  source 1..34: mol_type = other DNA

SEQ ID NO: 39972 - DNA, 41 bp, synthetic construct; identical to SEQ ID NO: 19895
  misc_feature 1..41: note = Probe
  source 1..41: mol_type = other DNA

SEQ ID NO: 39973 - DNA, 42 bp, synthetic construct; identical to SEQ ID NO: 19896
  misc_feature 1..42: note = Probe
  source 1..42: mol_type = other DNA

SEQ ID NO: 39974 - DNA, 50 bp, synthetic construct
  misc_feature 1..50: note = Probe
  source 1..50: mol_type = other DNA
gaagagcccggatagctcagtcggtagagcatcagacttttaatctgagg

SEQ ID NO: 39975 - DNA, 17 bp, synthetic construct
  misc_feature 1..17: note = Probe
  source 1..17: mol_type = other DNA
gaagatcgcgggttcga

SEQ ID NO: 39976 - DNA, 29 bp, synthetic construct
  misc_feature 1..29: note = Probe
  source 1..29: mol_type = other DNA
gaagattgagggttcgagtcccttcgtgg

SEQ ID NO: 39977 - DNA, 30 bp, synthetic construct; identical to SEQ ID NO: 890
  misc_feature 1..30: note = Probe
  source 1..30: mol_type = other DNA

SEQ ID NO: 39978 - DNA, 31 bp, synthetic construct; identical to SEQ ID NO: 19909
  misc_feature 1..31: note = Probe
  source 1..31: mol_type = other DNA

SEQ ID NO: 39979 - DNA, 38 bp, synthetic construct
  misc_feature 1..38: note = Probe
  source 1..38: mol_type = other DNA
gaagattgagggttcgagtcccttcgtggtcgtcgttt

SEQ ID NO: 39980 - DNA, 35 bp, synthetic construct; identical to SEQ ID NO: 5490
  misc_feature 1..35: note = Probe
  source 1..35: mol_type = other DNA

SEQ ID NO: 39981 - DNA, 50 bp, synthetic construct
  misc_feature 1..50: note = Probe
  source 1..50: mol_type = other DNA
gaagattgagggttcgagtcccttcgtggtcgttgccatgttaacgtttt

SEQ ID NO: 39982 - DNA, 30 bp, synthetic construct; identical to SEQ ID NO: 5497
  misc_feature 1..30: note = Probe
  source 1..30: mol_type = other DNA

SEQ ID NO: 39983 - DNA, 50 bp, synthetic construct; identical to SEQ ID NO: 5504
  misc_feature 1..50: note = Probe
  source 1..50: mol_type = other DNA

SEQ ID NO: 39984 - DNA, 34 bp, synthetic construct
  misc_feature 1..34: note = Probe
  source 1..34: mol_type = other DNA
gaagcccggctagctcagtcggtagagcatggga

SEQ ID NO: 39985 - DNA, 18 bp, synthetic construct
  misc_feature 1..18: note = Probe
  source 1..18: mol_type = other DNA
gaagcgggtgctcttatt

SEQ ID NO: 39986 - DNA, 19 bp, synthetic construct
  misc_feature 1..19: note = Probe
  source 1..19: mol_type = other DNA
gaagcgggtgctcttattt

SEQ ID NO: 39987 - DNA, 20 bp, synthetic construct
  misc_feature 1..20: note = Probe
  source 1..20: mol_type = other DNA
gaagcgggtgctcttatttt

SEQ ID NO: 39988 - DNA, 21 bp, synthetic construct
  misc_feature 1..21: note = Probe
  source 1..21: mol_type = other DNA
gaagcgggtgctcttattttt

SEQ ID NO: 39989 - DNA, 22 bp, synthetic construct
  misc_feature 1..22: note = Probe
  source 1..22: mol_type = other DNA
gaagcgggtgctcttatttttt

SEQ ID NO: 39990 - DNA, 31 bp, synthetic construct
  misc_feature 1..31: note = Probe
  source 1..31: mol_type = other DNA
gaagcgtgctgggcccataacccagaggtcg

SEQ ID NO: 39991 - DNA, 34 bp, synthetic construct
  misc_feature 1..34: note = Probe
  source 1..34: mol_type = other DNA
gaagcgtgctgggcccataacccagaggtcgatg

SEQ ID NO: 39992 - DNA, 45 bp, synthetic construct
  misc_feature 1..45: note = Probe
  source 1..45: mol_type = other DNA
gaaggcattcaaaggttccgggttcgagtcccggcggagtcgtaa

SEQ ID NO: 39993 - DNA, 30 bp, synthetic construct; identical to SEQ ID NO: 5510
  misc_feature 1..30: note = Probe
  source 1..30: mol_type = other DNA

SEQ ID NO: 39994 - DNA, 31 bp, synthetic construct; identical to SEQ ID NO: 891
  misc_feature 1..31: note = Probe
  source 1..31: mol_type = other DNA

SEQ ID NO: 39995 - DNA, 32 bp, synthetic construct; identical to SEQ ID NO: 5511
  misc_feature 1..32: note = Probe
  source 1..32: mol_type = other DNA

SEQ ID NO: 39996 - DNA, 35 bp, synthetic construct; identical to SEQ ID NO: 5513
  misc_feature 1..35: note = Probe
  source 1..35: mol_type = other DNA

SEQ ID NO: 39997 - DNA, 35 bp, synthetic construct
  misc_feature 1..35: note = Probe
  source 1..35: mol_type = other DNA
gaatccagcgatccgagttcaaatctcggtggaac

SEQ ID NO: 39998 - DNA, 35 bp, synthetic construct
  misc_feature 1..35: note = Probe
  source 1..35: mol_type = other DNA
gaatccagcgatccgagttcaagtctcggtggaac

SEQ ID NO: 39999 - DNA, 36 bp, synthetic construct
  misc_feature 1..36: note = Probe
  source 1..36: mol_type = other DNA
gaatccagcgatccgagttcaagtctcggtggaacc

SEQ ID NO: 40000 - DNA, 33 bp, synthetic construct; identical to SEQ ID NO: 5540
  misc_feature 1..33: note = Probe
  source 1..33: mol_type = other DNA

SEQ ID NO: 40001 - DNA, 50 bp, synthetic construct; identical to SEQ ID NO: 5541
  misc_feature 1..50: note = Probe
  source 1..50: mol_type = other DNA

SEQ ID NO: 40002 - DNA, 50 bp, synthetic construct
  misc_feature 1..50: note = Probe
  source 1..50: mol_type = other DNA
gaattctcgcctgccacgcgggaggcccgggttcgattcccggccaatgc

SEQ ID NO: 40003 - DNA, 50 bp, synthetic construct
  misc_feature 1..50: note = Probe
  source 1..50: mol_type = other DNA
gaattctcgcctgccacgcgggaggcccgggttcgattcccggcccatgc

SEQ ID NO: 40004 - DNA, 46 bp, synthetic construct; identical to SEQ ID NO: 5545
  misc_feature 1..46: note = Probe
  source 1..46: mol_type = other DNA

SEQ ID NO: 40005 - DNA, 31 bp, synthetic construct; identical to SEQ ID NO: 903
  misc_feature 1..31: note = Probe
  source 1..31: mol_type = other DNA

SEQ ID NO: 40006 - DNA, 32 bp, synthetic construct; identical to SEQ ID NO: 5551
  misc_feature 1..32: note = Probe
  source 1..32: mol_type = other DNA

SEQ ID NO: 40007 - DNA, 34 bp, synthetic construct; identical to SEQ ID NO: 5553
  misc_feature 1..34: note = Probe
  source 1..34: mol_type = other DNA

SEQ ID NO: 40008 - DNA, 28 bp, synthetic construct
  misc_feature 1..28: note = Probe
  source 1..28: mol_type = other DNA
gacagtagcattggtggttcagtggtag

SEQ ID NO: 40009 - DNA, 36 bp, synthetic construct; identical to SEQ ID NO: 20046
  misc_feature 1..36: note = Probe
  source 1..36: mol_type = other DNA

SEQ ID NO: 40010 - DNA, 32 bp, synthetic construct; identical to SEQ ID NO: 905
  misc_feature 1..32: note = Probe
  source 1..32: mol_type = other DNA

SEQ ID NO: 40011 - DNA, 33 bp, synthetic construct; identical to SEQ ID NO: 906
  misc_feature 1..33: note = Probe
  source 1..33: mol_type = other DNA

SEQ ID NO: 40012 - DNA, 35 bp, synthetic construct; identical to SEQ ID NO: 908
  misc_feature 1..35: note = Probe
  source 1..35: mol_type = other DNA

SEQ ID NO: 40013 - DNA, 36 bp, synthetic construct; identical to SEQ ID NO: 909
  misc_feature 1..36: note = Probe
  source 1..36: mol_type = other DNA

SEQ ID NO: 40014 - DNA, 26 bp, synthetic construct
  misc_feature 1..26: note = Probe
  source 1..26: mol_type = other DNA
gacccgggttcgattcccggccaacg

SEQ ID NO: 40015 - DNA, 27 bp, synthetic construct
  misc_feature 1..27: note = Probe
  source 1..27: mol_type = other DNA
gacccgggttcgattcccggccaacgc

SEQ ID NO: 40016 - DNA, 31 bp, synthetic construct; identical to SEQ ID NO: 5567
  misc_feature 1..31: note = Probe
  source 1..31: mol_type = other DNA

SEQ ID NO: 40017 - DNA, 31 bp, synthetic construct; identical to SEQ ID NO: 5568
  misc_feature 1..31: note = Probe
  source 1..31: mol_type = other DNA

SEQ ID NO: 40018 - DNA, 28 bp, synthetic construct
  misc_feature 1..28: note = Probe
  source 1..28: mol_type = other DNA
gacccttttggatgttcgcaaccccttt

SEQ ID NO: 40019 - DNA, 30 bp, synthetic construct; identical to SEQ ID NO: 10101
  misc_feature 1..30: note = Probe
  source 1..30: mol_type = other DNA

SEQ ID NO: 40020 - DNA, 28 bp, synthetic construct
  misc_feature 1..28: note = Probe
  source 1..28: mol_type = other DNA
gaccggggttcaattccccgacggggag

SEQ ID NO: 40021 - DNA, 25 bp, synthetic construct
  misc_feature 1..25: note = Probe
  source 1..25: mol_type = other DNA
gaccggggttcgattccccgacggg

SEQ ID NO: 40022 - DNA, 27 bp, synthetic construct
  misc_feature 1..27: note = Probe
  source 1..27: mol_type = other DNA
gaccggggttcgattccccgacgggga

SEQ ID NO: 40023 - DNA, 31 bp, synthetic construct; identical to SEQ ID NO: 5580
  misc_feature 1..31: note = Probe
  source 1..31: mol_type = other DNA

SEQ ID NO: 40024 - DNA, 30 bp, synthetic construct
  misc_feature 1..30: note = Probe
  source 1..30: mol_type = other DNA
gacgagctagctcagtcggtagagcatggg

SEQ ID NO: 40025 - DNA, 31 bp, synthetic construct
  misc_feature 1..31: note = Probe
  source 1..31: mol_type = other DNA
gacgagctagctcagtcggtagagcatggga

SEQ ID NO: 40026 - DNA, 30 bp, synthetic construct; identical to SEQ ID NO: 10127
  misc_feature 1..30: note = Probe
  source 1..30: mol_type = other DNA

SEQ ID NO: 40027 - DNA, 50 bp, synthetic construct
  misc_feature 1..50: note = Probe
  source 1..50: mol_type = other DNA
gacgggccgcgtggcctaatggataaggcgtctgacttcggatcagaaga

SEQ ID NO: 40028 - DNA, 22 bp, synthetic construct
  misc_feature 1..22: note = Probe
  source 1..22: mol_type = other DNA
gacgggctcacatcaccccata

SEQ ID NO: 40029 - DNA, 26 bp, synthetic construct
  misc_feature 1..26: note = Probe
  source 1..26: mol_type = other DNA
gacgggctcacatcaccccataaaca

SEQ ID NO: 40030 - DNA, 29 bp, synthetic construct
  misc_feature 1..29: note = Probe
  source 1..29: mol_type = other DNA
gacgggctcacatcaccccataaacaaat

SEQ ID NO: 40031 - DNA, 25 bp, synthetic construct
  misc_feature 1..25: note = Probe
  source 1..25: mol_type = other DNA
gactacaaaaaggattagactgaac

SEQ ID NO: 40032 - DNA, 26 bp, synthetic construct
  misc_feature 1..26: note = Probe
  source 1..26: mol_type = other DNA
gactacaaaaaggattagactgaacc

SEQ ID NO: 40033 - DNA, 23 bp, synthetic construct
  misc_feature 1..23: note = Probe
  source 1..23: mol_type = other DNA
gactacggatcagaagattccag

SEQ ID NO: 40034 - DNA, 24 bp, synthetic construct
  misc_feature 1..24: note = Probe
  source 1..24: mol_type = other DNA
gactacggatcagaagattccagg

SEQ ID NO: 40035 - DNA, 31 bp, synthetic construct
  misc_feature 1..31: note = Probe
  source 1..31: mol_type = other DNA
gactagaaatccattggggtctccccgcgca

SEQ ID NO: 40036 - DNA, 34 bp, synthetic construct
  misc_feature 1..34: note = Probe
  source 1..34: mol_type = other DNA
gactagaaatccattggggtctccccgcgcaggt

SEQ ID NO: 40037 - DNA, 36 bp, synthetic construct; identical to SEQ ID NO: 5607
  misc_feature 1..36: note = Probe
  source 1..36: mol_type = other DNA

SEQ ID NO: 40038 - DNA, 24 bp, synthetic construct
  misc_feature 1..24: note = Probe
  source 1..24: mol_type = other DNA
gactccagatcagaaggttgcgtg

SEQ ID NO: 40039 - DNA, 34 bp, synthetic construct
  misc_feature 1..34: note = Probe
  source 1..34: mol_type = other DNA
gactcgaaatccaatgggggttccccgcgcaggt

SEQ ID NO: 40040 - DNA, 18 bp, synthetic construct
  misc_feature 1..18: note = Probe
  source 1..18: mol_type = other DNA
gactctgaatccagcgat

SEQ ID NO: 40041 - DNA, 19 bp, synthetic construct
  misc_feature 1..19: note = Probe
  source 1..19: mol_type = other DNA
gactctgaatccagcgatc

SEQ ID NO: 40042 - DNA, 24 bp, synthetic construct
  misc_feature 1..24: note = Probe
  source 1..24: mol_type = other DNA
gactctgaatccagcgatccgagt

SEQ ID NO: 40043 - DNA, 43 bp, synthetic construct
  misc_feature 1..43: note = Probe
  source 1..43: mol_type = other DNA
gactctgaatccagcgatccgagttcaaatctcggtggaacct

SEQ ID NO: 40044 - DNA, 45 bp, synthetic construct
  misc_feature 1..45: note = Probe
  source 1..45: mol_type = other DNA
gactctgaatccagcgatccgagttcaaatctcggtggaacctgc

SEQ ID NO: 40045 - DNA, 46 bp, synthetic construct; identical to SEQ ID NO: 20140
  misc_feature 1..46: note = Probe
  source 1..46: mol_type = other DNA

SEQ ID NO: 40046 - DNA, 50 bp, synthetic construct
  misc_feature 1..50: note = Probe
  source 1..50: mol_type = other DNA
gactctgaatccagcgatccgagttcaaatctcggtggaacctgcattgg

SEQ ID NO: 40047 - DNA, 49 bp, synthetic construct
  misc_feature 1..49: note = Probe
  source 1..49: mol_type = other DNA
gactctgaatccagcgatccgagttcaaatctcggtggaacctttcata

SEQ ID NO: 40048 - DNA, 50 bp, synthetic construct
  misc_feature 1..50: note = Probe
  source 1..50: mol_type = other DNA
gactctgaatccagcgatccgagttcaaatctcggtggaacctttcatat

SEQ ID NO: 40049 - DNA, 50 bp, synthetic construct
  misc_feature 1..50: note = Probe
  source 1..50: mol_type = other DNA
gactctgaatccagcgatccgagttcaaatctcggtggaacctttcattt

SEQ ID NO: 40050 - DNA, 42 bp, synthetic construct
  misc_feature 1..42: note = Probe
  source 1..42: mol_type = other DNA
gactctgaatccagcgatccgagttcaaatctcggtgggacc

SEQ ID NO: 40051 - DNA, 46 bp, synthetic construct
  misc_feature 1..46: note = Probe
  source 1..46: mol_type = other DNA
gactctgaatccagcgatccgagttcaaatctcggtgggacccagt

SEQ ID NO: 40052 - DNA, 46 bp, synthetic construct
  misc_feature 1..46: note = Probe
  source 1..46: mol_type = other DNA
gactctgaatccagcgatccgagttcaagtctcggtggaacctgct

SEQ ID NO: 40053 - DNA, 50 bp, synthetic construct
  misc_feature 1..50: note = Probe
  source 1..50: mol_type = other DNA
gactctgaatccagcgatccgagttcaagtctcggtggaacctgctcgaa

SEQ ID NO: 40054 - DNA, 46 bp, synthetic construct
  misc_feature 1..46: note = Probe
  source 1..46: mol_type = other DNA
gactctgaatccagcgatccgagttcgagtctcggtggaacctttg

SEQ ID NO: 40055 - DNA, 18 bp, synthetic construct
  misc_feature 1..18: note = Probe
  source 1..18: mol_type = other DNA
gactcttaatctcagggt

SEQ ID NO: 40056 - DNA, 22 bp, synthetic construct
  misc_feature 1..22: note = Probe
  source 1..22: mol_type = other DNA
gactcttaatctcagggtcgtg

SEQ ID NO: 40057 - DNA, 50 bp, synthetic construct
  misc_feature 1..50: note = Probe
  source 1..50: mol_type = other DNA
gactcttaatctcagggtcgtgggttcgagccccacgttgggcgctgtgt

SEQ ID NO: 40058 - DNA, 23 bp, synthetic construct
  misc_feature 1..23: note = Probe
  source 1..23: mol_type = other DNA
gactgaagatctaaaggtccctg

SEQ ID NO: 40059 - DNA, 24 bp, synthetic construct
  misc_feature 1..24: note = Probe
  source 1..24: mol_type = other DNA
gactgaagatctaaaggtccctgg

SEQ ID NO: 40060 - DNA, 31 bp, synthetic construct
  misc_feature 1..31: note = Probe
  source 1..31: mol_type = other DNA
gacttgaaatccattggggtctccccgcgca

SEQ ID NO: 40061 - DNA, 34 bp, synthetic construct
  misc_feature 1..34: note = Probe
  source 1..34: mol_type = other DNA
gacttgaaatccattggggtctccccgcgcaggt

SEQ ID NO: 40062 - DNA, 41 bp, synthetic construct
  misc_feature 1..41: note = Probe
  source 1..41: mol_type = other DNA
gactttgaatccagcaatccgagttcgaatctcggtgggac

SEQ ID NO: 40063 - DNA, 46 bp, synthetic construct
  misc_feature 1..46: note = Probe
  source 1..46: mol_type = other DNA
gactttgaatccagcaatccgagttcgaatctcggtgggacctttc

SEQ ID NO: 40064 - DNA, 20 bp, synthetic construct
  misc_feature 1..20: note = Probe
  source 1..20: mol_type = other DNA
gactttgaatccagcgatcc

SEQ ID NO: 40065 - DNA, 46 bp, synthetic construct; identical to SEQ ID NO: 20141
  misc_feature 1..46: note = Probe
  source 1..46: mol_type = other DNA

SEQ ID NO: 40066 - DNA, 21 bp, synthetic construct
  misc_feature 1..21: note = Probe
  source 1..21: mol_type = other DNA
gagaaagctcacaagaactgc

SEQ ID NO: 40067 - DNA, 28 bp, synthetic construct
  misc_feature 1..28: note = Probe
  source 1..28: mol_type = other DNA
gagaaagctcacaagaactgctaactca

SEQ ID NO: 40068 - DNA, 29 bp, synthetic construct
  misc_feature 1..29: note = Probe
  source 1..29: mol_type = other DNA
gagaaagctcacaagaactgctaactcat

SEQ ID NO: 40069 - DNA, 31 bp, synthetic construct; identical to SEQ ID NO: 933
  misc_feature 1..31: note = Probe
  source 1..31: mol_type = other DNA

SEQ ID NO: 40070 - DNA, 32 bp, synthetic construct; identical to SEQ ID NO: 934
  misc_feature 1..32: note = Probe
  source 1..32: mol_type = other DNA

SEQ ID NO: 40071 - DNA, 33 bp, synthetic construct; identical to SEQ ID NO: 935
  misc_feature 1..33: note = Probe
  source 1..33: mol_type = other DNA

SEQ ID NO: 40072 - DNA, 34 bp, synthetic construct; identical to SEQ ID NO: 936
  misc_feature 1..34: note = Probe
  source 1..34: mol_type = other DNA

SEQ ID NO: 40073 - DNA, 35 bp, synthetic construct; identical to SEQ ID NO: 937
  misc_feature 1..35: note = Probe
  source 1..35: mol_type = other DNA

SEQ ID NO: 40074 - DNA, 37 bp, synthetic construct; identical to SEQ ID NO: 939
  misc_feature 1..37: note = Probe
  source 1..37: mol_type = other DNA

SEQ ID NO: 40075 - DNA, 28 bp, synthetic construct
  misc_feature 1..28: note = Probe
  source 1..28: mol_type = other DNA
gagaaccaacacctctttacagtgaaat

SEQ ID NO: 40076 - DNA, 50 bp, synthetic construct
  misc_feature 1..50: note = Probe
  source 1..50: mol_type = other DNA
gagacagcagagtggcgcagcggaagcgtgctgggcccataacccagagg

SEQ ID NO: 40077 - DNA, 30 bp, synthetic construct; identical to SEQ ID NO: 20156
  misc_feature 1..30: note = Probe
  source 1..30: mol_type = other DNA

SEQ ID NO: 40078 - DNA, 28 bp, synthetic construct
  misc_feature 1..28: note = Probe
  source 1..28: mol_type = other DNA
gagaccggggttcaattccccgacgggg

SEQ ID NO: 40079 - DNA, 24 bp, synthetic construct
  misc_feature 1..24: note = Probe
  source 1..24: mol_type = other DNA
gagaccggggttcgattccccgac

SEQ ID NO: 40080 - DNA, 33 bp, synthetic construct; identical to SEQ ID NO: 5626
  misc_feature 1..33: note = Probe
  source 1..33: mol_type = other DNA

SEQ ID NO: 40081 - DNA, 17 bp, synthetic construct
  misc_feature 1..17: note = Probe
  source 1..17: mol_type = other DNA
gagagcgctcggttttt

SEQ ID NO: 40082 - DNA, 30 bp, synthetic construct; identical to SEQ ID NO: 20187
  misc_feature 1..30: note = Probe
  source 1..30: mol_type = other DNA

SEQ ID NO: 40083 - DNA, 31 bp, synthetic construct; identical to SEQ ID NO: 20188
  misc_feature 1..31: note = Probe
  source 1..31: mol_type = other DNA

SEQ ID NO: 40084 - DNA, 28 bp, synthetic construct
  misc_feature 1..28: note = Probe
  source 1..28: mol_type = other DNA
gagatcctgggttcgaatcccagcggtg

SEQ ID NO: 40085 - DNA, 34 bp, synthetic construct
  misc_feature 1..34: note = Probe
  source 1..34: mol_type = other DNA
gagatcctgggttcgaatcccagcggtgccttta

SEQ ID NO: 40086 - DNA, 30 bp, synthetic construct
  misc_feature 1..30: note = Probe
  source 1..30: mol_type = other DNA
gagatcctgggttcgactcccagcggggcc

SEQ ID NO: 40087 - DNA, 34 bp, synthetic construct
  misc_feature 1..34: note = Probe
  source 1..34: mol_type = other DNA
gagatcctgggttcgactcccagcggggccttgg

SEQ ID NO: 40088 - DNA, 29 bp, synthetic construct
  misc_feature 1..29: note = Probe
  source 1..29: mol_type = other DNA
gagatgaaaacctttttccaaggacaaat

SEQ ID NO: 40089 - DNA, 19 bp, synthetic construct
  misc_feature 1..19: note = Probe
  source 1..19: mol_type = other DNA
gagatgttacctagcgttt

SEQ ID NO: 40090 - DNA, 20 bp, synthetic construct
  misc_feature 1..20: note = Probe
  source 1..20: mol_type = other DNA
gagatgttacctagcgtttt

SEQ ID NO: 40091 - DNA, 29 bp, synthetic construct
  misc_feature 1..29: note = Probe
  source 1..29: mol_type = other DNA
gagatgttacctagcgttttgtgagccag

SEQ ID NO: 40092 - DNA, 28 bp, synthetic construct
  misc_feature 1..28: note = Probe
  source 1..28: mol_type = other DNA
gagatttcaacttaacttgaccgctctg

SEQ ID NO: 40093 - DNA, 29 bp, synthetic construct
  misc_feature 1..29: note = Probe
  source 1..29: mol_type = other DNA
gagatttcaacttaacttgaccgctctga

SEQ ID NO: 40094 - DNA, 32 bp, synthetic construct; identical to SEQ ID NO: 5643
  misc_feature 1..32: note = Probe
  source 1..32: mol_type = other DNA

SEQ ID NO: 40095 - DNA, 50 bp, synthetic construct
  misc_feature 1..50: note = Probe
  source 1..50: mol_type = other DNA
gagcaatgccgaggttgtgagttcgagcctcacctggagcaagacccttt

SEQ ID NO: 40096 - DNA, 50 bp, synthetic construct; identical to SEQ ID NO: 20232
  misc_feature 1..50: note = Probe
  source 1..50: mol_type = other DNA

SEQ ID NO: 40097 - DNA, 37 bp, synthetic construct; identical to SEQ ID NO: 20245
  misc_feature 1..37: note = Probe
  source 1..37: mol_type = other DNA

SEQ ID NO: 40098 - DNA, 38 bp, synthetic construct; identical to SEQ ID NO: 20246
  misc_feature 1..38: note = Probe
  source 1..38: mol_type = other DNA

SEQ ID NO: 40099 - DNA, 25 bp, synthetic construct
  misc_feature 1..25: note = Probe
  source 1..25: mol_type = other DNA
gagcccggtaatcgcataaaactta

SEQ ID NO: 40100 - DNA, 30 bp, synthetic construct; identical to SEQ ID NO: 960
  misc_feature 1..30: note = Probe
  source 1..30: mol_type = other DNA

SEQ ID NO: 40101 - DNA, 31 bp, synthetic construct; identical to SEQ ID NO: 961
  misc_feature 1..31: note = Probe
  source 1..31: mol_type = other DNA

SEQ ID NO: 40102 - DNA, 35 bp, synthetic construct; identical to SEQ ID NO: 5659
  misc_feature 1..35: note = Probe
  source 1..35: mol_type = other DNA

SEQ ID NO: 40103 - DNA, 37 bp, synthetic construct
  misc_feature 1..37: note = Probe
  source 1..37: mol_type = other DNA
gagcctggatagctcagtcggtagagcatcagacttt

SEQ ID NO: 40104 - DNA, 50 bp, synthetic construct
  misc_feature 1..50: note = Probe
  source 1..50: mol_type = other DNA
gagcgttagactgaagatctaaaggtccctggttcgatcccgggtttcgg

SEQ ID NO: 40105 - DNA, 32 bp, synthetic construct; identical to SEQ ID NO: 20290
  misc_feature 1..32: note = Probe
  source 1..32: mol_type = other DNA

SEQ ID NO: 40106 - DNA, 31 bp, synthetic construct
  misc_feature 1..31: note = Probe
  source 1..31: mol_type = other DNA
gaggccccgggttcgatccccggcatctcca

SEQ ID NO: 40107 - DNA, 34 bp, synthetic construct; identical to SEQ ID NO: 20295
  misc_feature 1..34: note = Probe
  source 1..34: mol_type = other DNA

SEQ ID NO: 40108 - DNA, 50 bp, synthetic construct
  misc_feature 1..50: note = Probe
  source 1..50: mol_type = other DNA
gagggtccagggttcaagtccctgtccaggcgctaaaaatgcaactttta

SEQ ID NO: 40109 - DNA, 42 bp, synthetic construct; identical to SEQ ID NO: 20311
  misc_feature 1..42: note = Probe
  source 1..42: mol_type = other DNA

SEQ ID NO: 40110 - DNA, 50 bp, synthetic construct
  misc_feature 1..50: note = Probe
  source 1..50: mol_type = other DNA
gagggtccagggttcaagtccctgttcgggcggcatgtctttgcttttgg

SEQ ID NO: 40111 - DNA, 46 bp, synthetic construct
  misc_feature 1..46: note = Probe
  source 1..46: mol_type = other DNA
gagggtccagggttcaagtccctgttcgggcgggagtggtggcttt

SEQ ID NO: 40112 - DNA, 50 bp, synthetic construct
  misc_feature 1..50: note = Probe
  source 1..50: mol_type = other DNA
gagggtccagggttcaagtccctgttcgggcgggagtggtggcttttagt

SEQ ID NO: 40113 - DNA, 41 bp, synthetic construct; identical to SEQ ID NO: 20313
  misc_feature 1..41: note = Probe
  source 1..41: mol_type = other DNA

SEQ ID NO: 40114 - DNA, 42 bp, synthetic construct; identical to SEQ ID NO: 31492
  misc_feature 1..42: note = Probe
  source 1..42: mol_type = other DNA

SEQ ID NO: 40115 - DNA, 43 bp, synthetic construct; identical to SEQ ID NO: 31493
  misc_feature 1..43: note = Probe
  source 1..43: mol_type = other DNA

SEQ ID NO: 40116 - DNA, 46 bp, synthetic construct
  misc_feature 1..46: note = Probe
  source 1..46: mol_type = other DNA
gagggtctagggttcaagtccctgtccaggcgttgagtgtagtttt

SEQ ID NO: 40117 - DNA, 28 bp, synthetic construct
  misc_feature 1..28: note = Probe
  source 1..28: mol_type = other DNA
gagggttctcaccttctctctccgattt

SEQ ID NO: 40118 - DNA, 29 bp, synthetic construct
  misc_feature 1..29: note = Probe
  source 1..29: mol_type = other DNA
gagggttctcaccttctctctccgatttt

SEQ ID NO: 40119 - DNA, 30 bp, synthetic construct
  misc_feature 1..30: note = Probe
  source 1..30: mol_type = other DNA
gaggtcccgggttcgatccccggcatctcc

SEQ ID NO: 40120 - DNA, 36 bp, synthetic construct; identical to SEQ ID NO: 972
  misc_feature 1..36: note = Probe
  source 1..36: mol_type = other DNA

SEQ ID NO: 40121 - DNA, 38 bp, synthetic construct; identical to SEQ ID NO: 5681
  misc_feature 1..38: note = Probe
  source 1..38: mol_type = other DNA

SEQ ID NO: 40122 - DNA, 50 bp, synthetic construct; identical to SEQ ID NO: 5686
  misc_feature 1..50: note = Probe
  source 1..50: mol_type = other DNA

SEQ ID NO: 40123 - DNA, 50 bp, synthetic construct
  misc_feature 1..50: note = Probe
  source 1..50: mol_type = other DNA
gagtgaagcattggactgtaaatctaaagacaggggttaggcctcttttt

SEQ ID NO: 40124 - DNA, 23 bp, synthetic construct
  misc_feature 1..23: note = Probe
  source 1..23: mol_type = other DNA
gagttagcggggagtgatatatt

SEQ ID NO: 40125 - DNA, 24 bp, synthetic construct
  misc_feature 1..24: note = Probe
  source 1..24: mol_type = other DNA
gagttagcggggagtgatatatta

SEQ ID NO: 40126 - DNA, 26 bp, synthetic construct
  misc_feature 1..26: note = Probe
  source 1..26: mol_type = other DNA
gagttagcggggagtgatatattatt

SEQ ID NO: 40127 - DNA, 50 bp, synthetic construct; identical to SEQ ID NO: 973
  misc_feature 1..50: note = Probe
  source 1..50: mol_type = other DNA

SEQ ID NO: 40128 - DNA, 43 bp, synthetic construct; identical to SEQ ID NO: 5713
  misc_feature 1..43: note = Probe
  source 1..43: mol_type = other DNA

SEQ ID NO: 40129 - DNA, 45 bp, synthetic construct; identical to SEQ ID NO: 5715
  misc_feature 1..45: note = Probe
  source 1..45: mol_type = other DNA

SEQ ID NO: 40130 - DNA, 21 bp, synthetic construct
  misc_feature 1..21: note = Probe
  source 1..21: mol_type = other DNA
gatagctcagtcggtagagca

SEQ ID NO: 40131 - DNA, 30 bp, synthetic construct; identical to SEQ ID NO: 20401
  misc_feature 1..30: note = Probe
  source 1..30: mol_type = other DNA

SEQ ID NO: 40132 - DNA, 20 bp, synthetic construct
  misc_feature 1..20: note = Probe
  source 1..20: mol_type = other DNA
gatccccggcatctccattg

SEQ ID NO: 40133 - DNA, 32 bp, synthetic construct
  misc_feature 1..32: note = Probe
  source 1..32: mol_type = other DNA
gatcctgggttcgactcccagcggggccttgg

SEQ ID NO: 40134 - DNA, 24 bp, synthetic construct
  misc_feature 1..24: note = Probe
  source 1..24: mol_type = other DNA
gatcgaaaccatcctctgctaggt

SEQ ID NO: 40135 - DNA, 31 bp, synthetic construct
  misc_feature 1..31: note = Probe
  source 1..31: mol_type = other DNA
gatcgaaaccatcctctgctatcggagtttt

SEQ ID NO: 40136 - DNA, 32 bp, synthetic construct
  misc_feature 1..32: note = Probe
  source 1..32: mol_type = other DNA
gatcgaaaccatcctctgctatcggagttttt

SEQ ID NO: 40137 - DNA, 20 bp, synthetic construct
  misc_feature 1..20: note = Probe
  source 1..20: mol_type = other DNA
gatcgtatagtggttagtac

SEQ ID NO: 40138 - DNA, 21 bp, synthetic construct
  misc_feature 1..21: note = Probe
  source 1..21: mol_type = other DNA
gatcgtatagtggttagtact

SEQ ID NO: 40139 - DNA, 24 bp, synthetic construct
  misc_feature 1..24: note = Probe
  source 1..24: mol_type = other DNA
gatcgtatagtggttagtactctg

SEQ ID NO: 40140 - DNA, 27 bp, synthetic construct
  misc_feature 1..27: note = Probe
  source 1..27: mol_type = other DNA
gatgaaaacctttttccaaggacaaat

SEQ ID NO: 40141 - DNA, 30 bp, synthetic construct; identical to SEQ ID NO: 5730
  misc_feature 1..30: note = Probe
  source 1..30: mol_type = other DNA

SEQ ID NO: 40142 - DNA, 31 bp, synthetic construct; identical to SEQ ID NO: 5731
  misc_feature 1..31: note = Probe
  source 1..31: mol_type = other DNA

SEQ ID NO: 40143 - DNA, 30 bp, synthetic construct; identical to SEQ ID NO: 10204
  misc_feature 1..30: note = Probe
  source 1..30: mol_type = other DNA

SEQ ID NO: 40144 - DNA, 34 bp, synthetic construct; identical to SEQ ID NO: 5739
  misc_feature 1..34: note = Probe
  source 1..34: mol_type = other DNA

SEQ ID NO: 40145 - DNA, 17 bp, synthetic construct
  misc_feature 1..17: note = Probe
  source 1..17: mol_type = other DNA
gattcccattcttgcga

SEQ ID NO: 40146 - DNA, 33 bp, synthetic construct
  misc_feature 1..33: note = Probe
  source 1..33: mol_type = other DNA
gattcccattcttgcgacccgggttcgattccc

SEQ ID NO: 40147 - DNA, 38 bp, synthetic construct
  misc_feature 1..38: note = Probe
  source 1..38: mol_type = other DNA
gattcccattcttgcgacccgggttcgattcccgggcg

SEQ ID NO: 40148 - DNA, 41 bp, synthetic construct
  misc_feature 1..41: note = Probe
  source 1..41: mol_type = other DNA
gattcccattcttgcgacccgggttcgattcccgggcggcg

SEQ ID NO: 40149 - DNA, 45 bp, synthetic construct
  misc_feature 1..45: note = Probe
  source 1..45: mol_type = other DNA
gattcccattcttgcgacccgggttcgattcccgggcggcgcact

SEQ ID NO: 40150 - DNA, 46 bp, synthetic construct; identical to SEQ ID NO: 20434
  misc_feature 1..46: note = Probe
  source 1..46: mol_type = other DNA

SEQ ID NO: 40151 - DNA, 50 bp, synthetic construct
  misc_feature 1..50: note = Probe
  source 1..50: mol_type = other DNA
gattcccattcttgcgacccgggttcgattcccgggcggcgcacttagtt

SEQ ID NO: 40152 - DNA, 46 bp, synthetic construct
  misc_feature 1..46: note = Probe
  source 1..46: mol_type = other DNA
gattcccattcttgcgacccgggttcgattcccgggcggcgcatag

SEQ ID NO: 40153 - DNA, 50 bp, synthetic construct
  misc_feature 1..50: note = Probe
  source 1..50: mol_type = other DNA
gattcccattcttgcgacccgggttcgattcccgggcggcgcataggcgt

SEQ ID NO: 40154 - DNA, 50 bp, synthetic construct
  misc_feature 1..50: note = Probe
  source 1..50: mol_type = other DNA
gattcctggttttcacccaggcggcccgggttcgactcccggtgtgggaa

SEQ ID NO: 40155 - DNA, 27 bp, synthetic construct
  misc_feature 1..27: note = Probe
  source 1..27: mol_type = other DNA
gattcggcgctttcaccgccgcggccc

SEQ ID NO: 40156 - DNA, 29 bp, synthetic construct
  misc_feature 1..29: note = Probe
  source 1..29: mol_type = other DNA
gattgaaacttttcgaaagtacgattact

SEQ ID NO: 40157 - DNA, 25 bp, synthetic construct
  misc_feature 1..25: note = Probe
  source 1..25: mol_type = other DNA
gattgagggttcgagtcccttcgtg

SEQ ID NO: 40158 - DNA, 27 bp, synthetic construct
  misc_feature 1..27: note = Probe
  source 1..27: mol_type = other DNA
gattgagggttcgagtcccttcgtggt

SEQ ID NO: 40159 - DNA, 28 bp, synthetic construct
  misc_feature 1..28: note = Probe
  source 1..28: mol_type = other DNA
gattgagggttcgagtcccttcgtggtc

SEQ ID NO: 40160 - DNA, 29 bp, synthetic construct
  misc_feature 1..29: note = Probe
  source 1..29: mol_type = other DNA
gattgagggttcgagtcccttcgtggtcg

SEQ ID NO: 40161 - DNA, 32 bp, synthetic construct; identical to SEQ ID NO: 5746
  misc_feature 1..32: note = Probe
  source 1..32: mol_type = other DNA

SEQ ID NO: 40162 - DNA, 35 bp, synthetic construct
  misc_feature 1..35: note = Probe
  source 1..35: mol_type = other DNA
gattggtggttcgagcccacccagggacgcttatt

SEQ ID NO: 40163 - DNA, 32 bp, synthetic construct; identical to SEQ ID NO: 5751
  misc_feature 1..32: note = Probe
  source 1..32: mol_type = other DNA

SEQ ID NO: 40164 - DNA, 33 bp, synthetic construct; identical to SEQ ID NO: 982
  misc_feature 1..33: note = Probe
  source 1..33: mol_type = other DNA

SEQ ID NO: 40165 - DNA, 34 bp, synthetic construct; identical to SEQ ID NO: 983
  misc_feature 1..34: note = Probe
  source 1..34: mol_type = other DNA

SEQ ID NO: 40166 - DNA, 35 bp, synthetic construct; identical to SEQ ID NO: 5752
  misc_feature 1..35: note = Probe
  source 1..35: mol_type = other DNA

SEQ ID NO: 40167 - DNA, 46 bp, synthetic construct; identical to SEQ ID NO: 5757
  misc_feature 1..46: note = Probe
  source 1..46: mol_type = other DNA

SEQ ID NO: 40168 - DNA, 20 bp, synthetic construct
  misc_feature 1..20: note = Probe
  source 1..20: mol_type = other DNA
gatttaggctccagtctctt

SEQ ID NO: 40169 - DNA, 27 bp, synthetic construct
  misc_feature 1..27: note = Probe
  source 1..27: mol_type = other DNA
gatttcaacttaacttgaccgctctga

SEQ ID NO: 40170 - DNA, 30 bp, synthetic construct; identical to SEQ ID NO: 5769
  misc_feature 1..30: note = Probe
  source 1..30: mol_type = other DNA

SEQ ID NO: 40171 - DNA, 42 bp, synthetic construct; identical to SEQ ID NO: 5774
  misc_feature 1..42: note = Probe
  source 1..42: mol_type = other DNA

SEQ ID NO: 40172 - DNA, 22 bp, synthetic construct
  misc_feature 1..22: note = Probe
  source 1..22: mol_type = other DNA
gatttctgtaccttacacattt

SEQ ID NO: 40173 - DNA, 41 bp, synthetic construct; identical to SEQ ID NO: 5783
  misc_feature 1..41: note = Probe
  source 1..41: mol_type = other DNA

SEQ ID NO: 40174 - DNA, 50 bp, synthetic construct; identical to SEQ ID NO: 5793
  misc_feature 1..50: note = Probe
  source 1..50: mol_type = other DNA

SEQ ID NO: 40175 - DNA, 27 bp, synthetic construct
  misc_feature 1..27: note = Probe
  source 1..27: mol_type = other DNA
gcaatggtggttcagtggtagaattct

SEQ ID NO: 40176 - DNA, 28 bp, synthetic construct
  misc_feature 1..28: note = Probe
  source 1..28: mol_type = other DNA
gcaatggtggttcagtggtagaattctc

SEQ ID NO: 40177 - DNA, 29 bp, synthetic construct
  misc_feature 1..29: note = Probe
  source 1..29: mol_type = other DNA
gcaatggtggttcagtggtagaattctcg

SEQ ID NO: 40178 - DNA, 30 bp, synthetic construct; identical to SEQ ID NO: 10262
  misc_feature 1..30: note = Probe
  source 1..30: mol_type = other DNA

SEQ ID NO: 40179 - DNA, 33 bp, synthetic construct
  misc_feature 1..33: note = Probe
  source 1..33: mol_type = other DNA
gcaatgtcgttagtctaggctgtcagctcttcc

SEQ ID NO: 40180 - DNA, 50 bp, synthetic construct; identical to SEQ ID NO: 5820
  misc_feature 1..50: note = Probe
  source 1..50: mol_type = other DNA

SEQ ID NO: 40181 - DNA, 37 bp, synthetic construct; identical to SEQ ID NO: 20530
  misc_feature 1..37: note = Probe
  source 1..37: mol_type = other DNA

SEQ ID NO: 40182 - DNA, 38 bp, synthetic construct; identical to SEQ ID NO: 5821
  misc_feature 1..38: note = Probe
  source 1..38: mol_type = other DNA

SEQ ID NO: 40183 - DNA, 38 bp, synthetic construct; identical to SEQ ID NO: 20536
  misc_feature 1..38: note = Probe
  source 1..38: mol_type = other DNA

SEQ ID NO: 40184 - DNA, 38 bp, synthetic construct; identical to SEQ ID NO: 20537
  misc_feature 1..38: note = Probe
  source 1..38: mol_type = other DNA

SEQ ID NO: 40185 - DNA, 34 bp, synthetic construct
  misc_feature 1..34: note = Probe
  source 1..34: mol_type = other DNA
gcacgaggtcctgggttcgatccccagtacctcc

SEQ ID NO: 40186 - DNA, 37 bp, synthetic construct; identical to SEQ ID NO: 20538
  misc_feature 1..37: note = Probe
  source 1..37: mol_type = other DNA

SEQ ID NO: 40187 - DNA, 38 bp, synthetic construct; identical to SEQ ID NO: 20539
  misc_feature 1..38: note = Probe
  source 1..38: mol_type = other DNA

SEQ ID NO: 40188 - DNA, 42 bp, synthetic construct; identical to SEQ ID NO: 20546
  misc_feature 1..42: note = Probe
  source 1..42: mol_type = other DNA

SEQ ID NO: 40189 - DNA, 27 bp, synthetic construct
  misc_feature 1..27: note = Probe
  source 1..27: mol_type = other DNA
gcactggtggttcagtggtagaattct

SEQ ID NO: 40190 - DNA, 28 bp, synthetic construct
  misc_feature 1..28: note = Probe
  source 1..28: mol_type = other DNA
gcactggtggttcagtggtagaattctc

SEQ ID NO: 40191 - DNA, 30 bp, synthetic construct; identical to SEQ ID NO: 8615
  misc_feature 1..30: note = Probe
  source 1..30: mol_type = other DNA

SEQ ID NO: 40192 - DNA, 32 bp, synthetic construct; identical to SEQ ID NO: 991
  misc_feature 1..32: note = Probe
  source 1..32: mol_type = other DNA

SEQ ID NO: 40193 - DNA, 34 bp, synthetic construct; identical to SEQ ID NO: 13440
  misc_feature 1..34: note = Probe
  source 1..34: mol_type = other DNA

SEQ ID NO: 40194 - DNA, 36 bp, synthetic construct; identical to SEQ ID NO: 993
  misc_feature 1..36: note = Probe
  source 1..36: mol_type = other DNA

SEQ ID NO: 40195 - DNA, 38 bp, synthetic construct; identical to SEQ ID NO: 5831
  misc_feature 1..38: note = Probe
  source 1..38: mol_type = other DNA

SEQ ID NO: 40196 - DNA, 38 bp, synthetic construct; identical to SEQ ID NO: 5832
  misc_feature 1..38: note = Probe
  source 1..38: mol_type = other DNA

SEQ ID NO: 40197 - DNA, 50 bp, synthetic construct
  misc_feature 1..50: note = Probe
  source 1..50: mol_type = other DNA
gcagagtggcgcagcggaagcgtgctgggcccataacccagaggtcgatg

SEQ ID NO: 40198 - DNA, 28 bp, synthetic construct
  misc_feature 1..28: note = Probe
  source 1..28: mol_type = other DNA
gcagagtggggttttgcagtccttagct

SEQ ID NO: 40199 - DNA, 36 bp, synthetic construct; identical to SEQ ID NO: 5839
  misc_feature 1..36: note = Probe
  source 1..36: mol_type = other DNA

SEQ ID NO: 40200 - DNA, 36 bp, synthetic construct; identical to SEQ ID NO: 5840
  misc_feature 1..36: note = Probe
  source 1..36: mol_type = other DNA

SEQ ID NO: 40201 - DNA, 32 bp, synthetic construct; identical to SEQ ID NO: 20614
  misc_feature 1..32: note = Probe
  source 1..32: mol_type = other DNA

SEQ ID NO: 40202 - DNA, 27 bp, synthetic construct
  misc_feature 1..27: note = Probe
  source 1..27: mol_type = other DNA
gcataggtggttcagtggtagaattct

SEQ ID NO: 40203 - DNA, 29 bp, synthetic construct
  misc_feature 1..29: note = Probe
  source 1..29: mol_type = other DNA
gcataggtggttcagtggtagaattcttg

SEQ ID NO: 40204 - DNA, 30 bp, synthetic construct; identical to SEQ ID NO: 10307
  misc_feature 1..30: note = Probe
  source 1..30: mol_type = other DNA

SEQ ID NO: 40205 - DNA, 35 bp, synthetic construct; identical to SEQ ID NO: 13456
  misc_feature 1..35: note = Probe
  source 1..35: mol_type = other DNA

SEQ ID NO: 40206 - DNA, 38 bp, synthetic construct; identical to SEQ ID NO: 5861
  misc_feature 1..38: note = Probe
  source 1..38: mol_type = other DNA

SEQ ID NO: 40207 - DNA, 28 bp, synthetic construct
  misc_feature 1..28: note = Probe
  source 1..28: mol_type = other DNA
gcatgggtgattcagtggtagaattttc

SEQ ID NO: 40208 - DNA, 18 bp, synthetic construct
  misc_feature 1..18: note = Probe
  source 1..18: mol_type = other DNA
gcatgggtggttcagtgg

SEQ ID NO: 40209 - DNA, 19 bp, synthetic construct
  misc_feature 1..19: note = Probe
  source 1..19: mol_type = other DNA
gcatgggtggttcagtggt

SEQ ID NO: 40210 - DNA, 20 bp, synthetic construct
  misc_feature 1..20: note = Probe
  source 1..20: mol_type = other DNA
gcatgggtggttcagtggta

SEQ ID NO: 40211 - DNA, 21 bp, synthetic construct
  misc_feature 1..21: note = Probe
  source 1..21: mol_type = other DNA
gcatgggtggttcagtggtag

SEQ ID NO: 40212 - DNA, 22 bp, synthetic construct
  misc_feature 1..22: note = Probe
  source 1..22: mol_type = other DNA
gcatgggtggttcagtggtaga

SEQ ID NO: 40213 - DNA, 23 bp, synthetic construct
  misc_feature 1..23: note = Probe
  source 1..23: mol_type = other DNA
gcatgggtggttcagtggtagaa

SEQ ID NO: 40214 - DNA, 24 bp, synthetic construct
  misc_feature 1..24: note = Probe
  source 1..24: mol_type = other DNA
gcatgggtggttcagtggtagaat

SEQ ID NO: 40215 - DNA, 25 bp, synthetic construct
  misc_feature 1..25: note = Probe
  source 1..25: mol_type = other DNA
gcatgggtggttcagtggtagaatt

SEQ ID NO: 40216 - DNA, 26 bp, synthetic construct
  misc_feature 1..26: note = Probe
  source 1..26: mol_type = other DNA
gcatgggtggttcagtggtagaattc

SEQ ID NO: 40217 - DNA, 27 bp, synthetic construct
  misc_feature 1..27: note = Probe
  source 1..27: mol_type = other DNA
gcatgggtggttcagtggtagaattct

SEQ ID NO: 40218 - DNA, 36 bp, synthetic construct; identical to SEQ ID NO: 1008
  misc_feature 1..36: note = Probe
  source 1..36: mol_type = other DNA

SEQ ID NO: 40219 - DNA, 37 bp, synthetic construct; identical to SEQ ID NO: 5870
  misc_feature 1..37: note = Probe
  source 1..37: mol_type = other DNA

SEQ ID NO: 40220 - DNA, 38 bp, synthetic construct; identical to SEQ ID NO: 1009
  misc_feature 1..38: note = Probe
  source 1..38: mol_type = other DNA

SEQ ID NO: 40221 - DNA, 41 bp, synthetic construct; identical to SEQ ID NO: 13469
  misc_feature 1..41: note = Probe
  source 1..41: mol_type = other DNA

SEQ ID NO: 40222 - DNA, 42 bp, synthetic construct; identical to SEQ ID NO: 20652
  misc_feature 1..42: note = Probe
  source 1..42: mol_type = other DNA

SEQ ID NO: 40223 - DNA, 44 bp, synthetic construct
  misc_feature 1..44: note = Probe
  source 1..44: mol_type = other DNA
gcatgggtggttcagtggtagaattctcgcctgccacgcgggag

SEQ ID NO: 40224 - DNA, 45 bp, synthetic construct
  misc_feature 1..45: note = Probe
  source 1..45: mol_type = other DNA
gcatgggtggttcagtggtagaattctcgcctgccacgcgggagg

SEQ ID NO: 40225 - DNA, 46 bp, synthetic construct; identical to SEQ ID NO: 20654
  misc_feature 1..46: note = Probe
  source 1..46: mol_type = other DNA

SEQ ID NO: 40226 - DNA, 42 bp, synthetic construct
  misc_feature 1..42: note = Probe
  source 1..42: mol_type = other DNA
gcatgtacgaggtccctggttcaatccctggtacctccattt

SEQ ID NO: 40227 - DNA, 34 bp, synthetic construct; identical to SEQ ID NO: 1011
  misc_feature 1..34: note = Probe
  source 1..34: mol_type = other DNA

SEQ ID NO: 40228 - DNA, 50 bp, synthetic construct; identical to SEQ ID NO: 5882
  misc_feature 1..50: note = Probe
  source 1..50: mol_type = other DNA

SEQ ID NO: 40229 - DNA, 28 bp, synthetic construct
  misc_feature 1..28: note = Probe
  source 1..28: mol_type = other DNA
gcattggtggttcaatggtagaattctc

SEQ ID NO: 40230 - DNA, 30 bp, synthetic construct; identical to SEQ ID NO: 10328
  misc_feature 1..30: note = Probe
  source 1..30: mol_type = other DNA

SEQ ID NO: 40231 - DNA, 18 bp, synthetic construct
  misc_feature 1..18: note = Probe
  source 1..18: mol_type = other DNA
gcattggtggttcagtgg

SEQ ID NO: 40232 - DNA, 19 bp, synthetic construct
  misc_feature 1..19: note = Probe
  source 1..19: mol_type = other DNA
gcattggtggttcagtggt

SEQ ID NO: 40233 - DNA, 20 bp, synthetic construct
  misc_feature 1..20: note = Probe
  source 1..20: mol_type = other DNA
gcattggtggttcagtggta

SEQ ID NO: 40234 - DNA, 21 bp, synthetic construct
  misc_feature 1..21: note = Probe
  source 1..21: mol_type = other DNA
gcattggtggttcagtggtag

SEQ ID NO: 40235 - DNA, 22 bp, synthetic construct
  misc_feature 1..22: note = Probe
  source 1..22: mol_type = other DNA
gcattggtggttcagtggtaga

SEQ ID NO: 40236 - DNA, 23 bp, synthetic construct
  misc_feature 1..23: note = Probe
  source 1..23: mol_type = other DNA
gcattggtggttcagtggtagaa

SEQ ID NO: 40237 - DNA, 24 bp, synthetic construct
  misc_feature 1..24: note = Probe
  source 1..24: mol_type = other DNA
gcattggtggttcagtggtagaat

SEQ ID NO: 40238 - DNA, 25 bp, synthetic construct
  misc_feature 1..25: note = Probe
  source 1..25: mol_type = other DNA
gcattggtggttcagtggtagaatt

SEQ ID NO: 40239 - DNA, 26 bp, synthetic construct
  misc_feature 1..26: note = Probe
  source 1..26: mol_type = other DNA
gcattggtggttcagtggtagaattc

SEQ ID NO: 40240 - DNA, 27 bp, synthetic construct
  misc_feature 1..27: note = Probe
  source 1..27: mol_type = other DNA
gcattggtggttcagtggtagaattct

SEQ ID NO: 40241 - DNA, 28 bp, synthetic construct
  misc_feature 1..28: note = Probe
  source 1..28: mol_type = other DNA
gcattggtggttcagtggtagaattctc

SEQ ID NO: 40242 - DNA, 29 bp, synthetic construct
  misc_feature 1..29: note = Probe
  source 1..29: mol_type = other DNA
gcattggtggttcagtggtagaattctcg

SEQ ID NO: 40243 - DNA, 30 bp, synthetic construct; identical to SEQ ID NO: 5900
  misc_feature 1..30: note = Probe
  source 1..30: mol_type = other DNA

SEQ ID NO: 40244 - DNA, 31 bp, synthetic construct; identical to SEQ ID NO: 5901
  misc_feature 1..31: note = Probe
  source 1..31: mol_type = other DNA

SEQ ID NO: 40245 - DNA, 32 bp, synthetic construct; identical to SEQ ID NO: 5902
  misc_feature 1..32: note = Probe
  source 1..32: mol_type = other DNA

SEQ ID NO: 40246 - DNA, 33 bp, synthetic construct; identical to SEQ ID NO: 5903
  misc_feature 1..33: note = Probe
  source 1..33: mol_type = other DNA

SEQ ID NO: 40247 - DNA, 34 bp, synthetic construct; identical to SEQ ID NO: 5904
  misc_feature 1..34: note = Probe
  source 1..34: mol_type = other DNA

SEQ ID NO: 40248 - DNA, 35 bp, synthetic construct; identical to SEQ ID NO: 5905
  misc_feature 1..35: note = Probe
  source 1..35: mol_type = other DNA

SEQ ID NO: 40249 - DNA, 36 bp, synthetic construct; identical to SEQ ID NO: 5906
  misc_feature 1..36: note = Probe
  source 1..36: mol_type = other DNA

SEQ ID NO: 40250 - DNA, 37 bp, synthetic construct
  misc_feature 1..37: note = Probe
  source 1..37: mol_type = other DNA
gcattggtggttcagtggtagaattctcgcctcccac

SEQ ID NO: 40251 - DNA, 41 bp, synthetic construct
  misc_feature 1..41: note = Probe
  source 1..41: mol_type = other DNA
gcattggtggttcagtggtagaattctcgcctcccacgcgg

SEQ ID NO: 40252 - DNA, 42 bp, synthetic construct
  misc_feature 1..42: note = Probe
  source 1..42: mol_type = other DNA
gcattggtggttcagtggtagaattctcgcctcccacgcggg

SEQ ID NO: 40253 - DNA, 45 bp, synthetic construct
  misc_feature 1..45: note = Probe
  source 1..45: mol_type = other DNA
gcattggtggttcagtggtagaattctcgcctcccacgcgggaga

SEQ ID NO: 40254 - DNA, 33 bp, synthetic construct; identical to SEQ ID NO: 5908
  misc_feature 1..33: note = Probe
  source 1..33: mol_type = other DNA

SEQ ID NO: 40255 - DNA, 34 bp, synthetic construct; identical to SEQ ID NO: 5909
  misc_feature 1..34: note = Probe
  source 1..34: mol_type = other DNA

SEQ ID NO: 40256 - DNA, 35 bp, synthetic construct; identical to SEQ ID NO: 5910
  misc_feature 1..35: note = Probe
  source 1..35: mol_type = other DNA

SEQ ID NO: 40257 - DNA, 36 bp, synthetic construct; identical to SEQ ID NO: 5911
  misc_feature 1..36: note = Probe
  source 1..36: mol_type = other DNA

SEQ ID NO: 40258 - DNA, 41 bp, synthetic construct; identical to SEQ ID NO: 1017
  misc_feature 1..41: note = Probe
  source 1..41: mol_type = other DNA

SEQ ID NO: 40259 - DNA, 43 bp, synthetic construct; identical to SEQ ID NO: 5914
  misc_feature 1..43: note = Probe
  source 1..43: mol_type = other DNA

SEQ ID NO: 40260 - DNA, 44 bp, synthetic construct; identical to SEQ ID NO: 1018
  misc_feature 1..44: note = Probe
  source 1..44: mol_type = other DNA

SEQ ID NO: 40261 - DNA, 45 bp, synthetic construct; identical to SEQ ID NO: 5915
  misc_feature 1..45: note = Probe
  source 1..45: mol_type = other DNA

SEQ ID NO: 40262 - DNA, 37 bp, synthetic construct; identical to SEQ ID NO: 5919
  misc_feature 1..37: note = Probe
  source 1..37: mol_type = other DNA

SEQ ID NO: 40263 - DNA, 25 bp, synthetic construct
  misc_feature 1..25: note = Probe
  source 1..25: mol_type = other DNA
gccacacctcagaaggtctcacttt

SEQ ID NO: 40264 - DNA, 26 bp, synthetic construct
  misc_feature 1..26: note = Probe
  source 1..26: mol_type = other DNA
gccacacctcagaaggtctcactttt

SEQ ID NO: 40265 - DNA, 36 bp, synthetic construct; identical to SEQ ID NO: 31798
  misc_feature 1..36: note = Probe
  source 1..36: mol_type = other DNA

SEQ ID NO: 40266 - DNA, 37 bp, synthetic construct
  misc_feature 1..37: note = Probe
  source 1..37: mol_type = other DNA
gccacgcgggaggcccgggttcgattcccggccaatg

SEQ ID NO: 40267 - DNA, 38 bp, synthetic construct
  misc_feature 1..38: note = Probe
  source 1..38: mol_type = other DNA
gccacgcgggaggcccgggttcgattcccggccaatgc

SEQ ID NO: 40268 - DNA, 42 bp, synthetic construct; identical to SEQ ID NO: 5926
  misc_feature 1..42: note = Probe
  source 1..42: mol_type = other DNA

SEQ ID NO: 40269 - DNA, 42 bp, synthetic construct; identical to SEQ ID NO: 20722
  misc_feature 1..42: note = Probe
  source 1..42: mol_type = other DNA

SEQ ID NO: 40270 - DNA, 36 bp, synthetic construct
  misc_feature 1..36: note = Probe
  source 1..36: mol_type = other DNA
gccacgcgggaggcccgggttcgattcccggcccat

SEQ ID NO: 40271 - DNA, 37 bp, synthetic construct
  misc_feature 1..37: note = Probe
  source 1..37: mol_type = other DNA
gccacgcgggaggcccgggttcgattcccggcccatg

SEQ ID NO: 40272 - DNA, 38 bp, synthetic construct; identical to SEQ ID NO: 20731
  misc_feature 1..38: note = Probe
  source 1..38: mol_type = other DNA

SEQ ID NO: 40273 - DNA, 30 bp, synthetic construct
  misc_feature 1..30: note = Probe
  source 1..30: mol_type = other DNA
gcccagctagctcagtcggtagagcataag

SEQ ID NO: 40274 - DNA, 31 bp, synthetic construct; identical to SEQ ID NO: 20745
  misc_feature 1..31: note = Probe
  source 1..31: mol_type = other DNA

SEQ ID NO: 40275 - DNA, 28 bp, synthetic construct
  misc_feature 1..28: note = Probe
  source 1..28: mol_type = other DNA
gcccagctagctcagtcggtagagcatg

SEQ ID NO: 40276 - DNA, 29 bp, synthetic construct
  misc_feature 1..29: note = Probe
  source 1..29: mol_type = other DNA
gcccagctagctcagtcggtagagcatga

SEQ ID NO: 40277 - DNA, 30 bp, synthetic construct; identical to SEQ ID NO: 10349
  misc_feature 1..30: note = Probe
  source 1..30: mol_type = other DNA

SEQ ID NO: 40278 - DNA, 31 bp, synthetic construct; identical to SEQ ID NO: 5936
  misc_feature 1..31: note = Probe
  source 1..31: mol_type = other DNA

SEQ ID NO: 40279 - DNA, 32 bp, synthetic construct; identical to SEQ ID NO: 5937
  misc_feature 1..32: note = Probe
  source 1..32: mol_type = other DNA

SEQ ID NO: 40280 - DNA, 33 bp, synthetic construct; identical to SEQ ID NO: 5938
  misc_feature 1..33: note = Probe
  source 1..33: mol_type = other DNA

SEQ ID NO: 40281 - DNA, 34 bp, synthetic construct; identical to SEQ ID NO: 5939
  misc_feature 1..34: note = Probe
  source 1..34: mol_type = other DNA

SEQ ID NO: 40282 - DNA, 21 bp, synthetic construct
  misc_feature 1..21: note = Probe
  source 1..21: mol_type = other DNA
gcccataacccagaggtcgat

SEQ ID NO: 40283 - DNA, 23 bp, synthetic construct
  misc_feature 1..23: note = Probe
  source 1..23: mol_type = other DNA
gcccataacccagaggtcgatgg

SEQ ID NO: 40284 - DNA, 46 bp, synthetic construct; identical to SEQ ID NO: 5942
  misc_feature 1..46: note = Probe
  source 1..46: mol_type = other DNA

SEQ ID NO: 40285 - DNA, 31 bp, synthetic construct
  misc_feature 1..31: note = Probe
  source 1..31: mol_type = other DNA
gccccagtggcctaatggataaggcactggc

SEQ ID NO: 40286 - DNA, 50 bp, synthetic construct
  misc_feature 1..50: note = Probe
  source 1..50: mol_type = other DNA
gccccagtggcctaatggataaggcactggcctcctaagccagggattgt

SEQ ID NO: 40287 - DNA, 31 bp, synthetic construct; identical to SEQ ID NO: 20768
  misc_feature 1..31: note = Probe
  source 1..31: mol_type = other DNA

SEQ ID NO: 40288 - DNA, 50 bp, synthetic construct
  misc_feature 1..50: note = Probe
  source 1..50: mol_type = other DNA
gccccagtggcctaatggataaggcattggcctcctaagccagggattgt

SEQ ID NO: 40289 - DNA, 20 bp, synthetic construct
  misc_feature 1..20: note = Probe
  source 1..20: mol_type = other DNA
gcccccatgtctaacaacat

SEQ ID NO: 40290 - DNA, 21 bp, synthetic construct
  misc_feature 1..21: note = Probe
  source 1..21: mol_type = other DNA
gcccccatgtctaacaacatg

SEQ ID NO: 40291 - DNA, 22 bp, synthetic construct
  misc_feature 1..22: note = Probe
  source 1..22: mol_type = other DNA
gcccccatgtctaacaacatgg

SEQ ID NO: 40292 - DNA, 23 bp, synthetic construct
  misc_feature 1..23: note = Probe
  source 1..23: mol_type = other DNA
gcccccatgtctaacaacatggc

SEQ ID NO: 40293 - DNA, 24 bp, synthetic construct
  misc_feature 1..24: note = Probe
  source 1..24: mol_type = other DNA
gcccccatgtctaacaacatggct

SEQ ID NO: 40294 - DNA, 25 bp, synthetic construct
  misc_feature 1..25: note = Probe
  source 1..25: mol_type = other DNA
gcccccatgtctaacaacatggctt

SEQ ID NO: 40295 - DNA, 26 bp, synthetic construct
  misc_feature 1..26: note = Probe
  source 1..26: mol_type = other DNA
gcccccatgtctaacaacatggcttt

SEQ ID NO: 40296 - DNA, 27 bp, synthetic construct
  misc_feature 1..27: note = Probe
  source 1..27: mol_type = other DNA
gcccccatgtctaacaacatggctttc

SEQ ID NO: 40297 - DNA, 28 bp, synthetic construct
  misc_feature 1..28: note = Probe
  source 1..28: mol_type = other DNA
gcccccatgtctaacaacatggctttct

SEQ ID NO: 40298 - DNA, 29 bp, synthetic construct
  misc_feature 1..29: note = Probe
  source 1..29: mol_type = other DNA
gcccccatgtctaacaacatggctttctc

SEQ ID NO: 40299 - DNA, 30 bp, synthetic construct; identical to SEQ ID NO: 5966
  misc_feature 1..30: note = Probe
  source 1..30: mol_type = other DNA

SEQ ID NO: 40300 - DNA, 31 bp, synthetic construct; identical to SEQ ID NO: 5967
  misc_feature 1..31: note = Probe
  source 1..31: mol_type = other DNA

SEQ ID NO: 40301 - DNA, 32 bp, synthetic construct; identical to SEQ ID NO: 5968
  misc_feature 1..32: note = Probe
  source 1..32: mol_type = other DNA

SEQ ID NO: 40302 - DNA, 33 bp, synthetic construct; identical to SEQ ID NO: 5969
  misc_feature 1..33: note = Probe
  source 1..33: mol_type = other DNA

SEQ ID NO: 40303 - DNA, 34 bp, synthetic construct; identical to SEQ ID NO: 5970
  misc_feature 1..34: note = Probe
  source 1..34: mol_type = other DNA

SEQ ID NO: 40304 - DNA, 35 bp, synthetic construct; identical to SEQ ID NO: 5971
  misc_feature 1..35: note = Probe
  source 1..35: mol_type = other DNA

SEQ ID NO: 40305 - DNA, 36 bp, synthetic construct; identical to SEQ ID NO: 5972
  misc_feature 1..36: note = Probe
  source 1..36: mol_type = other DNA

SEQ ID NO: 40306 - DNA, 37 bp, synthetic construct; identical to SEQ ID NO: 5973
  misc_feature 1..37: note = Probe
  source 1..37: mol_type = other DNA

SEQ ID NO: 40307 - DNA, 38 bp, synthetic construct; identical to SEQ ID NO: 5974
  misc_feature 1..38: note = Probe
  source 1..38: mol_type = other DNA

SEQ ID NO: 40308 - DNA, 41 bp, synthetic construct; identical to SEQ ID NO: 5977
  misc_feature 1..41: note = Probe
  source 1..41: mol_type = other DNA

SEQ ID NO: 40309 - DNA, 31 bp, synthetic construct; identical to SEQ ID NO: 20801
  misc_feature 1..31: note = Probe
  source 1..31: mol_type = other DNA

SEQ ID NO: 40310 - DNA, 27 bp, synthetic construct
  misc_feature 1..27: note = Probe
  source 1..27: mol_type = other DNA
gccccgggttcgatccccggcatctcc

SEQ ID NO: 40311 - DNA, 31 bp, synthetic construct; identical to SEQ ID NO: 5979
  misc_feature 1..31: note = Probe
  source 1..31: mol_type = other DNA

SEQ ID NO: 40312 - DNA, 29 bp, synthetic construct
  misc_feature 1..29: note = Probe
  source 1..29: mol_type = other DNA
gccccggtggcctaatggataaggcattg

SEQ ID NO: 40313 - DNA, 28 bp, synthetic construct
  misc_feature 1..28: note = Probe
  source 1..28: mol_type = other DNA
gcccctcatttacataaatattatacta

SEQ ID NO: 40314 - DNA, 31 bp, synthetic construct; identical to SEQ ID NO: 20807
  misc_feature 1..31: note = Probe
  source 1..31: mol_type = other DNA

SEQ ID NO: 40315 - DNA, 23 bp, synthetic construct
  misc_feature 1..23: note = Probe
  source 1..23: mol_type = other DNA
gcccggatagctcagtcggtaga

SEQ ID NO: 40316 - DNA, 37 bp, synthetic construct; identical to SEQ ID NO: 1045
  misc_feature 1..37: note = Probe
  source 1..37: mol_type = other DNA

SEQ ID NO: 40317 - DNA, 39 bp, synthetic construct; identical to SEQ ID NO: 5988
  misc_feature 1..39: note = Probe
  source 1..39: mol_type = other DNA

SEQ ID NO: 40318 - DNA, 50 bp, synthetic construct
  misc_feature 1..50: note = Probe
  source 1..50: mol_type = other DNA
gcccggatagctcagtcggtagagcatcagacttttaatctgagggtccg

SEQ ID NO: 40319 - DNA, 30 bp, synthetic construct
  misc_feature 1..30: note = Probe
  source 1..30: mol_type = other DNA
gcccggatagttcagttggtagagcatcag

SEQ ID NO: 40320 - DNA, 31 bp, synthetic construct; identical to SEQ ID NO: 20818
  misc_feature 1..31: note = Probe
  source 1..31: mol_type = other DNA

SEQ ID NO: 40321 - DNA, 32 bp, synthetic construct; identical to SEQ ID NO: 5990
  misc_feature 1..32: note = Probe
  source 1..32: mol_type = other DNA

SEQ ID NO: 40322 - DNA, 33 bp, synthetic construct; identical to SEQ ID NO: 5991
  misc_feature 1..33: note = Probe
  source 1..33: mol_type = other DNA

SEQ ID NO: 40323 - DNA, 28 bp, synthetic construct
  misc_feature 1..28: note = Probe
  source 1..28: mol_type = other DNA
gcccggctagctcagtcgatagagcatg

SEQ ID NO: 40324 - DNA, 29 bp, synthetic construct
  misc_feature 1..29: note = Probe
  source 1..29: mol_type = other DNA
gcccggctagctcagtcgatagagcatga

SEQ ID NO: 40325 - DNA, 30 bp, synthetic construct; identical to SEQ ID NO: 20824
  misc_feature 1..30: note = Probe
  source 1..30: mol_type = other DNA

SEQ ID NO: 40326 - DNA, 31 bp, synthetic construct; identical to SEQ ID NO: 1050
  misc_feature 1..31: note = Probe
  source 1..31: mol_type = other DNA

SEQ ID NO: 40327 - DNA, 50 bp, synthetic construct
  misc_feature 1..50: note = Probe
  source 1..50: mol_type = other DNA
gcccggctagctcagtcgatagagcatgagactcttaatctcagggtcgt

SEQ ID NO: 40328 - DNA, 19 bp, synthetic construct
  misc_feature 1..19: note = Probe
  source 1..19: mol_type = other DNA
gcccggctagctcagtcgg

SEQ ID NO: 40329 - DNA, 21 bp, synthetic construct
  misc_feature 1..21: note = Probe
  source 1..21: mol_type = other DNA
gcccggctagctcagtcggta

SEQ ID NO: 40330 - DNA, 33 bp, synthetic construct; identical to SEQ ID NO: 1065
  misc_feature 1..33: note = Probe
  source 1..33: mol_type = other DNA

SEQ ID NO: 40331 - DNA, 38 bp, synthetic construct; identical to SEQ ID NO: 20832
  misc_feature 1..38: note = Probe
  source 1..38: mol_type = other DNA

SEQ ID NO: 40332 - DNA, 37 bp, synthetic construct; identical to SEQ ID NO: 1074
  misc_feature 1..37: note = Probe
  source 1..37: mol_type = other DNA

SEQ ID NO: 40333 - DNA, 38 bp, synthetic construct; identical to SEQ ID NO: 13544
  misc_feature 1..38: note = Probe
  source 1..38: mol_type = other DNA

SEQ ID NO: 40334 - DNA, 41 bp, synthetic construct; identical to SEQ ID NO: 5997
  misc_feature 1..41: note = Probe
  source 1..41: mol_type = other DNA

SEQ ID NO: 40335 - DNA, 43 bp, synthetic construct; identical to SEQ ID NO: 20834
  misc_feature 1..43: note = Probe
  source 1..43: mol_type = other DNA

SEQ ID NO: 40336 - DNA, 45 bp, synthetic construct; identical to SEQ ID NO: 5998
  misc_feature 1..45: note = Probe
  source 1..45: mol_type = other DNA

SEQ ID NO: 40337 - DNA, 46 bp, synthetic construct
  misc_feature 1..46: note = Probe
  source 1..46: mol_type = other DNA
gcccggctagctcagtcggtagagcatgagactcttaatctcaggg

SEQ ID NO: 40338 - DNA, 37 bp, synthetic construct; identical to SEQ ID NO: 1087
  misc_feature 1..37: note = Probe
  source 1..37: mol_type = other DNA

SEQ ID NO: 40339 - DNA, 38 bp, synthetic construct; identical to SEQ ID NO: 6000
  misc_feature 1..38: note = Probe
  source 1..38: mol_type = other DNA

SEQ ID NO: 40340 - DNA, 42 bp, synthetic construct; identical to SEQ ID NO: 1089
  misc_feature 1..42: note = Probe
  source 1..42: mol_type = other DNA

SEQ ID NO: 40341 - DNA, 45 bp, synthetic construct; identical to SEQ ID NO: 1090
  misc_feature 1..45: note = Probe
  source 1..45: mol_type = other DNA

SEQ ID NO: 40342 - DNA, 46 bp, synthetic construct; identical to SEQ ID NO: 6004
  misc_feature 1..46: note = Probe
  source 1..46: mol_type = other DNA

SEQ ID NO: 40343 - DNA, 50 bp, synthetic construct; identical to SEQ ID NO: 6012
  misc_feature 1..50: note = Probe
  source 1..50: mol_type = other DNA

SEQ ID NO: 40344 - DNA, 23 bp, synthetic construct
  misc_feature 1..23: note = Probe
  source 1..23: mol_type = other DNA
gccgaaatagctcagttgggaga

SEQ ID NO: 40345 - DNA, 24 bp, synthetic construct
  misc_feature 1..24: note = Probe
  source 1..24: mol_type = other DNA
gccgaaatagctcagttgggagag

SEQ ID NO: 40346 - DNA, 25 bp, synthetic construct
  misc_feature 1..25: note = Probe
  source 1..25: mol_type = other DNA
gccgaaatagctcagttgggagagc

SEQ ID NO: 40347 - DNA, 30 bp, synthetic construct; identical to SEQ ID NO: 10395
  misc_feature 1..30: note = Probe
  source 1..30: mol_type = other DNA

SEQ ID NO: 40348 - DNA, 31 bp, synthetic construct; identical to SEQ ID NO: 13572
  misc_feature 1..31: note = Probe
  source 1..31: mol_type = other DNA

SEQ ID NO: 40349 - DNA, 33 bp, synthetic construct; identical to SEQ ID NO: 6022
  misc_feature 1..33: note = Probe
  source 1..33: mol_type = other DNA

SEQ ID NO: 40350 - DNA, 34 bp, synthetic construct; identical to SEQ ID NO: 6023
  misc_feature 1..34: note = Probe
  source 1..34: mol_type = other DNA

SEQ ID NO: 40351 - DNA, 34 bp, synthetic construct; identical to SEQ ID NO: 6024
  misc_feature 1..34: note = Probe
  source 1..34: mol_type = other DNA

SEQ ID NO: 40352 - DNA, 34 bp, synthetic construct; identical to SEQ ID NO: 6027
  misc_feature 1..34: note = Probe
  source 1..34: mol_type = other DNA

SEQ ID NO: 40353 - DNA, 36 bp, synthetic construct; identical to SEQ ID NO: 6028
  misc_feature 1..36: note = Probe
  source 1..36: mol_type = other DNA

SEQ ID NO: 40354 - DNA, 26 bp, synthetic construct
  misc_feature 1..26: note = Probe
  source 1..26: mol_type = other DNA
gccgctggtgtagtggtatcatgcaa

SEQ ID NO: 40355 - DNA, 27 bp, synthetic construct
  misc_feature 1..27: note = Probe
  source 1..27: mol_type = other DNA
gccgctggtgtagtggtatcatgcaag

SEQ ID NO: 40356 - DNA, 31 bp, synthetic construct; identical to SEQ ID NO: 1101
  misc_feature 1..31: note = Probe
  source 1..31: mol_type = other DNA

SEQ ID NO: 40357 - DNA, 21 bp, synthetic construct
  misc_feature 1..21: note = Probe
  source 1..21: mol_type = other DNA
gccgggtactttcgtattttt

SEQ ID NO: 40358 - DNA, 37 bp, synthetic construct
  misc_feature 1..37: note = Probe
  source 1..37: mol_type = other DNA
gccgtcgtcctcgttagtatagtggtgagtatccccg

SEQ ID NO: 40359 - DNA, 23 bp, synthetic construct
  misc_feature 1..23: note = Probe
  source 1..23: mol_type = other DNA
gccgtgatcgtatagtggttagt

SEQ ID NO: 40360 - DNA, 24 bp, synthetic construct
  misc_feature 1..24: note = Probe
  source 1..24: mol_type = other DNA
gccgtgatcgtatagtggttagta

SEQ ID NO: 40361 - DNA, 26 bp, synthetic construct
  misc_feature 1..26: note = Probe
  source 1..26: mol_type = other DNA
gccgtgatcgtatagtggttagtact

SEQ ID NO: 40362 - DNA, 27 bp, synthetic construct
  misc_feature 1..27: note = Probe
  source 1..27: mol_type = other DNA
gccgtgatcgtatagtggttagtactc

SEQ ID NO: 40363 - DNA, 28 bp, synthetic construct
  misc_feature 1..28: note = Probe
  source 1..28: mol_type = other DNA
gccgtgatcgtatagtggttagtactct

SEQ ID NO: 40364 - DNA, 29 bp, synthetic construct
  misc_feature 1..29: note = Probe
  source 1..29: mol_type = other DNA
gccgtgatcgtatagtggttagtactctg

SEQ ID NO: 40365 - DNA, 35 bp, synthetic construct; identical to SEQ ID NO: 1110
  misc_feature 1..35: note = Probe
  source 1..35: mol_type = other DNA

SEQ ID NO: 40366 - DNA, 37 bp, synthetic construct; identical to SEQ ID NO: 6039
  misc_feature 1..37: note = Probe
  source 1..37: mol_type = other DNA

SEQ ID NO: 40367 - DNA, 50 bp, synthetic construct; identical to SEQ ID NO: 6040
  misc_feature 1..50: note = Probe
  source 1..50: mol_type = other DNA

SEQ ID NO: 40368 - DNA, 23 bp, synthetic construct
  misc_feature 1..23: note = Probe
  source 1..23: mol_type = other DNA
gcctaacacgcgaaaggtccccg

SEQ ID NO: 40369 - DNA, 24 bp, synthetic construct
  misc_feature 1..24: note = Probe
  source 1..24: mol_type = other DNA
gcctaacacgcgaaaggtccccgg

SEQ ID NO: 40370 - DNA, 25 bp, synthetic construct
  misc_feature 1..25: note = Probe
  source 1..25: mol_type = other DNA
gcctaacacgcgaaaggtccccggt

SEQ ID NO: 40371 - DNA, 41 bp, synthetic construct
  misc_feature 1..41: note = Probe
  source 1..41: mol_type = other DNA
gcctaacacgcgaaaggtccccggttcgaaaccgggcggaa

SEQ ID NO: 40372 - DNA, 42 bp, synthetic construct
  misc_feature 1..42: note = Probe
  source 1..42: mol_type = other DNA
gcctaacacgcgaaaggtccccggttcgaaaccgggcggaaa

SEQ ID NO: 40373 - DNA, 44 bp, synthetic construct
  misc_feature 1..44: note = Probe
  source 1..44: mol_type = other DNA
gcctaacacgcgaaaggtccccggttcgaaaccgggcggaaaca

SEQ ID NO: 40374 - DNA, 20 bp, synthetic construct
  misc_feature 1..20: note = Probe
  source 1..20: mol_type = other DNA
gcctcacacgcgaaaggtcc

SEQ ID NO: 40375 - DNA, 41 bp, synthetic construct
  misc_feature 1..41: note = Probe
  source 1..41: mol_type = other DNA
gcctcacacgcgaaaggtccccggttcgaaaccgggcagaa

SEQ ID NO: 40376 - DNA, 44 bp, synthetic construct
  misc_feature 1..44: note = Probe
  source 1..44: mol_type = other DNA
gcctcacacgcgaaaggtccccggttcgaaaccgggcagaagca

SEQ ID NO: 40377 - DNA, 50 bp, synthetic construct
  misc_feature 1..50: note = Probe
  source 1..50: mol_type = other DNA
gcctcacacgcgaaaggtccccggttcgaaaccgggcagaagcaacctgt

SEQ ID NO: 40378 - DNA, 43 bp, synthetic construct
  misc_feature 1..43: note = Probe
  source 1..43: mol_type = other DNA
gcctcacacgcgaaaggtccccggttcgaaaccgggcggaaac

SEQ ID NO: 40379 - DNA, 50 bp, synthetic construct
  misc_feature 1..50: note = Probe
  source 1..50: mol_type = other DNA
gcctcacacgcgaaaggtccccggttcgaaaccgggcggaaacaaagtgg

SEQ ID NO: 40380 - DNA, 50 bp, synthetic construct
  misc_feature 1..50: note = Probe
  source 1..50: mol_type = other DNA
gcctcacacgcgaaaggtccccggttcgaaaccgggcggaaacacctcct

SEQ ID NO: 40381 - DNA, 50 bp, synthetic construct
  misc_feature 1..50: note = Probe
  source 1..50: mol_type = other DNA
gcctcacacgcgaaaggtccccggttcgaaaccgggcggaaacacgtttt

SEQ ID NO: 40382 - DNA, 50 bp, synthetic construct
  misc_feature 1..50: note = Probe
  source 1..50: mol_type = other DNA
gcctcacacgcgaaaggtccccggttcgatcccgggcggaaacaggtcag

SEQ ID NO: 40383 - DNA, 41 bp, synthetic construct
  misc_feature 1..41: note = Probe
  source 1..41: mol_type = other DNA
gcctcccacgcgggagacccgggttcaattcccggccaatg

SEQ ID NO: 40384 - DNA, 46 bp, synthetic construct
  misc_feature 1..46: note = Probe
  source 1..46: mol_type = other DNA
gcctcccacgcgggagacccgggttcaattcccggccaatgcaaaa

SEQ ID NO: 40385 - DNA, 50 bp, synthetic construct
  misc_feature 1..50: note = Probe
  source 1..50: mol_type = other DNA
gcctcctaagccagggattgtgggttcgagtcccacccggggtaaagaaa

SEQ ID NO: 40386 - DNA, 50 bp, synthetic construct
  misc_feature 1..50: note = Probe
  source 1..50: mol_type = other DNA
gcctcctaagccagggattgtgggttcgagtcccacctggggtgtcgaga

SEQ ID NO: 40387 - DNA, 31 bp, synthetic construct
  misc_feature 1..31: note = Probe
  source 1..31: mol_type = other DNA
gcctcgggttcgatccccgacacctccaagc

SEQ ID NO: 40388 - DNA, 19 bp, synthetic construct
  misc_feature 1..19: note = Probe
  source 1..19: mol_type = other DNA
gcctcgttagcgcagtagg

SEQ ID NO: 40389 - DNA, 20 bp, synthetic construct
  misc_feature 1..20: note = Probe
  source 1..20: mol_type = other DNA
gcctcgttagcgcagtaggt

SEQ ID NO: 40390 - DNA, 24 bp, synthetic construct
  misc_feature 1..24: note = Probe
  source 1..24: mol_type = other DNA
gcctcgttagcgcagtaggtagcg

SEQ ID NO: 40391 - DNA, 34 bp, synthetic construct
  misc_feature 1..34: note = Probe
  source 1..34: mol_type = other DNA
gcctctccctggtggtctagtggttaggattcgg

SEQ ID NO: 40392 - DNA, 36 bp, synthetic construct; identical to SEQ ID NO: 31916
  misc_feature 1..36: note = Probe
  source 1..36: mol_type = other DNA

SEQ ID NO: 40393 - DNA, 31 bp, synthetic construct
  misc_feature 1..31: note = Probe
  source 1..31: mol_type = other DNA
gcctgccacgcgggaggcccgggttcgattc

SEQ ID NO: 40394 - DNA, 32 bp, synthetic construct
  misc_feature 1..32: note = Probe
  source 1..32: mol_type = other DNA
gcctgccacgcgggaggcccgggttcgattcc

SEQ ID NO: 40395 - DNA, 33 bp, synthetic construct
  misc_feature 1..33: note = Probe
  source 1..33: mol_type = other DNA
gcctgccacgcgggaggcccgggttcgattccc

SEQ ID NO: 40396 - DNA, 34 bp, synthetic construct
  misc_feature 1..34: note = Probe
  source 1..34: mol_type = other DNA
gcctgccacgcgggaggcccgggttcgattcccg

SEQ ID NO: 40397 - DNA, 41 bp, synthetic construct
  misc_feature 1..41: note = Probe
  source 1..41: mol_type = other DNA
gcctgccacgcgggaggcccgggttcgattcccggccaatg

SEQ ID NO: 40398 - DNA, 43 bp, synthetic construct
  misc_feature 1..43: note = Probe
  source 1..43: mol_type = other DNA
gcctgccacgcgggaggcccgggttcgattcccggccaatgca

SEQ ID NO: 40399 - DNA, 50 bp, synthetic construct
  misc_feature 1..50: note = Probe
  source 1..50: mol_type = other DNA
gcctgccacgcgggaggcccgggttcgattcccggccaatgcaacgatga

SEQ ID NO: 40400 - DNA, 46 bp, synthetic construct; identical to SEQ ID NO: 20930
  misc_feature 1..46: note = Probe
  source 1..46: mol_type = other DNA

SEQ ID NO: 40401 - DNA, 49 bp, synthetic construct
  misc_feature 1..49: note = Probe
  source 1..49: mol_type = other DNA
gcctgccacgcgggaggcccgggttcgattcccggccaatgcaagtttt

SEQ ID NO: 40402 - DNA, 50 bp, synthetic construct
  misc_feature 1..50: note = Probe
  source 1..50: mol_type = other DNA
gcctgccacgcgggaggcccgggttcgattcccggccaatgcaagttttg

SEQ ID NO: 40403 - DNA, 46 bp, synthetic construct; identical to SEQ ID NO: 20931
  misc_feature 1..46: note = Probe
  source 1..46: mol_type = other DNA

SEQ ID NO: 40404 - DNA, 49 bp, synthetic construct
  misc_feature 1..49: note = Probe
  source 1..49: mol_type = other DNA
gcctgccacgcgggaggcccgggttcgattcccggccaatgcacgagta

SEQ ID NO: 40405 - DNA, 50 bp, synthetic construct
  misc_feature 1..50: note = Probe
  source 1..50: mol_type = other DNA
gcctgccacgcgggaggcccgggttcgattcccggccaatgcacgagtac

SEQ ID NO: 40406 - DNA, 46 bp, synthetic construct; identical to SEQ ID NO: 20932
  misc_feature 1..46: note = Probe
  source 1..46: mol_type = other DNA

SEQ ID NO: 40407 - DNA, 49 bp, synthetic construct
  misc_feature 1..49: note = Probe
  source 1..49: mol_type = other DNA
gcctgccacgcgggaggcccgggttcgattcccggccaatgcactttca

SEQ ID NO: 40408 - DNA, 50 bp, synthetic construct
  misc_feature 1..50: note = Probe
  source 1..50: mol_type = other DNA
gcctgccacgcgggaggcccgggttcgattcccggccaatgcactttcat

SEQ ID NO: 40409 - DNA, 46 bp, synthetic construct; identical to SEQ ID NO: 20933
  misc_feature 1..46: note = Probe
  source 1..46: mol_type = other DNA

SEQ ID NO: 40410 - DNA, 49 bp, synthetic construct
  misc_feature 1..49: note = Probe
  source 1..49: mol_type = other DNA
gcctgccacgcgggaggcccgggttcgattcccggccaatgcagcagca

SEQ ID NO: 40411 - DNA, 50 bp, synthetic construct
  misc_feature 1..50: note = Probe
  source 1..50: mol_type = other DNA
gcctgccacgcgggaggcccgggttcgattcccggccaatgcagcagcag

SEQ ID NO: 40412 - DNA, 50 bp, synthetic construct
  misc_feature 1..50: note = Probe
  source 1..50: mol_type = other DNA
gcctgccacgcgggaggcccgggttcgattcccggccaatgcagcagctg

SEQ ID NO: 40413 - DNA, 43 bp, synthetic construct
  misc_feature 1..43: note = Probe
  source 1..43: mol_type = other DNA
gcctgccacgcgggaggcccgggttcgattcccggcccatgca

SEQ ID NO: 40414 - DNA, 46 bp, synthetic construct; identical to SEQ ID NO: 20935
  misc_feature 1..46: note = Probe
  source 1..46: mol_type = other DNA

SEQ ID NO: 40415 - DNA, 49 bp, synthetic construct
  misc_feature 1..49: note = Probe
  source 1..49: mol_type = other DNA
gcctgccacgcgggaggcccgggttcgattcccggcccatgcagcacga

SEQ ID NO: 40416 - DNA, 50 bp, synthetic construct; identical to SEQ ID NO: 20936
  misc_feature 1..50: note = Probe
  source 1..50: mol_type = other DNA

SEQ ID NO: 40417 - DNA, 50 bp, synthetic construct; identical to SEQ ID NO: 20938
  misc_feature 1..50: note = Probe
  source 1..50: mol_type = other DNA

SEQ ID NO: 40418 - DNA, 25 bp, synthetic construct
  misc_feature 1..25: note = Probe
  source 1..25: mol_type = other DNA
gcctggatagctcagtcggtagagc

SEQ ID NO: 40419 - DNA, 26 bp, synthetic construct
  misc_feature 1..26: note = Probe
  source 1..26: mol_type = other DNA
gcctggatagctcagtcggtagagca

SEQ ID NO: 40420 - DNA, 35 bp, synthetic construct; identical to SEQ ID NO: 1118
  misc_feature 1..35: note = Probe
  source 1..35: mol_type = other DNA

SEQ ID NO: 40421 - DNA, 36 bp, synthetic construct; identical to SEQ ID NO: 1119
  misc_feature 1..36: note = Probe
  source 1..36: mol_type = other DNA

SEQ ID NO: 40422 - DNA, 31 bp, synthetic construct
  misc_feature 1..31: note = Probe
  source 1..31: mol_type = other DNA
gcctggatagctcagttggtagaacatcaga

SEQ ID NO: 40423 - DNA, 26 bp, synthetic construct
  misc_feature 1..26: note = Probe
  source 1..26: mol_type = other DNA
gcctggatagctcagttggtagagca

SEQ ID NO: 40424 - DNA, 29 bp, synthetic construct
  misc_feature 1..29: note = Probe
  source 1..29: mol_type = other DNA
gcctggatagctcagttggtagagcatca

SEQ ID NO: 40425 - DNA, 34 bp, synthetic construct; identical to SEQ ID NO: 1123
  misc_feature 1..34: note = Probe
  source 1..34: mol_type = other DNA

SEQ ID NO: 40426 - DNA, 28 bp, synthetic construct
  misc_feature 1..28: note = Probe
  source 1..28: mol_type = other DNA
gcctgggtagctcagtcggtagagcatc

SEQ ID NO: 40427 - DNA, 22 bp, synthetic construct
  misc_feature 1..22: note = Probe
  source 1..22: mol_type = other DNA
gcctgtcacgcgggagaccggg

SEQ ID NO: 40428 - DNA, 23 bp, synthetic construct
  misc_feature 1..23: note = Probe
  source 1..23: mol_type = other DNA
gcctgtcacgcgggagaccgggg

SEQ ID NO: 40429 - DNA, 25 bp, synthetic construct
  misc_feature 1..25: note = Probe
  source 1..25: mol_type = other DNA
gcctgtcacgcgggagaccggggtt

SEQ ID NO: 40430 - DNA, 26 bp, synthetic construct
  misc_feature 1..26: note = Probe
  source 1..26: mol_type = other DNA
gcctgtcacgcgggagaccggggttc

SEQ ID NO: 40431 - DNA, 36 bp, synthetic construct; identical to SEQ ID NO: 20954
  misc_feature 1..36: note = Probe
  source 1..36: mol_type = other DNA

SEQ ID NO: 40432 - DNA, 44 bp, synthetic construct; identical to SEQ ID NO: 6059
  misc_feature 1..44: note = Probe
  source 1..44: mol_type = other DNA

SEQ ID NO: 40433 - DNA, 45 bp, synthetic construct
  misc_feature 1..45: note = Probe
  source 1..45: mol_type = other DNA
gcctgtcacgcgggagaccggggttcaattccccgacggggaggt

SEQ ID NO: 40434 - DNA, 46 bp, synthetic construct; identical to SEQ ID NO: 6060
  misc_feature 1..46: note = Probe
  source 1..46: mol_type = other DNA

SEQ ID NO: 40435 - DNA, 50 bp, synthetic construct; identical to SEQ ID NO: 20959
  misc_feature 1..50: note = Probe
  source 1..50: mol_type = other DNA

SEQ ID NO: 40436 - DNA, 30 bp, synthetic construct; identical to SEQ ID NO: 20962
  misc_feature 1..30: note = Probe
  source 1..30: mol_type = other DNA

SEQ ID NO: 40437 - DNA, 31 bp, synthetic construct; identical to SEQ ID NO: 20963
  misc_feature 1..31: note = Probe
  source 1..31: mol_type = other DNA

SEQ ID NO: 40438 - DNA, 34 bp, synthetic construct
  misc_feature 1..34: note = Probe
  source 1..34: mol_type = other DNA
gcctgtcacgcgggagaccggggttcgattcccc

SEQ ID NO: 40439 - DNA, 35 bp, synthetic construct
  misc_feature 1..35: note = Probe
  source 1..35: mol_type = other DNA
gcctgtcacgcgggagaccggggttcgattcccca

SEQ ID NO: 40440 - DNA, 36 bp, synthetic construct
  misc_feature 1..36: note = Probe
  source 1..36: mol_type = other DNA
gcctgtcacgcgggagaccggggttcgattccccaa

SEQ ID NO: 40441 - DNA, 41 bp, synthetic construct
  misc_feature 1..41: note = Probe
  source 1..41: mol_type = other DNA
gcctgtcacgcgggagaccggggttcgattccccaacgggg

SEQ ID NO: 40442 - DNA, 43 bp, synthetic construct
  misc_feature 1..43: note = Probe
  source 1..43: mol_type = other DNA
gcctgtcacgcgggagaccggggttcgattccccaacggggag

SEQ ID NO: 40443 - DNA, 46 bp, synthetic construct; identical to SEQ ID NO: 20964
  misc_feature 1..46: note = Probe
  source 1..46: mol_type = other DNA

SEQ ID NO: 40444 - DNA, 50 bp, synthetic construct
  misc_feature 1..50: note = Probe
  source 1..50: mol_type = other DNA
gcctgtcacgcgggagaccggggttcgattccccaacggggaggctaata

SEQ ID NO: 40445 - DNA, 36 bp, synthetic construct; identical to SEQ ID NO: 13618
  misc_feature 1..36: note = Probe
  source 1..36: mol_type = other DNA

SEQ ID NO: 40446 - DNA, 38 bp, synthetic construct; identical to SEQ ID NO: 13619
  misc_feature 1..38: note = Probe
  source 1..38: mol_type = other DNA

SEQ ID NO: 40447 - DNA, 44 bp, synthetic construct; identical to SEQ ID NO: 6062
  misc_feature 1..44: note = Probe
  source 1..44: mol_type = other DNA

SEQ ID NO: 40448 - DNA, 45 bp, synthetic construct
  misc_feature 1..45: note = Probe
  source 1..45: mol_type = other DNA
gcctgtcacgcgggagaccggggttcgattccccgacggggagaa

SEQ ID NO: 40449 - DNA, 46 bp, synthetic construct; identical to SEQ ID NO: 20968
  misc_feature 1..46: note = Probe
  source 1..46: mol_type = other DNA

SEQ ID NO: 40450 - DNA, 50 bp, synthetic construct; identical to SEQ ID NO: 6063
  misc_feature 1..50: note = Probe
  source 1..50: mol_type = other DNA

SEQ ID NO: 40451 - DNA, 45 bp, synthetic construct
  misc_feature 1..45: note = Probe
  source 1..45: mol_type = other DNA
gcctgtcacgcgggagaccggggttcgattccccgacggggagag

SEQ ID NO: 40452 - DNA, 46 bp, synthetic construct; identical to SEQ ID NO: 6064
  misc_feature 1..46: note = Probe
  source 1..46: mol_type = other DNA

SEQ ID NO: 40453 - DNA, 50 bp, synthetic construct
  misc_feature 1..50: note = Probe
  source 1..50: mol_type = other DNA
gcctgtcacgcgggagaccggggttcgattccccgacggggagagtacta

SEQ ID NO: 40454 - DNA, 44 bp, synthetic construct; identical to SEQ ID NO: 6065
  misc_feature 1..44: note = Probe
  source 1..44: mol_type = other DNA

SEQ ID NO: 40455 - DNA, 45 bp, synthetic construct
  misc_feature 1..45: note = Probe
  source 1..45: mol_type = other DNA
gcctgtcacgcgggagaccggggttcgattccccgacggggagga

SEQ ID NO: 40456 - DNA, 46 bp, synthetic construct; identical to SEQ ID NO: 20972
  misc_feature 1..46: note = Probe
  source 1..46: mol_type = other DNA

SEQ ID NO: 40457 - DNA, 50 bp, synthetic construct; identical to SEQ ID NO: 20973
  misc_feature 1..50: note = Probe
  source 1..50: mol_type = other DNA

SEQ ID NO: 40458 - DNA, 45 bp, synthetic construct
  misc_feature 1..45: note = Probe
  source 1..45: mol_type = other DNA
gcctgtcacgcgggagaccggggttcgattccccgacggggaggc

SEQ ID NO: 40459 - DNA, 46 bp, synthetic construct; identical to SEQ ID NO: 6066
  misc_feature 1..46: note = Probe
  source 1..46: mol_type = other DNA

SEQ ID NO: 40460 - DNA, 50 bp, synthetic construct; identical to SEQ ID NO: 6068
  misc_feature 1..50: note = Probe
  source 1..50: mol_type = other DNA

SEQ ID NO: 40461 - DNA, 50 bp, synthetic construct; identical to SEQ ID NO: 20978
  misc_feature 1..50: note = Probe
  source 1..50: mol_type = other DNA

SEQ ID NO: 40462 - DNA, 46 bp, synthetic construct; identical to SEQ ID NO: 6070
  misc_feature 1..46: note = Probe
  source 1..46: mol_type = other DNA

SEQ ID NO: 40463 - DNA, 50 bp, synthetic construct; identical to SEQ ID NO: 20980
  misc_feature 1..50: note = Probe
  source 1..50: mol_type = other DNA

SEQ ID NO: 40464 - DNA, 50 bp, synthetic construct; identical to SEQ ID NO: 20981
  misc_feature 1..50: note = Probe
  source 1..50: mol_type = other DNA

SEQ ID NO: 40465 - DNA, 17 bp, synthetic construct
  misc_feature 1..17: note = Probe
  source 1..17: mol_type = other DNA
gccttccaagcagttga

SEQ ID NO: 40466 - DNA, 20 bp, synthetic construct
  misc_feature 1..20: note = Probe
  source 1..20: mol_type = other DNA
gccttccaagcagttgaccc

SEQ ID NO: 40467 - DNA, 24 bp, synthetic construct
  misc_feature 1..24: note = Probe
  source 1..24: mol_type = other DNA
gccttccaagcagttgacccgggt

SEQ ID NO: 40468 - DNA, 50 bp, synthetic construct
  misc_feature 1..50: note = Probe
  source 1..50: mol_type = other DNA
gccttccaagcagttgacccgggttcgattcccggccaacgcaagggttt

SEQ ID NO: 40469 - DNA, 46 bp, synthetic construct; identical to SEQ ID NO: 20985
  misc_feature 1..46: note = Probe
  source 1..46: mol_type = other DNA

SEQ ID NO: 40470 - DNA, 50 bp, synthetic construct
  misc_feature 1..50: note = Probe
  source 1..50: mol_type = other DNA
gccttccaagcagttgacccgggttcgattcccggccaacgcaagtcgtt

SEQ ID NO: 40471 - DNA, 46 bp, synthetic construct
  misc_feature 1..46: note = Probe
  source 1..46: mol_type = other DNA
gccttccaagcagttgacccgggttcgattcccggccaacgcagcg

SEQ ID NO: 40472 - DNA, 50 bp, synthetic construct
  misc_feature 1..50: note = Probe
  source 1..50: mol_type = other DNA
gccttccaagcagttgacccgggttcgattcccggccaacgcagcgggcg

SEQ ID NO: 40473 - DNA, 46 bp, synthetic construct; identical to SEQ ID NO: 20986
  misc_feature 1..46: note = Probe
  source 1..46: mol_type = other DNA

SEQ ID NO: 40474 - DNA, 49 bp, synthetic construct
  misc_feature 1..49: note = Probe
  source 1..49: mol_type = other DNA
gccttccaagcagttgacccgggttcgattcccggccaacgcagtgtca

SEQ ID NO: 40475 - DNA, 50 bp, synthetic construct
  misc_feature 1..50: note = Probe
  source 1..50: mol_type = other DNA
gccttccaagcagttgacccgggttcgattcccggccaacgcagtgtcag

SEQ ID NO: 40476 - DNA, 30 bp, synthetic construct; identical to SEQ ID NO: 20987
  misc_feature 1..30: note = Probe
  source 1..30: mol_type = other DNA

SEQ ID NO: 40477 - DNA, 29 bp, synthetic construct
  misc_feature 1..29: note = Probe
  source 1..29: mol_type = other DNA
gccttggtggtgcagtggtagaattctcg

SEQ ID NO: 40478 - DNA, 32 bp, synthetic construct; identical to SEQ ID NO: 6077
  misc_feature 1..32: note = Probe
  source 1..32: mol_type = other DNA

SEQ ID NO: 40479 - DNA, 38 bp, synthetic construct; identical to SEQ ID NO: 6078
  misc_feature 1..38: note = Probe
  source 1..38: mol_type = other DNA

SEQ ID NO: 40480 - DNA, 28 bp, synthetic construct
  misc_feature 1..28: note = Probe
  source 1..28: mol_type = other DNA
gcgacccgggttcgattcccgggcggcg

SEQ ID NO: 40481 - DNA, 30 bp, synthetic construct
  misc_feature 1..30: note = Probe
  source 1..30: mol_type = other DNA
gcgacccgggttcgattcccgggcggcgca

SEQ ID NO: 40482 - DNA, 32 bp, synthetic construct; identical to SEQ ID NO: 21003
  misc_feature 1..32: note = Probe
  source 1..32: mol_type = other DNA

SEQ ID NO: 40483 - DNA, 33 bp, synthetic construct; identical to SEQ ID NO: 21004
  misc_feature 1..33: note = Probe
  source 1..33: mol_type = other DNA

SEQ ID NO: 40484 - DNA, 34 bp, synthetic construct; identical to SEQ ID NO: 21005
  misc_feature 1..34: note = Probe
  source 1..34: mol_type = other DNA

SEQ ID NO: 40485 - DNA, 38 bp, synthetic construct; identical to SEQ ID NO: 21007
  misc_feature 1..38: note = Probe
  source 1..38: mol_type = other DNA

SEQ ID NO: 40486 - DNA, 34 bp, synthetic construct; identical to SEQ ID NO: 21014
  misc_feature 1..34: note = Probe
  source 1..34: mol_type = other DNA

SEQ ID NO: 40487 - DNA, 28 bp, synthetic construct
  misc_feature 1..28: note = Probe
  source 1..28: mol_type = other DNA
gcgatccgagttcaaatctcggtggaac

SEQ ID NO: 40488 - DNA, 28 bp, synthetic construct
  misc_feature 1..28: note = Probe
  source 1..28: mol_type = other DNA
gcgatccgagttcaaatctcggtgggac

SEQ ID NO: 40489 - DNA, 28 bp, synthetic construct
  misc_feature 1..28: note = Probe
  source 1..28: mol_type = other DNA
gcgatccgagttcaagtctcggtggaac

SEQ ID NO: 40490 - DNA, 31 bp, synthetic construct
  misc_feature 1..31: note = Probe
  source 1..31: mol_type = other DNA
gcgcattggtggttcagtggtagaattctcg

SEQ ID NO: 40491 - DNA, 34 bp, synthetic construct; identical to SEQ ID NO: 31946
  misc_feature 1..34: note = Probe
  source 1..34: mol_type = other DNA

SEQ ID NO: 40492 - DNA, 37 bp, synthetic construct; identical to SEQ ID NO: 1156
  misc_feature 1..37: note = Probe
  source 1..37: mol_type = other DNA

SEQ ID NO: 40493 - DNA, 38 bp, synthetic construct; identical to SEQ ID NO: 6089
  misc_feature 1..38: note = Probe
  source 1..38: mol_type = other DNA

SEQ ID NO: 40494 - DNA, 41 bp, synthetic construct; identical to SEQ ID NO: 1159
  misc_feature 1..41: note = Probe
  source 1..41: mol_type = other DNA

SEQ ID NO: 40495 - DNA, 42 bp, synthetic construct; identical to SEQ ID NO: 6090
  misc_feature 1..42: note = Probe
  source 1..42: mol_type = other DNA

SEQ ID NO: 40496 - DNA, 44 bp, synthetic construct; identical to SEQ ID NO: 6092
  misc_feature 1..44: note = Probe
  source 1..44: mol_type = other DNA

SEQ ID NO: 40497 - DNA, 45 bp, synthetic construct; identical to SEQ ID NO: 6093
  misc_feature 1..45: note = Probe
  source 1..45: mol_type = other DNA

SEQ ID NO: 40498 - DNA, 46 bp, synthetic construct; identical to SEQ ID NO: 1160
  misc_feature 1..46: note = Probe
  source 1..46: mol_type = other DNA

SEQ ID NO: 40499 - DNA, 50 bp, synthetic construct
  misc_feature 1..50: note = Probe
  source 1..50: mol_type = other DNA
gcgcgttcggctgttaaccgaaaggttggtggttcgagcccacccaggga

SEQ ID NO: 40500 - DNA, 43 bp, synthetic construct
  misc_feature 1..43: note = Probe
  source 1..43: mol_type = other DNA
gcgctctcaccgccgcggcccgggttcgattcccggtcaggga

SEQ ID NO: 40501 - DNA, 50 bp, synthetic construct; identical to SEQ ID NO: 6097
  misc_feature 1..50: note = Probe
  source 1..50: mol_type = other DNA

SEQ ID NO: 40502 - DNA, 22 bp, synthetic construct
  misc_feature 1..22: note = Probe
  source 1..22: mol_type = other DNA
gcggaagcgggtgctcttattt

SEQ ID NO: 40503 - DNA, 34 bp, synthetic construct
  misc_feature 1..34: note = Probe
  source 1..34: mol_type = other DNA
gcggaagcgtgctgggcccataacccagaggtcg

SEQ ID NO: 40504 - DNA, 26 bp, synthetic construct
  misc_feature 1..26: note = Probe
  source 1..26: mol_type = other DNA
gcggcccgggttcgactcccggtgtg

SEQ ID NO: 40505 - DNA, 27 bp, synthetic construct
  misc_feature 1..27: note = Probe
  source 1..27: mol_type = other DNA
gcggcccgggttcgactcccggtgtgg

SEQ ID NO: 40506 - DNA, 28 bp, synthetic construct
  misc_feature 1..28: note = Probe
  source 1..28: mol_type = other DNA
gcggcccgggttcgactcccggtgtggg

SEQ ID NO: 40507 - DNA, 29 bp, synthetic construct
  misc_feature 1..29: note = Probe
  source 1..29: mol_type = other DNA
gcggcccgggttcgactcccggtgtggga

SEQ ID NO: 40508 - DNA, 30 bp, synthetic construct; identical to SEQ ID NO: 13658
  misc_feature 1..30: note = Probe
  source 1..30: mol_type = other DNA

SEQ ID NO: 40509 - DNA, 27 bp, synthetic construct
  misc_feature 1..27: note = Probe
  source 1..27: mol_type = other DNA
gcggcccgggttcgattcccggtcagg

SEQ ID NO: 40510 - DNA, 28 bp, synthetic construct
  misc_feature 1..28: note = Probe
  source 1..28: mol_type = other DNA
gcggcccgggttcgattcccggtcaggg

SEQ ID NO: 40511 - DNA, 30 bp, synthetic construct; identical to SEQ ID NO: 13662
  misc_feature 1..30: note = Probe
  source 1..30: mol_type = other DNA

SEQ ID NO: 40512 - DNA, 33 bp, synthetic construct; identical to SEQ ID NO: 6104
  misc_feature 1..33: note = Probe
  source 1..33: mol_type = other DNA

SEQ ID NO: 40513 - DNA, 50 bp, synthetic construct
  misc_feature 1..50: note = Probe
  source 1..50: mol_type = other DNA
gcggctgtgatggccgagtggttaaggcgttggactcgaaatccaatggg

SEQ ID NO: 40514 - DNA, 32 bp, synthetic construct
  misc_feature 1..32: note = Probe
  source 1..32: mol_type = other DNA
gcgggagacccgggttcaattcccggccaatg

SEQ ID NO: 40515 - DNA, 33 bp, synthetic construct; identical to SEQ ID NO: 6107
  misc_feature 1..33: note = Probe
  source 1..33: mol_type = other DNA

SEQ ID NO: 40516 - DNA, 37 bp, synthetic construct; identical to SEQ ID NO: 6109
  misc_feature 1..37: note = Probe
  source 1..37: mol_type = other DNA

SEQ ID NO: 40517 - DNA, 32 bp, synthetic construct; identical to SEQ ID NO: 31972
  misc_feature 1..32: note = Probe
  source 1..32: mol_type = other DNA

SEQ ID NO: 40518 - DNA, 34 bp, synthetic construct
  misc_feature 1..34: note = Probe
  source 1..34: mol_type = other DNA
gcgggagaccggggttcgattccccaacggggag

SEQ ID NO: 40519 - DNA, 27 bp, synthetic construct
  misc_feature 1..27: note = Probe
  source 1..27: mol_type = other DNA
gcgggagaccggggttcgattccccga

SEQ ID NO: 40520 - DNA, 28 bp, synthetic construct
  misc_feature 1..28: note = Probe
  source 1..28: mol_type = other DNA
gcgggagaccggggttcgattccccgac

SEQ ID NO: 40521 - DNA, 29 bp, synthetic construct
  misc_feature 1..29: note = Probe
  source 1..29: mol_type = other DNA
gcgggagaccggggttcgattccccgacg

SEQ ID NO: 40522 - DNA, 35 bp, synthetic construct; identical to SEQ ID NO: 6112
  misc_feature 1..35: note = Probe
  source 1..35: mol_type = other DNA

SEQ ID NO: 40523 - DNA, 37 bp, synthetic construct; identical to SEQ ID NO: 6117
  misc_feature 1..37: note = Probe
  source 1..37: mol_type = other DNA

SEQ ID NO: 40524 - DNA, 35 bp, synthetic construct; identical to SEQ ID NO: 6118
  misc_feature 1..35: note = Probe
  source 1..35: mol_type = other DNA

SEQ ID NO: 40525 - DNA, 37 bp, synthetic construct; identical to SEQ ID NO: 6121
  misc_feature 1..37: note = Probe
  source 1..37: mol_type = other DNA

SEQ ID NO: 40526 - DNA, 32 bp, synthetic construct; identical to SEQ ID NO: 21098
  misc_feature 1..32: note = Probe
  source 1..32: mol_type = other DNA

SEQ ID NO: 40527 - DNA, 33 bp, synthetic construct; identical to SEQ ID NO: 6124
  misc_feature 1..33: note = Probe
  source 1..33: mol_type = other DNA

SEQ ID NO: 40528 - DNA, 33 bp, synthetic construct; identical to SEQ ID NO: 21108
  misc_feature 1..33: note = Probe
  source 1..33: mol_type = other DNA

SEQ ID NO: 40529 - DNA, 23 bp, synthetic construct
  misc_feature 1..23: note = Probe
  source 1..23: mol_type = other DNA
gcggtctagtggttaggattcgg

SEQ ID NO: 40530 - DNA, 50 bp, synthetic construct
  misc_feature 1..50: note = Probe
  source 1..50: mol_type = other DNA
gcgtctacccagggcctggatagctcagttggtagaacatcagactttta

SEQ ID NO: 40531 - DNA, 35 bp, synthetic construct
  misc_feature 1..35: note = Probe
  source 1..35: mol_type = other DNA
gcgtgaggccctatagctcaggggttagagcactg

SEQ ID NO: 40532 - DNA, 24 bp, synthetic construct
  misc_feature 1..24: note = Probe
  source 1..24: mol_type = other DNA
gcgtgggttcgaatcccatcctcg

SEQ ID NO: 40533 - DNA, 25 bp, synthetic construct
  misc_feature 1..25: note = Probe
  source 1..25: mol_type = other DNA
gcgtgggttcgaatcccatcctcgt

SEQ ID NO: 40534 - DNA, 17 bp, synthetic construct
  misc_feature 1..17: note = Probe
  source 1..17: mol_type = other DNA
gcgttggtggtatagtg

SEQ ID NO: 40535 - DNA, 18 bp, synthetic construct
  misc_feature 1..18: note = Probe
  source 1..18: mol_type = other DNA
gcgttggtggtatagtgg

SEQ ID NO: 40536 - DNA, 33 bp, synthetic construct; identical to SEQ ID NO: 1186
  misc_feature 1..33: note = Probe
  source 1..33: mol_type = other DNA

SEQ ID NO: 40537 - DNA, 34 bp, synthetic construct; identical to SEQ ID NO: 1187
  misc_feature 1..34: note = Probe
  source 1..34: mol_type = other DNA

SEQ ID NO: 40538 - DNA, 35 bp, synthetic construct; identical to SEQ ID NO: 1188
  misc_feature 1..35: note = Probe
  source 1..35: mol_type = other DNA

SEQ ID NO: 40539 - DNA, 39 bp, synthetic construct; identical to SEQ ID NO: 21123
  misc_feature 1..39: note = Probe
  source 1..39: mol_type = other DNA

SEQ ID NO: 40540 - DNA, 44 bp, synthetic construct; identical to SEQ ID NO: 1191
  misc_feature 1..44: note = Probe
  source 1..44: mol_type = other DNA

SEQ ID NO: 40541 - DNA, 20 bp, synthetic construct
  misc_feature 1..20: note = Probe
  source 1..20: mol_type = other DNA
gcgttggtggtatagtggtg

SEQ ID NO: 40542 - DNA, 21 bp, synthetic construct
  misc_feature 1..21: note = Probe
  source 1..21: mol_type = other DNA
gcgttggtggtatagtggtga

SEQ ID NO: 40543 - DNA, 22 bp, synthetic construct
  misc_feature 1..22: note = Probe
  source 1..22: mol_type = other DNA
gcgttggtggtatagtggtgag

SEQ ID NO: 40544 - DNA, 23 bp, synthetic construct
  misc_feature 1..23: note = Probe
  source 1..23: mol_type = other DNA
gcgttggtggtatagtggtgagc

SEQ ID NO: 40545 - DNA, 24 bp, synthetic construct
  misc_feature 1..24: note = Probe
  source 1..24: mol_type = other DNA
gcgttggtggtatagtggtgagca

SEQ ID NO: 40546 - DNA, 25 bp, synthetic construct
  misc_feature 1..25: note = Probe
  source 1..25: mol_type = other DNA
gcgttggtggtatagtggtgagcat

SEQ ID NO: 40547 - DNA, 26 bp, synthetic construct
  misc_feature 1..26: note = Probe
  source 1..26: mol_type = other DNA
gcgttggtggtatagtggtgagcata

SEQ ID NO: 40548 - DNA, 27 bp, synthetic construct
  misc_feature 1..27: note = Probe
  source 1..27: mol_type = other DNA
gcgttggtggtatagtggtgagcatag

SEQ ID NO: 40549 - DNA, 28 bp, synthetic construct
  misc_feature 1..28: note = Probe
  source 1..28: mol_type = other DNA
gcgttggtggtatagtggtgagcatagc

SEQ ID NO: 40550 - DNA, 29 bp, synthetic construct
  misc_feature 1..29: note = Probe
  source 1..29: mol_type = other DNA
gcgttggtggtatagtggtgagcatagct

SEQ ID NO: 40551 - DNA, 30 bp, synthetic construct; identical to SEQ ID NO: 6150
  misc_feature 1..30: note = Probe
  source 1..30: mol_type = other DNA

SEQ ID NO: 40552 - DNA, 31 bp, synthetic construct; identical to SEQ ID NO: 6151
  misc_feature 1..31: note = Probe
  source 1..31: mol_type = other DNA

SEQ ID NO: 40553 - DNA, 32 bp, synthetic construct; identical to SEQ ID NO: 6152
  misc_feature 1..32: note = Probe
  source 1..32: mol_type = other DNA

SEQ ID NO: 40554 - DNA, 33 bp, synthetic construct; identical to SEQ ID NO: 6153
  misc_feature 1..33: note = Probe
  source 1..33: mol_type = other DNA

SEQ ID NO: 40555 - DNA, 34 bp, synthetic construct; identical to SEQ ID NO: 6154
  misc_feature 1..34: note = Probe
  source 1..34: mol_type = other DNA

SEQ ID NO: 40556 - DNA, 35 bp, synthetic construct; identical to SEQ ID NO: 6155
  misc_feature 1..35: note = Probe
  source 1..35: mol_type = other DNA

SEQ ID NO: 40557 - DNA, 36 bp, synthetic construct; identical to SEQ ID NO: 6156
  misc_feature 1..36: note = Probe
  source 1..36: mol_type = other DNA

SEQ ID NO: 40558 - DNA, 37 bp, synthetic construct; identical to SEQ ID NO: 6157
  misc_feature 1..37: note = Probe
  source 1..37: mol_type = other DNA

SEQ ID NO: 40559 - DNA, 38 bp, synthetic construct; identical to SEQ ID NO: 21144
  misc_feature 1..38: note = Probe
  source 1..38: mol_type = other DNA

SEQ ID NO: 40560 - DNA, 41 bp, synthetic construct; identical to SEQ ID NO: 13692
  misc_feature 1..41: note = Probe
  source 1..41: mol_type = other DNA

SEQ ID NO: 40561 - DNA, 45 bp, synthetic construct; identical to SEQ ID NO: 6160
  misc_feature 1..45: note = Probe
  source 1..45: mol_type = other DNA

SEQ ID NO: 40562 - DNA, 46 bp, synthetic construct; identical to SEQ ID NO: 6161
  misc_feature 1..46: note = Probe
  source 1..46: mol_type = other DNA

SEQ ID NO: 40563 - DNA, 29 bp, synthetic construct
  misc_feature 1..29: note = Probe
  source 1..29: mol_type = other DNA
gcgttggtggtatagtggtgagcatagtt

SEQ ID NO: 40564 - DNA, 30 bp, synthetic construct
  misc_feature 1..30: note = Probe
  source 1..30: mol_type = other DNA
gcgttggtggtatagtggtgagcatagttg

SEQ ID NO: 40565 - DNA, 23 bp, synthetic construct
  misc_feature 1..23: note = Probe
  source 1..23: mol_type = other DNA
gcgttggtggtatagtggttagc

SEQ ID NO: 40566 - DNA, 24 bp, synthetic construct
  misc_feature 1..24: note = Probe
  source 1..24: mol_type = other DNA
gcgttggtggtatagtggttagca

SEQ ID NO: 40567 - DNA, 25 bp, synthetic construct
  misc_feature 1..25: note = Probe
  source 1..25: mol_type = other DNA
gcgttggtggtatagtggttagcat

SEQ ID NO: 40568 - DNA, 26 bp, synthetic construct
  misc_feature 1..26: note = Probe
  source 1..26: mol_type = other DNA
gcgttggtggtatagtggttagcata

SEQ ID NO: 40569 - DNA, 27 bp, synthetic construct
  misc_feature 1..27: note = Probe
  source 1..27: mol_type = other DNA
gcgttggtggtatagtggttagcatag

SEQ ID NO: 40570 - DNA, 28 bp, synthetic construct
  misc_feature 1..28: note = Probe
  source 1..28: mol_type = other DNA
gcgttggtggtatagtggttagcatagc

SEQ ID NO: 40571 - DNA, 29 bp, synthetic construct
  misc_feature 1..29: note = Probe
  source 1..29: mol_type = other DNA
gcgttggtggtatagtggttagcatagct

SEQ ID NO: 40572 - DNA, 30 bp, synthetic construct; identical to SEQ ID NO: 6172
  misc_feature 1..30: note = Probe
  source 1..30: mol_type = other DNA

SEQ ID NO: 40573 - DNA, 31 bp, synthetic construct; identical to SEQ ID NO: 6173
  misc_feature 1..31: note = Probe
  source 1..31: mol_type = other DNA

SEQ ID NO: 40574 - DNA, 32 bp, synthetic construct; identical to SEQ ID NO: 6174
  misc_feature 1..32: note = Probe
  source 1..32: mol_type = other DNA

SEQ ID NO: 40575 - DNA, 33 bp, synthetic construct; identical to SEQ ID NO: 6175
  misc_feature 1..33: note = Probe
  source 1..33: mol_type = other DNA

SEQ ID NO: 40576 - DNA, 34 bp, synthetic construct; identical to SEQ ID NO: 6176
  misc_feature 1..34: note = Probe
  source 1..34: mol_type = other DNA

SEQ ID NO: 40577 - DNA, 35 bp, synthetic construct; identical to SEQ ID NO: 6177
  misc_feature 1..35: note = Probe
  source 1..35: mol_type = other DNA

SEQ ID NO: 40578 - DNA, 36 bp, synthetic construct; identical to SEQ ID NO: 6178
  misc_feature 1..36: note = Probe
  source 1..36: mol_type = other DNA

SEQ ID NO: 40579 - DNA, 44 bp, synthetic construct; identical to SEQ ID NO: 1196
  misc_feature 1..44: note = Probe
  source 1..44: mol_type = other DNA

SEQ ID NO: 40580 - DNA, 30 bp, synthetic construct
  misc_feature 1..30: note = Probe
  source 1..30: mol_type = other DNA
gcgttggtggtgtagtggtgagcacagctg

SEQ ID NO: 40581 - DNA, 28 bp, synthetic construct
  misc_feature 1..28: note = Probe
  source 1..28: mol_type = other DNA
gcgttggtggtttagtggtagaattctc

SEQ ID NO: 40582 - DNA, 30 bp, synthetic construct; identical to SEQ ID NO: 10512
  misc_feature 1..30: note = Probe
  source 1..30: mol_type = other DNA

SEQ ID NO: 40583 - DNA, 32 bp, synthetic construct; identical to SEQ ID NO: 6188
  misc_feature 1..32: note = Probe
  source 1..32: mol_type = other DNA

SEQ ID NO: 40584 - DNA, 33 bp, synthetic construct; identical to SEQ ID NO: 21178
  misc_feature 1..33: note = Probe
  source 1..33: mol_type = other DNA

SEQ ID NO: 40585 - DNA, 34 bp, synthetic construct
  misc_feature 1..34: note = Probe
  source 1..34: mol_type = other DNA
gcgttggtggtttagtggtagaattctcgcctcc

SEQ ID NO: 40586 - DNA, 19 bp, synthetic construct
  misc_feature 1..19: note = Probe
  source 1..19: mol_type = other DNA
gctaaacctagccccaaac

SEQ ID NO: 40587 - DNA, 20 bp, synthetic construct
  misc_feature 1..20: note = Probe
  source 1..20: mol_type = other DNA
gctaaacctagccccaaacc

SEQ ID NO: 40588 - DNA, 21 bp, synthetic construct
  misc_feature 1..21: note = Probe
  source 1..21: mol_type = other DNA
gctaaacctagccccaaaccc

SEQ ID NO: 40589 - DNA, 22 bp, synthetic construct
  misc_feature 1..22: note = Probe
  source 1..22: mol_type = other DNA
gctaaacctagccccaaaccca

SEQ ID NO: 40590 - DNA, 23 bp, synthetic construct
  misc_feature 1..23: note = Probe
  source 1..23: mol_type = other DNA
gctaaacctagccccaaacccac

SEQ ID NO: 40591 - DNA, 24 bp, synthetic construct
  misc_feature 1..24: note = Probe
  source 1..24: mol_type = other DNA
gctaaacctagccccaaacccact

SEQ ID NO: 40592 - DNA, 25 bp, synthetic construct
  misc_feature 1..25: note = Probe
  source 1..25: mol_type = other DNA
gctaaacctagccccaaacccactc

SEQ ID NO: 40593 - DNA, 26 bp, synthetic construct
  misc_feature 1..26: note = Probe
  source 1..26: mol_type = other DNA
gctaaacctagccccaaacccactcc

SEQ ID NO: 40594 - DNA, 27 bp, synthetic construct
  misc_feature 1..27: note = Probe
  source 1..27: mol_type = other DNA
gctaaacctagccccaaacccactcca

SEQ ID NO: 40595 - DNA, 28 bp, synthetic construct
  misc_feature 1..28: note = Probe
  source 1..28: mol_type = other DNA
gctaaacctagccccaaacccactccac

SEQ ID NO: 40596 - DNA, 29 bp, synthetic construct
  misc_feature 1..29: note = Probe
  source 1..29: mol_type = other DNA
gctaaacctagccccaaacccactccacc

SEQ ID NO: 40597 - DNA, 30 bp, synthetic construct; identical to SEQ ID NO: 6203
  misc_feature 1..30: note = Probe
  source 1..30: mol_type = other DNA

SEQ ID NO: 40598 - DNA, 23 bp, synthetic construct
  misc_feature 1..23: note = Probe
  source 1..23: mol_type = other DNA
gctaaatcctatatatcttaatg

SEQ ID NO: 40599 - DNA, 38 bp, synthetic construct; identical to SEQ ID NO: 6221
  misc_feature 1..38: note = Probe
  source 1..38: mol_type = other DNA

SEQ ID NO: 40600 - DNA, 43 bp, synthetic construct; identical to SEQ ID NO: 6226
  misc_feature 1..43: note = Probe
  source 1..43: mol_type = other DNA

SEQ ID NO: 40601 - DNA, 25 bp, synthetic construct
  misc_feature 1..25: note = Probe
  source 1..25: mol_type = other DNA
gctaaggaagtcctgtgctcagttt

SEQ ID NO: 40602 - DNA, 26 bp, synthetic construct
  misc_feature 1..26: note = Probe
  source 1..26: mol_type = other DNA
gctaaggaagtcctgtgctcagtttt

SEQ ID NO: 40603 - DNA, 27 bp, synthetic construct
  misc_feature 1..27: note = Probe
  source 1..27: mol_type = other DNA
gctaaggaagtcctgtgctcagttttg

SEQ ID NO: 40604 - DNA, 30 bp, synthetic construct
  misc_feature 1..30: note = Probe
  source 1..30: mol_type = other DNA
gctaaggaagtcctgtgctcagttttgtag

SEQ ID NO: 40605 - DNA, 35 bp, synthetic construct; identical to SEQ ID NO: 6234
  misc_feature 1..35: note = Probe
  source 1..35: mol_type = other DNA

SEQ ID NO: 40606 - DNA, 37 bp, synthetic construct; identical to SEQ ID NO: 6235
  misc_feature 1..37: note = Probe
  source 1..37: mol_type = other DNA

SEQ ID NO: 40607 - DNA, 42 bp, synthetic construct; identical to SEQ ID NO: 6240
  misc_feature 1..42: note = Probe
  source 1..42: mol_type = other DNA

SEQ ID NO: 40608 - DNA, 17 bp, synthetic construct
  misc_feature 1..17: note = Probe
  source 1..17: mol_type = other DNA
gctagctcagtcggtag

SEQ ID NO: 40609 - DNA, 19 bp, synthetic construct
  misc_feature 1..19: note = Probe
  source 1..19: mol_type = other DNA
gctagctcagtcggtagag

SEQ ID NO: 40610 - DNA, 21 bp, synthetic construct
  misc_feature 1..21: note = Probe
  source 1..21: mol_type = other DNA
gctagctcagtcggtagagca

SEQ ID NO: 40611 - DNA, 23 bp, synthetic construct
  misc_feature 1..23: note = Probe
  source 1..23: mol_type = other DNA
gctagctcagtcggtagagcatg

SEQ ID NO: 40612 - DNA, 24 bp, synthetic construct
  misc_feature 1..24: note = Probe
  source 1..24: mol_type = other DNA
gctagctcagtcggtagagcatga

SEQ ID NO: 40613 - DNA, 25 bp, synthetic construct
  misc_feature 1..25: note = Probe
  source 1..25: mol_type = other DNA
gctagctcagtcggtagagcatgag

SEQ ID NO: 40614 - DNA, 26 bp, synthetic construct
  misc_feature 1..26: note = Probe
  source 1..26: mol_type = other DNA
gctagctcagtcggtagagcatgaga

SEQ ID NO: 40615 - DNA, 27 bp, synthetic construct
  misc_feature 1..27: note = Probe
  source 1..27: mol_type = other DNA
gctagctcagtcggtagagcatgagac

SEQ ID NO: 40616 - DNA, 23 bp, synthetic construct
  misc_feature 1..23: note = Probe
  source 1..23: mol_type = other DNA
gctatcgggcccataccccgaaa

SEQ ID NO: 40617 - DNA, 24 bp, synthetic construct
  misc_feature 1..24: note = Probe
  source 1..24: mol_type = other DNA
gctatcgggcccataccccgaaaa

SEQ ID NO: 40618 - DNA, 25 bp, synthetic construct
  misc_feature 1..25: note = Probe
  source 1..25: mol_type = other DNA
gctatcgggcccataccccgaaaat

SEQ ID NO: 40619 - DNA, 28 bp, synthetic construct
  misc_feature 1..28: note = Probe
  source 1..28: mol_type = other DNA
gctatcgggcccataccccgaaaatgtt

SEQ ID NO: 40620 - DNA, 29 bp, synthetic construct
  misc_feature 1..29: note = Probe
  source 1..29: mol_type = other DNA
gctatcgggcccataccccgaaaatgttg

SEQ ID NO: 40621 - DNA, 30 bp, synthetic construct; identical to SEQ ID NO: 6264
  misc_feature 1..30: note = Probe
  source 1..30: mol_type = other DNA

SEQ ID NO: 40622 - DNA, 31 bp, synthetic construct; identical to SEQ ID NO: 6265
  misc_feature 1..31: note = Probe
  source 1..31: mol_type = other DNA

SEQ ID NO: 40623 - DNA, 50 bp, synthetic construct; identical to SEQ ID NO: 6269
  misc_feature 1..50: note = Probe
  source 1..50: mol_type = other DNA

SEQ ID NO: 40624 - DNA, 24 bp, synthetic construct
  misc_feature 1..24: note = Probe
  source 1..24: mol_type = other DNA
gctcacatcaccccataaacaaat

SEQ ID NO: 40625 - DNA, 33 bp, synthetic construct; identical to SEQ ID NO: 6280
  misc_feature 1..33: note = Probe
  source 1..33: mol_type = other DNA

SEQ ID NO: 40626 - DNA, 34 bp, synthetic construct
  misc_feature 1..34: note = Probe
  source 1..34: mol_type = other DNA
gctccagtggcgcaatcggttagcgcgcggtact

SEQ ID NO: 40627 - DNA, 30 bp, synthetic construct; identical to SEQ ID NO: 1206
  misc_feature 1..30: note = Probe
  source 1..30: mol_type = other DNA

SEQ ID NO: 40628 - DNA, 50 bp, synthetic construct; identical to SEQ ID NO: 6286
  misc_feature 1..50: note = Probe
  source 1..50: mol_type = other DNA

SEQ ID NO: 40629 - DNA, 30 bp, synthetic construct; identical to SEQ ID NO: 32108
  misc_feature 1..30: note = Probe
  source 1..30: mol_type = other DNA

SEQ ID NO: 40630 - DNA, 33 bp, synthetic construct
  misc_feature 1..33: note = Probe
  source 1..33: mol_type = other DNA
gctcgccgtgatcgtatagtggttagtactctg

SEQ ID NO: 40631 - DNA, 49 bp, synthetic construct
  misc_feature 1..49: note = Probe
  source 1..49: mol_type = other DNA
gctctcaccgccgcggcccgggttcgattcccggtcaggaaagtaagcc

SEQ ID NO: 40632 - DNA, 50 bp, synthetic construct
  misc_feature 1..50: note = Probe
  source 1..50: mol_type = other DNA
gctctcaccgccgcggcccgggttcgattcccggtcaggaaagtaagccg

SEQ ID NO: 40633 - DNA, 42 bp, synthetic construct
  misc_feature 1..42: note = Probe
  source 1..42: mol_type = other DNA
gctctcaccgccgcggcccgggttcgattcccggtcagggaa

SEQ ID NO: 40634 - DNA, 45 bp, synthetic construct
  misc_feature 1..45: note = Probe
  source 1..45: mol_type = other DNA
gctctcaccgccgcggcccgggttcgattcccggtcagggaaaga

SEQ ID NO: 40635 - DNA, 50 bp, synthetic construct
  misc_feature 1..50: note = Probe
  source 1..50: mol_type = other DNA
gctctcaccgccgcggcccgggttcgattcccggtcagggaaagagtaac

SEQ ID NO: 40636 - DNA, 45 bp, synthetic construct
  misc_feature 1..45: note = Probe
  source 1..45: mol_type = other DNA
gctctcaccgccgcggcccgggttcgattcccggtcagggaagcc

SEQ ID NO: 40637 - DNA, 50 bp, synthetic construct
  misc_feature 1..50: note = Probe
  source 1..50: mol_type = other DNA
gctctcaccgccgcggcccgggttcgattcccggtcagggaagccttcct

SEQ ID NO: 40638 - DNA, 45 bp, synthetic construct; identical to SEQ ID NO: 6287
  misc_feature 1..45: note = Probe
  source 1..45: mol_type = other DNA

SEQ ID NO: 40639 - DNA, 50 bp, synthetic construct
  misc_feature 1..50: note = Probe
  source 1..50: mol_type = other DNA
gctctcaccgccgcggcccgggttcgattcccggtcagggaagtcttgtt

SEQ ID NO: 40640 - DNA, 45 bp, synthetic construct
  misc_feature 1..45: note = Probe
  source 1..45: mol_type = other DNA
gctctcaccgccgcggcccgggttcgattcccggtcagggaatga

SEQ ID NO: 40641 - DNA, 50 bp, synthetic construct
  misc_feature 1..50: note = Probe
  source 1..50: mol_type = other DNA
gctctcaccgccgcggcccgggttcgattcccggtcagggaatgaggttt

SEQ ID NO: 40642 - DNA, 17 bp, synthetic construct
  misc_feature 1..17: note = Probe
  source 1..17: mol_type = other DNA
gctctgcctgccaactg

SEQ ID NO: 40643 - DNA, 18 bp, synthetic construct
  misc_feature 1..18: note = Probe
  source 1..18: mol_type = other DNA
gctgcatagcaagccttt

SEQ ID NO: 40644 - DNA, 19 bp, synthetic construct
  misc_feature 1..19: note = Probe
  source 1..19: mol_type = other DNA
gctgcatagcaagcctttt

SEQ ID NO: 40645 - DNA, 26 bp, synthetic construct
  misc_feature 1..26: note = Probe
  source 1..26: mol_type = other DNA
gctggggcctcctgttggcttacttt

SEQ ID NO: 40646 - DNA, 22 bp, synthetic construct
  misc_feature 1..22: note = Probe
  source 1..22: mol_type = other DNA
gctggggcctgcttccgtcttt

SEQ ID NO: 40647 - DNA, 23 bp, synthetic construct
  misc_feature 1..23: note = Probe
  source 1..23: mol_type = other DNA
gctggggcctgcttccgtctttt

SEQ ID NO: 40648 - DNA, 23 bp, synthetic construct
  misc_feature 1..23: note = Probe
  source 1..23: mol_type = other DNA
gctggtgtagtggtatcatgcaa

SEQ ID NO: 40649 - DNA, 34 bp, synthetic construct
  misc_feature 1..34: note = Probe
  source 1..34: mol_type = other DNA
gctgtggctcgttggtctaggggtatgattctcg

SEQ ID NO: 40650 - DNA, 22 bp, synthetic construct
  misc_feature 1..22: note = Probe
  source 1..22: mol_type = other DNA
gctgttaaccgaaagattggtg

SEQ ID NO: 40651 - DNA, 22 bp, synthetic construct
  misc_feature 1..22: note = Probe
  source 1..22: mol_type = other DNA
gctgttaaccgaaagcttggtg

SEQ ID NO: 40652 - DNA, 20 bp, synthetic construct
  misc_feature 1..20: note = Probe
  source 1..20: mol_type = other DNA
gctgttaaccgaaaggttgg

SEQ ID NO: 40653 - DNA, 23 bp, synthetic construct
  misc_feature 1..23: note = Probe
  source 1..23: mol_type = other DNA
gctgttaaccgaaaggttggtgg

SEQ ID NO: 40654 - DNA, 27 bp, synthetic construct
  misc_feature 1..27: note = Probe
  source 1..27: mol_type = other DNA
gctgttaaccgaaaggttggtggttcg

SEQ ID NO: 40655 - DNA, 42 bp, synthetic construct
  misc_feature 1..42: note = Probe
  source 1..42: mol_type = other DNA
gctgttaaccgaaaggttggtggttcgagcccacccagggac

SEQ ID NO: 40656 - DNA, 43 bp, synthetic construct
  misc_feature 1..43: note = Probe
  source 1..43: mol_type = other DNA
gctgttaaccgaaaggttggtggttcgagcccacccagggacg

SEQ ID NO: 40657 - DNA, 46 bp, synthetic construct
  misc_feature 1..46: note = Probe
  source 1..46: mol_type = other DNA
gctgttaaccgaaaggttggtggttcgagcccacccagggacgcct

SEQ ID NO: 40658 - DNA, 45 bp, synthetic construct; identical to SEQ ID NO: 6301
  misc_feature 1..45: note = Probe
  source 1..45: mol_type = other DNA

SEQ ID NO: 40659 - DNA, 46 bp, synthetic construct; identical to SEQ ID NO: 6302
  misc_feature 1..46: note = Probe
  source 1..46: mol_type = other DNA

SEQ ID NO: 40660 - DNA, 30 bp, synthetic construct; identical to SEQ ID NO: 6308
  misc_feature 1..30: note = Probe
  source 1..30: mol_type = other DNA

SEQ ID NO: 40661 - DNA, 50 bp, synthetic construct
  misc_feature 1..50: note = Probe
  source 1..50: mol_type = other DNA
gcttagcatgcatgaggtcccgggttcgatccccagcatctccagtgttt

SEQ ID NO: 40662 - DNA, 23 bp, synthetic construct
  misc_feature 1..23: note = Probe
  source 1..23: mol_type = other DNA
gcttaggatgcgagaggtcccgg

SEQ ID NO: 40663 - DNA, 24 bp, synthetic construct
  misc_feature 1..24: note = Probe
  source 1..24: mol_type = other DNA
gcttaggatgcgagaggtcccggg

SEQ ID NO: 40664 - DNA, 22 bp, synthetic construct
  misc_feature 1..22: note = Probe
  source 1..22: mol_type = other DNA
gcttagggtgcgagaggtcccg

SEQ ID NO: 40665 - DNA, 23 bp, synthetic construct
  misc_feature 1..23: note = Probe
  source 1..23: mol_type = other DNA
gcttagggtgcgagaggtcccgg

SEQ ID NO: 40666 - DNA, 25 bp, synthetic construct
  misc_feature 1..25: note = Probe
  source 1..25: mol_type = other DNA
gcttagggtgcgagaggtcccgggt

SEQ ID NO: 40667 - DNA, 41 bp, synthetic construct
  misc_feature 1..41: note = Probe
  source 1..41: mol_type = other DNA
gcttagggtgcgagaggtcccgggttcaaatcccggacgag

SEQ ID NO: 40668 - DNA, 42 bp, synthetic construct
  misc_feature 1..42: note = Probe
  source 1..42: mol_type = other DNA
gcttagggtgcgagaggtcccgggttcaaatcccggacgagc

SEQ ID NO: 40669 - DNA, 34 bp, synthetic construct
  misc_feature 1..34: note = Probe
  source 1..34: mol_type = other DNA
gcttccctggtggtctagtggttaggattcggcg

SEQ ID NO: 40670 - DNA, 22 bp, synthetic construct
  misc_feature 1..22: note = Probe
  source 1..22: mol_type = other DNA
gcttcgggtgcgagaggtcccg

SEQ ID NO: 40671 - DNA, 23 bp, synthetic construct
  misc_feature 1..23: note = Probe
  source 1..23: mol_type = other DNA
gcttcgggtgcgagaggtcccgg

SEQ ID NO: 40672 - DNA, 24 bp, synthetic construct
  misc_feature 1..24: note = Probe
  source 1..24: mol_type = other DNA
gcttcgggtgcgagaggtcccggg

SEQ ID NO: 40673 - DNA, 25 bp, synthetic construct
  misc_feature 1..25: note = Probe
  source 1..25: mol_type = other DNA
gcttcgggtgcgagaggtcccgggt

SEQ ID NO: 40674 - DNA, 41 bp, synthetic construct
  misc_feature 1..41: note = Probe
  source 1..41: mol_type = other DNA
gcttcgggtgcgagaggtcccgggttcaaatcccggacgag

SEQ ID NO: 40675 - DNA, 42 bp, synthetic construct
  misc_feature 1..42: note = Probe
  source 1..42: mol_type = other DNA
gcttcgggtgcgagaggtcccgggttcaaatcccggacgagc

SEQ ID NO: 40676 - DNA, 49 bp, synthetic construct
  misc_feature 1..49: note = Probe
  source 1..49: mol_type = other DNA
gcttcgggtgcgagaggtcccgggttcaaatcccggacgagccctcctt

SEQ ID NO: 40677 - DNA, 50 bp, synthetic construct
  misc_feature 1..50: note = Probe
  source 1..50: mol_type = other DNA
gcttcgggtgcgagaggtcccgggttcaaatcccggacgagccctccttt

SEQ ID NO: 40678 - DNA, 29 bp, synthetic construct
  misc_feature 1..29: note = Probe
  source 1..29: mol_type = other DNA
gcttctgtaatgtagtggttatcacattc

SEQ ID NO: 40679 - DNA, 30 bp, synthetic construct
  misc_feature 1..30: note = Probe
  source 1..30: mol_type = other DNA
gcttctgtaatgtagtggttatcacattcg

SEQ ID NO: 40680 - DNA, 31 bp, synthetic construct
  misc_feature 1..31: note = Probe
  source 1..31: mol_type = other DNA
gcttctgtaatgtagtggttatcacattcgc

SEQ ID NO: 40681 - DNA, 23 bp, synthetic construct
  misc_feature 1..23: note = Probe
  source 1..23: mol_type = other DNA
gcttctgtagtgtagtggttatc

SEQ ID NO: 40682 - DNA, 32 bp, synthetic construct; identical to SEQ ID NO: 1214
  misc_feature 1..32: note = Probe
  source 1..32: mol_type = other DNA

SEQ ID NO: 40683 - DNA, 35 bp, synthetic construct; identical to SEQ ID NO: 1217
  misc_feature 1..35: note = Probe
  source 1..35: mol_type = other DNA

SEQ ID NO: 40684 - DNA, 50 bp, synthetic construct
  misc_feature 1..50: note = Probe
  source 1..50: mol_type = other DNA
gctttacacgcagaaggtcctgggttcaagccccagtggaaccatggtgt

SEQ ID NO: 40685 - DNA, 50 bp, synthetic construct; identical to SEQ ID NO: 21335
  misc_feature 1..50: note = Probe
  source 1..50: mol_type = other DNA

SEQ ID NO: 40686 - DNA, 50 bp, synthetic construct
  misc_feature 1..50: note = Probe
  source 1..50: mol_type = other DNA
gctttacacgcagaaggtcctgggttcgagccccagtggaaccatagccg

SEQ ID NO: 40687 - DNA, 50 bp, synthetic construct
  misc_feature 1..50: note = Probe
  source 1..50: mol_type = other DNA
gctttacacgcagaaggtcctgggttcgagccccagtggaaccatgagat

SEQ ID NO: 40688 - DNA, 41 bp, synthetic construct
  misc_feature 1..41: note = Probe
  source 1..41: mol_type = other DNA
gctttcaccgccgcggcccgggttcgattcccggtcaggga

SEQ ID NO: 40689 - DNA, 42 bp, synthetic construct
  misc_feature 1..42: note = Probe
  source 1..42: mol_type = other DNA
gctttcaccgccgcggcccgggttcgattcccggtcagggaa

SEQ ID NO: 40690 - DNA, 45 bp, synthetic construct
  misc_feature 1..45: note = Probe
  source 1..45: mol_type = other DNA
gctttcaccgccgcggcccgggttcgattcccggtcagggaattg

SEQ ID NO: 40691 - DNA, 50 bp, synthetic construct
  misc_feature 1..50: note = Probe
  source 1..50: mol_type = other DNA
gctttcaccgccgcggcccgggttcgattcccggtcagggaattgtttta

SEQ ID NO: 40692 - DNA, 18 bp, synthetic construct
  misc_feature 1..18: note = Probe
  source 1..18: mol_type = other DNA
gctttgcacgtatgaggc

SEQ ID NO: 40693 - DNA, 21 bp, synthetic construct
  misc_feature 1..21: note = Probe
  source 1..21: mol_type = other DNA
gctttgcacgtatgaggcccc

SEQ ID NO: 40694 - DNA, 23 bp, synthetic construct
  misc_feature 1..23: note = Probe
  source 1..23: mol_type = other DNA
gctttgcacgtatgaggccccgg

SEQ ID NO: 40695 - DNA, 24 bp, synthetic construct
  misc_feature 1..24: note = Probe
  source 1..24: mol_type = other DNA
gctttgcacgtatgaggccccggg

SEQ ID NO: 40696 - DNA, 50 bp, synthetic construct
  misc_feature 1..50: note = Probe
  source 1..50: mol_type = other DNA
gctttgcacgtatgaggccccgggttcaatccccggcatctccagacttt

SEQ ID NO: 40697 - DNA, 50 bp, synthetic construct
  misc_feature 1..50: note = Probe
  source 1..50: mol_type = other DNA
gctttgcatgtatgaggccccgggttcgatccccggcatctccattgtag

SEQ ID NO: 40698 - DNA, 31 bp, synthetic construct; identical to SEQ ID NO: 6328
  misc_feature 1..31: note = Probe
  source 1..31: mol_type = other DNA

SEQ ID NO: 40699 - DNA, 32 bp, synthetic construct; identical to SEQ ID NO: 6329
  misc_feature 1..32: note = Probe
  source 1..32: mol_type = other DNA

SEQ ID NO: 40700 - DNA, 33 bp, synthetic construct; identical to SEQ ID NO: 6330
  misc_feature 1..33: note = Probe
  source 1..33: mol_type = other DNA

SEQ ID NO: 40701 - DNA, 34 bp, synthetic construct; identical to SEQ ID NO: 21347
  misc_feature 1..34: note = Probe
  source 1..34: mol_type = other DNA

SEQ ID NO: 40702 - DNA, 35 bp, synthetic construct
  misc_feature 1..35: note = Probe
  source 1..35: mol_type = other DNA
gctttggggggttcgattccttccttttttgtcta

SEQ ID NO: 40703 - DNA, 23 bp, synthetic construct
  misc_feature 1..23: note = Probe
  source 1..23: mol_type = other DNA
gctttgggtgcgagaggtcccgg

SEQ ID NO: 40704 - DNA, 41 bp, synthetic construct
  misc_feature 1..41: note = Probe
  source 1..41: mol_type = other DNA
gctttgggtgcgagaggtcccgggttcaaatcccggacgag

SEQ ID NO: 40705 - DNA, 42 bp, synthetic construct
  misc_feature 1..42: note = Probe
  source 1..42: mol_type = other DNA
gctttgggtgcgagaggtcccgggttcaaatcccggacgagc

SEQ ID NO: 40706 - DNA, 50 bp, synthetic construct
  misc_feature 1..50: note = Probe
  source 1..50: mol_type = other DNA
gctttgggtgcgagaggtcccgggttcaaatcccggacgagccccctttt

SEQ ID NO: 40707 - DNA, 50 bp, synthetic construct
  misc_feature 1..50: note = Probe
  source 1..50: mol_type = other DNA
gctttgggtgcgagaggtcccgggttcaaatcccggacgagcccctttac

SEQ ID NO: 40708 - DNA, 33 bp, synthetic construct; identical to SEQ ID NO: 1226
  misc_feature 1..33: note = Probe
  source 1..33: mol_type = other DNA

SEQ ID NO: 40709 - DNA, 35 bp, synthetic construct; identical to SEQ ID NO: 1228
  misc_feature 1..35: note = Probe
  source 1..35: mol_type = other DNA

SEQ ID NO: 40710 - DNA, 30 bp, synthetic construct; identical to SEQ ID NO: 6337
  misc_feature 1..30: note = Probe
  source 1..30: mol_type = other DNA

SEQ ID NO: 40711 - DNA, 42 bp, synthetic construct; identical to SEQ ID NO: 13734
  misc_feature 1..42: note = Probe
  source 1..42: mol_type = other DNA

SEQ ID NO: 40712 - DNA, 45 bp, synthetic construct; identical to SEQ ID NO: 6343
  misc_feature 1..45: note = Probe
  source 1..45: mol_type = other DNA

SEQ ID NO: 40713 - DNA, 30 bp, synthetic construct; identical to SEQ ID NO: 1235
  misc_feature 1..30: note = Probe
  source 1..30: mol_type = other DNA

SEQ ID NO: 40714 - DNA, 34 bp, synthetic construct; identical to SEQ ID NO: 6346
  misc_feature 1..34: note = Probe
  source 1..34: mol_type = other DNA

SEQ ID NO: 40715 - DNA, 25 bp, synthetic construct
  misc_feature 1..25: note = Probe
  source 1..25: mol_type = other DNA
ggagaccggggttcgattccccgac

SEQ ID NO: 40716 - DNA, 32 bp, synthetic construct; identical to SEQ ID NO: 6348
  misc_feature 1..32: note = Probe
  source 1..32: mol_type = other DNA

SEQ ID NO: 40717 - DNA, 32 bp, synthetic construct; identical to SEQ ID NO: 6353
  misc_feature 1..32: note = Probe
  source 1..32: mol_type = other DNA

SEQ ID NO: 40718 - DNA, 34 bp, synthetic construct; identical to SEQ ID NO: 6355
  misc_feature 1..34: note = Probe
  source 1..34: mol_type = other DNA

SEQ ID NO: 40719 - DNA, 29 bp, synthetic construct
  misc_feature 1..29: note = Probe
  source 1..29: mol_type = other DNA
ggagatgaaaacctttttccaaggacaaa

SEQ ID NO: 40720 - DNA, 30 bp, synthetic construct; identical to SEQ ID NO: 6362
  misc_feature 1..30: note = Probe
  source 1..30: mol_type = other DNA

SEQ ID NO: 40721 - DNA, 31 bp, synthetic construct; identical to SEQ ID NO: 6363
  misc_feature 1..31: note = Probe
  source 1..31: mol_type = other DNA

SEQ ID NO: 40722 - DNA, 27 bp, synthetic construct
  misc_feature 1..27: note = Probe
  source 1..27: mol_type = other DNA
ggagatttcaacttaacttgaccgctc

SEQ ID NO: 40723 - DNA, 32 bp, synthetic construct; identical to SEQ ID NO: 6374
  misc_feature 1..32: note = Probe
  source 1..32: mol_type = other DNA

SEQ ID NO: 40724 - DNA, 33 bp, synthetic construct; identical to SEQ ID NO: 6375
  misc_feature 1..33: note = Probe
  source 1..33: mol_type = other DNA

SEQ ID NO: 40725 - DNA, 39 bp, synthetic construct; identical to SEQ ID NO: 21433
  misc_feature 1..39: note = Probe
  source 1..39: mol_type = other DNA

SEQ ID NO: 40726 - DNA, 35 bp, synthetic construct; identical to SEQ ID NO: 21446
  misc_feature 1..35: note = Probe
  source 1..35: mol_type = other DNA

SEQ ID NO: 40727 - DNA, 36 bp, synthetic construct; identical to SEQ ID NO: 32201
  misc_feature 1..36: note = Probe
  source 1..36: mol_type = other DNA

SEQ ID NO: 40728 - DNA, 37 bp, synthetic construct
  misc_feature 1..37: note = Probe
  source 1..37: mol_type = other DNA
ggagctccagtggcgcaatcggttagcgcgcggtact

SEQ ID NO: 40729 - DNA, 41 bp, synthetic construct; identical to SEQ ID NO: 21450
  misc_feature 1..41: note = Probe
  source 1..41: mol_type = other DNA

SEQ ID NO: 40730 - DNA, 30 bp, synthetic construct
  misc_feature 1..30: note = Probe
  source 1..30: mol_type = other DNA
ggaggcccgggttcgattcccggccaatgc

SEQ ID NO: 40731 - DNA, 29 bp, synthetic construct
  misc_feature 1..29: note = Probe
  source 1..29: mol_type = other DNA
ggaggcccgggttcgattcccggcccatg

SEQ ID NO: 40732 - DNA, 30 bp, synthetic construct
  misc_feature 1..30: note = Probe
  source 1..30: mol_type = other DNA
ggaggcccgggttcgattcccggcccatgc

SEQ ID NO: 40733 - DNA, 26 bp, synthetic construct
  misc_feature 1..26: note = Probe
  source 1..26: mol_type = other DNA
ggagttaaagactttttctctgattt

SEQ ID NO: 40734 - DNA, 27 bp, synthetic construct
  misc_feature 1..27: note = Probe
  source 1..27: mol_type = other DNA
ggatagctcagtcggtagagcatcaga

SEQ ID NO: 40735 - DNA, 31 bp, synthetic construct; identical to SEQ ID NO: 1252
  misc_feature 1..31: note = Probe
  source 1..31: mol_type = other DNA

SEQ ID NO: 40736 - DNA, 32 bp, synthetic construct; identical to SEQ ID NO: 1253
  misc_feature 1..32: note = Probe
  source 1..32: mol_type = other DNA

SEQ ID NO: 40737 - DNA, 19 bp, synthetic construct
  misc_feature 1..19: note = Probe
  source 1..19: mol_type = other DNA
ggatcagaagattgagggt

SEQ ID NO: 40738 - DNA, 28 bp, synthetic construct
  misc_feature 1..28: note = Probe
  source 1..28: mol_type = other DNA
ggatgccatagtggggcccttcacttac

SEQ ID NO: 40739 - DNA, 30 bp, synthetic construct; identical to SEQ ID NO: 21482
  misc_feature 1..30: note = Probe
  source 1..30: mol_type = other DNA

SEQ ID NO: 40740 - DNA, 30 bp, synthetic construct
  misc_feature 1..30: note = Probe
  source 1..30: mol_type = other DNA
ggattgaaacttttcgaaagtacgattact

SEQ ID NO: 40741 - DNA, 26 bp, synthetic construct
  misc_feature 1..26: note = Probe
  source 1..26: mol_type = other DNA
ggattgtgggttcgagtcccatctgg

SEQ ID NO: 40742 - DNA, 30 bp, synthetic construct
  misc_feature 1..30: note = Probe
  source 1..30: mol_type = other DNA
ggattgtgggttcgagtcccatctggggtg

SEQ ID NO: 40743 - DNA, 42 bp, synthetic construct
  misc_feature 1..42: note = Probe
  source 1..42: mol_type = other DNA
ggattgtgggttcgagtcccatctggggtggcctgtgacttt

SEQ ID NO: 40744 - DNA, 27 bp, synthetic construct
  misc_feature 1..27: note = Probe
  source 1..27: mol_type = other DNA
ggcagaaacagagcgtagtttcgtttt

SEQ ID NO: 40745 - DNA, 30 bp, synthetic construct
  misc_feature 1..30: note = Probe
  source 1..30: mol_type = other DNA
ggcattggtggttcagtggtagaattctcg

SEQ ID NO: 40746 - DNA, 19 bp, synthetic construct
  misc_feature 1..19: note = Probe
  source 1..19: mol_type = other DNA
ggcccataacccagaggtc

SEQ ID NO: 40747 - DNA, 25 bp, synthetic construct
  misc_feature 1..25: note = Probe
  source 1..25: mol_type = other DNA
ggcccataacccagaggtcgatgga

SEQ ID NO: 40748 - DNA, 50 bp, synthetic construct
  misc_feature 1..50: note = Probe
  source 1..50: mol_type = other DNA
ggcccataacccagaggtcgatggatcgaaaccatcctctgctagggagc

SEQ ID NO: 40749 - DNA, 49 bp, synthetic construct
  misc_feature 1..49: note = Probe
  source 1..49: mol_type = other DNA
ggcccataacccagaggtcgatggatcgaaaccatcctctgctaggtgc

SEQ ID NO: 40750 - DNA, 50 bp, synthetic construct; identical to SEQ ID NO: 6398
  misc_feature 1..50: note = Probe
  source 1..50: mol_type = other DNA

SEQ ID NO: 40751 - DNA, 50 bp, synthetic construct
  misc_feature 1..50: note = Probe
  source 1..50: mol_type = other DNA
ggcccataacccagaggtcgatggatcgaaaccatcctctgctatatggc

SEQ ID NO: 40752 - DNA, 46 bp, synthetic construct
  misc_feature 1..46: note = Probe
  source 1..46: mol_type = other DNA
ggcccataacccagaggtcgatggatcgaaaccatcctctgctatc

SEQ ID NO: 40753 - DNA, 50 bp, synthetic construct
  misc_feature 1..50: note = Probe
  source 1..50: mol_type = other DNA
ggcccataacccagaggtcgatggatcgaaaccatcctctgctatcggag

SEQ ID NO: 40754 - DNA, 50 bp, synthetic construct
  misc_feature 1..50: note = Probe
  source 1..50: mol_type = other DNA
ggcccataacccagaggtcgatggatcgaaaccatcctctgctatttttt

SEQ ID NO: 40755 - DNA, 45 bp, synthetic construct; identical to SEQ ID NO: 6422
  misc_feature 1..45: note = Probe
  source 1..45: mol_type = other DNA

SEQ ID NO: 40756 - DNA, 36 bp, synthetic construct
  misc_feature 1..36: note = Probe
  source 1..36: mol_type = other DNA
ggcccatggggatatagctcaggggtagagcatttg

SEQ ID NO: 40757 - DNA, 24 bp, synthetic construct
  misc_feature 1..24: note = Probe
  source 1..24: mol_type = other DNA
ggccccatggtgtaatggtcagca

SEQ ID NO: 40758 - DNA, 34 bp, synthetic construct
  misc_feature 1..34: note = Probe
  source 1..34: mol_type = other DNA
ggccccatggtgtaatggtcagcactctggactc

SEQ ID NO: 40759 - DNA, 50 bp, synthetic construct
  misc_feature 1..50: note = Probe
  source 1..50: mol_type = other DNA
ggccccatggtgtaatggtcagcactctggactctgaatccagcgatccg

SEQ ID NO: 40760 - DNA, 23 bp, synthetic construct
  misc_feature 1..23: note = Probe
  source 1..23: mol_type = other DNA
ggccccatggtgtaatggttagc

SEQ ID NO: 40761 - DNA, 26 bp, synthetic construct
  misc_feature 1..26: note = Probe
  source 1..26: mol_type = other DNA
ggccccatggtgtaatggttagcact

SEQ ID NO: 40762 - DNA, 32 bp, synthetic construct; identical to SEQ ID NO: 1262
  misc_feature 1..32: note = Probe
  source 1..32: mol_type = other DNA

SEQ ID NO: 40763 - DNA, 33 bp, synthetic construct; identical to SEQ ID NO: 1263
  misc_feature 1..33: note = Probe
  source 1..33: mol_type = other DNA

SEQ ID NO: 40764 - DNA, 37 bp, synthetic construct; identical to SEQ ID NO: 1265
  misc_feature 1..37: note = Probe
  source 1..37: mol_type = other DNA

SEQ ID NO: 40765 - DNA, 49 bp, synthetic construct
  misc_feature 1..49: note = Probe
  source 1..49: mol_type = other DNA
ggccccatggtgtaatggttagcactctggactttgaatccagcgatcc

SEQ ID NO: 40766 - DNA, 32 bp, synthetic construct; identical to SEQ ID NO: 6430
  misc_feature 1..32: note = Probe
  source 1..32: mol_type = other DNA

SEQ ID NO: 40767 - DNA, 36 bp, synthetic construct; identical to SEQ ID NO: 21552
  misc_feature 1..36: note = Probe
  source 1..36: mol_type = other DNA

SEQ ID NO: 40768 - DNA, 37 bp, synthetic construct; identical to SEQ ID NO: 21553
  misc_feature 1..37: note = Probe
  source 1..37: mol_type = other DNA

SEQ ID NO: 40769 - DNA, 31 bp, synthetic construct; identical to SEQ ID NO: 6431
  misc_feature 1..31: note = Probe
  source 1..31: mol_type = other DNA

SEQ ID NO: 40770 - DNA, 42 bp, synthetic construct; identical to SEQ ID NO: 21557
  misc_feature 1..42: note = Probe
  source 1..42: mol_type = other DNA

SEQ ID NO: 40771 - DNA, 21 bp, synthetic construct
  misc_feature 1..21: note = Probe
  source 1..21: mol_type = other DNA
ggcccgggttcgattcccggc

SEQ ID NO: 40772 - DNA, 18 bp, synthetic construct
  misc_feature 1..18: note = Probe
  source 1..18: mol_type = other DNA
ggccctatagctcagggg

SEQ ID NO: 40773 - DNA, 19 bp, synthetic construct
  misc_feature 1..19: note = Probe
  source 1..19: mol_type = other DNA
ggccctatagctcaggggt

SEQ ID NO: 40774 - DNA, 32 bp, synthetic construct; identical to SEQ ID NO: 1269
  misc_feature 1..32: note = Probe
  source 1..32: mol_type = other DNA

SEQ ID NO: 40775 - DNA, 50 bp, synthetic construct; identical to SEQ ID NO: 1272
  misc_feature 1..50: note = Probe
  source 1..50: mol_type = other DNA

SEQ ID NO: 40776 - DNA, 30 bp, synthetic construct; identical to SEQ ID NO: 8656
  misc_feature 1..30: note = Probe
  source 1..30: mol_type = other DNA

SEQ ID NO: 40777 - DNA, 31 bp, synthetic construct
  misc_feature 1..31: note = Probe
  source 1..31: mol_type = other DNA
ggccggttagctcagtcggctagagcgtggt

SEQ ID NO: 40778 - DNA, 32 bp, synthetic construct
  misc_feature 1..32: note = Probe
  source 1..32: mol_type = other DNA
ggccggttagctcagtcggctagagcgtggtg

SEQ ID NO: 40779 - DNA, 20 bp, synthetic construct
  misc_feature 1..20: note = Probe
  source 1..20: mol_type = other DNA
ggccggttagctcagttggt

SEQ ID NO: 40780 - DNA, 21 bp, synthetic construct
  misc_feature 1..21: note = Probe
  source 1..21: mol_type = other DNA
ggccggttagctcagttggtt

SEQ ID NO: 40781 - DNA, 24 bp, synthetic construct
  misc_feature 1..24: note = Probe
  source 1..24: mol_type = other DNA
ggccggttagctcagttggttaga

SEQ ID NO: 40782 - DNA, 25 bp, synthetic construct
  misc_feature 1..25: note = Probe
  source 1..25: mol_type = other DNA
ggccggttagctcagttggttagag

SEQ ID NO: 40783 - DNA, 26 bp, synthetic construct
  misc_feature 1..26: note = Probe
  source 1..26: mol_type = other DNA
ggccggttagctcagttggttagagc

SEQ ID NO: 40784 - DNA, 31 bp, synthetic construct
  misc_feature 1..31: note = Probe
  source 1..31: mol_type = other DNA
ggccggttagctcagttggttagagcgtggt

SEQ ID NO: 40785 - DNA, 32 bp, synthetic construct; identical to SEQ ID NO: 21581
  misc_feature 1..32: note = Probe
  source 1..32: mol_type = other DNA

SEQ ID NO: 40786 - DNA, 18 bp, synthetic construct
  misc_feature 1..18: note = Probe
  source 1..18: mol_type = other DNA
ggcgatcacgtagatttt

SEQ ID NO: 40787 - DNA, 22 bp, synthetic construct
  misc_feature 1..22: note = Probe
  source 1..22: mol_type = other DNA
ggcgatcacgtagattttgttt

SEQ ID NO: 40788 - DNA, 27 bp, synthetic construct
  misc_feature 1..27: note = Probe
  source 1..27: mol_type = other DNA
ggcggaaacacactaaaaaatcccttt

SEQ ID NO: 40789 - DNA, 30 bp, synthetic construct; identical to SEQ ID NO: 1278
  misc_feature 1..30: note = Probe
  source 1..30: mol_type = other DNA

SEQ ID NO: 40790 - DNA, 31 bp, synthetic construct; identical to SEQ ID NO: 1279
  misc_feature 1..31: note = Probe
  source 1..31: mol_type = other DNA

SEQ ID NO: 40791 - DNA, 18 bp, synthetic construct
  misc_feature 1..18: note = Probe
  source 1..18: mol_type = other DNA
ggcgtgattcataccttt

SEQ ID NO: 40792 - DNA, 19 bp, synthetic construct
  misc_feature 1..19: note = Probe
  source 1..19: mol_type = other DNA
ggcgtgattcatacctttt

SEQ ID NO: 40793 - DNA, 20 bp, synthetic construct
  misc_feature 1..20: note = Probe
  source 1..20: mol_type = other DNA
ggcgtgattcataccttttt

SEQ ID NO: 40794 - DNA, 24 bp, synthetic construct
  misc_feature 1..24: note = Probe
  source 1..24: mol_type = other DNA
ggctaaatcctatatatcttaatg

SEQ ID NO: 40795 - DNA, 25 bp, synthetic construct
  misc_feature 1..25: note = Probe
  source 1..25: mol_type = other DNA
ggctagctcagtcggtagagcatga

SEQ ID NO: 40796 - DNA, 27 bp, synthetic construct
  misc_feature 1..27: note = Probe
  source 1..27: mol_type = other DNA
ggctagctcagtcggtagagcatgaga

SEQ ID NO: 40797 - DNA, 30 bp, synthetic construct; identical to SEQ ID NO: 1285
  misc_feature 1..30: note = Probe
  source 1..30: mol_type = other DNA

SEQ ID NO: 40798 - DNA, 18 bp, synthetic construct
  misc_feature 1..18: note = Probe
  source 1..18: mol_type = other DNA
ggctcacatcaccccata

SEQ ID NO: 40799 - DNA, 24 bp, synthetic construct
  misc_feature 1..24: note = Probe
  source 1..24: mol_type = other DNA
ggctcacatcaccccataaacaaa

SEQ ID NO: 40800 - DNA, 25 bp, synthetic construct
  misc_feature 1..25: note = Probe
  source 1..25: mol_type = other DNA
ggctcacatcaccccataaacaaat

SEQ ID NO: 40801 - DNA, 19 bp, synthetic construct
  misc_feature 1..19: note = Probe
  source 1..19: mol_type = other DNA
ggctccatagctcaggggt

SEQ ID NO: 40802 - DNA, 20 bp, synthetic construct
  misc_feature 1..20: note = Probe
  source 1..20: mol_type = other DNA
ggctccatagctcaggggtt

SEQ ID NO: 40803 - DNA, 26 bp, synthetic construct
  misc_feature 1..26: note = Probe
  source 1..26: mol_type = other DNA
ggctccatagctcaggggttagagca

SEQ ID NO: 40804 - DNA, 28 bp, synthetic construct
  misc_feature 1..28: note = Probe
  source 1..28: mol_type = other DNA
ggctccatagctcaggggttagagcact

SEQ ID NO: 40805 - DNA, 29 bp, synthetic construct
  misc_feature 1..29: note = Probe
  source 1..29: mol_type = other DNA
ggctccatagctcaggggttagagcactg

SEQ ID NO: 40806 - DNA, 30 bp, synthetic construct; identical to SEQ ID NO: 10696
  misc_feature 1..30: note = Probe
  source 1..30: mol_type = other DNA

SEQ ID NO: 40807 - DNA, 31 bp, synthetic construct; identical to SEQ ID NO: 6482
  misc_feature 1..31: note = Probe
  source 1..31: mol_type = other DNA

SEQ ID NO: 40808 - DNA, 32 bp, synthetic construct; identical to SEQ ID NO: 6483
  misc_feature 1..32: note = Probe
  source 1..32: mol_type = other DNA

SEQ ID NO: 40809 - DNA, 33 bp, synthetic construct; identical to SEQ ID NO: 6484
  misc_feature 1..33: note = Probe
  source 1..33: mol_type = other DNA

SEQ ID NO: 40810 - DNA, 49 bp, synthetic construct; identical to SEQ ID NO: 6490
  misc_feature 1..49: note = Probe
  source 1..49: mol_type = other DNA

SEQ ID NO: 40811 - DNA, 26 bp, synthetic construct
  misc_feature 1..26: note = Probe
  source 1..26: mol_type = other DNA
ggctccatagctcagtggttagagca

SEQ ID NO: 40812 - DNA, 32 bp, synthetic construct; identical to SEQ ID NO: 1299
  misc_feature 1..32: note = Probe
  source 1..32: mol_type = other DNA

SEQ ID NO: 40813 - DNA, 50 bp, synthetic construct
  misc_feature 1..50: note = Probe
  source 1..50: mol_type = other DNA
ggctccatagctcagtggttagagcactggtcttgtaaaccaggggtcgc

SEQ ID NO: 40814 - DNA, 31 bp, synthetic construct
  misc_feature 1..31: note = Probe
  source 1..31: mol_type = other DNA
ggctccgtagcttagttggttaaagcgcctg

SEQ ID NO: 40815 - DNA, 29 bp, synthetic construct
  misc_feature 1..29: note = Probe
  source 1..29: mol_type = other DNA
ggctccgtggcgcaatggatagcgcattg

SEQ ID NO: 40816 - DNA, 31 bp, synthetic construct; identical to SEQ ID NO: 21644
  misc_feature 1..31: note = Probe
  source 1..31: mol_type = other DNA

SEQ ID NO: 40817 - DNA, 33 bp, synthetic construct; identical to SEQ ID NO: 6492
  misc_feature 1..33: note = Probe
  source 1..33: mol_type = other DNA

SEQ ID NO: 40818 - DNA, 34 bp, synthetic construct
  misc_feature 1..34: note = Probe
  source 1..34: mol_type = other DNA
ggctccgtggcgcaatggatagcgcattggactt

SEQ ID NO: 40819 - DNA, 37 bp, synthetic construct
  misc_feature 1..37: note = Probe
  source 1..37: mol_type = other DNA
ggctccgtggcgcaatggatagcgcattggacttcta

SEQ ID NO: 40820 - DNA, 19 bp, synthetic construct
  misc_feature 1..19: note = Probe
  source 1..19: mol_type = other DNA
ggctcgttggtctaggggt

SEQ ID NO: 40821 - DNA, 20 bp, synthetic construct
  misc_feature 1..20: note = Probe
  source 1..20: mol_type = other DNA
ggctcgttggtctaggggta

SEQ ID NO: 40822 - DNA, 22 bp, synthetic construct
  misc_feature 1..22: note = Probe
  source 1..22: mol_type = other DNA
ggctcgttggtctaggggtatg

SEQ ID NO: 40823 - DNA, 23 bp, synthetic construct
  misc_feature 1..23: note = Probe
  source 1..23: mol_type = other DNA
ggctcgttggtctaggggtatga

SEQ ID NO: 40824 - DNA, 24 bp, synthetic construct
  misc_feature 1..24: note = Probe
  source 1..24: mol_type = other DNA
ggctcgttggtctaggggtatgat

SEQ ID NO: 40825 - DNA, 25 bp, synthetic construct
  misc_feature 1..25: note = Probe
  source 1..25: mol_type = other DNA
ggctcgttggtctaggggtatgatt

SEQ ID NO: 40826 - DNA, 26 bp, synthetic construct
  misc_feature 1..26: note = Probe
  source 1..26: mol_type = other DNA
ggctcgttggtctaggggtatgattc

SEQ ID NO: 40827 - DNA, 27 bp, synthetic construct
  misc_feature 1..27: note = Probe
  source 1..27: mol_type = other DNA
ggctcgttggtctaggggtatgattct

SEQ ID NO: 40828 - DNA, 28 bp, synthetic construct
  misc_feature 1..28: note = Probe
  source 1..28: mol_type = other DNA
ggctcgttggtctaggggtatgattctc

SEQ ID NO: 40829 - DNA, 29 bp, synthetic construct
  misc_feature 1..29: note = Probe
  source 1..29: mol_type = other DNA
ggctcgttggtctaggggtatgattctcg

SEQ ID NO: 40830 - DNA, 30 bp, synthetic construct; identical to SEQ ID NO: 6496
  misc_feature 1..30: note = Probe
  source 1..30: mol_type = other DNA

SEQ ID NO: 40831 - DNA, 31 bp, synthetic construct; identical to SEQ ID NO: 6497
  misc_feature 1..31: note = Probe
  source 1..31: mol_type = other DNA

SEQ ID NO: 40832 - DNA, 32 bp, synthetic construct; identical to SEQ ID NO: 6498
  misc_feature 1..32: note = Probe
  source 1..32: mol_type = other DNA

SEQ ID NO: 40833 - DNA, 50 bp, synthetic construct; identical to SEQ ID NO: 32303
  misc_feature 1..50: note = Probe
  source 1..50: mol_type = other DNA

SEQ ID NO: 40834 - DNA, 50 bp, synthetic construct; identical to SEQ ID NO: 32306
  misc_feature 1..50: note = Probe
  source 1..50: mol_type = other DNA

SEQ ID NO: 40835 - DNA, 33 bp, synthetic construct; identical to SEQ ID NO: 1307
  misc_feature 1..33: note = Probe
  source 1..33: mol_type = other DNA

SEQ ID NO: 40836 - DNA, 50 bp, synthetic construct; identical to SEQ ID NO: 32310
  misc_feature 1..50: note = Probe
  source 1..50: mol_type = other DNA

SEQ ID NO: 40837 - DNA, 31 bp, synthetic construct; identical to SEQ ID NO: 6502
  misc_feature 1..31: note = Probe
  source 1..31: mol_type = other DNA

SEQ ID NO: 40838 - DNA, 18 bp, synthetic construct
  misc_feature 1..18: note = Probe
  source 1..18: mol_type = other DNA
ggctctgcctgccaactg

SEQ ID NO: 40839 - DNA, 29 bp, synthetic construct
  misc_feature 1..29: note = Probe
  source 1..29: mol_type = other DNA
ggctctgtggcgcaatggatagcgcattg

SEQ ID NO: 40840 - DNA, 37 bp, synthetic construct
  misc_feature 1..37: note = Probe
  source 1..37: mol_type = other DNA
ggctctgtggcgcaatggatagcgcattggacttcta

SEQ ID NO: 40841 - DNA, 23 bp, synthetic construct
  misc_feature 1..23: note = Probe
  source 1..23: mol_type = other DNA
ggctgttaaccgaaagattggtg

SEQ ID NO: 40842 - DNA, 24 bp, synthetic construct
  misc_feature 1..24: note = Probe
  source 1..24: mol_type = other DNA
ggctgttaaccgaaaggttggtgg

SEQ ID NO: 40843 - DNA, 27 bp, synthetic construct
  misc_feature 1..27: note = Probe
  source 1..27: mol_type = other DNA
ggctgttaaccgaaaggttggtggttc

SEQ ID NO: 40844 - DNA, 50 bp, synthetic construct
  misc_feature 1..50: note = Probe
  source 1..50: mol_type = other DNA
ggctgttaaccgaaaggttggtggttcgagcccacccagggacgcctctt

SEQ ID NO: 40845 - DNA, 23 bp, synthetic construct
  misc_feature 1..23: note = Probe
  source 1..23: mol_type = other DNA
ggctgttaactaaaaggttggtg

SEQ ID NO: 40846 - DNA, 34 bp, synthetic construct; identical to SEQ ID NO: 21678
  misc_feature 1..34: note = Probe
  source 1..34: mol_type = other DNA

SEQ ID NO: 40847 - DNA, 35 bp, synthetic construct
  misc_feature 1..35: note = Probe
  source 1..35: mol_type = other DNA
ggcttgtcctcgttagtatagtggtgagtatcccc

SEQ ID NO: 40848 - DNA, 36 bp, synthetic construct; identical to SEQ ID NO: 21679
  misc_feature 1..36: note = Probe
  source 1..36: mol_type = other DNA

SEQ ID NO: 40849 - DNA, 37 bp, synthetic construct
  misc_feature 1..37: note = Probe
  source 1..37: mol_type = other DNA
ggcttgtcctcgttagtatagtggtgagtatccccgc

SEQ ID NO: 40850 - DNA, 41 bp, synthetic construct; identical to SEQ ID NO: 21682
  misc_feature 1..41: note = Probe
  source 1..41: mol_type = other DNA

SEQ ID NO: 40851 - DNA, 42 bp, synthetic construct; identical to SEQ ID NO: 21683
  misc_feature 1..42: note = Probe
  source 1..42: mol_type = other DNA

SEQ ID NO: 40852 - DNA, 30 bp, synthetic construct
  misc_feature 1..30: note = Probe
  source 1..30: mol_type = other DNA
ggcttttggtgcagggtaaaagtcgtttcc

SEQ ID NO: 40853 - DNA, 50 bp, synthetic construct
  misc_feature 1..50: note = Probe
  source 1..50: mol_type = other DNA
gggacgaggtggccgagtggttaaggcgatggactgctaatccattgtgc

SEQ ID NO: 40854 - DNA, 26 bp, synthetic construct
  misc_feature 1..26: note = Probe
  source 1..26: mol_type = other DNA
gggagaccggggttcgattccccgac

SEQ ID NO: 40855 - DNA, 31 bp, synthetic construct; identical to SEQ ID NO: 1316
  misc_feature 1..31: note = Probe
  source 1..31: mol_type = other DNA

SEQ ID NO: 40856 - DNA, 35 bp, synthetic construct; identical to SEQ ID NO: 6518
  misc_feature 1..35: note = Probe
  source 1..35: mol_type = other DNA

SEQ ID NO: 40857 - DNA, 35 bp, synthetic construct; identical to SEQ ID NO: 6520
  misc_feature 1..35: note = Probe
  source 1..35: mol_type = other DNA

SEQ ID NO: 40858 - DNA, 35 bp, synthetic construct; identical to SEQ ID NO: 6521
  misc_feature 1..35: note = Probe
  source 1..35: mol_type = other DNA

SEQ ID NO: 40859 - DNA, 35 bp, synthetic construct; identical to SEQ ID NO: 21721
  misc_feature 1..35: note = Probe
  source 1..35: mol_type = other DNA

SEQ ID NO: 40860 - DNA, 41 bp, synthetic construct; identical to SEQ ID NO: 21727
  misc_feature 1..41: note = Probe
  source 1..41: mol_type = other DNA

SEQ ID NO: 40861 - DNA, 50 bp, synthetic construct
  misc_feature 1..50: note = Probe
  source 1..50: mol_type = other DNA
gggagcccggatagctcagtcggtagagcatcagacttttaatctgaggg

SEQ ID NO: 40862 - DNA, 37 bp, synthetic construct; identical to SEQ ID NO: 21739
  misc_feature 1..37: note = Probe
  source 1..37: mol_type = other DNA

SEQ ID NO: 40863 - DNA, 41 bp, synthetic construct; identical to SEQ ID NO: 21743
  misc_feature 1..41: note = Probe
  source 1..41: mol_type = other DNA

SEQ ID NO: 40864 - DNA, 42 bp, synthetic construct; identical to SEQ ID NO: 21744
  misc_feature 1..42: note = Probe
  source 1..42: mol_type = other DNA

SEQ ID NO: 40865 - DNA, 43 bp, synthetic construct; identical to SEQ ID NO: 21745
  misc_feature 1..43: note = Probe
  source 1..43: mol_type = other DNA

SEQ ID NO: 40866 - DNA, 50 bp, synthetic construct; identical to SEQ ID NO: 21748
  misc_feature 1..50: note = Probe
  source 1..50: mol_type = other DNA

SEQ ID NO: 40867 - DNA, 30 bp, synthetic construct; identical to SEQ ID NO: 21753
  misc_feature 1..30: note = Probe
  source 1..30: mol_type = other DNA

SEQ ID NO: 40868 - DNA, 31 bp, synthetic construct; identical to SEQ ID NO: 6525
  misc_feature 1..31: note = Probe
  source 1..31: mol_type = other DNA

SEQ ID NO: 40869 - DNA, 31 bp, synthetic construct; identical to SEQ ID NO: 6527
  misc_feature 1..31: note = Probe
  source 1..31: mol_type = other DNA

SEQ ID NO: 40870 - DNA, 50 bp, synthetic construct; identical to SEQ ID NO: 21782
  misc_feature 1..50: note = Probe
  source 1..50: mol_type = other DNA

SEQ ID NO: 40871 - DNA, 27 bp, synthetic construct
  misc_feature 1..27: note = Probe
  source 1..27: mol_type = other DNA
gggattgtgggttcgagtcccacctgg

SEQ ID NO: 40872 - DNA, 31 bp, synthetic construct
  misc_feature 1..31: note = Probe
  source 1..31: mol_type = other DNA
gggattgtgggttcgagtcccacctggggtg

SEQ ID NO: 40873 - DNA, 26 bp, synthetic construct
  misc_feature 1..26: note = Probe
  source 1..26: mol_type = other DNA
gggattgtgggttcgagtcccatctg

SEQ ID NO: 40874 - DNA, 27 bp, synthetic construct
  misc_feature 1..27: note = Probe
  source 1..27: mol_type = other DNA
gggattgtgggttcgagtcccatctgg

SEQ ID NO: 40875 - DNA, 28 bp, synthetic construct
  misc_feature 1..28: note = Probe
  source 1..28: mol_type = other DNA
gggattgtgggttcgagtcccatctggg

SEQ ID NO: 40876 - DNA, 31 bp, synthetic construct; identical to SEQ ID NO: 6534
  misc_feature 1..31: note = Probe
  source 1..31: mol_type = other DNA

SEQ ID NO: 40877 - DNA, 29 bp, synthetic construct
  misc_feature 1..29: note = Probe
  source 1..29: mol_type = other DNA
gggattgtgggttcgagtcccatctgggt

SEQ ID NO: 40878 - DNA, 30 bp, synthetic construct
  misc_feature 1..30: note = Probe
  source 1..30: mol_type = other DNA
gggattgtgggttcgagtcccatctgggtc

SEQ ID NO: 40879 - DNA, 31 bp, synthetic construct; identical to SEQ ID NO: 6536
  misc_feature 1..31: note = Probe
  source 1..31: mol_type = other DNA

SEQ ID NO: 40880 - DNA, 50 bp, synthetic construct; identical to SEQ ID NO: 6540
  misc_feature 1..50: note = Probe
  source 1..50: mol_type = other DNA

SEQ ID NO: 40881 - DNA, 38 bp, synthetic construct; identical to SEQ ID NO: 21819
  misc_feature 1..38: note = Probe
  source 1..38: mol_type = other DNA

SEQ ID NO: 40882 - DNA, 41 bp, synthetic construct
  misc_feature 1..41: note = Probe
  source 1..41: mol_type = other DNA
gggcgcccggctagctcagtcggtagagcatgagactctta

SEQ ID NO: 40883 - DNA, 50 bp, synthetic construct
  misc_feature 1..50: note = Probe
  source 1..50: mol_type = other DNA
gggcgcccggctagctcagtcggtagagcatgagactcttaatctcaggg

SEQ ID NO: 40884 - DNA, 26 bp, synthetic construct
  misc_feature 1..26: note = Probe
  source 1..26: mol_type = other DNA
gggctcacatcaccccataaacaaat

SEQ ID NO: 40885 - DNA, 23 bp, synthetic construct
  misc_feature 1..23: note = Probe
  source 1..23: mol_type = other DNA
ggggaattagctcaaatggtaga

SEQ ID NO: 40886 - DNA, 24 bp, synthetic construct
  misc_feature 1..24: note = Probe
  source 1..24: mol_type = other DNA
ggggaattagctcaaatggtagag

SEQ ID NO: 40887 - DNA, 30 bp, synthetic construct; identical to SEQ ID NO: 10769
  misc_feature 1..30: note = Probe
  source 1..30: mol_type = other DNA

SEQ ID NO: 40888 - DNA, 50 bp, synthetic construct; identical to SEQ ID NO: 21843
  misc_feature 1..50: note = Probe
  source 1..50: mol_type = other DNA

SEQ ID NO: 40889 - DNA, 23 bp, synthetic construct
  misc_feature 1..23: note = Probe
  source 1..23: mol_type = other DNA
ggggatgtagctcagtggtagag

SEQ ID NO: 40890 - DNA, 24 bp, synthetic construct
  misc_feature 1..24: note = Probe
  source 1..24: mol_type = other DNA
ggggatgtagctcagtggtagagc

SEQ ID NO: 40891 - DNA, 29 bp, synthetic construct
  misc_feature 1..29: note = Probe
  source 1..29: mol_type = other DNA
ggggatgtagctcagtggtagagcgcgcg

SEQ ID NO: 40892 - DNA, 21 bp, synthetic construct
  misc_feature 1..21: note = Probe
  source 1..21: mol_type = other DNA
gggggattagctcaaatggta

SEQ ID NO: 40893 - DNA, 24 bp, synthetic construct
  misc_feature 1..24: note = Probe
  source 1..24: mol_type = other DNA
gggggattagctcaaatggtagag

SEQ ID NO: 40894 - DNA, 30 bp, synthetic construct; identical to SEQ ID NO: 10791
  misc_feature 1..30: note = Probe
  source 1..30: mol_type = other DNA

SEQ ID NO: 40895 - DNA, 35 bp, synthetic construct; identical to SEQ ID NO: 1354
  misc_feature 1..35: note = Probe
  source 1..35: mol_type = other DNA

SEQ ID NO: 40896 - DNA, 50 bp, synthetic construct
  misc_feature 1..50: note = Probe
  source 1..50: mol_type = other DNA
ggggggtgtagctcagtggtagagcgcgtgcttagcatgcacgaggcccc

SEQ ID NO: 40897 - DNA, 25 bp, synthetic construct
  misc_feature 1..25: note = Probe
  source 1..25: mol_type = other DNA
gggggtatagctcaggggtagagca

SEQ ID NO: 40898 - DNA, 28 bp, synthetic construct
  misc_feature 1..28: note = Probe
  source 1..28: mol_type = other DNA
gggggtatagctcaggggtagagcactt

SEQ ID NO: 40899 - DNA, 30 bp, synthetic construct
  misc_feature 1..30: note = Probe
  source 1..30: mol_type = other DNA
gggggtatagctcaggggtagagcacttga

SEQ ID NO: 40900 - DNA, 28 bp, synthetic construct
  misc_feature 1..28: note = Probe
  source 1..28: mol_type = other DNA
gggggtatagctcaggggtagagcattt

SEQ ID NO: 40901 - DNA, 32 bp, synthetic construct; identical to SEQ ID NO: 1355
  misc_feature 1..32: note = Probe
  source 1..32: mol_type = other DNA

SEQ ID NO: 40902 - DNA, 33 bp, synthetic construct; identical to SEQ ID NO: 1356
  misc_feature 1..33: note = Probe
  source 1..33: mol_type = other DNA

SEQ ID NO: 40903 - DNA, 34 bp, synthetic construct; identical to SEQ ID NO: 1357
  misc_feature 1..34: note = Probe
  source 1..34: mol_type = other DNA

SEQ ID NO: 40904 - DNA, 34 bp, synthetic construct; identical to SEQ ID NO: 13856
  misc_feature 1..34: note = Probe
  source 1..34: mol_type = other DNA

SEQ ID NO: 40905 - DNA, 17 bp, synthetic construct
  misc_feature 1..17: note = Probe
  source 1..17: mol_type = other DNA
gggggtatagctcagtg

SEQ ID NO: 40906 - DNA, 18 bp, synthetic construct
  misc_feature 1..18: note = Probe
  source 1..18: mol_type = other DNA
gggggtatagctcagtgg

SEQ ID NO: 40907 - DNA, 34 bp, synthetic construct; identical to SEQ ID NO: 13861
  misc_feature 1..34: note = Probe
  source 1..34: mol_type = other DNA

SEQ ID NO: 40908 - DNA, 35 bp, synthetic construct; identical to SEQ ID NO: 1358
  misc_feature 1..35: note = Probe
  source 1..35: mol_type = other DNA

SEQ ID NO: 40909 - DNA, 20 bp, synthetic construct
  misc_feature 1..20: note = Probe
  source 1..20: mol_type = other DNA
gggggtatagctcagtggta

SEQ ID NO: 40910 - DNA, 22 bp, synthetic construct
  misc_feature 1..22: note = Probe
  source 1..22: mol_type = other DNA
gggggtatagctcagtggtaga

SEQ ID NO: 40911 - DNA, 23 bp, synthetic construct
  misc_feature 1..23: note = Probe
  source 1..23: mol_type = other DNA
gggggtatagctcagtggtagag

SEQ ID NO: 40912 - DNA, 24 bp, synthetic construct
  misc_feature 1..24: note = Probe
  source 1..24: mol_type = other DNA
gggggtatagctcagtggtagagc

SEQ ID NO: 40913 - DNA, 25 bp, synthetic construct
  misc_feature 1..25: note = Probe
  source 1..25: mol_type = other DNA
gggggtatagctcagtggtagagca

SEQ ID NO: 40914 - DNA, 28 bp, synthetic construct
  misc_feature 1..28: note = Probe
  source 1..28: mol_type = other DNA
gggggtatagctcagtggtagagcattt

SEQ ID NO: 40915 - DNA, 29 bp, synthetic construct
  misc_feature 1..29: note = Probe
  source 1..29: mol_type = other DNA
gggggtatagctcagtggtagagcatttg

SEQ ID NO: 40916 - DNA, 30 bp, synthetic construct; identical to SEQ ID NO: 6598
  misc_feature 1..30: note = Probe
  source 1..30: mol_type = other DNA

SEQ ID NO: 40917 - DNA, 31 bp, synthetic construct; identical to SEQ ID NO: 6599
  misc_feature 1..31: note = Probe
  source 1..31: mol_type = other DNA

SEQ ID NO: 40918 - DNA, 32 bp, synthetic construct; identical to SEQ ID NO: 6600
  misc_feature 1..32: note = Probe
  source 1..32: mol_type = other DNA

SEQ ID NO: 40919 - DNA, 33 bp, synthetic construct; identical to SEQ ID NO: 6601
  misc_feature 1..33: note = Probe
  source 1..33: mol_type = other DNA

SEQ ID NO: 40920 - DNA, 34 bp, synthetic construct; identical to SEQ ID NO: 6602
  misc_feature 1..34: note = Probe
  source 1..34: mol_type = other DNA

SEQ ID NO: 40921 - DNA, 35 bp, synthetic construct; identical to SEQ ID NO: 6603
  misc_feature 1..35: note = Probe
  source 1..35: mol_type = other DNA

SEQ ID NO: 40922 - DNA, 28 bp, synthetic construct
  misc_feature 1..28: note = Probe
  source 1..28: mol_type = other DNA
gggggtatagctcagtggtagagcgcgt

SEQ ID NO: 40923 - DNA, 29 bp, synthetic construct
  misc_feature 1..29: note = Probe
  source 1..29: mol_type = other DNA
gggggtatagctcagtggtagagcgcgtg

SEQ ID NO: 40924 - DNA, 18 bp, synthetic construct
  misc_feature 1..18: note = Probe
  source 1..18: mol_type = other DNA
gggggtgtagctcagtgg

SEQ ID NO: 40925 - DNA, 20 bp, synthetic construct
  misc_feature 1..20: note = Probe
  source 1..20: mol_type = other DNA
gggggtgtagctcagtggta

SEQ ID NO: 40926 - DNA, 23 bp, synthetic construct
  misc_feature 1..23: note = Probe
  source 1..23: mol_type = other DNA
gggggtgtagctcagtggtagag

SEQ ID NO: 40927 - DNA, 28 bp, synthetic construct
  misc_feature 1..28: note = Probe
  source 1..28: mol_type = other DNA
gggggtgtagctcagtggtagagcacat

SEQ ID NO: 40928 - DNA, 33 bp, synthetic construct; identical to SEQ ID NO: 21922
  misc_feature 1..33: note = Probe
  source 1..33: mol_type = other DNA

SEQ ID NO: 40929 - DNA, 35 bp, synthetic construct
  misc_feature 1..35: note = Probe
  source 1..35: mol_type = other DNA
gggggtgtagctcagtggtagagcacatgctttgc

SEQ ID NO: 40930 - DNA, 30 bp, synthetic construct
  misc_feature 1..30: note = Probe
  source 1..30: mol_type = other DNA
gggggtgtagctcagtggtagagcatttga

SEQ ID NO: 40931 - DNA, 29 bp, synthetic construct
  misc_feature 1..29: note = Probe
  source 1..29: mol_type = other DNA
gggggtgtagctcagtggtagagcgcatg

SEQ ID NO: 40932 - DNA, 30 bp, synthetic construct
  misc_feature 1..30: note = Probe
  source 1..30: mol_type = other DNA
gggggtgtagctcagtggtagagcgcatgc

SEQ ID NO: 40933 - DNA, 28 bp, synthetic construct
  misc_feature 1..28: note = Probe
  source 1..28: mol_type = other DNA
ggggtatagctcagtggtagagcatttg

SEQ ID NO: 40934 - DNA, 29 bp, synthetic construct
  misc_feature 1..29: note = Probe
  source 1..29: mol_type = other DNA
ggggtatagctcagtggtagagcatttga

SEQ ID NO: 40935 - DNA, 36 bp, synthetic construct; identical to SEQ ID NO: 21946
  misc_feature 1..36: note = Probe
  source 1..36: mol_type = other DNA

SEQ ID NO: 40936 - DNA, 50 bp, synthetic construct; identical to SEQ ID NO: 21949
  misc_feature 1..50: note = Probe
  source 1..50: mol_type = other DNA

SEQ ID NO: 40937 - DNA, 34 bp, synthetic construct
  misc_feature 1..34: note = Probe
  source 1..34: mol_type = other DNA
gggtatgattctcgcttaggatgcgagaggtccc

SEQ ID NO: 40938 - DNA, 34 bp, synthetic construct; identical to SEQ ID NO: 21958
  misc_feature 1..34: note = Probe
  source 1..34: mol_type = other DNA

SEQ ID NO: 40939 - DNA, 34 bp, synthetic construct; identical to SEQ ID NO: 13881
  misc_feature 1..34: note = Probe
  source 1..34: mol_type = other DNA

SEQ ID NO: 40940 - DNA, 34 bp, synthetic construct; identical to SEQ ID NO: 21964
  misc_feature 1..34: note = Probe
  source 1..34: mol_type = other DNA

SEQ ID NO: 40941 - DNA, 28 bp, synthetic construct
  misc_feature 1..28: note = Probe
  source 1..28: mol_type = other DNA
gggtccagggttcaagtccctgttcggg

SEQ ID NO: 40942 - DNA, 38 bp, synthetic construct
  misc_feature 1..38: note = Probe
  source 1..38: mol_type = other DNA
gggtcgcgagttcaattctcgctggggcctgtgtgttt

SEQ ID NO: 40943 - DNA, 30 bp, synthetic construct; identical to SEQ ID NO: 10861
  misc_feature 1..30: note = Probe
  source 1..30: mol_type = other DNA

SEQ ID NO: 40944 - DNA, 50 bp, synthetic construct; identical to SEQ ID NO: 6656
  misc_feature 1..50: note = Probe
  source 1..50: mol_type = other DNA

SEQ ID NO: 40945 - DNA, 34 bp, synthetic construct
  misc_feature 1..34: note = Probe
  source 1..34: mol_type = other DNA
gggtggctctgtggcgcaatggatagcgcattgg

SEQ ID NO: 40946 - DNA, 41 bp, synthetic construct; identical to SEQ ID NO: 21998
  misc_feature 1..41: note = Probe
  source 1..41: mol_type = other DNA

SEQ ID NO: 40947 - DNA, 50 bp, synthetic construct
  misc_feature 1..50: note = Probe
  source 1..50: mol_type = other DNA
gggtggctctgtggcgcaatggatagcgcattggacttctagtgacgaat

SEQ ID NO: 40948 - DNA, 27 bp, synthetic construct
  misc_feature 1..27: note = Probe
  source 1..27: mol_type = other DNA
gggttcctcgcagcttcgctgcgtgag

SEQ ID NO: 40949 - DNA, 26 bp, synthetic construct
  misc_feature 1..26: note = Probe
  source 1..26: mol_type = other DNA
gggttcgattccccgacggggaggca

SEQ ID NO: 40950 - DNA, 31 bp, synthetic construct; identical to SEQ ID NO: 6689
  misc_feature 1..31: note = Probe
  source 1..31: mol_type = other DNA

SEQ ID NO: 40951 - DNA, 32 bp, synthetic construct; identical to SEQ ID NO: 6690
  misc_feature 1..32: note = Probe
  source 1..32: mol_type = other DNA

SEQ ID NO: 40952 - DNA, 33 bp, synthetic construct; identical to SEQ ID NO: 6691
  misc_feature 1..33: note = Probe
  source 1..33: mol_type = other DNA

SEQ ID NO: 40953 - DNA, 34 bp, synthetic construct; identical to SEQ ID NO: 6692
  misc_feature 1..34: note = Probe
  source 1..34: mol_type = other DNA

SEQ ID NO: 40954 - DNA, 35 bp, synthetic construct; identical to SEQ ID NO: 6693
  misc_feature 1..35: note = Probe
  source 1..35: mol_type = other DNA

SEQ ID NO: 40955 - DNA, 37 bp, synthetic construct; identical to SEQ ID NO: 6695
  misc_feature 1..37: note = Probe
  source 1..37: mol_type = other DNA

SEQ ID NO: 40956 - DNA, 50 bp, synthetic construct; identical to SEQ ID NO: 32525
  misc_feature 1..50: note = Probe
  source 1..50: mol_type = other DNA

SEQ ID NO: 40957 - DNA, 33 bp, synthetic construct; identical to SEQ ID NO: 13887
  misc_feature 1..33: note = Probe
  source 1..33: mol_type = other DNA

SEQ ID NO: 40958 - DNA, 50 bp, synthetic construct; identical to SEQ ID NO: 6698
  misc_feature 1..50: note = Probe
  source 1..50: mol_type = other DNA

SEQ ID NO: 40959 - DNA, 37 bp, synthetic construct; identical to SEQ ID NO: 13893
  misc_feature 1..37: note = Probe
  source 1..37: mol_type = other DNA

SEQ ID NO: 40960 - DNA, 18 bp, synthetic construct
  misc_feature 1..18: note = Probe
  source 1..18: mol_type = other DNA
ggtagcgtggccgagcgg

SEQ ID NO: 40961 - DNA, 23 bp, synthetic construct
  misc_feature 1..23: note = Probe
  source 1..23: mol_type = other DNA
ggtagcgtggccgagcggtctaa

SEQ ID NO: 40962 - DNA, 25 bp, synthetic construct
  misc_feature 1..25: note = Probe
  source 1..25: mol_type = other DNA
ggtagcgtggccgagcggtctaagg

SEQ ID NO: 40963 - DNA, 29 bp, synthetic construct
  misc_feature 1..29: note = Probe
  source 1..29: mol_type = other DNA
ggtagcgtggccgagcggtctaaggcgct

SEQ ID NO: 40964 - DNA, 31 bp, synthetic construct
  misc_feature 1..31: note = Probe
  source 1..31: mol_type = other DNA
ggtagcgtggccgagcggtctaaggcgctgg

SEQ ID NO: 40965 - DNA, 25 bp, synthetic construct
  misc_feature 1..25: note = Probe
  source 1..25: mol_type = other DNA
ggtagcgtggccgagtggtctaagg

SEQ ID NO: 40966 - DNA, 21 bp, synthetic construct
  misc_feature 1..21: note = Probe
  source 1..21: mol_type = other DNA
ggtatagtggtaagcatagct

SEQ ID NO: 40967 - DNA, 22 bp, synthetic construct
  misc_feature 1..22: note = Probe
  source 1..22: mol_type = other DNA
ggtatagtggtaagcatagctg

SEQ ID NO: 40968 - DNA, 22 bp, synthetic construct
  misc_feature 1..22: note = Probe
  source 1..22: mol_type = other DNA
ggtatagtggtgagcatagctg

SEQ ID NO: 40969 - DNA, 21 bp, synthetic construct
  misc_feature 1..21: note = Probe
  source 1..21: mol_type = other DNA
ggtatagtggttagcatagct

SEQ ID NO: 40970 - DNA, 22 bp, synthetic construct
  misc_feature 1..22: note = Probe
  source 1..22: mol_type = other DNA
ggtatagtggttagcatagctg

SEQ ID NO: 40971 - DNA, 33 bp, synthetic construct; identical to SEQ ID NO: 6726
  misc_feature 1..33: note = Probe
  source 1..33: mol_type = other DNA

SEQ ID NO: 40972 - DNA, 50 bp, synthetic construct; identical to SEQ ID NO: 1410
  misc_feature 1..50: note = Probe
  source 1..50: mol_type = other DNA

SEQ ID NO: 40973 - DNA, 30 bp, synthetic construct
  misc_feature 1..30: note = Probe
  source 1..30: mol_type = other DNA
ggtcagctgtttttcctaaccggagagtaa

SEQ ID NO: 40974 - DNA, 23 bp, synthetic construct
  misc_feature 1..23: note = Probe
  source 1..23: mol_type = other DNA
ggtcccatggtgtaatggttagc

SEQ ID NO: 40975 - DNA, 24 bp, synthetic construct
  misc_feature 1..24: note = Probe
  source 1..24: mol_type = other DNA
ggtcccatggtgtaatggttagca

SEQ ID NO: 40976 - DNA, 26 bp, synthetic construct
  misc_feature 1..26: note = Probe
  source 1..26: mol_type = other DNA
ggtcccatggtgtaatggttagcact

SEQ ID NO: 40977 - DNA, 32 bp, synthetic construct; identical to SEQ ID NO: 1414
  misc_feature 1..32: note = Probe
  source 1..32: mol_type = other DNA

SEQ ID NO: 40978 - DNA, 33 bp, synthetic construct; identical to SEQ ID NO: 1415
  misc_feature 1..33: note = Probe
  source 1..33: mol_type = other DNA

SEQ ID NO: 40979 - DNA, 32 bp, synthetic construct; identical to SEQ ID NO: 6752
  misc_feature 1..32: note = Probe
  source 1..32: mol_type = other DNA

SEQ ID NO: 40980 - DNA, 32 bp, synthetic construct; identical to SEQ ID NO: 22153
  misc_feature 1..32: note = Probe
  source 1..32: mol_type = other DNA

SEQ ID NO: 40981 - DNA, 21 bp, synthetic construct
  misc_feature 1..21: note = Probe
  source 1..21: mol_type = other DNA
ggtcctagcctttctattagc

SEQ ID NO: 40982 - DNA, 31 bp, synthetic construct
  misc_feature 1..31: note = Probe
  source 1..31: mol_type = other DNA
ggtcctcgttagtatagtggtgagtatcccc

SEQ ID NO: 40983 - DNA, 27 bp, synthetic construct
  misc_feature 1..27: note = Probe
  source 1..27: mol_type = other DNA
ggtcctgggttcgagccccagtggaac

SEQ ID NO: 40984 - DNA, 32 bp, synthetic construct; identical to SEQ ID NO: 6754
  misc_feature 1..32: note = Probe
  source 1..32: mol_type = other DNA

SEQ ID NO: 40985 - DNA, 50 bp, synthetic construct
  misc_feature 1..50: note = Probe
  source 1..50: mol_type = other DNA
ggtcggccggttagctcagttggttagagcgtgctgctactaatgccagg

SEQ ID NO: 40986 - DNA, 24 bp, synthetic construct
  misc_feature 1..24: note = Probe
  source 1..24: mol_type = other DNA
ggtcgtggttgtagtccgtgcgag

SEQ ID NO: 40987 - DNA, 28 bp, synthetic construct
  misc_feature 1..28: note = Probe
  source 1..28: mol_type = other DNA
ggtcgtggttgtagtccgtgcgagaata

SEQ ID NO: 40988 - DNA, 31 bp, synthetic construct; identical to SEQ ID NO: 6765
  misc_feature 1..31: note = Probe
  source 1..31: mol_type = other DNA

SEQ ID NO: 40989 - DNA, 21 bp, synthetic construct
  misc_feature 1..21: note = Probe
  source 1..21: mol_type = other DNA
ggtctagcggttaggattcct

SEQ ID NO: 40990 - DNA, 20 bp, synthetic construct
  misc_feature 1..20: note = Probe
  source 1..20: mol_type = other DNA
ggtctagtggttaggattcg

SEQ ID NO: 40991 - DNA, 21 bp, synthetic construct
  misc_feature 1..21: note = Probe
  source 1..21: mol_type = other DNA
ggtctagtggttaggattcgg

SEQ ID NO: 40992 - DNA, 33 bp, synthetic construct; identical to SEQ ID NO: 13931
  misc_feature 1..33: note = Probe
  source 1..33: mol_type = other DNA

SEQ ID NO: 40993 - DNA, 34 bp, synthetic construct; identical to SEQ ID NO: 13935
  misc_feature 1..34: note = Probe
  source 1..34: mol_type = other DNA

SEQ ID NO: 40994 - DNA, 37 bp, synthetic construct; identical to SEQ ID NO: 13936
  misc_feature 1..37: note = Probe
  source 1..37: mol_type = other DNA

SEQ ID NO: 40995 - DNA, 50 bp, synthetic construct
  misc_feature 1..50: note = Probe
  source 1..50: mol_type = other DNA
ggtgagtatccccgcctgtcacgcgggagaccggggttcgattccccgac

SEQ ID NO: 40996 - DNA, 32 bp, synthetic construct; identical to SEQ ID NO: 22202
  misc_feature 1..32: note = Probe
  source 1..32: mol_type = other DNA

SEQ ID NO: 40997 - DNA, 35 bp, synthetic construct; identical to SEQ ID NO: 32616
  misc_feature 1..35: note = Probe
  source 1..35: mol_type = other DNA

SEQ ID NO: 40998 - DNA, 22 bp, synthetic construct
  misc_feature 1..22: note = Probe
  source 1..22: mol_type = other DNA
ggtgcccccttcccggatgttt

SEQ ID NO: 40999 - DNA, 23 bp, synthetic construct
  misc_feature 1..23: note = Probe
  source 1..23: mol_type = other DNA
ggtgcccccttcccggatgtttt

SEQ ID NO: 41000 - DNA, 18 bp, synthetic construct
  misc_feature 1..18: note = Probe
  source 1..18: mol_type = other DNA
ggtgcgagaggtcccggg

SEQ ID NO: 41001 - DNA, 35 bp, synthetic construct
  misc_feature 1..35: note = Probe
  source 1..35: mol_type = other DNA
ggtgcgagaggtcccgggttcaaatcccggacgag

SEQ ID NO: 41002 - DNA, 50 bp, synthetic construct; identical to SEQ ID NO: 6773
  misc_feature 1..50: note = Probe
  source 1..50: mol_type = other DNA

SEQ ID NO: 41003 - DNA, 29 bp, synthetic construct
  misc_feature 1..29: note = Probe
  source 1..29: mol_type = other DNA
ggtggagttaaagactttttctctgattt

SEQ ID NO: 41004 - DNA, 50 bp, synthetic construct
  misc_feature 1..50: note = Probe
  source 1..50: mol_type = other DNA
ggtggcacggagaattttggattctcagggatgggttcgattctcatagt

SEQ ID NO: 41005 - DNA, 28 bp, synthetic construct
  misc_feature 1..28: note = Probe
  source 1..28: mol_type = other DNA
ggtggcccgggttcgactcccggtatgg

SEQ ID NO: 41006 - DNA, 30 bp, synthetic construct; identical to SEQ ID NO: 22215
  misc_feature 1..30: note = Probe
  source 1..30: mol_type = other DNA

SEQ ID NO: 41007 - DNA, 34 bp, synthetic construct; identical to SEQ ID NO: 22217
  misc_feature 1..34: note = Probe
  source 1..34: mol_type = other DNA

SEQ ID NO: 41008 - DNA, 22 bp, synthetic construct
  misc_feature 1..22: note = Probe
  source 1..22: mol_type = other DNA
ggtgggacctcacgagactttt

SEQ ID NO: 41009 - DNA, 24 bp, synthetic construct
  misc_feature 1..24: note = Probe
  source 1..24: mol_type = other DNA
ggtggtatagtggtaagcatagct

SEQ ID NO: 41010 - DNA, 25 bp, synthetic construct
  misc_feature 1..25: note = Probe
  source 1..25: mol_type = other DNA
ggtggtatagtggtaagcatagctg

SEQ ID NO: 41011 - DNA, 25 bp, synthetic construct
  misc_feature 1..25: note = Probe
  source 1..25: mol_type = other DNA
ggtggtatagtggtgagcatagctg

SEQ ID NO: 41012 - DNA, 24 bp, synthetic construct
  misc_feature 1..24: note = Probe
  source 1..24: mol_type = other DNA
ggtggtatagtggttagcatagct

SEQ ID NO: 41013 - DNA, 25 bp, synthetic construct
  misc_feature 1..25: note = Probe
  source 1..25: mol_type = other DNA
ggtggtatagtggttagcatagctg

SEQ ID NO: 41014 - DNA, 20 bp, synthetic construct
  misc_feature 1..20: note = Probe
  source 1..20: mol_type = other DNA
ggtggtctagtggctaggat

SEQ ID NO: 41015 - DNA, 21 bp, synthetic construct
  misc_feature 1..21: note = Probe
  source 1..21: mol_type = other DNA
ggtggtctagtggctaggatt

SEQ ID NO: 41016 - DNA, 23 bp, synthetic construct
  misc_feature 1..23: note = Probe
  source 1..23: mol_type = other DNA
ggtggtctagtggctaggattcg

SEQ ID NO: 41017 - DNA, 24 bp, synthetic construct
  misc_feature 1..24: note = Probe
  source 1..24: mol_type = other DNA
ggtggtctagtggctaggattcgg

SEQ ID NO: 41018 - DNA, 18 bp, synthetic construct
  misc_feature 1..18: note = Probe
  source 1..18: mol_type = other DNA
ggtggtctagtggttagg

SEQ ID NO: 41019 - DNA, 20 bp, synthetic construct
  misc_feature 1..20: note = Probe
  source 1..20: mol_type = other DNA
ggtggtctagtggttaggat

SEQ ID NO: 41020 - DNA, 21 bp, synthetic construct
  misc_feature 1..21: note = Probe
  source 1..21: mol_type = other DNA
ggtggtctagtggttaggatt

SEQ ID NO: 41021 - DNA, 22 bp, synthetic construct
  misc_feature 1..22: note = Probe
  source 1..22: mol_type = other DNA
ggtggtctagtggttaggattc

SEQ ID NO: 41022 - DNA, 23 bp, synthetic construct
  misc_feature 1..23: note = Probe
  source 1..23: mol_type = other DNA
ggtggtctagtggttaggattcg

SEQ ID NO: 41023 - DNA, 24 bp, synthetic construct
  misc_feature 1..24: note = Probe
  source 1..24: mol_type = other DNA
ggtggtctagtggttaggattcgg

SEQ ID NO: 41024 - DNA, 20 bp, synthetic construct
  misc_feature 1..20: note = Probe
  source 1..20: mol_type = other DNA
ggtggttcagtggtagaatt

SEQ ID NO: 41025 - DNA, 22 bp, synthetic construct
  misc_feature 1..22: note = Probe
  source 1..22: mol_type = other DNA
ggtggttcagtggtagaattct

SEQ ID NO: 41026 - DNA, 23 bp, synthetic construct
  misc_feature 1..23: note = Probe
  source 1..23: mol_type = other DNA
ggtggttcagtggtagaattctc

SEQ ID NO: 41027 - DNA, 24 bp, synthetic construct
  misc_feature 1..24: note = Probe
  source 1..24: mol_type = other DNA
ggtggttcagtggtagaattctcg

SEQ ID NO: 41028 - DNA, 25 bp, synthetic construct
  misc_feature 1..25: note = Probe
  source 1..25: mol_type = other DNA
ggtggttcagtggtagaattctcgc

SEQ ID NO: 41029 - DNA, 28 bp, synthetic construct
  misc_feature 1..28: note = Probe
  source 1..28: mol_type = other DNA
ggtggttcagtggtagaattctcgcctc

SEQ ID NO: 41030 - DNA, 29 bp, synthetic construct
  misc_feature 1..29: note = Probe
  source 1..29: mol_type = other DNA
ggtggttcagtggtagaattctcgcctcc

SEQ ID NO: 41031 - DNA, 30 bp, synthetic construct; identical to SEQ ID NO: 22239
  misc_feature 1..30: note = Probe
  source 1..30: mol_type = other DNA

SEQ ID NO: 41032 - DNA, 33 bp, synthetic construct; identical to SEQ ID NO: 22258
  misc_feature 1..33: note = Probe
  source 1..33: mol_type = other DNA

SEQ ID NO: 41033 - DNA, 21 bp, synthetic construct
  misc_feature 1..21: note = Probe
  source 1..21: mol_type = other DNA
ggttcaatccccagcacctcc

SEQ ID NO: 41034 - DNA, 25 bp, synthetic construct
  misc_feature 1..25: note = Probe
  source 1..25: mol_type = other DNA
ggttcaatccccggcacctccacca

SEQ ID NO: 41035 - DNA, 21 bp, synthetic construct
  misc_feature 1..21: note = Probe
  source 1..21: mol_type = other DNA
ggttcagtggtagaattctcg

SEQ ID NO: 41036 - DNA, 18 bp, synthetic construct
  misc_feature 1..18: note = Probe
  source 1..18: mol_type = other DNA
ggttccatagtgtagcgg

SEQ ID NO: 41037 - DNA, 21 bp, synthetic construct
  misc_feature 1..21: note = Probe
  source 1..21: mol_type = other DNA
ggttccatagtgtagcggtta

SEQ ID NO: 41038 - DNA, 22 bp, synthetic construct
  misc_feature 1..22: note = Probe
  source 1..22: mol_type = other DNA
ggttccatagtgtagcggttat

SEQ ID NO: 41039 - DNA, 32 bp, synthetic construct; identical to SEQ ID NO: 1433
  misc_feature 1..32: note = Probe
  source 1..32: mol_type = other DNA

SEQ ID NO: 41040 - DNA, 33 bp, synthetic construct; identical to SEQ ID NO: 1434
  misc_feature 1..33: note = Probe
  source 1..33: mol_type = other DNA

SEQ ID NO: 41041 - DNA, 22 bp, synthetic construct
  misc_feature 1..22: note = Probe
  source 1..22: mol_type = other DNA
ggttccatagtgtagtggttat

SEQ ID NO: 41042 - DNA, 32 bp, synthetic construct; identical to SEQ ID NO: 1444
  misc_feature 1..32: note = Probe
  source 1..32: mol_type = other DNA

SEQ ID NO: 41043 - DNA, 34 bp, synthetic construct; identical to SEQ ID NO: 1446
  misc_feature 1..34: note = Probe
  source 1..34: mol_type = other DNA

SEQ ID NO: 41044 - DNA, 26 bp, synthetic construct
  misc_feature 1..26: note = Probe
  source 1..26: mol_type = other DNA
ggttccatagtgtagtggttatcacg

SEQ ID NO: 41045 - DNA, 35 bp, synthetic construct; identical to SEQ ID NO: 6817
  misc_feature 1..35: note = Probe
  source 1..35: mol_type = other DNA

SEQ ID NO: 41046 - DNA, 37 bp, synthetic construct; identical to SEQ ID NO: 6818
  misc_feature 1..37: note = Probe
  source 1..37: mol_type = other DNA

SEQ ID NO: 41047 - DNA, 39 bp, synthetic construct; identical to SEQ ID NO: 6819
  misc_feature 1..39: note = Probe
  source 1..39: mol_type = other DNA

SEQ ID NO: 41048 - DNA, 49 bp, synthetic construct; identical to SEQ ID NO: 22315
  misc_feature 1..49: note = Probe
  source 1..49: mol_type = other DNA

SEQ ID NO: 41049 - DNA, 29 bp, synthetic construct
  misc_feature 1..29: note = Probe
  source 1..29: mol_type = other DNA
ggttccatggtgtaatggtaagcactctg

SEQ ID NO: 41050 - DNA, 29 bp, synthetic construct
  misc_feature 1..29: note = Probe
  source 1..29: mol_type = other DNA
ggttccatggtgtaatggtgagcactctg

SEQ ID NO: 41051 - DNA, 22 bp, synthetic construct
  misc_feature 1..22: note = Probe
  source 1..22: mol_type = other DNA
ggttccatggtgtaatggttag

SEQ ID NO: 41052 - DNA, 23 bp, synthetic construct
  misc_feature 1..23: note = Probe
  source 1..23: mol_type = other DNA
ggttccatggtgtaatggttagc

SEQ ID NO: 41053 - DNA, 24 bp, synthetic construct
  misc_feature 1..24: note = Probe
  source 1..24: mol_type = other DNA
ggttccatggtgtaatggttagca

SEQ ID NO: 41054 - DNA, 25 bp, synthetic construct
  misc_feature 1..25: note = Probe
  source 1..25: mol_type = other DNA
ggttccatggtgtaatggttagcac

SEQ ID NO: 41055 - DNA, 26 bp, synthetic construct
  misc_feature 1..26: note = Probe
  source 1..26: mol_type = other DNA
ggttccatggtgtaatggttagcact

SEQ ID NO: 41056 - DNA, 27 bp, synthetic construct
  misc_feature 1..27: note = Probe
  source 1..27: mol_type = other DNA
ggttccatggtgtaatggttagcactc

SEQ ID NO: 41057 - DNA, 28 bp, synthetic construct
  misc_feature 1..28: note = Probe
  source 1..28: mol_type = other DNA
ggttccatggtgtaatggttagcactct

SEQ ID NO: 41058 - DNA, 29 bp, synthetic construct
  misc_feature 1..29: note = Probe
  source 1..29: mol_type = other DNA
ggttccatggtgtaatggttagcactctg

SEQ ID NO: 41059 - DNA, 31 bp, synthetic construct; identical to SEQ ID NO: 22321
  misc_feature 1..31: note = Probe
  source 1..31: mol_type = other DNA

SEQ ID NO: 41060 - DNA, 34 bp, synthetic construct; identical to SEQ ID NO: 1459
  misc_feature 1..34: note = Probe
  source 1..34: mol_type = other DNA

SEQ ID NO: 41061 - DNA, 37 bp, synthetic construct; identical to SEQ ID NO: 1461
  misc_feature 1..37: note = Probe
  source 1..37: mol_type = other DNA

SEQ ID NO: 41062 - DNA, 32 bp, synthetic construct
  misc_feature 1..32: note = Probe
  source 1..32: mol_type = other DNA
ggttcctcgttagtatagtggtgagtatcccc

SEQ ID NO: 41063 - DNA, 34 bp, synthetic construct
  misc_feature 1..34: note = Probe
  source 1..34: mol_type = other DNA
ggttcgaatcccaccgctgccaggctggagtttt

SEQ ID NO: 41064 - DNA, 35 bp, synthetic construct
  misc_feature 1..35: note = Probe
  source 1..35: mol_type = other DNA
ggttcgaatcccaccgctgccaggtgcttcccttt

SEQ ID NO: 41065 - DNA, 33 bp, synthetic construct
  misc_feature 1..33: note = Probe
  source 1..33: mol_type = other DNA
ggttcgaatcccactcctgacagttcgtacttt

SEQ ID NO: 41066 - DNA, 21 bp, synthetic construct
  misc_feature 1..21: note = Probe
  source 1..21: mol_type = other DNA
ggttcgaatcccacttctgac

SEQ ID NO: 41067 - DNA, 31 bp, synthetic construct
  misc_feature 1..31: note = Probe
  source 1..31: mol_type = other DNA
ggttcgaatcccacttctgacacaactatct

SEQ ID NO: 41068 - DNA, 34 bp, synthetic construct
  misc_feature 1..34: note = Probe
  source 1..34: mol_type = other DNA
ggttcgaatcccacttctgacacaactatcttat

SEQ ID NO: 41069 - DNA, 30 bp, synthetic construct
  misc_feature 1..30: note = Probe
  source 1..30: mol_type = other DNA
ggttcgaatcccacttctgacacatacttt

SEQ ID NO: 41070 - DNA, 31 bp, synthetic construct
  misc_feature 1..31: note = Probe
  source 1..31: mol_type = other DNA
ggttcgaatcccacttctgacacatactttt

SEQ ID NO: 41071 - DNA, 31 bp, synthetic construct
  misc_feature 1..31: note = Probe
  source 1..31: mol_type = other DNA
ggttcgaatcccacttctgacacattcgttt

SEQ ID NO: 41072 - DNA, 21 bp, synthetic construct
  misc_feature 1..21: note = Probe
  source 1..21: mol_type = other DNA
ggttcgaatcccagcggggcc

SEQ ID NO: 41073 - DNA, 25 bp, synthetic construct
  misc_feature 1..25: note = Probe
  source 1..25: mol_type = other DNA
ggttcgaatcccagcggtgcctccg

SEQ ID NO: 41074 - DNA, 21 bp, synthetic construct
  misc_feature 1..21: note = Probe
  source 1..21: mol_type = other DNA
ggttcgaatcccatcctcgtc

SEQ ID NO: 41075 - DNA, 31 bp, synthetic construct
  misc_feature 1..31: note = Probe
  source 1..31: mol_type = other DNA
ggttcgagccccacgttgggcgctctggttt

SEQ ID NO: 41076 - DNA, 30 bp, synthetic construct
  misc_feature 1..30: note = Probe
  source 1..30: mol_type = other DNA
ggttcgagccccacgttgggcgctgtgttt

SEQ ID NO: 41077 - DNA, 31 bp, synthetic construct
  misc_feature 1..31: note = Probe
  source 1..31: mol_type = other DNA
ggttcgagccccacgttgggcgctgtgtttt

SEQ ID NO: 41078 - DNA, 31 bp, synthetic construct
  misc_feature 1..31: note = Probe
  source 1..31: mol_type = other DNA
ggttcgagccccacgttgggcgggtttgttt

SEQ ID NO: 41079 - DNA, 34 bp, synthetic construct
  misc_feature 1..34: note = Probe
  source 1..34: mol_type = other DNA
ggttcgagccccacgttgggcgtaatttcgcttt

SEQ ID NO: 41080 - DNA, 19 bp, synthetic construct
  misc_feature 1..19: note = Probe
  source 1..19: mol_type = other DNA
ggttcgagccccagtggaa

SEQ ID NO: 41081 - DNA, 21 bp, synthetic construct
  misc_feature 1..21: note = Probe
  source 1..21: mol_type = other DNA
ggttcgagccccagtggaacc

SEQ ID NO: 41082 - DNA, 25 bp, synthetic construct
  misc_feature 1..25: note = Probe
  source 1..25: mol_type = other DNA
ggttcgagtcccttcgtggtcgttg

SEQ ID NO: 41083 - DNA, 20 bp, synthetic construct
  misc_feature 1..20: note = Probe
  source 1..20: mol_type = other DNA
ggttcgatccccagcatctc

SEQ ID NO: 41084 - DNA, 22 bp, synthetic construct
  misc_feature 1..22: note = Probe
  source 1..22: mol_type = other DNA
ggttcgatccccagcatctcca

SEQ ID NO: 41085 - DNA, 20 bp, synthetic construct
  misc_feature 1..20: note = Probe
  source 1..20: mol_type = other DNA
ggttcgatccccggcacctc

SEQ ID NO: 41086 - DNA, 22 bp, synthetic construct
  misc_feature 1..22: note = Probe
  source 1..22: mol_type = other DNA
ggttcgatccccggcatctcca

SEQ ID NO: 41087 - DNA, 25 bp, synthetic construct
  misc_feature 1..25: note = Probe
  source 1..25: mol_type = other DNA
ggttcgatccccggcatctccattg

SEQ ID NO: 41088 - DNA, 25 bp, synthetic construct
  misc_feature 1..25: note = Probe
  source 1..25: mol_type = other DNA
ggttcgattccccgacggggaggca

SEQ ID NO: 41089 - DNA, 24 bp, synthetic construct
  misc_feature 1..24: note = Probe
  source 1..24: mol_type = other DNA
ggttcgattctcatagtcctagaa

SEQ ID NO: 41090 - DNA, 25 bp, synthetic construct
  misc_feature 1..25: note = Probe
  source 1..25: mol_type = other DNA
ggttgtagtccgtgcgagaataatg

SEQ ID NO: 41091 - DNA, 30 bp, synthetic construct
  misc_feature 1..30: note = Probe
  source 1..30: mol_type = other DNA
ggtttccgtagtgtagtggttatcacgttc

SEQ ID NO: 41092 - DNA, 32 bp, synthetic construct
  misc_feature 1..32: note = Probe
  source 1..32: mol_type = other DNA
ggtttccgtagtgtagtggttatcacgttcgc

SEQ ID NO: 41093 - DNA, 50 bp, synthetic construct
  misc_feature 1..50: note = Probe
  source 1..50: mol_type = other DNA
ggttttcacccaggcggcccgggttcgactcccggtgtgggaacgccgaa

SEQ ID NO: 41094 - DNA, 50 bp, synthetic construct
  misc_feature 1..50: note = Probe
  source 1..50: mol_type = other DNA
ggttttcacccaggcggcccgggttcgactcccggtgtgggaatgactgg

SEQ ID NO: 41095 - DNA, 46 bp, synthetic construct
  misc_feature 1..46: note = Probe
  source 1..46: mol_type = other DNA
ggttttcacccaggtggcccgggttcgactcccggtatgggaacaa

SEQ ID NO: 41096 - DNA, 36 bp, synthetic construct; identical to SEQ ID NO: 6870
  misc_feature 1..36: note = Probe
  source 1..36: mol_type = other DNA

SEQ ID NO: 41097 - DNA, 20 bp, synthetic construct
  misc_feature 1..20: note = Probe
  source 1..20: mol_type = other DNA
gtaaacaggagatcctgggt

SEQ ID NO: 41098 - DNA, 37 bp, synthetic construct; identical to SEQ ID NO: 6880
  misc_feature 1..37: note = Probe
  source 1..37: mol_type = other DNA

SEQ ID NO: 41099 - DNA, 50 bp, synthetic construct; identical to SEQ ID NO: 6887
  misc_feature 1..50: note = Probe
  source 1..50: mol_type = other DNA

SEQ ID NO: 41100 - DNA, 50 bp, synthetic construct; identical to SEQ ID NO: 6907
  misc_feature 1..50: note = Probe
  source 1..50: mol_type = other DNA

SEQ ID NO: 41101 - DNA, 50 bp, synthetic construct; identical to SEQ ID NO: 6908
  misc_feature 1..50: note = Probe
  source 1..50: mol_type = other DNA

SEQ ID NO: 41102 - DNA, 18 bp, synthetic construct
  misc_feature 1..18: note = Probe
  source 1..18: mol_type = other DNA
gtaatggttagcactctg

SEQ ID NO: 41103 - DNA, 30 bp, synthetic construct; identical to SEQ ID NO: 22433
  misc_feature 1..30: note = Probe
  source 1..30: mol_type = other DNA

SEQ ID NO: 41104 - DNA, 38 bp, synthetic construct; identical to SEQ ID NO: 22434
  misc_feature 1..38: note = Probe
  source 1..38: mol_type = other DNA

SEQ ID NO: 41105 - DNA, 38 bp, synthetic construct; identical to SEQ ID NO: 6914
  misc_feature 1..38: note = Probe
  source 1..38: mol_type = other DNA

SEQ ID NO: 41106 - DNA, 34 bp, synthetic construct
  misc_feature 1..34: note = Probe
  source 1..34: mol_type = other DNA
gtacgcgttggtggtatagtggtgagcatagctg

SEQ ID NO: 41107 - DNA, 36 bp, synthetic construct; identical to SEQ ID NO: 22443
  misc_feature 1..36: note = Probe
  source 1..36: mol_type = other DNA

SEQ ID NO: 41108 - DNA, 34 bp, synthetic construct
  misc_feature 1..34: note = Probe
  source 1..34: mol_type = other DNA
gtagaggttccatagtgtagtggttatcacgtct

SEQ ID NO: 41109 - DNA, 34 bp, synthetic construct
  misc_feature 1..34: note = Probe
  source 1..34: mol_type = other DNA
gtaggcagcgcgtcagtctcataatctgaaggtc

SEQ ID NO: 41110 - DNA, 21 bp, synthetic construct
  misc_feature 1..21: note = Probe
  source 1..21: mol_type = other DNA
gtagtccgtgcgagaataatg

SEQ ID NO: 41111 - DNA, 23 bp, synthetic construct
  misc_feature 1..23: note = Probe
  source 1..23: mol_type = other DNA
gtagtcgtggccgagtggttaag

SEQ ID NO: 41112 - DNA, 37 bp, synthetic construct
  misc_feature 1..37: note = Probe
  source 1..37: mol_type = other DNA
gtagtcgtggccgagtggttaaggtgatggactagaa

SEQ ID NO: 41113 - DNA, 18 bp, synthetic construct
  misc_feature 1..18: note = Probe
  source 1..18: mol_type = other DNA
gtagtggttatcacgtct

SEQ ID NO: 41114 - DNA, 18 bp, synthetic construct
  misc_feature 1..18: note = Probe
  source 1..18: mol_type = other DNA
gtagtggttatcacgttc

SEQ ID NO: 41115 - DNA, 22 bp, synthetic construct
  misc_feature 1..22: note = Probe
  source 1..22: mol_type = other DNA
gtagtgtagtggttatcacgtt

SEQ ID NO: 41116 - DNA, 23 bp, synthetic construct
  misc_feature 1..23: note = Probe
  source 1..23: mol_type = other DNA
gtagtgtagtggttatcacgttc

SEQ ID NO: 41117 - DNA, 24 bp, synthetic construct
  misc_feature 1..24: note = Probe
  source 1..24: mol_type = other DNA
gtagtgtagtggttatcacgttcg

SEQ ID NO: 41118 - DNA, 25 bp, synthetic construct
  misc_feature 1..25: note = Probe
  source 1..25: mol_type = other DNA
gtagtgtagtggttatcacgttcgc

SEQ ID NO: 41119 - DNA, 30 bp, synthetic construct
  misc_feature 1..30: note = Probe
  source 1..30: mol_type = other DNA
gtagttgataccacgttgtgtatcaccacc

SEQ ID NO: 41120 - DNA, 18 bp, synthetic construct
  misc_feature 1..18: note = Probe
  source 1..18: mol_type = other DNA
gtatagtggtaagcatag

SEQ ID NO: 41121 - DNA, 20 bp, synthetic construct
  misc_feature 1..20: note = Probe
  source 1..20: mol_type = other DNA
gtatagtggtaagcatagct

SEQ ID NO: 41122 - DNA, 21 bp, synthetic construct
  misc_feature 1..21: note = Probe
  source 1..21: mol_type = other DNA
gtatagtggtaagcatagctg

SEQ ID NO: 41123 - DNA, 18 bp, synthetic construct
  misc_feature 1..18: note = Probe
  source 1..18: mol_type = other DNA
gtatagtggtgagcatag

SEQ ID NO: 41124 - DNA, 21 bp, synthetic construct
  misc_feature 1..21: note = Probe
  source 1..21: mol_type = other DNA
gtatagtggtgagcatagctg

SEQ ID NO: 41125 - DNA, 20 bp, synthetic construct
  misc_feature 1..20: note = Probe
  source 1..20: mol_type = other DNA
gtatagtggtgagtatcccc

SEQ ID NO: 41126 - DNA, 21 bp, synthetic construct
  misc_feature 1..21: note = Probe
  source 1..21: mol_type = other DNA
gtatagtggtgagtatccccg

SEQ ID NO: 41127 - DNA, 18 bp, synthetic construct
  misc_feature 1..18: note = Probe
  source 1..18: mol_type = other DNA
gtatagtggttagcatag

SEQ ID NO: 41128 - DNA, 20 bp, synthetic construct
  misc_feature 1..20: note = Probe
  source 1..20: mol_type = other DNA
gtatagtggttagcatagct

SEQ ID NO: 41129 - DNA, 21 bp, synthetic construct
  misc_feature 1..21: note = Probe
  source 1..21: mol_type = other DNA
gtatagtggttagcatagctg

SEQ ID NO: 41130 - DNA, 20 bp, synthetic construct
  misc_feature 1..20: note = Probe
  source 1..20: mol_type = other DNA
gtatagtggttagtactctg

SEQ ID NO: 41131 - DNA, 50 bp, synthetic construct
  misc_feature 1..50: note = Probe
  source 1..50: mol_type = other DNA
gtatccccgcctgtcacgcgggagaccggggttcgattccccgacgggga

SEQ ID NO: 41132 - DNA, 38 bp, synthetic construct; identical to SEQ ID NO: 22492
  misc_feature 1..38: note = Probe
  source 1..38: mol_type = other DNA

SEQ ID NO: 41133 - DNA, 34 bp, synthetic construct
  misc_feature 1..34: note = Probe
  source 1..34: mol_type = other DNA
gtatgaggccccgggttcgatccccggcatctcc

SEQ ID NO: 41134 - DNA, 35 bp, synthetic construct; identical to SEQ ID NO: 22507
  misc_feature 1..35: note = Probe
  source 1..35: mol_type = other DNA

SEQ ID NO: 41135 - DNA, 38 bp, synthetic construct; identical to SEQ ID NO: 6928
  misc_feature 1..38: note = Probe
  source 1..38: mol_type = other DNA

SEQ ID NO: 41136 - DNA, 32 bp, synthetic construct; identical to SEQ ID NO: 6929
  misc_feature 1..32: note = Probe
  source 1..32: mol_type = other DNA

SEQ ID NO: 41137 - DNA, 32 bp, synthetic construct; identical to SEQ ID NO: 6931
  misc_feature 1..32: note = Probe
  source 1..32: mol_type = other DNA

SEQ ID NO: 41138 - DNA, 32 bp, synthetic construct; identical to SEQ ID NO: 1472
  misc_feature 1..32: note = Probe
  source 1..32: mol_type = other DNA

SEQ ID NO: 41139 - DNA, 41 bp, synthetic construct; identical to SEQ ID NO: 22534
  misc_feature 1..41: note = Probe
  source 1..41: mol_type = other DNA

SEQ ID NO: 41140 - DNA, 22 bp, synthetic construct
  misc_feature 1..22: note = Probe
  source 1..22: mol_type = other DNA
gtcacctggcaggtgcctcttt

SEQ ID NO: 41141 - DNA, 23 bp, synthetic construct
  misc_feature 1..23: note = Probe
  source 1..23: mol_type = other DNA
gtcacctggcaggtgcctctttt

SEQ ID NO: 41142 - DNA, 20 bp, synthetic construct
  misc_feature 1..20: note = Probe
  source 1..20: mol_type = other DNA
gtcacgcgggagaccggggt

SEQ ID NO: 41143 - DNA, 36 bp, synthetic construct; identical to SEQ ID NO: 14028
  misc_feature 1..36: note = Probe
  source 1..36: mol_type = other DNA

SEQ ID NO: 41144 - DNA, 38 bp, synthetic construct
  misc_feature 1..38: note = Probe
  source 1..38: mol_type = other DNA
gtcacgcgggagaccggggttcaattccccgacgggga

SEQ ID NO: 41145 - DNA, 42 bp, synthetic construct; identical to SEQ ID NO: 6945
  misc_feature 1..42: note = Probe
  source 1..42: mol_type = other DNA

SEQ ID NO: 41146 - DNA, 33 bp, synthetic construct; identical to SEQ ID NO: 14031
  misc_feature 1..33: note = Probe
  source 1..33: mol_type = other DNA

SEQ ID NO: 41147 - DNA, 38 bp, synthetic construct; identical to SEQ ID NO: 22549
  misc_feature 1..38: note = Probe
  source 1..38: mol_type = other DNA

SEQ ID NO: 41148 - DNA, 50 bp, synthetic construct
  misc_feature 1..50: note = Probe
  source 1..50: mol_type = other DNA
gtcacgcgggagaccggggttcgattccccgacggggagaaaagttgctt

SEQ ID NO: 41149 - DNA, 42 bp, synthetic construct; identical to SEQ ID NO: 22552
  misc_feature 1..42: note = Probe
  source 1..42: mol_type = other DNA

SEQ ID NO: 41150 - DNA, 42 bp, synthetic construct; identical to SEQ ID NO: 6950
  misc_feature 1..42: note = Probe
  source 1..42: mol_type = other DNA

SEQ ID NO: 41151 - DNA, 50 bp, synthetic construct; identical to SEQ ID NO: 6952
  misc_feature 1..50: note = Probe
  source 1..50: mol_type = other DNA

SEQ ID NO: 41152 - DNA, 23 bp, synthetic construct
  misc_feature 1..23: note = Probe
  source 1..23: mol_type = other DNA
gtcagaggttcaattcctcttct

SEQ ID NO: 41153 - DNA, 25 bp, synthetic construct
  misc_feature 1..25: note = Probe
  source 1..25: mol_type = other DNA
gtcagaggttcaattcctcttctta

SEQ ID NO: 41154 - DNA, 30 bp, synthetic construct; identical to SEQ ID NO: 22564
  misc_feature 1..30: note = Probe
  source 1..30: mol_type = other DNA

SEQ ID NO: 41155 - DNA, 31 bp, synthetic construct; identical to SEQ ID NO: 6959
  misc_feature 1..31: note = Probe
  source 1..31: mol_type = other DNA

SEQ ID NO: 41156 - DNA, 29 bp, synthetic construct
  misc_feature 1..29: note = Probe
  source 1..29: mol_type = other DNA
gtcagctgtttttcctaaccggagagtaa

SEQ ID NO: 41157 - DNA, 19 bp, synthetic construct
  misc_feature 1..19: note = Probe
  source 1..19: mol_type = other DNA
gtcaggatggccgagcggt

SEQ ID NO: 41158 - DNA, 20 bp, synthetic construct
  misc_feature 1..20: note = Probe
  source 1..20: mol_type = other DNA
gtcaggatggccgagcggtc

SEQ ID NO: 41159 - DNA, 21 bp, synthetic construct
  misc_feature 1..21: note = Probe
  source 1..21: mol_type = other DNA
gtcaggatggccgagcggtct

SEQ ID NO: 41160 - DNA, 22 bp, synthetic construct
  misc_feature 1..22: note = Probe
  source 1..22: mol_type = other DNA
gtcaggatggccgagcggtcta

SEQ ID NO: 41161 - DNA, 23 bp, synthetic construct
  misc_feature 1..23: note = Probe
  source 1..23: mol_type = other DNA
gtcaggatggccgagcggtctaa

SEQ ID NO: 41162 - DNA, 24 bp, synthetic construct
  misc_feature 1..24: note = Probe
  source 1..24: mol_type = other DNA
gtcaggatggccgagcggtctaag

SEQ ID NO: 41163 - DNA, 25 bp, synthetic construct
  misc_feature 1..25: note = Probe
  source 1..25: mol_type = other DNA
gtcaggatggccgagcggtctaagg

SEQ ID NO: 41164 - DNA, 30 bp, synthetic construct; identical to SEQ ID NO: 11220
  misc_feature 1..30: note = Probe
  source 1..30: mol_type = other DNA

SEQ ID NO: 41165 - DNA, 50 bp, synthetic construct; identical to SEQ ID NO: 6992
  misc_feature 1..50: note = Probe
  source 1..50: mol_type = other DNA

SEQ ID NO: 41166 - DNA, 19 bp, synthetic construct
  misc_feature 1..19: note = Probe
  source 1..19: mol_type = other DNA
gtcaggatggccgagtggt

SEQ ID NO: 41167 - DNA, 20 bp, synthetic construct
  misc_feature 1..20: note = Probe
  source 1..20: mol_type = other DNA
gtcaggatggccgagtggtc

SEQ ID NO: 41168 - DNA, 22 bp, synthetic construct
  misc_feature 1..22: note = Probe
  source 1..22: mol_type = other DNA
gtcaggatggccgagtggtcta

SEQ ID NO: 41169 - DNA, 26 bp, synthetic construct
  misc_feature 1..26: note = Probe
  source 1..26: mol_type = other DNA
gtcaggatggccgagtggtctaaggc

SEQ ID NO: 41170 - DNA, 31 bp, synthetic construct; identical to SEQ ID NO: 14043
  misc_feature 1..31: note = Probe
  source 1..31: mol_type = other DNA

SEQ ID NO: 41171 - DNA, 50 bp, synthetic construct
  misc_feature 1..50: note = Probe
  source 1..50: mol_type = other DNA
gtcaggatggccgagtggtctaaggcgccagactcaagcttggcttcctc

SEQ ID NO: 41172 - DNA, 30 bp, synthetic construct; identical to SEQ ID NO: 22605
  misc_feature 1..30: note = Probe
  source 1..30: mol_type = other DNA

SEQ ID NO: 41173 - DNA, 28 bp, synthetic construct
  misc_feature 1..28: note = Probe
  source 1..28: mol_type = other DNA
gtcccatggtgtaatggttagcactctg

SEQ ID NO: 41174 - DNA, 31 bp, synthetic construct; identical to SEQ ID NO: 22617
  misc_feature 1..31: note = Probe
  source 1..31: mol_type = other DNA

SEQ ID NO: 41175 - DNA, 31 bp, synthetic construct; identical to SEQ ID NO: 7002
  misc_feature 1..31: note = Probe
  source 1..31: mol_type = other DNA

SEQ ID NO: 41176 - DNA, 34 bp, synthetic construct; identical to SEQ ID NO: 22622
  misc_feature 1..34: note = Probe
  source 1..34: mol_type = other DNA

SEQ ID NO: 41177 - DNA, 35 bp, synthetic construct; identical to SEQ ID NO: 22623
  misc_feature 1..35: note = Probe
  source 1..35: mol_type = other DNA

SEQ ID NO: 41178 - DNA, 31 bp, synthetic construct
  misc_feature 1..31: note = Probe
  source 1..31: mol_type = other DNA
gtcccgggttcgatccccggcatctccaagt

SEQ ID NO: 41179 - DNA, 33 bp, synthetic construct; identical to SEQ ID NO: 22629
  misc_feature 1..33: note = Probe
  source 1..33: mol_type = other DNA

SEQ ID NO: 41180 - DNA, 34 bp, synthetic construct
  misc_feature 1..34: note = Probe
  source 1..34: mol_type = other DNA
gtccctcctcgttagtatagtggtgagtatcccc

SEQ ID NO: 41181 - DNA, 35 bp, synthetic construct; identical to SEQ ID NO: 22630
  misc_feature 1..35: note = Probe
  source 1..35: mol_type = other DNA

SEQ ID NO: 41182 - DNA, 36 bp, synthetic construct; identical to SEQ ID NO: 22631
  misc_feature 1..36: note = Probe
  source 1..36: mol_type = other DNA

SEQ ID NO: 41183 - DNA, 37 bp, synthetic construct; identical to SEQ ID NO: 22632
  misc_feature 1..37: note = Probe
  source 1..37: mol_type = other DNA

SEQ ID NO: 41184 - DNA, 38 bp, synthetic construct; identical to SEQ ID NO: 22633
  misc_feature 1..38: note = Probe
  source 1..38: mol_type = other DNA

SEQ ID NO: 41185 - DNA, 39 bp, synthetic construct; identical to SEQ ID NO: 22634
  misc_feature 1..39: note = Probe
  source 1..39: mol_type = other DNA

SEQ ID NO: 41186 - DNA, 42 bp, synthetic construct
  misc_feature 1..42: note = Probe
  source 1..42: mol_type = other DNA
gtccctcctcgttagtatagtggtgagtatccccgcctgtca

SEQ ID NO: 41187 - DNA, 18 bp, synthetic construct
  misc_feature 1..18: note = Probe
  source 1..18: mol_type = other DNA
gtccctgtccaggcgcta

SEQ ID NO: 41188 - DNA, 30 bp, synthetic construct
  misc_feature 1..30: note = Probe
  source 1..30: mol_type = other DNA
gtcctcgttagtatagtggtgagtatcccc

SEQ ID NO: 41189 - DNA, 31 bp, synthetic construct
  misc_feature 1..31: note = Probe
  source 1..31: mol_type = other DNA
gtcctcgttagtatagtggtgagtatccccg

SEQ ID NO: 41190 - DNA, 36 bp, synthetic construct; identical to SEQ ID NO: 22646
  misc_feature 1..36: note = Probe
  source 1..36: mol_type = other DNA

SEQ ID NO: 41191 - DNA, 38 bp, synthetic construct; identical to SEQ ID NO: 22647
  misc_feature 1..38: note = Probe
  source 1..38: mol_type = other DNA

SEQ ID NO: 41192 - DNA, 27 bp, synthetic construct
  misc_feature 1..27: note = Probe
  source 1..27: mol_type = other DNA
gtccttggaaaaaggttttcatctccg

SEQ ID NO: 41193 - DNA, 18 bp, synthetic construct
  misc_feature 1..18: note = Probe
  source 1..18: mol_type = other DNA
gtccttgtagtataaact

SEQ ID NO: 41194 - DNA, 26 bp, synthetic construct
  misc_feature 1..26: note = Probe
  source 1..26: mol_type = other DNA
gtccttgtagtataaactaatacacc

SEQ ID NO: 41195 - DNA, 29 bp, synthetic construct
  misc_feature 1..29: note = Probe
  source 1..29: mol_type = other DNA
gtccttgtagtataaactaatacaccagt

SEQ ID NO: 41196 - DNA, 30 bp, synthetic construct; identical to SEQ ID NO: 1487
  misc_feature 1..30: note = Probe
  source 1..30: mol_type = other DNA

SEQ ID NO: 41197 - DNA, 31 bp, synthetic construct; identical to SEQ ID NO: 1488
  misc_feature 1..31: note = Probe
  source 1..31: mol_type = other DNA

SEQ ID NO: 41198 - DNA, 32 bp, synthetic construct; identical to SEQ ID NO: 7010
  misc_feature 1..32: note = Probe
  source 1..32: mol_type = other DNA

SEQ ID NO: 41199 - DNA, 33 bp, synthetic construct; identical to SEQ ID NO: 7011
  misc_feature 1..33: note = Probe
  source 1..33: mol_type = other DNA

SEQ ID NO: 41200 - DNA, 34 bp, synthetic construct; identical to SEQ ID NO: 7012
  misc_feature 1..34: note = Probe
  source 1..34: mol_type = other DNA

SEQ ID NO: 41201 - DNA, 35 bp, synthetic construct; identical to SEQ ID NO: 1492
  misc_feature 1..35: note = Probe
  source 1..35: mol_type = other DNA

SEQ ID NO: 41202 - DNA, 32 bp, synthetic construct
  misc_feature 1..32: note = Probe
  source 1..32: mol_type = other DNA
gtcgtcctcgttagtatagtggtgagtatccc

SEQ ID NO: 41203 - DNA, 33 bp, synthetic construct
  misc_feature 1..33: note = Probe
  source 1..33: mol_type = other DNA
gtcgtcctcgttagtatagtggtgagtatcccc

SEQ ID NO: 41204 - DNA, 34 bp, synthetic construct
  misc_feature 1..34: note = Probe
  source 1..34: mol_type = other DNA
gtcgtcctcgttagtatagtggtgagtatccccg

SEQ ID NO: 41205 - DNA, 35 bp, synthetic construct
  misc_feature 1..35: note = Probe
  source 1..35: mol_type = other DNA
gtcgtcctcgttagtatagtggtgagtatccccgc

SEQ ID NO: 41206 - DNA, 36 bp, synthetic construct; identical to SEQ ID NO: 33024
  misc_feature 1..36: note = Probe
  source 1..36: mol_type = other DNA

SEQ ID NO: 41207 - DNA, 37 bp, synthetic construct; identical to SEQ ID NO: 33025
  misc_feature 1..37: note = Probe
  source 1..37: mol_type = other DNA

SEQ ID NO: 41208 - DNA, 38 bp, synthetic construct; identical to SEQ ID NO: 33026
  misc_feature 1..38: note = Probe
  source 1..38: mol_type = other DNA

SEQ ID NO: 41209 - DNA, 41 bp, synthetic construct
  misc_feature 1..41: note = Probe
  source 1..41: mol_type = other DNA
gtcgtcctcgttagtatagtggtgagtatccccgcctgtca

SEQ ID NO: 41210 - DNA, 30 bp, synthetic construct; identical to SEQ ID NO: 7024
  misc_feature 1..30: note = Probe
  source 1..30: mol_type = other DNA

SEQ ID NO: 41211 - DNA, 28 bp, synthetic construct
  misc_feature 1..28: note = Probe
  source 1..28: mol_type = other DNA
gtcgttagtctaggctgtcagctcttcc

SEQ ID NO: 41212 - DNA, 46 bp, synthetic construct
  misc_feature 1..46: note = Probe
  source 1..46: mol_type = other DNA
gtctacgggagcccggatagctcagtcggtagagcatcagactttt

SEQ ID NO: 41213 - DNA, 50 bp, synthetic construct; identical to SEQ ID NO: 7030
  misc_feature 1..50: note = Probe
  source 1..50: mol_type = other DNA

SEQ ID NO: 41214 - DNA, 18 bp, synthetic construct
  misc_feature 1..18: note = Probe
  source 1..18: mol_type = other DNA
gtctaggggtatgattct

SEQ ID NO: 41215 - DNA, 20 bp, synthetic construct
  misc_feature 1..20: note = Probe
  source 1..20: mol_type = other DNA
gtctaggggtatgattctcg

SEQ ID NO: 41216 - DNA, 20 bp, synthetic construct
  misc_feature 1..20: note = Probe
  source 1..20: mol_type = other DNA
gtctagtggctaggattcgg

SEQ ID NO: 41217 - DNA, 17 bp, synthetic construct
  misc_feature 1..17: note = Probe
  source 1..17: mol_type = other DNA
gtctagtggttaggatt

SEQ ID NO: 41218 - DNA, 19 bp, synthetic construct
  misc_feature 1..19: note = Probe
  source 1..19: mol_type = other DNA
gtctagtggttaggattcg

SEQ ID NO: 41219 - DNA, 20 bp, synthetic construct
  misc_feature 1..20: note = Probe
  source 1..20: mol_type = other DNA
gtctagtggttaggattcgg

SEQ ID NO: 41220 - DNA, 22 bp, synthetic construct
  misc_feature 1..22: note = Probe
  source 1..22: mol_type = other DNA
gtctagtggttaggattcggcg

SEQ ID NO: 41221 - DNA, 18 bp, synthetic construct
  misc_feature 1..18: note = Probe
  source 1..18: mol_type = other DNA
gtctcataatctgaaggt

SEQ ID NO: 41222 - DNA, 19 bp, synthetic construct
  misc_feature 1..19: note = Probe
  source 1..19: mol_type = other DNA
gtctcataatctgaaggtc

SEQ ID NO: 41223 - DNA, 20 bp, synthetic construct
  misc_feature 1..20: note = Probe
  source 1..20: mol_type = other DNA
gtctcataatctgaaggtcc

SEQ ID NO: 41224 - DNA, 21 bp, synthetic construct
  misc_feature 1..21: note = Probe
  source 1..21: mol_type = other DNA
gtctcataatctgaaggtcct

SEQ ID NO: 41225 - DNA, 22 bp, synthetic construct
  misc_feature 1..22: note = Probe
  source 1..22: mol_type = other DNA
gtctcataatctgaaggtcctg

SEQ ID NO: 41226 - DNA, 23 bp, synthetic construct
  misc_feature 1..23: note = Probe
  source 1..23: mol_type = other DNA
gtctcataatctgaaggtcctga

SEQ ID NO: 41227 - DNA, 24 bp, synthetic construct
  misc_feature 1..24: note = Probe
  source 1..24: mol_type = other DNA
gtctcataatctgaaggtcctgag

SEQ ID NO: 41228 - DNA, 25 bp, synthetic construct
  misc_feature 1..25: note = Probe
  source 1..25: mol_type = other DNA
gtctcataatctgaaggtcctgagt

SEQ ID NO: 41229 - DNA, 27 bp, synthetic construct
  misc_feature 1..27: note = Probe
  source 1..27: mol_type = other DNA
gtctcataatctgaaggtcctgagttc

SEQ ID NO: 41230 - DNA, 50 bp, synthetic construct
  misc_feature 1..50: note = Probe
  source 1..50: mol_type = other DNA
gtctcataatctgaaggtcctgagttcgaacctcagagggggcagctgcc

SEQ ID NO: 41231 - DNA, 50 bp, synthetic construct
  misc_feature 1..50: note = Probe
  source 1..50: mol_type = other DNA
gtctcataatctgaaggtcgtgagttcgatcctcacacggggcacaataa

SEQ ID NO: 41232 - DNA, 32 bp, synthetic construct
  misc_feature 1..32: note = Probe
  source 1..32: mol_type = other DNA
gtctctgtggcgcaatcggttagcgcattcgg

SEQ ID NO: 41233 - DNA, 41 bp, synthetic construct
  misc_feature 1..41: note = Probe
  source 1..41: mol_type = other DNA
gtctgtcacgcgggagaccggggttcgattccccgacgggg

SEQ ID NO: 41234 - DNA, 42 bp, synthetic construct
  misc_feature 1..42: note = Probe
  source 1..42: mol_type = other DNA
gtctgtcacgcgggagaccggggttcgattccccgacgggga

SEQ ID NO: 41235 - DNA, 43 bp, synthetic construct
  misc_feature 1..43: note = Probe
  source 1..43: mol_type = other DNA
gtctgtcacgcgggagaccggggttcgattccccgacggggag

SEQ ID NO: 41236 - DNA, 50 bp, synthetic construct
  misc_feature 1..50: note = Probe
  source 1..50: mol_type = other DNA
gtctgtcacgcgggagaccggggttcgattccccgacggggagacgaagc

SEQ ID NO: 41237 - DNA, 18 bp, synthetic construct
  misc_feature 1..18: note = Probe
  source 1..18: mol_type = other DNA
gtcttgtaaaccaggggt

SEQ ID NO: 41238 - DNA, 20 bp, synthetic construct
  misc_feature 1..20: note = Probe
  source 1..20: mol_type = other DNA
gtcttgtaaaccaggggtcg

SEQ ID NO: 41239 - DNA, 22 bp, synthetic construct
  misc_feature 1..22: note = Probe
  source 1..22: mol_type = other DNA
gtcttgtaaaccaggggtcgcg

SEQ ID NO: 41240 - DNA, 50 bp, synthetic construct
  misc_feature 1..50: note = Probe
  source 1..50: mol_type = other DNA
gtcttgtaaaccaggggtcgcgagttcaattctcgctggggcctgtgtgt

SEQ ID NO: 41241 - DNA, 42 bp, synthetic construct; identical to SEQ ID NO: 7041
  misc_feature 1..42: note = Probe
  source 1..42: mol_type = other DNA

SEQ ID NO: 41242 - DNA, 42 bp, synthetic construct; identical to SEQ ID NO: 7048
  misc_feature 1..42: note = Probe
  source 1..42: mol_type = other DNA

SEQ ID NO: 41243 - DNA, 50 bp, synthetic construct; identical to SEQ ID NO: 22715
  misc_feature 1..50: note = Probe
  source 1..50: mol_type = other DNA

SEQ ID NO: 41244 - DNA, 32 bp, synthetic construct
  misc_feature 1..32: note = Probe
  source 1..32: mol_type = other DNA
gtgagaggtcccgggttcaaatcccggacgag

SEQ ID NO: 41245 - DNA, 35 bp, synthetic construct; identical to SEQ ID NO: 22723
  misc_feature 1..35: note = Probe
  source 1..35: mol_type = other DNA

SEQ ID NO: 41246 - DNA, 41 bp, synthetic construct; identical to SEQ ID NO: 22729
  misc_feature 1..41: note = Probe
  source 1..41: mol_type = other DNA

SEQ ID NO: 41247 - DNA, 50 bp, synthetic construct
  misc_feature 1..50: note = Probe
  source 1..50: mol_type = other DNA
gtgagcccggatagctcagtcggtagagcatcagacttttaatctgaggg

SEQ ID NO: 41248 - DNA, 33 bp, synthetic construct
  misc_feature 1..33: note = Probe
  source 1..33: mol_type = other DNA
gtgaggccctatagctcaggggttagagcactg

SEQ ID NO: 41249 - DNA, 50 bp, synthetic construct
  misc_feature 1..50: note = Probe
  source 1..50: mol_type = other DNA
gtgaggccctatagctcaggggttagagcactggtcttgtaaaccagggg

SEQ ID NO: 41250 - DNA, 32 bp, synthetic construct; identical to SEQ ID NO: 22740
  misc_feature 1..32: note = Probe
  source 1..32: mol_type = other DNA

SEQ ID NO: 41251 - DNA, 33 bp, synthetic construct; identical to SEQ ID NO: 14079
  misc_feature 1..33: note = Probe
  source 1..33: mol_type = other DNA

SEQ ID NO: 41252 - DNA, 36 bp, synthetic construct; identical to SEQ ID NO: 22741
  misc_feature 1..36: note = Probe
  source 1..36: mol_type = other DNA

SEQ ID NO: 41253 - DNA, 21 bp, synthetic construct
  misc_feature 1..21: note = Probe
  source 1..21: mol_type = other DNA
gtgatcgtatagtggttagta

SEQ ID NO: 41254 - DNA, 22 bp, synthetic construct
  misc_feature 1..22: note = Probe
  source 1..22: mol_type = other DNA
gtgatcgtatagtggttagtac

SEQ ID NO: 41255 - DNA, 23 bp, synthetic construct
  misc_feature 1..23: note = Probe
  source 1..23: mol_type = other DNA
gtgatcgtatagtggttagtact

SEQ ID NO: 41256 - DNA, 26 bp, synthetic construct
  misc_feature 1..26: note = Probe
  source 1..26: mol_type = other DNA
gtgatcgtatagtggttagtactctg

SEQ ID NO: 41257 - DNA, 27 bp, synthetic construct
  misc_feature 1..27: note = Probe
  source 1..27: mol_type = other DNA
gtgatcgtatagtggttagtactctgc

SEQ ID NO: 41258 - DNA, 37 bp, synthetic construct; identical to SEQ ID NO: 22769
  misc_feature 1..37: note = Probe
  source 1..37: mol_type = other DNA

SEQ ID NO: 41259 - DNA, 38 bp, synthetic construct; identical to SEQ ID NO: 22770
  misc_feature 1..38: note = Probe
  source 1..38: mol_type = other DNA

SEQ ID NO: 41260 - DNA, 41 bp, synthetic construct; identical to SEQ ID NO: 22773
  misc_feature 1..41: note = Probe
  source 1..41: mol_type = other DNA

SEQ ID NO: 41261 - DNA, 42 bp, synthetic construct; identical to SEQ ID NO: 22774
  misc_feature 1..42: note = Probe
  source 1..42: mol_type = other DNA

SEQ ID NO: 41262 - DNA, 22 bp, synthetic construct
  misc_feature 1..22: note = Probe
  source 1..22: mol_type = other DNA
gtgctccggagttacctcgttt

SEQ ID NO: 41263 - DNA, 50 bp, synthetic construct
  misc_feature 1..50: note = Probe
  source 1..50: mol_type = other DNA
gtgcttagctgttaactaagtgtttgtgggtttaagtcccattggtctag

SEQ ID NO: 41264 - DNA, 50 bp, synthetic construct; identical to SEQ ID NO: 22784
  misc_feature 1..50: note = Probe
  source 1..50: mol_type = other DNA

SEQ ID NO: 41265 - DNA, 28 bp, synthetic construct
  misc_feature 1..28: note = Probe
  source 1..28: mol_type = other DNA
gtggagttaaagactttttctctgattt

SEQ ID NO: 41266 - DNA, 30 bp, synthetic construct; identical to SEQ ID NO: 22788
  misc_feature 1..30: note = Probe
  source 1..30: mol_type = other DNA

SEQ ID NO: 41267 - DNA, 33 bp, synthetic construct; identical to SEQ ID NO: 7064
  misc_feature 1..33: note = Probe
  source 1..33: mol_type = other DNA

SEQ ID NO: 41268 - DNA, 42 bp, synthetic construct
  misc_feature 1..42: note = Probe
  source 1..42: mol_type = other DNA
gtggcccgggttcgactcccggtatgggaacgcttccttatt

SEQ ID NO: 41269 - DNA, 34 bp, synthetic construct
  misc_feature 1..34: note = Probe
  source 1..34: mol_type = other DNA
gtggcggctccatagctcaggggttagagcactg

SEQ ID NO: 41270 - DNA, 50 bp, synthetic construct
  misc_feature 1..50: note = Probe
  source 1..50: mol_type = other DNA
gtggcggctccatagctcaggggttagagcactggtcttgtaaaccaggg

SEQ ID NO: 41271 - DNA, 34 bp, synthetic construct
  misc_feature 1..34: note = Probe
  source 1..34: mol_type = other DNA
gtggcgggggtatagctcagtggtagagcatttg

SEQ ID NO: 41272 - DNA, 18 bp, synthetic construct
  misc_feature 1..18: note = Probe
  source 1..18: mol_type = other DNA
gtggcgtcccggtagctc

SEQ ID NO: 41273 - DNA, 30 bp, synthetic construct; identical to SEQ ID NO: 22800
  misc_feature 1..30: note = Probe
  source 1..30: mol_type = other DNA

SEQ ID NO: 41274 - DNA, 20 bp, synthetic construct
  misc_feature 1..20: note = Probe
  source 1..20: mol_type = other DNA
gtggtatagtggtaagcata

SEQ ID NO: 41275 - DNA, 21 bp, synthetic construct
  misc_feature 1..21: note = Probe
  source 1..21: mol_type = other DNA
gtggtatagtggtaagcatag

SEQ ID NO: 41276 - DNA, 23 bp, synthetic construct
  misc_feature 1..23: note = Probe
  source 1..23: mol_type = other DNA
gtggtatagtggtaagcatagct

SEQ ID NO: 41277 - DNA, 24 bp, synthetic construct
  misc_feature 1..24: note = Probe
  source 1..24: mol_type = other DNA
gtggtatagtggtaagcatagctg

SEQ ID NO: 41278 - DNA, 18 bp, synthetic construct
  misc_feature 1..18: note = Probe
  source 1..18: mol_type = other DNA
gtggtatagtggtgagca

SEQ ID NO: 41279 - DNA, 20 bp, synthetic construct
  misc_feature 1..20: note = Probe
  source 1..20: mol_type = other DNA
gtggtatagtggtgagcata

SEQ ID NO: 41280 - DNA, 21 bp, synthetic construct
  misc_feature 1..21: note = Probe
  source 1..21: mol_type = other DNA
gtggtatagtggtgagcatag

SEQ ID NO: 41281 - DNA, 23 bp, synthetic construct
  misc_feature 1..23: note = Probe
  source 1..23: mol_type = other DNA
gtggtatagtggtgagcatagct

SEQ ID NO: 41282 - DNA, 24 bp, synthetic construct
  misc_feature 1..24: note = Probe
  source 1..24: mol_type = other DNA
gtggtatagtggtgagcatagctg

SEQ ID NO: 41283 - DNA, 25 bp, synthetic construct
  misc_feature 1..25: note = Probe
  source 1..25: mol_type = other DNA
gtggtatagtggtgagcatagctgc

SEQ ID NO: 41284 - DNA, 20 bp, synthetic construct
  misc_feature 1..20: note = Probe
  source 1..20: mol_type = other DNA
gtggtatagtggttagcata

SEQ ID NO: 41285 - DNA, 21 bp, synthetic construct
  misc_feature 1..21: note = Probe
  source 1..21: mol_type = other DNA
gtggtatagtggttagcatag

SEQ ID NO: 41286 - DNA, 23 bp, synthetic construct
  misc_feature 1..23: note = Probe
  source 1..23: mol_type = other DNA
gtggtatagtggttagcatagct

SEQ ID NO: 41287 - DNA, 24 bp, synthetic construct
  misc_feature 1..24: note = Probe
  source 1..24: mol_type = other DNA
gtggtatagtggttagcatagctg

SEQ ID NO: 41288 - DNA, 27 bp, synthetic construct
  misc_feature 1..27: note = Probe
  source 1..27: mol_type = other DNA
gtggtcatcacgttcgcctaacacgcg

SEQ ID NO: 41289 - DNA, 24 bp, synthetic construct
  misc_feature 1..24: note = Probe
  source 1..24: mol_type = other DNA
gtggtcgttgccatgttaacgttt

SEQ ID NO: 41290 - DNA, 18 bp, synthetic construct
  misc_feature 1..18: note = Probe
  source 1..18: mol_type = other DNA
gtggtctagtggctagga

SEQ ID NO: 41291 - DNA, 19 bp, synthetic construct
  misc_feature 1..19: note = Probe
  source 1..19: mol_type = other DNA
gtggtctagtggctaggat

SEQ ID NO: 41292 - DNA, 20 bp, synthetic construct
  misc_feature 1..20: note = Probe
  source 1..20: mol_type = other DNA
gtggtctagtggctaggatt

SEQ ID NO: 41293 - DNA, 22 bp, synthetic construct
  misc_feature 1..22: note = Probe
  source 1..22: mol_type = other DNA
gtggtctagtggctaggattcg

SEQ ID NO: 41294 - DNA, 23 bp, synthetic construct
  misc_feature 1..23: note = Probe
  source 1..23: mol_type = other DNA
gtggtctagtggctaggattcgg

SEQ ID NO: 41295 - DNA, 18 bp, synthetic construct
  misc_feature 1..18: note = Probe
  source 1..18: mol_type = other DNA
gtggtctagtggttagga

SEQ ID NO: 41296 - DNA, 19 bp, synthetic construct
  misc_feature 1..19: note = Probe
  source 1..19: mol_type = other DNA
gtggtctagtggttaggat

SEQ ID NO: 41297 - DNA, 20 bp, synthetic construct
  misc_feature 1..20: note = Probe
  source 1..20: mol_type = other DNA
gtggtctagtggttaggatt

SEQ ID NO: 41298 - DNA, 21 bp, synthetic construct
  misc_feature 1..21: note = Probe
  source 1..21: mol_type = other DNA
gtggtctagtggttaggattc

SEQ ID NO: 41299 - DNA, 22 bp, synthetic construct
  misc_feature 1..22: note = Probe
  source 1..22: mol_type = other DNA
gtggtctagtggttaggattcg

SEQ ID NO: 41300 - DNA, 23 bp, synthetic construct
  misc_feature 1..23: note = Probe
  source 1..23: mol_type = other DNA
gtggtctagtggttaggattcgg

SEQ ID NO: 41301 - DNA, 24 bp, synthetic construct
  misc_feature 1..24: note = Probe
  source 1..24: mol_type = other DNA
gtggtctagtggttaggattcggc

SEQ ID NO: 41302 - DNA, 50 bp, synthetic construct
  misc_feature 1..50: note = Probe
  source 1..50: mol_type = other DNA
gtggtgacccagtggcctaatggataaggcatcagcctccggagctgggg

SEQ ID NO: 41303 - DNA, 29 bp, synthetic construct
  misc_feature 1..29: note = Probe
  source 1..29: mol_type = other DNA
gtggtgacttttgccctcctggaataaca

SEQ ID NO: 41304 - DNA, 36 bp, synthetic construct; identical to SEQ ID NO: 14097
  misc_feature 1..36: note = Probe
  source 1..36: mol_type = other DNA

SEQ ID NO: 41305 - DNA, 17 bp, synthetic construct
  misc_feature 1..17: note = Probe
  source 1..17: mol_type = other DNA
gtggttaggattcggcg

SEQ ID NO: 41306 - DNA, 36 bp, synthetic construct; identical to SEQ ID NO: 22856
  misc_feature 1..36: note = Probe
  source 1..36: mol_type = other DNA

SEQ ID NO: 41307 - DNA, 27 bp, synthetic construct
  misc_feature 1..27: note = Probe
  source 1..27: mol_type = other DNA
gtggttatcacgttcgcctaacacgcg

SEQ ID NO: 41308 - DNA, 23 bp, synthetic construct
  misc_feature 1..23: note = Probe
  source 1..23: mol_type = other DNA
gtggttatcacgttcgcctcaca

SEQ ID NO: 41309 - DNA, 26 bp, synthetic construct
  misc_feature 1..26: note = Probe
  source 1..26: mol_type = other DNA
gtggttatcacgttcgcctcacacgc

SEQ ID NO: 41310 - DNA, 27 bp, synthetic construct
  misc_feature 1..27: note = Probe
  source 1..27: mol_type = other DNA
gtggttatcacgttcgcctcacacgcg

SEQ ID NO: 41311 - DNA, 18 bp, synthetic construct
  misc_feature 1..18: note = Probe
  source 1..18: mol_type = other DNA
gtggttcagtggtagaat

SEQ ID NO: 41312 - DNA, 19 bp, synthetic construct
  misc_feature 1..19: note = Probe
  source 1..19: mol_type = other DNA
gtggttcagtggtagaatt

SEQ ID NO: 41313 - DNA, 20 bp, synthetic construct
  misc_feature 1..20: note = Probe
  source 1..20: mol_type = other DNA
gtggttcagtggtagaattc

SEQ ID NO: 41314 - DNA, 21 bp, synthetic construct
  misc_feature 1..21: note = Probe
  source 1..21: mol_type = other DNA
gtggttcagtggtagaattct

SEQ ID NO: 41315 - DNA, 22 bp, synthetic construct
  misc_feature 1..22: note = Probe
  source 1..22: mol_type = other DNA
gtggttcagtggtagaattctc

SEQ ID NO: 41316 - DNA, 23 bp, synthetic construct
  misc_feature 1..23: note = Probe
  source 1..23: mol_type = other DNA
gtggttcagtggtagaattctcg

SEQ ID NO: 41317 - DNA, 24 bp, synthetic construct
  misc_feature 1..24: note = Probe
  source 1..24: mol_type = other DNA
gtggttcagtggtagaattctcgc

SEQ ID NO: 41318 - DNA, 27 bp, synthetic construct
  misc_feature 1..27: note = Probe
  source 1..27: mol_type = other DNA
gtggttcagtggtagaattctcgcctc

SEQ ID NO: 41319 - DNA, 28 bp, synthetic construct
  misc_feature 1..28: note = Probe
  source 1..28: mol_type = other DNA
gtggttcagtggtagaattctcgcctcc

SEQ ID NO: 41320 - DNA, 27 bp, synthetic construct
  misc_feature 1..27: note = Probe
  source 1..27: mol_type = other DNA
gtggttcagtggtagaattctcgcctg

SEQ ID NO: 41321 - DNA, 29 bp, synthetic construct
  misc_feature 1..29: note = Probe
  source 1..29: mol_type = other DNA
gtggttctaacttgctggggtggcggttt

SEQ ID NO: 41322 - DNA, 27 bp, synthetic construct
  misc_feature 1..27: note = Probe
  source 1..27: mol_type = other DNA
gtggttgtagtccgtgcgagaataatg

SEQ ID NO: 41323 - DNA, 18 bp, synthetic construct
  misc_feature 1..18: note = Probe
  source 1..18: mol_type = other DNA
gtgtaagcagggtcgttt

SEQ ID NO: 41324 - DNA, 19 bp, synthetic construct
  misc_feature 1..19: note = Probe
  source 1..19: mol_type = other DNA
gtgtaagcagggtcgtttt

SEQ ID NO: 41325 - DNA, 20 bp, synthetic construct
  misc_feature 1..20: note = Probe
  source 1..20: mol_type = other DNA
gtgtaatggttagcactctg

SEQ ID NO: 41326 - DNA, 50 bp, synthetic construct
  misc_feature 1..50: note = Probe
  source 1..50: mol_type = other DNA
gtgtcaggatggccgagtggtctaaggcgccagactcaagcttggcttcc

SEQ ID NO: 41327 - DNA, 25 bp, synthetic construct
  misc_feature 1..25: note = Probe
  source 1..25: mol_type = other DNA
gtgtcagtttttctcttcagctttt

SEQ ID NO: 41328 - DNA, 17 bp, synthetic construct
  misc_feature 1..17: note = Probe
  source 1..17: mol_type = other DNA
gtgtccttcgatagctc

SEQ ID NO: 41329 - DNA, 50 bp, synthetic construct
  misc_feature 1..50: note = Probe
  source 1..50: mol_type = other DNA
gtgtccttcgatagctcagttggtagagcggaggactgtaggctcattaa

SEQ ID NO: 41330 - DNA, 34 bp, synthetic construct
  misc_feature 1..34: note = Probe
  source 1..34: mol_type = other DNA
gtgtggtttccgtagtgtagtggttatcacgttc

SEQ ID NO: 41331 - DNA, 36 bp, synthetic construct; identical to SEQ ID NO: 33282
  misc_feature 1..36: note = Probe
  source 1..36: mol_type = other DNA

SEQ ID NO: 41332 - DNA, 50 bp, synthetic construct
  misc_feature 1..50: note = Probe
  source 1..50: mol_type = other DNA
gtgtggtttccgtagtgtagtggttatcacgttcgcctcacacgcgaaag

SEQ ID NO: 41333 - DNA, 18 bp, synthetic construct
  misc_feature 1..18: note = Probe
  source 1..18: mol_type = other DNA
gtgtgtagctgcactttt

SEQ ID NO: 41334 - DNA, 19 bp, synthetic construct
  misc_feature 1..19: note = Probe
  source 1..19: mol_type = other DNA
gtgtgtagctgcacttttt

SEQ ID NO: 41335 - DNA, 29 bp, synthetic construct
  misc_feature 1..29: note = Probe
  source 1..29: mol_type = other DNA
gtgttgatggtatagtggtgagcatagct

SEQ ID NO: 41336 - DNA, 30 bp, synthetic construct
  misc_feature 1..30: note = Probe
  source 1..30: mol_type = other DNA
gtgttgatggtatagtggtgagcatagctg

SEQ ID NO: 41337 - DNA, 28 bp, synthetic construct
  misc_feature 1..28: note = Probe
  source 1..28: mol_type = other DNA
gtgtttgtgggtttaagtcccattggtc

SEQ ID NO: 41338 - DNA, 41 bp, synthetic construct; identical to SEQ ID NO: 7121
  misc_feature 1..41: note = Probe
  source 1..41: mol_type = other DNA

SEQ ID NO: 41339 - DNA, 42 bp, synthetic construct; identical to SEQ ID NO: 7122
  misc_feature 1..42: note = Probe
  source 1..42: mol_type = other DNA

SEQ ID NO: 41340 - DNA, 50 bp, synthetic construct
  misc_feature 1..50: note = Probe
  source 1..50: mol_type = other DNA
gttaaatacagaccaagagccttcaaagccctcagtaagttgcaatactt

SEQ ID NO: 41341 - DNA, 43 bp, synthetic construct; identical to SEQ ID NO: 7129
  misc_feature 1..43: note = Probe
  source 1..43: mol_type = other DNA

SEQ ID NO: 41342 - DNA, 30 bp, synthetic construct; identical to SEQ ID NO: 1521
  misc_feature 1..30: note = Probe
  source 1..30: mol_type = other DNA

SEQ ID NO: 41343 - DNA, 37 bp, synthetic construct; identical to SEQ ID NO: 1523
  misc_feature 1..37: note = Probe
  source 1..37: mol_type = other DNA

SEQ ID NO: 41344 - DNA, 26 bp, synthetic construct
  misc_feature 1..26: note = Probe
  source 1..26: mol_type = other DNA
gttagtatagtggtgagtatccccgc

SEQ ID NO: 41345 - DNA, 18 bp, synthetic construct
  misc_feature 1..18: note = Probe
  source 1..18: mol_type = other DNA
gttcaaatccgggtgccc

SEQ ID NO: 41346 - DNA, 21 bp, synthetic construct
  misc_feature 1..21: note = Probe
  source 1..21: mol_type = other DNA
gttcaaatccgggtgccccct

SEQ ID NO: 41347 - DNA, 24 bp, synthetic construct
  misc_feature 1..24: note = Probe
  source 1..24: mol_type = other DNA
gttcaaatccgggtgccccctcaa

SEQ ID NO: 41348 - DNA, 30 bp, synthetic construct
  misc_feature 1..30: note = Probe
  source 1..30: mol_type = other DNA
gttcaaatcctgctcacagcgtcgccattt

SEQ ID NO: 41349 - DNA, 31 bp, synthetic construct
  misc_feature 1..31: note = Probe
  source 1..31: mol_type = other DNA
gttcaaatcctgctcacagcgtcgccatttt

SEQ ID NO: 41350 - DNA, 20 bp, synthetic construct
  misc_feature 1..20: note = Probe
  source 1..20: mol_type = other DNA
gttcaatccccagcacctcc

SEQ ID NO: 41351 - DNA, 21 bp, synthetic construct
  misc_feature 1..21: note = Probe
  source 1..21: mol_type = other DNA
gttcaatccccggcacctcca

SEQ ID NO: 41352 - DNA, 21 bp, synthetic construct
  misc_feature 1..21: note = Probe
  source 1..21: mol_type = other DNA
gttcaatcccgggtttcggca

SEQ ID NO: 41353 - DNA, 33 bp, synthetic construct
  misc_feature 1..33: note = Probe
  source 1..33: mol_type = other DNA
gttcaatcccgggtttcggcagcgcttccgttt

SEQ ID NO: 41354 - DNA, 34 bp, synthetic construct
  misc_feature 1..34: note = Probe
  source 1..34: mol_type = other DNA
gttcaatcccgggtttcggcagcgcttccgtttt

SEQ ID NO: 41355 - DNA, 29 bp, synthetic construct
  misc_feature 1..29: note = Probe
  source 1..29: mol_type = other DNA
gttcaatcccgggtttcggcagttgcatt

SEQ ID NO: 41356 - DNA, 30 bp, synthetic construct
  misc_feature 1..30: note = Probe
  source 1..30: mol_type = other DNA
gttcaatcccgggtttcggcagttgcattt

SEQ ID NO: 41357 - DNA, 31 bp, synthetic construct
  misc_feature 1..31: note = Probe
  source 1..31: mol_type = other DNA
gttcaatcccgggtttcggcagttgcatttt

SEQ ID NO: 41358 - DNA, 50 bp, synthetic construct
  misc_feature 1..50: note = Probe
  source 1..50: mol_type = other DNA
gttcaggtcgcagtctcccctggaggcgtgggttcgaatcccactcctga

SEQ ID NO: 41359 - DNA, 20 bp, synthetic construct
  misc_feature 1..20: note = Probe
  source 1..20: mol_type = other DNA
gttcagtggtagaattctcg

SEQ ID NO: 41360 - DNA, 28 bp, synthetic construct
  misc_feature 1..28: note = Probe
  source 1..28: mol_type = other DNA
gttccatagtgtagcggttatcacgtct

SEQ ID NO: 41361 - DNA, 28 bp, synthetic construct
  misc_feature 1..28: note = Probe
  source 1..28: mol_type = other DNA
gttccatagtgtagtggttatcacgtct

SEQ ID NO: 41362 - DNA, 30 bp, synthetic construct; identical to SEQ ID NO: 14124
  misc_feature 1..30: note = Probe
  source 1..30: mol_type = other DNA

SEQ ID NO: 41363 - DNA, 31 bp, synthetic construct
  misc_feature 1..31: note = Probe
  source 1..31: mol_type = other DNA
gttcgaacctcagagggggcagctgccattt

SEQ ID NO: 41364 - DNA, 21 bp, synthetic construct
  misc_feature 1..21: note = Probe
  source 1..21: mol_type = other DNA
gttcgaatcccaccgctgcca

SEQ ID NO: 41365 - DNA, 34 bp, synthetic construct
  misc_feature 1..34: note = Probe
  source 1..34: mol_type = other DNA
gttcgaatcccaccgctgccaggtgcttcccttt

SEQ ID NO: 41366 - DNA, 29 bp, synthetic construct
  misc_feature 1..29: note = Probe
  source 1..29: mol_type = other DNA
gttcgaatcccacttctgacacatacttt

SEQ ID NO: 41367 - DNA, 30 bp, synthetic construct
  misc_feature 1..30: note = Probe
  source 1..30: mol_type = other DNA
gttcgaatcccacttctgacacattcgttt

SEQ ID NO: 41368 - DNA, 32 bp, synthetic construct
  misc_feature 1..32: note = Probe
  source 1..32: mol_type = other DNA
gttcgaatccggctcgaaggagttcacaattt

SEQ ID NO: 41369 - DNA, 19 bp, synthetic construct
  misc_feature 1..19: note = Probe
  source 1..19: mol_type = other DNA
gttcgaatcctgccgacta

SEQ ID NO: 41370 - DNA, 31 bp, synthetic construct
  misc_feature 1..31: note = Probe
  source 1..31: mol_type = other DNA
gttcgaatcctgctcacagcgtcactagttt

SEQ ID NO: 41371 - DNA, 30 bp, synthetic construct
  misc_feature 1..30: note = Probe
  source 1..30: mol_type = other DNA
gttcgaatcctgtcggctacggtttggttt

SEQ ID NO: 41372 - DNA, 24 bp, synthetic construct
  misc_feature 1..24: note = Probe
  source 1..24: mol_type = other DNA
gttcgactcccagcggggccttgg

SEQ ID NO: 41373 - DNA, 21 bp, synthetic construct
  misc_feature 1..21: note = Probe
  source 1..21: mol_type = other DNA
gttcgactcctggctggctcg

SEQ ID NO: 41374 - DNA, 33 bp, synthetic construct
  misc_feature 1..33: note = Probe
  source 1..33: mol_type = other DNA
gttcgactcctggctggctcgcgatgtctgttt

SEQ ID NO: 41375 - DNA, 34 bp, synthetic construct
  misc_feature 1..34: note = Probe
  source 1..34: mol_type = other DNA
gttcgactcctggctggctcgcgatgtctgtttt

SEQ ID NO: 41376 - DNA, 35 bp, synthetic construct
  misc_feature 1..35: note = Probe
  source 1..35: mol_type = other DNA
gttcgagcccacccaggaacgcttgttcgagcttt

SEQ ID NO: 41377 - DNA, 21 bp, synthetic construct
  misc_feature 1..21: note = Probe
  source 1..21: mol_type = other DNA
gttcgagcccacccagggacg

SEQ ID NO: 41378 - DNA, 24 bp, synthetic construct
  misc_feature 1..24: note = Probe
  source 1..24: mol_type = other DNA
gttcgagcccacccagggacgcct

SEQ ID NO: 41379 - DNA, 35 bp, synthetic construct
  misc_feature 1..35: note = Probe
  source 1..35: mol_type = other DNA
gttcgagcccacccagggacgcctctttgagcttt

SEQ ID NO: 41380 - DNA, 32 bp, synthetic construct
  misc_feature 1..32: note = Probe
  source 1..32: mol_type = other DNA
gttcgagcccacccagggacgcgctctccttt

SEQ ID NO: 41381 - DNA, 34 bp, synthetic construct
  misc_feature 1..34: note = Probe
  source 1..34: mol_type = other DNA
gttcgagcccacccagggacgcgtggtgactttt

SEQ ID NO: 41382 - DNA, 32 bp, synthetic construct
  misc_feature 1..32: note = Probe
  source 1..32: mol_type = other DNA
gttcgagcccacccagggacgctatgaccttt

SEQ ID NO: 41383 - DNA, 33 bp, synthetic construct
  misc_feature 1..33: note = Probe
  source 1..33: mol_type = other DNA
gttcgagcccacccagggacgctatgacctttt

SEQ ID NO: 41384 - DNA, 35 bp, synthetic construct
  misc_feature 1..35: note = Probe
  source 1..35: mol_type = other DNA
gttcgagcccacccagggacggtcagtgcttcttt

SEQ ID NO: 41385 - DNA, 18 bp, synthetic construct
  misc_feature 1..18: note = Probe
  source 1..18: mol_type = other DNA
gttcgagccccagtggaa

SEQ ID NO: 41386 - DNA, 20 bp, synthetic construct
  misc_feature 1..20: note = Probe
  source 1..20: mol_type = other DNA
gttcgagccccagtggaacc

SEQ ID NO: 41387 - DNA, 24 bp, synthetic construct
  misc_feature 1..24: note = Probe
  source 1..24: mol_type = other DNA
gttcgagtcccacctggggtgtcg

SEQ ID NO: 41388 - DNA, 33 bp, synthetic construct
  misc_feature 1..33: note = Probe
  source 1..33: mol_type = other DNA
gttcgagtcccatctggggtggcctgtgacttt

SEQ ID NO: 41389 - DNA, 34 bp, synthetic construct
  misc_feature 1..34: note = Probe
  source 1..34: mol_type = other DNA
gttcgagtcccatctggggtggcctgtgactttt

SEQ ID NO: 41390 - DNA, 24 bp, synthetic construct
  misc_feature 1..24: note = Probe
  source 1..24: mol_type = other DNA
gttcgagtcccatctgggtcgcgt

SEQ ID NO: 41391 - DNA, 20 bp, synthetic construct
  misc_feature 1..20: note = Probe
  source 1..20: mol_type = other DNA
gttcgagtcccttcgtggtc

SEQ ID NO: 41392 - DNA, 21 bp, synthetic construct
  misc_feature 1..21: note = Probe
  source 1..21: mol_type = other DNA
gttcgagtcccttcgtggtcg

SEQ ID NO: 41393 - DNA, 24 bp, synthetic construct
  misc_feature 1..24: note = Probe
  source 1..24: mol_type = other DNA
gttcgagtcccttcgtggtcgttg

SEQ ID NO: 41394 - DNA, 21 bp, synthetic construct
  misc_feature 1..21: note = Probe
  source 1..21: mol_type = other DNA
gttcgagtcctgccgcggtcg

SEQ ID NO: 41395 - DNA, 24 bp, synthetic construct
  misc_feature 1..24: note = Probe
  source 1..24: mol_type = other DNA
gttcgagtcctgccgcggtcgaag

SEQ ID NO: 41396 - DNA, 20 bp, synthetic construct
  misc_feature 1..20: note = Probe
  source 1..20: mol_type = other DNA
gttcgatccccagcatctcc

SEQ ID NO: 41397 - DNA, 28 bp, synthetic construct
  misc_feature 1..28: note = Probe
  source 1..28: mol_type = other DNA
gttcgatccccagcatctccagtgtttt

SEQ ID NO: 41398 - DNA, 21 bp, synthetic construct
  misc_feature 1..21: note = Probe
  source 1..21: mol_type = other DNA
gttcgatccccggcacctcca

SEQ ID NO: 41399 - DNA, 18 bp, synthetic construct
  misc_feature 1..18: note = Probe
  source 1..18: mol_type = other DNA
gttcgatccccggcatct

SEQ ID NO: 41400 - DNA, 21 bp, synthetic construct
  misc_feature 1..21: note = Probe
  source 1..21: mol_type = other DNA
gttcgatccccggcatctcca

SEQ ID NO: 41401 - DNA, 24 bp, synthetic construct
  misc_feature 1..24: note = Probe
  source 1..24: mol_type = other DNA
gttcgatccccggcatctccattg

SEQ ID NO: 41402 - DNA, 18 bp, synthetic construct
  misc_feature 1..18: note = Probe
  source 1..18: mol_type = other DNA
gttcgatcccgggtttcg

SEQ ID NO: 41403 - DNA, 20 bp, synthetic construct
  misc_feature 1..20: note = Probe
  source 1..20: mol_type = other DNA
gttcgatcccgggtttcggc

SEQ ID NO: 41404 - DNA, 31 bp, synthetic construct
  misc_feature 1..31: note = Probe
  source 1..31: mol_type = other DNA
gttcgatcccgggtttcggcacttcctcttt

SEQ ID NO: 41405 - DNA, 28 bp, synthetic construct
  misc_feature 1..28: note = Probe
  source 1..28: mol_type = other DNA
gttcgatcccgggtttcggcagaagttt

SEQ ID NO: 41406 - DNA, 28 bp, synthetic construct
  misc_feature 1..28: note = Probe
  source 1..28: mol_type = other DNA
gttcgatcccgggtttcggcagaccttt

SEQ ID NO: 41407 - DNA, 29 bp, synthetic construct
  misc_feature 1..29: note = Probe
  source 1..29: mol_type = other DNA
gttcgatcccgggtttcggcagctacttt

SEQ ID NO: 41408 - DNA, 30 bp, synthetic construct
  misc_feature 1..30: note = Probe
  source 1..30: mol_type = other DNA
gttcgatcccgggtttcggcagctactttt

SEQ ID NO: 41409 - DNA, 30 bp, synthetic construct
  misc_feature 1..30: note = Probe
  source 1..30: mol_type = other DNA
gttcgatcctcacacggggcacaataattt

SEQ ID NO: 41410 - DNA, 21 bp, synthetic construct
  misc_feature 1..21: note = Probe
  source 1..21: mol_type = other DNA
gttcgattccccgacggggag

SEQ ID NO: 41411 - DNA, 24 bp, synthetic construct
  misc_feature 1..24: note = Probe
  source 1..24: mol_type = other DNA
gttcgattccccgacggggaggca

SEQ ID NO: 41412 - DNA, 34 bp, synthetic construct
  misc_feature 1..34: note = Probe
  source 1..34: mol_type = other DNA
gttcgattccccgacggggaggcagccgtgcttt

SEQ ID NO: 41413 - DNA, 19 bp, synthetic construct
  misc_feature 1..19: note = Probe
  source 1..19: mol_type = other DNA
gttcgattcccggcccatg

SEQ ID NO: 41414 - DNA, 32 bp, synthetic construct
  misc_feature 1..32: note = Probe
  source 1..32: mol_type = other DNA
gttcgattcccggtcaggaaagtaagccgttt

SEQ ID NO: 41415 - DNA, 29 bp, synthetic construct
  misc_feature 1..29: note = Probe
  source 1..29: mol_type = other DNA
gttcgattcccggtcagggaatgaggttt

SEQ ID NO: 41416 - DNA, 30 bp, synthetic construct
  misc_feature 1..30: note = Probe
  source 1..30: mol_type = other DNA
gttcgattcccggtcagggaatgaggtttt

SEQ ID NO: 41417 - DNA, 20 bp, synthetic construct
  misc_feature 1..20: note = Probe
  source 1..20: mol_type = other DNA
gttcgattccggctcgaagg

SEQ ID NO: 41418 - DNA, 36 bp, synthetic construct
  misc_feature 1..36: note = Probe
  source 1..36: mol_type = other DNA
gttcgattccggctcgaaggaagtgcccgatgcttt

SEQ ID NO: 41419 - DNA, 37 bp, synthetic construct
  misc_feature 1..37: note = Probe
  source 1..37: mol_type = other DNA
gttcgattccggctcgaaggaagtgcccgatgctttt

SEQ ID NO: 41420 - DNA, 36 bp, synthetic construct
  misc_feature 1..36: note = Probe
  source 1..36: mol_type = other DNA
gttcgattccggctcgaaggacttcgtctgtaattt

SEQ ID NO: 41421 - DNA, 37 bp, synthetic construct
  misc_feature 1..37: note = Probe
  source 1..37: mol_type = other DNA
gttcgattccggctcgaaggacttcgtctgtaatttt

SEQ ID NO: 41422 - DNA, 36 bp, synthetic construct
  misc_feature 1..36: note = Probe
  source 1..36: mol_type = other DNA
gttcgattccggctcgaaggagacaagtgcggtttt

SEQ ID NO: 41423 - DNA, 36 bp, synthetic construct
  misc_feature 1..36: note = Probe
  source 1..36: mol_type = other DNA
gttcgattccggctcgaaggagctgccgtattcttt

SEQ ID NO: 41424 - DNA, 23 bp, synthetic construct
  misc_feature 1..23: note = Probe
  source 1..23: mol_type = other DNA
gttcttgtagttgaaatacaacg

SEQ ID NO: 41425 - DNA, 50 bp, synthetic construct; identical to SEQ ID NO: 23018
  misc_feature 1..50: note = Probe
  source 1..50: mol_type = other DNA

SEQ ID NO: 41426 - DNA, 30 bp, synthetic construct; identical to SEQ ID NO: 14129
  misc_feature 1..30: note = Probe
  source 1..30: mol_type = other DNA

SEQ ID NO: 41427 - DNA, 34 bp, synthetic construct; identical to SEQ ID NO: 7208
  misc_feature 1..34: note = Probe
  source 1..34: mol_type = other DNA

SEQ ID NO: 41428 - DNA, 18 bp, synthetic construct
  misc_feature 1..18: note = Probe
  source 1..18: mol_type = other DNA
gttgccatgttaacgttt

SEQ ID NO: 41429 - DNA, 24 bp, synthetic construct
  misc_feature 1..24: note = Probe
  source 1..24: mol_type = other DNA
gttggtctaggggtatgattctcg

SEQ ID NO: 41430 - DNA, 28 bp, synthetic construct
  misc_feature 1..28: note = Probe
  source 1..28: mol_type = other DNA
gttggtggtatagtggtaagcatagctg

SEQ ID NO: 41431 - DNA, 28 bp, synthetic construct
  misc_feature 1..28: note = Probe
  source 1..28: mol_type = other DNA
gttggtggtatagtggtgagcatagctg

SEQ ID NO: 41432 - DNA, 28 bp, synthetic construct
  misc_feature 1..28: note = Probe
  source 1..28: mol_type = other DNA
gttggtggtatagtggttagcatagctg

SEQ ID NO: 41433 - DNA, 24 bp, synthetic construct
  misc_feature 1..24: note = Probe
  source 1..24: mol_type = other DNA
gttgtagtccgtgcgagaataatg

SEQ ID NO: 41434 - DNA, 50 bp, synthetic construct; identical to SEQ ID NO: 1530
  misc_feature 1..50: note = Probe
  source 1..50: mol_type = other DNA

SEQ ID NO: 41435 - DNA, 50 bp, synthetic construct; identical to SEQ ID NO: 1531
  misc_feature 1..50: note = Probe
  source 1..50: mol_type = other DNA

SEQ ID NO: 41436 - DNA, 27 bp, synthetic construct
  misc_feature 1..27: note = Probe
  source 1..27: mol_type = other DNA
gtttagacgggctcacatcaccccata

SEQ ID NO: 41437 - DNA, 34 bp, synthetic construct; identical to SEQ ID NO: 7239
  misc_feature 1..34: note = Probe
  source 1..34: mol_type = other DNA

SEQ ID NO: 41438 - DNA, 30 bp, synthetic construct; identical to SEQ ID NO: 1536
  misc_feature 1..30: note = Probe
  source 1..30: mol_type = other DNA

SEQ ID NO: 41439 - DNA, 33 bp, synthetic construct; identical to SEQ ID NO: 1537
  misc_feature 1..33: note = Probe
  source 1..33: mol_type = other DNA

SEQ ID NO: 41440 - DNA, 37 bp, synthetic construct; identical to SEQ ID NO: 1541
  misc_feature 1..37: note = Probe
  source 1..37: mol_type = other DNA

SEQ ID NO: 41441 - DNA, 29 bp, synthetic construct
  misc_feature 1..29: note = Probe
  source 1..29: mol_type = other DNA
gtttccgtagtggagtggttatcacgttc

SEQ ID NO: 41442 - DNA, 31 bp, synthetic construct; identical to SEQ ID NO: 23081
  misc_feature 1..31: note = Probe
  source 1..31: mol_type = other DNA

SEQ ID NO: 41443 - DNA, 21 bp, synthetic construct
  misc_feature 1..21: note = Probe
  source 1..21: mol_type = other DNA
gtttccgtagtgtagcggtta

SEQ ID NO: 41444 - DNA, 26 bp, synthetic construct
  misc_feature 1..26: note = Probe
  source 1..26: mol_type = other DNA
gtttccgtagtgtagcggttatcaca

SEQ ID NO: 41445 - DNA, 32 bp, synthetic construct; identical to SEQ ID NO: 1548
  misc_feature 1..32: note = Probe
  source 1..32: mol_type = other DNA

SEQ ID NO: 41446 - DNA, 35 bp, synthetic construct; identical to SEQ ID NO: 1551
  misc_feature 1..35: note = Probe
  source 1..35: mol_type = other DNA

SEQ ID NO: 41447 - DNA, 18 bp, synthetic construct
  misc_feature 1..18: note = Probe
  source 1..18: mol_type = other DNA
gtttccgtagtgtagtgg

SEQ ID NO: 41448 - DNA, 19 bp, synthetic construct
  misc_feature 1..19: note = Probe
  source 1..19: mol_type = other DNA
gtttccgtagtgtagtggt

SEQ ID NO: 41449 - DNA, 20 bp, synthetic construct
  misc_feature 1..20: note = Probe
  source 1..20: mol_type = other DNA
gtttccgtagtgtagtggtc

SEQ ID NO: 41450 - DNA, 22 bp, synthetic construct
  misc_feature 1..22: note = Probe
  source 1..22: mol_type = other DNA
gtttccgtagtgtagtggtcat

SEQ ID NO: 41451 - DNA, 34 bp, synthetic construct; identical to SEQ ID NO: 7259
  misc_feature 1..34: note = Probe
  source 1..34: mol_type = other DNA

SEQ ID NO: 41452 - DNA, 35 bp, synthetic construct; identical to SEQ ID NO: 7260
  misc_feature 1..35: note = Probe
  source 1..35: mol_type = other DNA

SEQ ID NO: 41453 - DNA, 36 bp, synthetic construct; identical to SEQ ID NO: 7261
  misc_feature 1..36: note = Probe
  source 1..36: mol_type = other DNA

SEQ ID NO: 41454 - DNA, 50 bp, synthetic construct; identical to SEQ ID NO: 7263
  misc_feature 1..50: note = Probe
  source 1..50: mol_type = other DNA

SEQ ID NO: 41455 - DNA, 20 bp, synthetic construct
  misc_feature 1..20: note = Probe
  source 1..20: mol_type = other DNA
gtttccgtagtgtagtggtt

SEQ ID NO: 41456 - DNA, 21 bp, synthetic construct
  misc_feature 1..21: note = Probe
  source 1..21: mol_type = other DNA
gtttccgtagtgtagtggtta

SEQ ID NO: 41457 - DNA, 22 bp, synthetic construct
  misc_feature 1..22: note = Probe
  source 1..22: mol_type = other DNA
gtttccgtagtgtagtggttat

SEQ ID NO: 41458 - DNA, 23 bp, synthetic construct
  misc_feature 1..23: note = Probe
  source 1..23: mol_type = other DNA
gtttccgtagtgtagtggttatc

SEQ ID NO: 41459 - DNA, 24 bp, synthetic construct
  misc_feature 1..24: note = Probe
  source 1..24: mol_type = other DNA
gtttccgtagtgtagtggttatca

SEQ ID NO: 41460 - DNA, 25 bp, synthetic construct
  misc_feature 1..25: note = Probe
  source 1..25: mol_type = other DNA
gtttccgtagtgtagtggttatcac

SEQ ID NO: 41461 - DNA, 26 bp, synthetic construct
  misc_feature 1..26: note = Probe
  source 1..26: mol_type = other DNA
gtttccgtagtgtagtggttatcacg

SEQ ID NO: 41462 - DNA, 27 bp, synthetic construct
  misc_feature 1..27: note = Probe
  source 1..27: mol_type = other DNA
gtttccgtagtgtagtggttatcacgt

SEQ ID NO: 41463 - DNA, 28 bp, synthetic construct
  misc_feature 1..28: note = Probe
  source 1..28: mol_type = other DNA
gtttccgtagtgtagtggttatcacgtt

SEQ ID NO: 41464 - DNA, 29 bp, synthetic construct
  misc_feature 1..29: note = Probe
  source 1..29: mol_type = other DNA
gtttccgtagtgtagtggttatcacgttc

SEQ ID NO: 41465 - DNA, 30 bp, synthetic construct; identical to SEQ ID NO: 7273
  misc_feature 1..30: note = Probe
  source 1..30: mol_type = other DNA

SEQ ID NO: 41466 - DNA, 31 bp, synthetic construct; identical to SEQ ID NO: 7274
  misc_feature 1..31: note = Probe
  source 1..31: mol_type = other DNA

SEQ ID NO: 41467 - DNA, 32 bp, synthetic construct; identical to SEQ ID NO: 7275
  misc_feature 1..32: note = Probe
  source 1..32: mol_type = other DNA

SEQ ID NO: 41468 - DNA, 33 bp, synthetic construct; identical to SEQ ID NO: 7276
  misc_feature 1..33: note = Probe
  source 1..33: mol_type = other DNA

SEQ ID NO: 41469 - DNA, 34 bp, synthetic construct; identical to SEQ ID NO: 1562
  misc_feature 1..34: note = Probe
  source 1..34: mol_type = other DNA

SEQ ID NO: 41470 - DNA, 35 bp, synthetic construct; identical to SEQ ID NO: 23123
  misc_feature 1..35: note = Probe
  source 1..35: mol_type = other DNA

SEQ ID NO: 41471 - DNA, 36 bp, synthetic construct; identical to SEQ ID NO: 23124
  misc_feature 1..36: note = Probe
  source 1..36: mol_type = other DNA

SEQ ID NO: 41472 - DNA, 37 bp, synthetic construct
  misc_feature 1..37: note = Probe
  source 1..37: mol_type = other DNA
gtttccgtagtgtagtggttatcacgttcgcctaaca

SEQ ID NO: 41473 - DNA, 38 bp, synthetic construct
  misc_feature 1..38: note = Probe
  source 1..38: mol_type = other DNA
gtttccgtagtgtagtggttatcacgttcgcctaacac

SEQ ID NO: 41474 - DNA, 41 bp, synthetic construct; identical to SEQ ID NO: 23126
  misc_feature 1..41: note = Probe
  source 1..41: mol_type = other DNA

SEQ ID NO: 41475 - DNA, 42 bp, synthetic construct; identical to SEQ ID NO: 33531
  misc_feature 1..42: note = Probe
  source 1..42: mol_type = other DNA

SEQ ID NO: 41476 - DNA, 49 bp, synthetic construct; identical to SEQ ID NO: 23127
  misc_feature 1..49: note = Probe
  source 1..49: mol_type = other DNA

SEQ ID NO: 41477 - DNA, 34 bp, synthetic construct; identical to SEQ ID NO: 7278
  misc_feature 1..34: note = Probe
  source 1..34: mol_type = other DNA

SEQ ID NO: 41478 - DNA, 35 bp, synthetic construct; identical to SEQ ID NO: 7279
  misc_feature 1..35: note = Probe
  source 1..35: mol_type = other DNA

SEQ ID NO: 41479 - DNA, 36 bp, synthetic construct; identical to SEQ ID NO: 7280
  misc_feature 1..36: note = Probe
  source 1..36: mol_type = other DNA

SEQ ID NO: 41480 - DNA, 37 bp, synthetic construct; identical to SEQ ID NO: 7281
  misc_feature 1..37: note = Probe
  source 1..37: mol_type = other DNA

SEQ ID NO: 41481 - DNA, 42 bp, synthetic construct; identical to SEQ ID NO: 23135
  misc_feature 1..42: note = Probe
  source 1..42: mol_type = other DNA

SEQ ID NO: 41482 - DNA, 29 bp, synthetic construct
  misc_feature 1..29: note = Probe
  source 1..29: mol_type = other DNA
gtttccgtagtgtagtggttatcacgttt

SEQ ID NO: 41483 - DNA, 31 bp, synthetic construct; identical to SEQ ID NO: 23137
  misc_feature 1..31: note = Probe
  source 1..31: mol_type = other DNA

SEQ ID NO: 41484 - DNA, 29 bp, synthetic construct
  misc_feature 1..29: note = Probe
  source 1..29: mol_type = other DNA
gtttccgtagtgtagtggttattatgttc

SEQ ID NO: 41485 - DNA, 31 bp, synthetic construct; identical to SEQ ID NO: 23143
  misc_feature 1..31: note = Probe
  source 1..31: mol_type = other DNA

SEQ ID NO: 41486 - DNA, 28 bp, synthetic construct
  misc_feature 1..28: note = Probe
  source 1..28: mol_type = other DNA
gtttccgtggtgtagtggttatcacatt

SEQ ID NO: 41487 - DNA, 30 bp, synthetic construct; identical to SEQ ID NO: 11583
  misc_feature 1..30: note = Probe
  source 1..30: mol_type = other DNA

SEQ ID NO: 41488 - DNA, 31 bp, synthetic construct; identical to SEQ ID NO: 23150
  misc_feature 1..31: note = Probe
  source 1..31: mol_type = other DNA

SEQ ID NO: 41489 - DNA, 32 bp, synthetic construct; identical to SEQ ID NO: 7284
  misc_feature 1..32: note = Probe
  source 1..32: mol_type = other DNA

SEQ ID NO: 41490 - DNA, 33 bp, synthetic construct; identical to SEQ ID NO: 7285
  misc_feature 1..33: note = Probe
  source 1..33: mol_type = other DNA

SEQ ID NO: 41491 - DNA, 23 bp, synthetic construct
  misc_feature 1..23: note = Probe
  source 1..23: mol_type = other DNA
gtttgggtccgagaggtcccggg

SEQ ID NO: 41492 - DNA, 41 bp, synthetic construct
  misc_feature 1..41: note = Probe
  source 1..41: mol_type = other DNA
gtttgggtccgagaggtcccgggttcaaatcccggacgagc

SEQ ID NO: 41493 - DNA, 50 bp, synthetic construct
  misc_feature 1..50: note = Probe
  source 1..50: mol_type = other DNA
gtttgggtccgagaggtcccgggttcaaatcccggacgagcccctctttt

SEQ ID NO: 41494 - DNA, 17 bp, synthetic construct
  misc_feature 1..17: note = Probe
  source 1..17: mol_type = other DNA
gtttgtgggtttaagtc

SEQ ID NO: 41495 - DNA, 18 bp, synthetic construct
  misc_feature 1..18: note = Probe
  source 1..18: mol_type = other DNA
gtttgtgggtttaagtcc

SEQ ID NO: 41496 - DNA, 19 bp, synthetic construct
  misc_feature 1..19: note = Probe
  source 1..19: mol_type = other DNA
gtttgtgggtttaagtccc

SEQ ID NO: 41497 - DNA, 21 bp, synthetic construct
  misc_feature 1..21: note = Probe
  source 1..21: mol_type = other DNA
gtttgtgggtttaagtcccat

SEQ ID NO: 41498 - DNA, 22 bp, synthetic construct
  misc_feature 1..22: note = Probe
  source 1..22: mol_type = other DNA
gtttgtgggtttaagtcccatt

SEQ ID NO: 41499 - DNA, 23 bp, synthetic construct
  misc_feature 1..23: note = Probe
  source 1..23: mol_type = other DNA
gtttgtgggtttaagtcccattg

SEQ ID NO: 41500 - DNA, 24 bp, synthetic construct
  misc_feature 1..24: note = Probe
  source 1..24: mol_type = other DNA
gtttgtgggtttaagtcccattgg

SEQ ID NO: 41501 - DNA, 25 bp, synthetic construct
  misc_feature 1..25: note = Probe
  source 1..25: mol_type = other DNA
gtttgtgggtttaagtcccattggt

SEQ ID NO: 41502 - DNA, 26 bp, synthetic construct
  misc_feature 1..26: note = Probe
  source 1..26: mol_type = other DNA
gtttgtgggtttaagtcccattggtc

SEQ ID NO: 41503 - DNA, 27 bp, synthetic construct
  misc_feature 1..27: note = Probe
  source 1..27: mol_type = other DNA
gtttgtgggtttaagtcccattggtct

SEQ ID NO: 41504 - DNA, 28 bp, synthetic construct
  misc_feature 1..28: note = Probe
  source 1..28: mol_type = other DNA
gtttgtgggtttaagtcccattggtcta

SEQ ID NO: 41505 - DNA, 29 bp, synthetic construct
  misc_feature 1..29: note = Probe
  source 1..29: mol_type = other DNA
gtttgtgggtttaagtcccattggtctag

SEQ ID NO: 41506 - DNA, 30 bp, synthetic construct; identical to SEQ ID NO: 7300
  misc_feature 1..30: note = Probe
  source 1..30: mol_type = other DNA

SEQ ID NO: 41507 - DNA, 31 bp, synthetic construct; identical to SEQ ID NO: 7301
  misc_feature 1..31: note = Probe
  source 1..31: mol_type = other DNA

SEQ ID NO: 41508 - DNA, 32 bp, synthetic construct; identical to SEQ ID NO: 7302
  misc_feature 1..32: note = Probe
  source 1..32: mol_type = other DNA

SEQ ID NO: 41509 - DNA, 33 bp, synthetic construct; identical to SEQ ID NO: 7303
  misc_feature 1..33: note = Probe
  source 1..33: mol_type = other DNA

SEQ ID NO: 41510 - DNA, 34 bp, synthetic construct; identical to SEQ ID NO: 7304
  misc_feature 1..34: note = Probe
  source 1..34: mol_type = other DNA

SEQ ID NO: 41511 - DNA, 35 bp, synthetic construct; identical to SEQ ID NO: 7305
  misc_feature 1..35: note = Probe
  source 1..35: mol_type = other DNA

SEQ ID NO: 41512 - DNA, 39 bp, synthetic construct
  misc_feature 1..39: note = Probe
  source 1..39: mol_type = other DNA
gttttcacccaggcggcccgggttcgactcccggtgtgg

SEQ ID NO: 41513 - DNA, 41 bp, synthetic construct
  misc_feature 1..41: note = Probe
  source 1..41: mol_type = other DNA
gttttcacccaggcggcccgggttcgactcccggtgtggga

SEQ ID NO: 41514 - DNA, 45 bp, synthetic construct
  misc_feature 1..45: note = Probe
  source 1..45: mol_type = other DNA
gttttcacccaggcggcccgggttcgactcccggtgtgggaacgc

SEQ ID NO: 41515 - DNA, 49 bp, synthetic construct
  misc_feature 1..49: note = Probe
  source 1..49: mol_type = other DNA
gttttcacccaggcggcccgggttcgactcccggtgtgggaacgccgaa

SEQ ID NO: 41516 - DNA, 50 bp, synthetic construct
  misc_feature 1..50: note = Probe
  source 1..50: mol_type = other DNA
gttttcacccaggcggcccgggttcgactcccggtgtgggaacgccgaaa

SEQ ID NO: 41517 - DNA, 50 bp, synthetic construct
  misc_feature 1..50: note = Probe
  source 1..50: mol_type = other DNA
gttttcacccaggcggcccgggttcgactcccggtgtgggaatgactgga

SEQ ID NO: 41518 - DNA, 45 bp, synthetic construct
  misc_feature 1..45: note = Probe
  source 1..45: mol_type = other DNA
gttttcacccaggtggcccgggttcgactcccggtatgggaacaa

SEQ ID NO: 41519 - DNA, 50 bp, synthetic construct
  misc_feature 1..50: note = Probe
  source 1..50: mol_type = other DNA
gttttcacccaggtggcccgggttcgactcccggtatgggaacgcttcct

SEQ ID NO: 41520 - DNA, 20 bp, synthetic construct
  misc_feature 1..20: note = Probe
  source 1..20: mol_type = other DNA
gtttttcatatcattggtcg

SEQ ID NO: 41521 - DNA, 23 bp, synthetic construct
  misc_feature 1..23: note = Probe
  source 1..23: mol_type = other DNA
gtttttcatatcattggtcgtgg

SEQ ID NO: 41522 - DNA, 32 bp, synthetic construct; identical to SEQ ID NO: 25624
  misc_feature 1..32: note = Probe
  source 1..32: mol_type = other DNA

SEQ ID NO: 41523 - DNA, 46 bp, synthetic construct; identical to SEQ ID NO: 7307
  misc_feature 1..46: note = Probe
  source 1..46: mol_type = other DNA

SEQ ID NO: 41524 - DNA, 50 bp, synthetic construct; identical to SEQ ID NO: 7308
  misc_feature 1..50: note = Probe
  source 1..50: mol_type = other DNA

SEQ ID NO: 41525 - DNA, 50 bp, synthetic construct; identical to SEQ ID NO: 7321
  misc_feature 1..50: note = Probe
  source 1..50: mol_type = other DNA

SEQ ID NO: 41526 - DNA, 18 bp, synthetic construct
  misc_feature 1..18: note = Probe
  source 1..18: mol_type = other DNA
taaaccaggggtcgcgag

SEQ ID NO: 41527 - DNA, 36 bp, synthetic construct; identical to SEQ ID NO: 7329
  misc_feature 1..36: note = Probe
  source 1..36: mol_type = other DNA

SEQ ID NO: 41528 - DNA, 28 bp, synthetic construct
  misc_feature 1..28: note = Probe
  source 1..28: mol_type = other DNA
taaacctagccccaaacccactccacct

SEQ ID NO: 41529 - DNA, 38 bp, synthetic construct; identical to SEQ ID NO: 7332
  misc_feature 1..38: note = Probe
  source 1..38: mol_type = other DNA

SEQ ID NO: 41530 - DNA, 50 bp, synthetic construct; identical to SEQ ID NO: 7341
  misc_feature 1..50: note = Probe
  source 1..50: mol_type = other DNA

SEQ ID NO: 41531 - DNA, 50 bp, synthetic construct; identical to SEQ ID NO: 1567
  misc_feature 1..50: note = Probe
  source 1..50: mol_type = other DNA

SEQ ID NO: 41532 - DNA, 17 bp, synthetic construct
  misc_feature 1..17: note = Probe
  source 1..17: mol_type = other DNA
taacacaaagcacccaa

SEQ ID NO: 41533 - DNA, 18 bp, synthetic construct
  misc_feature 1..18: note = Probe
  source 1..18: mol_type = other DNA
taacacgcgaaaggtccc

SEQ ID NO: 41534 - DNA, 20 bp, synthetic construct
  misc_feature 1..20: note = Probe
  source 1..20: mol_type = other DNA
taacacgcgaaaggtccccg

SEQ ID NO: 41535 - DNA, 21 bp, synthetic construct
  misc_feature 1..21: note = Probe
  source 1..21: mol_type = other DNA
taacacgcgaaaggtccccgg

SEQ ID NO: 41536 - DNA, 22 bp, synthetic construct
  misc_feature 1..22: note = Probe
  source 1..22: mol_type = other DNA
taacacgcgaaaggtccccggt

SEQ ID NO: 41537 - DNA, 38 bp, synthetic construct
  misc_feature 1..38: note = Probe
  source 1..38: mol_type = other DNA
taacacgcgaaaggtccccggttcgaaaccgggcggaa

SEQ ID NO: 41538 - DNA, 30 bp, synthetic construct; identical to SEQ ID NO: 11605
  misc_feature 1..30: note = Probe
  source 1..30: mol_type = other DNA

SEQ ID NO: 41539 - DNA, 30 bp, synthetic construct; identical to SEQ ID NO: 7365
  misc_feature 1..30: note = Probe
  source 1..30: mol_type = other DNA

SEQ ID NO: 41540 - DNA, 33 bp, synthetic construct; identical to SEQ ID NO: 7368
  misc_feature 1..33: note = Probe
  source 1..33: mol_type = other DNA

SEQ ID NO: 41541 - DNA, 41 bp, synthetic construct; identical to SEQ ID NO: 7396
  misc_feature 1..41: note = Probe
  source 1..41: mol_type = other DNA

SEQ ID NO: 41542 - DNA, 31 bp, synthetic construct; identical to SEQ ID NO: 7406
  misc_feature 1..31: note = Probe
  source 1..31: mol_type = other DNA

SEQ ID NO: 41543 - DNA, 37 bp, synthetic construct
  misc_feature 1..37: note = Probe
  source 1..37: mol_type = other DNA
taagccgcgcattggtggttcagtggtagaattctcg

SEQ ID NO: 41544 - DNA, 28 bp, synthetic construct
  misc_feature 1..28: note = Probe
  source 1..28: mol_type = other DNA
taagctatcgggcccataccccgaaaat

SEQ ID NO: 41545 - DNA, 50 bp, synthetic construct; identical to SEQ ID NO: 1573
  misc_feature 1..50: note = Probe
  source 1..50: mol_type = other DNA

SEQ ID NO: 41546 - DNA, 32 bp, synthetic construct; identical to SEQ ID NO: 7457
  misc_feature 1..32: note = Probe
  source 1..32: mol_type = other DNA

SEQ ID NO: 41547 - DNA, 17 bp, synthetic construct
  misc_feature 1..17: note = Probe
  source 1..17: mol_type = other DNA
taatggataaggcactg

SEQ ID NO: 41548 - DNA, 18 bp, synthetic construct
  misc_feature 1..18: note = Probe
  source 1..18: mol_type = other DNA
taatggttagcactctgg

SEQ ID NO: 41549 - DNA, 50 bp, synthetic construct; identical to SEQ ID NO: 1574
  misc_feature 1..50: note = Probe
  source 1..50: mol_type = other DNA

SEQ ID NO: 41550 - DNA, 30 bp, synthetic construct; identical to SEQ ID NO: 7478
  misc_feature 1..30: note = Probe
  source 1..30: mol_type = other DNA

SEQ ID NO: 41551 - DNA, 20 bp, synthetic construct
  misc_feature 1..20: note = Probe
  source 1..20: mol_type = other DNA
tacacgcagaaggtcctggg

SEQ ID NO: 41552 - DNA, 21 bp, synthetic construct
  misc_feature 1..21: note = Probe
  source 1..21: mol_type = other DNA
tacacgcagaaggtcctgggt

SEQ ID NO: 41553 - DNA, 43 bp, synthetic construct; identical to SEQ ID NO: 7483
  misc_feature 1..43: note = Probe
  source 1..43: mol_type = other DNA

SEQ ID NO: 41554 - DNA, 34 bp, synthetic construct; identical to SEQ ID NO: 7490
  misc_feature 1..34: note = Probe
  source 1..34: mol_type = other DNA

SEQ ID NO: 41555 - DNA, 41 bp, synthetic construct; identical to SEQ ID NO: 7497
  misc_feature 1..41: note = Probe
  source 1..41: mol_type = other DNA

SEQ ID NO: 41556 - DNA, 42 bp, synthetic construct; identical to SEQ ID NO: 7498
  misc_feature 1..42: note = Probe
  source 1..42: mol_type = other DNA

SEQ ID NO: 41557 - DNA, 27 bp, synthetic construct
  misc_feature 1..27: note = Probe
  source 1..27: mol_type = other DNA
tacagtcagaggttcaattcctcttct

SEQ ID NO: 41558 - DNA, 28 bp, synthetic construct
  misc_feature 1..28: note = Probe
  source 1..28: mol_type = other DNA
tacagtcagaggttcaattcctcttctt

SEQ ID NO: 41559 - DNA, 29 bp, synthetic construct
  misc_feature 1..29: note = Probe
  source 1..29: mol_type = other DNA
tacagtcagaggttcaattcctcttctta

SEQ ID NO: 41560 - DNA, 32 bp, synthetic construct; identical to SEQ ID NO: 7506
  misc_feature 1..32: note = Probe
  source 1..32: mol_type = other DNA

SEQ ID NO: 41561 - DNA, 32 bp, synthetic construct; identical to SEQ ID NO: 7512
  misc_feature 1..32: note = Probe
  source 1..32: mol_type = other DNA

SEQ ID NO: 41562 - DNA, 50 bp, synthetic construct; identical to SEQ ID NO: 7523
  misc_feature 1..50: note = Probe
  source 1..50: mol_type = other DNA

SEQ ID NO: 41563 - DNA, 31 bp, synthetic construct
  misc_feature 1..31: note = Probe
  source 1..31: mol_type = other DNA
tactcagtggtctagtggttaggattcagcg

SEQ ID NO: 41564 - DNA, 30 bp, synthetic construct
  misc_feature 1..30: note = Probe
  source 1..30: mol_type = other DNA
tactcgttagtatagtggtgcgtatccccg

SEQ ID NO: 41565 - DNA, 50 bp, synthetic construct; identical to SEQ ID NO: 7535
  misc_feature 1..50: note = Probe
  source 1..50: mol_type = other DNA

SEQ ID NO: 41566 - DNA, 50 bp, synthetic construct; identical to SEQ ID NO: 1580
  misc_feature 1..50: note = Probe
  source 1..50: mol_type = other DNA

SEQ ID NO: 41567 - DNA, 24 bp, synthetic construct
  misc_feature 1..24: note = Probe
  source 1..24: mol_type = other DNA
tagacgggctcacatcaccccata

SEQ ID NO: 41568 - DNA, 28 bp, synthetic construct
  misc_feature 1..28: note = Probe
  source 1..28: mol_type = other DNA
tagacgggctcacatcaccccataaaca

SEQ ID NO: 41569 - DNA, 30 bp, synthetic construct; identical to SEQ ID NO: 7542
  misc_feature 1..30: note = Probe
  source 1..30: mol_type = other DNA

SEQ ID NO: 41570 - DNA, 31 bp, synthetic construct; identical to SEQ ID NO: 7543
  misc_feature 1..31: note = Probe
  source 1..31: mol_type = other DNA

SEQ ID NO: 41571 - DNA, 41 bp, synthetic construct; identical to SEQ ID NO: 7552
  misc_feature 1..41: note = Probe
  source 1..41: mol_type = other DNA

SEQ ID NO: 41572 - DNA, 45 bp, synthetic construct
  misc_feature 1..45: note = Probe
  source 1..45: mol_type = other DNA
tagattgaagccagttgattagggtgcttagctgttaactaagtg

SEQ ID NO: 41573 - DNA, 36 bp, synthetic construct; identical to SEQ ID NO: 1584
  misc_feature 1..36: note = Probe
  source 1..36: mol_type = other DNA

SEQ ID NO: 41574 - DNA, 37 bp, synthetic construct; identical to SEQ ID NO: 7559
  misc_feature 1..37: note = Probe
  source 1..37: mol_type = other DNA

SEQ ID NO: 41575 - DNA, 22 bp, synthetic construct
  misc_feature 1..22: note = Probe
  source 1..22: mol_type = other DNA
tagccccaaacccactccacct

SEQ ID NO: 41576 - DNA, 18 bp, synthetic construct
  misc_feature 1..18: note = Probe
  source 1..18: mol_type = other DNA
tagcggttaggattcctg

SEQ ID NO: 41577 - DNA, 18 bp, synthetic construct
  misc_feature 1..18: note = Probe
  source 1..18: mol_type = other DNA
tagcggttatcacattcg

SEQ ID NO: 41578 - DNA, 18 bp, synthetic construct
  misc_feature 1..18: note = Probe
  source 1..18: mol_type = other DNA
tagcggttatcacgtctg

SEQ ID NO: 41579 - DNA, 23 bp, synthetic construct
  misc_feature 1..23: note = Probe
  source 1..23: mol_type = other DNA
tagctcagtcggtagagcatgag

SEQ ID NO: 41580 - DNA, 24 bp, synthetic construct
  misc_feature 1..24: note = Probe
  source 1..24: mol_type = other DNA
tagctcagtcggtagagcatgaga

SEQ ID NO: 41581 - DNA, 17 bp, synthetic construct
  misc_feature 1..17: note = Probe
  source 1..17: mol_type = other DNA
tagctcagttgggagag

SEQ ID NO: 41582 - DNA, 50 bp, synthetic construct; identical to SEQ ID NO: 7568
  misc_feature 1..50: note = Probe
  source 1..50: mol_type = other DNA

SEQ ID NO: 41583 - DNA, 34 bp, synthetic construct; identical to SEQ ID NO: 7578
  misc_feature 1..34: note = Probe
  source 1..34: mol_type = other DNA

SEQ ID NO: 41584 - DNA, 35 bp, synthetic construct; identical to SEQ ID NO: 7579
  misc_feature 1..35: note = Probe
  source 1..35: mol_type = other DNA

SEQ ID NO: 41585 - DNA, 22 bp, synthetic construct
  misc_feature 1..22: note = Probe
  source 1..22: mol_type = other DNA
taggatgcgagaggtcccgggt

SEQ ID NO: 41586 - DNA, 31 bp, synthetic construct; identical to SEQ ID NO: 7585
  misc_feature 1..31: note = Probe
  source 1..31: mol_type = other DNA

SEQ ID NO: 41587 - DNA, 32 bp, synthetic construct; identical to SEQ ID NO: 1593
  misc_feature 1..32: note = Probe
  source 1..32: mol_type = other DNA

SEQ ID NO: 41588 - DNA, 33 bp, synthetic construct; identical to SEQ ID NO: 1594
  misc_feature 1..33: note = Probe
  source 1..33: mol_type = other DNA

SEQ ID NO: 41589 - DNA, 34 bp, synthetic construct; identical to SEQ ID NO: 7586
  misc_feature 1..34: note = Probe
  source 1..34: mol_type = other DNA

SEQ ID NO: 41590 - DNA, 35 bp, synthetic construct; identical to SEQ ID NO: 7587
  misc_feature 1..35: note = Probe
  source 1..35: mol_type = other DNA

SEQ ID NO: 41591 - DNA, 36 bp, synthetic construct; identical to SEQ ID NO: 1595
  misc_feature 1..36: note = Probe
  source 1..36: mol_type = other DNA

SEQ ID NO: 41592 - DNA, 37 bp, synthetic construct; identical to SEQ ID NO: 7588
  misc_feature 1..37: note = Probe
  source 1..37: mol_type = other DNA

SEQ ID NO: 41593 - DNA, 38 bp, synthetic construct; identical to SEQ ID NO: 23494
  misc_feature 1..38: note = Probe
  source 1..38: mol_type = other DNA

SEQ ID NO: 41594 - DNA, 18 bp, synthetic construct
  misc_feature 1..18: note = Probe
  source 1..18: mol_type = other DNA
taggggtatgattctcgc

SEQ ID NO: 41595 - DNA, 18 bp, synthetic construct
  misc_feature 1..18: note = Probe
  source 1..18: mol_type = other DNA
taggggtatgattctcgg

SEQ ID NO: 41596 - DNA, 50 bp, synthetic construct; identical to SEQ ID NO: 1596
  misc_feature 1..50: note = Probe
  source 1..50: mol_type = other DNA

SEQ ID NO: 41597 - DNA, 29 bp, synthetic construct
  misc_feature 1..29: note = Probe
  source 1..29: mol_type = other DNA
taggtcgctggttcgattccggctcgaag

SEQ ID NO: 41598 - DNA, 30 bp, synthetic construct; identical to SEQ ID NO: 11715
  misc_feature 1..30: note = Probe
  source 1..30: mol_type = other DNA

SEQ ID NO: 41599 - DNA, 50 bp, synthetic construct
  misc_feature 1..50: note = Probe
  source 1..50: mol_type = other DNA
taggtcgctggttcgattccggctcgaaggacttcgtctgtaatttttaa

SEQ ID NO: 41600 - DNA, 22 bp, synthetic construct
  misc_feature 1..22: note = Probe
  source 1..22: mol_type = other DNA
tagtaaacaggagatcctgggt

SEQ ID NO: 41601 - DNA, 22 bp, synthetic construct
  misc_feature 1..22: note = Probe
  source 1..22: mol_type = other DNA
tagtatagtggtgagtatcccc

SEQ ID NO: 41602 - DNA, 23 bp, synthetic construct
  misc_feature 1..23: note = Probe
  source 1..23: mol_type = other DNA
tagtatagtggtgagtatccccg

SEQ ID NO: 41603 - DNA, 20 bp, synthetic construct
  misc_feature 1..20: note = Probe
  source 1..20: mol_type = other DNA
tagtccgtgcgagaataatg

SEQ ID NO: 41604 - DNA, 23 bp, synthetic construct
  misc_feature 1..23: note = Probe
  source 1..23: mol_type = other DNA
tagtctaggctgtcagctcttcc

SEQ ID NO: 41605 - DNA, 37 bp, synthetic construct; identical to SEQ ID NO: 14202
  misc_feature 1..37: note = Probe
  source 1..37: mol_type = other DNA

SEQ ID NO: 41606 - DNA, 18 bp, synthetic construct
  misc_feature 1..18: note = Probe
  source 1..18: mol_type = other DNA
tagtggtaagcatagctg

SEQ ID NO: 41607 - DNA, 21 bp, synthetic construct
  misc_feature 1..21: note = Probe
  source 1..21: mol_type = other DNA
tagtggtagaattctcgcctc

SEQ ID NO: 41608 - DNA, 50 bp, synthetic construct
  misc_feature 1..50: note = Probe
  source 1..50: mol_type = other DNA
tagtggtatcatgcaagattcccattcttgcgacccgggttcgattcccg

SEQ ID NO: 41609 - DNA, 37 bp, synthetic construct; identical to SEQ ID NO: 14204
  misc_feature 1..37: note = Probe
  source 1..37: mol_type = other DNA

SEQ ID NO: 41610 - DNA, 42 bp, synthetic construct
  misc_feature 1..42: note = Probe
  source 1..42: mol_type = other DNA
tagtggtcatcacgttcgcctaacacgcgaaaggtccccggt

SEQ ID NO: 41611 - DNA, 18 bp, synthetic construct
  misc_feature 1..18: note = Probe
  source 1..18: mol_type = other DNA
tagtggtgagcatagctg

SEQ ID NO: 41612 - DNA, 23 bp, synthetic construct
  misc_feature 1..23: note = Probe
  source 1..23: mol_type = other DNA
tagtggtgagcatagctgccttc

SEQ ID NO: 41613 - DNA, 39 bp, synthetic construct
  misc_feature 1..39: note = Probe
  source 1..39: mol_type = other DNA
tagtggtgagcatagctgccttccaagcagttgacccgg

SEQ ID NO: 41614 - DNA, 18 bp, synthetic construct
  misc_feature 1..18: note = Probe
  source 1..18: mol_type = other DNA
tagtggtgagtatccccg

SEQ ID NO: 41615 - DNA, 23 bp, synthetic construct
  misc_feature 1..23: note = Probe
  source 1..23: mol_type = other DNA
tagtggtgagtatccccgcctgt

SEQ ID NO: 41616 - DNA, 24 bp, synthetic construct
  misc_feature 1..24: note = Probe
  source 1..24: mol_type = other DNA
tagtggtgagtatccccgcctgtc

SEQ ID NO: 41617 - DNA, 25 bp, synthetic construct
  misc_feature 1..25: note = Probe
  source 1..25: mol_type = other DNA
tagtggtgagtatccccgcctgtca

SEQ ID NO: 41618 - DNA, 38 bp, synthetic construct; identical to SEQ ID NO: 14213
  misc_feature 1..38: note = Probe
  source 1..38: mol_type = other DNA

SEQ ID NO: 41619 - DNA, 18 bp, synthetic construct
  misc_feature 1..18: note = Probe
  source 1..18: mol_type = other DNA
tagtggttagcatagctg

SEQ ID NO: 41620 - DNA, 34 bp, synthetic construct
  misc_feature 1..34: note = Probe
  source 1..34: mol_type = other DNA
tagtggttaggattcggcgctctcaccgccgcgg

SEQ ID NO: 41621 - DNA, 50 bp, synthetic construct
  misc_feature 1..50: note = Probe
  source 1..50: mol_type = other DNA
tagtggttaggattcggcgctctcaccgccgcggcccgggttcgattccc

SEQ ID NO: 41622 - DNA, 18 bp, synthetic construct
  misc_feature 1..18: note = Probe
  source 1..18: mol_type = other DNA
tagtggttatcacatctg

SEQ ID NO: 41623 - DNA, 19 bp, synthetic construct
  misc_feature 1..19: note = Probe
  source 1..19: mol_type = other DNA
tagtggttatcacgtctgc

SEQ ID NO: 41624 - DNA, 18 bp, synthetic construct
  misc_feature 1..18: note = Probe
  source 1..18: mol_type = other DNA
tagtggttatcacgttcg

SEQ ID NO: 41625 - DNA, 19 bp, synthetic construct
  misc_feature 1..19: note = Probe
  source 1..19: mol_type = other DNA
tagtggttatcacgttcgc

SEQ ID NO: 41626 - DNA, 42 bp, synthetic construct; identical to SEQ ID NO: 23563
  misc_feature 1..42: note = Probe
  source 1..42: mol_type = other DNA

SEQ ID NO: 41627 - DNA, 25 bp, synthetic construct
  misc_feature 1..25: note = Probe
  source 1..25: mol_type = other DNA
tagtggttatcacgttcgcctcaca

SEQ ID NO: 41628 - DNA, 29 bp, synthetic construct
  misc_feature 1..29: note = Probe
  source 1..29: mol_type = other DNA
tagtggttatcacgttcgcctcacacgcg

SEQ ID NO: 41629 - DNA, 50 bp, synthetic construct
  misc_feature 1..50: note = Probe
  source 1..50: mol_type = other DNA
tagtggttatcacgttcgcctcacacgcgaaaggtccccggttcgaaacc

SEQ ID NO: 41630 - DNA, 18 bp, synthetic construct
  misc_feature 1..18: note = Probe
  source 1..18: mol_type = other DNA
tagtggttatcatgttcg

SEQ ID NO: 41631 - DNA, 23 bp, synthetic construct
  misc_feature 1..23: note = Probe
  source 1..23: mol_type = other DNA
tagtggttatcatgttcgcctca

SEQ ID NO: 41632 - DNA, 22 bp, synthetic construct
  misc_feature 1..22: note = Probe
  source 1..22: mol_type = other DNA
tagtgtagtggttatcacgttc

SEQ ID NO: 41633 - DNA, 24 bp, synthetic construct
  misc_feature 1..24: note = Probe
  source 1..24: mol_type = other DNA
tagtgtagtggttatcacgttcgc

SEQ ID NO: 41634 - DNA, 17 bp, synthetic construct
  misc_feature 1..17: note = Probe
  source 1..17: mol_type = other DNA
tatacccacacccaccc

SEQ ID NO: 41635 - DNA, 18 bp, synthetic construct
  misc_feature 1..18: note = Probe
  source 1..18: mol_type = other DNA
tatacccacacccaccca

SEQ ID NO: 41636 - DNA, 20 bp, synthetic construct
  misc_feature 1..20: note = Probe
  source 1..20: mol_type = other DNA
tatacccacacccacccaag

SEQ ID NO: 41637 - DNA, 21 bp, synthetic construct
  misc_feature 1..21: note = Probe
  source 1..21: mol_type = other DNA
tatacccacacccacccaaga

SEQ ID NO: 41638 - DNA, 22 bp, synthetic construct
  misc_feature 1..22: note = Probe
  source 1..22: mol_type = other DNA
tatacccacacccacccaagaa

SEQ ID NO: 41639 - DNA, 24 bp, synthetic construct
  misc_feature 1..24: note = Probe
  source 1..24: mol_type = other DNA
tatacccacacccacccaagaaca

SEQ ID NO: 41640 - DNA, 29 bp, synthetic construct
  misc_feature 1..29: note = Probe
  source 1..29: mol_type = other DNA
tatacccacacccacccaagaacagggtt

SEQ ID NO: 41641 - DNA, 30 bp, synthetic construct; identical to SEQ ID NO: 7623
  misc_feature 1..30: note = Probe
  source 1..30: mol_type = other DNA

SEQ ID NO: 41642 - DNA, 31 bp, synthetic construct; identical to SEQ ID NO: 7624
  misc_feature 1..31: note = Probe
  source 1..31: mol_type = other DNA

SEQ ID NO: 41643 - DNA, 32 bp, synthetic construct; identical to SEQ ID NO: 7625
  misc_feature 1..32: note = Probe
  source 1..32: mol_type = other DNA

SEQ ID NO: 41644 - DNA, 33 bp, synthetic construct; identical to SEQ ID NO: 7626
  misc_feature 1..33: note = Probe
  source 1..33: mol_type = other DNA

SEQ ID NO: 41645 - DNA, 34 bp, synthetic construct; identical to SEQ ID NO: 7627
  misc_feature 1..34: note = Probe
  source 1..34: mol_type = other DNA

SEQ ID NO: 41646 - DNA, 35 bp, synthetic construct; identical to SEQ ID NO: 7628
  misc_feature 1..35: note = Probe
  source 1..35: mol_type = other DNA

SEQ ID NO: 41647 - DNA, 36 bp, synthetic construct; identical to SEQ ID NO: 7629
  misc_feature 1..36: note = Probe
  source 1..36: mol_type = other DNA

SEQ ID NO: 41648 - DNA, 37 bp, synthetic construct; identical to SEQ ID NO: 7630
  misc_feature 1..37: note = Probe
  source 1..37: mol_type = other DNA

SEQ ID NO: 41649 - DNA, 38 bp, synthetic construct; identical to SEQ ID NO: 23596
  misc_feature 1..38: note = Probe
  source 1..38: mol_type = other DNA

SEQ ID NO: 41650 - DNA, 39 bp, synthetic construct; identical to SEQ ID NO: 7631
  misc_feature 1..39: note = Probe
  source 1..39: mol_type = other DNA

SEQ ID NO: 41651 - DNA, 20 bp, synthetic construct
  misc_feature 1..20: note = Probe
  source 1..20: mol_type = other DNA
tatagtggtaagcatagctg

SEQ ID NO: 41652 - DNA, 20 bp, synthetic construct
  misc_feature 1..20: note = Probe
  source 1..20: mol_type = other DNA
tatagtggtgagcatagctg

SEQ ID NO: 41653 - DNA, 19 bp, synthetic construct
  misc_feature 1..19: note = Probe
  source 1..19: mol_type = other DNA
tatagtggtgagtatcccc

SEQ ID NO: 41654 - DNA, 20 bp, synthetic construct
  misc_feature 1..20: note = Probe
  source 1..20: mol_type = other DNA
tatagtggtgagtatccccg

SEQ ID NO: 41655 - DNA, 21 bp, synthetic construct
  misc_feature 1..21: note = Probe
  source 1..21: mol_type = other DNA
tatagtggtgagtgtccccgt

SEQ ID NO: 41656 - DNA, 19 bp, synthetic construct
  misc_feature 1..19: note = Probe
  source 1..19: mol_type = other DNA
tatagtggttagtactctg

SEQ ID NO: 41657 - DNA, 21 bp, synthetic construct
  misc_feature 1..21: note = Probe
  source 1..21: mol_type = other DNA
tatagtggttagtactctgcg

SEQ ID NO: 41658 - DNA, 27 bp, synthetic construct
  misc_feature 1..27: note = Probe
  source 1..27: mol_type = other DNA
tatcattggtcgtggttgtagtccgtg

SEQ ID NO: 41659 - DNA, 31 bp, synthetic construct; identical to SEQ ID NO: 23604
  misc_feature 1..31: note = Probe
  source 1..31: mol_type = other DNA

SEQ ID NO: 41660 - DNA, 50 bp, synthetic construct
  misc_feature 1..50: note = Probe
  source 1..50: mol_type = other DNA
tatccccgcctgtcacgcgggagaccggggttcgattccccgacggggag

SEQ ID NO: 41661 - DNA, 34 bp, synthetic construct
  misc_feature 1..34: note = Probe
  source 1..34: mol_type = other DNA
tatgaggccccgggttcaatccccggcatctcca

SEQ ID NO: 41662 - DNA, 37 bp, synthetic construct; identical to SEQ ID NO: 23608
  misc_feature 1..37: note = Probe
  source 1..37: mol_type = other DNA

SEQ ID NO: 41663 - DNA, 34 bp, synthetic construct
  misc_feature 1..34: note = Probe
  source 1..34: mol_type = other DNA
tatgaggccccgggttcgatccccggcatctcca

SEQ ID NO: 41664 - DNA, 37 bp, synthetic construct; identical to SEQ ID NO: 23610
  misc_feature 1..37: note = Probe
  source 1..37: mol_type = other DNA

SEQ ID NO: 41665 - DNA, 34 bp, synthetic construct
  misc_feature 1..34: note = Probe
  source 1..34: mol_type = other DNA
tatgaggtcccgggttcgatccccggcatctcca

SEQ ID NO: 41666 - DNA, 37 bp, synthetic construct
  misc_feature 1..37: note = Probe
  source 1..37: mol_type = other DNA
tatgaggtcccgggttcgatccccggcatctccaagt

SEQ ID NO: 41667 - DNA, 24 bp, synthetic construct
  misc_feature 1..24: note = Probe
  source 1..24: mol_type = other DNA
tatggtctagcggttaggattcct

SEQ ID NO: 41668 - DNA, 27 bp, synthetic construct
  misc_feature 1..27: note = Probe
  source 1..27: mol_type = other DNA
tcaaactttaaatgggcaagaagccca

SEQ ID NO: 41669 - DNA, 28 bp, synthetic construct
  misc_feature 1..28: note = Probe
  source 1..28: mol_type = other DNA
tcaaactttaaatgggcaagaagcccag

SEQ ID NO: 41670 - DNA, 29 bp, synthetic construct
  misc_feature 1..29: note = Probe
  source 1..29: mol_type = other DNA
tcaaactttaaatgggcaagaagcccagc

SEQ ID NO: 41671 - DNA, 30 bp, synthetic construct
  misc_feature 1..30: note = Probe
  source 1..30: mol_type = other DNA
tcaaactttaaatgggcaagaagcccagct

SEQ ID NO: 41672 - DNA, 32 bp, synthetic construct; identical to SEQ ID NO: 7643
  misc_feature 1..32: note = Probe
  source 1..32: mol_type = other DNA

SEQ ID NO: 41673 - DNA, 35 bp, synthetic construct; identical to SEQ ID NO: 23625
  misc_feature 1..35: note = Probe
  source 1..35: mol_type = other DNA

SEQ ID NO: 41674 - DNA, 22 bp, synthetic construct
  misc_feature 1..22: note = Probe
  source 1..22: mol_type = other DNA
tcaaatcccggacgagccccct

SEQ ID NO: 41675 - DNA, 22 bp, synthetic construct
  misc_feature 1..22: note = Probe
  source 1..22: mol_type = other DNA
tcaaatccgggtgccccctcaa

SEQ ID NO: 41676 - DNA, 26 bp, synthetic construct
  misc_feature 1..26: note = Probe
  source 1..26: mol_type = other DNA
tcaacttaacttgaccgctctgagct

SEQ ID NO: 41677 - DNA, 45 bp, synthetic construct
  misc_feature 1..45: note = Probe
  source 1..45: mol_type = other DNA
tcaagcagttaacgcgggttcgattcccgggtaacgaaacgtttt

SEQ ID NO: 41678 - DNA, 22 bp, synthetic construct
  misc_feature 1..22: note = Probe
  source 1..22: mol_type = other DNA
tcaagtccctgttcgggcggca

SEQ ID NO: 41679 - DNA, 24 bp, synthetic construct
  misc_feature 1..24: note = Probe
  source 1..24: mol_type = other DNA
tcaatccccaatacctccaggttt

SEQ ID NO: 41680 - DNA, 25 bp, synthetic construct
  misc_feature 1..25: note = Probe
  source 1..25: mol_type = other DNA
tcaatccccaatacctccaggtttt

SEQ ID NO: 41681 - DNA, 22 bp, synthetic construct
  misc_feature 1..22: note = Probe
  source 1..22: mol_type = other DNA
tcaatccccagcacctccacaa

SEQ ID NO: 41682 - DNA, 29 bp, synthetic construct
  misc_feature 1..29: note = Probe
  source 1..29: mol_type = other DNA
tcaatccccggcacctccagcttcatttt

SEQ ID NO: 41683 - DNA, 26 bp, synthetic construct
  misc_feature 1..26: note = Probe
  source 1..26: mol_type = other DNA
tcaatccccggcacctccattccttt

SEQ ID NO: 41684 - DNA, 22 bp, synthetic construct
  misc_feature 1..22: note = Probe
  source 1..22: mol_type = other DNA
tcaattccccgacggggaggtg

SEQ ID NO: 41685 - DNA, 22 bp, synthetic construct
  misc_feature 1..22: note = Probe
  source 1..22: mol_type = other DNA
tcaattcccggtcagggaacca

SEQ ID NO: 41686 - DNA, 22 bp, synthetic construct
  misc_feature 1..22: note = Probe
  source 1..22: mol_type = other DNA
tcacaagaactgctaactcatg

SEQ ID NO: 41687 - DNA, 49 bp, synthetic construct; identical to SEQ ID NO: 1609
  misc_feature 1..49: note = Probe
  source 1..49: mol_type = other DNA

SEQ ID NO: 41688 - DNA, 38 bp, synthetic construct
  misc_feature 1..38: note = Probe
  source 1..38: mol_type = other DNA
tcacacgcgaaaggtccccggttcgaaaccgggcggaa

SEQ ID NO: 41689 - DNA, 38 bp, synthetic construct
  misc_feature 1..38: note = Probe
  source 1..38: mol_type = other DNA
tcacacgcgaaaggtccccggttcgatcccgggcggaa

SEQ ID NO: 41690 - DNA, 21 bp, synthetic construct
  misc_feature 1..21: note = Probe
  source 1..21: mol_type = other DNA
tcacacggggcacaataattt

SEQ ID NO: 41691 - DNA, 18 bp, synthetic construct
  misc_feature 1..18: note = Probe
  source 1..18: mol_type = other DNA
tcacatcaccccataaac

SEQ ID NO: 41692 - DNA, 19 bp, synthetic construct
  misc_feature 1..19: note = Probe
  source 1..19: mol_type = other DNA
tcacatcaccccataaaca

SEQ ID NO: 41693 - DNA, 22 bp, synthetic construct
  misc_feature 1..22: note = Probe
  source 1..22: mol_type = other DNA
tcacatcaccccataaacaaat

SEQ ID NO: 41694 - DNA, 35 bp, synthetic construct
  misc_feature 1..35: note = Probe
  source 1..35: mol_type = other DNA
tcacccaggcggcccgggttcgactcccggtgtgg

SEQ ID NO: 41695 - DNA, 36 bp, synthetic construct; identical to SEQ ID NO: 34263
  misc_feature 1..36: note = Probe
  source 1..36: mol_type = other DNA

SEQ ID NO: 41696 - DNA, 37 bp, synthetic construct
  misc_feature 1..37: note = Probe
  source 1..37: mol_type = other DNA
tcacccaggcggcccgggttcgactcccggtgtggga

SEQ ID NO: 41697 - DNA, 38 bp, synthetic construct
  misc_feature 1..38: note = Probe
  source 1..38: mol_type = other DNA
tcacccaggcggcccgggttcgactcccggtgtgggaa

SEQ ID NO: 41698 - DNA, 41 bp, synthetic construct; identical to SEQ ID NO: 7674
  misc_feature 1..41: note = Probe
  source 1..41: mol_type = other DNA

SEQ ID NO: 41699 - DNA, 37 bp, synthetic construct
  misc_feature 1..37: note = Probe
  source 1..37: mol_type = other DNA
tcacccaggtggcccgggttcgactcccggtatggga

SEQ ID NO: 41700 - DNA, 41 bp, synthetic construct; identical to SEQ ID NO: 7677
  misc_feature 1..41: note = Probe
  source 1..41: mol_type = other DNA

SEQ ID NO: 41701 - DNA, 36 bp, synthetic construct; identical to SEQ ID NO: 25709
  misc_feature 1..36: note = Probe
  source 1..36: mol_type = other DNA

SEQ ID NO: 41702 - DNA, 41 bp, synthetic construct; identical to SEQ ID NO: 7682
  misc_feature 1..41: note = Probe
  source 1..41: mol_type = other DNA

SEQ ID NO: 41703 - DNA, 21 bp, synthetic construct
  misc_feature 1..21: note = Probe
  source 1..21: mol_type = other DNA
tcacctggagcaagacccttt

SEQ ID NO: 41704 - DNA, 31 bp, synthetic construct
  misc_feature 1..31: note = Probe
  source 1..31: mol_type = other DNA
tcacgcgggagaccggggttcaattccccga

SEQ ID NO: 41705 - DNA, 41 bp, synthetic construct; identical to SEQ ID NO: 7691
  misc_feature 1..41: note = Probe
  source 1..41: mol_type = other DNA

SEQ ID NO: 41706 - DNA, 30 bp, synthetic construct
  misc_feature 1..30: note = Probe
  source 1..30: mol_type = other DNA
tcacgcgggagaccggggttcgattcccca

SEQ ID NO: 41707 - DNA, 31 bp, synthetic construct
  misc_feature 1..31: note = Probe
  source 1..31: mol_type = other DNA
tcacgcgggagaccggggttcgattccccaa

SEQ ID NO: 41708 - DNA, 36 bp, synthetic construct
  misc_feature 1..36: note = Probe
  source 1..36: mol_type = other DNA
tcacgcgggagaccggggttcgattccccaacgggg

SEQ ID NO: 41709 - DNA, 30 bp, synthetic construct; identical to SEQ ID NO: 34283
  misc_feature 1..30: note = Probe
  source 1..30: mol_type = other DNA

SEQ ID NO: 41710 - DNA, 31 bp, synthetic construct; identical to SEQ ID NO: 7697
  misc_feature 1..31: note = Probe
  source 1..31: mol_type = other DNA

SEQ ID NO: 41711 - DNA, 33 bp, synthetic construct; identical to SEQ ID NO: 1619
  misc_feature 1..33: note = Probe
  source 1..33: mol_type = other DNA

SEQ ID NO: 41712 - DNA, 41 bp, synthetic construct; identical to SEQ ID NO: 7701
  misc_feature 1..41: note = Probe
  source 1..41: mol_type = other DNA

SEQ ID NO: 41713 - DNA, 49 bp, synthetic construct; identical to SEQ ID NO: 7704
  misc_feature 1..49: note = Probe
  source 1..49: mol_type = other DNA

SEQ ID NO: 41714 - DNA, 50 bp, synthetic construct; identical to SEQ ID NO: 7705
  misc_feature 1..50: note = Probe
  source 1..50: mol_type = other DNA

SEQ ID NO: 41715 - DNA, 41 bp, synthetic construct; identical to SEQ ID NO: 7707
  misc_feature 1..41: note = Probe
  source 1..41: mol_type = other DNA

SEQ ID NO: 41716 - DNA, 41 bp, synthetic construct; identical to SEQ ID NO: 7709
  misc_feature 1..41: note = Probe
  source 1..41: mol_type = other DNA

SEQ ID NO: 41717 - DNA, 50 bp, synthetic construct
  misc_feature 1..50: note = Probe
  source 1..50: mol_type = other DNA
tcacgcgggagaccggggttcgattccccgacggggagagtactagcagt

SEQ ID NO: 41718 - DNA, 50 bp, synthetic construct
  misc_feature 1..50: note = Probe
  source 1..50: mol_type = other DNA
tcacgcgggagaccggggttcgattccccgacggggaggaggcttaaact

SEQ ID NO: 41719 - DNA, 41 bp, synthetic construct; identical to SEQ ID NO: 7716
  misc_feature 1..41: note = Probe
  source 1..41: mol_type = other DNA

SEQ ID NO: 41720 - DNA, 50 bp, synthetic construct; identical to SEQ ID NO: 7720
  misc_feature 1..50: note = Probe
  source 1..50: mol_type = other DNA

SEQ ID NO: 41721 - DNA, 50 bp, synthetic construct
  misc_feature 1..50: note = Probe
  source 1..50: mol_type = other DNA
tcacgcgggagaccggggttcgattccccgacggggaggcagccgtgctt

SEQ ID NO: 41722 - DNA, 41 bp, synthetic construct; identical to SEQ ID NO: 7723
  misc_feature 1..41: note = Probe
  source 1..41: mol_type = other DNA

SEQ ID NO: 41723 - DNA, 49 bp, synthetic construct
  misc_feature 1..49: note = Probe
  source 1..49: mol_type = other DNA
tcacgcgggagaccggggttcgattccccgacggggaggccaagtacgt

SEQ ID NO: 41724 - DNA, 50 bp, synthetic construct
  misc_feature 1..50: note = Probe
  source 1..50: mol_type = other DNA
tcacgcgggagaccggggttcgattccccgacggggaggccaagtacgtt

SEQ ID NO: 41725 - DNA, 50 bp, synthetic construct
  misc_feature 1..50: note = Probe
  source 1..50: mol_type = other DNA
tcacgcgggagaccggggttcgattccccgacggggaggccgggtacttt

SEQ ID NO: 41726 - DNA, 18 bp, synthetic construct
  misc_feature 1..18: note = Probe
  source 1..18: mol_type = other DNA
tcagaagattctaggttc

SEQ ID NO: 41727 - DNA, 31 bp, synthetic construct
  misc_feature 1..31: note = Probe
  source 1..31: mol_type = other DNA
tcagaagattgagggttcgagtcccttcgtg

SEQ ID NO: 41728 - DNA, 33 bp, synthetic construct; identical to SEQ ID NO: 23699
  misc_feature 1..33: note = Probe
  source 1..33: mol_type = other DNA

SEQ ID NO: 41729 - DNA, 35 bp, synthetic construct
  misc_feature 1..35: note = Probe
  source 1..35: mol_type = other DNA
tcagaagattgagggttcgagtcccttcgtggtcg

SEQ ID NO: 41730 - DNA, 34 bp, synthetic construct
  misc_feature 1..34: note = Probe
  source 1..34: mol_type = other DNA
tcagaaggttgcgtgttcaagtcacgtcggggtc

SEQ ID NO: 41731 - DNA, 18 bp, synthetic construct
  misc_feature 1..18: note = Probe
  source 1..18: mol_type = other DNA
tcagctatagggtggaga

SEQ ID NO: 41732 - DNA, 30 bp, synthetic construct
  misc_feature 1..30: note = Probe
  source 1..30: mol_type = other DNA
tcagggatgggttcgattctcatagtccta

SEQ ID NO: 41733 - DNA, 17 bp, synthetic construct
  misc_feature 1..17: note = Probe
  source 1..17: mol_type = other DNA
tcagtggtagaattctc

SEQ ID NO: 41734 - DNA, 18 bp, synthetic construct
  misc_feature 1..18: note = Probe
  source 1..18: mol_type = other DNA
tcagtggtagaattctcg

SEQ ID NO: 41735 - DNA, 21 bp, synthetic construct
  misc_feature 1..21: note = Probe
  source 1..21: mol_type = other DNA
tcataatctgaaggtcctgag

SEQ ID NO: 41736 - DNA, 21 bp, synthetic construct
  misc_feature 1..21: note = Probe
  source 1..21: mol_type = other DNA
tcataatctgaaggtcgtgag

SEQ ID NO: 41737 - DNA, 50 bp, synthetic construct; identical to SEQ ID NO: 7753
  misc_feature 1..50: note = Probe
  source 1..50: mol_type = other DNA

SEQ ID NO: 41738 - DNA, 30 bp, synthetic construct; identical to SEQ ID NO: 7761
  misc_feature 1..30: note = Probe
  source 1..30: mol_type = other DNA

SEQ ID NO: 41739 - DNA, 31 bp, synthetic construct; identical to SEQ ID NO: 7762
  misc_feature 1..31: note = Probe
  source 1..31: mol_type = other DNA

SEQ ID NO: 41740 - DNA, 32 bp, synthetic construct; identical to SEQ ID NO: 7763
  misc_feature 1..32: note = Probe
  source 1..32: mol_type = other DNA

SEQ ID NO: 41741 - DNA, 33 bp, synthetic construct; identical to SEQ ID NO: 7764
  misc_feature 1..33: note = Probe
  source 1..33: mol_type = other DNA

SEQ ID NO: 41742 - DNA, 34 bp, synthetic construct; identical to SEQ ID NO: 7765
  misc_feature 1..34: note = Probe
  source 1..34: mol_type = other DNA

SEQ ID NO: 41743 - DNA, 35 bp, synthetic construct; identical to SEQ ID NO: 7766
  misc_feature 1..35: note = Probe
  source 1..35: mol_type = other DNA

SEQ ID NO: 41744 - DNA, 36 bp, synthetic construct; identical to SEQ ID NO: 7767
  misc_feature 1..36: note = Probe
  source 1..36: mol_type = other DNA

SEQ ID NO: 41745 - DNA, 37 bp, synthetic construct; identical to SEQ ID NO: 7768
  misc_feature 1..37: note = Probe
  source 1..37: mol_type = other DNA

SEQ ID NO: 41746 - DNA, 37 bp, synthetic construct
  misc_feature 1..37: note = Probe
  source 1..37: mol_type = other DNA
tccaagcagttgacccgggttcgattcccggccaacg

SEQ ID NO: 41747 - DNA, 42 bp, synthetic construct; identical to SEQ ID NO: 23758
  misc_feature 1..42: note = Probe
  source 1..42: mol_type = other DNA

SEQ ID NO: 41748 - DNA, 34 bp, synthetic construct
  misc_feature 1..34: note = Probe
  source 1..34: mol_type = other DNA
tccaagtgatggtttccctctggcagttctcaag

SEQ ID NO: 41749 - DNA, 23 bp, synthetic construct
  misc_feature 1..23: note = Probe
  source 1..23: mol_type = other DNA
tccaatgggggttccccgcgcag

SEQ ID NO: 41750 - DNA, 25 bp, synthetic construct
  misc_feature 1..25: note = Probe
  source 1..25: mol_type = other DNA
tccaatgggggttccccgcgcaggt

SEQ ID NO: 41751 - DNA, 20 bp, synthetic construct
  misc_feature 1..20: note = Probe
  source 1..20: mol_type = other DNA
tccaatggggtctccccgcg

SEQ ID NO: 41752 - DNA, 22 bp, synthetic construct
  misc_feature 1..22: note = Probe
  source 1..22: mol_type = other DNA
tccaatggggtctccccgcgca

SEQ ID NO: 41753 - DNA, 23 bp, synthetic construct
  misc_feature 1..23: note = Probe
  source 1..23: mol_type = other DNA
tccaatggggtctccccgcgcag

SEQ ID NO: 41754 - DNA, 25 bp, synthetic construct
  misc_feature 1..25: note = Probe
  source 1..25: mol_type = other DNA
tccaatggggtctccccgcgcaggt

SEQ ID NO: 41755 - DNA, 24 bp, synthetic construct
  misc_feature 1..24: note = Probe
  source 1..24: mol_type = other DNA
tccaatggggtttccccgcacagg

SEQ ID NO: 41756 - DNA, 25 bp, synthetic construct
  misc_feature 1..25: note = Probe
  source 1..25: mol_type = other DNA
tccaatggggtttccccgcacaggt

SEQ ID NO: 41757 - DNA, 41 bp, synthetic construct; identical to SEQ ID NO: 7777
  misc_feature 1..41: note = Probe
  source 1..41: mol_type = other DNA

SEQ ID NO: 41758 - DNA, 32 bp, synthetic construct
  misc_feature 1..32: note = Probe
  source 1..32: mol_type = other DNA
tccagcaatccgagttcgaatctcggtgggac

SEQ ID NO: 41759 - DNA, 32 bp, synthetic construct; identical to SEQ ID NO: 7779
  misc_feature 1..32: note = Probe
  source 1..32: mol_type = other DNA

SEQ ID NO: 41760 - DNA, 33 bp, synthetic construct; identical to SEQ ID NO: 7780
  misc_feature 1..33: note = Probe
  source 1..33: mol_type = other DNA

SEQ ID NO: 41761 - DNA, 34 bp, synthetic construct; identical to SEQ ID NO: 1627
  misc_feature 1..34: note = Probe
  source 1..34: mol_type = other DNA

SEQ ID NO: 41762 - DNA, 37 bp, synthetic construct; identical to SEQ ID NO: 7781
  misc_feature 1..37: note = Probe
  source 1..37: mol_type = other DNA

SEQ ID NO: 41763 - DNA, 31 bp, synthetic construct; identical to SEQ ID NO: 23790
  misc_feature 1..31: note = Probe
  source 1..31: mol_type = other DNA

SEQ ID NO: 41764 - DNA, 34 bp, synthetic construct; identical to SEQ ID NO: 1628
  misc_feature 1..34: note = Probe
  source 1..34: mol_type = other DNA

SEQ ID NO: 41765 - DNA, 37 bp, synthetic construct; identical to SEQ ID NO: 7783
  misc_feature 1..37: note = Probe
  source 1..37: mol_type = other DNA

SEQ ID NO: 41766 - DNA, 24 bp, synthetic construct
  misc_feature 1..24: note = Probe
  source 1..24: mol_type = other DNA
tccagcgatccgagttcaagtctc

SEQ ID NO: 41767 - DNA, 32 bp, synthetic construct
  misc_feature 1..32: note = Probe
  source 1..32: mol_type = other DNA
tccagcgatccgagttcaagtctcggtggaac

SEQ ID NO: 41768 - DNA, 33 bp, synthetic construct
  misc_feature 1..33: note = Probe
  source 1..33: mol_type = other DNA
tccagcgatccgagttcaagtctcggtggaacc

SEQ ID NO: 41769 - DNA, 24 bp, synthetic construct
  misc_feature 1..24: note = Probe
  source 1..24: mol_type = other DNA
tccagtctcttcgggggcgtgggt

SEQ ID NO: 41770 - DNA, 27 bp, synthetic construct
  misc_feature 1..27: note = Probe
  source 1..27: mol_type = other DNA
tccatagtgtagtggttatcacgtctg

SEQ ID NO: 41771 - DNA, 28 bp, synthetic construct
  misc_feature 1..28: note = Probe
  source 1..28: mol_type = other DNA
tccatagtgtagtggttatcacgtctgc

SEQ ID NO: 41772 - DNA, 26 bp, synthetic construct
  misc_feature 1..26: note = Probe
  source 1..26: mol_type = other DNA
tccatggtgtaatggttagcactctg

SEQ ID NO: 41773 - DNA, 22 bp, synthetic construct
  misc_feature 1..22: note = Probe
  source 1..22: mol_type = other DNA
tccattggggtctccccgcgca

SEQ ID NO: 41774 - DNA, 23 bp, synthetic construct
  misc_feature 1..23: note = Probe
  source 1..23: mol_type = other DNA
tccattggggtctccccgcgcag

SEQ ID NO: 41775 - DNA, 24 bp, synthetic construct
  misc_feature 1..24: note = Probe
  source 1..24: mol_type = other DNA
tccattggggtctccccgcgcagg

SEQ ID NO: 41776 - DNA, 25 bp, synthetic construct
  misc_feature 1..25: note = Probe
  source 1..25: mol_type = other DNA
tccattggggtctccccgcgcaggt

SEQ ID NO: 41777 - DNA, 21 bp, synthetic construct
  misc_feature 1..21: note = Probe
  source 1..21: mol_type = other DNA
tccattggggtttccccgcgc

SEQ ID NO: 41778 - DNA, 22 bp, synthetic construct
  misc_feature 1..22: note = Probe
  source 1..22: mol_type = other DNA
tccattgtgctttgcacgcgtg

SEQ ID NO: 41779 - DNA, 37 bp, synthetic construct; identical to SEQ ID NO: 1650
  misc_feature 1..37: note = Probe
  source 1..37: mol_type = other DNA

SEQ ID NO: 41780 - DNA, 41 bp, synthetic construct; identical to SEQ ID NO: 7796
  misc_feature 1..41: note = Probe
  source 1..41: mol_type = other DNA

SEQ ID NO: 41781 - DNA, 45 bp, synthetic construct
  misc_feature 1..45: note = Probe
  source 1..45: mol_type = other DNA
tcccacatggtctagcggttaggattcctggttttcacccaggcg

SEQ ID NO: 41782 - DNA, 49 bp, synthetic construct; identical to SEQ ID NO: 7797
  misc_feature 1..49: note = Probe
  source 1..49: mol_type = other DNA

SEQ ID NO: 41783 - DNA, 32 bp, synthetic construct; identical to SEQ ID NO: 1661
  misc_feature 1..32: note = Probe
  source 1..32: mol_type = other DNA

SEQ ID NO: 41784 - DNA, 38 bp, synthetic construct
  misc_feature 1..38: note = Probe
  source 1..38: mol_type = other DNA
tcccatatggtctagcggttaggattcctggttttcac

SEQ ID NO: 41785 - DNA, 49 bp, synthetic construct; identical to SEQ ID NO: 23834
  misc_feature 1..49: note = Probe
  source 1..49: mol_type = other DNA

SEQ ID NO: 41786 - DNA, 50 bp, synthetic construct; identical to SEQ ID NO: 7809
  misc_feature 1..50: note = Probe
  source 1..50: mol_type = other DNA

SEQ ID NO: 41787 - DNA, 19 bp, synthetic construct
  misc_feature 1..19: note = Probe
  source 1..19: mol_type = other DNA
tccccggcacctccaccag

SEQ ID NO: 41788 - DNA, 20 bp, synthetic construct
  misc_feature 1..20: note = Probe
  source 1..20: mol_type = other DNA
tccccggcacctccaccagt

SEQ ID NO: 41789 - DNA, 28 bp, synthetic construct
  misc_feature 1..28: note = Probe
  source 1..28: mol_type = other DNA
tccccttggtctagtggttaggattcaa

SEQ ID NO: 41790 - DNA, 17 bp, synthetic construct
  misc_feature 1..17: note = Probe
  source 1..17: mol_type = other DNA
tcccgccttttttcccg

SEQ ID NO: 41791 - DNA, 18 bp, synthetic construct
  misc_feature 1..18: note = Probe
  source 1..18: mol_type = other DNA
tcccgccttttttcccgg

SEQ ID NO: 41792 - DNA, 23 bp, synthetic construct
  misc_feature 1..23: note = Probe
  source 1..23: mol_type = other DNA
tcccgccttttttcccggcggcg

SEQ ID NO: 41793 - DNA, 25 bp, synthetic construct
  misc_feature 1..25: note = Probe
  source 1..25: mol_type = other DNA
tcccgccttttttcccggcggcggg

SEQ ID NO: 41794 - DNA, 26 bp, synthetic construct
  misc_feature 1..26: note = Probe
  source 1..26: mol_type = other DNA
tcccgccttttttcccggcggcggga

SEQ ID NO: 41795 - DNA, 27 bp, synthetic construct
  misc_feature 1..27: note = Probe
  source 1..27: mol_type = other DNA
tcccgccttttttcccggcggcgggag

SEQ ID NO: 41796 - DNA, 28 bp, synthetic construct
  misc_feature 1..28: note = Probe
  source 1..28: mol_type = other DNA
tcccgccttttttcccggcggcgggaga

SEQ ID NO: 41797 - DNA, 31 bp, synthetic construct; identical to SEQ ID NO: 7830
  misc_feature 1..31: note = Probe
  source 1..31: mol_type = other DNA

SEQ ID NO: 41798 - DNA, 32 bp, synthetic construct; identical to SEQ ID NO: 7831
  misc_feature 1..32: note = Probe
  source 1..32: mol_type = other DNA

SEQ ID NO: 41799 - DNA, 33 bp, synthetic construct; identical to SEQ ID NO: 7832
  misc_feature 1..33: note = Probe
  source 1..33: mol_type = other DNA

SEQ ID NO: 41800 - DNA, 30 bp, synthetic construct; identical to SEQ ID NO: 7835
  misc_feature 1..30: note = Probe
  source 1..30: mol_type = other DNA

SEQ ID NO: 41801 - DNA, 30 bp, synthetic construct
  misc_feature 1..30: note = Probe
  source 1..30: mol_type = other DNA
tcccgggttcgatccccagcatctccagtg

SEQ ID NO: 41802 - DNA, 34 bp, synthetic construct
  misc_feature 1..34: note = Probe
  source 1..34: mol_type = other DNA
tcccgggttcgatccccagcatctccagtgtttt

SEQ ID NO: 41803 - DNA, 20 bp, synthetic construct
  misc_feature 1..20: note = Probe
  source 1..20: mol_type = other DNA
tccctctggcagttctcaag

SEQ ID NO: 41804 - DNA, 25 bp, synthetic construct
  misc_feature 1..25: note = Probe
  source 1..25: mol_type = other DNA
tccctggtctagtggttaggattta

SEQ ID NO: 41805 - DNA, 26 bp, synthetic construct
  misc_feature 1..26: note = Probe
  source 1..26: mol_type = other DNA
tccctggtctagtggttaggatttat

SEQ ID NO: 41806 - DNA, 28 bp, synthetic construct
  misc_feature 1..28: note = Probe
  source 1..28: mol_type = other DNA
tccctggtctagtggttaggatttatta

SEQ ID NO: 41807 - DNA, 28 bp, synthetic construct
  misc_feature 1..28: note = Probe
  source 1..28: mol_type = other DNA
tccctggtggtctaatggttaggagtcg

SEQ ID NO: 41808 - DNA, 29 bp, synthetic construct
  misc_feature 1..29: note = Probe
  source 1..29: mol_type = other DNA
tccctggtggtctaatggttaggagtcgg

SEQ ID NO: 41809 - DNA, 18 bp, synthetic construct
  misc_feature 1..18: note = Probe
  source 1..18: mol_type = other DNA
tccctggtggtctagtgg

SEQ ID NO: 41810 - DNA, 20 bp, synthetic construct
  misc_feature 1..20: note = Probe
  source 1..20: mol_type = other DNA
tccctggtggtctagtggct

SEQ ID NO: 41811 - DNA, 22 bp, synthetic construct
  misc_feature 1..22: note = Probe
  source 1..22: mol_type = other DNA
tccctggtggtctagtggctag

SEQ ID NO: 41812 - DNA, 23 bp, synthetic construct
  misc_feature 1..23: note = Probe
  source 1..23: mol_type = other DNA
tccctggtggtctagtggctagg

SEQ ID NO: 41813 - DNA, 24 bp, synthetic construct
  misc_feature 1..24: note = Probe
  source 1..24: mol_type = other DNA
tccctggtggtctagtggctagga

SEQ ID NO: 41814 - DNA, 25 bp, synthetic construct
  misc_feature 1..25: note = Probe
  source 1..25: mol_type = other DNA
tccctggtggtctagtggctaggat

SEQ ID NO: 41815 - DNA, 26 bp, synthetic construct
  misc_feature 1..26: note = Probe
  source 1..26: mol_type = other DNA
tccctggtggtctagtggctaggatt

SEQ ID NO: 41816 - DNA, 27 bp, synthetic construct
  misc_feature 1..27: note = Probe
  source 1..27: mol_type = other DNA
tccctggtggtctagtggctaggattc

SEQ ID NO: 41817 - DNA, 28 bp, synthetic construct
  misc_feature 1..28: note = Probe
  source 1..28: mol_type = other DNA
tccctggtggtctagtggctaggattcg

SEQ ID NO: 41818 - DNA, 29 bp, synthetic construct
  misc_feature 1..29: note = Probe
  source 1..29: mol_type = other DNA
tccctggtggtctagtggctaggattcgg

SEQ ID NO: 41819 - DNA, 30 bp, synthetic construct; identical to SEQ ID NO: 7856
  misc_feature 1..30: note = Probe
  source 1..30: mol_type = other DNA

SEQ ID NO: 41820 - DNA, 37 bp, synthetic construct; identical to SEQ ID NO: 1677
  misc_feature 1..37: note = Probe
  source 1..37: mol_type = other DNA

SEQ ID NO: 41821 - DNA, 38 bp, synthetic construct; identical to SEQ ID NO: 23913
  misc_feature 1..38: note = Probe
  source 1..38: mol_type = other DNA

SEQ ID NO: 41822 - DNA, 39 bp, synthetic construct; identical to SEQ ID NO: 7857
  misc_feature 1..39: note = Probe
  source 1..39: mol_type = other DNA

SEQ ID NO: 41823 - DNA, 44 bp, synthetic construct
  misc_feature 1..44: note = Probe
  source 1..44: mol_type = other DNA
tccctggtggtctagtggctaggattcggcgctttcaccgccgc

SEQ ID NO: 41824 - DNA, 45 bp, synthetic construct
  misc_feature 1..45: note = Probe
  source 1..45: mol_type = other DNA
tccctggtggtctagtggctaggattcggcgctttcaccgccgcg

SEQ ID NO: 41825 - DNA, 19 bp, synthetic construct
  misc_feature 1..19: note = Probe
  source 1..19: mol_type = other DNA
tccctggtggtctagtggt

SEQ ID NO: 41826 - DNA, 20 bp, synthetic construct
  misc_feature 1..20: note = Probe
  source 1..20: mol_type = other DNA
tccctggtggtctagtggtt

SEQ ID NO: 41827 - DNA, 21 bp, synthetic construct
  misc_feature 1..21: note = Probe
  source 1..21: mol_type = other DNA
tccctggtggtctagtggtta

SEQ ID NO: 41828 - DNA, 22 bp, synthetic construct
  misc_feature 1..22: note = Probe
  source 1..22: mol_type = other DNA
tccctggtggtctagtggttag

SEQ ID NO: 41829 - DNA, 23 bp, synthetic construct
  misc_feature 1..23: note = Probe
  source 1..23: mol_type = other DNA
tccctggtggtctagtggttagg

SEQ ID NO: 41830 - DNA, 24 bp, synthetic construct
  misc_feature 1..24: note = Probe
  source 1..24: mol_type = other DNA
tccctggtggtctagtggttagga

SEQ ID NO: 41831 - DNA, 25 bp, synthetic construct
  misc_feature 1..25: note = Probe
  source 1..25: mol_type = other DNA
tccctggtggtctagtggttaggat

SEQ ID NO: 41832 - DNA, 26 bp, synthetic construct
  misc_feature 1..26: note = Probe
  source 1..26: mol_type = other DNA
tccctggtggtctagtggttaggatt

SEQ ID NO: 41833 - DNA, 27 bp, synthetic construct
  misc_feature 1..27: note = Probe
  source 1..27: mol_type = other DNA
tccctggtggtctagtggttaggattc

SEQ ID NO: 41834 - DNA, 28 bp, synthetic construct
  misc_feature 1..28: note = Probe
  source 1..28: mol_type = other DNA
tccctggtggtctagtggttaggattcg

SEQ ID NO: 41835 - DNA, 29 bp, synthetic construct
  misc_feature 1..29: note = Probe
  source 1..29: mol_type = other DNA
tccctggtggtctagtggttaggattcgg

SEQ ID NO: 41836 - DNA, 30 bp, synthetic construct; identical to SEQ ID NO: 7870
  misc_feature 1..30: note = Probe
  source 1..30: mol_type = other DNA

SEQ ID NO: 41837 - DNA, 38 bp, synthetic construct; identical to SEQ ID NO: 1686
  misc_feature 1..38: note = Probe
  source 1..38: mol_type = other DNA

SEQ ID NO: 41838 - DNA, 41 bp, synthetic construct; identical to SEQ ID NO: 7871
  misc_feature 1..41: note = Probe
  source 1..41: mol_type = other DNA

SEQ ID NO: 41839 - DNA, 42 bp, synthetic construct; identical to SEQ ID NO: 1689
  misc_feature 1..42: note = Probe
  source 1..42: mol_type = other DNA

SEQ ID NO: 41840 - DNA, 43 bp, synthetic construct; identical to SEQ ID NO: 7872
  misc_feature 1..43: note = Probe
  source 1..43: mol_type = other DNA

SEQ ID NO: 41841 - DNA, 45 bp, synthetic construct; identical to SEQ ID NO: 7874
  misc_feature 1..45: note = Probe
  source 1..45: mol_type = other DNA

SEQ ID NO: 41842 - DNA, 31 bp, synthetic construct; identical to SEQ ID NO: 23935
  misc_feature 1..31: note = Probe
  source 1..31: mol_type = other DNA

SEQ ID NO: 41843 - DNA, 35 bp, synthetic construct
  misc_feature 1..35: note = Probe
  source 1..35: mol_type = other DNA
tccgagaggtcccgggttcaaatcccggacgagcc

SEQ ID NO: 41844 - DNA, 26 bp, synthetic construct
  misc_feature 1..26: note = Probe
  source 1..26: mol_type = other DNA
tccgtagtgtagcggttatcacattc

SEQ ID NO: 41845 - DNA, 26 bp, synthetic construct
  misc_feature 1..26: note = Probe
  source 1..26: mol_type = other DNA
tccgtagtgtagtggtcatcacgttc

SEQ ID NO: 41846 - DNA, 28 bp, synthetic construct
  misc_feature 1..28: note = Probe
  source 1..28: mol_type = other DNA
tccgtagtgtagtggtcatcacgttcgc

SEQ ID NO: 41847 - DNA, 20 bp, synthetic construct
  misc_feature 1..20: note = Probe
  source 1..20: mol_type = other DNA
tccgtagtgtagtggttatc

SEQ ID NO: 41848 - DNA, 25 bp, synthetic construct
  misc_feature 1..25: note = Probe
  source 1..25: mol_type = other DNA
tccgtagtgtagtggttatcacgtt

SEQ ID NO: 41849 - DNA, 26 bp, synthetic construct
  misc_feature 1..26: note = Probe
  source 1..26: mol_type = other DNA
tccgtagtgtagtggttatcacgttc

SEQ ID NO: 41850 - DNA, 27 bp, synthetic construct
  misc_feature 1..27: note = Probe
  source 1..27: mol_type = other DNA
tccgtagtgtagtggttatcacgttcg

SEQ ID NO: 41851 - DNA, 28 bp, synthetic construct
  misc_feature 1..28: note = Probe
  source 1..28: mol_type = other DNA
tccgtagtgtagtggttatcacgttcgc

SEQ ID NO: 41852 - DNA, 29 bp, synthetic construct
  misc_feature 1..29: note = Probe
  source 1..29: mol_type = other DNA
tccgtagtgtagtggttatcacgttcgcc

SEQ ID NO: 41853 - DNA, 30 bp, synthetic construct; identical to SEQ ID NO: 7893
  misc_feature 1..30: note = Probe
  source 1..30: mol_type = other DNA

SEQ ID NO: 41854 - DNA, 50 bp, synthetic construct; identical to SEQ ID NO: 23965
  misc_feature 1..50: note = Probe
  source 1..50: mol_type = other DNA

SEQ ID NO: 41855 - DNA, 50 bp, synthetic construct; identical to SEQ ID NO: 7899
  misc_feature 1..50: note = Probe
  source 1..50: mol_type = other DNA

SEQ ID NO: 41856 - DNA, 28 bp, synthetic construct
  misc_feature 1..28: note = Probe
  source 1..28: mol_type = other DNA
tccgtggtggtctagtggctaggattcg

SEQ ID NO: 41857 - DNA, 29 bp, synthetic construct
  misc_feature 1..29: note = Probe
  source 1..29: mol_type = other DNA
tccgtggtggtctagtggctaggattcgg

SEQ ID NO: 41858 - DNA, 31 bp, synthetic construct
  misc_feature 1..31: note = Probe
  source 1..31: mol_type = other DNA
tccgtggtggtctagtggctaggattcggcg

SEQ ID NO: 41859 - DNA, 22 bp, synthetic construct
  misc_feature 1..22: note = Probe
  source 1..22: mol_type = other DNA
tcctaagccagggattgtgggt

SEQ ID NO: 41860 - DNA, 50 bp, synthetic construct; identical to SEQ ID NO: 1694
  misc_feature 1..50: note = Probe
  source 1..50: mol_type = other DNA

SEQ ID NO: 41861 - DNA, 24 bp, synthetic construct
  misc_feature 1..24: note = Probe
  source 1..24: mol_type = other DNA
tcctcacacggggcacaataattt

SEQ ID NO: 41862 - DNA, 29 bp, synthetic construct
  misc_feature 1..29: note = Probe
  source 1..29: mol_type = other DNA
tcctcatcagtatagtggtgagtatcccc

SEQ ID NO: 41863 - DNA, 30 bp, synthetic construct
  misc_feature 1..30: note = Probe
  source 1..30: mol_type = other DNA
tcctcatcagtatagtggtgagtatccccg

SEQ ID NO: 41864 - DNA, 31 bp, synthetic construct
  misc_feature 1..31: note = Probe
  source 1..31: mol_type = other DNA
tcctcatcagtatagtggtgagtatccccgc

SEQ ID NO: 41865 - DNA, 23 bp, synthetic construct
  misc_feature 1..23: note = Probe
  source 1..23: mol_type = other DNA
tcctcgcagcttcgctgcgtgag

SEQ ID NO: 41866 - DNA, 18 bp, synthetic construct
  misc_feature 1..18: note = Probe
  source 1..18: mol_type = other DNA
tcctcgctggggcctcct

SEQ ID NO: 41867 - DNA, 18 bp, synthetic construct
  misc_feature 1..18: note = Probe
  source 1..18: mol_type = other DNA
tcctcgttagtatagtgg

SEQ ID NO: 41868 - DNA, 20 bp, synthetic construct
  misc_feature 1..20: note = Probe
  source 1..20: mol_type = other DNA
tcctcgttagtatagtggtg

SEQ ID NO: 41869 - DNA, 21 bp, synthetic construct
  misc_feature 1..21: note = Probe
  source 1..21: mol_type = other DNA
tcctcgttagtatagtggtga

SEQ ID NO: 41870 - DNA, 24 bp, synthetic construct
  misc_feature 1..24: note = Probe
  source 1..24: mol_type = other DNA
tcctcgttagtatagtggtgagta

SEQ ID NO: 41871 - DNA, 37 bp, synthetic construct; identical to SEQ ID NO: 1708
  misc_feature 1..37: note = Probe
  source 1..37: mol_type = other DNA

SEQ ID NO: 41872 - DNA, 41 bp, synthetic construct; identical to SEQ ID NO: 7923
  misc_feature 1..41: note = Probe
  source 1..41: mol_type = other DNA

SEQ ID NO: 41873 - DNA, 29 bp, synthetic construct
  misc_feature 1..29: note = Probe
  source 1..29: mol_type = other DNA
tcctcgttagtatagtggtgagtgtcccc

SEQ ID NO: 41874 - DNA, 30 bp, synthetic construct
  misc_feature 1..30: note = Probe
  source 1..30: mol_type = other DNA
tcctcgttagtatagtggtgagtgtccccg

SEQ ID NO: 41875 - DNA, 27 bp, synthetic construct
  misc_feature 1..27: note = Probe
  source 1..27: mol_type = other DNA
tcctcgttagtatagtggttagtatcc

SEQ ID NO: 41876 - DNA, 35 bp, synthetic construct; identical to SEQ ID NO: 1717
  misc_feature 1..35: note = Probe
  source 1..35: mol_type = other DNA

SEQ ID NO: 41877 - DNA, 30 bp, synthetic construct
  misc_feature 1..30: note = Probe
  source 1..30: mol_type = other DNA
tcctcgttagtatggtggtgagtatccctg

SEQ ID NO: 41878 - DNA, 26 bp, synthetic construct
  misc_feature 1..26: note = Probe
  source 1..26: mol_type = other DNA
tcctggctggctcgcgatgtctgttt

SEQ ID NO: 41879 - DNA, 27 bp, synthetic construct
  misc_feature 1..27: note = Probe
  source 1..27: mol_type = other DNA
tcctggctggctcgcgatgtctgtttt

SEQ ID NO: 41880 - DNA, 30 bp, synthetic construct
  misc_feature 1..30: note = Probe
  source 1..30: mol_type = other DNA
tcctggctggctcgcttgtgctctcacttt

SEQ ID NO: 41881 - DNA, 31 bp, synthetic construct
  misc_feature 1..31: note = Probe
  source 1..31: mol_type = other DNA
tcctggctggctcgcttgtgctctcactttt

SEQ ID NO: 41882 - DNA, 33 bp, synthetic construct; identical to SEQ ID NO: 24011
  misc_feature 1..33: note = Probe
  source 1..33: mol_type = other DNA

SEQ ID NO: 41883 - DNA, 32 bp, synthetic construct; identical to SEQ ID NO: 24014
  misc_feature 1..32: note = Probe
  source 1..32: mol_type = other DNA

SEQ ID NO: 41884 - DNA, 33 bp, synthetic construct; identical to SEQ ID NO: 24015
  misc_feature 1..33: note = Probe
  source 1..33: mol_type = other DNA

SEQ ID NO: 41885 - DNA, 28 bp, synthetic construct
  misc_feature 1..28: note = Probe
  source 1..28: mol_type = other DNA
tccttggtggtctagtggctaggattcg

SEQ ID NO: 41886 - DNA, 29 bp, synthetic construct
  misc_feature 1..29: note = Probe
  source 1..29: mol_type = other DNA
tccttggtggtctagtggctaggattcgg

SEQ ID NO: 41887 - DNA, 31 bp, synthetic construct
  misc_feature 1..31: note = Probe
  source 1..31: mol_type = other DNA
tccttggtggtctagtggctaggattcggtg

SEQ ID NO: 41888 - DNA, 29 bp, synthetic construct
  misc_feature 1..29: note = Probe
  source 1..29: mol_type = other DNA
tcgaaaccatcctctgctatcggagtttt

SEQ ID NO: 41889 - DNA, 30 bp, synthetic construct
  misc_feature 1..30: note = Probe
  source 1..30: mol_type = other DNA
tcgaaaccatcctctgctatcggagttttt

SEQ ID NO: 41890 - DNA, 22 bp, synthetic construct
  misc_feature 1..22: note = Probe
  source 1..22: mol_type = other DNA
tcgaaaccgggcggaaacacct

SEQ ID NO: 41891 - DNA, 29 bp, synthetic construct
  misc_feature 1..29: note = Probe
  source 1..29: mol_type = other DNA
tcgaaatccaatggggtctccccgcgcag

SEQ ID NO: 41892 - DNA, 29 bp, synthetic construct
  misc_feature 1..29: note = Probe
  source 1..29: mol_type = other DNA
tcgaaatccaatggggtttccccgcacag

SEQ ID NO: 41893 - DNA, 29 bp, synthetic construct
  misc_feature 1..29: note = Probe
  source 1..29: mol_type = other DNA
tcgaacctcagagggggcagctgccattt

SEQ ID NO: 41894 - DNA, 35 bp, synthetic construct; identical to SEQ ID NO: 7941
  misc_feature 1..35: note = Probe
  source 1..35: mol_type = other DNA

SEQ ID NO: 41895 - DNA, 30 bp, synthetic construct
  misc_feature 1..30: note = Probe
  source 1..30: mol_type = other DNA
tcgaatcccaccactgccagtggtacgttt

SEQ ID NO: 41896 - DNA, 22 bp, synthetic construct
  misc_feature 1..22: note = Probe
  source 1..22: mol_type = other DNA
tcgaatcccaccgctgccacac

SEQ ID NO: 41897 - DNA, 31 bp, synthetic construct
  misc_feature 1..31: note = Probe
  source 1..31: mol_type = other DNA
tcgaatcccaccgctgccaggctggagtttt

SEQ ID NO: 41898 - DNA, 34 bp, synthetic construct
  misc_feature 1..34: note = Probe
  source 1..34: mol_type = other DNA
tcgaatcccaccgctgccagggttgctgtctttt

SEQ ID NO: 41899 - DNA, 32 bp, synthetic construct
  misc_feature 1..32: note = Probe
  source 1..32: mol_type = other DNA
tcgaatcccaccgctgccaggtgcttcccttt

SEQ ID NO: 41900 - DNA, 30 bp, synthetic construct
  misc_feature 1..30: note = Probe
  source 1..30: mol_type = other DNA
tcgaatcccactcctgacagttcgtacttt

SEQ ID NO: 41901 - DNA, 22 bp, synthetic construct
  misc_feature 1..22: note = Probe
  source 1..22: mol_type = other DNA
tcgaatcccacttctgacacaa

SEQ ID NO: 41902 - DNA, 27 bp, synthetic construct
  misc_feature 1..27: note = Probe
  source 1..27: mol_type = other DNA
tcgaatcccacttctgacacatacttt

SEQ ID NO: 41903 - DNA, 28 bp, synthetic construct
  misc_feature 1..28: note = Probe
  source 1..28: mol_type = other DNA
tcgaatcccacttctgacacattcgttt

SEQ ID NO: 41904 - DNA, 22 bp, synthetic construct
  misc_feature 1..22: note = Probe
  source 1..22: mol_type = other DNA
tcgaatcccagcggtgcctccg

SEQ ID NO: 41905 - DNA, 29 bp, synthetic construct
  misc_feature 1..29: note = Probe
  source 1..29: mol_type = other DNA
tcgaatcctgctcacagcgtcactagttt

SEQ ID NO: 41906 - DNA, 38 bp, synthetic construct; identical to SEQ ID NO: 24034
  misc_feature 1..38: note = Probe
  source 1..38: mol_type = other DNA

SEQ ID NO: 41907 - DNA, 22 bp, synthetic construct
  misc_feature 1..22: note = Probe
  source 1..22: mol_type = other DNA
tcgactcccggtatgggaacaa

SEQ ID NO: 41908 - DNA, 22 bp, synthetic construct
  misc_feature 1..22: note = Probe
  source 1..22: mol_type = other DNA
tcgactcccggtgtgggaacgc

SEQ ID NO: 41909 - DNA, 30 bp, synthetic construct; identical to SEQ ID NO: 11965
  misc_feature 1..30: note = Probe
  source 1..30: mol_type = other DNA

SEQ ID NO: 41910 - DNA, 22 bp, synthetic construct
  misc_feature 1..22: note = Probe
  source 1..22: mol_type = other DNA
tcgagcccacccagggacgcct

SEQ ID NO: 41911 - DNA, 30 bp, synthetic construct
  misc_feature 1..30: note = Probe
  source 1..30: mol_type = other DNA
tcgagcccacccagggacgcgctctccttt

SEQ ID NO: 41912 - DNA, 18 bp, synthetic construct
  misc_feature 1..18: note = Probe
  source 1..18: mol_type = other DNA
tcgagccccagtggaacc

SEQ ID NO: 41913 - DNA, 22 bp, synthetic construct
  misc_feature 1..22: note = Probe
  source 1..22: mol_type = other DNA
tcgagtcccacctggggtgtcg

SEQ ID NO: 41914 - DNA, 31 bp, synthetic construct
  misc_feature 1..31: note = Probe
  source 1..31: mol_type = other DNA
tcgagtcccatctggggtggcctgtgacttt

SEQ ID NO: 41915 - DNA, 22 bp, synthetic construct
  misc_feature 1..22: note = Probe
  source 1..22: mol_type = other DNA
tcgagtcccatctgggtcgcgt

SEQ ID NO: 41916 - DNA, 18 bp, synthetic construct
  misc_feature 1..18: note = Probe
  source 1..18: mol_type = other DNA
tcgagtcccttcgtggtc

SEQ ID NO: 41917 - DNA, 22 bp, synthetic construct
  misc_feature 1..22: note = Probe
  source 1..22: mol_type = other DNA
tcgagtcccttcgtggtcgttg

SEQ ID NO: 41918 - DNA, 36 bp, synthetic construct
  misc_feature 1..36: note = Probe
  source 1..36: mol_type = other DNA
tcgatccccagcacttccacaagtacatttccttat

SEQ ID NO: 41919 - DNA, 18 bp, synthetic construct
  misc_feature 1..18: note = Probe
  source 1..18: mol_type = other DNA
tcgatccccagcatctcc

SEQ ID NO: 41920 - DNA, 25 bp, synthetic construct
  misc_feature 1..25: note = Probe
  source 1..25: mol_type = other DNA
tcgatccccagcatctccagtgttt

SEQ ID NO: 41921 - DNA, 26 bp, synthetic construct
  misc_feature 1..26: note = Probe
  source 1..26: mol_type = other DNA
tcgatccccagcatctccagtgtttt

SEQ ID NO: 41922 - DNA, 22 bp, synthetic construct
  misc_feature 1..22: note = Probe
  source 1..22: mol_type = other DNA
tcgatccccagtacctccaggc

SEQ ID NO: 41923 - DNA, 22 bp, synthetic construct
  misc_feature 1..22: note = Probe
  source 1..22: mol_type = other DNA
tcgatccccgacacctccaagt

SEQ ID NO: 41924 - DNA, 18 bp, synthetic construct
  misc_feature 1..18: note = Probe
  source 1..18: mol_type = other DNA
tcgatccccggcacctcc

SEQ ID NO: 41925 - DNA, 19 bp, synthetic construct
  misc_feature 1..19: note = Probe
  source 1..19: mol_type = other DNA
tcgatccccggcatctcca

SEQ ID NO: 41926 - DNA, 28 bp, synthetic construct
  misc_feature 1..28: note = Probe
  source 1..28: mol_type = other DNA
tcgatccccggcatctccagtgtagttt

SEQ ID NO: 41927 - DNA, 29 bp, synthetic construct
  misc_feature 1..29: note = Probe
  source 1..29: mol_type = other DNA
tcgatccccggcatctccagtgtagtttt

SEQ ID NO: 41928 - DNA, 22 bp, synthetic construct
  misc_feature 1..22: note = Probe
  source 1..22: mol_type = other DNA
tcgatccccggcatctccattg

SEQ ID NO: 41929 - DNA, 22 bp, synthetic construct
  misc_feature 1..22: note = Probe
  source 1..22: mol_type = other DNA
tcgatccccgtacgggccacga

SEQ ID NO: 41930 - DNA, 22 bp, synthetic construct
  misc_feature 1..22: note = Probe
  source 1..22: mol_type = other DNA
tcgatcctcacacggggcacaa

SEQ ID NO: 41931 - DNA, 28 bp, synthetic construct
  misc_feature 1..28: note = Probe
  source 1..28: mol_type = other DNA
tcgatcctcacacggggcacaataattt

SEQ ID NO: 41932 - DNA, 22 bp, synthetic construct
  misc_feature 1..22: note = Probe
  source 1..22: mol_type = other DNA
tcgattccccgacggggaggca

SEQ ID NO: 41933 - DNA, 22 bp, synthetic construct
  misc_feature 1..22: note = Probe
  source 1..22: mol_type = other DNA
tcgattcccggccaacgcaagt

SEQ ID NO: 41934 - DNA, 22 bp, synthetic construct
  misc_feature 1..22: note = Probe
  source 1..22: mol_type = other DNA
tcgattcccggccaacgcagtg

SEQ ID NO: 41935 - DNA, 22 bp, synthetic construct
  misc_feature 1..22: note = Probe
  source 1..22: mol_type = other DNA
tcgattcccggccaatgcacga

SEQ ID NO: 41936 - DNA, 31 bp, synthetic construct
  misc_feature 1..31: note = Probe
  source 1..31: mol_type = other DNA
tcgattcccggccaatgcacgagtacagttt

SEQ ID NO: 41937 - DNA, 32 bp, synthetic construct
  misc_feature 1..32: note = Probe
  source 1..32: mol_type = other DNA
tcgattcccggccaatgcacgagtacagtttt

SEQ ID NO: 41938 - DNA, 22 bp, synthetic construct
  misc_feature 1..22: note = Probe
  source 1..22: mol_type = other DNA
tcgattcccggccaatgcagca

SEQ ID NO: 41939 - DNA, 22 bp, synthetic construct
  misc_feature 1..22: note = Probe
  source 1..22: mol_type = other DNA
tcgattcccggcccatgcagca

SEQ ID NO: 41940 - DNA, 22 bp, synthetic construct
  misc_feature 1..22: note = Probe
  source 1..22: mol_type = other DNA
tcgattcccggtcagggaacaa

SEQ ID NO: 41941 - DNA, 22 bp, synthetic construct
  misc_feature 1..22: note = Probe
  source 1..22: mol_type = other DNA
tcgattcccggtcatggaacca

SEQ ID NO: 41942 - DNA, 22 bp, synthetic construct
  misc_feature 1..22: note = Probe
  source 1..22: mol_type = other DNA
tcgattcctggtcagggaacca

SEQ ID NO: 41943 - DNA, 23 bp, synthetic construct
  misc_feature 1..23: note = Probe
  source 1..23: mol_type = other DNA
tcgcagtctcccctggaggcgtg

SEQ ID NO: 41944 - DNA, 24 bp, synthetic construct
  misc_feature 1..24: note = Probe
  source 1..24: mol_type = other DNA
tcgcagtctcccctggaggcgtgg

SEQ ID NO: 41945 - DNA, 26 bp, synthetic construct
  misc_feature 1..26: note = Probe
  source 1..26: mol_type = other DNA
tcgcagtctcccctggaggcgtgggt

SEQ ID NO: 41946 - DNA, 42 bp, synthetic construct
  misc_feature 1..42: note = Probe
  source 1..42: mol_type = other DNA
tcgcagtctcccctggaggcgtgggttcgaatcccactcctg

SEQ ID NO: 41947 - DNA, 43 bp, synthetic construct
  misc_feature 1..43: note = Probe
  source 1..43: mol_type = other DNA
tcgcagtctcccctggaggcgtgggttcgaatcccactcctga

SEQ ID NO: 41948 - DNA, 42 bp, synthetic construct
  misc_feature 1..42: note = Probe
  source 1..42: mol_type = other DNA
tcgcagtctcccctggaggcgtgggttcgaatcccacttctg

SEQ ID NO: 41949 - DNA, 50 bp, synthetic construct; identical to SEQ ID NO: 7991
  misc_feature 1..50: note = Probe
  source 1..50: mol_type = other DNA

SEQ ID NO: 41950 - DNA, 23 bp, synthetic construct
  misc_feature 1..23: note = Probe
  source 1..23: mol_type = other DNA
tcgggtgcgagaggtcccgggtt

SEQ ID NO: 41951 - DNA, 21 bp, synthetic construct
  misc_feature 1..21: note = Probe
  source 1..21: mol_type = other DNA
tcgtaaacaggagatcctggg

SEQ ID NO: 41952 - DNA, 22 bp, synthetic construct
  misc_feature 1..22: note = Probe
  source 1..22: mol_type = other DNA
tcgtaaacaggagatcctgggt

SEQ ID NO: 41953 - DNA, 22 bp, synthetic construct
  misc_feature 1..22: note = Probe
  source 1..22: mol_type = other DNA
tcgtaaaccgaagatcacgggt

SEQ ID NO: 41954 - DNA, 18 bp, synthetic construct
  misc_feature 1..18: note = Probe
  source 1..18: mol_type = other DNA
tcgtatagtggttagtac

SEQ ID NO: 41955 - DNA, 22 bp, synthetic construct
  misc_feature 1..22: note = Probe
  source 1..22: mol_type = other DNA
tcgtatagtggttagtactctg

SEQ ID NO: 41956 - DNA, 23 bp, synthetic construct
  misc_feature 1..23: note = Probe
  source 1..23: mol_type = other DNA
tcgtatagtggttagtactctgc

SEQ ID NO: 41957 - DNA, 22 bp, synthetic construct
  misc_feature 1..22: note = Probe
  source 1..22: mol_type = other DNA
tcgtggttgtagtccgtgcgag

SEQ ID NO: 41958 - DNA, 29 bp, synthetic construct
  misc_feature 1..29: note = Probe
  source 1..29: mol_type = other DNA
tcgtggttgtagtccgtgcgagaataatg

SEQ ID NO: 41959 - DNA, 27 bp, synthetic construct
  misc_feature 1..27: note = Probe
  source 1..27: mol_type = other DNA
tcgttagtatagtggtgagtatccccg

SEQ ID NO: 41960 - DNA, 28 bp, synthetic construct
  misc_feature 1..28: note = Probe
  source 1..28: mol_type = other DNA
tcgttagtatagtggtgagtatccccgc

SEQ ID NO: 41961 - DNA, 30 bp, synthetic construct; identical to SEQ ID NO: 24115
  misc_feature 1..30: note = Probe
  source 1..30: mol_type = other DNA

SEQ ID NO: 41962 - DNA, 33 bp, synthetic construct
  misc_feature 1..33: note = Probe
  source 1..33: mol_type = other DNA
tctaaaggtccctggttcgatcccgggtttcgg

SEQ ID NO: 41963 - DNA, 20 bp, synthetic construct
  misc_feature 1..20: note = Probe
  source 1..20: mol_type = other DNA
tctaacaacatggctttctc

SEQ ID NO: 41964 - DNA, 18 bp, synthetic construct
  misc_feature 1..18: note = Probe
  source 1..18: mol_type = other DNA
tctaggggtatgattctc

SEQ ID NO: 41965 - DNA, 19 bp, synthetic construct
  misc_feature 1..19: note = Probe
  source 1..19: mol_type = other DNA
tctaggggtatgattctcg

SEQ ID NO: 41966 - DNA, 20 bp, synthetic construct
  misc_feature 1..20: note = Probe
  source 1..20: mol_type = other DNA
tctaggggtatgattctcgc

SEQ ID NO: 41967 - DNA, 23 bp, synthetic construct
  misc_feature 1..23: note = Probe
  source 1..23: mol_type = other DNA
tctagtaaacaggagatcctggg

SEQ ID NO: 41968 - DNA, 24 bp, synthetic construct
  misc_feature 1..24: note = Probe
  source 1..24: mol_type = other DNA
tctagtaaacaggagatcctgggt

SEQ ID NO: 41969 - DNA, 46 bp, synthetic construct
  misc_feature 1..46: note = Probe
  source 1..46: mol_type = other DNA
tctagtaaacaggagatcctgggttcgactcccagcggggccttgg

SEQ ID NO: 41970 - DNA, 18 bp, synthetic construct
  misc_feature 1..18: note = Probe
  source 1..18: mol_type = other DNA
tctagtggctaggattcg

SEQ ID NO: 41971 - DNA, 18 bp, synthetic construct
  misc_feature 1..18: note = Probe
  source 1..18: mol_type = other DNA
tctagtggttaggattcg

SEQ ID NO: 41972 - DNA, 19 bp, synthetic construct
  misc_feature 1..19: note = Probe
  source 1..19: mol_type = other DNA
tctagtggttaggattcgg

SEQ ID NO: 41973 - DNA, 21 bp, synthetic construct
  misc_feature 1..21: note = Probe
  source 1..21: mol_type = other DNA
tctagtggttaggattcggcg

SEQ ID NO: 41974 - DNA, 38 bp, synthetic construct
  misc_feature 1..38: note = Probe
  source 1..38: mol_type = other DNA
tctcaccgccgcggcccgggttcgattcccggtcaggg

SEQ ID NO: 41975 - DNA, 43 bp, synthetic construct; identical to SEQ ID NO: 8000
  misc_feature 1..43: note = Probe
  source 1..43: mol_type = other DNA

SEQ ID NO: 41976 - DNA, 18 bp, synthetic construct
  misc_feature 1..18: note = Probe
  source 1..18: mol_type = other DNA
tctcataatctgaaggtc

SEQ ID NO: 41977 - DNA, 19 bp, synthetic construct
  misc_feature 1..19: note = Probe
  source 1..19: mol_type = other DNA
tctcataatctgaaggtcc

SEQ ID NO: 41978 - DNA, 20 bp, synthetic construct
  misc_feature 1..20: note = Probe
  source 1..20: mol_type = other DNA
tctcataatctgaaggtcct

SEQ ID NO: 41979 - DNA, 21 bp, synthetic construct
  misc_feature 1..21: note = Probe
  source 1..21: mol_type = other DNA
tctcataatctgaaggtcctg

SEQ ID NO: 41980 - DNA, 22 bp, synthetic construct
  misc_feature 1..22: note = Probe
  source 1..22: mol_type = other DNA
tctcataatctgaaggtcctga

SEQ ID NO: 41981 - DNA, 23 bp, synthetic construct
  misc_feature 1..23: note = Probe
  source 1..23: mol_type = other DNA
tctcataatctgaaggtcctgag

SEQ ID NO: 41982 - DNA, 24 bp, synthetic construct
  misc_feature 1..24: note = Probe
  source 1..24: mol_type = other DNA
tctcataatctgaaggtcctgagt

SEQ ID NO: 41983 - DNA, 41 bp, synthetic construct
  misc_feature 1..41: note = Probe
  source 1..41: mol_type = other DNA
tctcataatctgaaggtcctgagttcgaacctcagaggggg

SEQ ID NO: 41984 - DNA, 46 bp, synthetic construct
  misc_feature 1..46: note = Probe
  source 1..46: mol_type = other DNA
tctcataatctgaaggtcctgagttcgaacctcagagggggcaagg

SEQ ID NO: 41985 - DNA, 46 bp, synthetic construct
  misc_feature 1..46: note = Probe
  source 1..46: mol_type = other DNA
tctcataatctgaaggtcctgagttcgaacctcagagggggcagct

SEQ ID NO: 41986 - DNA, 50 bp, synthetic construct
  misc_feature 1..50: note = Probe
  source 1..50: mol_type = other DNA
tctcataatctgaaggtcctgagttcgaacctcagagggggcagctgcca

SEQ ID NO: 41987 - DNA, 46 bp, synthetic construct
  misc_feature 1..46: note = Probe
  source 1..46: mol_type = other DNA
tctcataatctgaaggtcctgagttcgagcctcagagagggcagct

SEQ ID NO: 41988 - DNA, 20 bp, synthetic construct
  misc_feature 1..20: note = Probe
  source 1..20: mol_type = other DNA
tctcataatctgaaggtcgt

SEQ ID NO: 41989 - DNA, 50 bp, synthetic construct
  misc_feature 1..50: note = Probe
  source 1..50: mol_type = other DNA
tctcataatctgaaggtcgtgagttcgagcctcacacggggcagtctaac

SEQ ID NO: 41990 - DNA, 46 bp, synthetic construct
  misc_feature 1..46: note = Probe
  source 1..46: mol_type = other DNA
tctcataatctgaaggtcgtgagttcgatcctcacacggggcacaa

SEQ ID NO: 41991 - DNA, 50 bp, synthetic construct
  misc_feature 1..50: note = Probe
  source 1..50: mol_type = other DNA
tctcataatctgaaggtcgtgagttcgatcctcacacggggcacaataat

SEQ ID NO: 41992 - DNA, 32 bp, synthetic construct
  misc_feature 1..32: note = Probe
  source 1..32: mol_type = other DNA
tctcccacatggtctagcggttaggattcctg

SEQ ID NO: 41993 - DNA, 31 bp, synthetic construct
  misc_feature 1..31: note = Probe
  source 1..31: mol_type = other DNA
tctccctggtggtctagtggttaggattcgg

SEQ ID NO: 41994 - DNA, 23 bp, synthetic construct
  misc_feature 1..23: note = Probe
  source 1..23: mol_type = other DNA
tctcgtaaacaggagatcctggg

SEQ ID NO: 41995 - DNA, 46 bp, synthetic construct
  misc_feature 1..46: note = Probe
  source 1..46: mol_type = other DNA
tctcgtaaacaggagatcctgggttcgaatcccagcggggccttag

SEQ ID NO: 41996 - DNA, 38 bp, synthetic construct; identical to SEQ ID NO: 8005
  misc_feature 1..38: note = Probe
  source 1..38: mol_type = other DNA

SEQ ID NO: 41997 - DNA, 37 bp, synthetic construct; identical to SEQ ID NO: 8010
  misc_feature 1..37: note = Probe
  source 1..37: mol_type = other DNA

SEQ ID NO: 41998 - DNA, 33 bp, synthetic construct
  misc_feature 1..33: note = Probe
  source 1..33: mol_type = other DNA
tctgagggtccagggttcaagtccctgttcagg

SEQ ID NO: 41999 - DNA, 32 bp, synthetic construct
  misc_feature 1..32: note = Probe
  source 1..32: mol_type = other DNA
tctgagggtccagggttcaagtccctgttcgg

SEQ ID NO: 42000 - DNA, 34 bp, synthetic construct
  misc_feature 1..34: note = Probe
  source 1..34: mol_type = other DNA
tctgagggtccagggttcaagtccctgttcgggc

SEQ ID NO: 42001 - DNA, 35 bp, synthetic construct; identical to SEQ ID NO: 34835
  misc_feature 1..35: note = Probe
  source 1..35: mol_type = other DNA

SEQ ID NO: 42002 - DNA, 38 bp, synthetic construct; identical to SEQ ID NO: 24149
  misc_feature 1..38: note = Probe
  source 1..38: mol_type = other DNA

SEQ ID NO: 42003 - DNA, 39 bp, synthetic construct
  misc_feature 1..39: note = Probe
  source 1..39: mol_type = other DNA
tctgtcacgcgggagaccggggttcgattccccgacggg

SEQ ID NO: 42004 - DNA, 41 bp, synthetic construct
  misc_feature 1..41: note = Probe
  source 1..41: mol_type = other DNA
tctgtcacgcgggagaccggggttcgattccccgacgggga

SEQ ID NO: 42005 - DNA, 42 bp, synthetic construct
  misc_feature 1..42: note = Probe
  source 1..42: mol_type = other DNA
tctgtcacgcgggagaccggggttcgattccccgacggggag

SEQ ID NO: 42006 - DNA, 45 bp, synthetic construct
  misc_feature 1..45: note = Probe
  source 1..45: mol_type = other DNA
tctgtcacgcgggagaccggggttcgattccccgacggggagacg

SEQ ID NO: 42007 - DNA, 50 bp, synthetic construct
  misc_feature 1..50: note = Probe
  source 1..50: mol_type = other DNA
tctgtcacgcgggagaccggggttcgattccccgacggggagacgaagca

SEQ ID NO: 42008 - DNA, 25 bp, synthetic construct
  misc_feature 1..25: note = Probe
  source 1..25: mol_type = other DNA
tctgtgctccggagttacctcgttt

SEQ ID NO: 42009 - DNA, 19 bp, synthetic construct
  misc_feature 1..19: note = Probe
  source 1..19: mol_type = other DNA
tcttaatcccagggtcgtg

SEQ ID NO: 42010 - DNA, 19 bp, synthetic construct
  misc_feature 1..19: note = Probe
  source 1..19: mol_type = other DNA
tcttaatctcagggtcgtg

SEQ ID NO: 42011 - DNA, 20 bp, synthetic construct
  misc_feature 1..20: note = Probe
  source 1..20: mol_type = other DNA
tcttaatctcagggtcgtgg

SEQ ID NO: 42012 - DNA, 30 bp, synthetic construct; identical to SEQ ID NO: 12041
  misc_feature 1..30: note = Probe
  source 1..30: mol_type = other DNA

SEQ ID NO: 42013 - DNA, 31 bp, synthetic construct; identical to SEQ ID NO: 34856
  misc_feature 1..31: note = Probe
  source 1..31: mol_type = other DNA

SEQ ID NO: 42014 - DNA, 34 bp, synthetic construct; identical to SEQ ID NO: 24160
  misc_feature 1..34: note = Probe
  source 1..34: mol_type = other DNA

SEQ ID NO: 42015 - DNA, 37 bp, synthetic construct; identical to SEQ ID NO: 8017
  misc_feature 1..37: note = Probe
  source 1..37: mol_type = other DNA

SEQ ID NO: 42016 - DNA, 23 bp, synthetic construct
  misc_feature 1..23: note = Probe
  source 1..23: mol_type = other DNA
tcttgtaaacaggagatcctggg

SEQ ID NO: 42017 - DNA, 21 bp, synthetic construct
  misc_feature 1..21: note = Probe
  source 1..21: mol_type = other DNA
tcttgtaaaccaggggtcgcg

SEQ ID NO: 42018 - DNA, 46 bp, synthetic construct
  misc_feature 1..46: note = Probe
  source 1..46: mol_type = other DNA
tcttgtaaaccaggggtcgcgagttcaattctcgctggggcctgtg

SEQ ID NO: 42019 - DNA, 36 bp, synthetic construct; identical to SEQ ID NO: 1740
  misc_feature 1..36: note = Probe
  source 1..36: mol_type = other DNA

SEQ ID NO: 42020 - DNA, 38 bp, synthetic construct; identical to SEQ ID NO: 1742
  misc_feature 1..38: note = Probe
  source 1..38: mol_type = other DNA

SEQ ID NO: 42021 - DNA, 41 bp, synthetic construct; identical to SEQ ID NO: 8044
  misc_feature 1..41: note = Probe
  source 1..41: mol_type = other DNA

SEQ ID NO: 42022 - DNA, 46 bp, synthetic construct; identical to SEQ ID NO: 8048
  misc_feature 1..46: note = Probe
  source 1..46: mol_type = other DNA

SEQ ID NO: 42023 - DNA, 35 bp, synthetic construct; identical to SEQ ID NO: 8059
  misc_feature 1..35: note = Probe
  source 1..35: mol_type = other DNA

SEQ ID NO: 42024 - DNA, 20 bp, synthetic construct
  misc_feature 1..20: note = Probe
  source 1..20: mol_type = other DNA
tgagatgttacctagcgttt

SEQ ID NO: 42025 - DNA, 32 bp, synthetic construct
  misc_feature 1..32: note = Probe
  source 1..32: mol_type = other DNA
tgaggccccgggttcgatccccggcatctcca

SEQ ID NO: 42026 - DNA, 35 bp, synthetic construct; identical to SEQ ID NO: 24211
  misc_feature 1..35: note = Probe
  source 1..35: mol_type = other DNA

SEQ ID NO: 42027 - DNA, 23 bp, synthetic construct
  misc_feature 1..23: note = Probe
  source 1..23: mol_type = other DNA
tgaggtcccgggttcgatcccca

SEQ ID NO: 42028 - DNA, 50 bp, synthetic construct
  misc_feature 1..50: note = Probe
  source 1..50: mol_type = other DNA
tgagtatccccgcctgtcacgcgggagaccggggttcgattccccgacgg

SEQ ID NO: 42029 - DNA, 44 bp, synthetic construct; identical to SEQ ID NO: 8071
  misc_feature 1..44: note = Probe
  source 1..44: mol_type = other DNA

SEQ ID NO: 42030 - DNA, 21 bp, synthetic construct
  misc_feature 1..21: note = Probe
  source 1..21: mol_type = other DNA
tgatcgtatagtggttagtac

SEQ ID NO: 42031 - DNA, 22 bp, synthetic construct
  misc_feature 1..22: note = Probe
  source 1..22: mol_type = other DNA
tgatcgtatagtggttagtact

SEQ ID NO: 42032 - DNA, 25 bp, synthetic construct
  misc_feature 1..25: note = Probe
  source 1..25: mol_type = other DNA
tgatcgtatagtggttagtactctg

SEQ ID NO: 42033 - DNA, 29 bp, synthetic construct
  misc_feature 1..29: note = Probe
  source 1..29: mol_type = other DNA
tgattctcgcttcgggtgcgagaggtccc

SEQ ID NO: 42034 - DNA, 29 bp, synthetic construct
  misc_feature 1..29: note = Probe
  source 1..29: mol_type = other DNA
tgattctcgctttgggtgcgagaggtccc

SEQ ID NO: 42035 - DNA, 23 bp, synthetic construct
  misc_feature 1..23: note = Probe
  source 1..23: mol_type = other DNA
tgatttctgtaccttacacattt

SEQ ID NO: 42036 - DNA, 39 bp, synthetic construct; identical to SEQ ID NO: 24241
  misc_feature 1..39: note = Probe
  source 1..39: mol_type = other DNA

SEQ ID NO: 42037 - DNA, 39 bp, synthetic construct; identical to SEQ ID NO: 24242
  misc_feature 1..39: note = Probe
  source 1..39: mol_type = other DNA

SEQ ID NO: 42038 - DNA, 35 bp, synthetic construct
  misc_feature 1..35: note = Probe
  source 1..35: mol_type = other DNA
tgcacgaggtcctgggttcgatccccagtacctcc

SEQ ID NO: 42039 - DNA, 36 bp, synthetic construct
  misc_feature 1..36: note = Probe
  source 1..36: mol_type = other DNA
tgcacgaggtcctgggttcgatccccagtacctcca

SEQ ID NO: 42040 - DNA, 27 bp, synthetic construct
  misc_feature 1..27: note = Probe
  source 1..27: mol_type = other DNA
tgcatgaggtcccgggttcgatcccca

SEQ ID NO: 42041 - DNA, 39 bp, synthetic construct; identical to SEQ ID NO: 8088
  misc_feature 1..39: note = Probe
  source 1..39: mol_type = other DNA

SEQ ID NO: 42042 - DNA, 30 bp, synthetic construct; identical to SEQ ID NO: 12069
  misc_feature 1..30: note = Probe
  source 1..30: mol_type = other DNA

SEQ ID NO: 42043 - DNA, 19 bp, synthetic construct
  misc_feature 1..19: note = Probe
  source 1..19: mol_type = other DNA
tgccacgcgggaggcccgg

SEQ ID NO: 42044 - DNA, 21 bp, synthetic construct
  misc_feature 1..21: note = Probe
  source 1..21: mol_type = other DNA
tgccacgcgggaggcccgggt

SEQ ID NO: 42045 - DNA, 37 bp, synthetic construct; identical to SEQ ID NO: 24252
  misc_feature 1..37: note = Probe
  source 1..37: mol_type = other DNA

SEQ ID NO: 42046 - DNA, 38 bp, synthetic construct
  misc_feature 1..38: note = Probe
  source 1..38: mol_type = other DNA
tgccacgcgggaggcccgggttcgattcccggccaatg

SEQ ID NO: 42047 - DNA, 39 bp, synthetic construct
  misc_feature 1..39: note = Probe
  source 1..39: mol_type = other DNA
tgccacgcgggaggcccgggttcgattcccggccaatgc

SEQ ID NO: 42048 - DNA, 50 bp, synthetic construct
  misc_feature 1..50: note = Probe
  source 1..50: mol_type = other DNA
tgccacgcgggaggcccgggttcgattcccggccaatgcaacgatgacgt

SEQ ID NO: 42049 - DNA, 50 bp, synthetic construct
  misc_feature 1..50: note = Probe
  source 1..50: mol_type = other DNA
tgccacgcgggaggcccgggttcgattcccggccaatgcacgagtacagt

SEQ ID NO: 42050 - DNA, 25 bp, synthetic construct
  misc_feature 1..25: note = Probe
  source 1..25: mol_type = other DNA
tgcccccatgtctaacaacatggct

SEQ ID NO: 42051 - DNA, 26 bp, synthetic construct
  misc_feature 1..26: note = Probe
  source 1..26: mol_type = other DNA
tgcccccatgtctaacaacatggctt

SEQ ID NO: 42052 - DNA, 27 bp, synthetic construct
  misc_feature 1..27: note = Probe
  source 1..27: mol_type = other DNA
tgcccccatgtctaacaacatggcttt

SEQ ID NO: 42053 - DNA, 28 bp, synthetic construct
  misc_feature 1..28: note = Probe
  source 1..28: mol_type = other DNA
tgcccccatgtctaacaacatggctttc

SEQ ID NO: 42054 - DNA, 29 bp, synthetic construct
  misc_feature 1..29: note = Probe
  source 1..29: mol_type = other DNA
tgcccccatgtctaacaacatggctttct

SEQ ID NO: 42055 - DNA, 30 bp, synthetic construct; identical to SEQ ID NO: 8103
  misc_feature 1..30: note = Probe
  source 1..30: mol_type = other DNA

SEQ ID NO: 42056 - DNA, 31 bp, synthetic construct; identical to SEQ ID NO: 8104
  misc_feature 1..31: note = Probe
  source 1..31: mol_type = other DNA

SEQ ID NO: 42057 - DNA, 32 bp, synthetic construct; identical to SEQ ID NO: 8105
  misc_feature 1..32: note = Probe
  source 1..32: mol_type = other DNA

SEQ ID NO: 42058 - DNA, 33 bp, synthetic construct; identical to SEQ ID NO: 8106
  misc_feature 1..33: note = Probe
  source 1..33: mol_type = other DNA

SEQ ID NO: 42059 - DNA, 34 bp, synthetic construct; identical to SEQ ID NO: 8107
  misc_feature 1..34: note = Probe
  source 1..34: mol_type = other DNA

SEQ ID NO: 42060 - DNA, 35 bp, synthetic construct; identical to SEQ ID NO: 24277
  misc_feature 1..35: note = Probe
  source 1..35: mol_type = other DNA

SEQ ID NO: 42061 - DNA, 32 bp, synthetic construct
  misc_feature 1..32: note = Probe
  source 1..32: mol_type = other DNA
tgccccctctgtgctccggagttacctcgttt

SEQ ID NO: 42062 - DNA, 29 bp, synthetic construct
  misc_feature 1..29: note = Probe
  source 1..29: mol_type = other DNA
tgcccctcatttacataaatattatacta

SEQ ID NO: 42063 - DNA, 21 bp, synthetic construct
  misc_feature 1..21: note = Probe
  source 1..21: mol_type = other DNA
tgccgtgatcgtatagtggtt

SEQ ID NO: 42064 - DNA, 24 bp, synthetic construct
  misc_feature 1..24: note = Probe
  source 1..24: mol_type = other DNA
tgccgtgatcgtatagtggttagt

SEQ ID NO: 42065 - DNA, 26 bp, synthetic construct
  misc_feature 1..26: note = Probe
  source 1..26: mol_type = other DNA
tgccgtgatcgtatagtggttagtac

SEQ ID NO: 42066 - DNA, 27 bp, synthetic construct
  misc_feature 1..27: note = Probe
  source 1..27: mol_type = other DNA
tgccgtgatcgtatagtggttagtact

SEQ ID NO: 42067 - DNA, 28 bp, synthetic construct
  misc_feature 1..28: note = Probe
  source 1..28: mol_type = other DNA
tgccgtgatcgtatagtggttagtactc

SEQ ID NO: 42068 - DNA, 29 bp, synthetic construct
  misc_feature 1..29: note = Probe
  source 1..29: mol_type = other DNA
tgccgtgatcgtatagtggttagtactct

SEQ ID NO: 42069 - DNA, 30 bp, synthetic construct; identical to SEQ ID NO: 12089
  misc_feature 1..30: note = Probe
  source 1..30: mol_type = other DNA

SEQ ID NO: 42070 - DNA, 31 bp, synthetic construct; identical to SEQ ID NO: 8115
  misc_feature 1..31: note = Probe
  source 1..31: mol_type = other DNA

SEQ ID NO: 42071 - DNA, 32 bp, synthetic construct; identical to SEQ ID NO: 8116
  misc_feature 1..32: note = Probe
  source 1..32: mol_type = other DNA

SEQ ID NO: 42072 - DNA, 35 bp, synthetic construct; identical to SEQ ID NO: 1755
  misc_feature 1..35: note = Probe
  source 1..35: mol_type = other DNA

SEQ ID NO: 42073 - DNA, 36 bp, synthetic construct; identical to SEQ ID NO: 1756
  misc_feature 1..36: note = Probe
  source 1..36: mol_type = other DNA

SEQ ID NO: 42074 - DNA, 50 bp, synthetic construct; identical to SEQ ID NO: 35021
  misc_feature 1..50: note = Probe
  source 1..50: mol_type = other DNA

SEQ ID NO: 42075 - DNA, 30 bp, synthetic construct; identical to SEQ ID NO: 24306
  misc_feature 1..30: note = Probe
  source 1..30: mol_type = other DNA

SEQ ID NO: 42076 - DNA, 39 bp, synthetic construct; identical to SEQ ID NO: 8121
  misc_feature 1..39: note = Probe
  source 1..39: mol_type = other DNA

SEQ ID NO: 42077 - DNA, 44 bp, synthetic construct; identical to SEQ ID NO: 8134
  misc_feature 1..44: note = Probe
  source 1..44: mol_type = other DNA

SEQ ID NO: 42078 - DNA, 50 bp, synthetic construct
  misc_feature 1..50: note = Probe
  source 1..50: mol_type = other DNA
tgctaataacgccaaggtcgcgggttcgatccccgtactggccacgtatt

SEQ ID NO: 42079 - DNA, 36 bp, synthetic construct; identical to SEQ ID NO: 8139
  misc_feature 1..36: note = Probe
  source 1..36: mol_type = other DNA

SEQ ID NO: 42080 - DNA, 38 bp, synthetic construct; identical to SEQ ID NO: 8140
  misc_feature 1..38: note = Probe
  source 1..38: mol_type = other DNA

SEQ ID NO: 42081 - DNA, 41 bp, synthetic construct; identical to SEQ ID NO: 8143
  misc_feature 1..41: note = Probe
  source 1..41: mol_type = other DNA

SEQ ID NO: 42082 - DNA, 43 bp, synthetic construct; identical to SEQ ID NO: 8145
  misc_feature 1..43: note = Probe
  source 1..43: mol_type = other DNA

SEQ ID NO: 42083 - DNA, 27 bp, synthetic construct
  misc_feature 1..27: note = Probe
  source 1..27: mol_type = other DNA
tggaaccacggcgtgattcataccttt

SEQ ID NO: 42084 - DNA, 43 bp, synthetic construct; identical to SEQ ID NO: 24340
  misc_feature 1..43: note = Probe
  source 1..43: mol_type = other DNA

SEQ ID NO: 42085 - DNA, 28 bp, synthetic construct
  misc_feature 1..28: note = Probe
  source 1..28: mol_type = other DNA
tggatgccatagtggggcccttcactta

SEQ ID NO: 42086 - DNA, 29 bp, synthetic construct
  misc_feature 1..29: note = Probe
  source 1..29: mol_type = other DNA
tggatgccatagtggggcccttcacttac

SEQ ID NO: 42087 - DNA, 34 bp, synthetic construct; identical to SEQ ID NO: 24351
  misc_feature 1..34: note = Probe
  source 1..34: mol_type = other DNA

SEQ ID NO: 42088 - DNA, 27 bp, synthetic construct
  misc_feature 1..27: note = Probe
  source 1..27: mol_type = other DNA
tgggaacaatggcacggcaaggggctc

SEQ ID NO: 42089 - DNA, 29 bp, synthetic construct
  misc_feature 1..29: note = Probe
  source 1..29: mol_type = other DNA
tggggttcctcgcagcttcgctgcgtgag

SEQ ID NO: 42090 - DNA, 20 bp, synthetic construct
  misc_feature 1..20: note = Probe
  source 1..20: mol_type = other DNA
tggtatagtggtaagcatag

SEQ ID NO: 42091 - DNA, 22 bp, synthetic construct
  misc_feature 1..22: note = Probe
  source 1..22: mol_type = other DNA
tggtatagtggtaagcatagct

SEQ ID NO: 42092 - DNA, 23 bp, synthetic construct
  misc_feature 1..23: note = Probe
  source 1..23: mol_type = other DNA
tggtatagtggtaagcatagctg

SEQ ID NO: 42093 - DNA, 20 bp, synthetic construct
  misc_feature 1..20: note = Probe
  source 1..20: mol_type = other DNA
tggtatagtggtgagcatag

SEQ ID NO: 42094 - DNA, 22 bp, synthetic construct
  misc_feature 1..22: note = Probe
  source 1..22: mol_type = other DNA
tggtatagtggtgagcatagct

SEQ ID NO: 42095 - DNA, 23 bp, synthetic construct
  misc_feature 1..23: note = Probe
  source 1..23: mol_type = other DNA
tggtatagtggtgagcatagctg

SEQ ID NO: 42096 - DNA, 20 bp, synthetic construct
  misc_feature 1..20: note = Probe
  source 1..20: mol_type = other DNA
tggtatagtggttagcatag

SEQ ID NO: 42097 - DNA, 22 bp, synthetic construct
  misc_feature 1..22: note = Probe
  source 1..22: mol_type = other DNA
tggtatagtggttagcatagct

SEQ ID NO: 42098 - DNA, 23 bp, synthetic construct
  misc_feature 1..23: note = Probe
  source 1..23: mol_type = other DNA
tggtatagtggttagcatagctg

SEQ ID NO: 42099 - DNA, 30 bp, synthetic construct; identical to SEQ ID NO: 24388
  misc_feature 1..30: note = Probe
  source 1..30: mol_type = other DNA

SEQ ID NO: 42100 - DNA, 50 bp, synthetic construct; identical to SEQ ID NO: 1773
  misc_feature 1..50: note = Probe
  source 1..50: mol_type = other DNA

SEQ ID NO: 42101 - DNA, 34 bp, synthetic construct; identical to SEQ ID NO: 24395
  misc_feature 1..34: note = Probe
  source 1..34: mol_type = other DNA

SEQ ID NO: 42102 - DNA, 20 bp, synthetic construct
  misc_feature 1..20: note = Probe
  source 1..20: mol_type = other DNA
tggtctagcggttaggattc

SEQ ID NO: 42103 - DNA, 21 bp, synthetic construct
  misc_feature 1..21: note = Probe
  source 1..21: mol_type = other DNA
tggtctagcggttaggattcc

SEQ ID NO: 42104 - DNA, 21 bp, synthetic construct
  misc_feature 1..21: note = Probe
  source 1..21: mol_type = other DNA
tggtctagtggctaggattcg

SEQ ID NO: 42105 - DNA, 22 bp, synthetic construct
  misc_feature 1..22: note = Probe
  source 1..22: mol_type = other DNA
tggtctagtggctaggattcgg

SEQ ID NO: 42106 - DNA, 18 bp, synthetic construct
  misc_feature 1..18: note = Probe
  source 1..18: mol_type = other DNA
tggtctagtggttaggat

SEQ ID NO: 42107 - DNA, 21 bp, synthetic construct
  misc_feature 1..21: note = Probe
  source 1..21: mol_type = other DNA
tggtctagtggttaggattcg

SEQ ID NO: 42108 - DNA, 22 bp, synthetic construct
  misc_feature 1..22: note = Probe
  source 1..22: mol_type = other DNA
tggtctagtggttaggattcgg

SEQ ID NO: 42109 - DNA, 30 bp, synthetic construct; identical to SEQ ID NO: 14406
  misc_feature 1..30: note = Probe
  source 1..30: mol_type = other DNA

SEQ ID NO: 42110 - DNA, 42 bp, synthetic construct; identical to SEQ ID NO: 24412
  misc_feature 1..42: note = Probe
  source 1..42: mol_type = other DNA

SEQ ID NO: 42111 - DNA, 34 bp, synthetic construct; identical to SEQ ID NO: 14407
  misc_feature 1..34: note = Probe
  source 1..34: mol_type = other DNA

SEQ ID NO: 42112 - DNA, 21 bp, synthetic construct
  misc_feature 1..21: note = Probe
  source 1..21: mol_type = other DNA
tggtgagtatccccgcctgtc

SEQ ID NO: 42113 - DNA, 23 bp, synthetic construct
  misc_feature 1..23: note = Probe
  source 1..23: mol_type = other DNA
tggtgagtatccccgcctgtcac

SEQ ID NO: 42114 - DNA, 34 bp, synthetic construct; identical to SEQ ID NO: 14414
  misc_feature 1..34: note = Probe
  source 1..34: mol_type = other DNA

SEQ ID NO: 42115 - DNA, 35 bp, synthetic construct; identical to SEQ ID NO: 14415
  misc_feature 1..35: note = Probe
  source 1..35: mol_type = other DNA

SEQ ID NO: 42116 - DNA, 24 bp, synthetic construct
  misc_feature 1..24: note = Probe
  source 1..24: mol_type = other DNA
tggtggtctagtggttaggattcg

SEQ ID NO: 42117 - DNA, 25 bp, synthetic construct
  misc_feature 1..25: note = Probe
  source 1..25: mol_type = other DNA
tggtggtctagtggttaggattcgg

SEQ ID NO: 42118 - DNA, 20 bp, synthetic construct
  misc_feature 1..20: note = Probe
  source 1..20: mol_type = other DNA
tggtgtagtggtatcatgca

SEQ ID NO: 42119 - DNA, 23 bp, synthetic construct
  misc_feature 1..23: note = Probe
  source 1..23: mol_type = other DNA
tggtgtagtggtatcatgcaaga

SEQ ID NO: 42120 - DNA, 34 bp, synthetic construct; identical to SEQ ID NO: 14427
  misc_feature 1..34: note = Probe
  source 1..34: mol_type = other DNA

SEQ ID NO: 42121 - DNA, 18 bp, synthetic construct
  misc_feature 1..18: note = Probe
  source 1..18: mol_type = other DNA
tggttcagtggtagaatt

SEQ ID NO: 42122 - DNA, 22 bp, synthetic construct
  misc_feature 1..22: note = Probe
  source 1..22: mol_type = other DNA
tggttcagtggtagaattctcg

SEQ ID NO: 42123 - DNA, 30 bp, synthetic construct
  misc_feature 1..30: note = Probe
  source 1..30: mol_type = other DNA
tggttggcaaggtcagtgtgcctttctgcc

SEQ ID NO: 42124 - DNA, 26 bp, synthetic construct
  misc_feature 1..26: note = Probe
  source 1..26: mol_type = other DNA
tggttgtagtccgtgcgagaataatg

SEQ ID NO: 42125 - DNA, 21 bp, synthetic construct
  misc_feature 1..21: note = Probe
  source 1..21: mol_type = other DNA
tgtaaacaggagatcctgggt

SEQ ID NO: 42126 - DNA, 38 bp, synthetic construct; identical to SEQ ID NO: 8222
  misc_feature 1..38: note = Probe
  source 1..38: mol_type = other DNA

SEQ ID NO: 42127 - DNA, 43 bp, synthetic construct; identical to SEQ ID NO: 8233
  misc_feature 1..43: note = Probe
  source 1..43: mol_type = other DNA

SEQ ID NO: 42128 - DNA, 50 bp, synthetic construct; identical to SEQ ID NO: 8238
  misc_feature 1..50: note = Probe
  source 1..50: mol_type = other DNA

SEQ ID NO: 42129 - DNA, 19 bp, synthetic construct
  misc_feature 1..19: note = Probe
  source 1..19: mol_type = other DNA
tgtaatggttagcactctg

SEQ ID NO: 42130 - DNA, 22 bp, synthetic construct
  misc_feature 1..22: note = Probe
  source 1..22: mol_type = other DNA
tgtagtccgtgcgagaataatg

SEQ ID NO: 42131 - DNA, 19 bp, synthetic construct
  misc_feature 1..19: note = Probe
  source 1..19: mol_type = other DNA
tgtagtggttatcacgttc

SEQ ID NO: 42132 - DNA, 34 bp, synthetic construct; identical to SEQ ID NO: 24486
  misc_feature 1..34: note = Probe
  source 1..34: mol_type = other DNA

SEQ ID NO: 42133 - DNA, 35 bp, synthetic construct
  misc_feature 1..35: note = Probe
  source 1..35: mol_type = other DNA
tgtatgaggccccgggttcgatccccggcatctcc

SEQ ID NO: 42134 - DNA, 39 bp, synthetic construct; identical to SEQ ID NO: 24490
  misc_feature 1..39: note = Probe
  source 1..39: mol_type = other DNA

SEQ ID NO: 42135 - DNA, 39 bp, synthetic construct; identical to SEQ ID NO: 24494
  misc_feature 1..39: note = Probe
  source 1..39: mol_type = other DNA

SEQ ID NO: 42136 - DNA, 34 bp, synthetic construct
  misc_feature 1..34: note = Probe
  source 1..34: mol_type = other DNA
tgtatgaggtcccgggttcgatccccggcatctc

SEQ ID NO: 42137 - DNA, 39 bp, synthetic construct; identical to SEQ ID NO: 24499
  misc_feature 1..39: note = Probe
  source 1..39: mol_type = other DNA

SEQ ID NO: 42138 - DNA, 19 bp, synthetic construct
  misc_feature 1..19: note = Probe
  source 1..19: mol_type = other DNA
tgtcacgcgggagaccggg

SEQ ID NO: 42139 - DNA, 33 bp, synthetic construct
  misc_feature 1..33: note = Probe
  source 1..33: mol_type = other DNA
tgtcacgcgggagaccggggttcaattccccga

SEQ ID NO: 42140 - DNA, 41 bp, synthetic construct
  misc_feature 1..41: note = Probe
  source 1..41: mol_type = other DNA
tgtcacgcgggagaccggggttcaattccccgacggggagg

SEQ ID NO: 42141 - DNA, 43 bp, synthetic construct; identical to SEQ ID NO: 8254
  misc_feature 1..43: note = Probe
  source 1..43: mol_type = other DNA

SEQ ID NO: 42142 - DNA, 32 bp, synthetic construct
  misc_feature 1..32: note = Probe
  source 1..32: mol_type = other DNA
tgtcacgcgggagaccggggttcgattcccca

SEQ ID NO: 42143 - DNA, 33 bp, synthetic construct
  misc_feature 1..33: note = Probe
  source 1..33: mol_type = other DNA
tgtcacgcgggagaccggggttcgattccccaa

SEQ ID NO: 42144 - DNA, 33 bp, synthetic construct; identical to SEQ ID NO: 14450
  misc_feature 1..33: note = Probe
  source 1..33: mol_type = other DNA

SEQ ID NO: 42145 - DNA, 34 bp, synthetic construct; identical to SEQ ID NO: 14451
  misc_feature 1..34: note = Probe
  source 1..34: mol_type = other DNA

SEQ ID NO: 42146 - DNA, 35 bp, synthetic construct; identical to SEQ ID NO: 14452
  misc_feature 1..35: note = Probe
  source 1..35: mol_type = other DNA

SEQ ID NO: 42147 - DNA, 41 bp, synthetic construct; identical to SEQ ID NO: 24517
  misc_feature 1..41: note = Probe
  source 1..41: mol_type = other DNA

SEQ ID NO: 42148 - DNA, 46 bp, synthetic construct
  misc_feature 1..46: note = Probe
  source 1..46: mol_type = other DNA
tgtcacgcgggagaccggggttcgattccccgacggggagaaaagt

SEQ ID NO: 42149 - DNA, 50 bp, synthetic construct
  misc_feature 1..50: note = Probe
  source 1..50: mol_type = other DNA
tgtcacgcgggagaccggggttcgattccccgacggggagaaaagttgct

SEQ ID NO: 42150 - DNA, 50 bp, synthetic construct
  misc_feature 1..50: note = Probe
  source 1..50: mol_type = other DNA
tgtcacgcgggagaccggggttcgattccccgacggggagacgaagcagt

SEQ ID NO: 42151 - DNA, 50 bp, synthetic construct
  misc_feature 1..50: note = Probe
  source 1..50: mol_type = other DNA
tgtcacgcgggagaccggggttcgattccccgacggggagagtactagca

SEQ ID NO: 42152 - DNA, 41 bp, synthetic construct; identical to SEQ ID NO: 24521
  misc_feature 1..41: note = Probe
  source 1..41: mol_type = other DNA

SEQ ID NO: 42153 - DNA, 50 bp, synthetic construct; identical to SEQ ID NO: 8256
  misc_feature 1..50: note = Probe
  source 1..50: mol_type = other DNA

SEQ ID NO: 42154 - DNA, 43 bp, synthetic construct; identical to SEQ ID NO: 8257
  misc_feature 1..43: note = Probe
  source 1..43: mol_type = other DNA

SEQ ID NO: 42155 - DNA, 50 bp, synthetic construct; identical to SEQ ID NO: 8259
  misc_feature 1..50: note = Probe
  source 1..50: mol_type = other DNA

SEQ ID NO: 42156 - DNA, 46 bp, synthetic construct
  misc_feature 1..46: note = Probe
  source 1..46: mol_type = other DNA
tgtcacgcgggagaccggggttcgattccccgacggggaggcagcc

SEQ ID NO: 42157 - DNA, 50 bp, synthetic construct
  misc_feature 1..50: note = Probe
  source 1..50: mol_type = other DNA
tgtcacgcgggagaccggggttcgattccccgacggggaggcagccgtgc

SEQ ID NO: 42158 - DNA, 50 bp, synthetic construct; identical to SEQ ID NO: 24527
  misc_feature 1..50: note = Probe
  source 1..50: mol_type = other DNA

SEQ ID NO: 42159 - DNA, 46 bp, synthetic construct
  misc_feature 1..46: note = Probe
  source 1..46: mol_type = other DNA
tgtcacgcgggagaccggggttcgattccccgacggggaggccggg

SEQ ID NO: 42160 - DNA, 50 bp, synthetic construct
  misc_feature 1..50: note = Probe
  source 1..50: mol_type = other DNA
tgtcacgcgggagaccggggttcgattccccgacggggaggccgggtact

SEQ ID NO: 42161 - DNA, 29 bp, synthetic construct
  misc_feature 1..29: note = Probe
  source 1..29: mol_type = other DNA
tgtcgttagtctaggctgtcagctcttcc

SEQ ID NO: 42162 - DNA, 43 bp, synthetic construct; identical to SEQ ID NO: 8271
  misc_feature 1..43: note = Probe
  source 1..43: mol_type = other DNA

SEQ ID NO: 42163 - DNA, 34 bp, synthetic construct
  misc_feature 1..34: note = Probe
  source 1..34: mol_type = other DNA
tgtgagaggtcccgggttcaaatcccggacgagc

SEQ ID NO: 42164 - DNA, 35 bp, synthetic construct
  misc_feature 1..35: note = Probe
  source 1..35: mol_type = other DNA
tgtgagaggtcccgggttcaaatcccggacgagcc

SEQ ID NO: 42165 - DNA, 21 bp, synthetic construct
  misc_feature 1..21: note = Probe
  source 1..21: mol_type = other DNA
tgtgctccggagttacctcgt

SEQ ID NO: 42166 - DNA, 22 bp, synthetic construct
  misc_feature 1..22: note = Probe
  source 1..22: mol_type = other DNA
tgtgctccggagttacctcgtt

SEQ ID NO: 42167 - DNA, 23 bp, synthetic construct
  misc_feature 1..23: note = Probe
  source 1..23: mol_type = other DNA
tgtgctccggagttacctcgttt

SEQ ID NO: 42168 - DNA, 24 bp, synthetic construct
  misc_feature 1..24: note = Probe
  source 1..24: mol_type = other DNA
tgtgctccggagttacctcgtttt

SEQ ID NO: 42169 - DNA, 35 bp, synthetic construct; identical to SEQ ID NO: 8289
  misc_feature 1..35: note = Probe
  source 1..35: mol_type = other DNA

SEQ ID NO: 42170 - DNA, 28 bp, synthetic construct
  misc_feature 1..28: note = Probe
  source 1..28: mol_type = other DNA
tgtttgtgggtttaagtcccattggtct

SEQ ID NO: 42171 - DNA, 34 bp, synthetic construct; identical to SEQ ID NO: 8304
  misc_feature 1..34: note = Probe
  source 1..34: mol_type = other DNA

SEQ ID NO: 42172 - DNA, 50 bp, synthetic construct; identical to SEQ ID NO: 1785
  misc_feature 1..50: note = Probe
  source 1..50: mol_type = other DNA

SEQ ID NO: 42173 - DNA, 41 bp, synthetic construct; identical to SEQ ID NO: 8318
  misc_feature 1..41: note = Probe
  source 1..41: mol_type = other DNA

SEQ ID NO: 42174 - DNA, 42 bp, synthetic construct; identical to SEQ ID NO: 8319
  misc_feature 1..42: note = Probe
  source 1..42: mol_type = other DNA

SEQ ID NO: 42175 - DNA, 32 bp, synthetic construct; identical to SEQ ID NO: 8326
  misc_feature 1..32: note = Probe
  source 1..32: mol_type = other DNA

SEQ ID NO: 42176 - DNA, 20 bp, synthetic construct
  misc_feature 1..20: note = Probe
  source 1..20: mol_type = other DNA
ttacacgcagaaggtcctgg

SEQ ID NO: 42177 - DNA, 21 bp, synthetic construct
  misc_feature 1..21: note = Probe
  source 1..21: mol_type = other DNA
ttacacgcagaaggtcctggg

SEQ ID NO: 42178 - DNA, 42 bp, synthetic construct; identical to SEQ ID NO: 8339
  misc_feature 1..42: note = Probe
  source 1..42: mol_type = other DNA

SEQ ID NO: 42179 - DNA, 43 bp, synthetic construct; identical to SEQ ID NO: 8340
  misc_feature 1..43: note = Probe
  source 1..43: mol_type = other DNA

SEQ ID NO: 42180 - DNA, 28 bp, synthetic construct
  misc_feature 1..28: note = Probe
  source 1..28: mol_type = other DNA
ttacagtcagaggttcaattcctcttct

SEQ ID NO: 42181 - DNA, 29 bp, synthetic construct
  misc_feature 1..29: note = Probe
  source 1..29: mol_type = other DNA
ttacagtcagaggttcaattcctcttctt

SEQ ID NO: 42182 - DNA, 30 bp, synthetic construct; identical to SEQ ID NO: 24601
  misc_feature 1..30: note = Probe
  source 1..30: mol_type = other DNA

SEQ ID NO: 42183 - DNA, 31 bp, synthetic construct
  misc_feature 1..31: note = Probe
  source 1..31: mol_type = other DNA
ttacagtcagaggttcaattcctcttcttaa

SEQ ID NO: 42184 - DNA, 33 bp, synthetic construct; identical to SEQ ID NO: 24602
  misc_feature 1..33: note = Probe
  source 1..33: mol_type = other DNA

SEQ ID NO: 42185 - DNA, 32 bp, synthetic construct; identical to SEQ ID NO: 8359
  misc_feature 1..32: note = Probe
  source 1..32: mol_type = other DNA

SEQ ID NO: 42186 - DNA, 50 bp, synthetic construct; identical to SEQ ID NO: 1795
  misc_feature 1..50: note = Probe
  source 1..50: mol_type = other DNA

SEQ ID NO: 42187 - DNA, 36 bp, synthetic construct; identical to SEQ ID NO: 8373
  misc_feature 1..36: note = Probe
  source 1..36: mol_type = other DNA

SEQ ID NO: 42188 - DNA, 23 bp, synthetic construct
  misc_feature 1..23: note = Probe
  source 1..23: mol_type = other DNA
ttaggatgcgagaggtcccgggt

SEQ ID NO: 42189 - DNA, 20 bp, synthetic construct
  misc_feature 1..20: note = Probe
  source 1..20: mol_type = other DNA
ttagggtgcgagaggtcccg

SEQ ID NO: 42190 - DNA, 23 bp, synthetic construct
  misc_feature 1..23: note = Probe
  source 1..23: mol_type = other DNA
ttagggtgcgagaggtcccgggt

SEQ ID NO: 42191 - DNA, 24 bp, synthetic construct
  misc_feature 1..24: note = Probe
  source 1..24: mol_type = other DNA
ttagggtgcgagaggtcccgggtt

SEQ ID NO: 42192 - DNA, 23 bp, synthetic construct
  misc_feature 1..23: note = Probe
  source 1..23: mol_type = other DNA
ttagtatagtggtgagtatcccc

SEQ ID NO: 42193 - DNA, 24 bp, synthetic construct
  misc_feature 1..24: note = Probe
  source 1..24: mol_type = other DNA
ttagtatagtggtgagtatccccg

SEQ ID NO: 42194 - DNA, 24 bp, synthetic construct
  misc_feature 1..24: note = Probe
  source 1..24: mol_type = other DNA
ttagtctaggctgtcagctcttcc

SEQ ID NO: 42195 - DNA, 18 bp, synthetic construct
  misc_feature 1..18: note = Probe
  source 1..18: mol_type = other DNA
ttcaaatcacgtcggggt

SEQ ID NO: 42196 - DNA, 20 bp, synthetic construct
  misc_feature 1..20: note = Probe
  source 1..20: mol_type = other DNA
ttcaaatcacgtcggggtca

SEQ ID NO: 42197 - DNA, 23 bp, synthetic construct
  misc_feature 1..23: note = Probe
  source 1..23: mol_type = other DNA
ttcaaatcacgtcggggtcaaca

SEQ ID NO: 42198 - DNA, 30 bp, synthetic construct
  misc_feature 1..30: note = Probe
  source 1..30: mol_type = other DNA
ttcaaatcacgtcggggtcagcggctattt

SEQ ID NO: 42199 - DNA, 31 bp, synthetic construct
  misc_feature 1..31: note = Probe
  source 1..31: mol_type = other DNA
ttcaaatcacgtcggggtcagcggctatttt

SEQ ID NO: 42200 - DNA, 17 bp, synthetic construct
  misc_feature 1..17: note = Probe
  source 1..17: mol_type = other DNA
ttcaaatcccggacgag

SEQ ID NO: 42201 - DNA, 23 bp, synthetic construct
  misc_feature 1..23: note = Probe
  source 1..23: mol_type = other DNA
ttcaaatccgggtgccccctcaa

SEQ ID NO: 42202 - DNA, 32 bp, synthetic construct
  misc_feature 1..32: note = Probe
  source 1..32: mol_type = other DNA
ttcaaatctcgctggggcctgcttccgtcttt

SEQ ID NO: 42203 - DNA, 18 bp, synthetic construct
  misc_feature 1..18: note = Probe
  source 1..18: mol_type = other DNA
ttcaaatctcggtgggac

SEQ ID NO: 42204 - DNA, 27 bp, synthetic construct
  misc_feature 1..27: note = Probe
  source 1..27: mol_type = other DNA
ttcaacttaacttgaccgctctgagct

SEQ ID NO: 42205 - DNA, 20 bp, synthetic construct
  misc_feature 1..20: note = Probe
  source 1..20: mol_type = other DNA
ttcaagtcacgtcggggtca

SEQ ID NO: 42206 - DNA, 25 bp, synthetic construct
  misc_feature 1..25: note = Probe
  source 1..25: mol_type = other DNA
ttcaatccccaatacctccaggttt

SEQ ID NO: 42207 - DNA, 26 bp, synthetic construct
  misc_feature 1..26: note = Probe
  source 1..26: mol_type = other DNA
ttcaatccccaatacctccaggtttt

SEQ ID NO: 42208 - DNA, 30 bp, synthetic construct
  misc_feature 1..30: note = Probe
  source 1..30: mol_type = other DNA
ttcaatccccggcacctccagcttcatttt

SEQ ID NO: 42209 - DNA, 23 bp, synthetic construct
  misc_feature 1..23: note = Probe
  source 1..23: mol_type = other DNA
ttcaattcccggtcagggaacca

SEQ ID NO: 42210 - DNA, 28 bp, synthetic construct
  misc_feature 1..28: note = Probe
  source 1..28: mol_type = other DNA
ttcaattctcgctggggcctgtgtgttt

SEQ ID NO: 42211 - DNA, 29 bp, synthetic construct
  misc_feature 1..29: note = Probe
  source 1..29: mol_type = other DNA
ttcaattctcgctggggcctgtgtgtttt

SEQ ID NO: 42212 - DNA, 30 bp, synthetic construct
  misc_feature 1..30: note = Probe
  source 1..30: mol_type = other DNA
ttcaattctcgctggggcctgtgtgttttt

SEQ ID NO: 42213 - DNA, 36 bp, synthetic construct
  misc_feature 1..36: note = Probe
  source 1..36: mol_type = other DNA
ttcacccaggcggcccgggttcgactcccggtgtgg

SEQ ID NO: 42214 - DNA, 37 bp, synthetic construct
  misc_feature 1..37: note = Probe
  source 1..37: mol_type = other DNA
ttcacccaggcggcccgggttcgactcccggtgtggg

SEQ ID NO: 42215 - DNA, 38 bp, synthetic construct
  misc_feature 1..38: note = Probe
  source 1..38: mol_type = other DNA
ttcacccaggcggcccgggttcgactcccggtgtggga

SEQ ID NO: 42216 - DNA, 18 bp, synthetic construct
  misc_feature 1..18: note = Probe
  source 1..18: mol_type = other DNA
ttcaggtcgcagtctccc

SEQ ID NO: 42217 - DNA, 50 bp, synthetic construct
  misc_feature 1..50: note = Probe
  source 1..50: mol_type = other DNA
ttcaggtcgcagtctcccctggaggcgtgggttcgaatcccacttctgac

SEQ ID NO: 42218 - DNA, 37 bp, synthetic construct; identical to SEQ ID NO: 8397
  misc_feature 1..37: note = Probe
  source 1..37: mol_type = other DNA

SEQ ID NO: 42219 - DNA, 38 bp, synthetic construct; identical to SEQ ID NO: 8398
  misc_feature 1..38: note = Probe
  source 1..38: mol_type = other DNA

SEQ ID NO: 42220 - DNA, 41 bp, synthetic construct; identical to SEQ ID NO: 24655
  misc_feature 1..41: note = Probe
  source 1..41: mol_type = other DNA

SEQ ID NO: 42221 - DNA, 21 bp, synthetic construct
  misc_feature 1..21: note = Probe
  source 1..21: mol_type = other DNA
ttccaagcagttgacccgggt

SEQ ID NO: 42222 - DNA, 28 bp, synthetic construct
  misc_feature 1..28: note = Probe
  source 1..28: mol_type = other DNA
ttccatagtgtagtggttatcacgtctg

SEQ ID NO: 42223 - DNA, 29 bp, synthetic construct
  misc_feature 1..29: note = Probe
  source 1..29: mol_type = other DNA
ttccatagtgtagtggttatcacgtctgc

SEQ ID NO: 42224 - DNA, 31 bp, synthetic construct
  misc_feature 1..31: note = Probe
  source 1..31: mol_type = other DNA
ttcccatatggtctagcggttaggattcctg

SEQ ID NO: 42225 - DNA, 20 bp, synthetic construct
  misc_feature 1..20: note = Probe
  source 1..20: mol_type = other DNA
ttcccattcttgcgacccgg

SEQ ID NO: 42226 - DNA, 39 bp, synthetic construct
  misc_feature 1..39: note = Probe
  source 1..39: mol_type = other DNA
ttcccattcttgcgacccgggttcgattcccgggcggcg

SEQ ID NO: 42227 - DNA, 50 bp, synthetic construct
  misc_feature 1..50: note = Probe
  source 1..50: mol_type = other DNA
ttcccattcttgcgacccgggttcgattcccgggcggcgcacttagtttt

SEQ ID NO: 42228 - DNA, 21 bp, synthetic construct
  misc_feature 1..21: note = Probe
  source 1..21: mol_type = other DNA
ttccctctggcagttctcaag

SEQ ID NO: 42229 - DNA, 29 bp, synthetic construct
  misc_feature 1..29: note = Probe
  source 1..29: mol_type = other DNA
ttccctggtggtctagtggttaggattcg

SEQ ID NO: 42230 - DNA, 30 bp, synthetic construct; identical to SEQ ID NO: 12344
  misc_feature 1..30: note = Probe
  source 1..30: mol_type = other DNA

SEQ ID NO: 42231 - DNA, 32 bp, synthetic construct
  misc_feature 1..32: note = Probe
  source 1..32: mol_type = other DNA
ttccctggtggtctagtggttaggattcggcg

SEQ ID NO: 42232 - DNA, 27 bp, synthetic construct
  misc_feature 1..27: note = Probe
  source 1..27: mol_type = other DNA
ttccgtagtgtagtggttatcacgttc

SEQ ID NO: 42233 - DNA, 29 bp, synthetic construct
  misc_feature 1..29: note = Probe
  source 1..29: mol_type = other DNA
ttccgtagtgtagtggttatcacgttcgc

SEQ ID NO: 42234 - DNA, 30 bp, synthetic construct; identical to SEQ ID NO: 8425
  misc_feature 1..30: note = Probe
  source 1..30: mol_type = other DNA

SEQ ID NO: 42235 - DNA, 50 bp, synthetic construct; identical to SEQ ID NO: 24697
  misc_feature 1..50: note = Probe
  source 1..50: mol_type = other DNA

SEQ ID NO: 42236 - DNA, 50 bp, synthetic construct; identical to SEQ ID NO: 24701
  misc_feature 1..50: note = Probe
  source 1..50: mol_type = other DNA

SEQ ID NO: 42237 - DNA, 18 bp, synthetic construct
  misc_feature 1..18: note = Probe
  source 1..18: mol_type = other DNA
ttccgtgggtttgttttt

SEQ ID NO: 42238 - DNA, 50 bp, synthetic construct; identical to SEQ ID NO: 8432
  misc_feature 1..50: note = Probe
  source 1..50: mol_type = other DNA

SEQ ID NO: 42239 - DNA, 29 bp, synthetic construct
  misc_feature 1..29: note = Probe
  source 1..29: mol_type = other DNA
ttcgaacctcagagggggcagctgccatt

SEQ ID NO: 42240 - DNA, 30 bp, synthetic construct
  misc_feature 1..30: note = Probe
  source 1..30: mol_type = other DNA
ttcgaacctcagagggggcagctgccattt

SEQ ID NO: 42241 - DNA, 31 bp, synthetic construct
  misc_feature 1..31: note = Probe
  source 1..31: mol_type = other DNA
ttcgaacctcagagggggcagctgccatttt

SEQ ID NO: 42242 - DNA, 36 bp, synthetic construct; identical to SEQ ID NO: 8438
  misc_feature 1..36: note = Probe
  source 1..36: mol_type = other DNA

SEQ ID NO: 42243 - DNA, 18 bp, synthetic construct
  misc_feature 1..18: note = Probe
  source 1..18: mol_type = other DNA
ttcgaatcacgtcggggt

SEQ ID NO: 42244 - DNA, 20 bp, synthetic construct
  misc_feature 1..20: note = Probe
  source 1..20: mol_type = other DNA
ttcgaatcacgtcggggtca

SEQ ID NO: 42245 - DNA, 31 bp, synthetic construct
  misc_feature 1..31: note = Probe
  source 1..31: mol_type = other DNA
ttcgaatcccaccactgccagtggtacgttt

SEQ ID NO: 42246 - DNA, 20 bp, synthetic construct
  misc_feature 1..20: note = Probe
  source 1..20: mol_type = other DNA
ttcgaatcccaccagagtcg

SEQ ID NO: 42247 - DNA, 20 bp, synthetic construct
  misc_feature 1..20: note = Probe
  source 1..20: mol_type = other DNA
ttcgaatcccaccgctgcca

SEQ ID NO: 42248 - DNA, 23 bp, synthetic construct
  misc_feature 1..23: note = Probe
  source 1..23: mol_type = other DNA
ttcgaatcccaccgctgccacac

SEQ ID NO: 42249 - DNA, 23 bp, synthetic construct
  misc_feature 1..23: note = Probe
  source 1..23: mol_type = other DNA
ttcgaatcccaccgctgccaggt

SEQ ID NO: 42250 - DNA, 33 bp, synthetic construct
  misc_feature 1..33: note = Probe
  source 1..33: mol_type = other DNA
ttcgaatcccaccgctgccaggtgcttcccttt

SEQ ID NO: 42251 - DNA, 34 bp, synthetic construct
  misc_feature 1..34: note = Probe
  source 1..34: mol_type = other DNA
ttcgaatcccaccgctgccaggtgcttccctttt

SEQ ID NO: 42252 - DNA, 28 bp, synthetic construct
  misc_feature 1..28: note = Probe
  source 1..28: mol_type = other DNA
ttcgaatcccacttctgacacatacttt

SEQ ID NO: 42253 - DNA, 29 bp, synthetic construct
  misc_feature 1..29: note = Probe
  source 1..29: mol_type = other DNA
ttcgaatcccacttctgacacattcgttt

SEQ ID NO: 42254 - DNA, 23 bp, synthetic construct
  misc_feature 1..23: note = Probe
  source 1..23: mol_type = other DNA
ttcgaatcccagcggtgcctccg

SEQ ID NO: 42255 - DNA, 30 bp, synthetic construct
  misc_feature 1..30: note = Probe
  source 1..30: mol_type = other DNA
ttcgaatcctgctcacagcgtcactagttt

SEQ ID NO: 42256 - DNA, 31 bp, synthetic construct
  misc_feature 1..31: note = Probe
  source 1..31: mol_type = other DNA
ttcgacccccggctcctccagttgtccattt

SEQ ID NO: 42257 - DNA, 32 bp, synthetic construct
  misc_feature 1..32: note = Probe
  source 1..32: mol_type = other DNA
ttcgacccccggctcctccagttgtccatttt

SEQ ID NO: 42258 - DNA, 23 bp, synthetic construct
  misc_feature 1..23: note = Probe
  source 1..23: mol_type = other DNA
ttcgactcccggtgtgggaacgc

SEQ ID NO: 42259 - DNA, 20 bp, synthetic construct
  misc_feature 1..20: note = Probe
  source 1..20: mol_type = other DNA
ttcgactcctggctggctcg

SEQ ID NO: 42260 - DNA, 34 bp, synthetic construct
  misc_feature 1..34: note = Probe
  source 1..34: mol_type = other DNA
ttcgagcccacccaggaacgcttgttcgagcttt

SEQ ID NO: 42261 - DNA, 23 bp, synthetic construct
  misc_feature 1..23: note = Probe
  source 1..23: mol_type = other DNA
ttcgagcccacccagggacgcct

SEQ ID NO: 42262 - DNA, 31 bp, synthetic construct
  misc_feature 1..31: note = Probe
  source 1..31: mol_type = other DNA
ttcgagcccacccagggacgcgctctccttt

SEQ ID NO: 42263 - DNA, 34 bp, synthetic construct
  misc_feature 1..34: note = Probe
  source 1..34: mol_type = other DNA
ttcgagcccacccagggacgcttattggaacttt

SEQ ID NO: 42264 - DNA, 34 bp, synthetic construct
  misc_feature 1..34: note = Probe
  source 1..34: mol_type = other DNA
ttcgagcccacccagggacggtcagtgcttcttt

SEQ ID NO: 42265 - DNA, 18 bp, synthetic construct
  misc_feature 1..18: note = Probe
  source 1..18: mol_type = other DNA
ttcgagccccagtggaac

SEQ ID NO: 42266 - DNA, 20 bp, synthetic construct
  misc_feature 1..20: note = Probe
  source 1..20: mol_type = other DNA
ttcgagccccagtggaacca

SEQ ID NO: 42267 - DNA, 31 bp, synthetic construct
  misc_feature 1..31: note = Probe
  source 1..31: mol_type = other DNA
ttcgagcctcacacggggcagtctaacgttt

SEQ ID NO: 42268 - DNA, 29 bp, synthetic construct
  misc_feature 1..29: note = Probe
  source 1..29: mol_type = other DNA
ttcgagcctcacctggagcaagacccttt

SEQ ID NO: 42269 - DNA, 30 bp, synthetic construct
  misc_feature 1..30: note = Probe
  source 1..30: mol_type = other DNA
ttcgagcctcacctggagcaagaccctttt

SEQ ID NO: 42270 - DNA, 27 bp, synthetic construct
  misc_feature 1..27: note = Probe
  source 1..27: mol_type = other DNA
ttcgagcctcacctggagcattgtttt

SEQ ID NO: 42271 - DNA, 23 bp, synthetic construct
  misc_feature 1..23: note = Probe
  source 1..23: mol_type = other DNA
ttcgagtcccacctggggtgtcg

SEQ ID NO: 42272 - DNA, 32 bp, synthetic construct
  misc_feature 1..32: note = Probe
  source 1..32: mol_type = other DNA
ttcgagtcccatctggggtggcctgtgacttt

SEQ ID NO: 42273 - DNA, 33 bp, synthetic construct
  misc_feature 1..33: note = Probe
  source 1..33: mol_type = other DNA
ttcgagtcccatctggggtggcctgtgactttt

SEQ ID NO: 42274 - DNA, 29 bp, synthetic construct
  misc_feature 1..29: note = Probe
  source 1..29: mol_type = other DNA
ttcgagtcccggcggagtcgtaacgcttt

SEQ ID NO: 42275 - DNA, 30 bp, synthetic construct
  misc_feature 1..30: note = Probe
  source 1..30: mol_type = other DNA
ttcgagtcccggcggagtcgtaacgctttt

SEQ ID NO: 42276 - DNA, 23 bp, synthetic construct
  misc_feature 1..23: note = Probe
  source 1..23: mol_type = other DNA
ttcgagtcccttcgtggtcgttg

SEQ ID NO: 42277 - DNA, 37 bp, synthetic construct
  misc_feature 1..37: note = Probe
  source 1..37: mol_type = other DNA
ttcgagtcccttcgtggtcgttgccatgttaacgttt

SEQ ID NO: 42278 - DNA, 37 bp, synthetic construct
  misc_feature 1..37: note = Probe
  source 1..37: mol_type = other DNA
ttcgatccccagcacttccacaagtacatttccttat

SEQ ID NO: 42279 - DNA, 20 bp, synthetic construct
  misc_feature 1..20: note = Probe
  source 1..20: mol_type = other DNA
ttcgatccccagcatctcca

SEQ ID NO: 42280 - DNA, 23 bp, synthetic construct
  misc_feature 1..23: note = Probe
  source 1..23: mol_type = other DNA
ttcgatccccagcatctccagtg

SEQ ID NO: 42281 - DNA, 27 bp, synthetic construct
  misc_feature 1..27: note = Probe
  source 1..27: mol_type = other DNA
ttcgatccccagcatctccagtgtttt

SEQ ID NO: 42282 - DNA, 20 bp, synthetic construct
  misc_feature 1..20: note = Probe
  source 1..20: mol_type = other DNA
ttcgatccccagtacctcca

SEQ ID NO: 42283 - DNA, 18 bp, synthetic construct
  misc_feature 1..18: note = Probe
  source 1..18: mol_type = other DNA
ttcgatccccggcacctc

SEQ ID NO: 42284 - DNA, 20 bp, synthetic construct
  misc_feature 1..20: note = Probe
  source 1..20: mol_type = other DNA
ttcgatccccggcacctcca

SEQ ID NO: 42285 - DNA, 30 bp, synthetic construct
  misc_feature 1..30: note = Probe
  source 1..30: mol_type = other DNA
ttcgatccccggcatctccagtgtagtttt

SEQ ID NO: 42286 - DNA, 23 bp, synthetic construct
  misc_feature 1..23: note = Probe
  source 1..23: mol_type = other DNA
ttcgatccccggcatctccattg

SEQ ID NO: 42287 - DNA, 23 bp, synthetic construct
  misc_feature 1..23: note = Probe
  source 1..23: mol_type = other DNA
ttcgatcctcacacggggcacaa

SEQ ID NO: 42288 - DNA, 29 bp, synthetic construct
  misc_feature 1..29: note = Probe
  source 1..29: mol_type = other DNA
ttcgatcctcacacggggcacaataattt

SEQ ID NO: 42289 - DNA, 30 bp, synthetic construct
  misc_feature 1..30: note = Probe
  source 1..30: mol_type = other DNA
ttcgatcctcacacggggcacaataatttt

SEQ ID NO: 42290 - DNA, 24 bp, synthetic construct
  misc_feature 1..24: note = Probe
  source 1..24: mol_type = other DNA
ttcgatcctcacctggagcacttt

SEQ ID NO: 42291 - DNA, 25 bp, synthetic construct
  misc_feature 1..25: note = Probe
  source 1..25: mol_type = other DNA
ttcgatcctcacctggagcactttt

SEQ ID NO: 42292 - DNA, 36 bp, synthetic construct
  misc_feature 1..36: note = Probe
  source 1..36: mol_type = other DNA
ttcgatcctcgctggggcctcctgttggcttacttt

SEQ ID NO: 42293 - DNA, 23 bp, synthetic construct
  misc_feature 1..23: note = Probe
  source 1..23: mol_type = other DNA
ttcgattccccgacggggaggca

SEQ ID NO: 42294 - DNA, 34 bp, synthetic construct
  misc_feature 1..34: note = Probe
  source 1..34: mol_type = other DNA
ttcgattccccgacggggaggcagccgtgctttt

SEQ ID NO: 42295 - DNA, 32 bp, synthetic construct
  misc_feature 1..32: note = Probe
  source 1..32: mol_type = other DNA
ttcgattcccggccaatgcacgagtacagttt

SEQ ID NO: 42296 - DNA, 33 bp, synthetic construct
  misc_feature 1..33: note = Probe
  source 1..33: mol_type = other DNA
ttcgattcccggccaatgcacgagtacagtttt

SEQ ID NO: 42297 - DNA, 31 bp, synthetic construct
  misc_feature 1..31: note = Probe
  source 1..31: mol_type = other DNA
ttcgattcccggtcaggaaagtaagccgttt

SEQ ID NO: 42298 - DNA, 23 bp, synthetic construct
  misc_feature 1..23: note = Probe
  source 1..23: mol_type = other DNA
ttcgattcccggtcagggaacaa

SEQ ID NO: 42299 - DNA, 20 bp, synthetic construct
  misc_feature 1..20: note = Probe
  source 1..20: mol_type = other DNA
ttcgggtgcgagaggtcccg

SEQ ID NO: 42300 - DNA, 23 bp, synthetic construct
  misc_feature 1..23: note = Probe
  source 1..23: mol_type = other DNA
ttcgggtgcgagaggtcccgggt

SEQ ID NO: 42301 - DNA, 24 bp, synthetic construct
  misc_feature 1..24: note = Probe
  source 1..24: mol_type = other DNA
ttcgggtgcgagaggtcccgggtt

SEQ ID NO: 42302 - DNA, 30 bp, synthetic construct
  misc_feature 1..30: note = Probe
  source 1..30: mol_type = other DNA
ttctcaaactttaaatgggcaagaagccca

SEQ ID NO: 42303 - DNA, 32 bp, synthetic construct
  misc_feature 1..32: note = Probe
  source 1..32: mol_type = other DNA
ttctcaaactttaaatgggcaagaagcccagc

SEQ ID NO: 42304 - DNA, 33 bp, synthetic construct; identical to SEQ ID NO: 24744
  misc_feature 1..33: note = Probe
  source 1..33: mol_type = other DNA

SEQ ID NO: 42305 - DNA, 45 bp, synthetic construct; identical to SEQ ID NO: 8473
  misc_feature 1..45: note = Probe
  source 1..45: mol_type = other DNA

SEQ ID NO: 42306 - DNA, 43 bp, synthetic construct; identical to SEQ ID NO: 8477
  misc_feature 1..43: note = Probe
  source 1..43: mol_type = other DNA

SEQ ID NO: 42307 - DNA, 50 bp, synthetic construct; identical to SEQ ID NO: 8478
  misc_feature 1..50: note = Probe
  source 1..50: mol_type = other DNA

SEQ ID NO: 42308 - DNA, 22 bp, synthetic construct
  misc_feature 1..22: note = Probe
  source 1..22: mol_type = other DNA
ttgggtgcgagaggtcccgggt

SEQ ID NO: 42309 - DNA, 41 bp, synthetic construct; identical to SEQ ID NO: 8481
  misc_feature 1..41: note = Probe
  source 1..41: mol_type = other DNA

SEQ ID NO: 42310 - DNA, 27 bp, synthetic construct
  misc_feature 1..27: note = Probe
  source 1..27: mol_type = other DNA
ttggtggtatagtggtaagcatagctg

SEQ ID NO: 42311 - DNA, 27 bp, synthetic construct
  misc_feature 1..27: note = Probe
  source 1..27: mol_type = other DNA
ttggtggtatagtggtgagcatagctg

SEQ ID NO: 42312 - DNA, 27 bp, synthetic construct
  misc_feature 1..27: note = Probe
  source 1..27: mol_type = other DNA
ttggtggtatagtggttagcatagctg

SEQ ID NO: 42313 - DNA, 24 bp, synthetic construct
  misc_feature 1..24: note = Probe
  source 1..24: mol_type = other DNA
ttggtggttcagtggtagaattct

SEQ ID NO: 42314 - DNA, 25 bp, synthetic construct
  misc_feature 1..25: note = Probe
  source 1..25: mol_type = other DNA
ttggtggttcagtggtagaattctc

SEQ ID NO: 42315 - DNA, 26 bp, synthetic construct
  misc_feature 1..26: note = Probe
  source 1..26: mol_type = other DNA
ttggtggttcagtggtagaattctcg

SEQ ID NO: 42316 - DNA, 27 bp, synthetic construct
  misc_feature 1..27: note = Probe
  source 1..27: mol_type = other DNA
ttggtggttcagtggtagaattctcgc

SEQ ID NO: 42317 - DNA, 22 bp, synthetic construct
  misc_feature 1..22: note = Probe
  source 1..22: mol_type = other DNA
ttgtaaacaggagatcctgggt

SEQ ID NO: 42318 - DNA, 20 bp, synthetic construct
  misc_feature 1..20: note = Probe
  source 1..20: mol_type = other DNA
ttgtggccgcagcaacctcg

SEQ ID NO: 42319 - DNA, 39 bp, synthetic construct
  misc_feature 1..39: note = Probe
  source 1..39: mol_type = other DNA
tttaagccgcgcattggtggttcagtggtagaattctcg

SEQ ID NO: 42320 - DNA, 21 bp, synthetic construct
  misc_feature 1..21: note = Probe
  source 1..21: mol_type = other DNA
tttacacgcagaaggtcctgg

SEQ ID NO: 42321 - DNA, 22 bp, synthetic construct
  misc_feature 1..22: note = Probe
  source 1..22: mol_type = other DNA
tttacacgcagaaggtcctggg

SEQ ID NO: 42322 - DNA, 45 bp, synthetic construct
  misc_feature 1..45: note = Probe
  source 1..45: mol_type = other DNA
tttacacgcagaaggtcctgggttcaagccccagtggaaccatgg

SEQ ID NO: 42323 - DNA, 39 bp, synthetic construct
  misc_feature 1..39: note = Probe
  source 1..39: mol_type = other DNA
tttacacgcagaaggtcctgggttcgagccccagtggaa

SEQ ID NO: 42324 - DNA, 45 bp, synthetic construct; identical to SEQ ID NO: 24797
  misc_feature 1..45: note = Probe
  source 1..45: mol_type = other DNA

SEQ ID NO: 42325 - DNA, 50 bp, synthetic construct
  misc_feature 1..50: note = Probe
  source 1..50: mol_type = other DNA
tttacacgcagaaggtcctgggttcgagccccagtggaaccacggcgtga

SEQ ID NO: 42326 - DNA, 45 bp, synthetic construct
  misc_feature 1..45: note = Probe
  source 1..45: mol_type = other DNA
tttacacgcagaaggtcctgggttcgagccccagtggaaccatag

SEQ ID NO: 42327 - DNA, 30 bp, synthetic construct; identical to SEQ ID NO: 24800
  misc_feature 1..30: note = Probe
  source 1..30: mol_type = other DNA

SEQ ID NO: 42328 - DNA, 31 bp, synthetic construct; identical to SEQ ID NO: 24801
  misc_feature 1..31: note = Probe
  source 1..31: mol_type = other DNA

SEQ ID NO: 42329 - DNA, 34 bp, synthetic construct; identical to SEQ ID NO: 24803
  misc_feature 1..34: note = Probe
  source 1..34: mol_type = other DNA

SEQ ID NO: 42330 - DNA, 33 bp, synthetic construct; identical to SEQ ID NO: 8527
  misc_feature 1..33: note = Probe
  source 1..33: mol_type = other DNA

SEQ ID NO: 42331 - DNA, 28 bp, synthetic construct
  misc_feature 1..28: note = Probe
  source 1..28: mol_type = other DNA
tttccgtagtgtagtggttatcacgttc

SEQ ID NO: 42332 - DNA, 30 bp, synthetic construct; identical to SEQ ID NO: 24813
  misc_feature 1..30: note = Probe
  source 1..30: mol_type = other DNA

SEQ ID NO: 42333 - DNA, 46 bp, synthetic construct; identical to SEQ ID NO: 8532
  misc_feature 1..46: note = Probe
  source 1..46: mol_type = other DNA

SEQ ID NO: 42334 - DNA, 49 bp, synthetic construct
  misc_feature 1..49: note = Probe
  source 1..49: mol_type = other DNA
tttgatagagtaaataataggagcttaaacccccttatttctaggacta

SEQ ID NO: 42335 - DNA, 50 bp, synthetic construct
  misc_feature 1..50: note = Probe
  source 1..50: mol_type = other DNA
tttgatagagtaaataataggagcttaaacccccttatttctaggactat

SEQ ID NO: 42336 - DNA, 45 bp, synthetic construct
  misc_feature 1..45: note = Probe
  source 1..45: mol_type = other DNA
tttgcacgtatgaggccccgggttcaatccccggcatctccagac

SEQ ID NO: 42337 - DNA, 24 bp, synthetic construct
  misc_feature 1..24: note = Probe
  source 1..24: mol_type = other DNA
tttggccttttcgagatactgttt

SEQ ID NO: 42338 - DNA, 25 bp, synthetic construct
  misc_feature 1..25: note = Probe
  source 1..25: mol_type = other DNA
tttggccttttcgagatactgtttt

SEQ ID NO: 42339 - DNA, 20 bp, synthetic construct
  misc_feature 1..20: note = Probe
  source 1..20: mol_type = other DNA
tttgggtgcgagaggtcccg

SEQ ID NO: 42340 - DNA, 21 bp, synthetic construct
  misc_feature 1..21: note = Probe
  source 1..21: mol_type = other DNA
tttgggtgcgagaggtcccgg

SEQ ID NO: 42341 - DNA, 22 bp, synthetic construct
  misc_feature 1..22: note = Probe
  source 1..22: mol_type = other DNA
tttgggtgcgagaggtcccggg

SEQ ID NO: 42342 - DNA, 23 bp, synthetic construct
  misc_feature 1..23: note = Probe
  source 1..23: mol_type = other DNA
tttgggtgcgagaggtcccgggt

SEQ ID NO: 42343 - DNA, 24 bp, synthetic construct
  misc_feature 1..24: note = Probe
  source 1..24: mol_type = other DNA
tttgggtgcgagaggtcccgggtt

SEQ ID NO: 42344 - DNA, 42 bp, synthetic construct; identical to SEQ ID NO: 24831
  misc_feature 1..42: note = Probe
  source 1..42: mol_type = other DNA

SEQ ID NO: 42345 - DNA, 49 bp, synthetic construct
  misc_feature 1..49: note = Probe
  source 1..49: mol_type = other DNA
ttttcacccaggcggcccgggttcgactcccggtgtgggaacgccgaaa

SEQ ID NO: 42346 - DNA, 50 bp, synthetic construct
  misc_feature 1..50: note = Probe
  source 1..50: mol_type = other DNA
ttttcacccaggcggcccgggttcgactcccggtgtgggaacgccgaaat

SEQ ID NO: 42347 - DNA, 50 bp, synthetic construct
  misc_feature 1..50: note = Probe
  source 1..50: mol_type = other DNA
ttttcacccaggcggcccgggttcgactcccggtgtgggaatgactggac

SEQ ID NO: 42348 - DNA, 50 bp, synthetic construct
  misc_feature 1..50: note = Probe
  source 1..50: mol_type = other DNA
ttttcacccaggtggcccgggttcgactcccggtatgggaacgcttcctt

SEQ ID NO: 42349 - DNA, 50 bp, synthetic construct; identical to SEQ ID NO: 4
  misc_feature 1..50: note = Probe
  source 1..50: mol_type = other DNA

SEQ ID NO: 42350 - DNA, 50 bp, synthetic construct; identical to SEQ ID NO: 14
  misc_feature 1..50: note = Probe
  source 1..50: mol_type = other DNA

SEQ ID NO: 42351 - DNA, 50 bp, synthetic construct; identical to SEQ ID NO: 25
  misc_feature 1..50: note = Probe
  source 1..50: mol_type = other DNA

SEQ ID NO: 42352 - DNA, 30 bp, synthetic construct; identical to SEQ ID NO: 12470
  misc_feature 1..30: note = Probe
  source 1..30: mol_type = other DNA

SEQ ID NO: 42353 - DNA, 34 bp, synthetic construct; identical to SEQ ID NO: 33
  misc_feature 1..34: note = Probe
  source 1..34: mol_type = other DNA

SEQ ID NO: 42354 - DNA, 50 bp, synthetic construct; identical to SEQ ID NO: 39
  misc_feature 1..50: note = Probe
  source 1..50: mol_type = other DNA

SEQ ID NO: 42355 - DNA, 18 bp, synthetic construct
  misc_feature 1..18: note = Probe
  source 1..18: mol_type = other DNA
aacagctatccattggtc

SEQ ID NO: 42356 - DNA, 19 bp, synthetic construct
  misc_feature 1..19: note = Probe
  source 1..19: mol_type = other DNA
aacagctatccattggtct

SEQ ID NO: 42357 - DNA, 28 bp, synthetic construct
  misc_feature 1..28: note = Probe
  source 1..28: mol_type = other DNA
aacagctatccattggtcttaggcccca

SEQ ID NO: 42358 - DNA, 36 bp, synthetic construct; identical to SEQ ID NO: 14746
  misc_feature 1..36: note = Probe
  source 1..36: mol_type = other DNA

SEQ ID NO: 42359 - DNA, 50 bp, synthetic construct; identical to SEQ ID NO: 42
  misc_feature 1..50: note = Probe
  source 1..50: mol_type = other DNA

SEQ ID NO: 42360 - DNA, 50 bp, synthetic construct; identical to SEQ ID NO: 47
  misc_feature 1..50: note = Probe
  source 1..50: mol_type = other DNA

SEQ ID NO: 42361 - DNA, 17 bp, synthetic construct
  misc_feature 1..17: note = Probe
  source 1..17: mol_type = other DNA
aaccggagatgaaaacc

SEQ ID NO: 42362 - DNA, 18 bp, synthetic construct
  misc_feature 1..18: note = Probe
  source 1..18: mol_type = other DNA
aaccggagatgaaaacct

SEQ ID NO: 42363 - DNA, 24 bp, synthetic construct
  misc_feature 1..24: note = Probe
  source 1..24: mol_type = other DNA
aaccggagatgaaaacctttttcc

SEQ ID NO: 42364 - DNA, 27 bp, synthetic construct
  misc_feature 1..27: note = Probe
  source 1..27: mol_type = other DNA
aaccggagatgaaaacctttttccaag

SEQ ID NO: 42365 - DNA, 29 bp, synthetic construct
  misc_feature 1..29: note = Probe
  source 1..29: mol_type = other DNA
aaccggagatgaaaacctttttccaagga

SEQ ID NO: 42366 - DNA, 30 bp, synthetic construct; identical to SEQ ID NO: 52
  misc_feature 1..30: note = Probe
  source 1..30: mol_type = other DNA

SEQ ID NO: 42367 - DNA, 31 bp, synthetic construct; identical to SEQ ID NO: 53
  misc_feature 1..31: note = Probe
  source 1..31: mol_type = other DNA

SEQ ID NO: 42368 - DNA, 38 bp, synthetic construct; identical to SEQ ID NO: 61
  misc_feature 1..38: note = Probe
  source 1..38: mol_type = other DNA

SEQ ID NO: 42369 - DNA, 40 bp, synthetic construct; identical to SEQ ID NO: 12486
  misc_feature 1..40: note = Probe
  source 1..40: mol_type = other DNA

SEQ ID NO: 42370 - DNA, 29 bp, synthetic construct
  misc_feature 1..29: note = Probe
  source 1..29: mol_type = other DNA
aagattccaggttcgactcctggctggct

SEQ ID NO: 42371 - DNA, 50 bp, synthetic construct; identical to SEQ ID NO: 80
  misc_feature 1..50: note = Probe
  source 1..50: mol_type = other DNA

SEQ ID NO: 42372 - DNA, 31 bp, synthetic construct; identical to SEQ ID NO: 15149
  misc_feature 1..31: note = Probe
  source 1..31: mol_type = other DNA

SEQ ID NO: 42373 - DNA, 29 bp, synthetic construct
  misc_feature 1..29: note = Probe
  source 1..29: mol_type = other DNA
aaggttggtggttcgagcccacccaggga

SEQ ID NO: 42374 - DNA, 31 bp, synthetic construct
  misc_feature 1..31: note = Probe
  source 1..31: mol_type = other DNA
aaggttggtggttcgagcccacccagggacg

SEQ ID NO: 42375 - DNA, 32 bp, synthetic construct
  misc_feature 1..32: note = Probe
  source 1..32: mol_type = other DNA
aaggttggtggttcgagcccacccagggacgc

SEQ ID NO: 42376 - DNA, 26 bp, synthetic construct
  misc_feature 1..26: note = Probe
  source 1..26: mol_type = other DNA
aagtgtttgtgggtttaagtcccatt

SEQ ID NO: 42377 - DNA, 30 bp, synthetic construct; identical to SEQ ID NO: 2390
  misc_feature 1..30: note = Probe
  source 1..30: mol_type = other DNA

SEQ ID NO: 42378 - DNA, 31 bp, synthetic construct; identical to SEQ ID NO: 86
  misc_feature 1..31: note = Probe
  source 1..31: mol_type = other DNA

SEQ ID NO: 42379 - DNA, 32 bp, synthetic construct; identical to SEQ ID NO: 2391
  misc_feature 1..32: note = Probe
  source 1..32: mol_type = other DNA

SEQ ID NO: 42380 - DNA, 20 bp, synthetic construct
  misc_feature 1..20: note = Probe
  source 1..20: mol_type = other DNA
aatccagcgatccgagttca

SEQ ID NO: 42381 - DNA, 22 bp, synthetic construct
  misc_feature 1..22: note = Probe
  source 1..22: mol_type = other DNA
aatccagcgatccgagttcaaa

SEQ ID NO: 42382 - DNA, 20 bp, synthetic construct
  misc_feature 1..20: note = Probe
  source 1..20: mol_type = other DNA
aatccccggcacctccacca

SEQ ID NO: 42383 - DNA, 30 bp, synthetic construct; identical to SEQ ID NO: 2459
  misc_feature 1..30: note = Probe
  source 1..30: mol_type = other DNA

SEQ ID NO: 42384 - DNA, 50 bp, synthetic construct; identical to SEQ ID NO: 117
  misc_feature 1..50: note = Probe
  source 1..50: mol_type = other DNA

SEQ ID NO: 42385 - DNA, 30 bp, synthetic construct; identical to SEQ ID NO: 2562
  misc_feature 1..30: note = Probe
  source 1..30: mol_type = other DNA

SEQ ID NO: 42386 - DNA, 43 bp, synthetic construct; identical to SEQ ID NO: 119
  misc_feature 1..43: note = Probe
  source 1..43: mol_type = other DNA

SEQ ID NO: 42387 - DNA, 43 bp, synthetic construct; identical to SEQ ID NO: 2601
  misc_feature 1..43: note = Probe
  source 1..43: mol_type = other DNA

SEQ ID NO: 42388 - DNA, 50 bp, synthetic construct; identical to SEQ ID NO: 124
  misc_feature 1..50: note = Probe
  source 1..50: mol_type = other DNA

SEQ ID NO: 42389 - DNA, 39 bp, synthetic construct; identical to SEQ ID NO: 12524
  misc_feature 1..39: note = Probe
  source 1..39: mol_type = other DNA

SEQ ID NO: 42390 - DNA, 40 bp, synthetic construct; identical to SEQ ID NO: 12525
  misc_feature 1..40: note = Probe
  source 1..40: mol_type = other DNA

SEQ ID NO: 42391 - DNA, 18 bp, synthetic construct
  misc_feature 1..18: note = Probe
  source 1..18: mol_type = other DNA
acacgcgaaaggtccccg

SEQ ID NO: 42392 - DNA, 20 bp, synthetic construct
  misc_feature 1..20: note = Probe
  source 1..20: mol_type = other DNA
acacgcgaaaggtccccggt

SEQ ID NO: 42393 - DNA, 24 bp, synthetic construct
  misc_feature 1..24: note = Probe
  source 1..24: mol_type = other DNA
acacgcgaaaggtccccggttcga

SEQ ID NO: 42394 - DNA, 35 bp, synthetic construct; identical to SEQ ID NO: 12530
  misc_feature 1..35: note = Probe
  source 1..35: mol_type = other DNA

SEQ ID NO: 42395 - DNA, 37 bp, synthetic construct; identical to SEQ ID NO: 37792
  misc_feature 1..37: note = Probe
  source 1..37: mol_type = other DNA

SEQ ID NO: 42396 - DNA, 18 bp, synthetic construct
  misc_feature 1..18: note = Probe
  source 1..18: mol_type = other DNA
acagaccaagagccttca

SEQ ID NO: 42397 - DNA, 17 bp, synthetic construct
  misc_feature 1..17: note = Probe
  source 1..17: mol_type = other DNA
acagaggcttacgaccc

SEQ ID NO: 42398 - DNA, 27 bp, synthetic construct
  misc_feature 1..27: note = Probe
  source 1..27: mol_type = other DNA
acagaggcttacgaccccttatttacc

SEQ ID NO: 42399 - DNA, 17 bp, synthetic construct
  misc_feature 1..17: note = Probe
  source 1..17: mol_type = other DNA
acagctatccattggtc

SEQ ID NO: 42400 - DNA, 18 bp, synthetic construct
  misc_feature 1..18: note = Probe
  source 1..18: mol_type = other DNA
acagctatccattggtct

SEQ ID NO: 42401 - DNA, 50 bp, synthetic construct; identical to SEQ ID NO: 138
  misc_feature 1..50: note = Probe
  source 1..50: mol_type = other DNA

SEQ ID NO: 42402 - DNA, 16 bp, synthetic construct
  misc_feature 1..16: note = Probe
  source 1..16: mol_type = other DNA
accaggatggccgagt

SEQ ID NO: 42403 - DNA, 32 bp, synthetic construct; identical to SEQ ID NO: 153
  misc_feature 1..32: note = Probe
  source 1..32: mol_type = other DNA

SEQ ID NO: 42404 - DNA, 33 bp, synthetic construct; identical to SEQ ID NO: 154
  misc_feature 1..33: note = Probe
  source 1..33: mol_type = other DNA

SEQ ID NO: 42405 - DNA, 34 bp, synthetic construct; identical to SEQ ID NO: 155
  misc_feature 1..34: note = Probe
  source 1..34: mol_type = other DNA

SEQ ID NO: 42406 - DNA, 35 bp, synthetic construct; identical to SEQ ID NO: 156
  misc_feature 1..35: note = Probe
  source 1..35: mol_type = other DNA

SEQ ID NO: 42407 - DNA, 34 bp, synthetic construct; identical to SEQ ID NO: 157
  misc_feature 1..34: note = Probe
  source 1..34: mol_type = other DNA

SEQ ID NO: 42408 - DNA, 36 bp, synthetic construct; identical to SEQ ID NO: 158
  misc_feature 1..36: note = Probe
  source 1..36: mol_type = other DNA

SEQ ID NO: 42409 - DNA, 37 bp, synthetic construct; identical to SEQ ID NO: 159
  misc_feature 1..37: note = Probe
  source 1..37: mol_type = other DNA

SEQ ID NO: 42410 - DNA, 38 bp, synthetic construct; identical to SEQ ID NO: 15640
  misc_feature 1..38: note = Probe
  source 1..38: mol_type = other DNA

SEQ ID NO: 42411 - DNA, 34 bp, synthetic construct
  misc_feature 1..34: note = Probe
  source 1..34: mol_type = other DNA
accgaaaggttggtggttcgatcccacccaggga

SEQ ID NO: 42412 - DNA, 36 bp, synthetic construct
  misc_feature 1..36: note = Probe
  source 1..36: mol_type = other DNA
accgaaaggttggtggttcgatcccacccagggacg

SEQ ID NO: 42413 - DNA, 35 bp, synthetic construct; identical to SEQ ID NO: 12558
  misc_feature 1..35: note = Probe
  source 1..35: mol_type = other DNA

SEQ ID NO: 42414 - DNA, 16 bp, synthetic construct
  misc_feature 1..16: note = Probe
  source 1..16: mol_type = other DNA
accggagatgaaaacc

SEQ ID NO: 42415 - DNA, 17 bp, synthetic construct
  misc_feature 1..17: note = Probe
  source 1..17: mol_type = other DNA
accggagatgaaaacct

SEQ ID NO: 42416 - DNA, 18 bp, synthetic construct
  misc_feature 1..18: note = Probe
  source 1..18: mol_type = other DNA
accggagatgaaaacctt

SEQ ID NO: 42417 - DNA, 19 bp, synthetic construct
  misc_feature 1..19: note = Probe
  source 1..19: mol_type = other DNA
accggagatgaaaaccttt

SEQ ID NO: 42418 - DNA, 20 bp, synthetic construct
  misc_feature 1..20: note = Probe
  source 1..20: mol_type = other DNA
accggagatgaaaacctttt

SEQ ID NO: 42419 - DNA, 23 bp, synthetic construct
  misc_feature 1..23: note = Probe
  source 1..23: mol_type = other DNA
accggagatgaaaacctttttcc

SEQ ID NO: 42420 - DNA, 24 bp, synthetic construct
  misc_feature 1..24: note = Probe
  source 1..24: mol_type = other DNA
accggagatgaaaacctttttcca

SEQ ID NO: 42421 - DNA, 26 bp, synthetic construct
  misc_feature 1..26: note = Probe
  source 1..26: mol_type = other DNA
accggagatgaaaacctttttccaag

SEQ ID NO: 42422 - DNA, 28 bp, synthetic construct
  misc_feature 1..28: note = Probe
  source 1..28: mol_type = other DNA
accggagatgaaaacctttttccaagga

SEQ ID NO: 42423 - DNA, 29 bp, synthetic construct
  misc_feature 1..29: note = Probe
  source 1..29: mol_type = other DNA
accggagatgaaaacctttttccaaggac

SEQ ID NO: 42424 - DNA, 30 bp, synthetic construct; identical to SEQ ID NO: 165
  misc_feature 1..30: note = Probe
  source 1..30: mol_type = other DNA

SEQ ID NO: 42425 - DNA, 16 bp, synthetic construct
  misc_feature 1..16: note = Probe
  source 1..16: mol_type = other DNA
accgggcggaaacacc

SEQ ID NO: 42426 - DNA, 27 bp, synthetic construct
  misc_feature 1..27: note = Probe
  source 1..27: mol_type = other DNA
accggggttcaattccccgacggggag

SEQ ID NO: 42427 - DNA, 24 bp, synthetic construct
  misc_feature 1..24: note = Probe
  source 1..24: mol_type = other DNA
accggggttcgattccccgacggg

SEQ ID NO: 42428 - DNA, 26 bp, synthetic construct
  misc_feature 1..26: note = Probe
  source 1..26: mol_type = other DNA
accggggttcgattccccgacgggga

SEQ ID NO: 42429 - DNA, 27 bp, synthetic construct
  misc_feature 1..27: note = Probe
  source 1..27: mol_type = other DNA
accggggttcgattccccgacggggag

SEQ ID NO: 42430 - DNA, 17 bp, synthetic construct
  misc_feature 1..17: note = Probe
  source 1..17: mol_type = other DNA
acctcctcaaagcaata

SEQ ID NO: 42431 - DNA, 35 bp, synthetic construct; identical to SEQ ID NO: 12575
  misc_feature 1..35: note = Probe
  source 1..35: mol_type = other DNA

SEQ ID NO: 42432 - DNA, 36 bp, synthetic construct; identical to SEQ ID NO: 2844
  misc_feature 1..36: note = Probe
  source 1..36: mol_type = other DNA

SEQ ID NO: 42433 - DNA, 37 bp, synthetic construct; identical to SEQ ID NO: 166
  misc_feature 1..37: note = Probe
  source 1..37: mol_type = other DNA

SEQ ID NO: 42434 - DNA, 38 bp, synthetic construct; identical to SEQ ID NO: 167
  misc_feature 1..38: note = Probe
  source 1..38: mol_type = other DNA

SEQ ID NO: 42435 - DNA, 18 bp, synthetic construct
  misc_feature 1..18: note = Probe
  source 1..18: mol_type = other DNA
acgcgaaaggtccccggt

SEQ ID NO: 42436 - DNA, 16 bp, synthetic construct
  misc_feature 1..16: note = Probe
  source 1..16: mol_type = other DNA
acgcgggagaccgggg

SEQ ID NO: 42437 - DNA, 17 bp, synthetic construct
  misc_feature 1..17: note = Probe
  source 1..17: mol_type = other DNA
acgcgggagaccggggt

SEQ ID NO: 42438 - DNA, 18 bp, synthetic construct
  misc_feature 1..18: note = Probe
  source 1..18: mol_type = other DNA
acgcgggagaccggggtt

SEQ ID NO: 42439 - DNA, 31 bp, synthetic construct; identical to SEQ ID NO: 176
  misc_feature 1..31: note = Probe
  source 1..31: mol_type = other DNA

SEQ ID NO: 42440 - DNA, 32 bp, synthetic construct; identical to SEQ ID NO: 177
  misc_feature 1..32: note = Probe
  source 1..32: mol_type = other DNA

SEQ ID NO: 42441 - DNA, 33 bp, synthetic construct; identical to SEQ ID NO: 178
  misc_feature 1..33: note = Probe
  source 1..33: mol_type = other DNA

SEQ ID NO: 42442 - DNA, 34 bp, synthetic construct; identical to SEQ ID NO: 179
  misc_feature 1..34: note = Probe
  source 1..34: mol_type = other DNA

SEQ ID NO: 42443 - DNA, 35 bp, synthetic construct; identical to SEQ ID NO: 12593
  misc_feature 1..35: note = Probe
  source 1..35: mol_type = other DNA

SEQ ID NO: 42444 - DNA, 36 bp, synthetic construct; identical to SEQ ID NO: 180
  misc_feature 1..36: note = Probe
  source 1..36: mol_type = other DNA

SEQ ID NO: 42445 - DNA, 31 bp, synthetic construct; identical to SEQ ID NO: 183
  misc_feature 1..31: note = Probe
  source 1..31: mol_type = other DNA

SEQ ID NO: 42446 - DNA, 32 bp, synthetic construct; identical to SEQ ID NO: 184
  misc_feature 1..32: note = Probe
  source 1..32: mol_type = other DNA

SEQ ID NO: 42447 - DNA, 33 bp, synthetic construct; identical to SEQ ID NO: 185
  misc_feature 1..33: note = Probe
  source 1..33: mol_type = other DNA

SEQ ID NO: 42448 - DNA, 34 bp, synthetic construct; identical to SEQ ID NO: 186
  misc_feature 1..34: note = Probe
  source 1..34: mol_type = other DNA

SEQ ID NO: 42449 - DNA, 35 bp, synthetic construct; identical to SEQ ID NO: 187
  misc_feature 1..35: note = Probe
  source 1..35: mol_type = other DNA

SEQ ID NO: 42450 - DNA, 36 bp, synthetic construct; identical to SEQ ID NO: 188
  misc_feature 1..36: note = Probe
  source 1..36: mol_type = other DNA

SEQ ID NO: 42451 - DNA, 17 bp, synthetic construct
  misc_feature 1..17: note = Probe
  source 1..17: mol_type = other DNA
acgcgggaggcccgggt

SEQ ID NO: 42452 - DNA, 18 bp, synthetic construct
  misc_feature 1..18: note = Probe
  source 1..18: mol_type = other DNA
acgcgggaggcccgggtt

SEQ ID NO: 42453 - DNA, 27 bp, synthetic construct
  misc_feature 1..27: note = Probe
  source 1..27: mol_type = other DNA
acgcgtgggttcgaatcccatcctcgt

SEQ ID NO: 42454 - DNA, 29 bp, synthetic construct
  misc_feature 1..29: note = Probe
  source 1..29: mol_type = other DNA
actaagtgtttgtgggtttaagtcccatt

SEQ ID NO: 42455 - DNA, 31 bp, synthetic construct; identical to SEQ ID NO: 12612
  misc_feature 1..31: note = Probe
  source 1..31: mol_type = other DNA

SEQ ID NO: 42456 - DNA, 32 bp, synthetic construct; identical to SEQ ID NO: 15903
  misc_feature 1..32: note = Probe
  source 1..32: mol_type = other DNA

SEQ ID NO: 42457 - DNA, 33 bp, synthetic construct; identical to SEQ ID NO: 191
  misc_feature 1..33: note = Probe
  source 1..33: mol_type = other DNA

SEQ ID NO: 42458 - DNA, 34 bp, synthetic construct; identical to SEQ ID NO: 192
  misc_feature 1..34: note = Probe
  source 1..34: mol_type = other DNA

SEQ ID NO: 42459 - DNA, 35 bp, synthetic construct; identical to SEQ ID NO: 193
  misc_feature 1..35: note = Probe
  source 1..35: mol_type = other DNA

SEQ ID NO: 42460 - DNA, 36 bp, synthetic construct; identical to SEQ ID NO: 2894
  misc_feature 1..36: note = Probe
  source 1..36: mol_type = other DNA

SEQ ID NO: 42461 - DNA, 50 bp, synthetic construct; identical to SEQ ID NO: 199
  misc_feature 1..50: note = Probe
  source 1..50: mol_type = other DNA

SEQ ID NO: 42462 - DNA, 39 bp, synthetic construct; identical to SEQ ID NO: 12625
  misc_feature 1..39: note = Probe
  source 1..39: mol_type = other DNA

SEQ ID NO: 42463 - DNA, 50 bp, synthetic construct; identical to SEQ ID NO: 201
  misc_feature 1..50: note = Probe
  source 1..50: mol_type = other DNA

SEQ ID NO: 42464 - DNA, 35 bp, synthetic construct; identical to SEQ ID NO: 3024
  misc_feature 1..35: note = Probe
  source 1..35: mol_type = other DNA

SEQ ID NO: 42465 - DNA, 36 bp, synthetic construct; identical to SEQ ID NO: 3025
  misc_feature 1..36: note = Probe
  source 1..36: mol_type = other DNA

SEQ ID NO: 42466 - DNA, 37 bp, synthetic construct; identical to SEQ ID NO: 203
  misc_feature 1..37: note = Probe
  source 1..37: mol_type = other DNA

SEQ ID NO: 42467 - DNA, 38 bp, synthetic construct; identical to SEQ ID NO: 204
  misc_feature 1..38: note = Probe
  source 1..38: mol_type = other DNA

SEQ ID NO: 42468 - DNA, 39 bp, synthetic construct; identical to SEQ ID NO: 205
  misc_feature 1..39: note = Probe
  source 1..39: mol_type = other DNA

SEQ ID NO: 42469 - DNA, 30 bp, synthetic construct; identical to SEQ ID NO: 209
  misc_feature 1..30: note = Probe
  source 1..30: mol_type = other DNA

SEQ ID NO: 42470 - DNA, 31 bp, synthetic construct; identical to SEQ ID NO: 210
  misc_feature 1..31: note = Probe
  source 1..31: mol_type = other DNA

SEQ ID NO: 42471 - DNA, 32 bp, synthetic construct; identical to SEQ ID NO: 211
  misc_feature 1..32: note = Probe
  source 1..32: mol_type = other DNA

SEQ ID NO: 42472 - DNA, 41 bp, synthetic construct; identical to SEQ ID NO: 3037
  misc_feature 1..41: note = Probe
  source 1..41: mol_type = other DNA

SEQ ID NO: 42473 - DNA, 27 bp, synthetic construct
  misc_feature 1..27: note = Probe
  source 1..27: mol_type = other DNA
agaactgctaactcatgcccccatgtc

SEQ ID NO: 42474 - DNA, 28 bp, synthetic construct
  misc_feature 1..28: note = Probe
  source 1..28: mol_type = other DNA
agaactgctaactcatgcccccatgtct

SEQ ID NO: 42475 - DNA, 32 bp, synthetic construct; identical to SEQ ID NO: 3066
  misc_feature 1..32: note = Probe
  source 1..32: mol_type = other DNA

SEQ ID NO: 42476 - DNA, 44 bp, synthetic construct; identical to SEQ ID NO: 222
  misc_feature 1..44: note = Probe
  source 1..44: mol_type = other DNA

SEQ ID NO: 42477 - DNA, 46 bp, synthetic construct; identical to SEQ ID NO: 224
  misc_feature 1..46: note = Probe
  source 1..46: mol_type = other DNA

SEQ ID NO: 42478 - DNA, 33 bp, synthetic construct; identical to SEQ ID NO: 3094
  misc_feature 1..33: note = Probe
  source 1..33: mol_type = other DNA

SEQ ID NO: 42479 - DNA, 50 bp, synthetic construct; identical to SEQ ID NO: 235
  misc_feature 1..50: note = Probe
  source 1..50: mol_type = other DNA

SEQ ID NO: 42480 - DNA, 23 bp, synthetic construct
  misc_feature 1..23: note = Probe
  source 1..23: mol_type = other DNA
agaccggggttcaattccccgac

SEQ ID NO: 42481 - DNA, 28 bp, synthetic construct
  misc_feature 1..28: note = Probe
  source 1..28: mol_type = other DNA
agaccggggttcaattccccgacgggga

SEQ ID NO: 42482 - DNA, 29 bp, synthetic construct
  misc_feature 1..29: note = Probe
  source 1..29: mol_type = other DNA
agaccggggttcaattccccgacggggag

SEQ ID NO: 42483 - DNA, 23 bp, synthetic construct
  misc_feature 1..23: note = Probe
  source 1..23: mol_type = other DNA
agaccggggttcgattccccgac

SEQ ID NO: 42484 - DNA, 24 bp, synthetic construct
  misc_feature 1..24: note = Probe
  source 1..24: mol_type = other DNA
agaccggggttcgattccccgacg

SEQ ID NO: 42485 - DNA, 25 bp, synthetic construct
  misc_feature 1..25: note = Probe
  source 1..25: mol_type = other DNA
agaccggggttcgattccccgacgg

SEQ ID NO: 42486 - DNA, 27 bp, synthetic construct
  misc_feature 1..27: note = Probe
  source 1..27: mol_type = other DNA
agaccggggttcgattccccgacgggg

SEQ ID NO: 42487 - DNA, 28 bp, synthetic construct
  misc_feature 1..28: note = Probe
  source 1..28: mol_type = other DNA
agaccggggttcgattccccgacgggga

SEQ ID NO: 42488 - DNA, 29 bp, synthetic construct
  misc_feature 1..29: note = Probe
  source 1..29: mol_type = other DNA
agaccggggttcgattccccgacggggag

SEQ ID NO: 42489 - DNA, 50 bp, synthetic construct; identical to SEQ ID NO: 246
  misc_feature 1..50: note = Probe
  source 1..50: mol_type = other DNA

SEQ ID NO: 42490 - DNA, 50 bp, synthetic construct
  misc_feature 1..50: note = Probe
  source 1..50: mol_type = other DNA
agagcatgggactcttaatcccagggtcgtgggttcgagccccacgttgg

SEQ ID NO: 42491 - DNA, 17 bp, synthetic construct
  misc_feature 1..17: note = Probe
  source 1..17: mol_type = other DNA
agagcccggtaatcgca

SEQ ID NO: 42492 - DNA, 19 bp, synthetic construct
  misc_feature 1..19: note = Probe
  source 1..19: mol_type = other DNA
agagcccggtaatcgcata

SEQ ID NO: 42493 - DNA, 40 bp, synthetic construct; identical to SEQ ID NO: 3145
  misc_feature 1..40: note = Probe
  source 1..40: mol_type = other DNA

SEQ ID NO: 42494 - DNA, 42 bp, synthetic construct; identical to SEQ ID NO: 16221
  misc_feature 1..42: note = Probe
  source 1..42: mol_type = other DNA

SEQ ID NO: 42495 - DNA, 50 bp, synthetic construct; identical to SEQ ID NO: 3146
  misc_feature 1..50: note = Probe
  source 1..50: mol_type = other DNA

SEQ ID NO: 42496 - DNA, 26 bp, synthetic construct
  misc_feature 1..26: note = Probe
  source 1..26: mol_type = other DNA
agagtaaataataggagcttaaaccc

SEQ ID NO: 42497 - DNA, 27 bp, synthetic construct
  misc_feature 1..27: note = Probe
  source 1..27: mol_type = other DNA
agagtaaataataggagcttaaacccc

SEQ ID NO: 42498 - DNA, 28 bp, synthetic construct
  misc_feature 1..28: note = Probe
  source 1..28: mol_type = other DNA
agagtaaataataggagcttaaaccccc

SEQ ID NO: 42499 - DNA, 29 bp, synthetic construct
  misc_feature 1..29: note = Probe
  source 1..29: mol_type = other DNA
agagtaaataataggagcttaaaccccct

SEQ ID NO: 42500 - DNA, 30 bp, synthetic construct; identical to SEQ ID NO: 251
  misc_feature 1..30: note = Probe
  source 1..30: mol_type = other DNA

SEQ ID NO: 42501 - DNA, 31 bp, synthetic construct; identical to SEQ ID NO: 252
  misc_feature 1..31: note = Probe
  source 1..31: mol_type = other DNA

SEQ ID NO: 42502 - DNA, 36 bp, synthetic construct; identical to SEQ ID NO: 255
  misc_feature 1..36: note = Probe
  source 1..36: mol_type = other DNA

SEQ ID NO: 42503 - DNA, 37 bp, synthetic construct; identical to SEQ ID NO: 256
  misc_feature 1..37: note = Probe
  source 1..37: mol_type = other DNA

SEQ ID NO: 42504 - DNA, 28 bp, synthetic construct
  misc_feature 1..28: note = Probe
  source 1..28: mol_type = other DNA
agattccaggttcgactcctggctggct

SEQ ID NO: 42505 - DNA, 28 bp, synthetic construct
  misc_feature 1..28: note = Probe
  source 1..28: mol_type = other DNA
agattgagggttcgagtcccttcgtggt

SEQ ID NO: 42506 - DNA, 29 bp, synthetic construct
  misc_feature 1..29: note = Probe
  source 1..29: mol_type = other DNA
agcactctggactctgaatccagcgatcc

SEQ ID NO: 42507 - DNA, 30 bp, synthetic construct; identical to SEQ ID NO: 270
  misc_feature 1..30: note = Probe
  source 1..30: mol_type = other DNA

SEQ ID NO: 42508 - DNA, 31 bp, synthetic construct; identical to SEQ ID NO: 271
  misc_feature 1..31: note = Probe
  source 1..31: mol_type = other DNA

SEQ ID NO: 42509 - DNA, 32 bp, synthetic construct; identical to SEQ ID NO: 3254
  misc_feature 1..32: note = Probe
  source 1..32: mol_type = other DNA

SEQ ID NO: 42510 - DNA, 50 bp, synthetic construct; identical to SEQ ID NO: 272
  misc_feature 1..50: note = Probe
  source 1..50: mol_type = other DNA

SEQ ID NO: 42511 - DNA, 50 bp, synthetic construct
  misc_feature 1..50: note = Probe
  source 1..50: mol_type = other DNA
agcactctggactctgaatccagcgatccgagttcaagtctcggtggaac

SEQ ID NO: 42512 - DNA, 28 bp, synthetic construct
  misc_feature 1..28: note = Probe
  source 1..28: mol_type = other DNA
agcactctggactttgaatccagcgatc

SEQ ID NO: 42513 - DNA, 29 bp, synthetic construct
  misc_feature 1..29: note = Probe
  source 1..29: mol_type = other DNA
agcactctggactttgaatccagcgatcc

SEQ ID NO: 42514 - DNA, 30 bp, synthetic construct; identical to SEQ ID NO: 12674
  misc_feature 1..30: note = Probe
  source 1..30: mol_type = other DNA

SEQ ID NO: 42515 - DNA, 31 bp, synthetic construct
  misc_feature 1..31: note = Probe
  source 1..31: mol_type = other DNA
agcactctggactttgaatccagcgatccga

SEQ ID NO: 42516 - DNA, 50 bp, synthetic construct; identical to SEQ ID NO: 273
  misc_feature 1..50: note = Probe
  source 1..50: mol_type = other DNA

SEQ ID NO: 42517 - DNA, 29 bp, synthetic construct
  misc_feature 1..29: note = Probe
  source 1..29: mol_type = other DNA
agcagagtggcgcagcggaagcgtgctgg

SEQ ID NO: 42518 - DNA, 31 bp, synthetic construct; identical to SEQ ID NO: 275
  misc_feature 1..31: note = Probe
  source 1..31: mol_type = other DNA

SEQ ID NO: 42519 - DNA, 32 bp, synthetic construct; identical to SEQ ID NO: 276
  misc_feature 1..32: note = Probe
  source 1..32: mol_type = other DNA

SEQ ID NO: 42520 - DNA, 33 bp, synthetic construct; identical to SEQ ID NO: 277
  misc_feature 1..33: note = Probe
  source 1..33: mol_type = other DNA

SEQ ID NO: 42521 - DNA, 34 bp, synthetic construct; identical to SEQ ID NO: 278
  misc_feature 1..34: note = Probe
  source 1..34: mol_type = other DNA

SEQ ID NO: 42522 - DNA, 35 bp, synthetic construct; identical to SEQ ID NO: 279
  misc_feature 1..35: note = Probe
  source 1..35: mol_type = other DNA

SEQ ID NO: 42523 - DNA, 36 bp, synthetic construct; identical to SEQ ID NO: 12682
  misc_feature 1..36: note = Probe
  source 1..36: mol_type = other DNA

SEQ ID NO: 42524 - DNA, 29 bp, synthetic construct
  misc_feature 1..29: note = Probe
  source 1..29: mol_type = other DNA
agcatagctgccttccaagcagttgaccc

SEQ ID NO: 42525 - DNA, 35 bp, synthetic construct; identical to SEQ ID NO: 280
  misc_feature 1..35: note = Probe
  source 1..35: mol_type = other DNA

SEQ ID NO: 42526 - DNA, 36 bp, synthetic construct; identical to SEQ ID NO: 281
  misc_feature 1..36: note = Probe
  source 1..36: mol_type = other DNA

SEQ ID NO: 42527 - DNA, 50 bp, synthetic construct; identical to SEQ ID NO: 285
  misc_feature 1..50: note = Probe
  source 1..50: mol_type = other DNA

SEQ ID NO: 42528 - DNA, 35 bp, synthetic construct
  misc_feature 1..35: note = Probe
  source 1..35: mol_type = other DNA
agccagggattgtgggttcgagtcccatctggggt

SEQ ID NO: 42529 - DNA, 36 bp, synthetic construct; identical to SEQ ID NO: 288
  misc_feature 1..36: note = Probe
  source 1..36: mol_type = other DNA

SEQ ID NO: 42530 - DNA, 17 bp, synthetic construct
  misc_feature 1..17: note = Probe
  source 1..17: mol_type = other DNA
agcccggtaatcgcata

SEQ ID NO: 42531 - DNA, 18 bp, synthetic construct
  misc_feature 1..18: note = Probe
  source 1..18: mol_type = other DNA
agcccggtaatcgcataa

SEQ ID NO: 42532 - DNA, 24 bp, synthetic construct
  misc_feature 1..24: note = Probe
  source 1..24: mol_type = other DNA
agcccggtaatcgcataaaactta

SEQ ID NO: 42533 - DNA, 29 bp, synthetic construct
  misc_feature 1..29: note = Probe
  source 1..29: mol_type = other DNA
agcccggtaatcgcataaaacttaaaact

SEQ ID NO: 42534 - DNA, 34 bp, synthetic construct; identical to SEQ ID NO: 16437
  misc_feature 1..34: note = Probe
  source 1..34: mol_type = other DNA

SEQ ID NO: 42535 - DNA, 37 bp, synthetic construct; identical to SEQ ID NO: 3291
  misc_feature 1..37: note = Probe
  source 1..37: mol_type = other DNA

SEQ ID NO: 42536 - DNA, 38 bp, synthetic construct; identical to SEQ ID NO: 292
  misc_feature 1..38: note = Probe
  source 1..38: mol_type = other DNA

SEQ ID NO: 42537 - DNA, 40 bp, synthetic construct; identical to SEQ ID NO: 3292
  misc_feature 1..40: note = Probe
  source 1..40: mol_type = other DNA

SEQ ID NO: 42538 - DNA, 41 bp, synthetic construct; identical to SEQ ID NO: 16440
  misc_feature 1..41: note = Probe
  source 1..41: mol_type = other DNA

SEQ ID NO: 42539 - DNA, 43 bp, synthetic construct
  misc_feature 1..43: note = Probe
  source 1..43: mol_type = other DNA
agcccggtaatcgcataaaacttaaaactttacagtcagaggt

SEQ ID NO: 42540 - DNA, 46 bp, synthetic construct; identical to SEQ ID NO: 293
  misc_feature 1..46: note = Probe
  source 1..46: mol_type = other DNA

SEQ ID NO: 42541 - DNA, 18 bp, synthetic construct
  misc_feature 1..18: note = Probe
  source 1..18: mol_type = other DNA
agccctcagtaagttgca

SEQ ID NO: 42542 - DNA, 30 bp, synthetic construct; identical to SEQ ID NO: 297
  misc_feature 1..30: note = Probe
  source 1..30: mol_type = other DNA

SEQ ID NO: 42543 - DNA, 31 bp, synthetic construct; identical to SEQ ID NO: 298
  misc_feature 1..31: note = Probe
  source 1..31: mol_type = other DNA

SEQ ID NO: 42544 - DNA, 50 bp, synthetic construct; identical to SEQ ID NO: 3312
  misc_feature 1..50: note = Probe
  source 1..50: mol_type = other DNA

SEQ ID NO: 42545 - DNA, 50 bp, synthetic construct; identical to SEQ ID NO: 3325
  misc_feature 1..50: note = Probe
  source 1..50: mol_type = other DNA

SEQ ID NO: 42546 - DNA, 17 bp, synthetic construct
  misc_feature 1..17: note = Probe
  source 1..17: mol_type = other DNA
agctcacaagaactgct

SEQ ID NO: 42547 - DNA, 23 bp, synthetic construct
  misc_feature 1..23: note = Probe
  source 1..23: mol_type = other DNA
agctcacaagaactgctaactca

SEQ ID NO: 42548 - DNA, 36 bp, synthetic construct; identical to SEQ ID NO: 24978
  misc_feature 1..36: note = Probe
  source 1..36: mol_type = other DNA

SEQ ID NO: 42549 - DNA, 50 bp, synthetic construct; identical to SEQ ID NO: 311
  misc_feature 1..50: note = Probe
  source 1..50: mol_type = other DNA

SEQ ID NO: 42550 - DNA, 31 bp, synthetic construct; identical to SEQ ID NO: 315
  misc_feature 1..31: note = Probe
  source 1..31: mol_type = other DNA

SEQ ID NO: 42551 - DNA, 34 bp, synthetic construct; identical to SEQ ID NO: 12717
  misc_feature 1..34: note = Probe
  source 1..34: mol_type = other DNA

SEQ ID NO: 42552 - DNA, 22 bp, synthetic construct
  misc_feature 1..22: note = Probe
  source 1..22: mol_type = other DNA
agctgttaactaagtgtttgtg

SEQ ID NO: 42553 - DNA, 41 bp, synthetic construct; identical to SEQ ID NO: 12718
  misc_feature 1..41: note = Probe
  source 1..41: mol_type = other DNA

SEQ ID NO: 42554 - DNA, 42 bp, synthetic construct; identical to SEQ ID NO: 12719
  misc_feature 1..42: note = Probe
  source 1..42: mol_type = other DNA

SEQ ID NO: 42555 - DNA, 43 bp, synthetic construct; identical to SEQ ID NO: 3377
  misc_feature 1..43: note = Probe
  source 1..43: mol_type = other DNA

SEQ ID NO: 42556 - DNA, 33 bp, synthetic construct; identical to SEQ ID NO: 3396
  misc_feature 1..33: note = Probe
  source 1..33: mol_type = other DNA

SEQ ID NO: 42557 - DNA, 33 bp, synthetic construct; identical to SEQ ID NO: 318
  misc_feature 1..33: note = Probe
  source 1..33: mol_type = other DNA

SEQ ID NO: 42558 - DNA, 28 bp, synthetic construct
  misc_feature 1..28: note = Probe
  source 1..28: mol_type = other DNA
aggatggggtgtgataggtggcacggag

SEQ ID NO: 42559 - DNA, 29 bp, synthetic construct
  misc_feature 1..29: note = Probe
  source 1..29: mol_type = other DNA
aggattcggcgctctcaccgccgcggccc

SEQ ID NO: 42560 - DNA, 30 bp, synthetic construct; identical to SEQ ID NO: 16667
  misc_feature 1..30: note = Probe
  source 1..30: mol_type = other DNA

SEQ ID NO: 42561 - DNA, 24 bp, synthetic construct
  misc_feature 1..24: note = Probe
  source 1..24: mol_type = other DNA
aggccccgggttcgatccccggca

SEQ ID NO: 42562 - DNA, 30 bp, synthetic construct; identical to SEQ ID NO: 16670
  misc_feature 1..30: note = Probe
  source 1..30: mol_type = other DNA

SEQ ID NO: 42563 - DNA, 31 bp, synthetic construct; identical to SEQ ID NO: 325
  misc_feature 1..31: note = Probe
  source 1..31: mol_type = other DNA

SEQ ID NO: 42564 - DNA, 32 bp, synthetic construct; identical to SEQ ID NO: 326
  misc_feature 1..32: note = Probe
  source 1..32: mol_type = other DNA

SEQ ID NO: 42565 - DNA, 22 bp, synthetic construct
  misc_feature 1..22: note = Probe
  source 1..22: mol_type = other DNA
agggatgggttcgattctcata

SEQ ID NO: 42566 - DNA, 27 bp, synthetic construct
  misc_feature 1..27: note = Probe
  source 1..27: mol_type = other DNA
agggatgggttcgattctcatagtcct

SEQ ID NO: 42567 - DNA, 29 bp, synthetic construct
  misc_feature 1..29: note = Probe
  source 1..29: mol_type = other DNA
agggtccagggttcaagtccctgttcggg

SEQ ID NO: 42568 - DNA, 31 bp, synthetic construct; identical to SEQ ID NO: 38301
  misc_feature 1..31: note = Probe
  source 1..31: mol_type = other DNA

SEQ ID NO: 42569 - DNA, 50 bp, synthetic construct; identical to SEQ ID NO: 334
  misc_feature 1..50: note = Probe
  source 1..50: mol_type = other DNA

SEQ ID NO: 42570 - DNA, 30 bp, synthetic construct
  misc_feature 1..30: note = Probe
  source 1..30: mol_type = other DNA
aggtcccgggttcgatccccagcatctcca

SEQ ID NO: 42571 - DNA, 30 bp, synthetic construct
  misc_feature 1..30: note = Probe
  source 1..30: mol_type = other DNA
aggtccctggttcgatcccgggtttcggca

SEQ ID NO: 42572 - DNA, 30 bp, synthetic construct
  misc_feature 1..30: note = Probe
  source 1..30: mol_type = other DNA
aggtcctgggttcgagccccagtggaacca

SEQ ID NO: 42573 - DNA, 28 bp, synthetic construct
  misc_feature 1..28: note = Probe
  source 1..28: mol_type = other DNA
aggttggtggttcgagcccacccaggga

SEQ ID NO: 42574 - DNA, 30 bp, synthetic construct; identical to SEQ ID NO: 16821
  misc_feature 1..30: note = Probe
  source 1..30: mol_type = other DNA

SEQ ID NO: 42575 - DNA, 31 bp, synthetic construct
  misc_feature 1..31: note = Probe
  source 1..31: mol_type = other DNA
aggttggtggttcgagcccacccagggacgc

SEQ ID NO: 42576 - DNA, 26 bp, synthetic construct
  misc_feature 1..26: note = Probe
  source 1..26: mol_type = other DNA
agtaaataataggagcttaaaccccc

SEQ ID NO: 42577 - DNA, 34 bp, synthetic construct; identical to SEQ ID NO: 3537
  misc_feature 1..34: note = Probe
  source 1..34: mol_type = other DNA

SEQ ID NO: 42578 - DNA, 37 bp, synthetic construct; identical to SEQ ID NO: 3538
  misc_feature 1..37: note = Probe
  source 1..37: mol_type = other DNA

SEQ ID NO: 42579 - DNA, 50 bp, synthetic construct; identical to SEQ ID NO: 337
  misc_feature 1..50: note = Probe
  source 1..50: mol_type = other DNA

SEQ ID NO: 42580 - DNA, 16 bp, synthetic construct
  misc_feature 1..16: note = Probe
  source 1..16: mol_type = other DNA
agtcggtagagcatca

SEQ ID NO: 42581 - DNA, 18 bp, synthetic construct
  misc_feature 1..18: note = Probe
  source 1..18: mol_type = other DNA
agtcggtagagcatcaga

SEQ ID NO: 42582 - DNA, 19 bp, synthetic construct
  misc_feature 1..19: note = Probe
  source 1..19: mol_type = other DNA
agtcggtagagcatcagac

SEQ ID NO: 42583 - DNA, 16 bp, synthetic construct
  misc_feature 1..16: note = Probe
  source 1..16: mol_type = other DNA
agtcggtagagcatgg

SEQ ID NO: 42584 - DNA, 23 bp, synthetic construct
  misc_feature 1..23: note = Probe
  source 1..23: mol_type = other DNA
agtctcataatctgaaggtcgtg

SEQ ID NO: 42585 - DNA, 36 bp, synthetic construct; identical to SEQ ID NO: 16942
  misc_feature 1..36: note = Probe
  source 1..36: mol_type = other DNA

SEQ ID NO: 42586 - DNA, 36 bp, synthetic construct; identical to SEQ ID NO: 361
  misc_feature 1..36: note = Probe
  source 1..36: mol_type = other DNA

SEQ ID NO: 42587 - DNA, 29 bp, synthetic construct
  misc_feature 1..29: note = Probe
  source 1..29: mol_type = other DNA
agtgtttgtgggtttaagtcccattggtc

SEQ ID NO: 42588 - DNA, 30 bp, synthetic construct; identical to SEQ ID NO: 3599
  misc_feature 1..30: note = Probe
  source 1..30: mol_type = other DNA

SEQ ID NO: 42589 - DNA, 31 bp, synthetic construct; identical to SEQ ID NO: 3600
  misc_feature 1..31: note = Probe
  source 1..31: mol_type = other DNA

SEQ ID NO: 42590 - DNA, 22 bp, synthetic construct
  misc_feature 1..22: note = Probe
  source 1..22: mol_type = other DNA
agttcaaatctcggtgggacct

SEQ ID NO: 42591 - DNA, 39 bp, synthetic construct
  misc_feature 1..39: note = Probe
  source 1..39: mol_type = other DNA
agttgattagggtgcttagctgttaactaagtgtttgtg

SEQ ID NO: 42592 - DNA, 50 bp, synthetic construct; identical to SEQ ID NO: 365
  misc_feature 1..50: note = Probe
  source 1..50: mol_type = other DNA

SEQ ID NO: 42593 - DNA, 30 bp, synthetic construct; identical to SEQ ID NO: 17102
  misc_feature 1..30: note = Probe
  source 1..30: mol_type = other DNA

SEQ ID NO: 42594 - DNA, 32 bp, synthetic construct; identical to SEQ ID NO: 367
  misc_feature 1..32: note = Probe
  source 1..32: mol_type = other DNA

SEQ ID NO: 42595 - DNA, 33 bp, synthetic construct; identical to SEQ ID NO: 368
  misc_feature 1..33: note = Probe
  source 1..33: mol_type = other DNA

SEQ ID NO: 42596 - DNA, 36 bp, synthetic construct
  misc_feature 1..36: note = Probe
  source 1..36: mol_type = other DNA
atagagtaaataataggagcttaaacccccttattt

SEQ ID NO: 42597 - DNA, 39 bp, synthetic construct; identical to SEQ ID NO: 371
  misc_feature 1..39: note = Probe
  source 1..39: mol_type = other DNA

SEQ ID NO: 42598 - DNA, 16 bp, synthetic construct
  misc_feature 1..16: note = Probe
  source 1..16: mol_type = other DNA
ataggagcttaaaccc

SEQ ID NO: 42599 - DNA, 36 bp, synthetic construct; identical to SEQ ID NO: 17131
  misc_feature 1..36: note = Probe
  source 1..36: mol_type = other DNA

SEQ ID NO: 42600 - DNA, 24 bp, synthetic construct
  misc_feature 1..24: note = Probe
  source 1..24: mol_type = other DNA
atatcattggtcgtggttgtagtc

SEQ ID NO: 42601 - DNA, 28 bp, synthetic construct
  misc_feature 1..28: note = Probe
  source 1..28: mol_type = other DNA
atatcattggtcgtggttgtagtccgtg

SEQ ID NO: 42602 - DNA, 30 bp, synthetic construct; identical to SEQ ID NO: 3694
  misc_feature 1..30: note = Probe
  source 1..30: mol_type = other DNA

SEQ ID NO: 42603 - DNA, 32 bp, synthetic construct; identical to SEQ ID NO: 17140
  misc_feature 1..32: note = Probe
  source 1..32: mol_type = other DNA

SEQ ID NO: 42604 - DNA, 33 bp, synthetic construct; identical to SEQ ID NO: 12799
  misc_feature 1..33: note = Probe
  source 1..33: mol_type = other DNA

SEQ ID NO: 42605 - DNA, 34 bp, synthetic construct; identical to SEQ ID NO: 12800
  misc_feature 1..34: note = Probe
  source 1..34: mol_type = other DNA

SEQ ID NO: 42606 - DNA, 34 bp, synthetic construct; identical to SEQ ID NO: 12806
  misc_feature 1..34: note = Probe
  source 1..34: mol_type = other DNA

SEQ ID NO: 42607 - DNA, 26 bp, synthetic construct
  misc_feature 1..26: note = Probe
  source 1..26: mol_type = other DNA
atcattggtcgtggttgtagtccgtg

SEQ ID NO: 42608 - DNA, 30 bp, synthetic construct; identical to SEQ ID NO: 8552
  misc_feature 1..30: note = Probe
  source 1..30: mol_type = other DNA

SEQ ID NO: 42609 - DNA, 35 bp, synthetic construct; identical to SEQ ID NO: 379
  misc_feature 1..35: note = Probe
  source 1..35: mol_type = other DNA

SEQ ID NO: 42610 - DNA, 35 bp, synthetic construct; identical to SEQ ID NO: 380
  misc_feature 1..35: note = Probe
  source 1..35: mol_type = other DNA

SEQ ID NO: 42611 - DNA, 21 bp, synthetic construct
  misc_feature 1..21: note = Probe
  source 1..21: mol_type = other DNA
atccattggtcttaggcccca

SEQ ID NO: 42612 - DNA, 16 bp, synthetic construct
  misc_feature 1..16: note = Probe
  source 1..16: mol_type = other DNA
atcccaccgctgccac

SEQ ID NO: 42613 - DNA, 19 bp, synthetic construct
  misc_feature 1..19: note = Probe
  source 1..19: mol_type = other DNA
atccccggcacctccacca

SEQ ID NO: 42614 - DNA, 20 bp, synthetic construct
  misc_feature 1..20: note = Probe
  source 1..20: mol_type = other DNA
atcgatgcccgcatcctcca

SEQ ID NO: 42615 - DNA, 28 bp, synthetic construct
  misc_feature 1..28: note = Probe
  source 1..28: mol_type = other DNA
atcgcataaaacttaaaactttacagtc

SEQ ID NO: 42616 - DNA, 29 bp, synthetic construct
  misc_feature 1..29: note = Probe
  source 1..29: mol_type = other DNA
atcgcataaaacttaaaactttacagtca

SEQ ID NO: 42617 - DNA, 31 bp, synthetic construct; identical to SEQ ID NO: 17315
  misc_feature 1..31: note = Probe
  source 1..31: mol_type = other DNA

SEQ ID NO: 42618 - DNA, 32 bp, synthetic construct; identical to SEQ ID NO: 386
  misc_feature 1..32: note = Probe
  source 1..32: mol_type = other DNA

SEQ ID NO: 42619 - DNA, 33 bp, synthetic construct; identical to SEQ ID NO: 387
  misc_feature 1..33: note = Probe
  source 1..33: mol_type = other DNA

SEQ ID NO: 42620 - DNA, 22 bp, synthetic construct
  misc_feature 1..22: note = Probe
  source 1..22: mol_type = other DNA
atctaaaggtccctggttcgat

SEQ ID NO: 42621 - DNA, 34 bp, synthetic construct; identical to SEQ ID NO: 36319
  misc_feature 1..34: note = Probe
  source 1..34: mol_type = other DNA

SEQ ID NO: 42622 - DNA, 36 bp, synthetic construct; identical to SEQ ID NO: 393
  misc_feature 1..36: note = Probe
  source 1..36: mol_type = other DNA

SEQ ID NO: 42623 - DNA, 37 bp, synthetic construct; identical to SEQ ID NO: 394
  misc_feature 1..37: note = Probe
  source 1..37: mol_type = other DNA

SEQ ID NO: 42624 - DNA, 36 bp, synthetic construct; identical to SEQ ID NO: 17365
  misc_feature 1..36: note = Probe
  source 1..36: mol_type = other DNA

SEQ ID NO: 42625 - DNA, 16 bp, synthetic construct
  misc_feature 1..16: note = Probe
  source 1..16: mol_type = other DNA
atgcccgcatcctcca

SEQ ID NO: 42626 - DNA, 34 bp, synthetic construct; identical to SEQ ID NO: 17434
  misc_feature 1..34: note = Probe
  source 1..34: mol_type = other DNA

SEQ ID NO: 42627 - DNA, 35 bp, synthetic construct
  misc_feature 1..35: note = Probe
  source 1..35: mol_type = other DNA
atgccgaggttgtgagttcgagcctcacctggagc

SEQ ID NO: 42628 - DNA, 19 bp, synthetic construct
  misc_feature 1..19: note = Probe
  source 1..19: mol_type = other DNA
atgtttagacgggctcaca

SEQ ID NO: 42629 - DNA, 20 bp, synthetic construct
  misc_feature 1..20: note = Probe
  source 1..20: mol_type = other DNA
atgtttagacgggctcacat

SEQ ID NO: 42630 - DNA, 27 bp, synthetic construct
  misc_feature 1..27: note = Probe
  source 1..27: mol_type = other DNA
atgtttagacgggctcacatcacccca

SEQ ID NO: 42631 - DNA, 19 bp, synthetic construct
  misc_feature 1..19: note = Probe
  source 1..19: mol_type = other DNA
attggtcgtggttgtagtc

SEQ ID NO: 42632 - DNA, 20 bp, synthetic construct
  misc_feature 1..20: note = Probe
  source 1..20: mol_type = other DNA
attggtcgtggttgtagtcc

SEQ ID NO: 42633 - DNA, 22 bp, synthetic construct
  misc_feature 1..22: note = Probe
  source 1..22: mol_type = other DNA
attggtcgtggttgtagtccgt

SEQ ID NO: 42634 - DNA, 23 bp, synthetic construct
  misc_feature 1..23: note = Probe
  source 1..23: mol_type = other DNA
attggtcgtggttgtagtccgtg

SEQ ID NO: 42635 - DNA, 24 bp, synthetic construct
  misc_feature 1..24: note = Probe
  source 1..24: mol_type = other DNA
attggtcgtggttgtagtccgtgc

SEQ ID NO: 42636 - DNA, 25 bp, synthetic construct
  misc_feature 1..25: note = Probe
  source 1..25: mol_type = other DNA
attggtcgtggttgtagtccgtgcg

SEQ ID NO: 42637 - DNA, 26 bp, synthetic construct
  misc_feature 1..26: note = Probe
  source 1..26: mol_type = other DNA
attggtcgtggttgtagtccgtgcga

SEQ ID NO: 42638 - DNA, 27 bp, synthetic construct
  misc_feature 1..27: note = Probe
  source 1..27: mol_type = other DNA
attggtcgtggttgtagtccgtgcgag

SEQ ID NO: 42639 - DNA, 28 bp, synthetic construct
  misc_feature 1..28: note = Probe
  source 1..28: mol_type = other DNA
attggtcgtggttgtagtccgtgcgaga

SEQ ID NO: 42640 - DNA, 29 bp, synthetic construct
  misc_feature 1..29: note = Probe
  source 1..29: mol_type = other DNA
attggtcgtggttgtagtccgtgcgagaa

SEQ ID NO: 42641 - DNA, 30 bp, synthetic construct; identical to SEQ ID NO: 9429
  misc_feature 1..30: note = Probe
  source 1..30: mol_type = other DNA

SEQ ID NO: 42642 - DNA, 31 bp, synthetic construct; identical to SEQ ID NO: 426
  misc_feature 1..31: note = Probe
  source 1..31: mol_type = other DNA

SEQ ID NO: 42643 - DNA, 32 bp, synthetic construct; identical to SEQ ID NO: 3924
  misc_feature 1..32: note = Probe
  source 1..32: mol_type = other DNA

SEQ ID NO: 42644 - DNA, 33 bp, synthetic construct; identical to SEQ ID NO: 3925
  misc_feature 1..33: note = Probe
  source 1..33: mol_type = other DNA

SEQ ID NO: 42645 - DNA, 42 bp, synthetic construct; identical to SEQ ID NO: 3929
  misc_feature 1..42: note = Probe
  source 1..42: mol_type = other DNA

SEQ ID NO: 42646 - DNA, 44 bp, synthetic construct; identical to SEQ ID NO: 434
  misc_feature 1..44: note = Probe
  source 1..44: mol_type = other DNA

SEQ ID NO: 42647 - DNA, 46 bp, synthetic construct; identical to SEQ ID NO: 436
  misc_feature 1..46: note = Probe
  source 1..46: mol_type = other DNA

SEQ ID NO: 42648 - DNA, 50 bp, synthetic construct; identical to SEQ ID NO: 437
  misc_feature 1..50: note = Probe
  source 1..50: mol_type = other DNA

SEQ ID NO: 42649 - DNA, 29 bp, synthetic construct
  misc_feature 1..29: note = Probe
  source 1..29: mol_type = other DNA
caaagcaatacactgaaaatgtttagacg

SEQ ID NO: 42650 - DNA, 50 bp, synthetic construct; identical to SEQ ID NO: 442
  misc_feature 1..50: note = Probe
  source 1..50: mol_type = other DNA

SEQ ID NO: 42651 - DNA, 37 bp, synthetic construct; identical to SEQ ID NO: 443
  misc_feature 1..37: note = Probe
  source 1..37: mol_type = other DNA

SEQ ID NO: 42652 - DNA, 40 bp, synthetic construct
  misc_feature 1..40: note = Probe
  source 1..40: mol_type = other DNA
caaagcacccaacttacacttaggagatttcaacttaact

SEQ ID NO: 42653 - DNA, 45 bp, synthetic construct
  misc_feature 1..45: note = Probe
  source 1..45: mol_type = other DNA
caaagcacccaacttacacttaggagatttcaacttaacttgacc

SEQ ID NO: 42654 - DNA, 46 bp, synthetic construct; identical to SEQ ID NO: 446
  misc_feature 1..46: note = Probe
  source 1..46: mol_type = other DNA

SEQ ID NO: 42655 - DNA, 49 bp, synthetic construct; identical to SEQ ID NO: 3987
  misc_feature 1..49: note = Probe
  source 1..49: mol_type = other DNA

SEQ ID NO: 42656 - DNA, 50 bp, synthetic construct; identical to SEQ ID NO: 447
  misc_feature 1..50: note = Probe
  source 1..50: mol_type = other DNA

SEQ ID NO: 42657 - DNA, 31 bp, synthetic construct; identical to SEQ ID NO: 12856
  misc_feature 1..31: note = Probe
  source 1..31: mol_type = other DNA

SEQ ID NO: 42658 - DNA, 27 bp, synthetic construct
  misc_feature 1..27: note = Probe
  source 1..27: mol_type = other DNA
caacctcggttcgaatccgagtcacgg

SEQ ID NO: 42659 - DNA, 20 bp, synthetic construct
  misc_feature 1..20: note = Probe
  source 1..20: mol_type = other DNA
caatccccggcacctccacc

SEQ ID NO: 42660 - DNA, 21 bp, synthetic construct
  misc_feature 1..21: note = Probe
  source 1..21: mol_type = other DNA
caatccccggcacctccacca

SEQ ID NO: 42661 - DNA, 50 bp, synthetic construct; identical to SEQ ID NO: 462
  misc_feature 1..50: note = Probe
  source 1..50: mol_type = other DNA

SEQ ID NO: 42662 - DNA, 19 bp, synthetic construct
  misc_feature 1..19: note = Probe
  source 1..19: mol_type = other DNA
cacaagaactgctaactca

SEQ ID NO: 42663 - DNA, 50 bp, synthetic construct; identical to SEQ ID NO: 466
  misc_feature 1..50: note = Probe
  source 1..50: mol_type = other DNA

SEQ ID NO: 42664 - DNA, 38 bp, synthetic construct; identical to SEQ ID NO: 17769
  misc_feature 1..38: note = Probe
  source 1..38: mol_type = other DNA

SEQ ID NO: 42665 - DNA, 36 bp, synthetic construct; identical to SEQ ID NO: 477
  misc_feature 1..36: note = Probe
  source 1..36: mol_type = other DNA

SEQ ID NO: 42666 - DNA, 37 bp, synthetic construct; identical to SEQ ID NO: 478
  misc_feature 1..37: note = Probe
  source 1..37: mol_type = other DNA

SEQ ID NO: 42667 - DNA, 32 bp, synthetic construct; identical to SEQ ID NO: 481
  misc_feature 1..32: note = Probe
  source 1..32: mol_type = other DNA

SEQ ID NO: 42668 - DNA, 33 bp, synthetic construct; identical to SEQ ID NO: 482
  misc_feature 1..33: note = Probe
  source 1..33: mol_type = other DNA

SEQ ID NO: 42669 - DNA, 34 bp, synthetic construct; identical to SEQ ID NO: 483
  misc_feature 1..34: note = Probe
  source 1..34: mol_type = other DNA

SEQ ID NO: 42670 - DNA, 35 bp, synthetic construct; identical to SEQ ID NO: 484
  misc_feature 1..35: note = Probe
  source 1..35: mol_type = other DNA

SEQ ID NO: 42671 - DNA, 36 bp, synthetic construct; identical to SEQ ID NO: 485
  misc_feature 1..36: note = Probe
  source 1..36: mol_type = other DNA

SEQ ID NO: 42672 - DNA, 37 bp, synthetic construct; identical to SEQ ID NO: 486
  misc_feature 1..37: note = Probe
  source 1..37: mol_type = other DNA

SEQ ID NO: 42673 - DNA, 27 bp, synthetic construct
  misc_feature 1..27: note = Probe
  source 1..27: mol_type = other DNA
cactgtaaagctaacttagcattaacc

SEQ ID NO: 42674 - DNA, 28 bp, synthetic construct
  misc_feature 1..28: note = Probe
  source 1..28: mol_type = other DNA
cactgtaaagctaacttagcattaacct

SEQ ID NO: 42675 - DNA, 30 bp, synthetic construct; identical to SEQ ID NO: 493
  misc_feature 1..30: note = Probe
  source 1..30: mol_type = other DNA

SEQ ID NO: 42676 - DNA, 50 bp, synthetic construct; identical to SEQ ID NO: 502
  misc_feature 1..50: note = Probe
  source 1..50: mol_type = other DNA

SEQ ID NO: 42677 - DNA, 32 bp, synthetic construct; identical to SEQ ID NO: 504
  misc_feature 1..32: note = Probe
  source 1..32: mol_type = other DNA

SEQ ID NO: 42678 - DNA, 32 bp, synthetic construct; identical to SEQ ID NO: 505
  misc_feature 1..32: note = Probe
  source 1..32: mol_type = other DNA

SEQ ID NO: 42679 - DNA, 32 bp, synthetic construct; identical to SEQ ID NO: 511
  misc_feature 1..32: note = Probe
  source 1..32: mol_type = other DNA

SEQ ID NO: 42680 - DNA, 34 bp, synthetic construct; identical to SEQ ID NO: 17838
  misc_feature 1..34: note = Probe
  source 1..34: mol_type = other DNA

SEQ ID NO: 42681 - DNA, 17 bp, synthetic construct
  misc_feature 1..17: note = Probe
  source 1..17: mol_type = other DNA
cagaccaagagccttca

SEQ ID NO: 42682 - DNA, 36 bp, synthetic construct; identical to SEQ ID NO: 513
  misc_feature 1..36: note = Probe
  source 1..36: mol_type = other DNA

SEQ ID NO: 42683 - DNA, 24 bp, synthetic construct
  misc_feature 1..24: note = Probe
  source 1..24: mol_type = other DNA
cagagaatagtttaaattagaatc

SEQ ID NO: 42684 - DNA, 30 bp, synthetic construct; identical to SEQ ID NO: 519
  misc_feature 1..30: note = Probe
  source 1..30: mol_type = other DNA

SEQ ID NO: 42685 - DNA, 32 bp, synthetic construct; identical to SEQ ID NO: 521
  misc_feature 1..32: note = Probe
  source 1..32: mol_type = other DNA

SEQ ID NO: 42686 - DNA, 20 bp, synthetic construct
  misc_feature 1..20: note = Probe
  source 1..20: mol_type = other DNA
cagagcccggtaatcgcata

SEQ ID NO: 42687 - DNA, 41 bp, synthetic construct
  misc_feature 1..41: note = Probe
  source 1..41: mol_type = other DNA
cagagcccggtaatcgcataaaacttaaaactttacagtca

SEQ ID NO: 42688 - DNA, 43 bp, synthetic construct
  misc_feature 1..43: note = Probe
  source 1..43: mol_type = other DNA
cagagcccggtaatcgcataaaacttaaaactttacagtcaga

SEQ ID NO: 42689 - DNA, 32 bp, synthetic construct; identical to SEQ ID NO: 530
  misc_feature 1..32: note = Probe
  source 1..32: mol_type = other DNA

SEQ ID NO: 42690 - DNA, 32 bp, synthetic construct; identical to SEQ ID NO: 531
  misc_feature 1..32: note = Probe
  source 1..32: mol_type = other DNA

SEQ ID NO: 42691 - DNA, 23 bp, synthetic construct
  misc_feature 1..23: note = Probe
  source 1..23: mol_type = other DNA
cagggatgggttcgattctcata

SEQ ID NO: 42692 - DNA, 25 bp, synthetic construct
  misc_feature 1..25: note = Probe
  source 1..25: mol_type = other DNA
cagggatgggttcgattctcatagt

SEQ ID NO: 42693 - DNA, 26 bp, synthetic construct
  misc_feature 1..26: note = Probe
  source 1..26: mol_type = other DNA
cagggatgggttcgattctcatagtc

SEQ ID NO: 42694 - DNA, 27 bp, synthetic construct
  misc_feature 1..27: note = Probe
  source 1..27: mol_type = other DNA
cagggatgggttcgattctcatagtcc

SEQ ID NO: 42695 - DNA, 28 bp, synthetic construct
  misc_feature 1..28: note = Probe
  source 1..28: mol_type = other DNA
cagggatgggttcgattctcatagtcct

SEQ ID NO: 42696 - DNA, 30 bp, synthetic construct; identical to SEQ ID NO: 534
  misc_feature 1..30: note = Probe
  source 1..30: mol_type = other DNA

SEQ ID NO: 42697 - DNA, 32 bp, synthetic construct; identical to SEQ ID NO: 4353
  misc_feature 1..32: note = Probe
  source 1..32: mol_type = other DNA

SEQ ID NO: 42698 - DNA, 29 bp, synthetic construct
  misc_feature 1..29: note = Probe
  source 1..29: mol_type = other DNA
cagttgatgcagagtggggttttgcagtc

SEQ ID NO: 42699 - DNA, 31 bp, synthetic construct; identical to SEQ ID NO: 18035
  misc_feature 1..31: note = Probe
  source 1..31: mol_type = other DNA

SEQ ID NO: 42700 - DNA, 25 bp, synthetic construct
  misc_feature 1..25: note = Probe
  source 1..25: mol_type = other DNA
catatcattggtcgtggttgtagtc

SEQ ID NO: 42701 - DNA, 29 bp, synthetic construct
  misc_feature 1..29: note = Probe
  source 1..29: mol_type = other DNA
catatcattggtcgtggttgtagtccgtg

SEQ ID NO: 42702 - DNA, 31 bp, synthetic construct; identical to SEQ ID NO: 540
  misc_feature 1..31: note = Probe
  source 1..31: mol_type = other DNA

SEQ ID NO: 42703 - DNA, 33 bp, synthetic construct; identical to SEQ ID NO: 18059
  misc_feature 1..33: note = Probe
  source 1..33: mol_type = other DNA

SEQ ID NO: 42704 - DNA, 35 bp, synthetic construct; identical to SEQ ID NO: 18060
  misc_feature 1..35: note = Probe
  source 1..35: mol_type = other DNA

SEQ ID NO: 42705 - DNA, 22 bp, synthetic construct
  misc_feature 1..22: note = Probe
  source 1..22: mol_type = other DNA
cattcttgcgacccgggttcga

SEQ ID NO: 42706 - DNA, 23 bp, synthetic construct
  misc_feature 1..23: note = Probe
  source 1..23: mol_type = other DNA
cattcttgcgacccgggttcgat

SEQ ID NO: 42707 - DNA, 24 bp, synthetic construct
  misc_feature 1..24: note = Probe
  source 1..24: mol_type = other DNA
cattcttgcgacccgggttcgatt

SEQ ID NO: 42708 - DNA, 24 bp, synthetic construct
  misc_feature 1..24: note = Probe
  source 1..24: mol_type = other DNA
cattggtcgtggttgtagtccgtg

SEQ ID NO: 42709 - DNA, 26 bp, synthetic construct
  misc_feature 1..26: note = Probe
  source 1..26: mol_type = other DNA
cattggtcgtggttgtagtccgtgcg

SEQ ID NO: 42710 - DNA, 28 bp, synthetic construct
  misc_feature 1..28: note = Probe
  source 1..28: mol_type = other DNA
cattggtcgtggttgtagtccgtgcgag

SEQ ID NO: 42711 - DNA, 29 bp, synthetic construct
  misc_feature 1..29: note = Probe
  source 1..29: mol_type = other DNA
cattggtcgtggttgtagtccgtgcgaga

SEQ ID NO: 42712 - DNA, 30 bp, synthetic construct; identical to SEQ ID NO: 18130
  misc_feature 1..30: note = Probe
  source 1..30: mol_type = other DNA

SEQ ID NO: 42713 - DNA, 32 bp, synthetic construct; identical to SEQ ID NO: 548
  misc_feature 1..32: note = Probe
  source 1..32: mol_type = other DNA

SEQ ID NO: 42714 - DNA, 46 bp, synthetic construct; identical to SEQ ID NO: 558
  misc_feature 1..46: note = Probe
  source 1..46: mol_type = other DNA

SEQ ID NO: 42715 - DNA, 34 bp, synthetic construct; identical to SEQ ID NO: 566
  misc_feature 1..34: note = Probe
  source 1..34: mol_type = other DNA

SEQ ID NO: 42716 - DNA, 19 bp, synthetic construct
  misc_feature 1..19: note = Probe
  source 1..19: mol_type = other DNA
ccacgcgggaggcccgggt

SEQ ID NO: 42717 - DNA, 33 bp, synthetic construct; identical to SEQ ID NO: 4551
  misc_feature 1..33: note = Probe
  source 1..33: mol_type = other DNA

SEQ ID NO: 42718 - DNA, 33 bp, synthetic construct; identical to SEQ ID NO: 571
  misc_feature 1..33: note = Probe
  source 1..33: mol_type = other DNA

SEQ ID NO: 42719 - DNA, 32 bp, synthetic construct; identical to SEQ ID NO: 36419
  misc_feature 1..32: note = Probe
  source 1..32: mol_type = other DNA

SEQ ID NO: 42720 - DNA, 24 bp, synthetic construct
  misc_feature 1..24: note = Probe
  source 1..24: mol_type = other DNA
ccagggttcaagtccctgttcggg

SEQ ID NO: 42721 - DNA, 26 bp, synthetic construct
  misc_feature 1..26: note = Probe
  source 1..26: mol_type = other DNA
ccagggttcaagtccctgttcgggcg

SEQ ID NO: 42722 - DNA, 50 bp, synthetic construct; identical to SEQ ID NO: 4574
  misc_feature 1..50: note = Probe
  source 1..50: mol_type = other DNA

SEQ ID NO: 42723 - DNA, 30 bp, synthetic construct; identical to SEQ ID NO: 9679
  misc_feature 1..30: note = Probe
  source 1..30: mol_type = other DNA

SEQ ID NO: 42724 - DNA, 32 bp, synthetic construct; identical to SEQ ID NO: 580
  misc_feature 1..32: note = Probe
  source 1..32: mol_type = other DNA

SEQ ID NO: 42725 - DNA, 33 bp, synthetic construct; identical to SEQ ID NO: 581
  misc_feature 1..33: note = Probe
  source 1..33: mol_type = other DNA

SEQ ID NO: 42726 - DNA, 34 bp, synthetic construct; identical to SEQ ID NO: 582
  misc_feature 1..34: note = Probe
  source 1..34: mol_type = other DNA

SEQ ID NO: 42727 - DNA, 37 bp, synthetic construct; identical to SEQ ID NO: 12944
  misc_feature 1..37: note = Probe
  source 1..37: mol_type = other DNA

SEQ ID NO: 42728 - DNA, 40 bp, synthetic construct; identical to SEQ ID NO: 12945
  misc_feature 1..40: note = Probe
  source 1..40: mol_type = other DNA

SEQ ID NO: 42729 - DNA, 32 bp, synthetic construct; identical to SEQ ID NO: 590
  misc_feature 1..32: note = Probe
  source 1..32: mol_type = other DNA

SEQ ID NO: 42730 - DNA, 37 bp, synthetic construct; identical to SEQ ID NO: 599
  misc_feature 1..37: note = Probe
  source 1..37: mol_type = other DNA

SEQ ID NO: 42731 - DNA, 39 bp, synthetic construct; identical to SEQ ID NO: 600
  misc_feature 1..39: note = Probe
  source 1..39: mol_type = other DNA

SEQ ID NO: 42732 - DNA, 31 bp, synthetic construct; identical to SEQ ID NO: 602
  misc_feature 1..31: note = Probe
  source 1..31: mol_type = other DNA

SEQ ID NO: 42733 - DNA, 32 bp, synthetic construct; identical to SEQ ID NO: 4701
  misc_feature 1..32: note = Probe
  source 1..32: mol_type = other DNA

SEQ ID NO: 42734 - DNA, 33 bp, synthetic construct; identical to SEQ ID NO: 603
  misc_feature 1..33: note = Probe
  source 1..33: mol_type = other DNA

SEQ ID NO: 42735 - DNA, 34 bp, synthetic construct; identical to SEQ ID NO: 604
  misc_feature 1..34: note = Probe
  source 1..34: mol_type = other DNA

SEQ ID NO: 42736 - DNA, 17 bp, synthetic construct
  misc_feature 1..17: note = Probe
  source 1..17: mol_type = other DNA
ccccggcacctccacca

SEQ ID NO: 42737 - DNA, 24 bp, synthetic construct
  misc_feature 1..24: note = Probe
  source 1..24: mol_type = other DNA
ccccgggttcaatccccggcacct

SEQ ID NO: 42738 - DNA, 26 bp, synthetic construct
  misc_feature 1..26: note = Probe
  source 1..26: mol_type = other DNA
ccccgggttcaatccccggcacctcc

SEQ ID NO: 42739 - DNA, 27 bp, synthetic construct
  misc_feature 1..27: note = Probe
  source 1..27: mol_type = other DNA
ccccgggttcaatccccggcacctcca

SEQ ID NO: 42740 - DNA, 24 bp, synthetic construct
  misc_feature 1..24: note = Probe
  source 1..24: mol_type = other DNA
ccccgggttcaatccccggcatct

SEQ ID NO: 42741 - DNA, 26 bp, synthetic construct
  misc_feature 1..26: note = Probe
  source 1..26: mol_type = other DNA
ccccgggttcaatccccggcatctcc

SEQ ID NO: 42742 - DNA, 27 bp, synthetic construct
  misc_feature 1..27: note = Probe
  source 1..27: mol_type = other DNA
ccccgggttcaatccccggcatctcca

SEQ ID NO: 42743 - DNA, 27 bp, synthetic construct
  misc_feature 1..27: note = Probe
  source 1..27: mol_type = other DNA
ccccgggttcgacccccggctcctcca

SEQ ID NO: 42744 - DNA, 21 bp, synthetic construct
  misc_feature 1..21: note = Probe
  source 1..21: mol_type = other DNA
ccccgggttcgatccccggca

SEQ ID NO: 42745 - DNA, 24 bp, synthetic construct
  misc_feature 1..24: note = Probe
  source 1..24: mol_type = other DNA
ccccgggttcgatccccggcatct

SEQ ID NO: 42746 - DNA, 26 bp, synthetic construct
  misc_feature 1..26: note = Probe
  source 1..26: mol_type = other DNA
ccccgggttcgatccccggcatctcc

SEQ ID NO: 42747 - DNA, 27 bp, synthetic construct
  misc_feature 1..27: note = Probe
  source 1..27: mol_type = other DNA
ccccgggttcgatccccggcatctcca

SEQ ID NO: 42748 - DNA, 30 bp, synthetic construct; identical to SEQ ID NO: 611
  misc_feature 1..30: note = Probe
  source 1..30: mol_type = other DNA

SEQ ID NO: 42749 - DNA, 31 bp, synthetic construct; identical to SEQ ID NO: 612
  misc_feature 1..31: note = Probe
  source 1..31: mol_type = other DNA

SEQ ID NO: 42750 - DNA, 32 bp, synthetic construct; identical to SEQ ID NO: 613
  misc_feature 1..32: note = Probe
  source 1..32: mol_type = other DNA

SEQ ID NO: 42751 - DNA, 30 bp, synthetic construct; identical to SEQ ID NO: 615
  misc_feature 1..30: note = Probe
  source 1..30: mol_type = other DNA

SEQ ID NO: 42752 - DNA, 31 bp, synthetic construct; identical to SEQ ID NO: 616
  misc_feature 1..31: note = Probe
  source 1..31: mol_type = other DNA

SEQ ID NO: 42753 - DNA, 32 bp, synthetic construct; identical to SEQ ID NO: 617
  misc_feature 1..32: note = Probe
  source 1..32: mol_type = other DNA

SEQ ID NO: 42754 - DNA, 35 bp, synthetic construct; identical to SEQ ID NO: 620
  misc_feature 1..35: note = Probe
  source 1..35: mol_type = other DNA

SEQ ID NO: 42755 - DNA, 30 bp, synthetic construct; identical to SEQ ID NO: 4748
  misc_feature 1..30: note = Probe
  source 1..30: mol_type = other DNA

SEQ ID NO: 42756 - DNA, 31 bp, synthetic construct; identical to SEQ ID NO: 621
  misc_feature 1..31: note = Probe
  source 1..31: mol_type = other DNA

SEQ ID NO: 42757 - DNA, 32 bp, synthetic construct; identical to SEQ ID NO: 622
  misc_feature 1..32: note = Probe
  source 1..32: mol_type = other DNA

SEQ ID NO: 42758 - DNA, 30 bp, synthetic construct; identical to SEQ ID NO: 4750
  misc_feature 1..30: note = Probe
  source 1..30: mol_type = other DNA

SEQ ID NO: 42759 - DNA, 31 bp, synthetic construct; identical to SEQ ID NO: 626
  misc_feature 1..31: note = Probe
  source 1..31: mol_type = other DNA

SEQ ID NO: 42760 - DNA, 32 bp, synthetic construct; identical to SEQ ID NO: 627
  misc_feature 1..32: note = Probe
  source 1..32: mol_type = other DNA

SEQ ID NO: 42761 - DNA, 26 bp, synthetic construct
  misc_feature 1..26: note = Probe
  source 1..26: mol_type = other DNA
cccgggttcaaatcccggacgagccc

SEQ ID NO: 42762 - DNA, 27 bp, synthetic construct
  misc_feature 1..27: note = Probe
  source 1..27: mol_type = other DNA
cccgggttcaaatcccggacgagcccc

SEQ ID NO: 42763 - DNA, 29 bp, synthetic construct
  misc_feature 1..29: note = Probe
  source 1..29: mol_type = other DNA
cccgggttcaatccccggcacctccacca

SEQ ID NO: 42764 - DNA, 17 bp, synthetic construct
  misc_feature 1..17: note = Probe
  source 1..17: mol_type = other DNA
cccgggttcgatcccca

SEQ ID NO: 42765 - DNA, 18 bp, synthetic construct
  misc_feature 1..18: note = Probe
  source 1..18: mol_type = other DNA
cccgggttcgatccccag

SEQ ID NO: 42766 - DNA, 19 bp, synthetic construct
  misc_feature 1..19: note = Probe
  source 1..19: mol_type = other DNA
cccgggttcgatccccagc

SEQ ID NO: 42767 - DNA, 20 bp, synthetic construct
  misc_feature 1..20: note = Probe
  source 1..20: mol_type = other DNA
cccgggttcgatccccagca

SEQ ID NO: 42768 - DNA, 22 bp, synthetic construct
  misc_feature 1..22: note = Probe
  source 1..22: mol_type = other DNA
cccgggttcgatccccagcatc

SEQ ID NO: 42769 - DNA, 23 bp, synthetic construct
  misc_feature 1..23: note = Probe
  source 1..23: mol_type = other DNA
cccgggttcgatccccagcatct

SEQ ID NO: 42770 - DNA, 24 bp, synthetic construct
  misc_feature 1..24: note = Probe
  source 1..24: mol_type = other DNA
cccgggttcgatccccagcatctc

SEQ ID NO: 42771 - DNA, 25 bp, synthetic construct
  misc_feature 1..25: note = Probe
  source 1..25: mol_type = other DNA
cccgggttcgatccccagcatctcc

SEQ ID NO: 42772 - DNA, 26 bp, synthetic construct
  misc_feature 1..26: note = Probe
  source 1..26: mol_type = other DNA
cccgggttcgatccccagcatctcca

SEQ ID NO: 42773 - DNA, 36 bp, synthetic construct; identical to SEQ ID NO: 4758
  misc_feature 1..36: note = Probe
  source 1..36: mol_type = other DNA

SEQ ID NO: 42774 - DNA, 16 bp, synthetic construct
  misc_feature 1..16: note = Probe
  source 1..16: mol_type = other DNA
ccctcagtaagttgca

SEQ ID NO: 42775 - DNA, 30 bp, synthetic construct; identical to SEQ ID NO: 637
  misc_feature 1..30: note = Probe
  source 1..30: mol_type = other DNA

SEQ ID NO: 42776 - DNA, 31 bp, synthetic construct; identical to SEQ ID NO: 638
  misc_feature 1..31: note = Probe
  source 1..31: mol_type = other DNA

SEQ ID NO: 42777 - DNA, 32 bp, synthetic construct; identical to SEQ ID NO: 639
  misc_feature 1..32: note = Probe
  source 1..32: mol_type = other DNA

SEQ ID NO: 42778 - DNA, 33 bp, synthetic construct; identical to SEQ ID NO: 640
  misc_feature 1..33: note = Probe
  source 1..33: mol_type = other DNA

SEQ ID NO: 42779 - DNA, 34 bp, synthetic construct; identical to SEQ ID NO: 641
  misc_feature 1..34: note = Probe
  source 1..34: mol_type = other DNA

SEQ ID NO: 42780 - DNA, 35 bp, synthetic construct; identical to SEQ ID NO: 642
  misc_feature 1..35: note = Probe
  source 1..35: mol_type = other DNA

SEQ ID NO: 42781 - DNA, 26 bp, synthetic construct
  misc_feature 1..26: note = Probe
  source 1..26: mol_type = other DNA
ccctggttcaaatccgggtgccccct

SEQ ID NO: 42782 - DNA, 27 bp, synthetic construct
  misc_feature 1..27: note = Probe
  source 1..27: mol_type = other DNA
ccctggttcaaatccgggtgccccctc

SEQ ID NO: 42783 - DNA, 24 bp, synthetic construct
  misc_feature 1..24: note = Probe
  source 1..24: mol_type = other DNA
ccctggttcgatcccgggtttcgg

SEQ ID NO: 42784 - DNA, 25 bp, synthetic construct
  misc_feature 1..25: note = Probe
  source 1..25: mol_type = other DNA
ccctggttcgatcccgggtttcggc

SEQ ID NO: 42785 - DNA, 26 bp, synthetic construct
  misc_feature 1..26: note = Probe
  source 1..26: mol_type = other DNA
ccctggttcgatcccgggtttcggca

SEQ ID NO: 42786 - DNA, 27 bp, synthetic construct
  misc_feature 1..27: note = Probe
  source 1..27: mol_type = other DNA
ccctggttcgatcccgggtttcggcac

SEQ ID NO: 42787 - DNA, 29 bp, synthetic construct
  misc_feature 1..29: note = Probe
  source 1..29: mol_type = other DNA
ccgaaaatgttggttatacccttcccgta

SEQ ID NO: 42788 - DNA, 30 bp, synthetic construct; identical to SEQ ID NO: 644
  misc_feature 1..30: note = Probe
  source 1..30: mol_type = other DNA

SEQ ID NO: 42789 - DNA, 31 bp, synthetic construct; identical to SEQ ID NO: 4782
  misc_feature 1..31: note = Probe
  source 1..31: mol_type = other DNA

SEQ ID NO: 42790 - DNA, 32 bp, synthetic construct; identical to SEQ ID NO: 13002
  misc_feature 1..32: note = Probe
  source 1..32: mol_type = other DNA

SEQ ID NO: 42791 - DNA, 33 bp, synthetic construct; identical to SEQ ID NO: 645
  misc_feature 1..33: note = Probe
  source 1..33: mol_type = other DNA

SEQ ID NO: 42792 - DNA, 35 bp, synthetic construct; identical to SEQ ID NO: 646
  misc_feature 1..35: note = Probe
  source 1..35: mol_type = other DNA

SEQ ID NO: 42793 - DNA, 36 bp, synthetic construct; identical to SEQ ID NO: 18606
  misc_feature 1..36: note = Probe
  source 1..36: mol_type = other DNA

SEQ ID NO: 42794 - DNA, 33 bp, synthetic construct; identical to SEQ ID NO: 18608
  misc_feature 1..33: note = Probe
  source 1..33: mol_type = other DNA

SEQ ID NO: 42795 - DNA, 35 bp, synthetic construct
  misc_feature 1..35: note = Probe
  source 1..35: mol_type = other DNA
ccgaaaggttggtggttcgatcccacccagggacg

SEQ ID NO: 42796 - DNA, 33 bp, synthetic construct
  misc_feature 1..33: note = Probe
  source 1..33: mol_type = other DNA
ccgaggttgtgagttcgagcctcacctggagca

SEQ ID NO: 42797 - DNA, 34 bp, synthetic construct; identical to SEQ ID NO: 13007
  misc_feature 1..34: note = Probe
  source 1..34: mol_type = other DNA

SEQ ID NO: 42798 - DNA, 45 bp, synthetic construct
  misc_feature 1..45: note = Probe
  source 1..45: mol_type = other DNA
ccgcctgtcacgcgggagaccggggttcgattccccgacggggag

SEQ ID NO: 42799 - DNA, 31 bp, synthetic construct; identical to SEQ ID NO: 658
  misc_feature 1..31: note = Probe
  source 1..31: mol_type = other DNA

SEQ ID NO: 42800 - DNA, 32 bp, synthetic construct; identical to SEQ ID NO: 659
  misc_feature 1..32: note = Probe
  source 1..32: mol_type = other DNA

SEQ ID NO: 42801 - DNA, 25 bp, synthetic construct
  misc_feature 1..25: note = Probe
  source 1..25: mol_type = other DNA
ccggagatgaaaacctttttccaag

SEQ ID NO: 42802 - DNA, 27 bp, synthetic construct
  misc_feature 1..27: note = Probe
  source 1..27: mol_type = other DNA
ccggagatgaaaacctttttccaagga

SEQ ID NO: 42803 - DNA, 29 bp, synthetic construct
  misc_feature 1..29: note = Probe
  source 1..29: mol_type = other DNA
ccggagatgaaaacctttttccaaggaca

SEQ ID NO: 42804 - DNA, 29 bp, synthetic construct
  misc_feature 1..29: note = Probe
  source 1..29: mol_type = other DNA
ccggatagctcagtcggtagagcatcaga

SEQ ID NO: 42805 - DNA, 29 bp, synthetic construct
  misc_feature 1..29: note = Probe
  source 1..29: mol_type = other DNA
ccggctagctcagtcggtagagcatgaga

SEQ ID NO: 42806 - DNA, 30 bp, synthetic construct; identical to SEQ ID NO: 675
  misc_feature 1..30: note = Probe
  source 1..30: mol_type = other DNA

SEQ ID NO: 42807 - DNA, 29 bp, synthetic construct
  misc_feature 1..29: note = Probe
  source 1..29: mol_type = other DNA
ccggctagctcagtcggtagagcatggga

SEQ ID NO: 42808 - DNA, 30 bp, synthetic construct; identical to SEQ ID NO: 680
  misc_feature 1..30: note = Probe
  source 1..30: mol_type = other DNA

SEQ ID NO: 42809 - DNA, 35 bp, synthetic construct; identical to SEQ ID NO: 4832
  misc_feature 1..35: note = Probe
  source 1..35: mol_type = other DNA

SEQ ID NO: 42810 - DNA, 29 bp, synthetic construct
  misc_feature 1..29: note = Probe
  source 1..29: mol_type = other DNA
ccgtgatcgtatagtggttagtactctgc

SEQ ID NO: 42811 - DNA, 35 bp, synthetic construct; identical to SEQ ID NO: 690
  misc_feature 1..35: note = Probe
  source 1..35: mol_type = other DNA

SEQ ID NO: 42812 - DNA, 30 bp, synthetic construct; identical to SEQ ID NO: 4854
  misc_feature 1..30: note = Probe
  source 1..30: mol_type = other DNA

SEQ ID NO: 42813 - DNA, 27 bp, synthetic construct
  misc_feature 1..27: note = Probe
  source 1..27: mol_type = other DNA
cctcgggttcgatccccgacacctcca

SEQ ID NO: 42814 - DNA, 32 bp, synthetic construct; identical to SEQ ID NO: 4870
  misc_feature 1..32: note = Probe
  source 1..32: mol_type = other DNA

SEQ ID NO: 42815 - DNA, 34 bp, synthetic construct; identical to SEQ ID NO: 694
  misc_feature 1..34: note = Probe
  source 1..34: mol_type = other DNA

SEQ ID NO: 42816 - DNA, 35 bp, synthetic construct; identical to SEQ ID NO: 695
  misc_feature 1..35: note = Probe
  source 1..35: mol_type = other DNA

SEQ ID NO: 42817 - DNA, 26 bp, synthetic construct
  misc_feature 1..26: note = Probe
  source 1..26: mol_type = other DNA
cctgggttcgagccccagtggaacca

SEQ ID NO: 42818 - DNA, 29 bp, synthetic construct
  misc_feature 1..29: note = Probe
  source 1..29: mol_type = other DNA
cctggtggtctagtggttaggattcggcg

SEQ ID NO: 42819 - DNA, 31 bp, synthetic construct; identical to SEQ ID NO: 700
  misc_feature 1..31: note = Probe
  source 1..31: mol_type = other DNA

SEQ ID NO: 42820 - DNA, 32 bp, synthetic construct; identical to SEQ ID NO: 701
  misc_feature 1..32: note = Probe
  source 1..32: mol_type = other DNA

SEQ ID NO: 42821 - DNA, 33 bp, synthetic construct; identical to SEQ ID NO: 702
  misc_feature 1..33: note = Probe
  source 1..33: mol_type = other DNA

SEQ ID NO: 42822 - DNA, 34 bp, synthetic construct; identical to SEQ ID NO: 703
  misc_feature 1..34: note = Probe
  source 1..34: mol_type = other DNA

SEQ ID NO: 42823 - DNA, 23 bp, synthetic construct
  misc_feature 1..23: note = Probe
  source 1..23: mol_type = other DNA
cctgtcacgcgggagaccggggt

SEQ ID NO: 42824 - DNA, 24 bp, synthetic construct
  misc_feature 1..24: note = Probe
  source 1..24: mol_type = other DNA
cctgtcacgcgggagaccggggtt

SEQ ID NO: 42825 - DNA, 39 bp, synthetic construct; identical to SEQ ID NO: 13082
  misc_feature 1..39: note = Probe
  source 1..39: mol_type = other DNA

SEQ ID NO: 42826 - DNA, 41 bp, synthetic construct; identical to SEQ ID NO: 18829
  misc_feature 1..41: note = Probe
  source 1..41: mol_type = other DNA

SEQ ID NO: 42827 - DNA, 42 bp, synthetic construct; identical to SEQ ID NO: 706
  misc_feature 1..42: note = Probe
  source 1..42: mol_type = other DNA

SEQ ID NO: 42828 - DNA, 19 bp, synthetic construct
  misc_feature 1..19: note = Probe
  source 1..19: mol_type = other DNA
ccttccaagcagttgaccc

SEQ ID NO: 42829 - DNA, 28 bp, synthetic construct
  misc_feature 1..28: note = Probe
  source 1..28: mol_type = other DNA
cgaaaatgttggttatacccttcccgta

SEQ ID NO: 42830 - DNA, 29 bp, synthetic construct
  misc_feature 1..29: note = Probe
  source 1..29: mol_type = other DNA
cgaaaatgttggttatacccttcccgtac

SEQ ID NO: 42831 - DNA, 30 bp, synthetic construct; identical to SEQ ID NO: 709
  misc_feature 1..30: note = Probe
  source 1..30: mol_type = other DNA

SEQ ID NO: 42832 - DNA, 31 bp, synthetic construct; identical to SEQ ID NO: 710
  misc_feature 1..31: note = Probe
  source 1..31: mol_type = other DNA

SEQ ID NO: 42833 - DNA, 32 bp, synthetic construct; identical to SEQ ID NO: 711
  misc_feature 1..32: note = Probe
  source 1..32: mol_type = other DNA

SEQ ID NO: 42834 - DNA, 34 bp, synthetic construct; identical to SEQ ID NO: 18882
  misc_feature 1..34: note = Probe
  source 1..34: mol_type = other DNA

SEQ ID NO: 42835 - DNA, 18 bp, synthetic construct
  misc_feature 1..18: note = Probe
  source 1..18: mol_type = other DNA
cgaatccgagtcacggca

SEQ ID NO: 42836 - DNA, 19 bp, synthetic construct
  misc_feature 1..19: note = Probe
  source 1..19: mol_type = other DNA
cgactcccggtgtgggaac

SEQ ID NO: 42837 - DNA, 18 bp, synthetic construct
  misc_feature 1..18: note = Probe
  source 1..18: mol_type = other DNA
cgagcccacccagggacg

SEQ ID NO: 42838 - DNA, 20 bp, synthetic construct
  misc_feature 1..20: note = Probe
  source 1..20: mol_type = other DNA
cgagcccacccagggacgcc

SEQ ID NO: 42839 - DNA, 18 bp, synthetic construct
  misc_feature 1..18: note = Probe
  source 1..18: mol_type = other DNA
cgagcctcacctggagca

SEQ ID NO: 42840 - DNA, 32 bp, synthetic construct
  misc_feature 1..32: note = Probe
  source 1..32: mol_type = other DNA
cgaggttgtgagttcgagcctcacctggagca

SEQ ID NO: 42841 - DNA, 18 bp, synthetic construct
  misc_feature 1..18: note = Probe
  source 1..18: mol_type = other DNA
cgatccccggcatctcca

SEQ ID NO: 42842 - DNA, 18 bp, synthetic construct
  misc_feature 1..18: note = Probe
  source 1..18: mol_type = other DNA
cgatgcccgcatcctcca

SEQ ID NO: 42843 - DNA, 34 bp, synthetic construct; identical to SEQ ID NO: 13095
  misc_feature 1..34: note = Probe
  source 1..34: mol_type = other DNA

SEQ ID NO: 42844 - DNA, 35 bp, synthetic construct; identical to SEQ ID NO: 13096
  misc_feature 1..35: note = Probe
  source 1..35: mol_type = other DNA

SEQ ID NO: 42845 - DNA, 36 bp, synthetic construct; identical to SEQ ID NO: 13097
  misc_feature 1..36: note = Probe
  source 1..36: mol_type = other DNA

SEQ ID NO: 42846 - DNA, 26 bp, synthetic construct
  misc_feature 1..26: note = Probe
  source 1..26: mol_type = other DNA
cgcataaaacttaaaactttacagtc

SEQ ID NO: 42847 - DNA, 27 bp, synthetic construct
  misc_feature 1..27: note = Probe
  source 1..27: mol_type = other DNA
cgcataaaacttaaaactttacagtca

SEQ ID NO: 42848 - DNA, 29 bp, synthetic construct
  misc_feature 1..29: note = Probe
  source 1..29: mol_type = other DNA
cgcataaaacttaaaactttacagtcaga

SEQ ID NO: 42849 - DNA, 33 bp, synthetic construct; identical to SEQ ID NO: 13103
  misc_feature 1..33: note = Probe
  source 1..33: mol_type = other DNA

SEQ ID NO: 42850 - DNA, 28 bp, synthetic construct
  misc_feature 1..28: note = Probe
  source 1..28: mol_type = other DNA
cgccgctggtgtagtggtatcatgcaag

SEQ ID NO: 42851 - DNA, 29 bp, synthetic construct
  misc_feature 1..29: note = Probe
  source 1..29: mol_type = other DNA
cgccgctggtgtagtggtatcatgcaaga

SEQ ID NO: 42852 - DNA, 31 bp, synthetic construct; identical to SEQ ID NO: 722
  misc_feature 1..31: note = Probe
  source 1..31: mol_type = other DNA

SEQ ID NO: 42853 - DNA, 41 bp, synthetic construct; identical to SEQ ID NO: 725
  misc_feature 1..41: note = Probe
  source 1..41: mol_type = other DNA

SEQ ID NO: 42854 - DNA, 44 bp, synthetic construct; identical to SEQ ID NO: 5006
  misc_feature 1..44: note = Probe
  source 1..44: mol_type = other DNA

SEQ ID NO: 42855 - DNA, 36 bp, synthetic construct; identical to SEQ ID NO: 19123
  misc_feature 1..36: note = Probe
  source 1..36: mol_type = other DNA

SEQ ID NO: 42856 - DNA, 26 bp, synthetic construct
  misc_feature 1..26: note = Probe
  source 1..26: mol_type = other DNA
cgcgagttcaaatctcgctggggcct

SEQ ID NO: 42857 - DNA, 30 bp, synthetic construct; identical to SEQ ID NO: 19131
  misc_feature 1..30: note = Probe
  source 1..30: mol_type = other DNA

SEQ ID NO: 42858 - DNA, 31 bp, synthetic construct; identical to SEQ ID NO: 5024
  misc_feature 1..31: note = Probe
  source 1..31: mol_type = other DNA

SEQ ID NO: 42859 - DNA, 32 bp, synthetic construct; identical to SEQ ID NO: 727
  misc_feature 1..32: note = Probe
  source 1..32: mol_type = other DNA

SEQ ID NO: 42860 - DNA, 34 bp, synthetic construct; identical to SEQ ID NO: 728
  misc_feature 1..34: note = Probe
  source 1..34: mol_type = other DNA

SEQ ID NO: 42861 - DNA, 35 bp, synthetic construct; identical to SEQ ID NO: 729
  misc_feature 1..35: note = Probe
  source 1..35: mol_type = other DNA

SEQ ID NO: 42862 - DNA, 30 bp, synthetic construct; identical to SEQ ID NO: 730
  misc_feature 1..30: note = Probe
  source 1..30: mol_type = other DNA

SEQ ID NO: 42863 - DNA, 31 bp, synthetic construct; identical to SEQ ID NO: 731
  misc_feature 1..31: note = Probe
  source 1..31: mol_type = other DNA

SEQ ID NO: 42864 - DNA, 32 bp, synthetic construct; identical to SEQ ID NO: 732
  misc_feature 1..32: note = Probe
  source 1..32: mol_type = other DNA

SEQ ID NO: 42865 - DNA, 33 bp, synthetic construct; identical to SEQ ID NO: 733
  misc_feature 1..33: note = Probe
  source 1..33: mol_type = other DNA

SEQ ID NO: 42866 - DNA, 34 bp, synthetic construct; identical to SEQ ID NO: 734
  misc_feature 1..34: note = Probe
  source 1..34: mol_type = other DNA

SEQ ID NO: 42867 - DNA, 35 bp, synthetic construct; identical to SEQ ID NO: 735
  misc_feature 1..35: note = Probe
  source 1..35: mol_type = other DNA

SEQ ID NO: 42868 - DNA, 25 bp, synthetic construct
  misc_feature 1..25: note = Probe
  source 1..25: mol_type = other DNA
cgctggttcgaatccggctcgaagg

SEQ ID NO: 42869 - DNA, 26 bp, synthetic construct
  misc_feature 1..26: note = Probe
  source 1..26: mol_type = other DNA
cgctggttcgaatccggctcgaagga

SEQ ID NO: 42870 - DNA, 25 bp, synthetic construct
  misc_feature 1..25: note = Probe
  source 1..25: mol_type = other DNA
cgctggttcgattccggctcgaagg

SEQ ID NO: 42871 - DNA, 26 bp, synthetic construct
  misc_feature 1..26: note = Probe
  source 1..26: mol_type = other DNA
cgctggttcgattccggctcgaagga

SEQ ID NO: 42872 - DNA, 27 bp, synthetic construct
  misc_feature 1..27: note = Probe
  source 1..27: mol_type = other DNA
cgctggttcgattccggctcgaaggac

SEQ ID NO: 42873 - DNA, 17 bp, synthetic construct
  misc_feature 1..17: note = Probe
  source 1..17: mol_type = other DNA
cggaagcgtgctgggcc

SEQ ID NO: 42874 - DNA, 18 bp, synthetic construct
  misc_feature 1..18: note = Probe
  source 1..18: mol_type = other DNA
cggaagcgtgctgggccc

SEQ ID NO: 42875 - DNA, 25 bp, synthetic construct
  misc_feature 1..25: note = Probe
  source 1..25: mol_type = other DNA
cggaagcgtgctgggcccataaccc

SEQ ID NO: 42876 - DNA, 34 bp, synthetic construct; identical to SEQ ID NO: 747
  misc_feature 1..34: note = Probe
  source 1..34: mol_type = other DNA

SEQ ID NO: 42877 - DNA, 36 bp, synthetic construct; identical to SEQ ID NO: 749
  misc_feature 1..36: note = Probe
  source 1..36: mol_type = other DNA

SEQ ID NO: 42878 - DNA, 37 bp, synthetic construct; identical to SEQ ID NO: 750
  misc_feature 1..37: note = Probe
  source 1..37: mol_type = other DNA

SEQ ID NO: 42879 - DNA, 38 bp, synthetic construct; identical to SEQ ID NO: 751
  misc_feature 1..38: note = Probe
  source 1..38: mol_type = other DNA

SEQ ID NO: 42880 - DNA, 16 bp, synthetic construct
  misc_feature 1..16: note = Probe
  source 1..16: mol_type = other DNA
cggagatgaaaacctt

SEQ ID NO: 42881 - DNA, 18 bp, synthetic construct
  misc_feature 1..18: note = Probe
  source 1..18: mol_type = other DNA
cggagatgaaaacctttt

SEQ ID NO: 42882 - DNA, 26 bp, synthetic construct
  misc_feature 1..26: note = Probe
  source 1..26: mol_type = other DNA
cggagatgaaaacctttttccaagga

SEQ ID NO: 42883 - DNA, 28 bp, synthetic construct
  misc_feature 1..28: note = Probe
  source 1..28: mol_type = other DNA
cggagatgaaaacctttttccaaggaca

SEQ ID NO: 42884 - DNA, 28 bp, synthetic construct
  misc_feature 1..28: note = Probe
  source 1..28: mol_type = other DNA
cggatagctcagtcggtagagcatcaga

SEQ ID NO: 42885 - DNA, 28 bp, synthetic construct
  misc_feature 1..28: note = Probe
  source 1..28: mol_type = other DNA
cggcccgggttcgactcccggtgtggga

SEQ ID NO: 42886 - DNA, 29 bp, synthetic construct
  misc_feature 1..29: note = Probe
  source 1..29: mol_type = other DNA
cggcccgggttcgactcccggtgtgggaa

SEQ ID NO: 42887 - DNA, 28 bp, synthetic construct
  misc_feature 1..28: note = Probe
  source 1..28: mol_type = other DNA
cggcccgggttcgattcccggtcaggga

SEQ ID NO: 42888 - DNA, 29 bp, synthetic construct
  misc_feature 1..29: note = Probe
  source 1..29: mol_type = other DNA
cggcccgggttcgattcccggtcagggaa

SEQ ID NO: 42889 - DNA, 28 bp, synthetic construct
  misc_feature 1..28: note = Probe
  source 1..28: mol_type = other DNA
cggctagctcagtcggtagagcatgaga

SEQ ID NO: 42890 - DNA, 29 bp, synthetic construct
  misc_feature 1..29: note = Probe
  source 1..29: mol_type = other DNA
cggctagctcagtcggtagagcatgagac

SEQ ID NO: 42891 - DNA, 28 bp, synthetic construct
  misc_feature 1..28: note = Probe
  source 1..28: mol_type = other DNA
cggctagctcagtcggtagagcatggga

SEQ ID NO: 42892 - DNA, 29 bp, synthetic construct
  misc_feature 1..29: note = Probe
  source 1..29: mol_type = other DNA
cggctagctcagtcggtagagcatgggac

SEQ ID NO: 42893 - DNA, 30 bp, synthetic construct; identical to SEQ ID NO: 778
  misc_feature 1..30: note = Probe
  source 1..30: mol_type = other DNA

SEQ ID NO: 42894 - DNA, 32 bp, synthetic construct; identical to SEQ ID NO: 780
  misc_feature 1..32: note = Probe
  source 1..32: mol_type = other DNA

SEQ ID NO: 42895 - DNA, 43 bp, synthetic construct
  misc_feature 1..43: note = Probe
  source 1..43: mol_type = other DNA
cggctgttaaccgaaaggttggtggttcgagcccacccaggga

SEQ ID NO: 42896 - DNA, 45 bp, synthetic construct
  misc_feature 1..45: note = Probe
  source 1..45: mol_type = other DNA
cggctgttaaccgaaaggttggtggttcgagcccacccagggacg

SEQ ID NO: 42897 - DNA, 30 bp, synthetic construct; identical to SEQ ID NO: 13204
  misc_feature 1..30: note = Probe
  source 1..30: mol_type = other DNA

SEQ ID NO: 42898 - DNA, 32 bp, synthetic construct; identical to SEQ ID NO: 783
  misc_feature 1..32: note = Probe
  source 1..32: mol_type = other DNA

SEQ ID NO: 42899 - DNA, 33 bp, synthetic construct; identical to SEQ ID NO: 784
  misc_feature 1..33: note = Probe
  source 1..33: mol_type = other DNA

SEQ ID NO: 42900 - DNA, 30 bp, synthetic construct; identical to SEQ ID NO: 786
  misc_feature 1..30: note = Probe
  source 1..30: mol_type = other DNA

SEQ ID NO: 42901 - DNA, 31 bp, synthetic construct; identical to SEQ ID NO: 787
  misc_feature 1..31: note = Probe
  source 1..31: mol_type = other DNA

SEQ ID NO: 42902 - DNA, 32 bp, synthetic construct; identical to SEQ ID NO: 788
  misc_feature 1..32: note = Probe
  source 1..32: mol_type = other DNA

SEQ ID NO: 42903 - DNA, 33 bp, synthetic construct; identical to SEQ ID NO: 789
  misc_feature 1..33: note = Probe
  source 1..33: mol_type = other DNA

SEQ ID NO: 42904 - DNA, 27 bp, synthetic construct
  misc_feature 1..27: note = Probe
  source 1..27: mol_type = other DNA
cgggttcaatccccggcacctccacca

SEQ ID NO: 42905 - DNA, 34 bp, synthetic construct; identical to SEQ ID NO: 790
  misc_feature 1..34: note = Probe
  source 1..34: mol_type = other DNA

SEQ ID NO: 42906 - DNA, 36 bp, synthetic construct; identical to SEQ ID NO: 19325
  misc_feature 1..36: note = Probe
  source 1..36: mol_type = other DNA

SEQ ID NO: 42907 - DNA, 50 bp, synthetic construct; identical to SEQ ID NO: 791
  misc_feature 1..50: note = Probe
  source 1..50: mol_type = other DNA

SEQ ID NO: 42908 - DNA, 16 bp, synthetic construct
  misc_feature 1..16: note = Probe
  source 1..16: mol_type = other DNA
cggtagagcatcagac

SEQ ID NO: 42909 - DNA, 50 bp, synthetic construct
  misc_feature 1..50: note = Probe
  source 1..50: mol_type = other DNA
cggtagagcatgagactcttaatctcagggtcgtgggttcgagccccacg

SEQ ID NO: 42910 - DNA, 50 bp, synthetic construct
  misc_feature 1..50: note = Probe
  source 1..50: mol_type = other DNA
cggtagagcatgggactcttaatcccagggtcgtgggttcgagccccacg

SEQ ID NO: 42911 - DNA, 26 bp, synthetic construct
  misc_feature 1..26: note = Probe
  source 1..26: mol_type = other DNA
cgtgagttcgagcctcacacggggca

SEQ ID NO: 42912 - DNA, 26 bp, synthetic construct
  misc_feature 1..26: note = Probe
  source 1..26: mol_type = other DNA
cgtgagttcgatcctcacacggggca

SEQ ID NO: 42913 - DNA, 19 bp, synthetic construct
  misc_feature 1..19: note = Probe
  source 1..19: mol_type = other DNA
cgtggttgtagtccgtgcg

SEQ ID NO: 42914 - DNA, 21 bp, synthetic construct
  misc_feature 1..21: note = Probe
  source 1..21: mol_type = other DNA
cgtggttgtagtccgtgcgag

SEQ ID NO: 42915 - DNA, 32 bp, synthetic construct; identical to SEQ ID NO: 5170
  misc_feature 1..32: note = Probe
  source 1..32: mol_type = other DNA

SEQ ID NO: 42916 - DNA, 33 bp, synthetic construct; identical to SEQ ID NO: 5171
  misc_feature 1..33: note = Probe
  source 1..33: mol_type = other DNA

SEQ ID NO: 42917 - DNA, 34 bp, synthetic construct; identical to SEQ ID NO: 13235
  misc_feature 1..34: note = Probe
  source 1..34: mol_type = other DNA

SEQ ID NO: 42918 - DNA, 18 bp, synthetic construct
  misc_feature 1..18: note = Probe
  source 1..18: mol_type = other DNA
ctaatggataaggcattg

SEQ ID NO: 42919 - DNA, 22 bp, synthetic construct
  misc_feature 1..22: note = Probe
  source 1..22: mol_type = other DNA
ctagtggttaggattcggcgct

SEQ ID NO: 42920 - DNA, 21 bp, synthetic construct
  misc_feature 1..21: note = Probe
  source 1..21: mol_type = other DNA
ctcacaagaactgctaactca

SEQ ID NO: 42921 - DNA, 25 bp, synthetic construct
  misc_feature 1..25: note = Probe
  source 1..25: mol_type = other DNA
ctcacaagaactgctaactcatgcc

SEQ ID NO: 42922 - DNA, 50 bp, synthetic construct; identical to SEQ ID NO: 813
  misc_feature 1..50: note = Probe
  source 1..50: mol_type = other DNA

SEQ ID NO: 42923 - DNA, 25 bp, synthetic construct
  misc_feature 1..25: note = Probe
  source 1..25: mol_type = other DNA
ctcagggatgggttcgattctcata

SEQ ID NO: 42924 - DNA, 30 bp, synthetic construct; identical to SEQ ID NO: 13248
  misc_feature 1..30: note = Probe
  source 1..30: mol_type = other DNA

SEQ ID NO: 42925 - DNA, 32 bp, synthetic construct; identical to SEQ ID NO: 5222
  misc_feature 1..32: note = Probe
  source 1..32: mol_type = other DNA

SEQ ID NO: 42926 - DNA, 34 bp, synthetic construct
  misc_feature 1..34: note = Probe
  source 1..34: mol_type = other DNA
ctcagggtcgtgggttcgagccccacgttgggcg

SEQ ID NO: 42927 - DNA, 34 bp, synthetic construct; identical to SEQ ID NO: 5286
  misc_feature 1..34: note = Probe
  source 1..34: mol_type = other DNA

SEQ ID NO: 42928 - DNA, 33 bp, synthetic construct; identical to SEQ ID NO: 836
  misc_feature 1..33: note = Probe
  source 1..33: mol_type = other DNA

SEQ ID NO: 42929 - DNA, 32 bp, synthetic construct; identical to SEQ ID NO: 5303
  misc_feature 1..32: note = Probe
  source 1..32: mol_type = other DNA

SEQ ID NO: 42930 - DNA, 24 bp, synthetic construct
  misc_feature 1..24: note = Probe
  source 1..24: mol_type = other DNA
ctgcgtgttcgaatcacgtcgggg

SEQ ID NO: 42931 - DNA, 25 bp, synthetic construct
  misc_feature 1..25: note = Probe
  source 1..25: mol_type = other DNA
ctgcgtgttcgaatcacgtcggggt

SEQ ID NO: 42932 - DNA, 26 bp, synthetic construct
  misc_feature 1..26: note = Probe
  source 1..26: mol_type = other DNA
ctgcgtgttcgaatcacgtcggggtc

SEQ ID NO: 42933 - DNA, 32 bp, synthetic construct; identical to SEQ ID NO: 5327
  misc_feature 1..32: note = Probe
  source 1..32: mol_type = other DNA

SEQ ID NO: 42934 - DNA, 34 bp, synthetic construct
  misc_feature 1..34: note = Probe
  source 1..34: mol_type = other DNA
ctggggattgtgggttcgagtcccatctgggtcg

SEQ ID NO: 42935 - DNA, 22 bp, synthetic construct
  misc_feature 1..22: note = Probe
  source 1..22: mol_type = other DNA
ctgtcacgcgggagaccggggt

SEQ ID NO: 42936 - DNA, 23 bp, synthetic construct
  misc_feature 1..23: note = Probe
  source 1..23: mol_type = other DNA
ctgtcacgcgggagaccggggtt

SEQ ID NO: 42937 - DNA, 36 bp, synthetic construct; identical to SEQ ID NO: 19676
  misc_feature 1..36: note = Probe
  source 1..36: mol_type = other DNA

SEQ ID NO: 42938 - DNA, 39 bp, synthetic construct; identical to SEQ ID NO: 13295
  misc_feature 1..39: note = Probe
  source 1..39: mol_type = other DNA

SEQ ID NO: 42939 - DNA, 40 bp, synthetic construct
  misc_feature 1..40: note = Probe
  source 1..40: mol_type = other DNA
ctgtcacgcgggagaccggggttcgattccccgacgggga

SEQ ID NO: 42940 - DNA, 41 bp, synthetic construct; identical to SEQ ID NO: 36683
  misc_feature 1..41: note = Probe
  source 1..41: mol_type = other DNA

SEQ ID NO: 42941 - DNA, 39 bp, synthetic construct; identical to SEQ ID NO: 19691
  misc_feature 1..39: note = Probe
  source 1..39: mol_type = other DNA

SEQ ID NO: 42942 - DNA, 40 bp, synthetic construct; identical to SEQ ID NO: 19692
  misc_feature 1..40: note = Probe
  source 1..40: mol_type = other DNA

SEQ ID NO: 42943 - DNA, 20 bp, synthetic construct
  misc_feature 1..20: note = Probe
  source 1..20: mol_type = other DNA
cttacctcctcaaagcaata

SEQ ID NO: 42944 - DNA, 18 bp, synthetic construct
  misc_feature 1..18: note = Probe
  source 1..18: mol_type = other DNA
cttccaagcagttgaccc

SEQ ID NO: 42945 - DNA, 18 bp, synthetic construct
  misc_feature 1..18: note = Probe
  source 1..18: mol_type = other DNA
gaaaaagtcatggaggcc

SEQ ID NO: 42946 - DNA, 19 bp, synthetic construct
  misc_feature 1..19: note = Probe
  source 1..19: mol_type = other DNA
gaaaaagtcatggaggcca

SEQ ID NO: 42947 - DNA, 27 bp, synthetic construct
  misc_feature 1..27: note = Probe
  source 1..27: mol_type = other DNA
gaaaaagtcatggaggccatggggttg

SEQ ID NO: 42948 - DNA, 27 bp, synthetic construct
  misc_feature 1..27: note = Probe
  source 1..27: mol_type = other DNA
gaaaatgttggttatacccttcccgta

SEQ ID NO: 42949 - DNA, 31 bp, synthetic construct; identical to SEQ ID NO: 862
  misc_feature 1..31: note = Probe
  source 1..31: mol_type = other DNA

SEQ ID NO: 42950 - DNA, 32 bp, synthetic construct; identical to SEQ ID NO: 863
  misc_feature 1..32: note = Probe
  source 1..32: mol_type = other DNA

SEQ ID NO: 42951 - DNA, 31 bp, synthetic construct; identical to SEQ ID NO: 880
  misc_feature 1..31: note = Probe
  source 1..31: mol_type = other DNA

SEQ ID NO: 42952 - DNA, 33 bp, synthetic construct; identical to SEQ ID NO: 19832
  misc_feature 1..33: note = Probe
  source 1..33: mol_type = other DNA

SEQ ID NO: 42953 - DNA, 45 bp, synthetic construct; identical to SEQ ID NO: 19841
  misc_feature 1..45: note = Probe
  source 1..45: mol_type = other DNA

SEQ ID NO: 42954 - DNA, 30 bp, synthetic construct; identical to SEQ ID NO: 882
  misc_feature 1..30: note = Probe
  source 1..30: mol_type = other DNA

SEQ ID NO: 42955 - DNA, 30 bp, synthetic construct; identical to SEQ ID NO: 883
  misc_feature 1..30: note = Probe
  source 1..30: mol_type = other DNA

SEQ ID NO: 42956 - DNA, 30 bp, synthetic construct; identical to SEQ ID NO: 890
  misc_feature 1..30: note = Probe
  source 1..30: mol_type = other DNA

SEQ ID NO: 42957 - DNA, 32 bp, synthetic construct; identical to SEQ ID NO: 5489
  misc_feature 1..32: note = Probe
  source 1..32: mol_type = other DNA

SEQ ID NO: 42958 - DNA, 30 bp, synthetic construct; identical to SEQ ID NO: 5491
  misc_feature 1..30: note = Probe
  source 1..30: mol_type = other DNA

SEQ ID NO: 42959 - DNA, 32 bp, synthetic construct; identical to SEQ ID NO: 5511
  misc_feature 1..32: note = Probe
  source 1..32: mol_type = other DNA

SEQ ID NO: 42960 - DNA, 32 bp, synthetic construct
  misc_feature 1..32: note = Probe
  source 1..32: mol_type = other DNA
gaaggtcgtgagttcgatcctcacacggggca

SEQ ID NO: 42961 - DNA, 37 bp, synthetic construct; identical to SEQ ID NO: 897
  misc_feature 1..37: note = Probe
  source 1..37: mol_type = other DNA

SEQ ID NO: 42962 - DNA, 17 bp, synthetic construct
  misc_feature 1..17: note = Probe
  source 1..17: mol_type = other DNA
gaatccgagtcacggca

SEQ ID NO: 42963 - DNA, 17 bp, synthetic construct
  misc_feature 1..17: note = Probe
  source 1..17: mol_type = other DNA
gaatccggctcgaagga

SEQ ID NO: 42964 - DNA, 37 bp, synthetic construct; identical to SEQ ID NO: 901
  misc_feature 1..37: note = Probe
  source 1..37: mol_type = other DNA

SEQ ID NO: 42965 - DNA, 17 bp, synthetic construct
  misc_feature 1..17: note = Probe
  source 1..17: mol_type = other DNA
gacaacagaggcttacg

SEQ ID NO: 42966 - DNA, 18 bp, synthetic construct
  misc_feature 1..18: note = Probe
  source 1..18: mol_type = other DNA
gacaacagaggcttacga

SEQ ID NO: 42967 - DNA, 20 bp, synthetic construct
  misc_feature 1..20: note = Probe
  source 1..20: mol_type = other DNA
gacaacagaggcttacgacc

SEQ ID NO: 42968 - DNA, 21 bp, synthetic construct
  misc_feature 1..21: note = Probe
  source 1..21: mol_type = other DNA
gacaacagaggcttacgaccc

SEQ ID NO: 42969 - DNA, 22 bp, synthetic construct
  misc_feature 1..22: note = Probe
  source 1..22: mol_type = other DNA
gacaacagaggcttacgacccc

SEQ ID NO: 42970 - DNA, 25 bp, synthetic construct
  misc_feature 1..25: note = Probe
  source 1..25: mol_type = other DNA
gacaacagaggcttacgacccctta

SEQ ID NO: 42971 - DNA, 27 bp, synthetic construct
  misc_feature 1..27: note = Probe
  source 1..27: mol_type = other DNA
gacaacagaggcttacgaccccttatt

SEQ ID NO: 42972 - DNA, 30 bp, synthetic construct; identical to SEQ ID NO: 5550
  misc_feature 1..30: note = Probe
  source 1..30: mol_type = other DNA

SEQ ID NO: 42973 - DNA, 31 bp, synthetic construct; identical to SEQ ID NO: 903
  misc_feature 1..31: note = Probe
  source 1..31: mol_type = other DNA

SEQ ID NO: 42974 - DNA, 18 bp, synthetic construct
  misc_feature 1..18: note = Probe
  source 1..18: mol_type = other DNA
gacaacattcaaaaaaga

SEQ ID NO: 42975 - DNA, 30 bp, synthetic construct; identical to SEQ ID NO: 8599
  misc_feature 1..30: note = Probe
  source 1..30: mol_type = other DNA

SEQ ID NO: 42976 - DNA, 31 bp, synthetic construct; identical to SEQ ID NO: 904
  misc_feature 1..31: note = Probe
  source 1..31: mol_type = other DNA

SEQ ID NO: 42977 - DNA, 32 bp, synthetic construct; identical to SEQ ID NO: 905
  misc_feature 1..32: note = Probe
  source 1..32: mol_type = other DNA

SEQ ID NO: 42978 - DNA, 33 bp, synthetic construct; identical to SEQ ID NO: 906
  misc_feature 1..33: note = Probe
  source 1..33: mol_type = other DNA

SEQ ID NO: 42979 - DNA, 34 bp, synthetic construct; identical to SEQ ID NO: 907
  misc_feature 1..34: note = Probe
  source 1..34: mol_type = other DNA

SEQ ID NO: 42980 - DNA, 35 bp, synthetic construct; identical to SEQ ID NO: 908
  misc_feature 1..35: note = Probe
  source 1..35: mol_type = other DNA

SEQ ID NO: 42981 - DNA, 36 bp, synthetic construct; identical to SEQ ID NO: 909
  misc_feature 1..36: note = Probe
  source 1..36: mol_type = other DNA

SEQ ID NO: 42982 - DNA, 26 bp, synthetic construct
  misc_feature 1..26: note = Probe
  source 1..26: mol_type = other DNA
gacccgggttcgattcccggccaacg

SEQ ID NO: 42983 - DNA, 27 bp, synthetic construct
  misc_feature 1..27: note = Probe
  source 1..27: mol_type = other DNA
gacccgggttcgattcccggccaacgc

SEQ ID NO: 42984 - DNA, 28 bp, synthetic construct
  misc_feature 1..28: note = Probe
  source 1..28: mol_type = other DNA
gacccgggttcgattcccggccaacgca

SEQ ID NO: 42985 - DNA, 33 bp, synthetic construct; identical to SEQ ID NO: 31329
  misc_feature 1..33: note = Probe
  source 1..33: mol_type = other DNA

SEQ ID NO: 42986 - DNA, 27 bp, synthetic construct
  misc_feature 1..27: note = Probe
  source 1..27: mol_type = other DNA
gaccggggttcaattccccgacgggga

SEQ ID NO: 42987 - DNA, 28 bp, synthetic construct
  misc_feature 1..28: note = Probe
  source 1..28: mol_type = other DNA
gaccggggttcaattccccgacggggag

SEQ ID NO: 42988 - DNA, 26 bp, synthetic construct
  misc_feature 1..26: note = Probe
  source 1..26: mol_type = other DNA
gaccggggttcgattccccgacgggg

SEQ ID NO: 42989 - DNA, 27 bp, synthetic construct
  misc_feature 1..27: note = Probe
  source 1..27: mol_type = other DNA
gaccggggttcgattccccgacgggga

SEQ ID NO: 42990 - DNA, 28 bp, synthetic construct
  misc_feature 1..28: note = Probe
  source 1..28: mol_type = other DNA
gaccggggttcgattccccgacggggag

SEQ ID NO: 42991 - DNA, 32 bp, synthetic construct; identical to SEQ ID NO: 31335
  misc_feature 1..32: note = Probe
  source 1..32: mol_type = other DNA

SEQ ID NO: 42992 - DNA, 30 bp, synthetic construct
  misc_feature 1..30: note = Probe
  source 1..30: mol_type = other DNA
gacctcgtggcgcaatggtagcgcgtctga

SEQ ID NO: 42993 - DNA, 32 bp, synthetic construct
  misc_feature 1..32: note = Probe
  source 1..32: mol_type = other DNA
gacctcgtggcgcaatggtagcgcgtctgact

SEQ ID NO: 42994 - DNA, 33 bp, synthetic construct; identical to SEQ ID NO: 20085
  misc_feature 1..33: note = Probe
  source 1..33: mol_type = other DNA

SEQ ID NO: 42995 - DNA, 34 bp, synthetic construct; identical to SEQ ID NO: 20086
  misc_feature 1..34: note = Probe
  source 1..34: mol_type = other DNA

SEQ ID NO: 42996 - DNA, 18 bp, synthetic construct
  misc_feature 1..18: note = Probe
  source 1..18: mol_type = other DNA
gagaaagctcacaagaac

SEQ ID NO: 42997 - DNA, 19 bp, synthetic construct
  misc_feature 1..19: note = Probe
  source 1..19: mol_type = other DNA
gagaaagctcacaagaact

SEQ ID NO: 42998 - DNA, 20 bp, synthetic construct
  misc_feature 1..20: note = Probe
  source 1..20: mol_type = other DNA
gagaaagctcacaagaactg

SEQ ID NO: 42999 - DNA, 21 bp, synthetic construct
  misc_feature 1..21: note = Probe
  source 1..21: mol_type = other DNA
gagaaagctcacaagaactgc

SEQ ID NO: 43000 - DNA, 22 bp, synthetic construct
  misc_feature 1..22: note = Probe
  source 1..22: mol_type = other DNA
gagaaagctcacaagaactgct

SEQ ID NO: 43001 - DNA, 23 bp, synthetic construct
  misc_feature 1..23: note = Probe
  source 1..23: mol_type = other DNA
gagaaagctcacaagaactgcta

SEQ ID NO: 43002 - DNA, 25 bp, synthetic construct
  misc_feature 1..25: note = Probe
  source 1..25: mol_type = other DNA
gagaaagctcacaagaactgctaac

SEQ ID NO: 43003 - DNA, 26 bp, synthetic construct
  misc_feature 1..26: note = Probe
  source 1..26: mol_type = other DNA
gagaaagctcacaagaactgctaact

SEQ ID NO: 43004 - DNA, 27 bp, synthetic construct
  misc_feature 1..27: note = Probe
  source 1..27: mol_type = other DNA
gagaaagctcacaagaactgctaactc

SEQ ID NO: 43005 - DNA, 28 bp, synthetic construct
  misc_feature 1..28: note = Probe
  source 1..28: mol_type = other DNA
gagaaagctcacaagaactgctaactca

SEQ ID NO: 43006 - DNA, 29 bp, synthetic construct
  misc_feature 1..29: note = Probe
  source 1..29: mol_type = other DNA
gagaaagctcacaagaactgctaactcat

SEQ ID NO: 43007 - DNA, 30 bp, synthetic construct; identical to SEQ ID NO: 932
  misc_feature 1..30: note = Probe
  source 1..30: mol_type = other DNA

SEQ ID NO: 43008 - DNA, 31 bp, synthetic construct; identical to SEQ ID NO: 933
  misc_feature 1..31: note = Probe
  source 1..31: mol_type = other DNA

SEQ ID NO: 43009 - DNA, 32 bp, synthetic construct; identical to SEQ ID NO: 934
  misc_feature 1..32: note = Probe
  source 1..32: mol_type = other DNA

SEQ ID NO: 43010 - DNA, 35 bp, synthetic construct; identical to SEQ ID NO: 937
  misc_feature 1..35: note = Probe
  source 1..35: mol_type = other DNA

SEQ ID NO: 43011 - DNA, 36 bp, synthetic construct; identical to SEQ ID NO: 938
  misc_feature 1..36: note = Probe
  source 1..36: mol_type = other DNA

SEQ ID NO: 43012 - DNA, 38 bp, synthetic construct; identical to SEQ ID NO: 940
  misc_feature 1..38: note = Probe
  source 1..38: mol_type = other DNA

SEQ ID NO: 43013 - DNA, 39 bp, synthetic construct; identical to SEQ ID NO: 941
  misc_feature 1..39: note = Probe
  source 1..39: mol_type = other DNA

SEQ ID NO: 43014 - DNA, 40 bp, synthetic construct; identical to SEQ ID NO: 942
  misc_feature 1..40: note = Probe
  source 1..40: mol_type = other DNA

SEQ ID NO: 43015 - DNA, 41 bp, synthetic construct; identical to SEQ ID NO: 943
  misc_feature 1..41: note = Probe
  source 1..41: mol_type = other DNA

SEQ ID NO: 43016 - DNA, 42 bp, synthetic construct; identical to SEQ ID NO: 944
  misc_feature 1..42: note = Probe
  source 1..42: mol_type = other DNA

SEQ ID NO: 43017 - DNA, 43 bp, synthetic construct; identical to SEQ ID NO: 945
  misc_feature 1..43: note = Probe
  source 1..43: mol_type = other DNA

SEQ ID NO: 43018 - DNA, 44 bp, synthetic construct; identical to SEQ ID NO: 946
  misc_feature 1..44: note = Probe
  source 1..44: mol_type = other DNA

SEQ ID NO: 43019 - DNA, 45 bp, synthetic construct; identical to SEQ ID NO: 947
  misc_feature 1..45: note = Probe
  source 1..45: mol_type = other DNA

SEQ ID NO: 43020 - DNA, 49 bp, synthetic construct; identical to SEQ ID NO: 949
  misc_feature 1..49: note = Probe
  source 1..49: mol_type = other DNA

SEQ ID NO: 43021 - DNA, 50 bp, synthetic construct; identical to SEQ ID NO: 950
  misc_feature 1..50: note = Probe
  source 1..50: mol_type = other DNA

SEQ ID NO: 43022 - DNA, 24 bp, synthetic construct
  misc_feature 1..24: note = Probe
  source 1..24: mol_type = other DNA
gagaccggggttcaattccccgac

SEQ ID NO: 43023 - DNA, 29 bp, synthetic construct
  misc_feature 1..29: note = Probe
  source 1..29: mol_type = other DNA
gagaccggggttcaattccccgacgggga

SEQ ID NO: 43024 - DNA, 30 bp, synthetic construct; identical to SEQ ID NO: 20160
  misc_feature 1..30: note = Probe
  source 1..30: mol_type = other DNA

SEQ ID NO: 43025 - DNA, 24 bp, synthetic construct
  misc_feature 1..24: note = Probe
  source 1..24: mol_type = other DNA
gagaccggggttcgattccccgac

SEQ ID NO: 43026 - DNA, 28 bp, synthetic construct
  misc_feature 1..28: note = Probe
  source 1..28: mol_type = other DNA
gagaccggggttcgattccccgacgggg

SEQ ID NO: 43027 - DNA, 29 bp, synthetic construct
  misc_feature 1..29: note = Probe
  source 1..29: mol_type = other DNA
gagaccggggttcgattccccgacgggga

SEQ ID NO: 43028 - DNA, 30 bp, synthetic construct; identical to SEQ ID NO: 957
  misc_feature 1..30: note = Probe
  source 1..30: mol_type = other DNA

SEQ ID NO: 43029 - DNA, 31 bp, synthetic construct
  misc_feature 1..31: note = Probe
  source 1..31: mol_type = other DNA
gagatcctgggttcgaatcccagcggggcct

SEQ ID NO: 43030 - DNA, 31 bp, synthetic construct; identical to SEQ ID NO: 5648
  misc_feature 1..31: note = Probe
  source 1..31: mol_type = other DNA

SEQ ID NO: 43031 - DNA, 32 bp, synthetic construct; identical to SEQ ID NO: 13399
  misc_feature 1..32: note = Probe
  source 1..32: mol_type = other DNA

SEQ ID NO: 43032 - DNA, 17 bp, synthetic construct
  misc_feature 1..17: note = Probe
  source 1..17: mol_type = other DNA
gagccccagtggaacca

SEQ ID NO: 43033 - DNA, 16 bp, synthetic construct
  misc_feature 1..16: note = Probe
  source 1..16: mol_type = other DNA
gagcccggtaatcgca

SEQ ID NO: 43034 - DNA, 18 bp, synthetic construct
  misc_feature 1..18: note = Probe
  source 1..18: mol_type = other DNA
gagcccggtaatcgcata

SEQ ID NO: 43035 - DNA, 19 bp, synthetic construct
  misc_feature 1..19: note = Probe
  source 1..19: mol_type = other DNA
gagcccggtaatcgcataa

SEQ ID NO: 43036 - DNA, 25 bp, synthetic construct
  misc_feature 1..25: note = Probe
  source 1..25: mol_type = other DNA
gagcccggtaatcgcataaaactta

SEQ ID NO: 43037 - DNA, 26 bp, synthetic construct
  misc_feature 1..26: note = Probe
  source 1..26: mol_type = other DNA
gagcccggtaatcgcataaaacttaa

SEQ ID NO: 43038 - DNA, 30 bp, synthetic construct; identical to SEQ ID NO: 960
  misc_feature 1..30: note = Probe
  source 1..30: mol_type = other DNA

SEQ ID NO: 43039 - DNA, 35 bp, synthetic construct; identical to SEQ ID NO: 5659
  misc_feature 1..35: note = Probe
  source 1..35: mol_type = other DNA

SEQ ID NO: 43040 - DNA, 38 bp, synthetic construct; identical to SEQ ID NO: 962
  misc_feature 1..38: note = Probe
  source 1..38: mol_type = other DNA

SEQ ID NO: 43041 - DNA, 39 bp, synthetic construct; identical to SEQ ID NO: 963
  misc_feature 1..39: note = Probe
  source 1..39: mol_type = other DNA

SEQ ID NO: 43042 - DNA, 40 bp, synthetic construct
  misc_feature 1..40: note = Probe
  source 1..40: mol_type = other DNA
gagcccggtaatcgcataaaacttaaaactttacagtcag

SEQ ID NO: 43043 - DNA, 41 bp, synthetic construct; identical to SEQ ID NO: 20258
  misc_feature 1..41: note = Probe
  source 1..41: mol_type = other DNA

SEQ ID NO: 43044 - DNA, 42 bp, synthetic construct; identical to SEQ ID NO: 13408
  misc_feature 1..42: note = Probe
  source 1..42: mol_type = other DNA

SEQ ID NO: 43045 - DNA, 43 bp, synthetic construct; identical to SEQ ID NO: 20259
  misc_feature 1..43: note = Probe
  source 1..43: mol_type = other DNA

SEQ ID NO: 43046 - DNA, 44 bp, synthetic construct; identical to SEQ ID NO: 5660
  misc_feature 1..44: note = Probe
  source 1..44: mol_type = other DNA

SEQ ID NO: 43047 - DNA, 45 bp, synthetic construct; identical to SEQ ID NO: 964
  misc_feature 1..45: note = Probe
  source 1..45: mol_type = other DNA

SEQ ID NO: 43048 - DNA, 50 bp, synthetic construct; identical to SEQ ID NO: 965
  misc_feature 1..50: note = Probe
  source 1..50: mol_type = other DNA

SEQ ID NO: 43049 - DNA, 17 bp, synthetic construct
  misc_feature 1..17: note = Probe
  source 1..17: mol_type = other DNA
gagcctcacctggagca

SEQ ID NO: 43050 - DNA, 22 bp, synthetic construct
  misc_feature 1..22: note = Probe
  source 1..22: mol_type = other DNA
gagcttaaacccccttatttct

SEQ ID NO: 43051 - DNA, 31 bp, synthetic construct
  misc_feature 1..31: note = Probe
  source 1..31: mol_type = other DNA
gaggttgtgagttcgatcctcacctggagca

SEQ ID NO: 43052 - DNA, 26 bp, synthetic construct
  misc_feature 1..26: note = Probe
  source 1..26: mol_type = other DNA
gagtaaataataggagcttaaacccc

SEQ ID NO: 43053 - DNA, 27 bp, synthetic construct
  misc_feature 1..27: note = Probe
  source 1..27: mol_type = other DNA
gagtaaataataggagcttaaaccccc

SEQ ID NO: 43054 - DNA, 28 bp, synthetic construct
  misc_feature 1..28: note = Probe
  source 1..28: mol_type = other DNA
gagtaaataataggagcttaaaccccct

SEQ ID NO: 43055 - DNA, 29 bp, synthetic construct
  misc_feature 1..29: note = Probe
  source 1..29: mol_type = other DNA
gagtaaataataggagcttaaaccccctt

SEQ ID NO: 43056 - DNA, 30 bp, synthetic construct; identical to SEQ ID NO: 969
  misc_feature 1..30: note = Probe
  source 1..30: mol_type = other DNA

SEQ ID NO: 43057 - DNA, 35 bp, synthetic construct; identical to SEQ ID NO: 971
  misc_feature 1..35: note = Probe
  source 1..35: mol_type = other DNA

SEQ ID NO: 43058 - DNA, 36 bp, synthetic construct; identical to SEQ ID NO: 972
  misc_feature 1..36: note = Probe
  source 1..36: mol_type = other DNA

SEQ ID NO: 43059 - DNA, 16 bp, synthetic construct
  misc_feature 1..16: note = Probe
  source 1..16: mol_type = other DNA
gagtatccccgcctgt

SEQ ID NO: 43060 - DNA, 18 bp, synthetic construct
  misc_feature 1..18: note = Probe
  source 1..18: mol_type = other DNA
gagtggggttttgcagtc

SEQ ID NO: 43061 - DNA, 21 bp, synthetic construct
  misc_feature 1..21: note = Probe
  source 1..21: mol_type = other DNA
gataacagctatccattggtc

SEQ ID NO: 43062 - DNA, 31 bp, synthetic construct; identical to SEQ ID NO: 20382
  misc_feature 1..31: note = Probe
  source 1..31: mol_type = other DNA

SEQ ID NO: 43063 - DNA, 32 bp, synthetic construct; identical to SEQ ID NO: 5709
  misc_feature 1..32: note = Probe
  source 1..32: mol_type = other DNA

SEQ ID NO: 43064 - DNA, 17 bp, synthetic construct
  misc_feature 1..17: note = Probe
  source 1..17: mol_type = other DNA
gataggtggcacggaga

SEQ ID NO: 43065 - DNA, 17 bp, synthetic construct
  misc_feature 1..17: note = Probe
  source 1..17: mol_type = other DNA
gatcccgggtttcggca

SEQ ID NO: 43066 - DNA, 21 bp, synthetic construct
  misc_feature 1..21: note = Probe
  source 1..21: mol_type = other DNA
gatcgatgcccgcatcctcca

SEQ ID NO: 43067 - DNA, 20 bp, synthetic construct
  misc_feature 1..20: note = Probe
  source 1..20: mol_type = other DNA
gatgcagagtggggttttgc

SEQ ID NO: 43068 - DNA, 21 bp, synthetic construct
  misc_feature 1..21: note = Probe
  source 1..21: mol_type = other DNA
gatgcagagtggggttttgca

SEQ ID NO: 43069 - DNA, 24 bp, synthetic construct
  misc_feature 1..24: note = Probe
  source 1..24: mol_type = other DNA
gatgcagagtggggttttgcagtc

SEQ ID NO: 43070 - DNA, 26 bp, synthetic construct
  misc_feature 1..26: note = Probe
  source 1..26: mol_type = other DNA
gatggggtgtgataggtggcacggag

SEQ ID NO: 43071 - DNA, 27 bp, synthetic construct
  misc_feature 1..27: note = Probe
  source 1..27: mol_type = other DNA
gattctaggttcgactcctggctggct

SEQ ID NO: 43072 - DNA, 27 bp, synthetic construct
  misc_feature 1..27: note = Probe
  source 1..27: mol_type = other DNA
gattgagggttcgagtcccttcgtggt

SEQ ID NO: 43073 - DNA, 27 bp, synthetic construct
  misc_feature 1..27: note = Probe
  source 1..27: mol_type = other DNA
gattgcaggttcgagtcctgccgcggt

SEQ ID NO: 43074 - DNA, 27 bp, synthetic construct
  misc_feature 1..27: note = Probe
  source 1..27: mol_type = other DNA
gattgtgaatctgacaacagaggctta

SEQ ID NO: 43075 - DNA, 28 bp, synthetic construct
  misc_feature 1..28: note = Probe
  source 1..28: mol_type = other DNA
gattgtgaatctgacaacagaggcttac

SEQ ID NO: 43076 - DNA, 29 bp, synthetic construct
  misc_feature 1..29: note = Probe
  source 1..29: mol_type = other DNA
gattgtgaatctgacaacagaggcttacg

SEQ ID NO: 43077 - DNA, 30 bp, synthetic construct; identical to SEQ ID NO: 20455
  misc_feature 1..30: note = Probe
  source 1..30: mol_type = other DNA

SEQ ID NO: 43078 - DNA, 32 bp, synthetic construct; identical to SEQ ID NO: 5751
  misc_feature 1..32: note = Probe
  source 1..32: mol_type = other DNA

SEQ ID NO: 43079 - DNA, 33 bp, synthetic construct; identical to SEQ ID NO: 982
  misc_feature 1..33: note = Probe
  source 1..33: mol_type = other DNA

SEQ ID NO: 43080 - DNA, 34 bp, synthetic construct; identical to SEQ ID NO: 983
  misc_feature 1..34: note = Probe
  source 1..34: mol_type = other DNA

SEQ ID NO: 43081 - DNA, 37 bp, synthetic construct; identical to SEQ ID NO: 984
  misc_feature 1..37: note = Probe
  source 1..37: mol_type = other DNA

SEQ ID NO: 43082 - DNA, 39 bp, synthetic construct; identical to SEQ ID NO: 986
  misc_feature 1..39: note = Probe
  source 1..39: mol_type = other DNA

SEQ ID NO: 43083 - DNA, 43 bp, synthetic construct; identical to SEQ ID NO: 988
  misc_feature 1..43: note = Probe
  source 1..43: mol_type = other DNA

SEQ ID NO: 43084 - DNA, 27 bp, synthetic construct
  misc_feature 1..27: note = Probe
  source 1..27: mol_type = other DNA
gattgtgggttcgagtcccatctgggt

SEQ ID NO: 43085 - DNA, 29 bp, synthetic construct
  misc_feature 1..29: note = Probe
  source 1..29: mol_type = other DNA
gcactctggactctgaatccagcgatccg

SEQ ID NO: 43086 - DNA, 50 bp, synthetic construct
  misc_feature 1..50: note = Probe
  source 1..50: mol_type = other DNA
gcactctggactctgaatccagcgatccgagttcaaatctcggtggaacc

SEQ ID NO: 43087 - DNA, 50 bp, synthetic construct; identical to SEQ ID NO: 5825
  misc_feature 1..50: note = Probe
  source 1..50: mol_type = other DNA

SEQ ID NO: 43088 - DNA, 27 bp, synthetic construct
  misc_feature 1..27: note = Probe
  source 1..27: mol_type = other DNA
gcactggtggttcagtggtagaattct

SEQ ID NO: 43089 - DNA, 31 bp, synthetic construct; identical to SEQ ID NO: 5827
  misc_feature 1..31: note = Probe
  source 1..31: mol_type = other DNA

SEQ ID NO: 43090 - DNA, 32 bp, synthetic construct; identical to SEQ ID NO: 991
  misc_feature 1..32: note = Probe
  source 1..32: mol_type = other DNA

SEQ ID NO: 43091 - DNA, 35 bp, synthetic construct; identical to SEQ ID NO: 992
  misc_feature 1..35: note = Probe
  source 1..35: mol_type = other DNA

SEQ ID NO: 43092 - DNA, 21 bp, synthetic construct
  misc_feature 1..21: note = Probe
  source 1..21: mol_type = other DNA
gcagagcccggtaatcgcata

SEQ ID NO: 43093 - DNA, 18 bp, synthetic construct
  misc_feature 1..18: note = Probe
  source 1..18: mol_type = other DNA
gcagagtggggttttgca

SEQ ID NO: 43094 - DNA, 16 bp, synthetic construct
  misc_feature 1..16: note = Probe
  source 1..16: mol_type = other DNA
gcagcgatggccgagt

SEQ ID NO: 43095 - DNA, 26 bp, synthetic construct
  misc_feature 1..26: note = Probe
  source 1..26: mol_type = other DNA
gcataaaacttaaaactttacagtca

SEQ ID NO: 43096 - DNA, 29 bp, synthetic construct
  misc_feature 1..29: note = Probe
  source 1..29: mol_type = other DNA
gcatagctgccttccaagcagttgacccg

SEQ ID NO: 43097 - DNA, 28 bp, synthetic construct
  misc_feature 1..28: note = Probe
  source 1..28: mol_type = other DNA
gcatgggtggttcagtggtagaattctc

SEQ ID NO: 43098 - DNA, 29 bp, synthetic construct
  misc_feature 1..29: note = Probe
  source 1..29: mol_type = other DNA
gcatgggtggttcagtggtagaattctcg

SEQ ID NO: 43099 - DNA, 30 bp, synthetic construct; identical to SEQ ID NO: 1002
  misc_feature 1..30: note = Probe
  source 1..30: mol_type = other DNA

SEQ ID NO: 43100 - DNA, 31 bp, synthetic construct; identical to SEQ ID NO: 1003
  misc_feature 1..31: note = Probe
  source 1..31: mol_type = other DNA

SEQ ID NO: 43101 - DNA, 32 bp, synthetic construct; identical to SEQ ID NO: 1004
  misc_feature 1..32: note = Probe
  source 1..32: mol_type = other DNA

SEQ ID NO: 43102 - DNA, 33 bp, synthetic construct; identical to SEQ ID NO: 1005
  misc_feature 1..33: note = Probe
  source 1..33: mol_type = other DNA

SEQ ID NO: 43103 - DNA, 34 bp, synthetic construct; identical to SEQ ID NO: 1006
  misc_feature 1..34: note = Probe
  source 1..34: mol_type = other DNA

SEQ ID NO: 43104 - DNA, 35 bp, synthetic construct; identical to SEQ ID NO: 1007
  misc_feature 1..35: note = Probe
  source 1..35: mol_type = other DNA

SEQ ID NO: 43105 - DNA, 50 bp, synthetic construct; identical to SEQ ID NO: 1010
  misc_feature 1..50: note = Probe
  source 1..50: mol_type = other DNA

SEQ ID NO: 43106 - DNA, 29 bp, synthetic construct
  misc_feature 1..29: note = Probe
  source 1..29: mol_type = other DNA
gcattaaccttttaagttaaagattaaga

SEQ ID NO: 43107 - DNA, 34 bp, synthetic construct; identical to SEQ ID NO: 1011
  misc_feature 1..34: note = Probe
  source 1..34: mol_type = other DNA

SEQ ID NO: 43108 - DNA, 50 bp, synthetic construct; identical to SEQ ID NO: 1012
  misc_feature 1..50: note = Probe
  source 1..50: mol_type = other DNA

SEQ ID NO: 43109 - DNA, 31 bp, synthetic construct; identical to SEQ ID NO: 5884
  misc_feature 1..31: note = Probe
  source 1..31: mol_type = other DNA

SEQ ID NO: 43110 - DNA, 32 bp, synthetic construct; identical to SEQ ID NO: 1013
  misc_feature 1..32: note = Probe
  source 1..32: mol_type = other DNA

SEQ ID NO: 43111 - DNA, 40 bp, synthetic construct; identical to SEQ ID NO: 1016
  misc_feature 1..40: note = Probe
  source 1..40: mol_type = other DNA

SEQ ID NO: 43112 - DNA, 50 bp, synthetic construct; identical to SEQ ID NO: 1020
  misc_feature 1..50: note = Probe
  source 1..50: mol_type = other DNA

SEQ ID NO: 43113 - DNA, 35 bp, synthetic construct; identical to SEQ ID NO: 20735
  misc_feature 1..35: note = Probe
  source 1..35: mol_type = other DNA

SEQ ID NO: 43114 - DNA, 50 bp, synthetic construct; identical to SEQ ID NO: 1024
  misc_feature 1..50: note = Probe
  source 1..50: mol_type = other DNA

SEQ ID NO: 43115 - DNA, 19 bp, synthetic construct
  misc_feature 1..19: note = Probe
  source 1..19: mol_type = other DNA
gccccagtggcctaatgga

SEQ ID NO: 43116 - DNA, 36 bp, synthetic construct; identical to SEQ ID NO: 5950
  misc_feature 1..36: note = Probe
  source 1..36: mol_type = other DNA

SEQ ID NO: 43117 - DNA, 32 bp, synthetic construct
  misc_feature 1..32: note = Probe
  source 1..32: mol_type = other DNA
gccccagtggcctaatggataaggcattggcc

SEQ ID NO: 43118 - DNA, 36 bp, synthetic construct; identical to SEQ ID NO: 1025
  misc_feature 1..36: note = Probe
  source 1..36: mol_type = other DNA

SEQ ID NO: 43119 - DNA, 18 bp, synthetic construct
  misc_feature 1..18: note = Probe
  source 1..18: mol_type = other DNA
gcccggatagctcagtcg

SEQ ID NO: 43120 - DNA, 19 bp, synthetic construct
  misc_feature 1..19: note = Probe
  source 1..19: mol_type = other DNA
gcccggatagctcagtcgg

SEQ ID NO: 43121 - DNA, 20 bp, synthetic construct
  misc_feature 1..20: note = Probe
  source 1..20: mol_type = other DNA
gcccggatagctcagtcggt

SEQ ID NO: 43122 - DNA, 21 bp, synthetic construct
  misc_feature 1..21: note = Probe
  source 1..21: mol_type = other DNA
gcccggatagctcagtcggta

SEQ ID NO: 43123 - DNA, 22 bp, synthetic construct
  misc_feature 1..22: note = Probe
  source 1..22: mol_type = other DNA
gcccggatagctcagtcggtag

SEQ ID NO: 43124 - DNA, 23 bp, synthetic construct
  misc_feature 1..23: note = Probe
  source 1..23: mol_type = other DNA
gcccggatagctcagtcggtaga

SEQ ID NO: 43125 - DNA, 25 bp, synthetic construct
  misc_feature 1..25: note = Probe
  source 1..25: mol_type = other DNA
gcccggatagctcagtcggtagagc

SEQ ID NO: 43126 - DNA, 26 bp, synthetic construct
  misc_feature 1..26: note = Probe
  source 1..26: mol_type = other DNA
gcccggatagctcagtcggtagagca

SEQ ID NO: 43127 - DNA, 27 bp, synthetic construct
  misc_feature 1..27: note = Probe
  source 1..27: mol_type = other DNA
gcccggatagctcagtcggtagagcat

SEQ ID NO: 43128 - DNA, 29 bp, synthetic construct
  misc_feature 1..29: note = Probe
  source 1..29: mol_type = other DNA
gcccggatagctcagtcggtagagcatca

SEQ ID NO: 43129 - DNA, 30 bp, synthetic construct; identical to SEQ ID NO: 1038
  misc_feature 1..30: note = Probe
  source 1..30: mol_type = other DNA

SEQ ID NO: 43130 - DNA, 31 bp, synthetic construct; identical to SEQ ID NO: 1039
  misc_feature 1..31: note = Probe
  source 1..31: mol_type = other DNA

SEQ ID NO: 43131 - DNA, 32 bp, synthetic construct; identical to SEQ ID NO: 1040
  misc_feature 1..32: note = Probe
  source 1..32: mol_type = other DNA

SEQ ID NO: 43132 - DNA, 33 bp, synthetic construct; identical to SEQ ID NO: 1041
  misc_feature 1..33: note = Probe
  source 1..33: mol_type = other DNA

SEQ ID NO: 43133 - DNA, 34 bp, synthetic construct; identical to SEQ ID NO: 1042
  misc_feature 1..34: note = Probe
  source 1..34: mol_type = other DNA

SEQ ID NO: 43134 - DNA, 35 bp, synthetic construct; identical to SEQ ID NO: 1043
  misc_feature 1..35: note = Probe
  source 1..35: mol_type = other DNA

SEQ ID NO: 43135 - DNA, 36 bp, synthetic construct; identical to SEQ ID NO: 1044
  misc_feature 1..36: note = Probe
  source 1..36: mol_type = other DNA

SEQ ID NO: 43136 - DNA, 37 bp, synthetic construct; identical to SEQ ID NO: 1045
  misc_feature 1..37: note = Probe
  source 1..37: mol_type = other DNA

SEQ ID NO: 43137 - DNA, 40 bp, synthetic construct; identical to SEQ ID NO: 13517
  misc_feature 1..40: note = Probe
  source 1..40: mol_type = other DNA

SEQ ID NO: 43138 - DNA, 50 bp, synthetic construct; identical to SEQ ID NO: 1046
  misc_feature 1..50: note = Probe
  source 1..50: mol_type = other DNA

SEQ ID NO: 43139 - DNA, 16 bp, synthetic construct
  misc_feature 1..16: note = Probe
  source 1..16: mol_type = other DNA
gcccggctagctcagt

SEQ ID NO: 43140 - DNA, 17 bp, synthetic construct
  misc_feature 1..17: note = Probe
  source 1..17: mol_type = other DNA
gcccggctagctcagtc

SEQ ID NO: 43141 - DNA, 18 bp, synthetic construct
  misc_feature 1..18: note = Probe
  source 1..18: mol_type = other DNA
gcccggctagctcagtcg

SEQ ID NO: 43142 - DNA, 31 bp, synthetic construct; identical to SEQ ID NO: 1050
  misc_feature 1..31: note = Probe
  source 1..31: mol_type = other DNA

SEQ ID NO: 43143 - DNA, 32 bp, synthetic construct; identical to SEQ ID NO: 5994
  misc_feature 1..32: note = Probe
  source 1..32: mol_type = other DNA

SEQ ID NO: 43144 - DNA, 33 bp, synthetic construct; identical to SEQ ID NO: 1051
  misc_feature 1..33: note = Probe
  source 1..33: mol_type = other DNA

SEQ ID NO: 43145 - DNA, 19 bp, synthetic construct
  misc_feature 1..19: note = Probe
  source 1..19: mol_type = other DNA
gcccggctagctcagtcgg

SEQ ID NO: 43146 - DNA, 20 bp, synthetic construct
  misc_feature 1..20: note = Probe
  source 1..20: mol_type = other DNA
gcccggctagctcagtcggt

SEQ ID NO: 43147 - DNA, 21 bp, synthetic construct
  misc_feature 1..21: note = Probe
  source 1..21: mol_type = other DNA
gcccggctagctcagtcggta

SEQ ID NO: 43148 - DNA, 23 bp, synthetic construct
  misc_feature 1..23: note = Probe
  source 1..23: mol_type = other DNA
gcccggctagctcagtcggtaga

SEQ ID NO: 43149 - DNA, 25 bp, synthetic construct
  misc_feature 1..25: note = Probe
  source 1..25: mol_type = other DNA
gcccggctagctcagtcggtagagc

SEQ ID NO: 43150 - DNA, 26 bp, synthetic construct
  misc_feature 1..26: note = Probe
  source 1..26: mol_type = other DNA
gcccggctagctcagtcggtagagca

SEQ ID NO: 43151 - DNA, 28 bp, synthetic construct
  misc_feature 1..28: note = Probe
  source 1..28: mol_type = other DNA
gcccggctagctcagtcggtagagcatg

SEQ ID NO: 43152 - DNA, 29 bp, synthetic construct
  misc_feature 1..29: note = Probe
  source 1..29: mol_type = other DNA
gcccggctagctcagtcggtagagcatga

SEQ ID NO: 43153 - DNA, 30 bp, synthetic construct; identical to SEQ ID NO: 1062
  misc_feature 1..30: note = Probe
  source 1..30: mol_type = other DNA

SEQ ID NO: 43154 - DNA, 31 bp, synthetic construct; identical to SEQ ID NO: 1063
  misc_feature 1..31: note = Probe
  source 1..31: mol_type = other DNA

SEQ ID NO: 43155 - DNA, 32 bp, synthetic construct; identical to SEQ ID NO: 1064
  misc_feature 1..32: note = Probe
  source 1..32: mol_type = other DNA

SEQ ID NO: 43156 - DNA, 33 bp, synthetic construct; identical to SEQ ID NO: 1065
  misc_feature 1..33: note = Probe
  source 1..33: mol_type = other DNA

SEQ ID NO: 43157 - DNA, 34 bp, synthetic construct; identical to SEQ ID NO: 1066
  misc_feature 1..34: note = Probe
  source 1..34: mol_type = other DNA

SEQ ID NO: 43158 - DNA, 33 bp, synthetic construct; identical to SEQ ID NO: 1070
  misc_feature 1..33: note = Probe
  source 1..33: mol_type = other DNA

SEQ ID NO: 43159 - DNA, 34 bp, synthetic construct; identical to SEQ ID NO: 1071
  misc_feature 1..34: note = Probe
  source 1..34: mol_type = other DNA

SEQ ID NO: 43160 - DNA, 35 bp, synthetic construct; identical to SEQ ID NO: 1072
  misc_feature 1..35: note = Probe
  source 1..35: mol_type = other DNA

SEQ ID NO: 43161 - DNA, 36 bp, synthetic construct; identical to SEQ ID NO: 1073
  misc_feature 1..36: note = Probe
  source 1..36: mol_type = other DNA

SEQ ID NO: 43162 - DNA, 37 bp, synthetic construct; identical to SEQ ID NO: 1074
  misc_feature 1..37: note = Probe
  source 1..37: mol_type = other DNA

SEQ ID NO: 43163 - DNA, 40 bp, synthetic construct; identical to SEQ ID NO: 1076
  misc_feature 1..40: note = Probe
  source 1..40: mol_type = other DNA

SEQ ID NO: 43164 - DNA, 42 bp, synthetic construct; identical to SEQ ID NO: 1077
  misc_feature 1..42: note = Probe
  source 1..42: mol_type = other DNA

SEQ ID NO: 43165 - DNA, 49 bp, synthetic construct; identical to SEQ ID NO: 5999
  misc_feature 1..49: note = Probe
  source 1..49: mol_type = other DNA

SEQ ID NO: 43166 - DNA, 50 bp, synthetic construct; identical to SEQ ID NO: 1078
  misc_feature 1..50: note = Probe
  source 1..50: mol_type = other DNA

SEQ ID NO: 43167 - DNA, 29 bp, synthetic construct
  misc_feature 1..29: note = Probe
  source 1..29: mol_type = other DNA
gcccggctagctcagtcggtagagcatgg

SEQ ID NO: 43168 - DNA, 30 bp, synthetic construct; identical to SEQ ID NO: 1080
  misc_feature 1..30: note = Probe
  source 1..30: mol_type = other DNA

SEQ ID NO: 43169 - DNA, 31 bp, synthetic construct; identical to SEQ ID NO: 1081
  misc_feature 1..31: note = Probe
  source 1..31: mol_type = other DNA

SEQ ID NO: 43170 - DNA, 32 bp, synthetic construct; identical to SEQ ID NO: 1082
  misc_feature 1..32: note = Probe
  source 1..32: mol_type = other DNA

SEQ ID NO: 43171 - DNA, 33 bp, synthetic construct; identical to SEQ ID NO: 1083
  misc_feature 1..33: note = Probe
  source 1..33: mol_type = other DNA

SEQ ID NO: 43172 - DNA, 34 bp, synthetic construct; identical to SEQ ID NO: 1084
  misc_feature 1..34: note = Probe
  source 1..34: mol_type = other DNA

SEQ ID NO: 43173 - DNA, 35 bp, synthetic construct; identical to SEQ ID NO: 1085
  misc_feature 1..35: note = Probe
  source 1..35: mol_type = other DNA

SEQ ID NO: 43174 - DNA, 36 bp, synthetic construct; identical to SEQ ID NO: 1086
  misc_feature 1..36: note = Probe
  source 1..36: mol_type = other DNA

SEQ ID NO: 43175 - DNA, 16 bp, synthetic construct
  misc_feature 1..16: note = Probe
  source 1..16: mol_type = other DNA
gcccggtaatcgcata

SEQ ID NO: 43176 - DNA, 17 bp, synthetic construct
  misc_feature 1..17: note = Probe
  source 1..17: mol_type = other DNA
gcccggtaatcgcataa

SEQ ID NO: 43177 - DNA, 33 bp, synthetic construct; identical to SEQ ID NO: 20846
  misc_feature 1..33: note = Probe
  source 1..33: mol_type = other DNA

SEQ ID NO: 43178 - DNA, 36 bp, synthetic construct; identical to SEQ ID NO: 20847
  misc_feature 1..36: note = Probe
  source 1..36: mol_type = other DNA

SEQ ID NO: 43179 - DNA, 37 bp, synthetic construct; identical to SEQ ID NO: 1093
  misc_feature 1..37: note = Probe
  source 1..37: mol_type = other DNA

SEQ ID NO: 43180 - DNA, 39 bp, synthetic construct
  misc_feature 1..39: note = Probe
  source 1..39: mol_type = other DNA
gcccggtaatcgcataaaacttaaaactttacagtcaga

SEQ ID NO: 43181 - DNA, 17 bp, synthetic construct
  misc_feature 1..17: note = Probe
  source 1..17: mol_type = other DNA
gccctcagtaagttgca

SEQ ID NO: 43182 - DNA, 32 bp, synthetic construct; identical to SEQ ID NO: 6021
  misc_feature 1..32: note = Probe
  source 1..32: mol_type = other DNA

SEQ ID NO: 43183 - DNA, 28 bp, synthetic construct
  misc_feature 1..28: note = Probe
  source 1..28: mol_type = other DNA
gccgctggtgtagtggtatcatgcaaga

SEQ ID NO: 43184 - DNA, 31 bp, synthetic construct; identical to SEQ ID NO: 1101
  misc_feature 1..31: note = Probe
  source 1..31: mol_type = other DNA

SEQ ID NO: 43185 - DNA, 32 bp, synthetic construct; identical to SEQ ID NO: 1102
  misc_feature 1..32: note = Probe
  source 1..32: mol_type = other DNA

SEQ ID NO: 43186 - DNA, 33 bp, synthetic construct; identical to SEQ ID NO: 1103
  misc_feature 1..33: note = Probe
  source 1..33: mol_type = other DNA

SEQ ID NO: 43187 - DNA, 34 bp, synthetic construct; identical to SEQ ID NO: 1104
  misc_feature 1..34: note = Probe
  source 1..34: mol_type = other DNA

SEQ ID NO: 43188 - DNA, 30 bp, synthetic construct; identical to SEQ ID NO: 1105
  misc_feature 1..30: note = Probe
  source 1..30: mol_type = other DNA

SEQ ID NO: 43189 - DNA, 31 bp, synthetic construct; identical to SEQ ID NO: 1106
  misc_feature 1..31: note = Probe
  source 1..31: mol_type = other DNA

SEQ ID NO: 43190 - DNA, 32 bp, synthetic construct; identical to SEQ ID NO: 1107
  misc_feature 1..32: note = Probe
  source 1..32: mol_type = other DNA

SEQ ID NO: 43191 - DNA, 33 bp, synthetic construct; identical to SEQ ID NO: 1108
  misc_feature 1..33: note = Probe
  source 1..33: mol_type = other DNA

SEQ ID NO: 43192 - DNA, 34 bp, synthetic construct; identical to SEQ ID NO: 1109
  misc_feature 1..34: note = Probe
  source 1..34: mol_type = other DNA

SEQ ID NO: 43193 - DNA, 35 bp, synthetic construct; identical to SEQ ID NO: 1110
  misc_feature 1..35: note = Probe
  source 1..35: mol_type = other DNA

SEQ ID NO: 43194 - DNA, 36 bp, synthetic construct; identical to SEQ ID NO: 1111
  misc_feature 1..36: note = Probe
  source 1..36: mol_type = other DNA

SEQ ID NO: 43195 - DNA, 38 bp, synthetic construct
  misc_feature 1..38: note = Probe
  source 1..38: mol_type = other DNA
gcctcctaagccagggattgtgggttcgagtcccacct

SEQ ID NO: 43196 - DNA, 32 bp, synthetic construct; identical to SEQ ID NO: 1112
  misc_feature 1..32: note = Probe
  source 1..32: mol_type = other DNA

SEQ ID NO: 43197 - DNA, 33 bp, synthetic construct; identical to SEQ ID NO: 1113
  misc_feature 1..33: note = Probe
  source 1..33: mol_type = other DNA

SEQ ID NO: 43198 - DNA, 35 bp, synthetic construct; identical to SEQ ID NO: 1114
  misc_feature 1..35: note = Probe
  source 1..35: mol_type = other DNA

SEQ ID NO: 43199 - DNA, 31 bp, synthetic construct; identical to SEQ ID NO: 1115
  misc_feature 1..31: note = Probe
  source 1..31: mol_type = other DNA

SEQ ID NO: 43200 - DNA, 32 bp, synthetic construct; identical to SEQ ID NO: 1116
  misc_feature 1..32: note = Probe
  source 1..32: mol_type = other DNA

SEQ ID NO: 43201 - DNA, 33 bp, synthetic construct; identical to SEQ ID NO: 1117
  misc_feature 1..33: note = Probe
  source 1..33: mol_type = other DNA

SEQ ID NO: 43202 - DNA, 34 bp, synthetic construct; identical to SEQ ID NO: 6054
  misc_feature 1..34: note = Probe
  source 1..34: mol_type = other DNA

SEQ ID NO: 43203 - DNA, 35 bp, synthetic construct; identical to SEQ ID NO: 1118
  misc_feature 1..35: note = Probe
  source 1..35: mol_type = other DNA

SEQ ID NO: 43204 - DNA, 31 bp, synthetic construct; identical to SEQ ID NO: 1120
  misc_feature 1..31: note = Probe
  source 1..31: mol_type = other DNA

SEQ ID NO: 43205 - DNA, 32 bp, synthetic construct; identical to SEQ ID NO: 1121
  misc_feature 1..32: note = Probe
  source 1..32: mol_type = other DNA

SEQ ID NO: 43206 - DNA, 33 bp, synthetic construct; identical to SEQ ID NO: 1122
  misc_feature 1..33: note = Probe
  source 1..33: mol_type = other DNA

SEQ ID NO: 43207 - DNA, 34 bp, synthetic construct; identical to SEQ ID NO: 1123
  misc_feature 1..34: note = Probe
  source 1..34: mol_type = other DNA

SEQ ID NO: 43208 - DNA, 35 bp, synthetic construct; identical to SEQ ID NO: 1124
  misc_feature 1..35: note = Probe
  source 1..35: mol_type = other DNA

SEQ ID NO: 43209 - DNA, 31 bp, synthetic construct; identical to SEQ ID NO: 1126
  misc_feature 1..31: note = Probe
  source 1..31: mol_type = other DNA

SEQ ID NO: 43210 - DNA, 32 bp, synthetic construct; identical to SEQ ID NO: 1127
  misc_feature 1..32: note = Probe
  source 1..32: mol_type = other DNA

SEQ ID NO: 43211 - DNA, 33 bp, synthetic construct; identical to SEQ ID NO: 1128
  misc_feature 1..33: note = Probe
  source 1..33: mol_type = other DNA

SEQ ID NO: 43212 - DNA, 40 bp, synthetic construct; identical to SEQ ID NO: 13616
  misc_feature 1..40: note = Probe
  source 1..40: mol_type = other DNA

SEQ ID NO: 43213 - DNA, 40 bp, synthetic construct; identical to SEQ ID NO: 1131
  misc_feature 1..40: note = Probe
  source 1..40: mol_type = other DNA

SEQ ID NO: 43214 - DNA, 42 bp, synthetic construct; identical to SEQ ID NO: 20966
  misc_feature 1..42: note = Probe
  source 1..42: mol_type = other DNA

SEQ ID NO: 43215 - DNA, 43 bp, synthetic construct; identical to SEQ ID NO: 1132
  misc_feature 1..43: note = Probe
  source 1..43: mol_type = other DNA

SEQ ID NO: 43216 - DNA, 16 bp, synthetic construct
  misc_feature 1..16: note = Probe
  source 1..16: mol_type = other DNA
gcgaaaggtccccggt

SEQ ID NO: 43217 - DNA, 30 bp, synthetic construct
  misc_feature 1..30: note = Probe
  source 1..30: mol_type = other DNA
gcgatccgagttcaaatctcggtggaacct

SEQ ID NO: 43218 - DNA, 30 bp, synthetic construct
  misc_feature 1..30: note = Probe
  source 1..30: mol_type = other DNA
gcgatccgagttcaaatctcggtgggacct

SEQ ID NO: 43219 - DNA, 16 bp, synthetic construct
  misc_feature 1..16: note = Probe
  source 1..16: mol_type = other DNA
gcgccgctggtgtagt

SEQ ID NO: 43220 - DNA, 17 bp, synthetic construct
  misc_feature 1..17: note = Probe
  source 1..17: mol_type = other DNA
gcgccgctggtgtagtg

SEQ ID NO: 43221 - DNA, 18 bp, synthetic construct
  misc_feature 1..18: note = Probe
  source 1..18: mol_type = other DNA
gcgccgctggtgtagtgg

SEQ ID NO: 43222 - DNA, 19 bp, synthetic construct
  misc_feature 1..19: note = Probe
  source 1..19: mol_type = other DNA
gcgccgctggtgtagtggt

SEQ ID NO: 43223 - DNA, 20 bp, synthetic construct
  misc_feature 1..20: note = Probe
  source 1..20: mol_type = other DNA
gcgccgctggtgtagtggta

SEQ ID NO: 43224 - DNA, 21 bp, synthetic construct
  misc_feature 1..21: note = Probe
  source 1..21: mol_type = other DNA
gcgccgctggtgtagtggtat

SEQ ID NO: 43225 - DNA, 22 bp, synthetic construct
  misc_feature 1..22: note = Probe
  source 1..22: mol_type = other DNA
gcgccgctggtgtagtggtatc

SEQ ID NO: 43226 - DNA, 23 bp, synthetic construct
  misc_feature 1..23: note = Probe
  source 1..23: mol_type = other DNA
gcgccgctggtgtagtggtatca

SEQ ID NO: 43227 - DNA, 25 bp, synthetic construct
  misc_feature 1..25: note = Probe
  source 1..25: mol_type = other DNA
gcgccgctggtgtagtggtatcatg

SEQ ID NO: 43228 - DNA, 26 bp, synthetic construct
  misc_feature 1..26: note = Probe
  source 1..26: mol_type = other DNA
gcgccgctggtgtagtggtatcatgc

SEQ ID NO: 43229 - DNA, 27 bp, synthetic construct
  misc_feature 1..27: note = Probe
  source 1..27: mol_type = other DNA
gcgccgctggtgtagtggtatcatgca

SEQ ID NO: 43230 - DNA, 28 bp, synthetic construct
  misc_feature 1..28: note = Probe
  source 1..28: mol_type = other DNA
gcgccgctggtgtagtggtatcatgcaa

SEQ ID NO: 43231 - DNA, 29 bp, synthetic construct
  misc_feature 1..29: note = Probe
  source 1..29: mol_type = other DNA
gcgccgctggtgtagtggtatcatgcaag

SEQ ID NO: 43232 - DNA, 30 bp, synthetic construct; identical to SEQ ID NO: 1149
  misc_feature 1..30: note = Probe
  source 1..30: mol_type = other DNA

SEQ ID NO: 43233 - DNA, 31 bp, synthetic construct; identical to SEQ ID NO: 1150
  misc_feature 1..31: note = Probe
  source 1..31: mol_type = other DNA

SEQ ID NO: 43234 - DNA, 32 bp, synthetic construct; identical to SEQ ID NO: 1151
  misc_feature 1..32: note = Probe
  source 1..32: mol_type = other DNA

SEQ ID NO: 43235 - DNA, 33 bp, synthetic construct; identical to SEQ ID NO: 1152
  misc_feature 1..33: note = Probe
  source 1..33: mol_type = other DNA

SEQ ID NO: 43236 - DNA, 34 bp, synthetic construct; identical to SEQ ID NO: 1153
  misc_feature 1..34: note = Probe
  source 1..34: mol_type = other DNA

SEQ ID NO: 43237 - DNA, 35 bp, synthetic construct; identical to SEQ ID NO: 1154
  misc_feature 1..35: note = Probe
  source 1..35: mol_type = other DNA

SEQ ID NO: 43238 - DNA, 36 bp, synthetic construct; identical to SEQ ID NO: 1155
  misc_feature 1..36: note = Probe
  source 1..36: mol_type = other DNA

SEQ ID NO: 43239 - DNA, 37 bp, synthetic construct; identical to SEQ ID NO: 1156
  misc_feature 1..37: note = Probe
  source 1..37: mol_type = other DNA

SEQ ID NO: 43240 - DNA, 39 bp, synthetic construct; identical to SEQ ID NO: 1157
  misc_feature 1..39: note = Probe
  source 1..39: mol_type = other DNA

SEQ ID NO: 43241 - DNA, 40 bp, synthetic construct; identical to SEQ ID NO: 1158
  misc_feature 1..40: note = Probe
  source 1..40: mol_type = other DNA

SEQ ID NO: 43242 - DNA, 50 bp, synthetic construct; identical to SEQ ID NO: 1161
  misc_feature 1..50: note = Probe
  source 1..50: mol_type = other DNA

SEQ ID NO: 43243 - DNA, 29 bp, synthetic construct
  misc_feature 1..29: note = Probe
  source 1..29: mol_type = other DNA
gcggcccgggttcgactcccggtgtggga

SEQ ID NO: 43244 - DNA, 29 bp, synthetic construct
  misc_feature 1..29: note = Probe
  source 1..29: mol_type = other DNA
gcggcccgggttcgattcccggtcaggga

SEQ ID NO: 43245 - DNA, 32 bp, synthetic construct; identical to SEQ ID NO: 6106
  misc_feature 1..32: note = Probe
  source 1..32: mol_type = other DNA

SEQ ID NO: 43246 - DNA, 33 bp, synthetic construct; identical to SEQ ID NO: 6107
  misc_feature 1..33: note = Probe
  source 1..33: mol_type = other DNA

SEQ ID NO: 43247 - DNA, 34 bp, synthetic construct; identical to SEQ ID NO: 1167
  misc_feature 1..34: note = Probe
  source 1..34: mol_type = other DNA

SEQ ID NO: 43248 - DNA, 29 bp, synthetic construct
  misc_feature 1..29: note = Probe
  source 1..29: mol_type = other DNA
gcgggagaccggggttcgattccccgacg

SEQ ID NO: 43249 - DNA, 30 bp, synthetic construct; identical to SEQ ID NO: 1169
  misc_feature 1..30: note = Probe
  source 1..30: mol_type = other DNA

SEQ ID NO: 43250 - DNA, 31 bp, synthetic construct; identical to SEQ ID NO: 1170
  misc_feature 1..31: note = Probe
  source 1..31: mol_type = other DNA

SEQ ID NO: 43251 - DNA, 32 bp, synthetic construct; identical to SEQ ID NO: 1171
  misc_feature 1..32: note = Probe
  source 1..32: mol_type = other DNA

SEQ ID NO: 43252 - DNA, 33 bp, synthetic construct; identical to SEQ ID NO: 1172
  misc_feature 1..33: note = Probe
  source 1..33: mol_type = other DNA

SEQ ID NO: 43253 - DNA, 34 bp, synthetic construct; identical to SEQ ID NO: 1173
  misc_feature 1..34: note = Probe
  source 1..34: mol_type = other DNA

SEQ ID NO: 43254 - DNA, 32 bp, synthetic construct; identical to SEQ ID NO: 1185
  misc_feature 1..32: note = Probe
  source 1..32: mol_type = other DNA

SEQ ID NO: 43255 - DNA, 33 bp, synthetic construct; identical to SEQ ID NO: 1186
  misc_feature 1..33: note = Probe
  source 1..33: mol_type = other DNA

SEQ ID NO: 43256 - DNA, 34 bp, synthetic construct; identical to SEQ ID NO: 1187
  misc_feature 1..34: note = Probe
  source 1..34: mol_type = other DNA

SEQ ID NO: 43257 - DNA, 35 bp, synthetic construct; identical to SEQ ID NO: 1188
  misc_feature 1..35: note = Probe
  source 1..35: mol_type = other DNA

SEQ ID NO: 43258 - DNA, 36 bp, synthetic construct; identical to SEQ ID NO: 1189
  misc_feature 1..36: note = Probe
  source 1..36: mol_type = other DNA

SEQ ID NO: 43259 - DNA, 40 bp, synthetic construct; identical to SEQ ID NO: 1193
  misc_feature 1..40: note = Probe
  source 1..40: mol_type = other DNA

SEQ ID NO: 43260 - DNA, 44 bp, synthetic construct; identical to SEQ ID NO: 1194
  misc_feature 1..44: note = Probe
  source 1..44: mol_type = other DNA

SEQ ID NO: 43261 - DNA, 50 bp, synthetic construct; identical to SEQ ID NO: 1195
  misc_feature 1..50: note = Probe
  source 1..50: mol_type = other DNA

SEQ ID NO: 43262 - DNA, 24 bp, synthetic construct
  misc_feature 1..24: note = Probe
  source 1..24: mol_type = other DNA
gctatccattggtcttaggcccca

SEQ ID NO: 43263 - DNA, 43 bp, synthetic construct
  misc_feature 1..43: note = Probe
  source 1..43: mol_type = other DNA
gctatcgggcccataccccgaaaatgttggttatacccttccc

SEQ ID NO: 43264 - DNA, 16 bp, synthetic construct
  misc_feature 1..16: note = Probe
  source 1..16: mol_type = other DNA
gctcacaagaactgct

SEQ ID NO: 43265 - DNA, 50 bp, synthetic construct; identical to SEQ ID NO: 1205
  misc_feature 1..50: note = Probe
  source 1..50: mol_type = other DNA

SEQ ID NO: 43266 - DNA, 33 bp, synthetic construct; identical to SEQ ID NO: 6289
  misc_feature 1..33: note = Probe
  source 1..33: mol_type = other DNA

SEQ ID NO: 43267 - DNA, 41 bp, synthetic construct; identical to SEQ ID NO: 21313
  misc_feature 1..41: note = Probe
  source 1..41: mol_type = other DNA

SEQ ID NO: 43268 - DNA, 41 bp, synthetic construct; identical to SEQ ID NO: 21315
  misc_feature 1..41: note = Probe
  source 1..41: mol_type = other DNA

SEQ ID NO: 43269 - DNA, 23 bp, synthetic construct
  misc_feature 1..23: note = Probe
  source 1..23: mol_type = other DNA
gcttctgtagtgtagtggttatc

SEQ ID NO: 43270 - DNA, 28 bp, synthetic construct
  misc_feature 1..28: note = Probe
  source 1..28: mol_type = other DNA
gcttctgtagtgtagtggttatcacgtt

SEQ ID NO: 43271 - DNA, 31 bp, synthetic construct; identical to SEQ ID NO: 1213
  misc_feature 1..31: note = Probe
  source 1..31: mol_type = other DNA

SEQ ID NO: 43272 - DNA, 32 bp, synthetic construct; identical to SEQ ID NO: 1214
  misc_feature 1..32: note = Probe
  source 1..32: mol_type = other DNA

SEQ ID NO: 43273 - DNA, 33 bp, synthetic construct; identical to SEQ ID NO: 1215
  misc_feature 1..33: note = Probe
  source 1..33: mol_type = other DNA

SEQ ID NO: 43274 - DNA, 34 bp, synthetic construct; identical to SEQ ID NO: 1216
  misc_feature 1..34: note = Probe
  source 1..34: mol_type = other DNA

SEQ ID NO: 43275 - DNA, 50 bp, synthetic construct; identical to SEQ ID NO: 1219
  misc_feature 1..50: note = Probe
  source 1..50: mol_type = other DNA

SEQ ID NO: 43276 - DNA, 32 bp, synthetic construct; identical to SEQ ID NO: 1225
  misc_feature 1..32: note = Probe
  source 1..32: mol_type = other DNA

SEQ ID NO: 43277 - DNA, 33 bp, synthetic construct; identical to SEQ ID NO: 1226
  misc_feature 1..33: note = Probe
  source 1..33: mol_type = other DNA

SEQ ID NO: 43278 - DNA, 31 bp, synthetic construct; identical to SEQ ID NO: 1236
  misc_feature 1..31: note = Probe
  source 1..31: mol_type = other DNA

SEQ ID NO: 43279 - DNA, 27 bp, synthetic construct
  misc_feature 1..27: note = Probe
  source 1..27: mol_type = other DNA
ggagaccggggttcgattccccgacgg

SEQ ID NO: 43280 - DNA, 28 bp, synthetic construct
  misc_feature 1..28: note = Probe
  source 1..28: mol_type = other DNA
ggagaccggggttcgattccccgacggg

SEQ ID NO: 43281 - DNA, 29 bp, synthetic construct
  misc_feature 1..29: note = Probe
  source 1..29: mol_type = other DNA
ggagaccggggttcgattccccgacgggg

SEQ ID NO: 43282 - DNA, 30 bp, synthetic construct; identical to SEQ ID NO: 1241
  misc_feature 1..30: note = Probe
  source 1..30: mol_type = other DNA

SEQ ID NO: 43283 - DNA, 31 bp, synthetic construct; identical to SEQ ID NO: 1242
  misc_feature 1..31: note = Probe
  source 1..31: mol_type = other DNA

SEQ ID NO: 43284 - DNA, 19 bp, synthetic construct
  misc_feature 1..19: note = Probe
  source 1..19: mol_type = other DNA
ggagatgaaaacctttttc

SEQ ID NO: 43285 - DNA, 23 bp, synthetic construct
  misc_feature 1..23: note = Probe
  source 1..23: mol_type = other DNA
ggagatgaaaacctttttccaag

SEQ ID NO: 43286 - DNA, 25 bp, synthetic construct
  misc_feature 1..25: note = Probe
  source 1..25: mol_type = other DNA
ggagatgaaaacctttttccaagga

SEQ ID NO: 43287 - DNA, 16 bp, synthetic construct
  misc_feature 1..16: note = Probe
  source 1..16: mol_type = other DNA
ggagcttaaaccccct

SEQ ID NO: 43288 - DNA, 27 bp, synthetic construct
  misc_feature 1..27: note = Probe
  source 1..27: mol_type = other DNA
ggatggggtgtgataggtggcacggag

SEQ ID NO: 43289 - DNA, 28 bp, synthetic construct
  misc_feature 1..28: note = Probe
  source 1..28: mol_type = other DNA
ggatggggtgtgataggtggcacggaga

SEQ ID NO: 43290 - DNA, 28 bp, synthetic construct
  misc_feature 1..28: note = Probe
  source 1..28: mol_type = other DNA
ggattcggcgctctcaccgccgcggccc

SEQ ID NO: 43291 - DNA, 28 bp, synthetic construct
  misc_feature 1..28: note = Probe
  source 1..28: mol_type = other DNA
ggattgtgggttcgagtcccatctgggt

SEQ ID NO: 43292 - DNA, 39 bp, synthetic construct; identical to SEQ ID NO: 6419
  misc_feature 1..39: note = Probe
  source 1..39: mol_type = other DNA

SEQ ID NO: 43293 - DNA, 40 bp, synthetic construct; identical to SEQ ID NO: 21535
  misc_feature 1..40: note = Probe
  source 1..40: mol_type = other DNA

SEQ ID NO: 43294 - DNA, 41 bp, synthetic construct; identical to SEQ ID NO: 21536
  misc_feature 1..41: note = Probe
  source 1..41: mol_type = other DNA

SEQ ID NO: 43295 - DNA, 42 bp, synthetic construct; identical to SEQ ID NO: 21537
  misc_feature 1..42: note = Probe
  source 1..42: mol_type = other DNA

SEQ ID NO: 43296 - DNA, 32 bp, synthetic construct; identical to SEQ ID NO: 1262
  misc_feature 1..32: note = Probe
  source 1..32: mol_type = other DNA

SEQ ID NO: 43297 - DNA, 33 bp, synthetic construct; identical to SEQ ID NO: 1263
  misc_feature 1..33: note = Probe
  source 1..33: mol_type = other DNA

SEQ ID NO: 43298 - DNA, 29 bp, synthetic construct
  misc_feature 1..29: note = Probe
  source 1..29: mol_type = other DNA
ggccccgggttcaatccccggcacctcca

SEQ ID NO: 43299 - DNA, 29 bp, synthetic construct
  misc_feature 1..29: note = Probe
  source 1..29: mol_type = other DNA
ggccccgggttcgatccccggcatctcca

SEQ ID NO: 43300 - DNA, 27 bp, synthetic construct
  misc_feature 1..27: note = Probe
  source 1..27: mol_type = other DNA
ggcccgggttcgactcccggtatggga

SEQ ID NO: 43301 - DNA, 28 bp, synthetic construct
  misc_feature 1..28: note = Probe
  source 1..28: mol_type = other DNA
ggcccgggttcgactcccggtatgggaa

SEQ ID NO: 43302 - DNA, 28 bp, synthetic construct
  misc_feature 1..28: note = Probe
  source 1..28: mol_type = other DNA
ggcccgggttcgactcccggtgtgggaa

SEQ ID NO: 43303 - DNA, 30 bp, synthetic construct; identical to SEQ ID NO: 1267
  misc_feature 1..30: note = Probe
  source 1..30: mol_type = other DNA

SEQ ID NO: 43304 - DNA, 31 bp, synthetic construct; identical to SEQ ID NO: 1268
  misc_feature 1..31: note = Probe
  source 1..31: mol_type = other DNA

SEQ ID NO: 43305 - DNA, 32 bp, synthetic construct; identical to SEQ ID NO: 1269
  misc_feature 1..32: note = Probe
  source 1..32: mol_type = other DNA

SEQ ID NO: 43306 - DNA, 33 bp, synthetic construct; identical to SEQ ID NO: 1270
  misc_feature 1..33: note = Probe
  source 1..33: mol_type = other DNA

SEQ ID NO: 43307 - DNA, 34 bp, synthetic construct; identical to SEQ ID NO: 21572
  misc_feature 1..34: note = Probe
  source 1..34: mol_type = other DNA

SEQ ID NO: 43308 - DNA, 18 bp, synthetic construct
  misc_feature 1..18: note = Probe
  source 1..18: mol_type = other DNA
ggccgcgtggcctaatgg

SEQ ID NO: 43309 - DNA, 19 bp, synthetic construct
  misc_feature 1..19: note = Probe
  source 1..19: mol_type = other DNA
ggccgcgtggcctaatgga

SEQ ID NO: 43310 - DNA, 32 bp, synthetic construct; identical to SEQ ID NO: 6452
  misc_feature 1..32: note = Probe
  source 1..32: mol_type = other DNA

SEQ ID NO: 43311 - DNA, 33 bp, synthetic construct
  misc_feature 1..33: note = Probe
  source 1..33: mol_type = other DNA
ggcctcgtggcgcaacggtagcgcgtctgactc

SEQ ID NO: 43312 - DNA, 34 bp, synthetic construct
  misc_feature 1..34: note = Probe
  source 1..34: mol_type = other DNA
ggcctcgtggcgcaacggtagcgcgtctgactcc

SEQ ID NO: 43313 - DNA, 26 bp, synthetic construct
  misc_feature 1..26: note = Probe
  source 1..26: mol_type = other DNA
ggcgccgtggcttagttggttaaagc

SEQ ID NO: 43314 - DNA, 27 bp, synthetic construct
  misc_feature 1..27: note = Probe
  source 1..27: mol_type = other DNA
ggctagctcagtcggtagagcatggga

SEQ ID NO: 43315 - DNA, 50 bp, synthetic construct; identical to SEQ ID NO: 1296
  misc_feature 1..50: note = Probe
  source 1..50: mol_type = other DNA

SEQ ID NO: 43316 - DNA, 19 bp, synthetic construct
  misc_feature 1..19: note = Probe
  source 1..19: mol_type = other DNA
ggctccatagctcagtggt

SEQ ID NO: 43317 - DNA, 31 bp, synthetic construct; identical to SEQ ID NO: 1298
  misc_feature 1..31: note = Probe
  source 1..31: mol_type = other DNA

SEQ ID NO: 43318 - DNA, 32 bp, synthetic construct; identical to SEQ ID NO: 1299
  misc_feature 1..32: note = Probe
  source 1..32: mol_type = other DNA

SEQ ID NO: 43319 - DNA, 32 bp, synthetic construct; identical to SEQ ID NO: 1304
  misc_feature 1..32: note = Probe
  source 1..32: mol_type = other DNA

SEQ ID NO: 43320 - DNA, 33 bp, synthetic construct; identical to SEQ ID NO: 6492
  misc_feature 1..33: note = Probe
  source 1..33: mol_type = other DNA

SEQ ID NO: 43321 - DNA, 33 bp, synthetic construct; identical to SEQ ID NO: 32319
  misc_feature 1..33: note = Probe
  source 1..33: mol_type = other DNA

SEQ ID NO: 43322 - DNA, 42 bp, synthetic construct; identical to SEQ ID NO: 21672
  misc_feature 1..42: note = Probe
  source 1..42: mol_type = other DNA

SEQ ID NO: 43323 - DNA, 29 bp, synthetic construct
  misc_feature 1..29: note = Probe
  source 1..29: mol_type = other DNA
gggagaccggggttcgattccccgacggg

SEQ ID NO: 43324 - DNA, 31 bp, synthetic construct; identical to SEQ ID NO: 1316
  misc_feature 1..31: note = Probe
  source 1..31: mol_type = other DNA

SEQ ID NO: 43325 - DNA, 32 bp, synthetic construct; identical to SEQ ID NO: 1317
  misc_feature 1..32: note = Probe
  source 1..32: mol_type = other DNA

SEQ ID NO: 43326 - DNA, 21 bp, synthetic construct
  misc_feature 1..21: note = Probe
  source 1..21: mol_type = other DNA
gggatgggttcgattctcata

SEQ ID NO: 43327 - DNA, 25 bp, synthetic construct
  misc_feature 1..25: note = Probe
  source 1..25: mol_type = other DNA
gggatgggttcgattctcatagtcc

SEQ ID NO: 43328 - DNA, 26 bp, synthetic construct
  misc_feature 1..26: note = Probe
  source 1..26: mol_type = other DNA
gggatgggttcgattctcatagtcct

SEQ ID NO: 43329 - DNA, 29 bp, synthetic construct
  misc_feature 1..29: note = Probe
  source 1..29: mol_type = other DNA
gggattgtgggttcgagtcccatctgggt

SEQ ID NO: 43330 - DNA, 16 bp, synthetic construct
  misc_feature 1..16: note = Probe
  source 1..16: mol_type = other DNA
ggggatgtagctcagt

SEQ ID NO: 43331 - DNA, 17 bp, synthetic construct
  misc_feature 1..17: note = Probe
  source 1..17: mol_type = other DNA
ggggatgtagctcagtg

SEQ ID NO: 43332 - DNA, 18 bp, synthetic construct
  misc_feature 1..18: note = Probe
  source 1..18: mol_type = other DNA
ggggatgtagctcagtgg

SEQ ID NO: 43333 - DNA, 19 bp, synthetic construct
  misc_feature 1..19: note = Probe
  source 1..19: mol_type = other DNA
ggggatgtagctcagtggt

SEQ ID NO: 43334 - DNA, 20 bp, synthetic construct
  misc_feature 1..20: note = Probe
  source 1..20: mol_type = other DNA
ggggatgtagctcagtggta

SEQ ID NO: 43335 - DNA, 22 bp, synthetic construct
  misc_feature 1..22: note = Probe
  source 1..22: mol_type = other DNA
ggggatgtagctcagtggtaga

SEQ ID NO: 43336 - DNA, 24 bp, synthetic construct
  misc_feature 1..24: note = Probe
  source 1..24: mol_type = other DNA
ggggatgtagctcagtggtagagc

SEQ ID NO: 43337 - DNA, 30 bp, synthetic construct; identical to SEQ ID NO: 1335
  misc_feature 1..30: note = Probe
  source 1..30: mol_type = other DNA

SEQ ID NO: 43338 - DNA, 31 bp, synthetic construct; identical to SEQ ID NO: 1336
  misc_feature 1..31: note = Probe
  source 1..31: mol_type = other DNA

SEQ ID NO: 43339 - DNA, 32 bp, synthetic construct; identical to SEQ ID NO: 1337
  misc_feature 1..32: note = Probe
  source 1..32: mol_type = other DNA

SEQ ID NO: 43340 - DNA, 33 bp, synthetic construct; identical to SEQ ID NO: 1338
  misc_feature 1..33: note = Probe
  source 1..33: mol_type = other DNA

SEQ ID NO: 43341 - DNA, 30 bp, synthetic construct; identical to SEQ ID NO: 10779
  misc_feature 1..30: note = Probe
  source 1..30: mol_type = other DNA

SEQ ID NO: 43342 - DNA, 32 bp, synthetic construct; identical to SEQ ID NO: 1340
  misc_feature 1..32: note = Probe
  source 1..32: mol_type = other DNA

SEQ ID NO: 43343 - DNA, 30 bp, synthetic construct; identical to SEQ ID NO: 21865
  misc_feature 1..30: note = Probe
  source 1..30: mol_type = other DNA

SEQ ID NO: 43344 - DNA, 19 bp, synthetic construct
  misc_feature 1..19: note = Probe
  source 1..19: mol_type = other DNA
gggggattagctcaaatgg

SEQ ID NO: 43345 - DNA, 20 bp, synthetic construct
  misc_feature 1..20: note = Probe
  source 1..20: mol_type = other DNA
gggggattagctcaaatggt

SEQ ID NO: 43346 - DNA, 21 bp, synthetic construct
  misc_feature 1..21: note = Probe
  source 1..21: mol_type = other DNA
gggggattagctcaaatggta

SEQ ID NO: 43347 - DNA, 23 bp, synthetic construct
  misc_feature 1..23: note = Probe
  source 1..23: mol_type = other DNA
gggggattagctcaaatggtaga

SEQ ID NO: 43348 - DNA, 25 bp, synthetic construct
  misc_feature 1..25: note = Probe
  source 1..25: mol_type = other DNA
gggggattagctcaaatggtagagc

SEQ ID NO: 43349 - DNA, 31 bp, synthetic construct; identical to SEQ ID NO: 21876
  misc_feature 1..31: note = Probe
  source 1..31: mol_type = other DNA

SEQ ID NO: 43350 - DNA, 30 bp, synthetic construct; identical to SEQ ID NO: 37080
  misc_feature 1..30: note = Probe
  source 1..30: mol_type = other DNA

SEQ ID NO: 43351 - DNA, 31 bp, synthetic construct; identical to SEQ ID NO: 6580
  misc_feature 1..31: note = Probe
  source 1..31: mol_type = other DNA

SEQ ID NO: 43352 - DNA, 32 bp, synthetic construct; identical to SEQ ID NO: 1351
  misc_feature 1..32: note = Probe
  source 1..32: mol_type = other DNA

SEQ ID NO: 43353 - DNA, 33 bp, synthetic construct; identical to SEQ ID NO: 1352
  misc_feature 1..33: note = Probe
  source 1..33: mol_type = other DNA

SEQ ID NO: 43354 - DNA, 34 bp, synthetic construct; identical to SEQ ID NO: 1353
  misc_feature 1..34: note = Probe
  source 1..34: mol_type = other DNA

SEQ ID NO: 43355 - DNA, 35 bp, synthetic construct; identical to SEQ ID NO: 1354
  misc_feature 1..35: note = Probe
  source 1..35: mol_type = other DNA

SEQ ID NO: 43356 - DNA, 30 bp, synthetic construct; identical to SEQ ID NO: 21882
  misc_feature 1..30: note = Probe
  source 1..30: mol_type = other DNA

SEQ ID NO: 43357 - DNA, 31 bp, synthetic construct; identical to SEQ ID NO: 6584
  misc_feature 1..31: note = Probe
  source 1..31: mol_type = other DNA

SEQ ID NO: 43358 - DNA, 32 bp, synthetic construct; identical to SEQ ID NO: 1355
  misc_feature 1..32: note = Probe
  source 1..32: mol_type = other DNA

SEQ ID NO: 43359 - DNA, 33 bp, synthetic construct; identical to SEQ ID NO: 1356
  misc_feature 1..33: note = Probe
  source 1..33: mol_type = other DNA

SEQ ID NO: 43360 - DNA, 34 bp, synthetic construct; identical to SEQ ID NO: 1357
  misc_feature 1..34: note = Probe
  source 1..34: mol_type = other DNA

SEQ ID NO: 43361 - DNA, 33 bp, synthetic construct; identical to SEQ ID NO: 6585
  misc_feature 1..33: note = Probe
  source 1..33: mol_type = other DNA

SEQ ID NO: 43362 - DNA, 31 bp, synthetic construct; identical to SEQ ID NO: 21895
  misc_feature 1..31: note = Probe
  source 1..31: mol_type = other DNA

SEQ ID NO: 43363 - DNA, 33 bp, synthetic construct; identical to SEQ ID NO: 6590
  misc_feature 1..33: note = Probe
  source 1..33: mol_type = other DNA

SEQ ID NO: 43364 - DNA, 34 bp, synthetic construct; identical to SEQ ID NO: 13861
  misc_feature 1..34: note = Probe
  source 1..34: mol_type = other DNA

SEQ ID NO: 43365 - DNA, 35 bp, synthetic construct; identical to SEQ ID NO: 1358
  misc_feature 1..35: note = Probe
  source 1..35: mol_type = other DNA

SEQ ID NO: 43366 - DNA, 30 bp, synthetic construct
  misc_feature 1..30: note = Probe
  source 1..30: mol_type = other DNA
gggggtatagctcagtggtagagcgcgtgc

SEQ ID NO: 43367 - DNA, 32 bp, synthetic construct; identical to SEQ ID NO: 1360
  misc_feature 1..32: note = Probe
  source 1..32: mol_type = other DNA

SEQ ID NO: 43368 - DNA, 19 bp, synthetic construct
  misc_feature 1..19: note = Probe
  source 1..19: mol_type = other DNA
gggggtgtagctcagtggt

SEQ ID NO: 43369 - DNA, 24 bp, synthetic construct
  misc_feature 1..24: note = Probe
  source 1..24: mol_type = other DNA
gggggtgtagctcagtggtagagc

SEQ ID NO: 43370 - DNA, 30 bp, synthetic construct; identical to SEQ ID NO: 40930
  misc_feature 1..30: note = Probe
  source 1..30: mol_type = other DNA

SEQ ID NO: 43371 - DNA, 31 bp, synthetic construct
  misc_feature 1..31: note = Probe
  source 1..31: mol_type = other DNA
gggggtgtagctcagtggtagagcatttgac

SEQ ID NO: 43372 - DNA, 32 bp, synthetic construct; identical to SEQ ID NO: 1365
  misc_feature 1..32: note = Probe
  source 1..32: mol_type = other DNA

SEQ ID NO: 43373 - DNA, 33 bp, synthetic construct; identical to SEQ ID NO: 6614
  misc_feature 1..33: note = Probe
  source 1..33: mol_type = other DNA

SEQ ID NO: 43374 - DNA, 34 bp, synthetic construct; identical to SEQ ID NO: 1366
  misc_feature 1..34: note = Probe
  source 1..34: mol_type = other DNA

SEQ ID NO: 43375 - DNA, 29 bp, synthetic construct
  misc_feature 1..29: note = Probe
  source 1..29: mol_type = other DNA
gggggtgtagctcagtggtagagcgcgtg

SEQ ID NO: 43376 - DNA, 30 bp, synthetic construct; identical to SEQ ID NO: 1367
  misc_feature 1..30: note = Probe
  source 1..30: mol_type = other DNA

SEQ ID NO: 43377 - DNA, 31 bp, synthetic construct; identical to SEQ ID NO: 1368
  misc_feature 1..31: note = Probe
  source 1..31: mol_type = other DNA

SEQ ID NO: 43378 - DNA, 32 bp, synthetic construct; identical to SEQ ID NO: 1369
  misc_feature 1..32: note = Probe
  source 1..32: mol_type = other DNA

SEQ ID NO: 43379 - DNA, 30 bp, synthetic construct
  misc_feature 1..30: note = Probe
  source 1..30: mol_type = other DNA
gggtcgcgagttcaaatctcgctggggcct

SEQ ID NO: 43380 - DNA, 50 bp, synthetic construct; identical to SEQ ID NO: 6656
  misc_feature 1..50: note = Probe
  source 1..50: mol_type = other DNA

SEQ ID NO: 43381 - DNA, 28 bp, synthetic construct
  misc_feature 1..28: note = Probe
  source 1..28: mol_type = other DNA
gggtgtagctcagtggtagagcgcgtgc

SEQ ID NO: 43382 - DNA, 26 bp, synthetic construct
  misc_feature 1..26: note = Probe
  source 1..26: mol_type = other DNA
gggttcaatccccggcacctccacca

SEQ ID NO: 43383 - DNA, 33 bp, synthetic construct; identical to SEQ ID NO: 1381
  misc_feature 1..33: note = Probe
  source 1..33: mol_type = other DNA

SEQ ID NO: 43384 - DNA, 16 bp, synthetic construct
  misc_feature 1..16: note = Probe
  source 1..16: mol_type = other DNA
ggtagcgtggccgagc

SEQ ID NO: 43385 - DNA, 17 bp, synthetic construct
  misc_feature 1..17: note = Probe
  source 1..17: mol_type = other DNA
ggtagcgtggccgagcg

SEQ ID NO: 43386 - DNA, 18 bp, synthetic construct
  misc_feature 1..18: note = Probe
  source 1..18: mol_type = other DNA
ggtagcgtggccgagcgg

SEQ ID NO: 43387 - DNA, 19 bp, synthetic construct
  misc_feature 1..19: note = Probe
  source 1..19: mol_type = other DNA
ggtagcgtggccgagcggt

SEQ ID NO: 43388 - DNA, 20 bp, synthetic construct
  misc_feature 1..20: note = Probe
  source 1..20: mol_type = other DNA
ggtagcgtggccgagcggtc

SEQ ID NO: 43389 - DNA, 21 bp, synthetic construct
  misc_feature 1..21: note = Probe
  source 1..21: mol_type = other DNA
ggtagcgtggccgagcggtct

SEQ ID NO: 43390 - DNA, 22 bp, synthetic construct
  misc_feature 1..22: note = Probe
  source 1..22: mol_type = other DNA
ggtagcgtggccgagcggtcta

SEQ ID NO: 43391 - DNA, 23 bp, synthetic construct
  misc_feature 1..23: note = Probe
  source 1..23: mol_type = other DNA
ggtagcgtggccgagcggtctaa

SEQ ID NO: 43392 - DNA, 34 bp, synthetic construct; identical to SEQ ID NO: 22077
  misc_feature 1..34: note = Probe
  source 1..34: mol_type = other DNA

SEQ ID NO: 43393 - DNA, 35 bp, synthetic construct; identical to SEQ ID NO: 6708
  misc_feature 1..35: note = Probe
  source 1..35: mol_type = other DNA

SEQ ID NO: 43394 - DNA, 16 bp, synthetic construct
  misc_feature 1..16: note = Probe
  source 1..16: mol_type = other DNA
ggtagcgtggccgagt

SEQ ID NO: 43395 - DNA, 25 bp, synthetic construct
  misc_feature 1..25: note = Probe
  source 1..25: mol_type = other DNA
ggtagcgtggccgagtggtctaagg

SEQ ID NO: 43396 - DNA, 29 bp, synthetic construct
  misc_feature 1..29: note = Probe
  source 1..29: mol_type = other DNA
ggtagcgtggccgagtggtctaaggcgct

SEQ ID NO: 43397 - DNA, 34 bp, synthetic construct; identical to SEQ ID NO: 1404
  misc_feature 1..34: note = Probe
  source 1..34: mol_type = other DNA

SEQ ID NO: 43398 - DNA, 35 bp, synthetic construct; identical to SEQ ID NO: 1405
  misc_feature 1..35: note = Probe
  source 1..35: mol_type = other DNA

SEQ ID NO: 43399 - DNA, 36 bp, synthetic construct; identical to SEQ ID NO: 13914
  misc_feature 1..36: note = Probe
  source 1..36: mol_type = other DNA

SEQ ID NO: 43400 - DNA, 27 bp, synthetic construct
  misc_feature 1..27: note = Probe
  source 1..27: mol_type = other DNA
ggtccagggttcaagtccctgttcggg

SEQ ID NO: 43401 - DNA, 27 bp, synthetic construct
  misc_feature 1..27: note = Probe
  source 1..27: mol_type = other DNA
ggtcgtgggttcgagccccacgttggg

SEQ ID NO: 43402 - DNA, 18 bp, synthetic construct
  misc_feature 1..18: note = Probe
  source 1..18: mol_type = other DNA
ggtcgtggttgtagtccg

SEQ ID NO: 43403 - DNA, 20 bp, synthetic construct
  misc_feature 1..20: note = Probe
  source 1..20: mol_type = other DNA
ggtcgtggttgtagtccgtg

SEQ ID NO: 43404 - DNA, 21 bp, synthetic construct
  misc_feature 1..21: note = Probe
  source 1..21: mol_type = other DNA
ggtcgtggttgtagtccgtgc

SEQ ID NO: 43405 - DNA, 22 bp, synthetic construct
  misc_feature 1..22: note = Probe
  source 1..22: mol_type = other DNA
ggtcgtggttgtagtccgtgcg

SEQ ID NO: 43406 - DNA, 24 bp, synthetic construct
  misc_feature 1..24: note = Probe
  source 1..24: mol_type = other DNA
ggtcgtggttgtagtccgtgcgag

SEQ ID NO: 43407 - DNA, 25 bp, synthetic construct
  misc_feature 1..25: note = Probe
  source 1..25: mol_type = other DNA
ggtcgtggttgtagtccgtgcgaga

SEQ ID NO: 43408 - DNA, 26 bp, synthetic construct
  misc_feature 1..26: note = Probe
  source 1..26: mol_type = other DNA
ggtcgtggttgtagtccgtgcgagaa

SEQ ID NO: 43409 - DNA, 28 bp, synthetic construct
  misc_feature 1..28: note = Probe
  source 1..28: mol_type = other DNA
ggtcgtggttgtagtccgtgcgagaata

SEQ ID NO: 43410 - DNA, 25 bp, synthetic construct
  misc_feature 1..25: note = Probe
  source 1..25: mol_type = other DNA
ggttcaatccccggcacctccacca

SEQ ID NO: 43411 - DNA, 16 bp, synthetic construct
  misc_feature 1..16: note = Probe
  source 1..16: mol_type = other DNA
ggttccatagtgtagc

SEQ ID NO: 43412 - DNA, 17 bp, synthetic construct
  misc_feature 1..17: note = Probe
  source 1..17: mol_type = other DNA
ggttccatagtgtagcg

SEQ ID NO: 43413 - DNA, 18 bp, synthetic construct
  misc_feature 1..18: note = Probe
  source 1..18: mol_type = other DNA
ggttccatagtgtagcgg

SEQ ID NO: 43414 - DNA, 19 bp, synthetic construct
  misc_feature 1..19: note = Probe
  source 1..19: mol_type = other DNA
ggttccatagtgtagcggt

SEQ ID NO: 43415 - DNA, 23 bp, synthetic construct
  misc_feature 1..23: note = Probe
  source 1..23: mol_type = other DNA
ggttccatagtgtagcggttatc

SEQ ID NO: 43416 - DNA, 28 bp, synthetic construct
  misc_feature 1..28: note = Probe
  source 1..28: mol_type = other DNA
ggttccatagtgtagcggttatcacgtc

SEQ ID NO: 43417 - DNA, 31 bp, synthetic construct; identical to SEQ ID NO: 1432
  misc_feature 1..31: note = Probe
  source 1..31: mol_type = other DNA

SEQ ID NO: 43418 - DNA, 32 bp, synthetic construct; identical to SEQ ID NO: 1433
  misc_feature 1..32: note = Probe
  source 1..32: mol_type = other DNA

SEQ ID NO: 43419 - DNA, 33 bp, synthetic construct; identical to SEQ ID NO: 1434
  misc_feature 1..33: note = Probe
  source 1..33: mol_type = other DNA

SEQ ID NO: 43420 - DNA, 34 bp, synthetic construct; identical to SEQ ID NO: 1435
  misc_feature 1..34: note = Probe
  source 1..34: mol_type = other DNA

SEQ ID NO: 43421 - DNA, 50 bp, synthetic construct; identical to SEQ ID NO: 6812
  misc_feature 1..50: note = Probe
  source 1..50: mol_type = other DNA

SEQ ID NO: 43422 - DNA, 22 bp, synthetic construct
  misc_feature 1..22: note = Probe
  source 1..22: mol_type = other DNA
ggttccatagtgtagtggttat

SEQ ID NO: 43423 - DNA, 23 bp, synthetic construct
  misc_feature 1..23: note = Probe
  source 1..23: mol_type = other DNA
ggttccatagtgtagtggttatc

SEQ ID NO: 43424 - DNA, 24 bp, synthetic construct
  misc_feature 1..24: note = Probe
  source 1..24: mol_type = other DNA
ggttccatagtgtagtggttatca

SEQ ID NO: 43425 - DNA, 25 bp, synthetic construct
  misc_feature 1..25: note = Probe
  source 1..25: mol_type = other DNA
ggttccatagtgtagtggttatcac

SEQ ID NO: 43426 - DNA, 31 bp, synthetic construct; identical to SEQ ID NO: 1443
  misc_feature 1..31: note = Probe
  source 1..31: mol_type = other DNA

SEQ ID NO: 43427 - DNA, 32 bp, synthetic construct; identical to SEQ ID NO: 1444
  misc_feature 1..32: note = Probe
  source 1..32: mol_type = other DNA

SEQ ID NO: 43428 - DNA, 33 bp, synthetic construct; identical to SEQ ID NO: 1445
  misc_feature 1..33: note = Probe
  source 1..33: mol_type = other DNA

SEQ ID NO: 43429 - DNA, 34 bp, synthetic construct; identical to SEQ ID NO: 1446
  misc_feature 1..34: note = Probe
  source 1..34: mol_type = other DNA

SEQ ID NO: 43430 - DNA, 26 bp, synthetic construct
  misc_feature 1..26: note = Probe
  source 1..26: mol_type = other DNA
ggttccatagtgtagtggttatcacg

SEQ ID NO: 43431 - DNA, 28 bp, synthetic construct
  misc_feature 1..28: note = Probe
  source 1..28: mol_type = other DNA
ggttccatagtgtagtggttatcacgtc

SEQ ID NO: 43432 - DNA, 29 bp, synthetic construct
  misc_feature 1..29: note = Probe
  source 1..29: mol_type = other DNA
ggttccatagtgtagtggttatcacgtct

SEQ ID NO: 43433 - DNA, 30 bp, synthetic construct; identical to SEQ ID NO: 1451
  misc_feature 1..30: note = Probe
  source 1..30: mol_type = other DNA

SEQ ID NO: 43434 - DNA, 31 bp, synthetic construct; identical to SEQ ID NO: 1452
  misc_feature 1..31: note = Probe
  source 1..31: mol_type = other DNA

SEQ ID NO: 43435 - DNA, 32 bp, synthetic construct; identical to SEQ ID NO: 1453
  misc_feature 1..32: note = Probe
  source 1..32: mol_type = other DNA

SEQ ID NO: 43436 - DNA, 33 bp, synthetic construct; identical to SEQ ID NO: 1454
  misc_feature 1..33: note = Probe
  source 1..33: mol_type = other DNA

SEQ ID NO: 43437 - DNA, 34 bp, synthetic construct; identical to SEQ ID NO: 1455
  misc_feature 1..34: note = Probe
  source 1..34: mol_type = other DNA

SEQ ID NO: 43438 - DNA, 36 bp, synthetic construct; identical to SEQ ID NO: 1456
  misc_feature 1..36: note = Probe
  source 1..36: mol_type = other DNA

SEQ ID NO: 43439 - DNA, 49 bp, synthetic construct; identical to SEQ ID NO: 22315
  misc_feature 1..49: note = Probe
  source 1..49: mol_type = other DNA

SEQ ID NO: 43440 - DNA, 50 bp, synthetic construct; identical to SEQ ID NO: 1457
  misc_feature 1..50: note = Probe
  source 1..50: mol_type = other DNA

SEQ ID NO: 43441 - DNA, 33 bp, synthetic construct; identical to SEQ ID NO: 1458
  misc_feature 1..33: note = Probe
  source 1..33: mol_type = other DNA

SEQ ID NO: 43442 - DNA, 22 bp, synthetic construct
  misc_feature 1..22: note = Probe
  source 1..22: mol_type = other DNA
ggttcgaaaccgggcggaaaca

SEQ ID NO: 43443 - DNA, 22 bp, synthetic construct
  misc_feature 1..22: note = Probe
  source 1..22: mol_type = other DNA
ggttcgaatcccaccgctgcca

SEQ ID NO: 43444 - DNA, 22 bp, synthetic construct
  misc_feature 1..22: note = Probe
  source 1..22: mol_type = other DNA
ggttcgaatccgagtcacggca

SEQ ID NO: 43445 - DNA, 22 bp, synthetic construct
  misc_feature 1..22: note = Probe
  source 1..22: mol_type = other DNA
ggttcgatccccggcatctcca

SEQ ID NO: 43446 - DNA, 22 bp, synthetic construct
  misc_feature 1..22: note = Probe
  source 1..22: mol_type = other DNA
ggttcgatcccgggtttcggca

SEQ ID NO: 43447 - DNA, 22 bp, synthetic construct
  misc_feature 1..22: note = Probe
  source 1..22: mol_type = other DNA
ggttcgattcccggccaacgca

SEQ ID NO: 43448 - DNA, 22 bp, synthetic construct
  misc_feature 1..22: note = Probe
  source 1..22: mol_type = other DNA
ggttcgattcccgggcggcgca

SEQ ID NO: 43449 - DNA, 19 bp, synthetic construct
  misc_feature 1..19: note = Probe
  source 1..19: mol_type = other DNA
ggttcgattctcatagtcc

SEQ ID NO: 43450 - DNA, 20 bp, synthetic construct
  misc_feature 1..20: note = Probe
  source 1..20: mol_type = other DNA
ggttcgattctcatagtcct

SEQ ID NO: 43451 - DNA, 27 bp, synthetic construct
  misc_feature 1..27: note = Probe
  source 1..27: mol_type = other DNA
ggttggtggttcgagcccacccaggga

SEQ ID NO: 43452 - DNA, 29 bp, synthetic construct
  misc_feature 1..29: note = Probe
  source 1..29: mol_type = other DNA
ggttggtggttcgagcccacccagggacg

SEQ ID NO: 43453 - DNA, 32 bp, synthetic construct; identical to SEQ ID NO: 22374
  misc_feature 1..32: note = Probe
  source 1..32: mol_type = other DNA

SEQ ID NO: 43454 - DNA, 34 bp, synthetic construct; identical to SEQ ID NO: 32769
  misc_feature 1..34: note = Probe
  source 1..34: mol_type = other DNA

SEQ ID NO: 43455 - DNA, 36 bp, synthetic construct; identical to SEQ ID NO: 6870
  misc_feature 1..36: note = Probe
  source 1..36: mol_type = other DNA

SEQ ID NO: 43456 - DNA, 33 bp, synthetic construct; identical to SEQ ID NO: 6913
  misc_feature 1..33: note = Probe
  source 1..33: mol_type = other DNA

SEQ ID NO: 43457 - DNA, 36 bp, synthetic construct; identical to SEQ ID NO: 14013
  misc_feature 1..36: note = Probe
  source 1..36: mol_type = other DNA

SEQ ID NO: 43458 - DNA, 24 bp, synthetic construct
  misc_feature 1..24: note = Probe
  source 1..24: mol_type = other DNA
gtagtcgtggccgagtggttaagg

SEQ ID NO: 43459 - DNA, 20 bp, synthetic construct
  misc_feature 1..20: note = Probe
  source 1..20: mol_type = other DNA
gtcacgcgggagaccggggt

SEQ ID NO: 43460 - DNA, 39 bp, synthetic construct; identical to SEQ ID NO: 1474
  misc_feature 1..39: note = Probe
  source 1..39: mol_type = other DNA

SEQ ID NO: 43461 - DNA, 50 bp, synthetic construct; identical to SEQ ID NO: 1478
  misc_feature 1..50: note = Probe
  source 1..50: mol_type = other DNA

SEQ ID NO: 43462 - DNA, 25 bp, synthetic construct
  misc_feature 1..25: note = Probe
  source 1..25: mol_type = other DNA
gtcaggatggccgagtggtctaagg

SEQ ID NO: 43463 - DNA, 32 bp, synthetic construct; identical to SEQ ID NO: 14044
  misc_feature 1..32: note = Probe
  source 1..32: mol_type = other DNA

SEQ ID NO: 43464 - DNA, 26 bp, synthetic construct
  misc_feature 1..26: note = Probe
  source 1..26: mol_type = other DNA
gtccagggttcaagtccctgttcggg

SEQ ID NO: 43465 - DNA, 18 bp, synthetic construct
  misc_feature 1..18: note = Probe
  source 1..18: mol_type = other DNA
gtccttgtagtataaact

SEQ ID NO: 43466 - DNA, 26 bp, synthetic construct
  misc_feature 1..26: note = Probe
  source 1..26: mol_type = other DNA
gtccttgtagtataaactaatacacc

SEQ ID NO: 43467 - DNA, 27 bp, synthetic construct
  misc_feature 1..27: note = Probe
  source 1..27: mol_type = other DNA
gtccttgtagtataaactaatacacca

SEQ ID NO: 43468 - DNA, 28 bp, synthetic construct
  misc_feature 1..28: note = Probe
  source 1..28: mol_type = other DNA
gtccttgtagtataaactaatacaccag

SEQ ID NO: 43469 - DNA, 29 bp, synthetic construct
  misc_feature 1..29: note = Probe
  source 1..29: mol_type = other DNA
gtccttgtagtataaactaatacaccagt

SEQ ID NO: 43470 - DNA, 30 bp, synthetic construct; identical to SEQ ID NO: 1487
  misc_feature 1..30: note = Probe
  source 1..30: mol_type = other DNA

SEQ ID NO: 43471 - DNA, 31 bp, synthetic construct; identical to SEQ ID NO: 1488
  misc_feature 1..31: note = Probe
  source 1..31: mol_type = other DNA

SEQ ID NO: 43472 - DNA, 50 bp, synthetic construct; identical to SEQ ID NO: 1489
  misc_feature 1..50: note = Probe
  source 1..50: mol_type = other DNA

SEQ ID NO: 43473 - DNA, 17 bp, synthetic construct
  misc_feature 1..17: note = Probe
  source 1..17: mol_type = other DNA
gtcggtagagcatcaga

SEQ ID NO: 43474 - DNA, 17 bp, synthetic construct
  misc_feature 1..17: note = Probe
  source 1..17: mol_type = other DNA
gtcgtggttgtagtccg

SEQ ID NO: 43475 - DNA, 19 bp, synthetic construct
  misc_feature 1..19: note = Probe
  source 1..19: mol_type = other DNA
gtcgtggttgtagtccgtg

SEQ ID NO: 43476 - DNA, 20 bp, synthetic construct
  misc_feature 1..20: note = Probe
  source 1..20: mol_type = other DNA
gtcgtggttgtagtccgtgc

SEQ ID NO: 43477 - DNA, 21 bp, synthetic construct
  misc_feature 1..21: note = Probe
  source 1..21: mol_type = other DNA
gtcgtggttgtagtccgtgcg

SEQ ID NO: 43478 - DNA, 23 bp, synthetic construct
  misc_feature 1..23: note = Probe
  source 1..23: mol_type = other DNA
gtcgtggttgtagtccgtgcgag

SEQ ID NO: 43479 - DNA, 24 bp, synthetic construct
  misc_feature 1..24: note = Probe
  source 1..24: mol_type = other DNA
gtcgtggttgtagtccgtgcgaga

SEQ ID NO: 43480 - DNA, 25 bp, synthetic construct
  misc_feature 1..25: note = Probe
  source 1..25: mol_type = other DNA
gtcgtggttgtagtccgtgcgagaa

SEQ ID NO: 43481 - DNA, 23 bp, synthetic construct
  misc_feature 1..23: note = Probe
  source 1..23: mol_type = other DNA
gtctcataatctgaaggtcgtga

SEQ ID NO: 43482 - DNA, 25 bp, synthetic construct
  misc_feature 1..25: note = Probe
  source 1..25: mol_type = other DNA
gtctcataatctgaaggtcgtgagt

SEQ ID NO: 43483 - DNA, 32 bp, synthetic construct; identical to SEQ ID NO: 14072
  misc_feature 1..32: note = Probe
  source 1..32: mol_type = other DNA

SEQ ID NO: 43484 - DNA, 33 bp, synthetic construct; identical to SEQ ID NO: 1508
  misc_feature 1..33: note = Probe
  source 1..33: mol_type = other DNA

SEQ ID NO: 43485 - DNA, 25 bp, synthetic construct
  misc_feature 1..25: note = Probe
  source 1..25: mol_type = other DNA
gtggtctagtggttaggattcggcg

SEQ ID NO: 43486 - DNA, 27 bp, synthetic construct
  misc_feature 1..27: note = Probe
  source 1..27: mol_type = other DNA
gtggtctagtggttaggattcggcgct

SEQ ID NO: 43487 - DNA, 21 bp, synthetic construct
  misc_feature 1..21: note = Probe
  source 1..21: mol_type = other DNA
gtggttagtactctgcgttgt

SEQ ID NO: 43488 - DNA, 18 bp, synthetic construct
  misc_feature 1..18: note = Probe
  source 1..18: mol_type = other DNA
gtggttgtagtccgtgcg

SEQ ID NO: 43489 - DNA, 20 bp, synthetic construct
  misc_feature 1..20: note = Probe
  source 1..20: mol_type = other DNA
gtggttgtagtccgtgcgag

SEQ ID NO: 43490 - DNA, 22 bp, synthetic construct
  misc_feature 1..22: note = Probe
  source 1..22: mol_type = other DNA
gtggttgtagtccgtgcgagaa

SEQ ID NO: 43491 - DNA, 28 bp, synthetic construct
  misc_feature 1..28: note = Probe
  source 1..28: mol_type = other DNA
gtgtttgtgggtttaagtcccattggtc

SEQ ID NO: 43492 - DNA, 29 bp, synthetic construct
  misc_feature 1..29: note = Probe
  source 1..29: mol_type = other DNA
gtgtttgtgggtttaagtcccattggtct

SEQ ID NO: 43493 - DNA, 30 bp, synthetic construct; identical to SEQ ID NO: 1519
  misc_feature 1..30: note = Probe
  source 1..30: mol_type = other DNA

SEQ ID NO: 43494 - DNA, 37 bp, synthetic construct; identical to SEQ ID NO: 22938
  misc_feature 1..37: note = Probe
  source 1..37: mol_type = other DNA

SEQ ID NO: 43495 - DNA, 38 bp, synthetic construct; identical to SEQ ID NO: 7127
  misc_feature 1..38: note = Probe
  source 1..38: mol_type = other DNA

SEQ ID NO: 43496 - DNA, 21 bp, synthetic construct
  misc_feature 1..21: note = Probe
  source 1..21: mol_type = other DNA
gttaagatggcagagcccggt

SEQ ID NO: 43497 - DNA, 28 bp, synthetic construct
  misc_feature 1..28: note = Probe
  source 1..28: mol_type = other DNA
gttaagatggcagagcccggtaatcgca

SEQ ID NO: 43498 - DNA, 37 bp, synthetic construct; identical to SEQ ID NO: 1523
  misc_feature 1..37: note = Probe
  source 1..37: mol_type = other DNA

SEQ ID NO: 43499 - DNA, 21 bp, synthetic construct
  misc_feature 1..21: note = Probe
  source 1..21: mol_type = other DNA
gttcaaatccgggtgccccct

SEQ ID NO: 43500 - DNA, 22 bp, synthetic construct
  misc_feature 1..22: note = Probe
  source 1..22: mol_type = other DNA
gttcaaatccgggtgccccctc

SEQ ID NO: 43501 - DNA, 24 bp, synthetic construct
  misc_feature 1..24: note = Probe
  source 1..24: mol_type = other DNA
gttcaatccccggcacctccacca

SEQ ID NO: 43502 - DNA, 30 bp, synthetic construct; identical to SEQ ID NO: 14124
  misc_feature 1..30: note = Probe
  source 1..30: mol_type = other DNA

SEQ ID NO: 43503 - DNA, 21 bp, synthetic construct
  misc_feature 1..21: note = Probe
  source 1..21: mol_type = other DNA
gttcgaaaccgggcggaaaca

SEQ ID NO: 43504 - DNA, 21 bp, synthetic construct
  misc_feature 1..21: note = Probe
  source 1..21: mol_type = other DNA
gttcgaatcccactcctgaca

SEQ ID NO: 43505 - DNA, 21 bp, synthetic construct
  misc_feature 1..21: note = Probe
  source 1..21: mol_type = other DNA
gttcgaatccgagtcacggca

SEQ ID NO: 43506 - DNA, 21 bp, synthetic construct
  misc_feature 1..21: note = Probe
  source 1..21: mol_type = other DNA
gttcgaatcctgccgactacg

SEQ ID NO: 43507 - DNA, 21 bp, synthetic construct
  misc_feature 1..21: note = Probe
  source 1..21: mol_type = other DNA
gttcgatcccgggtttcggca

SEQ ID NO: 43508 - DNA, 21 bp, synthetic construct
  misc_feature 1..21: note = Probe
  source 1..21: mol_type = other DNA
gttcgattcccgggcggcgca

SEQ ID NO: 43509 - DNA, 24 bp, synthetic construct
  misc_feature 1..24: note = Probe
  source 1..24: mol_type = other DNA
gttgatgcagagtggggttttgca

SEQ ID NO: 43510 - DNA, 27 bp, synthetic construct
  misc_feature 1..27: note = Probe
  source 1..27: mol_type = other DNA
gttgatgcagagtggggttttgcagtc

SEQ ID NO: 43511 - DNA, 50 bp, synthetic construct; identical to SEQ ID NO: 7209
  misc_feature 1..50: note = Probe
  source 1..50: mol_type = other DNA

SEQ ID NO: 43512 - DNA, 26 bp, synthetic construct
  misc_feature 1..26: note = Probe
  source 1..26: mol_type = other DNA
gttggtggttcgagcccacccaggga

SEQ ID NO: 43513 - DNA, 30 bp, synthetic construct; identical to SEQ ID NO: 1536
  misc_feature 1..30: note = Probe
  source 1..30: mol_type = other DNA

SEQ ID NO: 43514 - DNA, 34 bp, synthetic construct; identical to SEQ ID NO: 1538
  misc_feature 1..34: note = Probe
  source 1..34: mol_type = other DNA

SEQ ID NO: 43515 - DNA, 35 bp, synthetic construct; identical to SEQ ID NO: 1539
  misc_feature 1..35: note = Probe
  source 1..35: mol_type = other DNA

SEQ ID NO: 43516 - DNA, 36 bp, synthetic construct; identical to SEQ ID NO: 1540
  misc_feature 1..36: note = Probe
  source 1..36: mol_type = other DNA

SEQ ID NO: 43517 - DNA, 16 bp, synthetic construct
  misc_feature 1..16: note = Probe
  source 1..16: mol_type = other DNA
gtttccgtagtgtagc

SEQ ID NO: 43518 - DNA, 19 bp, synthetic construct
  misc_feature 1..19: note = Probe
  source 1..19: mol_type = other DNA
gtttccgtagtgtagcggt

SEQ ID NO: 43519 - DNA, 23 bp, synthetic construct
  misc_feature 1..23: note = Probe
  source 1..23: mol_type = other DNA
gtttccgtagtgtagcggttatc

SEQ ID NO: 43520 - DNA, 28 bp, synthetic construct
  misc_feature 1..28: note = Probe
  source 1..28: mol_type = other DNA
gtttccgtagtgtagcggttatcacatt

SEQ ID NO: 43521 - DNA, 29 bp, synthetic construct
  misc_feature 1..29: note = Probe
  source 1..29: mol_type = other DNA
gtttccgtagtgtagcggttatcacattc

SEQ ID NO: 43522 - DNA, 30 bp, synthetic construct; identical to SEQ ID NO: 8769
  misc_feature 1..30: note = Probe
  source 1..30: mol_type = other DNA

SEQ ID NO: 43523 - DNA, 31 bp, synthetic construct; identical to SEQ ID NO: 1547
  misc_feature 1..31: note = Probe
  source 1..31: mol_type = other DNA

SEQ ID NO: 43524 - DNA, 32 bp, synthetic construct; identical to SEQ ID NO: 1548
  misc_feature 1..32: note = Probe
  source 1..32: mol_type = other DNA

SEQ ID NO: 43525 - DNA, 33 bp, synthetic construct; identical to SEQ ID NO: 1549
  misc_feature 1..33: note = Probe
  source 1..33: mol_type = other DNA

SEQ ID NO: 43526 - DNA, 34 bp, synthetic construct; identical to SEQ ID NO: 1550
  misc_feature 1..34: note = Probe
  source 1..34: mol_type = other DNA

SEQ ID NO: 43527 - DNA, 35 bp, synthetic construct; identical to SEQ ID NO: 1551
  misc_feature 1..35: note = Probe
  source 1..35: mol_type = other DNA

SEQ ID NO: 43528 - DNA, 36 bp, synthetic construct; identical to SEQ ID NO: 1552
  misc_feature 1..36: note = Probe
  source 1..36: mol_type = other DNA

SEQ ID NO: 43529 - DNA, 50 bp, synthetic construct; identical to SEQ ID NO: 7255
  misc_feature 1..50: note = Probe
  source 1..50: mol_type = other DNA

SEQ ID NO: 43530 - DNA, 23 bp, synthetic construct
  misc_feature 1..23: note = Probe
  source 1..23: mol_type = other DNA
gtttccgtagtgtagtggtcatc

SEQ ID NO: 43531 - DNA, 28 bp, synthetic construct
  misc_feature 1..28: note = Probe
  source 1..28: mol_type = other DNA
gtttccgtagtgtagtggtcatcacgtt

SEQ ID NO: 43532 - DNA, 30 bp, synthetic construct; identical to SEQ ID NO: 8772
  misc_feature 1..30: note = Probe
  source 1..30: mol_type = other DNA

SEQ ID NO: 43533 - DNA, 31 bp, synthetic construct; identical to SEQ ID NO: 1559
  misc_feature 1..31: note = Probe
  source 1..31: mol_type = other DNA

SEQ ID NO: 43534 - DNA, 32 bp, synthetic construct; identical to SEQ ID NO: 1560
  misc_feature 1..32: note = Probe
  source 1..32: mol_type = other DNA

SEQ ID NO: 43535 - DNA, 33 bp, synthetic construct; identical to SEQ ID NO: 1561
  misc_feature 1..33: note = Probe
  source 1..33: mol_type = other DNA

SEQ ID NO: 43536 - DNA, 34 bp, synthetic construct; identical to SEQ ID NO: 1562
  misc_feature 1..34: note = Probe
  source 1..34: mol_type = other DNA

SEQ ID NO: 43537 - DNA, 38 bp, synthetic construct; identical to SEQ ID NO: 1563
  misc_feature 1..38: note = Probe
  source 1..38: mol_type = other DNA

SEQ ID NO: 43538 - DNA, 50 bp, synthetic construct; identical to SEQ ID NO: 1564
  misc_feature 1..50: note = Probe
  source 1..50: mol_type = other DNA

SEQ ID NO: 43539 - DNA, 31 bp, synthetic construct; identical to SEQ ID NO: 23137
  misc_feature 1..31: note = Probe
  source 1..31: mol_type = other DNA

SEQ ID NO: 43540 - DNA, 23 bp, synthetic construct
  misc_feature 1..23: note = Probe
  source 1..23: mol_type = other DNA
gtttccgtagtgtagtggttatt

SEQ ID NO: 43541 - DNA, 22 bp, synthetic construct
  misc_feature 1..22: note = Probe
  source 1..22: mol_type = other DNA
gtttgtgggtttaagtcccatt

SEQ ID NO: 43542 - DNA, 26 bp, synthetic construct
  misc_feature 1..26: note = Probe
  source 1..26: mol_type = other DNA
gtttgtgggtttaagtcccattggtc

SEQ ID NO: 43543 - DNA, 27 bp, synthetic construct
  misc_feature 1..27: note = Probe
  source 1..27: mol_type = other DNA
gtttgtgggtttaagtcccattggtct

SEQ ID NO: 43544 - DNA, 31 bp, synthetic construct; identical to SEQ ID NO: 23173
  misc_feature 1..31: note = Probe
  source 1..31: mol_type = other DNA

SEQ ID NO: 43545 - DNA, 32 bp, synthetic construct; identical to SEQ ID NO: 25624
  misc_feature 1..32: note = Probe
  source 1..32: mol_type = other DNA

SEQ ID NO: 43546 - DNA, 41 bp, synthetic construct; identical to SEQ ID NO: 33586
  misc_feature 1..41: note = Probe
  source 1..41: mol_type = other DNA

SEQ ID NO: 43547 - DNA, 43 bp, synthetic construct; identical to SEQ ID NO: 7306
  misc_feature 1..43: note = Probe
  source 1..43: mol_type = other DNA

SEQ ID NO: 43548 - DNA, 50 bp, synthetic construct; identical to SEQ ID NO: 1568
  misc_feature 1..50: note = Probe
  source 1..50: mol_type = other DNA

SEQ ID NO: 43549 - DNA, 50 bp, synthetic construct; identical to SEQ ID NO: 1569
  misc_feature 1..50: note = Probe
  source 1..50: mol_type = other DNA

SEQ ID NO: 43550 - DNA, 27 bp, synthetic construct
  misc_feature 1..27: note = Probe
  source 1..27: mol_type = other DNA
taagtgtttgtgggtttaagtcccatt

SEQ ID NO: 43551 - DNA, 31 bp, synthetic construct; identical to SEQ ID NO: 7456
  misc_feature 1..31: note = Probe
  source 1..31: mol_type = other DNA

SEQ ID NO: 43552 - DNA, 32 bp, synthetic construct; identical to SEQ ID NO: 7457
  misc_feature 1..32: note = Probe
  source 1..32: mol_type = other DNA

SEQ ID NO: 43553 - DNA, 33 bp, synthetic construct; identical to SEQ ID NO: 7518
  misc_feature 1..33: note = Probe
  source 1..33: mol_type = other DNA

SEQ ID NO: 43554 - DNA, 34 bp, synthetic construct; identical to SEQ ID NO: 14167
  misc_feature 1..34: note = Probe
  source 1..34: mol_type = other DNA

SEQ ID NO: 43555 - DNA, 35 bp, synthetic construct; identical to SEQ ID NO: 1576
  misc_feature 1..35: note = Probe
  source 1..35: mol_type = other DNA

SEQ ID NO: 43556 - DNA, 36 bp, synthetic construct; identical to SEQ ID NO: 1577
  misc_feature 1..36: note = Probe
  source 1..36: mol_type = other DNA

SEQ ID NO: 43557 - DNA, 32 bp, synthetic construct; identical to SEQ ID NO: 7522
  misc_feature 1..32: note = Probe
  source 1..32: mol_type = other DNA

SEQ ID NO: 43558 - DNA, 18 bp, synthetic construct
  misc_feature 1..18: note = Probe
  source 1..18: mol_type = other DNA
tacctcctcaaagcaata

SEQ ID NO: 43559 - DNA, 22 bp, synthetic construct
  misc_feature 1..22: note = Probe
  source 1..22: mol_type = other DNA
tacctcctcaaagcaatacact

SEQ ID NO: 43560 - DNA, 50 bp, synthetic construct; identical to SEQ ID NO: 1582
  misc_feature 1..50: note = Probe
  source 1..50: mol_type = other DNA

SEQ ID NO: 43561 - DNA, 50 bp, synthetic construct; identical to SEQ ID NO: 7558
  misc_feature 1..50: note = Probe
  source 1..50: mol_type = other DNA

SEQ ID NO: 43562 - DNA, 50 bp, synthetic construct; identical to SEQ ID NO: 1583
  misc_feature 1..50: note = Probe
  source 1..50: mol_type = other DNA

SEQ ID NO: 43563 - DNA, 36 bp, synthetic construct; identical to SEQ ID NO: 1584
  misc_feature 1..36: note = Probe
  source 1..36: mol_type = other DNA

SEQ ID NO: 43564 - DNA, 37 bp, synthetic construct; identical to SEQ ID NO: 7559
  misc_feature 1..37: note = Probe
  source 1..37: mol_type = other DNA

SEQ ID NO: 43565 - DNA, 42 bp, synthetic construct; identical to SEQ ID NO: 23472
  misc_feature 1..42: note = Probe
  source 1..42: mol_type = other DNA

SEQ ID NO: 43566 - DNA, 29 bp, synthetic construct
  misc_feature 1..29: note = Probe
  source 1..29: mol_type = other DNA
taggatggggtgtgataggtggcacggag

SEQ ID NO: 43567 - DNA, 30 bp, synthetic construct; identical to SEQ ID NO: 1592
  misc_feature 1..30: note = Probe
  source 1..30: mol_type = other DNA

SEQ ID NO: 43568 - DNA, 50 bp, synthetic construct; identical to SEQ ID NO: 1596
  misc_feature 1..50: note = Probe
  source 1..50: mol_type = other DNA

SEQ ID NO: 43569 - DNA, 19 bp, synthetic construct
  misc_feature 1..19: note = Probe
  source 1..19: mol_type = other DNA
tagtggttaggattcggcg

SEQ ID NO: 43570 - DNA, 37 bp, synthetic construct; identical to SEQ ID NO: 14220
  misc_feature 1..37: note = Probe
  source 1..37: mol_type = other DNA

SEQ ID NO: 43571 - DNA, 19 bp, synthetic construct
  misc_feature 1..19: note = Probe
  source 1..19: mol_type = other DNA
tagtggttagtactctgcg

SEQ ID NO: 43572 - DNA, 27 bp, synthetic construct
  misc_feature 1..27: note = Probe
  source 1..27: mol_type = other DNA
tatcattggtcgtggttgtagtccgtg

SEQ ID NO: 43573 - DNA, 29 bp, synthetic construct
  misc_feature 1..29: note = Probe
  source 1..29: mol_type = other DNA
tatcattggtcgtggttgtagtccgtgcg

SEQ ID NO: 43574 - DNA, 31 bp, synthetic construct; identical to SEQ ID NO: 23604
  misc_feature 1..31: note = Probe
  source 1..31: mol_type = other DNA

SEQ ID NO: 43575 - DNA, 32 bp, synthetic construct; identical to SEQ ID NO: 23605
  misc_feature 1..32: note = Probe
  source 1..32: mol_type = other DNA

SEQ ID NO: 43576 - DNA, 19 bp, synthetic construct
  misc_feature 1..19: note = Probe
  source 1..19: mol_type = other DNA
tcaaatctcggtggaacct

SEQ ID NO: 43577 - DNA, 22 bp, synthetic construct
  misc_feature 1..22: note = Probe
  source 1..22: mol_type = other DNA
tcaatccccggcacctccacca

SEQ ID NO: 43578 - DNA, 50 bp, synthetic construct; identical to SEQ ID NO: 1610
  misc_feature 1..50: note = Probe
  source 1..50: mol_type = other DNA

SEQ ID NO: 43579 - DNA, 22 bp, synthetic construct
  misc_feature 1..22: note = Probe
  source 1..22: mol_type = other DNA
tcacacgcgaaaggtccccggt

SEQ ID NO: 43580 - DNA, 34 bp, synthetic construct; identical to SEQ ID NO: 1615
  misc_feature 1..34: note = Probe
  source 1..34: mol_type = other DNA

SEQ ID NO: 43581 - DNA, 36 bp, synthetic construct; identical to SEQ ID NO: 1616
  misc_feature 1..36: note = Probe
  source 1..36: mol_type = other DNA

SEQ ID NO: 43582 - DNA, 37 bp, synthetic construct; identical to SEQ ID NO: 7688
  misc_feature 1..37: note = Probe
  source 1..37: mol_type = other DNA

SEQ ID NO: 43583 - DNA, 38 bp, synthetic construct; identical to SEQ ID NO: 1617
  misc_feature 1..38: note = Probe
  source 1..38: mol_type = other DNA

SEQ ID NO: 43584 - DNA, 33 bp, synthetic construct; identical to SEQ ID NO: 1619
  misc_feature 1..33: note = Probe
  source 1..33: mol_type = other DNA

SEQ ID NO: 43585 - DNA, 34 bp, synthetic construct; identical to SEQ ID NO: 1620
  misc_feature 1..34: note = Probe
  source 1..34: mol_type = other DNA

SEQ ID NO: 43586 - DNA, 35 bp, synthetic construct; identical to SEQ ID NO: 1621
  misc_feature 1..35: note = Probe
  source 1..35: mol_type = other DNA

SEQ ID NO: 43587 - DNA, 36 bp, synthetic construct; identical to SEQ ID NO: 1622
  misc_feature 1..36: note = Probe
  source 1..36: mol_type = other DNA

SEQ ID NO: 43588 - DNA, 37 bp, synthetic construct; identical to SEQ ID NO: 7698
  misc_feature 1..37: note = Probe
  source 1..37: mol_type = other DNA

SEQ ID NO: 43589 - DNA, 38 bp, synthetic construct; identical to SEQ ID NO: 1623
  misc_feature 1..38: note = Probe
  source 1..38: mol_type = other DNA

SEQ ID NO: 43590 - DNA, 50 bp, synthetic construct; identical to SEQ ID NO: 7743
  misc_feature 1..50: note = Probe
  source 1..50: mol_type = other DNA

SEQ ID NO: 43591 - DNA, 24 bp, synthetic construct
  misc_feature 1..24: note = Probe
  source 1..24: mol_type = other DNA
tcagggatgggttcgattctcata

SEQ ID NO: 43592 - DNA, 26 bp, synthetic construct
  misc_feature 1..26: note = Probe
  source 1..26: mol_type = other DNA
tcagggatgggttcgattctcatagt

SEQ ID NO: 43593 - DNA, 27 bp, synthetic construct
  misc_feature 1..27: note = Probe
  source 1..27: mol_type = other DNA
tcagggatgggttcgattctcatagtc

SEQ ID NO: 43594 - DNA, 29 bp, synthetic construct
  misc_feature 1..29: note = Probe
  source 1..29: mol_type = other DNA
tcagggatgggttcgattctcatagtcct

SEQ ID NO: 43595 - DNA, 31 bp, synthetic construct; identical to SEQ ID NO: 7745
  misc_feature 1..31: note = Probe
  source 1..31: mol_type = other DNA

SEQ ID NO: 43596 - DNA, 25 bp, synthetic construct
  misc_feature 1..25: note = Probe
  source 1..25: mol_type = other DNA
tcattggtcgtggttgtagtccgtg

SEQ ID NO: 43597 - DNA, 27 bp, synthetic construct
  misc_feature 1..27: note = Probe
  source 1..27: mol_type = other DNA
tcattggtcgtggttgtagtccgtgcg

SEQ ID NO: 43598 - DNA, 29 bp, synthetic construct
  misc_feature 1..29: note = Probe
  source 1..29: mol_type = other DNA
tcattggtcgtggttgtagtccgtgcgag

SEQ ID NO: 43599 - DNA, 34 bp, synthetic construct; identical to SEQ ID NO: 1627
  misc_feature 1..34: note = Probe
  source 1..34: mol_type = other DNA

SEQ ID NO: 43600 - DNA, 33 bp, synthetic construct; identical to SEQ ID NO: 23792
  misc_feature 1..33: note = Probe
  source 1..33: mol_type = other DNA

SEQ ID NO: 43601 - DNA, 34 bp, synthetic construct; identical to SEQ ID NO: 1628
  misc_feature 1..34: note = Probe
  source 1..34: mol_type = other DNA

SEQ ID NO: 43602 - DNA, 25 bp, synthetic construct
  misc_feature 1..25: note = Probe
  source 1..25: mol_type = other DNA
tccagggttcaagtccctgttcggg

SEQ ID NO: 43603 - DNA, 27 bp, synthetic construct
  misc_feature 1..27: note = Probe
  source 1..27: mol_type = other DNA
tccagggttcaagtccctgttcgggcg

SEQ ID NO: 43604 - DNA, 25 bp, synthetic construct
  misc_feature 1..25: note = Probe
  source 1..25: mol_type = other DNA
tccattggggtttccccgcgcaggt

SEQ ID NO: 43605 - DNA, 18 bp, synthetic construct
  misc_feature 1..18: note = Probe
  source 1..18: mol_type = other DNA
tcccacatggtctagcgg

SEQ ID NO: 43606 - DNA, 19 bp, synthetic construct
  misc_feature 1..19: note = Probe
  source 1..19: mol_type = other DNA
tcccacatggtctagcggt

SEQ ID NO: 43607 - DNA, 22 bp, synthetic construct
  misc_feature 1..22: note = Probe
  source 1..22: mol_type = other DNA
tcccacatggtctagcggttag

SEQ ID NO: 43608 - DNA, 23 bp, synthetic construct
  misc_feature 1..23: note = Probe
  source 1..23: mol_type = other DNA
tcccacatggtctagcggttagg

SEQ ID NO: 43609 - DNA, 24 bp, synthetic construct
  misc_feature 1..24: note = Probe
  source 1..24: mol_type = other DNA
tcccacatggtctagcggttagga

SEQ ID NO: 43610 - DNA, 26 bp, synthetic construct
  misc_feature 1..26: note = Probe
  source 1..26: mol_type = other DNA
tcccacatggtctagcggttaggatt

SEQ ID NO: 43611 - DNA, 27 bp, synthetic construct
  misc_feature 1..27: note = Probe
  source 1..27: mol_type = other DNA
tcccacatggtctagcggttaggattc

SEQ ID NO: 43612 - DNA, 28 bp, synthetic construct
  misc_feature 1..28: note = Probe
  source 1..28: mol_type = other DNA
tcccacatggtctagcggttaggattcc

SEQ ID NO: 43613 - DNA, 29 bp, synthetic construct
  misc_feature 1..29: note = Probe
  source 1..29: mol_type = other DNA
tcccacatggtctagcggttaggattcct

SEQ ID NO: 43614 - DNA, 30 bp, synthetic construct; identical to SEQ ID NO: 1643
  misc_feature 1..30: note = Probe
  source 1..30: mol_type = other DNA

SEQ ID NO: 43615 - DNA, 31 bp, synthetic construct; identical to SEQ ID NO: 1644
  misc_feature 1..31: note = Probe
  source 1..31: mol_type = other DNA

SEQ ID NO: 43616 - DNA, 32 bp, synthetic construct; identical to SEQ ID NO: 1645
  misc_feature 1..32: note = Probe
  source 1..32: mol_type = other DNA

SEQ ID NO: 43617 - DNA, 33 bp, synthetic construct; identical to SEQ ID NO: 1646
  misc_feature 1..33: note = Probe
  source 1..33: mol_type = other DNA

SEQ ID NO: 43618 - DNA, 34 bp, synthetic construct; identical to SEQ ID NO: 1647
  misc_feature 1..34: note = Probe
  source 1..34: mol_type = other DNA

SEQ ID NO: 43619 - DNA, 35 bp, synthetic construct; identical to SEQ ID NO: 1648
  misc_feature 1..35: note = Probe
  source 1..35: mol_type = other DNA

SEQ ID NO: 43620 - DNA, 36 bp, synthetic construct; identical to SEQ ID NO: 1649
  misc_feature 1..36: note = Probe
  source 1..36: mol_type = other DNA

SEQ ID NO: 43621 - DNA, 37 bp, synthetic construct; identical to SEQ ID NO: 1650
  misc_feature 1..37: note = Probe
  source 1..37: mol_type = other DNA

SEQ ID NO: 43622 - DNA, 39 bp, synthetic construct; identical to SEQ ID NO: 7795
  misc_feature 1..39: note = Probe
  source 1..39: mol_type = other DNA

SEQ ID NO: 43623 - DNA, 40 bp, synthetic construct; identical to SEQ ID NO: 1651
  misc_feature 1..40: note = Probe
  source 1..40: mol_type = other DNA

SEQ ID NO: 43624 - DNA, 41 bp, synthetic construct; identical to SEQ ID NO: 7796
  misc_feature 1..41: note = Probe
  source 1..41: mol_type = other DNA

SEQ ID NO: 43625 - DNA, 50 bp, synthetic construct; identical to SEQ ID NO: 7798
  misc_feature 1..50: note = Probe
  source 1..50: mol_type = other DNA

SEQ ID NO: 43626 - DNA, 18 bp, synthetic construct
  misc_feature 1..18: note = Probe
  source 1..18: mol_type = other DNA
tcccatatggtctagcgg

SEQ ID NO: 43627 - DNA, 19 bp, synthetic construct
  misc_feature 1..19: note = Probe
  source 1..19: mol_type = other DNA
tcccatatggtctagcggt

SEQ ID NO: 43628 - DNA, 23 bp, synthetic construct
  misc_feature 1..23: note = Probe
  source 1..23: mol_type = other DNA
tcccatatggtctagcggttagg

SEQ ID NO: 43629 - DNA, 26 bp, synthetic construct
  misc_feature 1..26: note = Probe
  source 1..26: mol_type = other DNA
tcccatatggtctagcggttaggatt

SEQ ID NO: 43630 - DNA, 29 bp, synthetic construct
  misc_feature 1..29: note = Probe
  source 1..29: mol_type = other DNA
tcccatatggtctagcggttaggattcct

SEQ ID NO: 43631 - DNA, 30 bp, synthetic construct; identical to SEQ ID NO: 1659
  misc_feature 1..30: note = Probe
  source 1..30: mol_type = other DNA

SEQ ID NO: 43632 - DNA, 31 bp, synthetic construct; identical to SEQ ID NO: 1660
  misc_feature 1..31: note = Probe
  source 1..31: mol_type = other DNA

SEQ ID NO: 43633 - DNA, 32 bp, synthetic construct; identical to SEQ ID NO: 1661
  misc_feature 1..32: note = Probe
  source 1..32: mol_type = other DNA

SEQ ID NO: 43634 - DNA, 33 bp, synthetic construct; identical to SEQ ID NO: 1662
  misc_feature 1..33: note = Probe
  source 1..33: mol_type = other DNA

SEQ ID NO: 43635 - DNA, 34 bp, synthetic construct; identical to SEQ ID NO: 1663
  misc_feature 1..34: note = Probe
  source 1..34: mol_type = other DNA

SEQ ID NO: 43636 - DNA, 35 bp, synthetic construct; identical to SEQ ID NO: 1664
  misc_feature 1..35: note = Probe
  source 1..35: mol_type = other DNA

SEQ ID NO: 43637 - DNA, 36 bp, synthetic construct; identical to SEQ ID NO: 1665
  misc_feature 1..36: note = Probe
  source 1..36: mol_type = other DNA

SEQ ID NO: 43638 - DNA, 40 bp, synthetic construct; identical to SEQ ID NO: 7804
  misc_feature 1..40: note = Probe
  source 1..40: mol_type = other DNA

SEQ ID NO: 43639 - DNA, 16 bp, synthetic construct
  misc_feature 1..16: note = Probe
  source 1..16: mol_type = other DNA
tccccggcacctccac

SEQ ID NO: 43640 - DNA, 17 bp, synthetic construct
  misc_feature 1..17: note = Probe
  source 1..17: mol_type = other DNA
tccccggcacctccacc

SEQ ID NO: 43641 - DNA, 18 bp, synthetic construct
  misc_feature 1..18: note = Probe
  source 1..18: mol_type = other DNA
tccccggcacctccacca

SEQ ID NO: 43642 - DNA, 27 bp, synthetic construct
  misc_feature 1..27: note = Probe
  source 1..27: mol_type = other DNA
tcccgggttcgatccccagcatctcca

SEQ ID NO: 43643 - DNA, 31 bp, synthetic construct; identical to SEQ ID NO: 1671
  misc_feature 1..31: note = Probe
  source 1..31: mol_type = other DNA

SEQ ID NO: 43644 - DNA, 32 bp, synthetic construct; identical to SEQ ID NO: 1672
  misc_feature 1..32: note = Probe
  source 1..32: mol_type = other DNA

SEQ ID NO: 43645 - DNA, 33 bp, synthetic construct; identical to SEQ ID NO: 1673
  misc_feature 1..33: note = Probe
  source 1..33: mol_type = other DNA

SEQ ID NO: 43646 - DNA, 34 bp, synthetic construct; identical to SEQ ID NO: 1674
  misc_feature 1..34: note = Probe
  source 1..34: mol_type = other DNA

SEQ ID NO: 43647 - DNA, 35 bp, synthetic construct; identical to SEQ ID NO: 1675
  misc_feature 1..35: note = Probe
  source 1..35: mol_type = other DNA

SEQ ID NO: 43648 - DNA, 36 bp, synthetic construct; identical to SEQ ID NO: 1676
  misc_feature 1..36: note = Probe
  source 1..36: mol_type = other DNA

SEQ ID NO: 43649 - DNA, 31 bp, synthetic construct; identical to SEQ ID NO: 1679
  misc_feature 1..31: note = Probe
  source 1..31: mol_type = other DNA

SEQ ID NO: 43650 - DNA, 32 bp, synthetic construct; identical to SEQ ID NO: 1680
  misc_feature 1..32: note = Probe
  source 1..32: mol_type = other DNA

SEQ ID NO: 43651 - DNA, 33 bp, synthetic construct; identical to SEQ ID NO: 1681
  misc_feature 1..33: note = Probe
  source 1..33: mol_type = other DNA

SEQ ID NO: 43652 - DNA, 34 bp, synthetic construct; identical to SEQ ID NO: 1682
  misc_feature 1..34: note = Probe
  source 1..34: mol_type = other DNA

SEQ ID NO: 43653 - DNA, 35 bp, synthetic construct; identical to SEQ ID NO: 1683
  misc_feature 1..35: note = Probe
  source 1..35: mol_type = other DNA

SEQ ID NO: 43654 - DNA, 36 bp, synthetic construct; identical to SEQ ID NO: 1684
  misc_feature 1..36: note = Probe
  source 1..36: mol_type = other DNA

SEQ ID NO: 43655 - DNA, 37 bp, synthetic construct; identical to SEQ ID NO: 1685
  misc_feature 1..37: note = Probe
  source 1..37: mol_type = other DNA

SEQ ID NO: 43656 - DNA, 39 bp, synthetic construct; identical to SEQ ID NO: 1687
  misc_feature 1..39: note = Probe
  source 1..39: mol_type = other DNA

SEQ ID NO: 43657 - DNA, 40 bp, synthetic construct; identical to SEQ ID NO: 1688
  misc_feature 1..40: note = Probe
  source 1..40: mol_type = other DNA

SEQ ID NO: 43658 - DNA, 49 bp, synthetic construct; identical to SEQ ID NO: 1690
  misc_feature 1..49: note = Probe
  source 1..49: mol_type = other DNA

SEQ ID NO: 43659 - DNA, 50 bp, synthetic construct; identical to SEQ ID NO: 1691
  misc_feature 1..50: note = Probe
  source 1..50: mol_type = other DNA

SEQ ID NO: 43660 - DNA, 25 bp, synthetic construct
  misc_feature 1..25: note = Probe
  source 1..25: mol_type = other DNA
tccctggttcgatcccgggtttcgg

SEQ ID NO: 43661 - DNA, 27 bp, synthetic construct
  misc_feature 1..27: note = Probe
  source 1..27: mol_type = other DNA
tccctggttcgatcccgggtttcggca

SEQ ID NO: 43662 - DNA, 28 bp, synthetic construct
  misc_feature 1..28: note = Probe
  source 1..28: mol_type = other DNA
tccgtagtgtagtggtcatcacgttcgc

SEQ ID NO: 43663 - DNA, 22 bp, synthetic construct
  misc_feature 1..22: note = Probe
  source 1..22: mol_type = other DNA
tcctcgttagtatagtggtgag

SEQ ID NO: 43664 - DNA, 23 bp, synthetic construct
  misc_feature 1..23: note = Probe
  source 1..23: mol_type = other DNA
tcctcgttagtatagtggtgagt

SEQ ID NO: 43665 - DNA, 28 bp, synthetic construct
  misc_feature 1..28: note = Probe
  source 1..28: mol_type = other DNA
tcctcgttagtatagtggtgagtatccc

SEQ ID NO: 43666 - DNA, 30 bp, synthetic construct; identical to SEQ ID NO: 1701
  misc_feature 1..30: note = Probe
  source 1..30: mol_type = other DNA

SEQ ID NO: 43667 - DNA, 31 bp, synthetic construct; identical to SEQ ID NO: 1702
  misc_feature 1..31: note = Probe
  source 1..31: mol_type = other DNA

SEQ ID NO: 43668 - DNA, 32 bp, synthetic construct; identical to SEQ ID NO: 1703
  misc_feature 1..32: note = Probe
  source 1..32: mol_type = other DNA

SEQ ID NO: 43669 - DNA, 33 bp, synthetic construct; identical to SEQ ID NO: 1704
  misc_feature 1..33: note = Probe
  source 1..33: mol_type = other DNA

SEQ ID NO: 43670 - DNA, 34 bp, synthetic construct; identical to SEQ ID NO: 1705
  misc_feature 1..34: note = Probe
  source 1..34: mol_type = other DNA

SEQ ID NO: 43671 - DNA, 35 bp, synthetic construct; identical to SEQ ID NO: 1706
  misc_feature 1..35: note = Probe
  source 1..35: mol_type = other DNA

SEQ ID NO: 43672 - DNA, 36 bp, synthetic construct; identical to SEQ ID NO: 1707
  misc_feature 1..36: note = Probe
  source 1..36: mol_type = other DNA

SEQ ID NO: 43673 - DNA, 37 bp, synthetic construct; identical to SEQ ID NO: 1708
  misc_feature 1..37: note = Probe
  source 1..37: mol_type = other DNA

SEQ ID NO: 43674 - DNA, 50 bp, synthetic construct; identical to SEQ ID NO: 1711
  misc_feature 1..50: note = Probe
  source 1..50: mol_type = other DNA

SEQ ID NO: 43675 - DNA, 28 bp, synthetic construct
  misc_feature 1..28: note = Probe
  source 1..28: mol_type = other DNA
tcctcgttagtatagtggttagtatccc

SEQ ID NO: 43676 - DNA, 32 bp, synthetic construct; identical to SEQ ID NO: 1714
  misc_feature 1..32: note = Probe
  source 1..32: mol_type = other DNA

SEQ ID NO: 43677 - DNA, 33 bp, synthetic construct; identical to SEQ ID NO: 1715
  misc_feature 1..33: note = Probe
  source 1..33: mol_type = other DNA

SEQ ID NO: 43678 - DNA, 34 bp, synthetic construct; identical to SEQ ID NO: 1716
  misc_feature 1..34: note = Probe
  source 1..34: mol_type = other DNA

SEQ ID NO: 43679 - DNA, 35 bp, synthetic construct; identical to SEQ ID NO: 1717
  misc_feature 1..35: note = Probe
  source 1..35: mol_type = other DNA

SEQ ID NO: 43680 - DNA, 36 bp, synthetic construct; identical to SEQ ID NO: 1718
  misc_feature 1..36: note = Probe
  source 1..36: mol_type = other DNA

SEQ ID NO: 43681 - DNA, 19 bp, synthetic construct
  misc_feature 1..19: note = Probe
  source 1..19: mol_type = other DNA
tcgaatccgagtcacggca

SEQ ID NO: 43682 - DNA, 20 bp, synthetic construct
  misc_feature 1..20: note = Probe
  source 1..20: mol_type = other DNA
tcgactcccggtgtgggaac

SEQ ID NO: 43683 - DNA, 19 bp, synthetic construct
  misc_feature 1..19: note = Probe
  source 1..19: mol_type = other DNA
tcgatgcccgcatcctcca

SEQ ID NO: 43684 - DNA, 28 bp, synthetic construct
  misc_feature 1..28: note = Probe
  source 1..28: mol_type = other DNA
tcgcataaaacttaaaactttacagtca

SEQ ID NO: 43685 - DNA, 30 bp, synthetic construct; identical to SEQ ID NO: 24087
  misc_feature 1..30: note = Probe
  source 1..30: mol_type = other DNA

SEQ ID NO: 43686 - DNA, 22 bp, synthetic construct
  misc_feature 1..22: note = Probe
  source 1..22: mol_type = other DNA
tgaatccagcgatccgagttca

SEQ ID NO: 43687 - DNA, 32 bp, synthetic construct; identical to SEQ ID NO: 1736
  misc_feature 1..32: note = Probe
  source 1..32: mol_type = other DNA

SEQ ID NO: 43688 - DNA, 34 bp, synthetic construct; identical to SEQ ID NO: 1738
  misc_feature 1..34: note = Probe
  source 1..34: mol_type = other DNA

SEQ ID NO: 43689 - DNA, 37 bp, synthetic construct; identical to SEQ ID NO: 1741
  misc_feature 1..37: note = Probe
  source 1..37: mol_type = other DNA

SEQ ID NO: 43690 - DNA, 38 bp, synthetic construct; identical to SEQ ID NO: 1742
  misc_feature 1..38: note = Probe
  source 1..38: mol_type = other DNA

SEQ ID NO: 43691 - DNA, 32 bp, synthetic construct; identical to SEQ ID NO: 1745
  misc_feature 1..32: note = Probe
  source 1..32: mol_type = other DNA

SEQ ID NO: 43692 - DNA, 27 bp, synthetic construct
  misc_feature 1..27: note = Probe
  source 1..27: mol_type = other DNA
tgacccgggttcgattcccggccaacg

SEQ ID NO: 43693 - DNA, 26 bp, synthetic construct
  misc_feature 1..26: note = Probe
  source 1..26: mol_type = other DNA
tgagggttcgagtcccttcgtggtcg

SEQ ID NO: 43694 - DNA, 31 bp, synthetic construct; identical to SEQ ID NO: 8157
  misc_feature 1..31: note = Probe
  source 1..31: mol_type = other DNA

SEQ ID NO: 43695 - DNA, 21 bp, synthetic construct
  misc_feature 1..21: note = Probe
  source 1..21: mol_type = other DNA
tggtcgtggttgtagtccgtg

SEQ ID NO: 43696 - DNA, 23 bp, synthetic construct
  misc_feature 1..23: note = Probe
  source 1..23: mol_type = other DNA
tggtcgtggttgtagtccgtgcg

SEQ ID NO: 43697 - DNA, 25 bp, synthetic construct
  misc_feature 1..25: note = Probe
  source 1..25: mol_type = other DNA
tggtcgtggttgtagtccgtgcgag

SEQ ID NO: 43698 - DNA, 26 bp, synthetic construct
  misc_feature 1..26: note = Probe
  source 1..26: mol_type = other DNA
tggtcgtggttgtagtccgtgcgaga

SEQ ID NO: 43699 - DNA, 27 bp, synthetic construct
  misc_feature 1..27: note = Probe
  source 1..27: mol_type = other DNA
tggtcgtggttgtagtccgtgcgagaa

SEQ ID NO: 43700 - DNA, 17 bp, synthetic construct
  misc_feature 1..17: note = Probe
  source 1..17: mol_type = other DNA
tggttaggattcggcgc

SEQ ID NO: 43701 - DNA, 17 bp, synthetic construct
  misc_feature 1..17: note = Probe
  source 1..17: mol_type = other DNA
tggttagtactctgcgt

SEQ ID NO: 43702 - DNA, 19 bp, synthetic construct
  misc_feature 1..19: note = Probe
  source 1..19: mol_type = other DNA
tggttgtagtccgtgcgag

SEQ ID NO: 43703 - DNA, 18 bp, synthetic construct
  misc_feature 1..18: note = Probe
  source 1..18: mol_type = other DNA
tgtagcggttatcacatt

SEQ ID NO: 43704 - DNA, 23 bp, synthetic construct
  misc_feature 1..23: note = Probe
  source 1..23: mol_type = other DNA
tgtagcggttatcacattcgcct

SEQ ID NO: 43705 - DNA, 21 bp, synthetic construct
  misc_feature 1..21: note = Probe
  source 1..21: mol_type = other DNA
tgtcacgcgggagaccggggt

SEQ ID NO: 43706 - DNA, 36 bp, synthetic construct; identical to SEQ ID NO: 14453
  misc_feature 1..36: note = Probe
  source 1..36: mol_type = other DNA

SEQ ID NO: 43707 - DNA, 37 bp, synthetic construct; identical to SEQ ID NO: 14454
  misc_feature 1..37: note = Probe
  source 1..37: mol_type = other DNA

SEQ ID NO: 43708 - DNA, 38 bp, synthetic construct; identical to SEQ ID NO: 14455
  misc_feature 1..38: note = Probe
  source 1..38: mol_type = other DNA

SEQ ID NO: 43709 - DNA, 40 bp, synthetic construct; identical to SEQ ID NO: 1782
  misc_feature 1..40: note = Probe
  source 1..40: mol_type = other DNA

SEQ ID NO: 43710 - DNA, 26 bp, synthetic construct
  misc_feature 1..26: note = Probe
  source 1..26: mol_type = other DNA
tgtgagttcgagcctcacctggagca

SEQ ID NO: 43711 - DNA, 27 bp, synthetic construct
  misc_feature 1..27: note = Probe
  source 1..27: mol_type = other DNA
tgtttgtgggtttaagtcccattggtc

SEQ ID NO: 43712 - DNA, 28 bp, synthetic construct
  misc_feature 1..28: note = Probe
  source 1..28: mol_type = other DNA
tgtttgtgggtttaagtcccattggtct

SEQ ID NO: 43713 - DNA, 37 bp, synthetic construct; identical to SEQ ID NO: 1786
  misc_feature 1..37: note = Probe
  source 1..37: mol_type = other DNA

SEQ ID NO: 43714 - DNA, 36 bp, synthetic construct; identical to SEQ ID NO: 1789
  misc_feature 1..36: note = Probe
  source 1..36: mol_type = other DNA

SEQ ID NO: 43715 - DNA, 37 bp, synthetic construct; identical to SEQ ID NO: 1790
  misc_feature 1..37: note = Probe
  source 1..37: mol_type = other DNA

SEQ ID NO: 43716 - DNA, 38 bp, synthetic construct; identical to SEQ ID NO: 1791
  misc_feature 1..38: note = Probe
  source 1..38: mol_type = other DNA

SEQ ID NO: 43717 - DNA, 38 bp, synthetic construct; identical to SEQ ID NO: 24607
  misc_feature 1..38: note = Probe
  source 1..38: mol_type = other DNA

SEQ ID NO: 43718 - DNA, 39 bp, synthetic construct; identical to SEQ ID NO: 8348
  misc_feature 1..39: note = Probe
  source 1..39: mol_type = other DNA

SEQ ID NO: 43719 - DNA, 23 bp, synthetic construct
  misc_feature 1..23: note = Probe
  source 1..23: mol_type = other DNA
ttcaatccccggcacctccacca

SEQ ID NO: 43720 - DNA, 35 bp, synthetic construct; identical to SEQ ID NO: 1796
  misc_feature 1..35: note = Probe
  source 1..35: mol_type = other DNA

SEQ ID NO: 43721 - DNA, 18 bp, synthetic construct
  misc_feature 1..18: note = Probe
  source 1..18: mol_type = other DNA
ttcccattcttgcgaccc

SEQ ID NO: 43722 - DNA, 25 bp, synthetic construct
  misc_feature 1..25: note = Probe
  source 1..25: mol_type = other DNA
aaaaattttggtgcaactccaaata

SEQ ID NO: 43723 - DNA, 25 bp, synthetic construct
  misc_feature 1..25: note = Probe
  source 1..25: mol_type = other DNA
aaaacatcagattgtgaatctgaca

SEQ ID NO: 43724 - DNA, 28 bp, synthetic construct
  misc_feature 1..28: note = Probe
  source 1..28: mol_type = other DNA
aaaacatcagattgtgaatctgacaaca

SEQ ID NO: 43725 - DNA, 29 bp, synthetic construct
  misc_feature 1..29: note = Probe
  source 1..29: mol_type = other DNA
aaaacatcagattgtgaatctgacaacag

SEQ ID NO: 43726 - DNA, 30 bp, synthetic construct; identical to SEQ ID NO: 25958
  misc_feature 1..30: note = Probe
  source 1..30: mol_type = other DNA

SEQ ID NO: 43727 - DNA, 42 bp, synthetic construct; identical to SEQ ID NO: 14481
  misc_feature 1..42: note = Probe
  source 1..42: mol_type = other DNA

SEQ ID NO: 43728 - DNA, 43 bp, synthetic construct; identical to SEQ ID NO: 1
  misc_feature 1..43: note = Probe
  source 1..43: mol_type = other DNA

SEQ ID NO: 43729 - DNA, 49 bp, synthetic construct; identical to SEQ ID NO: 1812
  misc_feature 1..49: note = Probe
  source 1..49: mol_type = other DNA

SEQ ID NO: 43730 - DNA, 23 bp, synthetic construct
  misc_feature 1..23: note = Probe
  source 1..23: mol_type = other DNA
aaaacctttttccaaggacaaat

SEQ ID NO: 43731 - DNA, 50 bp, synthetic construct; identical to SEQ ID NO: 1818
  misc_feature 1..50: note = Probe
  source 1..50: mol_type = other DNA

SEQ ID NO: 43732 - DNA, 39 bp, synthetic construct; identical to SEQ ID NO: 6
  misc_feature 1..39: note = Probe
  source 1..39: mol_type = other DNA

SEQ ID NO: 43733 - DNA, 40 bp, synthetic construct; identical to SEQ ID NO: 7
  misc_feature 1..40: note = Probe
  source 1..40: mol_type = other DNA

SEQ ID NO: 43734 - DNA, 41 bp, synthetic construct; identical to SEQ ID NO: 1823
  misc_feature 1..41: note = Probe
  source 1..41: mol_type = other DNA

SEQ ID NO: 43735 - DNA, 42 bp, synthetic construct; identical to SEQ ID NO: 1824
  misc_feature 1..42: note = Probe
  source 1..42: mol_type = other DNA

SEQ ID NO: 43736 - DNA, 43 bp, synthetic construct; identical to SEQ ID NO: 1825
  misc_feature 1..43: note = Probe
  source 1..43: mol_type = other DNA

SEQ ID NO: 43737 - DNA, 44 bp, synthetic construct; identical to SEQ ID NO: 1826
  misc_feature 1..44: note = Probe
  source 1..44: mol_type = other DNA

SEQ ID NO: 43738 - DNA, 45 bp, synthetic construct; identical to SEQ ID NO: 1827
  misc_feature 1..45: note = Probe
  source 1..45: mol_type = other DNA

SEQ ID NO: 43739 - DNA, 46 bp, synthetic construct; identical to SEQ ID NO: 1828
  misc_feature 1..46: note = Probe
  source 1..46: mol_type = other DNA

SEQ ID NO: 43740 - DNA, 50 bp, synthetic construct; identical to SEQ ID NO: 1830
  misc_feature 1..50: note = Probe
  source 1..50: mol_type = other DNA

SEQ ID NO: 43741 - DNA, 33 bp, synthetic construct; identical to SEQ ID NO: 9
  misc_feature 1..33: note = Probe
  source 1..33: mol_type = other DNA

SEQ ID NO: 43742 - DNA, 38 bp, synthetic construct; identical to SEQ ID NO: 1833
  misc_feature 1..38: note = Probe
  source 1..38: mol_type = other DNA

SEQ ID NO: 43743 - DNA, 40 bp, synthetic construct; identical to SEQ ID NO: 1835
  misc_feature 1..40: note = Probe
  source 1..40: mol_type = other DNA

SEQ ID NO: 43744 - DNA, 42 bp, synthetic construct; identical to SEQ ID NO: 1837
  misc_feature 1..42: note = Probe
  source 1..42: mol_type = other DNA

SEQ ID NO: 43745 - DNA, 50 bp, synthetic construct; identical to SEQ ID NO: 1838
  misc_feature 1..50: note = Probe
  source 1..50: mol_type = other DNA

SEQ ID NO: 43746 - DNA, 30 bp, synthetic construct
  misc_feature 1..30: note = Probe
  source 1..30: mol_type = other DNA
aaaatgtttagacgggctcacatcacccca

SEQ ID NO: 43747 - DNA, 32 bp, synthetic construct; identical to SEQ ID NO: 25996
  misc_feature 1..32: note = Probe
  source 1..32: mol_type = other DNA

SEQ ID NO: 43748 - DNA, 37 bp, synthetic construct
  misc_feature 1..37: note = Probe
  source 1..37: mol_type = other DNA
aaaatgtttagacgggctcacatcaccccataaacaa

SEQ ID NO: 43749 - DNA, 38 bp, synthetic construct; identical to SEQ ID NO: 14509
  misc_feature 1..38: note = Probe
  source 1..38: mol_type = other DNA

SEQ ID NO: 43750 - DNA, 39 bp, synthetic construct; identical to SEQ ID NO: 1841
  misc_feature 1..39: note = Probe
  source 1..39: mol_type = other DNA

SEQ ID NO: 43751 - DNA, 40 bp, synthetic construct; identical to SEQ ID NO: 1842
  misc_feature 1..40: note = Probe
  source 1..40: mol_type = other DNA

SEQ ID NO: 43752 - DNA, 41 bp, synthetic construct; identical to SEQ ID NO: 14512
  misc_feature 1..41: note = Probe
  source 1..41: mol_type = other DNA

SEQ ID NO: 43753 - DNA, 50 bp, synthetic construct; identical to SEQ ID NO: 1846
  misc_feature 1..50: note = Probe
  source 1..50: mol_type = other DNA

SEQ ID NO: 43754 - DNA, 24 bp, synthetic construct
  misc_feature 1..24: note = Probe
  source 1..24: mol_type = other DNA
aaacatcagattgtgaatctgaca

SEQ ID NO: 43755 - DNA, 26 bp, synthetic construct
  misc_feature 1..26: note = Probe
  source 1..26: mol_type = other DNA
aaacatcagattgtgaatctgacaac

SEQ ID NO: 43756 - DNA, 27 bp, synthetic construct
  misc_feature 1..27: note = Probe
  source 1..27: mol_type = other DNA
aaacatcagattgtgaatctgacaaca

SEQ ID NO: 43757 - DNA, 28 bp, synthetic construct
  misc_feature 1..28: note = Probe
  source 1..28: mol_type = other DNA
aaacatcagattgtgaatctgacaacag

SEQ ID NO: 43758 - DNA, 29 bp, synthetic construct
  misc_feature 1..29: note = Probe
  source 1..29: mol_type = other DNA
aaacatcagattgtgaatctgacaacaga

SEQ ID NO: 43759 - DNA, 30 bp, synthetic construct; identical to SEQ ID NO: 8867
  misc_feature 1..30: note = Probe
  source 1..30: mol_type = other DNA

SEQ ID NO: 43760 - DNA, 31 bp, synthetic construct; identical to SEQ ID NO: 26009
  misc_feature 1..31: note = Probe
  source 1..31: mol_type = other DNA

SEQ ID NO: 43761 - DNA, 37 bp, synthetic construct; identical to SEQ ID NO: 14525
  misc_feature 1..37: note = Probe
  source 1..37: mol_type = other DNA

SEQ ID NO: 43762 - DNA, 38 bp, synthetic construct; identical to SEQ ID NO: 14526
  misc_feature 1..38: note = Probe
  source 1..38: mol_type = other DNA

SEQ ID NO: 43763 - DNA, 41 bp, synthetic construct; identical to SEQ ID NO: 24849
  misc_feature 1..41: note = Probe
  source 1..41: mol_type = other DNA

SEQ ID NO: 43764 - DNA, 42 bp, synthetic construct; identical to SEQ ID NO: 14527
  misc_feature 1..42: note = Probe
  source 1..42: mol_type = other DNA

SEQ ID NO: 43765 - DNA, 44 bp, synthetic construct; identical to SEQ ID NO: 12
  misc_feature 1..44: note = Probe
  source 1..44: mol_type = other DNA

SEQ ID NO: 43766 - DNA, 45 bp, synthetic construct; identical to SEQ ID NO: 13
  misc_feature 1..45: note = Probe
  source 1..45: mol_type = other DNA

SEQ ID NO: 43767 - DNA, 16 bp, synthetic construct
  misc_feature 1..16: note = Probe
  source 1..16: mol_type = other DNA
aaaccatttcataact

SEQ ID NO: 43768 - DNA, 21 bp, synthetic construct
  misc_feature 1..21: note = Probe
  source 1..21: mol_type = other DNA
aaaccatttcataactttgtc

SEQ ID NO: 43769 - DNA, 24 bp, synthetic construct
  misc_feature 1..24: note = Probe
  source 1..24: mol_type = other DNA
aaaccatttcataactttgtcaaa

SEQ ID NO: 43770 - DNA, 25 bp, synthetic construct
  misc_feature 1..25: note = Probe
  source 1..25: mol_type = other DNA
aaaccatttcataactttgtcaaag

SEQ ID NO: 43771 - DNA, 26 bp, synthetic construct
  misc_feature 1..26: note = Probe
  source 1..26: mol_type = other DNA
aaaccatttcataactttgtcaaagt

SEQ ID NO: 43772 - DNA, 28 bp, synthetic construct
  misc_feature 1..28: note = Probe
  source 1..28: mol_type = other DNA
aaaccatttcataactttgtcaaagtta

SEQ ID NO: 43773 - DNA, 30 bp, synthetic construct; identical to SEQ ID NO: 1865
  misc_feature 1..30: note = Probe
  source 1..30: mol_type = other DNA

SEQ ID NO: 43774 - DNA, 45 bp, synthetic construct; identical to SEQ ID NO: 1868
  misc_feature 1..45: note = Probe
  source 1..45: mol_type = other DNA

SEQ ID NO: 43775 - DNA, 46 bp, synthetic construct; identical to SEQ ID NO: 1869
  misc_feature 1..46: note = Probe
  source 1..46: mol_type = other DNA

SEQ ID NO: 43776 - DNA, 49 bp, synthetic construct; identical to SEQ ID NO: 1870
  misc_feature 1..49: note = Probe
  source 1..49: mol_type = other DNA

SEQ ID NO: 43777 - DNA, 50 bp, synthetic construct; identical to SEQ ID NO: 1871
  misc_feature 1..50: note = Probe
  source 1..50: mol_type = other DNA

SEQ ID NO: 43778 - DNA, 19 bp, synthetic construct
  misc_feature 1..19: note = Probe
  source 1..19: mol_type = other DNA
aaacccccttatttctagg

SEQ ID NO: 43779 - DNA, 32 bp, synthetic construct; identical to SEQ ID NO: 15
  misc_feature 1..32: note = Probe
  source 1..32: mol_type = other DNA

SEQ ID NO: 43780 - DNA, 34 bp, synthetic construct; identical to SEQ ID NO: 1875
  misc_feature 1..34: note = Probe
  source 1..34: mol_type = other DNA

SEQ ID NO: 43781 - DNA, 35 bp, synthetic construct; identical to SEQ ID NO: 1876
  misc_feature 1..35: note = Probe
  source 1..35: mol_type = other DNA

SEQ ID NO: 43782 - DNA, 19 bp, synthetic construct
  misc_feature 1..19: note = Probe
  source 1..19: mol_type = other DNA
aaaccgggcggaaacacct

SEQ ID NO: 43783 - DNA, 20 bp, synthetic construct
  misc_feature 1..20: note = Probe
  source 1..20: mol_type = other DNA
aaaccgggcggaaacacgtt

SEQ ID NO: 43784 - DNA, 20 bp, synthetic construct
  misc_feature 1..20: note = Probe
  source 1..20: mol_type = other DNA
aaaccgggcggaaacaggta

SEQ ID NO: 43785 - DNA, 18 bp, synthetic construct
  misc_feature 1..18: note = Probe
  source 1..18: mol_type = other DNA
aaacctagccccaaaccc

SEQ ID NO: 43786 - DNA, 24 bp, synthetic construct
  misc_feature 1..24: note = Probe
  source 1..24: mol_type = other DNA
aaacctagccccaaacccactcca

SEQ ID NO: 43787 - DNA, 26 bp, synthetic construct
  misc_feature 1..26: note = Probe
  source 1..26: mol_type = other DNA
aaacctagccccaaacccactccacc

SEQ ID NO: 43788 - DNA, 27 bp, synthetic construct
  misc_feature 1..27: note = Probe
  source 1..27: mol_type = other DNA
aaacctagccccaaacccactccacct

SEQ ID NO: 43789 - DNA, 28 bp, synthetic construct
  misc_feature 1..28: note = Probe
  source 1..28: mol_type = other DNA
aaacctgccggggcttctcccgcctttt

SEQ ID NO: 43790 - DNA, 33 bp, synthetic construct; identical to SEQ ID NO: 14551
  misc_feature 1..33: note = Probe
  source 1..33: mol_type = other DNA

SEQ ID NO: 43791 - DNA, 45 bp, synthetic construct; identical to SEQ ID NO: 1883
  misc_feature 1..45: note = Probe
  source 1..45: mol_type = other DNA

SEQ ID NO: 43792 - DNA, 49 bp, synthetic construct; identical to SEQ ID NO: 1884
  misc_feature 1..49: note = Probe
  source 1..49: mol_type = other DNA

SEQ ID NO: 43793 - DNA, 50 bp, synthetic construct; identical to SEQ ID NO: 1885
  misc_feature 1..50: note = Probe
  source 1..50: mol_type = other DNA

SEQ ID NO: 43794 - DNA, 40 bp, synthetic construct; identical to SEQ ID NO: 1886
  misc_feature 1..40: note = Probe
  source 1..40: mol_type = other DNA

SEQ ID NO: 43795 - DNA, 43 bp, synthetic construct
  misc_feature 1..43: note = Probe
  source 1..43: mol_type = other DNA
aaacttaaaactttacagtcagaggttcaattcctcttcttaa

SEQ ID NO: 43796 - DNA, 44 bp, synthetic construct; identical to SEQ ID NO: 1888
  misc_feature 1..44: note = Probe
  source 1..44: mol_type = other DNA

SEQ ID NO: 43797 - DNA, 50 bp, synthetic construct; identical to SEQ ID NO: 1890
  misc_feature 1..50: note = Probe
  source 1..50: mol_type = other DNA

SEQ ID NO: 43798 - DNA, 32 bp, synthetic construct; identical to SEQ ID NO: 17
  misc_feature 1..32: note = Probe
  source 1..32: mol_type = other DNA

SEQ ID NO: 43799 - DNA, 35 bp, synthetic construct; identical to SEQ ID NO: 1894
  misc_feature 1..35: note = Probe
  source 1..35: mol_type = other DNA

SEQ ID NO: 43800 - DNA, 38 bp, synthetic construct; identical to SEQ ID NO: 1895
  misc_feature 1..38: note = Probe
  source 1..38: mol_type = other DNA

SEQ ID NO: 43801 - DNA, 40 bp, synthetic construct; identical to SEQ ID NO: 1897
  misc_feature 1..40: note = Probe
  source 1..40: mol_type = other DNA

SEQ ID NO: 43802 - DNA, 41 bp, synthetic construct; identical to SEQ ID NO: 1898
  misc_feature 1..41: note = Probe
  source 1..41: mol_type = other DNA

SEQ ID NO: 43803 - DNA, 16 bp, synthetic construct
  misc_feature 1..16: note = Probe
  source 1..16: mol_type = other DNA
aaagacaccccccaca

SEQ ID NO: 43804 - DNA, 35 bp, synthetic construct; identical to SEQ ID NO: 1910
  misc_feature 1..35: note = Probe
  source 1..35: mol_type = other DNA

SEQ ID NO: 43805 - DNA, 46 bp, synthetic construct; identical to SEQ ID NO: 1916
  misc_feature 1..46: note = Probe
  source 1..46: mol_type = other DNA

SEQ ID NO: 43806 - DNA, 50 bp, synthetic construct; identical to SEQ ID NO: 1918
  misc_feature 1..50: note = Probe
  source 1..50: mol_type = other DNA

SEQ ID NO: 43807 - DNA, 20 bp, synthetic construct
  misc_feature 1..20: note = Probe
  source 1..20: mol_type = other DNA
aaagacaggggttaggcctc

SEQ ID NO: 43808 - DNA, 24 bp, synthetic construct
  misc_feature 1..24: note = Probe
  source 1..24: mol_type = other DNA
aaagacaggggttaggcctctttt

SEQ ID NO: 43809 - DNA, 28 bp, synthetic construct
  misc_feature 1..28: note = Probe
  source 1..28: mol_type = other DNA
aaagacaggggttaggcctctttttacc

SEQ ID NO: 43810 - DNA, 29 bp, synthetic construct
  misc_feature 1..29: note = Probe
  source 1..29: mol_type = other DNA
aaagacaggggttaggcctctttttacca

SEQ ID NO: 43811 - DNA, 31 bp, synthetic construct; identical to SEQ ID NO: 1924
  misc_feature 1..31: note = Probe
  source 1..31: mol_type = other DNA

SEQ ID NO: 43812 - DNA, 32 bp, synthetic construct; identical to SEQ ID NO: 1925
  misc_feature 1..32: note = Probe
  source 1..32: mol_type = other DNA

SEQ ID NO: 43813 - DNA, 50 bp, synthetic construct; identical to SEQ ID NO: 14605
  misc_feature 1..50: note = Probe
  source 1..50: mol_type = other DNA

SEQ ID NO: 43814 - DNA, 32 bp, synthetic construct; identical to SEQ ID NO: 14607
  misc_feature 1..32: note = Probe
  source 1..32: mol_type = other DNA

SEQ ID NO: 43815 - DNA, 33 bp, synthetic construct; identical to SEQ ID NO: 1926
  misc_feature 1..33: note = Probe
  source 1..33: mol_type = other DNA

SEQ ID NO: 43816 - DNA, 34 bp, synthetic construct; identical to SEQ ID NO: 1927
  misc_feature 1..34: note = Probe
  source 1..34: mol_type = other DNA

SEQ ID NO: 43817 - DNA, 35 bp, synthetic construct; identical to SEQ ID NO: 1928
  misc_feature 1..35: note = Probe
  source 1..35: mol_type = other DNA

SEQ ID NO: 43818 - DNA, 36 bp, synthetic construct; identical to SEQ ID NO: 1929
  misc_feature 1..36: note = Probe
  source 1..36: mol_type = other DNA

SEQ ID NO: 43819 - DNA, 37 bp, synthetic construct; identical to SEQ ID NO: 1930
  misc_feature 1..37: note = Probe
  source 1..37: mol_type = other DNA

SEQ ID NO: 43820 - DNA, 44 bp, synthetic construct; identical to SEQ ID NO: 22
  misc_feature 1..44: note = Probe
  source 1..44: mol_type = other DNA

SEQ ID NO: 43821 - DNA, 49 bp, synthetic construct; identical to SEQ ID NO: 24
  misc_feature 1..49: note = Probe
  source 1..49: mol_type = other DNA

SEQ ID NO: 43822 - DNA, 25 bp, synthetic construct
  misc_feature 1..25: note = Probe
  source 1..25: mol_type = other DNA
aaagcacccaacttacacttaggag

SEQ ID NO: 43823 - DNA, 26 bp, synthetic construct
  misc_feature 1..26: note = Probe
  source 1..26: mol_type = other DNA
aaagcacccaacttacacttaggaga

SEQ ID NO: 43824 - DNA, 27 bp, synthetic construct
  misc_feature 1..27: note = Probe
  source 1..27: mol_type = other DNA
aaagcacccaacttacacttaggagat

SEQ ID NO: 43825 - DNA, 31 bp, synthetic construct; identical to SEQ ID NO: 1954
  misc_feature 1..31: note = Probe
  source 1..31: mol_type = other DNA

SEQ ID NO: 43826 - DNA, 44 bp, synthetic construct
  misc_feature 1..44: note = Probe
  source 1..44: mol_type = other DNA
aaagcacccaacttacacttaggagatttcaacttaacttgacc

SEQ ID NO: 43827 - DNA, 45 bp, synthetic construct; identical to SEQ ID NO: 1959
  misc_feature 1..45: note = Probe
  source 1..45: mol_type = other DNA

SEQ ID NO: 43828 - DNA, 50 bp, synthetic construct; identical to SEQ ID NO: 1962
  misc_feature 1..50: note = Probe
  source 1..50: mol_type = other DNA

SEQ ID NO: 43829 - DNA, 50 bp, synthetic construct; identical to SEQ ID NO: 1965
  misc_feature 1..50: note = Probe
  source 1..50: mol_type = other DNA

SEQ ID NO: 43830 - DNA, 25 bp, synthetic construct
  misc_feature 1..25: note = Probe
  source 1..25: mol_type = other DNA
aaagctcacaagaactgctaactca

SEQ ID NO: 43831 - DNA, 27 bp, synthetic construct
  misc_feature 1..27: note = Probe
  source 1..27: mol_type = other DNA
aaagctcacaagaactgctaactcatg

SEQ ID NO: 43832 - DNA, 50 bp, synthetic construct; identical to SEQ ID NO: 32
  misc_feature 1..50: note = Probe
  source 1..50: mol_type = other DNA

SEQ ID NO: 43833 - DNA, 30 bp, synthetic construct; identical to SEQ ID NO: 14643
  misc_feature 1..30: note = Probe
  source 1..30: mol_type = other DNA

SEQ ID NO: 43834 - DNA, 29 bp, synthetic construct
  misc_feature 1..29: note = Probe
  source 1..29: mol_type = other DNA
aaaggttggtggttcgagcccacccaggg

SEQ ID NO: 43835 - DNA, 32 bp, synthetic construct; identical to SEQ ID NO: 14644
  misc_feature 1..32: note = Probe
  source 1..32: mol_type = other DNA

SEQ ID NO: 43836 - DNA, 33 bp, synthetic construct
  misc_feature 1..33: note = Probe
  source 1..33: mol_type = other DNA
aaaggttggtggttcgagcccacccagggacgc

SEQ ID NO: 43837 - DNA, 35 bp, synthetic construct; identical to SEQ ID NO: 14646
  misc_feature 1..35: note = Probe
  source 1..35: mol_type = other DNA

SEQ ID NO: 43838 - DNA, 30 bp, synthetic construct; identical to SEQ ID NO: 1972
  misc_feature 1..30: note = Probe
  source 1..30: mol_type = other DNA

SEQ ID NO: 43839 - DNA, 32 bp, synthetic construct; identical to SEQ ID NO: 1973
  misc_feature 1..32: note = Probe
  source 1..32: mol_type = other DNA

SEQ ID NO: 43840 - DNA, 21 bp, synthetic construct
  misc_feature 1..21: note = Probe
  source 1..21: mol_type = other DNA
aaataagctatcgggcccata

SEQ ID NO: 43841 - DNA, 24 bp, synthetic construct
  misc_feature 1..24: note = Probe
  source 1..24: mol_type = other DNA
aaataagctatcgggcccataccc

SEQ ID NO: 43842 - DNA, 28 bp, synthetic construct
  misc_feature 1..28: note = Probe
  source 1..28: mol_type = other DNA
aaataagctatcgggcccataccccgaa

SEQ ID NO: 43843 - DNA, 29 bp, synthetic construct
  misc_feature 1..29: note = Probe
  source 1..29: mol_type = other DNA
aaataagctatcgggcccataccccgaaa

SEQ ID NO: 43844 - DNA, 30 bp, synthetic construct; identical to SEQ ID NO: 1982
  misc_feature 1..30: note = Probe
  source 1..30: mol_type = other DNA

SEQ ID NO: 43845 - DNA, 31 bp, synthetic construct; identical to SEQ ID NO: 1983
  misc_feature 1..31: note = Probe
  source 1..31: mol_type = other DNA

SEQ ID NO: 43846 - DNA, 32 bp, synthetic construct; identical to SEQ ID NO: 1984
  misc_feature 1..32: note = Probe
  source 1..32: mol_type = other DNA

SEQ ID NO: 43847 - DNA, 37 bp, synthetic construct; identical to SEQ ID NO: 14669
  misc_feature 1..37: note = Probe
  source 1..37: mol_type = other DNA

SEQ ID NO: 43848 - DNA, 50 bp, synthetic construct; identical to SEQ ID NO: 1989
  misc_feature 1..50: note = Probe
  source 1..50: mol_type = other DNA

SEQ ID NO: 43849 - DNA, 32 bp, synthetic construct
  misc_feature 1..32: note = Probe
  source 1..32: mol_type = other DNA
aaataataggagcttaaacccccttatttcta

SEQ ID NO: 43850 - DNA, 45 bp, synthetic construct; identical to SEQ ID NO: 26126
  misc_feature 1..45: note = Probe
  source 1..45: mol_type = other DNA

SEQ ID NO: 43851 - DNA, 50 bp, synthetic construct; identical to SEQ ID NO: 26127
  misc_feature 1..50: note = Probe
  source 1..50: mol_type = other DNA

SEQ ID NO: 43852 - DNA, 20 bp, synthetic construct
  misc_feature 1..20: note = Probe
  source 1..20: mol_type = other DNA
aaatcccggacgagccccct

SEQ ID NO: 43853 - DNA, 20 bp, synthetic construct
  misc_feature 1..20: note = Probe
  source 1..20: mol_type = other DNA
aaatccgggtgccccctcaa

SEQ ID NO: 43854 - DNA, 35 bp, synthetic construct; identical to SEQ ID NO: 34
  misc_feature 1..35: note = Probe
  source 1..35: mol_type = other DNA

SEQ ID NO: 43855 - DNA, 36 bp, synthetic construct; identical to SEQ ID NO: 2000
  misc_feature 1..36: note = Probe
  source 1..36: mol_type = other DNA

SEQ ID NO: 43856 - DNA, 37 bp, synthetic construct; identical to SEQ ID NO: 2001
  misc_feature 1..37: note = Probe
  source 1..37: mol_type = other DNA

SEQ ID NO: 43857 - DNA, 38 bp, synthetic construct; identical to SEQ ID NO: 2002
  misc_feature 1..38: note = Probe
  source 1..38: mol_type = other DNA

SEQ ID NO: 43858 - DNA, 39 bp, synthetic construct; identical to SEQ ID NO: 2003
  misc_feature 1..39: note = Probe
  source 1..39: mol_type = other DNA

SEQ ID NO: 43859 - DNA, 25 bp, synthetic construct
  misc_feature 1..25: note = Probe
  source 1..25: mol_type = other DNA
aaatgttggttatacccttcccgta

SEQ ID NO: 43860 - DNA, 37 bp, synthetic construct; identical to SEQ ID NO: 14684
  misc_feature 1..37: note = Probe
  source 1..37: mol_type = other DNA

SEQ ID NO: 43861 - DNA, 38 bp, synthetic construct; identical to SEQ ID NO: 14685
  misc_feature 1..38: note = Probe
  source 1..38: mol_type = other DNA

SEQ ID NO: 43862 - DNA, 50 bp, synthetic construct; identical to SEQ ID NO: 36
  misc_feature 1..50: note = Probe
  source 1..50: mol_type = other DNA

SEQ ID NO: 43863 - DNA, 38 bp, synthetic construct; identical to SEQ ID NO: 2008
  misc_feature 1..38: note = Probe
  source 1..38: mol_type = other DNA

SEQ ID NO: 43864 - DNA, 39 bp, synthetic construct; identical to SEQ ID NO: 2009
  misc_feature 1..39: note = Probe
  source 1..39: mol_type = other DNA

SEQ ID NO: 43865 - DNA, 49 bp, synthetic construct; identical to SEQ ID NO: 2012
  misc_feature 1..49: note = Probe
  source 1..49: mol_type = other DNA

SEQ ID NO: 43866 - DNA, 50 bp, synthetic construct; identical to SEQ ID NO: 2013
  misc_feature 1..50: note = Probe
  source 1..50: mol_type = other DNA

SEQ ID NO: 43867 - DNA, 20 bp, synthetic construct
  misc_feature 1..20: note = Probe
  source 1..20: mol_type = other DNA
aacaacatggctttctcaac

SEQ ID NO: 43868 - DNA, 16 bp, synthetic construct
  misc_feature 1..16: note = Probe
  source 1..16: mol_type = other DNA
aacacaaagcacccaa

SEQ ID NO: 43869 - DNA, 17 bp, synthetic construct
  misc_feature 1..17: note = Probe
  source 1..17: mol_type = other DNA
aacacaaagcacccaac

SEQ ID NO: 43870 - DNA, 18 bp, synthetic construct
  misc_feature 1..18: note = Probe
  source 1..18: mol_type = other DNA
aacacaaagcacccaact

SEQ ID NO: 43871 - DNA, 19 bp, synthetic construct
  misc_feature 1..19: note = Probe
  source 1..19: mol_type = other DNA
aacacaaagcacccaactt

SEQ ID NO: 43872 - DNA, 20 bp, synthetic construct
  misc_feature 1..20: note = Probe
  source 1..20: mol_type = other DNA
aacacaaagcacccaactta

SEQ ID NO: 43873 - DNA, 22 bp, synthetic construct
  misc_feature 1..22: note = Probe
  source 1..22: mol_type = other DNA
aacacaaagcacccaacttaca

SEQ ID NO: 43874 - DNA, 24 bp, synthetic construct
  misc_feature 1..24: note = Probe
  source 1..24: mol_type = other DNA
aacacaaagcacccaacttacact

SEQ ID NO: 43875 - DNA, 25 bp, synthetic construct
  misc_feature 1..25: note = Probe
  source 1..25: mol_type = other DNA
aacacaaagcacccaacttacactt

SEQ ID NO: 43876 - DNA, 26 bp, synthetic construct
  misc_feature 1..26: note = Probe
  source 1..26: mol_type = other DNA
aacacaaagcacccaacttacactta

SEQ ID NO: 43877 - DNA, 27 bp, synthetic construct
  misc_feature 1..27: note = Probe
  source 1..27: mol_type = other DNA
aacacaaagcacccaacttacacttag

SEQ ID NO: 43878 - DNA, 28 bp, synthetic construct
  misc_feature 1..28: note = Probe
  source 1..28: mol_type = other DNA
aacacaaagcacccaacttacacttagg

SEQ ID NO: 43879 - DNA, 29 bp, synthetic construct
  misc_feature 1..29: note = Probe
  source 1..29: mol_type = other DNA
aacacaaagcacccaacttacacttagga

SEQ ID NO: 43880 - DNA, 30 bp, synthetic construct; identical to SEQ ID NO: 2027
  misc_feature 1..30: note = Probe
  source 1..30: mol_type = other DNA

SEQ ID NO: 43881 - DNA, 31 bp, synthetic construct; identical to SEQ ID NO: 2028
  misc_feature 1..31: note = Probe
  source 1..31: mol_type = other DNA

SEQ ID NO: 43882 - DNA, 32 bp, synthetic construct; identical to SEQ ID NO: 2029
  misc_feature 1..32: note = Probe
  source 1..32: mol_type = other DNA

SEQ ID NO: 43883 - DNA, 33 bp, synthetic construct; identical to SEQ ID NO: 2030
  misc_feature 1..33: note = Probe
  source 1..33: mol_type = other DNA

SEQ ID NO: 43884 - DNA, 35 bp, synthetic construct
  misc_feature 1..35: note = Probe
  source 1..35: mol_type = other DNA
aacacaaagcacccaacttacacttaggagatttc

SEQ ID NO: 43885 - DNA, 36 bp, synthetic construct; identical to SEQ ID NO: 2031
  misc_feature 1..36: note = Probe
  source 1..36: mol_type = other DNA

SEQ ID NO: 43886 - DNA, 38 bp, synthetic construct; identical to SEQ ID NO: 2033
  misc_feature 1..38: note = Probe
  source 1..38: mol_type = other DNA

SEQ ID NO: 43887 - DNA, 40 bp, synthetic construct; identical to SEQ ID NO: 2035
  misc_feature 1..40: note = Probe
  source 1..40: mol_type = other DNA

SEQ ID NO: 43888 - DNA, 41 bp, synthetic construct; identical to SEQ ID NO: 37
  misc_feature 1..41: note = Probe
  source 1..41: mol_type = other DNA

SEQ ID NO: 43889 - DNA, 44 bp, synthetic construct
  misc_feature 1..44: note = Probe
  source 1..44: mol_type = other DNA
aacacaaagcacccaacttacacttaggagatttcaacttaact

SEQ ID NO: 43890 - DNA, 45 bp, synthetic construct
  misc_feature 1..45: note = Probe
  source 1..45: mol_type = other DNA
aacacaaagcacccaacttacacttaggagatttcaacttaactt

SEQ ID NO: 43891 - DNA, 49 bp, synthetic construct; identical to SEQ ID NO: 2036
  misc_feature 1..49: note = Probe
  source 1..49: mol_type = other DNA

SEQ ID NO: 43892 - DNA, 17 bp, synthetic construct
  misc_feature 1..17: note = Probe
  source 1..17: mol_type = other DNA
aacacctctttacagtg

SEQ ID NO: 43893 - DNA, 18 bp, synthetic construct
  misc_feature 1..18: note = Probe
  source 1..18: mol_type = other DNA
aacacctctttacagtga

SEQ ID NO: 43894 - DNA, 19 bp, synthetic construct
  misc_feature 1..19: note = Probe
  source 1..19: mol_type = other DNA
aacacctctttacagtgaa

SEQ ID NO: 43895 - DNA, 20 bp, synthetic construct
  misc_feature 1..20: note = Probe
  source 1..20: mol_type = other DNA
aacacctctttacagtgaaa

SEQ ID NO: 43896 - DNA, 21 bp, synthetic construct
  misc_feature 1..21: note = Probe
  source 1..21: mol_type = other DNA
aacacctctttacagtgaaat

SEQ ID NO: 43897 - DNA, 36 bp, synthetic construct
  misc_feature 1..36: note = Probe
  source 1..36: mol_type = other DNA
aacacgcgaaaggtccccggttcgaaaccgggcgga

SEQ ID NO: 43898 - DNA, 28 bp, synthetic construct
  misc_feature 1..28: note = Probe
  source 1..28: mol_type = other DNA
aacagaggcttacgaccccttatttacc

SEQ ID NO: 43899 - DNA, 29 bp, synthetic construct
  misc_feature 1..29: note = Probe
  source 1..29: mol_type = other DNA
aacagaggcttacgaccccttatttaccg

SEQ ID NO: 43900 - DNA, 31 bp, synthetic construct; identical to SEQ ID NO: 2039
  misc_feature 1..31: note = Probe
  source 1..31: mol_type = other DNA

SEQ ID NO: 43901 - DNA, 17 bp, synthetic construct
  misc_feature 1..17: note = Probe
  source 1..17: mol_type = other DNA
aacagctaaggactgca

SEQ ID NO: 43902 - DNA, 25 bp, synthetic construct
  misc_feature 1..25: note = Probe
  source 1..25: mol_type = other DNA
aacagctaaggactgcaaaacccca

SEQ ID NO: 43903 - DNA, 27 bp, synthetic construct
  misc_feature 1..27: note = Probe
  source 1..27: mol_type = other DNA
aacagctaaggactgcaaaaccccact

SEQ ID NO: 43904 - DNA, 28 bp, synthetic construct
  misc_feature 1..28: note = Probe
  source 1..28: mol_type = other DNA
aacagctaaggactgcaaaaccccactc

SEQ ID NO: 43905 - DNA, 29 bp, synthetic construct
  misc_feature 1..29: note = Probe
  source 1..29: mol_type = other DNA
aacagctaaggactgcaaaaccccactct

SEQ ID NO: 43906 - DNA, 17 bp, synthetic construct
  misc_feature 1..17: note = Probe
  source 1..17: mol_type = other DNA
aacagctatccattggt

SEQ ID NO: 43907 - DNA, 27 bp, synthetic construct
  misc_feature 1..27: note = Probe
  source 1..27: mol_type = other DNA
aacagctatccattggtcttaggcccc

SEQ ID NO: 43908 - DNA, 29 bp, synthetic construct
  misc_feature 1..29: note = Probe
  source 1..29: mol_type = other DNA
aacagctatccattggtcttaggccccaa

SEQ ID NO: 43909 - DNA, 50 bp, synthetic construct; identical to SEQ ID NO: 2044
  misc_feature 1..50: note = Probe
  source 1..50: mol_type = other DNA

SEQ ID NO: 43910 - DNA, 33 bp, synthetic construct; identical to SEQ ID NO: 2047
  misc_feature 1..33: note = Probe
  source 1..33: mol_type = other DNA

SEQ ID NO: 43911 - DNA, 34 bp, synthetic construct; identical to SEQ ID NO: 2048
  misc_feature 1..34: note = Probe
  source 1..34: mol_type = other DNA

SEQ ID NO: 43912 - DNA, 35 bp, synthetic construct; identical to SEQ ID NO: 14750
  misc_feature 1..35: note = Probe
  source 1..35: mol_type = other DNA

SEQ ID NO: 43913 - DNA, 36 bp, synthetic construct; identical to SEQ ID NO: 2049
  misc_feature 1..36: note = Probe
  source 1..36: mol_type = other DNA

SEQ ID NO: 43914 - DNA, 39 bp, synthetic construct; identical to SEQ ID NO: 2051
  misc_feature 1..39: note = Probe
  source 1..39: mol_type = other DNA

SEQ ID NO: 43915 - DNA, 23 bp, synthetic construct
  misc_feature 1..23: note = Probe
  source 1..23: mol_type = other DNA
aacatcagattgtgaatctgaca

SEQ ID NO: 43916 - DNA, 26 bp, synthetic construct
  misc_feature 1..26: note = Probe
  source 1..26: mol_type = other DNA
aacatcagattgtgaatctgacaaca

SEQ ID NO: 43917 - DNA, 27 bp, synthetic construct
  misc_feature 1..27: note = Probe
  source 1..27: mol_type = other DNA
aacatcagattgtgaatctgacaacag

SEQ ID NO: 43918 - DNA, 28 bp, synthetic construct
  misc_feature 1..28: note = Probe
  source 1..28: mol_type = other DNA
aacatcagattgtgaatctgacaacaga

SEQ ID NO: 43919 - DNA, 37 bp, synthetic construct; identical to SEQ ID NO: 14758
  misc_feature 1..37: note = Probe
  source 1..37: mol_type = other DNA

SEQ ID NO: 43920 - DNA, 40 bp, synthetic construct; identical to SEQ ID NO: 24875
  misc_feature 1..40: note = Probe
  source 1..40: mol_type = other DNA

SEQ ID NO: 43921 - DNA, 41 bp, synthetic construct; identical to SEQ ID NO: 2056
  misc_feature 1..41: note = Probe
  source 1..41: mol_type = other DNA

SEQ ID NO: 43922 - DNA, 43 bp, synthetic construct; identical to SEQ ID NO: 40
  misc_feature 1..43: note = Probe
  source 1..43: mol_type = other DNA

SEQ ID NO: 43923 - DNA, 44 bp, synthetic construct; identical to SEQ ID NO: 41
  misc_feature 1..44: note = Probe
  source 1..44: mol_type = other DNA

SEQ ID NO: 43924 - DNA, 45 bp, synthetic construct; identical to SEQ ID NO: 2058
  misc_feature 1..45: note = Probe
  source 1..45: mol_type = other DNA

SEQ ID NO: 43925 - DNA, 46 bp, synthetic construct; identical to SEQ ID NO: 2059
  misc_feature 1..46: note = Probe
  source 1..46: mol_type = other DNA

SEQ ID NO: 43926 - DNA, 25 bp, synthetic construct
  misc_feature 1..25: note = Probe
  source 1..25: mol_type = other DNA
aaccaaaacatcagattgtgaatct

SEQ ID NO: 43927 - DNA, 29 bp, synthetic construct
  misc_feature 1..29: note = Probe
  source 1..29: mol_type = other DNA
aaccaaaacatcagattgtgaatctgaca

SEQ ID NO: 43928 - DNA, 30 bp, synthetic construct; identical to SEQ ID NO: 2063
  misc_feature 1..30: note = Probe
  source 1..30: mol_type = other DNA

SEQ ID NO: 43929 - DNA, 31 bp, synthetic construct; identical to SEQ ID NO: 2064
  misc_feature 1..31: note = Probe
  source 1..31: mol_type = other DNA

SEQ ID NO: 43930 - DNA, 32 bp, synthetic construct; identical to SEQ ID NO: 2065
  misc_feature 1..32: note = Probe
  source 1..32: mol_type = other DNA

SEQ ID NO: 43931 - DNA, 33 bp, synthetic construct; identical to SEQ ID NO: 2066
  misc_feature 1..33: note = Probe
  source 1..33: mol_type = other DNA

SEQ ID NO: 43932 - DNA, 34 bp, synthetic construct; identical to SEQ ID NO: 14767
  misc_feature 1..34: note = Probe
  source 1..34: mol_type = other DNA

SEQ ID NO: 43933 - DNA, 35 bp, synthetic construct; identical to SEQ ID NO: 14768
  misc_feature 1..35: note = Probe
  source 1..35: mol_type = other DNA

SEQ ID NO: 43934 - DNA, 36 bp, synthetic construct; identical to SEQ ID NO: 2067
  misc_feature 1..36: note = Probe
  source 1..36: mol_type = other DNA

SEQ ID NO: 43935 - DNA, 37 bp, synthetic construct; identical to SEQ ID NO: 2068
  misc_feature 1..37: note = Probe
  source 1..37: mol_type = other DNA

SEQ ID NO: 43936 - DNA, 38 bp, synthetic construct; identical to SEQ ID NO: 2069
  misc_feature 1..38: note = Probe
  source 1..38: mol_type = other DNA

SEQ ID NO: 43937 - DNA, 43 bp, synthetic construct; identical to SEQ ID NO: 44
  misc_feature 1..43: note = Probe
  source 1..43: mol_type = other DNA

SEQ ID NO: 43938 - DNA, 45 bp, synthetic construct
  misc_feature 1..45: note = Probe
  source 1..45: mol_type = other DNA
aaccaaaacatcagattgtgaatctgacaacagaggcttacgacc

SEQ ID NO: 43939 - DNA, 46 bp, synthetic construct; identical to SEQ ID NO: 45
  misc_feature 1..46: note = Probe
  source 1..46: mol_type = other DNA

SEQ ID NO: 43940 - DNA, 49 bp, synthetic construct; identical to SEQ ID NO: 46
  misc_feature 1..49: note = Probe
  source 1..49: mol_type = other DNA

SEQ ID NO: 43941 - DNA, 21 bp, synthetic construct
  misc_feature 1..21: note = Probe
  source 1..21: mol_type = other DNA
aaccaacacctctttacagtg

SEQ ID NO: 43942 - DNA, 22 bp, synthetic construct
  misc_feature 1..22: note = Probe
  source 1..22: mol_type = other DNA
aaccaacacctctttacagtga

SEQ ID NO: 43943 - DNA, 24 bp, synthetic construct
  misc_feature 1..24: note = Probe
  source 1..24: mol_type = other DNA
aaccaacacctctttacagtgaaa

SEQ ID NO: 43944 - DNA, 25 bp, synthetic construct
  misc_feature 1..25: note = Probe
  source 1..25: mol_type = other DNA
aaccaacacctctttacagtgaaat

SEQ ID NO: 43945 - DNA, 50 bp, synthetic construct; identical to SEQ ID NO: 2076
  misc_feature 1..50: note = Probe
  source 1..50: mol_type = other DNA

SEQ ID NO: 43946 - DNA, 36 bp, synthetic construct; identical to SEQ ID NO: 14782
  misc_feature 1..36: note = Probe
  source 1..36: mol_type = other DNA

SEQ ID NO: 43947 - DNA, 36 bp, synthetic construct
  misc_feature 1..36: note = Probe
  source 1..36: mol_type = other DNA
aaccaggggtcgcgagttcaaatctcgctggggcct

SEQ ID NO: 43948 - DNA, 39 bp, synthetic construct; identical to SEQ ID NO: 2079
  misc_feature 1..39: note = Probe
  source 1..39: mol_type = other DNA

SEQ ID NO: 43949 - DNA, 39 bp, synthetic construct; identical to SEQ ID NO: 2080
  misc_feature 1..39: note = Probe
  source 1..39: mol_type = other DNA

SEQ ID NO: 43950 - DNA, 39 bp, synthetic construct; identical to SEQ ID NO: 2081
  misc_feature 1..39: note = Probe
  source 1..39: mol_type = other DNA

SEQ ID NO: 43951 - DNA, 28 bp, synthetic construct
  misc_feature 1..28: note = Probe
  source 1..28: mol_type = other DNA
aaccatgcacactactataaccacccta

SEQ ID NO: 43952 - DNA, 21 bp, synthetic construct
  misc_feature 1..21: note = Probe
  source 1..21: mol_type = other DNA
aaccatttcataactttgtca

SEQ ID NO: 43953 - DNA, 40 bp, synthetic construct; identical to SEQ ID NO: 2086
  misc_feature 1..40: note = Probe
  source 1..40: mol_type = other DNA

SEQ ID NO: 43954 - DNA, 35 bp, synthetic construct; identical to SEQ ID NO: 14793
  misc_feature 1..35: note = Probe
  source 1..35: mol_type = other DNA

SEQ ID NO: 43955 - DNA, 40 bp, synthetic construct; identical to SEQ ID NO: 2088
  misc_feature 1..40: note = Probe
  source 1..40: mol_type = other DNA

SEQ ID NO: 43956 - DNA, 21 bp, synthetic construct
  misc_feature 1..21: note = Probe
  source 1..21: mol_type = other DNA
aaccgagcgtccaagctcttt

SEQ ID NO: 43957 - DNA, 22 bp, synthetic construct
  misc_feature 1..22: note = Probe
  source 1..22: mol_type = other DNA
aaccgagcgtccaagctctttc

SEQ ID NO: 43958 - DNA, 23 bp, synthetic construct
  misc_feature 1..23: note = Probe
  source 1..23: mol_type = other DNA
aaccgagcgtccaagctctttcc

SEQ ID NO: 43959 - DNA, 24 bp, synthetic construct
  misc_feature 1..24: note = Probe
  source 1..24: mol_type = other DNA
aaccgagcgtccaagctctttcca

SEQ ID NO: 43960 - DNA, 25 bp, synthetic construct
  misc_feature 1..25: note = Probe
  source 1..25: mol_type = other DNA
aaccgagcgtccaagctctttccat

SEQ ID NO: 43961 - DNA, 26 bp, synthetic construct
  misc_feature 1..26: note = Probe
  source 1..26: mol_type = other DNA
aaccgagcgtccaagctctttccatt

SEQ ID NO: 43962 - DNA, 27 bp, synthetic construct
  misc_feature 1..27: note = Probe
  source 1..27: mol_type = other DNA
aaccgagcgtccaagctctttccattt

SEQ ID NO: 43963 - DNA, 28 bp, synthetic construct
  misc_feature 1..28: note = Probe
  source 1..28: mol_type = other DNA
aaccgagcgtccaagctctttccatttt

SEQ ID NO: 43964 - DNA, 29 bp, synthetic construct
  misc_feature 1..29: note = Probe
  source 1..29: mol_type = other DNA
aaccgagcgtccaagctctttccattttt

SEQ ID NO: 43965 - DNA, 19 bp, synthetic construct
  misc_feature 1..19: note = Probe
  source 1..19: mol_type = other DNA
aaccggagatgaaaacctt

SEQ ID NO: 43966 - DNA, 20 bp, synthetic construct
  misc_feature 1..20: note = Probe
  source 1..20: mol_type = other DNA
aaccggagatgaaaaccttt

SEQ ID NO: 43967 - DNA, 23 bp, synthetic construct
  misc_feature 1..23: note = Probe
  source 1..23: mol_type = other DNA
aaccggagatgaaaacctttttc

SEQ ID NO: 43968 - DNA, 25 bp, synthetic construct
  misc_feature 1..25: note = Probe
  source 1..25: mol_type = other DNA
aaccggagatgaaaacctttttcca

SEQ ID NO: 43969 - DNA, 28 bp, synthetic construct
  misc_feature 1..28: note = Probe
  source 1..28: mol_type = other DNA
aaccggagatgaaaacctttttccaagg

SEQ ID NO: 43970 - DNA, 32 bp, synthetic construct; identical to SEQ ID NO: 2102
  misc_feature 1..32: note = Probe
  source 1..32: mol_type = other DNA

SEQ ID NO: 43971 - DNA, 33 bp, synthetic construct; identical to SEQ ID NO: 2103
  misc_feature 1..33: note = Probe
  source 1..33: mol_type = other DNA

SEQ ID NO: 43972 - DNA, 34 bp, synthetic construct; identical to SEQ ID NO: 2104
  misc_feature 1..34: note = Probe
  source 1..34: mol_type = other DNA

SEQ ID NO: 43973 - DNA, 35 bp, synthetic construct; identical to SEQ ID NO: 2105
  misc_feature 1..35: note = Probe
  source 1..35: mol_type = other DNA

SEQ ID NO: 43974 - DNA, 18 bp, synthetic construct
  misc_feature 1..18: note = Probe
  source 1..18: mol_type = other DNA
aaccgggcggaaacacac

SEQ ID NO: 43975 - DNA, 19 bp, synthetic construct
  misc_feature 1..19: note = Probe
  source 1..19: mol_type = other DNA
aaccgggcggaaacacact

SEQ ID NO: 43976 - DNA, 20 bp, synthetic construct
  misc_feature 1..20: note = Probe
  source 1..20: mol_type = other DNA
aaccgggcggaaacacacta

SEQ ID NO: 43977 - DNA, 17 bp, synthetic construct
  misc_feature 1..17: note = Probe
  source 1..17: mol_type = other DNA
aaccgggcggaaacacc

SEQ ID NO: 43978 - DNA, 18 bp, synthetic construct
  misc_feature 1..18: note = Probe
  source 1..18: mol_type = other DNA
aaccgggcggaaacacct

SEQ ID NO: 43979 - DNA, 19 bp, synthetic construct
  misc_feature 1..19: note = Probe
  source 1..19: mol_type = other DNA
aaccgggcggaaacacctc

SEQ ID NO: 43980 - DNA, 20 bp, synthetic construct
  misc_feature 1..20: note = Probe
  source 1..20: mol_type = other DNA
aaccgggcggaaacacctcc

SEQ ID NO: 43981 - DNA, 21 bp, synthetic construct
  misc_feature 1..21: note = Probe
  source 1..21: mol_type = other DNA
aaccgggcggaaacacctcct

SEQ ID NO: 43982 - DNA, 18 bp, synthetic construct
  misc_feature 1..18: note = Probe
  source 1..18: mol_type = other DNA
aaccgggcggaaacacgt

SEQ ID NO: 43983 - DNA, 19 bp, synthetic construct
  misc_feature 1..19: note = Probe
  source 1..19: mol_type = other DNA
aaccgggcggaaacacgtt

SEQ ID NO: 43984 - DNA, 20 bp, synthetic construct
  misc_feature 1..20: note = Probe
  source 1..20: mol_type = other DNA
aaccgggcggaaacacgttt

SEQ ID NO: 43985 - DNA, 21 bp, synthetic construct
  misc_feature 1..21: note = Probe
  source 1..21: mol_type = other DNA
aaccgggcggaaacacgtttt

SEQ ID NO: 43986 - DNA, 22 bp, synthetic construct
  misc_feature 1..22: note = Probe
  source 1..22: mol_type = other DNA
aaccgggcggaaacacgttttt

SEQ ID NO: 43987 - DNA, 18 bp, synthetic construct
  misc_feature 1..18: note = Probe
  source 1..18: mol_type = other DNA
aacctagccccaaaccca

SEQ ID NO: 43988 - DNA, 25 bp, synthetic construct
  misc_feature 1..25: note = Probe
  source 1..25: mol_type = other DNA
aacctagccccaaacccactccacc

SEQ ID NO: 43989 - DNA, 26 bp, synthetic construct
  misc_feature 1..26: note = Probe
  source 1..26: mol_type = other DNA
aacctagccccaaacccactccacct

SEQ ID NO: 43990 - DNA, 28 bp, synthetic construct
  misc_feature 1..28: note = Probe
  source 1..28: mol_type = other DNA
aacctcagagggggcaaggcgtctgttt

SEQ ID NO: 43991 - DNA, 26 bp, synthetic construct
  misc_feature 1..26: note = Probe
  source 1..26: mol_type = other DNA
aacctcggttcgaatccgagtcacgg

SEQ ID NO: 43992 - DNA, 31 bp, synthetic construct; identical to SEQ ID NO: 2118
  misc_feature 1..31: note = Probe
  source 1..31: mol_type = other DNA

SEQ ID NO: 43993 - DNA, 31 bp, synthetic construct; identical to SEQ ID NO: 2119
  misc_feature 1..31: note = Probe
  source 1..31: mol_type = other DNA

SEQ ID NO: 43994 - DNA, 30 bp, synthetic construct; identical to SEQ ID NO: 14840
  misc_feature 1..30: note = Probe
  source 1..30: mol_type = other DNA

SEQ ID NO: 43995 - DNA, 46 bp, synthetic construct
  misc_feature 1..46: note = Probe
  source 1..46: mol_type = other DNA
aaccttttaagttaaagattaagagaaccaacacctctttacagtg

SEQ ID NO: 43996 - DNA, 49 bp, synthetic construct
  misc_feature 1..49: note = Probe
  source 1..49: mol_type = other DNA
aaccttttaagttaaagattaagagaaccaacacctctttacagtgaaa

SEQ ID NO: 43997 - DNA, 50 bp, synthetic construct; identical to SEQ ID NO: 2121
  misc_feature 1..50: note = Probe
  source 1..50: mol_type = other DNA

SEQ ID NO: 43998 - DNA, 44 bp, synthetic construct; identical to SEQ ID NO: 14842
  misc_feature 1..44: note = Probe
  source 1..44: mol_type = other DNA

SEQ ID NO: 43999 - DNA, 48 bp, synthetic construct; identical to SEQ ID NO: 2123
  misc_feature 1..48: note = Probe
  source 1..48: mol_type = other DNA

SEQ ID NO: 44000 - DNA, 49 bp, synthetic construct; identical to SEQ ID NO: 2124
  misc_feature 1..49: note = Probe
  source 1..49: mol_type = other DNA

SEQ ID NO: 44001 - DNA, 50 bp, synthetic construct; identical to SEQ ID NO: 2125
  misc_feature 1..50: note = Probe
  source 1..50: mol_type = other DNA

SEQ ID NO: 44002 - DNA, 38 bp, synthetic construct; identical to SEQ ID NO: 26316
  misc_feature 1..38: note = Probe
  source 1..38: mol_type = other DNA

SEQ ID NO: 44003 - DNA, 39 bp, synthetic construct; identical to SEQ ID NO: 26317
  misc_feature 1..39: note = Probe
  source 1..39: mol_type = other DNA

SEQ ID NO: 44004 - DNA, 46 bp, synthetic construct
  misc_feature 1..46: note = Probe
  source 1..46: mol_type = other DNA
aacgatggtttttcatatcattggtcgtggttgtagtccgtgcgag

SEQ ID NO: 44005 - DNA, 50 bp, synthetic construct; identical to SEQ ID NO: 26319
  misc_feature 1..50: note = Probe
  source 1..50: mol_type = other DNA

SEQ ID NO: 44006 - DNA, 21 bp, synthetic construct
  misc_feature 1..21: note = Probe
  source 1..21: mol_type = other DNA
aactaaatactaccgtatggc

SEQ ID NO: 44007 - DNA, 20 bp, synthetic construct
  misc_feature 1..20: note = Probe
  source 1..20: mol_type = other DNA
aactaagtgtttgtgggttt

SEQ ID NO: 44008 - DNA, 32 bp, synthetic construct
  misc_feature 1..32: note = Probe
  source 1..32: mol_type = other DNA
aactaagtgtttgtgggtttaagtcccattgg

SEQ ID NO: 44009 - DNA, 33 bp, synthetic construct; identical to SEQ ID NO: 2128
  misc_feature 1..33: note = Probe
  source 1..33: mol_type = other DNA

SEQ ID NO: 44010 - DNA, 34 bp, synthetic construct; identical to SEQ ID NO: 2129
  misc_feature 1..34: note = Probe
  source 1..34: mol_type = other DNA

SEQ ID NO: 44011 - DNA, 35 bp, synthetic construct; identical to SEQ ID NO: 55
  misc_feature 1..35: note = Probe
  source 1..35: mol_type = other DNA

SEQ ID NO: 44012 - DNA, 36 bp, synthetic construct; identical to SEQ ID NO: 56
  misc_feature 1..36: note = Probe
  source 1..36: mol_type = other DNA

SEQ ID NO: 44013 - DNA, 38 bp, synthetic construct; identical to SEQ ID NO: 14852
  misc_feature 1..38: note = Probe
  source 1..38: mol_type = other DNA

SEQ ID NO: 44014 - DNA, 39 bp, synthetic construct; identical to SEQ ID NO: 2130
  misc_feature 1..39: note = Probe
  source 1..39: mol_type = other DNA

SEQ ID NO: 44015 - DNA, 40 bp, synthetic construct; identical to SEQ ID NO: 2131
  misc_feature 1..40: note = Probe
  source 1..40: mol_type = other DNA

SEQ ID NO: 44016 - DNA, 18 bp, synthetic construct
  misc_feature 1..18: note = Probe
  source 1..18: mol_type = other DNA
aactcatgcccccatgtc

SEQ ID NO: 44017 - DNA, 19 bp, synthetic construct
  misc_feature 1..19: note = Probe
  source 1..19: mol_type = other DNA
aactcatgcccccatgtct

SEQ ID NO: 44018 - DNA, 20 bp, synthetic construct
  misc_feature 1..20: note = Probe
  source 1..20: mol_type = other DNA
aactcatgcccccatgtcta

SEQ ID NO: 44019 - DNA, 23 bp, synthetic construct
  misc_feature 1..23: note = Probe
  source 1..23: mol_type = other DNA
aactcatgcccccatgtctaaca

SEQ ID NO: 44020 - DNA, 26 bp, synthetic construct
  misc_feature 1..26: note = Probe
  source 1..26: mol_type = other DNA
aactcatgcccccatgtctaacaaca

SEQ ID NO: 44021 - DNA, 31 bp, synthetic construct; identical to SEQ ID NO: 2140
  misc_feature 1..31: note = Probe
  source 1..31: mol_type = other DNA

SEQ ID NO: 44022 - DNA, 32 bp, synthetic construct; identical to SEQ ID NO: 2141
  misc_feature 1..32: note = Probe
  source 1..32: mol_type = other DNA

SEQ ID NO: 44023 - DNA, 34 bp, synthetic construct; identical to SEQ ID NO: 2143
  misc_feature 1..34: note = Probe
  source 1..34: mol_type = other DNA

SEQ ID NO: 44024 - DNA, 35 bp, synthetic construct; identical to SEQ ID NO: 2144
  misc_feature 1..35: note = Probe
  source 1..35: mol_type = other DNA

SEQ ID NO: 44025 - DNA, 36 bp, synthetic construct; identical to SEQ ID NO: 2145
  misc_feature 1..36: note = Probe
  source 1..36: mol_type = other DNA

SEQ ID NO: 44026 - DNA, 37 bp, synthetic construct; identical to SEQ ID NO: 2146
  misc_feature 1..37: note = Probe
  source 1..37: mol_type = other DNA

SEQ ID NO: 44027 - DNA, 38 bp, synthetic construct; identical to SEQ ID NO: 2147
  misc_feature 1..38: note = Probe
  source 1..38: mol_type = other DNA

SEQ ID NO: 44028 - DNA, 39 bp, synthetic construct; identical to SEQ ID NO: 2148
  misc_feature 1..39: note = Probe
  source 1..39: mol_type = other DNA

SEQ ID NO: 44029 - DNA, 40 bp, synthetic construct; identical to SEQ ID NO: 2149
  misc_feature 1..40: note = Probe
  source 1..40: mol_type = other DNA

SEQ ID NO: 44030 - DNA, 17 bp, synthetic construct
  misc_feature 1..17: note = Probe
  source 1..17: mol_type = other DNA
aactgctaactcatgcc

SEQ ID NO: 44031 - DNA, 21 bp, synthetic construct
  misc_feature 1..21: note = Probe
  source 1..21: mol_type = other DNA
aactgctaactcatgccccca

SEQ ID NO: 44032 - DNA, 24 bp, synthetic construct
  misc_feature 1..24: note = Probe
  source 1..24: mol_type = other DNA
aactgctaactcatgcccccatgt

SEQ ID NO: 44033 - DNA, 25 bp, synthetic construct
  misc_feature 1..25: note = Probe
  source 1..25: mol_type = other DNA
aactgctaactcatgcccccatgtc

SEQ ID NO: 44034 - DNA, 26 bp, synthetic construct
  misc_feature 1..26: note = Probe
  source 1..26: mol_type = other DNA
aactgctaactcatgcccccatgtct

SEQ ID NO: 44035 - DNA, 30 bp, synthetic construct; identical to SEQ ID NO: 14885
  misc_feature 1..30: note = Probe
  source 1..30: mol_type = other DNA

SEQ ID NO: 44036 - DNA, 33 bp, synthetic construct; identical to SEQ ID NO: 14887
  misc_feature 1..33: note = Probe
  source 1..33: mol_type = other DNA

SEQ ID NO: 44037 - DNA, 44 bp, synthetic construct; identical to SEQ ID NO: 2163
  misc_feature 1..44: note = Probe
  source 1..44: mol_type = other DNA

SEQ ID NO: 44038 - DNA, 46 bp, synthetic construct; identical to SEQ ID NO: 2165
  misc_feature 1..46: note = Probe
  source 1..46: mol_type = other DNA

SEQ ID NO: 44039 - DNA, 50 bp, synthetic construct; identical to SEQ ID NO: 2167
  misc_feature 1..50: note = Probe
  source 1..50: mol_type = other DNA

SEQ ID NO: 44040 - DNA, 27 bp, synthetic construct
  misc_feature 1..27: note = Probe
  source 1..27: mol_type = other DNA
aacttaaaactttacagtcagaggttc

SEQ ID NO: 44041 - DNA, 29 bp, synthetic construct
  misc_feature 1..29: note = Probe
  source 1..29: mol_type = other DNA
aacttaaaactttacagtcagaggttcaa

SEQ ID NO: 44042 - DNA, 30 bp, synthetic construct; identical to SEQ ID NO: 2170
  misc_feature 1..30: note = Probe
  source 1..30: mol_type = other DNA

SEQ ID NO: 44043 - DNA, 37 bp, synthetic construct; identical to SEQ ID NO: 60
  misc_feature 1..37: note = Probe
  source 1..37: mol_type = other DNA

SEQ ID NO: 44044 - DNA, 39 bp, synthetic construct; identical to SEQ ID NO: 62
  misc_feature 1..39: note = Probe
  source 1..39: mol_type = other DNA

SEQ ID NO: 44045 - DNA, 40 bp, synthetic construct; identical to SEQ ID NO: 2173
  misc_feature 1..40: note = Probe
  source 1..40: mol_type = other DNA

SEQ ID NO: 44046 - DNA, 41 bp, synthetic construct; identical to SEQ ID NO: 2174
  misc_feature 1..41: note = Probe
  source 1..41: mol_type = other DNA

SEQ ID NO: 44047 - DNA, 42 bp, synthetic construct; identical to SEQ ID NO: 2175
  misc_feature 1..42: note = Probe
  source 1..42: mol_type = other DNA

SEQ ID NO: 44048 - DNA, 43 bp, synthetic construct; identical to SEQ ID NO: 2176
  misc_feature 1..43: note = Probe
  source 1..43: mol_type = other DNA

SEQ ID NO: 44049 - DNA, 44 bp, synthetic construct; identical to SEQ ID NO: 2177
  misc_feature 1..44: note = Probe
  source 1..44: mol_type = other DNA

SEQ ID NO: 44050 - DNA, 45 bp, synthetic construct; identical to SEQ ID NO: 2178
  misc_feature 1..45: note = Probe
  source 1..45: mol_type = other DNA

SEQ ID NO: 44051 - DNA, 46 bp, synthetic construct; identical to SEQ ID NO: 2179
  misc_feature 1..46: note = Probe
  source 1..46: mol_type = other DNA

SEQ ID NO: 44052 - DNA, 50 bp, synthetic construct; identical to SEQ ID NO: 2180
  misc_feature 1..50: note = Probe
  source 1..50: mol_type = other DNA

SEQ ID NO: 44053 - DNA, 17 bp, synthetic construct
  misc_feature 1..17: note = Probe
  source 1..17: mol_type = other DNA
aacttaacttgaccgct

SEQ ID NO: 44054 - DNA, 22 bp, synthetic construct
  misc_feature 1..22: note = Probe
  source 1..22: mol_type = other DNA
aacttaacttgaccgctctgag

SEQ ID NO: 44055 - DNA, 23 bp, synthetic construct
  misc_feature 1..23: note = Probe
  source 1..23: mol_type = other DNA
aacttaacttgaccgctctgagc

SEQ ID NO: 44056 - DNA, 24 bp, synthetic construct
  misc_feature 1..24: note = Probe
  source 1..24: mol_type = other DNA
aacttaacttgaccgctctgagct

SEQ ID NO: 44057 - DNA, 16 bp, synthetic construct
  misc_feature 1..16: note = Probe
  source 1..16: mol_type = other DNA
aacttacacttaggag

SEQ ID NO: 44058 - DNA, 17 bp, synthetic construct
  misc_feature 1..17: note = Probe
  source 1..17: mol_type = other DNA
aacttacacttaggaga

SEQ ID NO: 44059 - DNA, 18 bp, synthetic construct
  misc_feature 1..18: note = Probe
  source 1..18: mol_type = other DNA
aacttacacttaggagat

SEQ ID NO: 44060 - DNA, 22 bp, synthetic construct
  misc_feature 1..22: note = Probe
  source 1..22: mol_type = other DNA
aacttacacttaggagatttca

SEQ ID NO: 44061 - DNA, 27 bp, synthetic construct
  misc_feature 1..27: note = Probe
  source 1..27: mol_type = other DNA
aacttacacttaggagatttcaactta

SEQ ID NO: 44062 - DNA, 30 bp, synthetic construct; identical to SEQ ID NO: 14931
  misc_feature 1..30: note = Probe
  source 1..30: mol_type = other DNA

SEQ ID NO: 44063 - DNA, 32 bp, synthetic construct
  misc_feature 1..32: note = Probe
  source 1..32: mol_type = other DNA
aacttacacttaggagatttcaacttaacttg

SEQ ID NO: 44064 - DNA, 34 bp, synthetic construct; identical to SEQ ID NO: 14933
  misc_feature 1..34: note = Probe
  source 1..34: mol_type = other DNA

SEQ ID NO: 44065 - DNA, 35 bp, synthetic construct; identical to SEQ ID NO: 14934
  misc_feature 1..35: note = Probe
  source 1..35: mol_type = other DNA

SEQ ID NO: 44066 - DNA, 36 bp, synthetic construct; identical to SEQ ID NO: 2188
  misc_feature 1..36: note = Probe
  source 1..36: mol_type = other DNA

SEQ ID NO: 44067 - DNA, 37 bp, synthetic construct; identical to SEQ ID NO: 2189
  misc_feature 1..37: note = Probe
  source 1..37: mol_type = other DNA

SEQ ID NO: 44068 - DNA, 38 bp, synthetic construct; identical to SEQ ID NO: 2190
  misc_feature 1..38: note = Probe
  source 1..38: mol_type = other DNA

SEQ ID NO: 44069 - DNA, 39 bp, synthetic construct; identical to SEQ ID NO: 2191
  misc_feature 1..39: note = Probe
  source 1..39: mol_type = other DNA

SEQ ID NO: 44070 - DNA, 40 bp, synthetic construct; identical to SEQ ID NO: 14939
  misc_feature 1..40: note = Probe
  source 1..40: mol_type = other DNA

SEQ ID NO: 44071 - DNA, 42 bp, synthetic construct; identical to SEQ ID NO: 2192
  misc_feature 1..42: note = Probe
  source 1..42: mol_type = other DNA

SEQ ID NO: 44072 - DNA, 43 bp, synthetic construct; identical to SEQ ID NO: 2193
  misc_feature 1..43: note = Probe
  source 1..43: mol_type = other DNA

SEQ ID NO: 44073 - DNA, 44 bp, synthetic construct; identical to SEQ ID NO: 2194
  misc_feature 1..44: note = Probe
  source 1..44: mol_type = other DNA

SEQ ID NO: 44074 - DNA, 45 bp, synthetic construct; identical to SEQ ID NO: 2195
  misc_feature 1..45: note = Probe
  source 1..45: mol_type = other DNA

SEQ ID NO: 44075 - DNA, 50 bp, synthetic construct; identical to SEQ ID NO: 2197
  misc_feature 1..50: note = Probe
  source 1..50: mol_type = other DNA

SEQ ID NO: 44076 - DNA, 18 bp, synthetic construct
  misc_feature 1..18: note = Probe
  source 1..18: mol_type = other DNA
aacttagcattaaccttt

SEQ ID NO: 44077 - DNA, 39 bp, synthetic construct
  misc_feature 1..39: note = Probe
  source 1..39: mol_type = other DNA
aacttagcattaaccttttaagttaaagattaagagaac

SEQ ID NO: 44078 - DNA, 41 bp, synthetic construct; identical to SEQ ID NO: 12487
  misc_feature 1..41: note = Probe
  source 1..41: mol_type = other DNA

SEQ ID NO: 44079 - DNA, 44 bp, synthetic construct; identical to SEQ ID NO: 2200
  misc_feature 1..44: note = Probe
  source 1..44: mol_type = other DNA

SEQ ID NO: 44080 - DNA, 50 bp, synthetic construct; identical to SEQ ID NO: 2201
  misc_feature 1..50: note = Probe
  source 1..50: mol_type = other DNA

SEQ ID NO: 44081 - DNA, 25 bp, synthetic construct
  misc_feature 1..25: note = Probe
  source 1..25: mol_type = other DNA
aacttccaattaactagttttgaca

SEQ ID NO: 44082 - DNA, 39 bp, synthetic construct
  misc_feature 1..39: note = Probe
  source 1..39: mol_type = other DNA
aacttccaattaactagttttgacaacattcaaaaaaga

SEQ ID NO: 44083 - DNA, 44 bp, synthetic construct; identical to SEQ ID NO: 2202
  misc_feature 1..44: note = Probe
  source 1..44: mol_type = other DNA

SEQ ID NO: 44084 - DNA, 45 bp, synthetic construct; identical to SEQ ID NO: 2203
  misc_feature 1..45: note = Probe
  source 1..45: mol_type = other DNA

SEQ ID NO: 44085 - DNA, 18 bp, synthetic construct
  misc_feature 1..18: note = Probe
  source 1..18: mol_type = other DNA
aacttgaccgctctgagc

SEQ ID NO: 44086 - DNA, 20 bp, synthetic construct
  misc_feature 1..20: note = Probe
  source 1..20: mol_type = other DNA
aactttacagtcagaggttc

SEQ ID NO: 44087 - DNA, 21 bp, synthetic construct
  misc_feature 1..21: note = Probe
  source 1..21: mol_type = other DNA
aactttacagtcagaggttca

SEQ ID NO: 44088 - DNA, 31 bp, synthetic construct; identical to SEQ ID NO: 65
  misc_feature 1..31: note = Probe
  source 1..31: mol_type = other DNA

SEQ ID NO: 44089 - DNA, 32 bp, synthetic construct; identical to SEQ ID NO: 2206
  misc_feature 1..32: note = Probe
  source 1..32: mol_type = other DNA

SEQ ID NO: 44090 - DNA, 33 bp, synthetic construct; identical to SEQ ID NO: 2207
  misc_feature 1..33: note = Probe
  source 1..33: mol_type = other DNA

SEQ ID NO: 44091 - DNA, 34 bp, synthetic construct; identical to SEQ ID NO: 2208
  misc_feature 1..34: note = Probe
  source 1..34: mol_type = other DNA

SEQ ID NO: 44092 - DNA, 36 bp, synthetic construct; identical to SEQ ID NO: 2210
  misc_feature 1..36: note = Probe
  source 1..36: mol_type = other DNA

SEQ ID NO: 44093 - DNA, 38 bp, synthetic construct; identical to SEQ ID NO: 2212
  misc_feature 1..38: note = Probe
  source 1..38: mol_type = other DNA

SEQ ID NO: 44094 - DNA, 39 bp, synthetic construct; identical to SEQ ID NO: 2213
  misc_feature 1..39: note = Probe
  source 1..39: mol_type = other DNA

SEQ ID NO: 44095 - DNA, 40 bp, synthetic construct; identical to SEQ ID NO: 2214
  misc_feature 1..40: note = Probe
  source 1..40: mol_type = other DNA

SEQ ID NO: 44096 - DNA, 18 bp, synthetic construct
  misc_feature 1..18: note = Probe
  source 1..18: mol_type = other DNA
aagaactgctaactcatg

SEQ ID NO: 44097 - DNA, 45 bp, synthetic construct; identical to SEQ ID NO: 69
  misc_feature 1..45: note = Probe
  source 1..45: mol_type = other DNA

SEQ ID NO: 44098 - DNA, 49 bp, synthetic construct; identical to SEQ ID NO: 2229
  misc_feature 1..49: note = Probe
  source 1..49: mol_type = other DNA

SEQ ID NO: 44099 - DNA, 50 bp, synthetic construct; identical to SEQ ID NO: 2230
  misc_feature 1..50: note = Probe
  source 1..50: mol_type = other DNA

SEQ ID NO: 44100 - DNA, 25 bp, synthetic construct
  misc_feature 1..25: note = Probe
  source 1..25: mol_type = other DNA
aagaagcagcttcaaacctgccggg

SEQ ID NO: 44101 - DNA, 26 bp, synthetic construct
  misc_feature 1..26: note = Probe
  source 1..26: mol_type = other DNA
aagaagcagcttcaaacctgccgggg

SEQ ID NO: 44102 - DNA, 27 bp, synthetic construct
  misc_feature 1..27: note = Probe
  source 1..27: mol_type = other DNA
aagaagcagcttcaaacctgccggggc

SEQ ID NO: 44103 - DNA, 29 bp, synthetic construct
  misc_feature 1..29: note = Probe
  source 1..29: mol_type = other DNA
aagaagcagcttcaaacctgccggggctt

SEQ ID NO: 44104 - DNA, 30 bp, synthetic construct; identical to SEQ ID NO: 14981
  misc_feature 1..30: note = Probe
  source 1..30: mol_type = other DNA

SEQ ID NO: 44105 - DNA, 31 bp, synthetic construct; identical to SEQ ID NO: 2232
  misc_feature 1..31: note = Probe
  source 1..31: mol_type = other DNA

SEQ ID NO: 44106 - DNA, 32 bp, synthetic construct; identical to SEQ ID NO: 2233
  misc_feature 1..32: note = Probe
  source 1..32: mol_type = other DNA

SEQ ID NO: 44107 - DNA, 31 bp, synthetic construct; identical to SEQ ID NO: 2247
  misc_feature 1..31: note = Probe
  source 1..31: mol_type = other DNA

SEQ ID NO: 44108 - DNA, 26 bp, synthetic construct
  misc_feature 1..26: note = Probe
  source 1..26: mol_type = other DNA
aagagaaccaacacctctttacagtg

SEQ ID NO: 44109 - DNA, 27 bp, synthetic construct
  misc_feature 1..27: note = Probe
  source 1..27: mol_type = other DNA
aagagaaccaacacctctttacagtga

SEQ ID NO: 44110 - DNA, 30 bp, synthetic construct; identical to SEQ ID NO: 2251
  misc_feature 1..30: note = Probe
  source 1..30: mol_type = other DNA

SEQ ID NO: 44111 - DNA, 37 bp, synthetic construct; identical to SEQ ID NO: 15012
  misc_feature 1..37: note = Probe
  source 1..37: mol_type = other DNA

SEQ ID NO: 44112 - DNA, 24 bp, synthetic construct
  misc_feature 1..24: note = Probe
  source 1..24: mol_type = other DNA
aagattaagagaaccaacacctct

SEQ ID NO: 44113 - DNA, 31 bp, synthetic construct; identical to SEQ ID NO: 15021
  misc_feature 1..31: note = Probe
  source 1..31: mol_type = other DNA

SEQ ID NO: 44114 - DNA, 32 bp, synthetic construct; identical to SEQ ID NO: 2257
  misc_feature 1..32: note = Probe
  source 1..32: mol_type = other DNA

SEQ ID NO: 44115 - DNA, 33 bp, synthetic construct; identical to SEQ ID NO: 2258
  misc_feature 1..33: note = Probe
  source 1..33: mol_type = other DNA

SEQ ID NO: 44116 - DNA, 34 bp, synthetic construct; identical to SEQ ID NO: 2259
  misc_feature 1..34: note = Probe
  source 1..34: mol_type = other DNA

SEQ ID NO: 44117 - DNA, 35 bp, synthetic construct; identical to SEQ ID NO: 15025
  misc_feature 1..35: note = Probe
  source 1..35: mol_type = other DNA

SEQ ID NO: 44118 - DNA, 36 bp, synthetic construct; identical to SEQ ID NO: 2260
  misc_feature 1..36: note = Probe
  source 1..36: mol_type = other DNA

SEQ ID NO: 44119 - DNA, 29 bp, synthetic construct
  misc_feature 1..29: note = Probe
  source 1..29: mol_type = other DNA
aagattctaggttcgactcctggctggct

SEQ ID NO: 44120 - DNA, 29 bp, synthetic construct
  misc_feature 1..29: note = Probe
  source 1..29: mol_type = other DNA
aagattgagggttcgagtcccttcgtggt

SEQ ID NO: 44121 - DNA, 29 bp, synthetic construct
  misc_feature 1..29: note = Probe
  source 1..29: mol_type = other DNA
aagattgcaggttcgagtcctgccgcggt

SEQ ID NO: 44122 - DNA, 27 bp, synthetic construct
  misc_feature 1..27: note = Probe
  source 1..27: mol_type = other DNA
aagcaatacactgaaaatgtttagacg

SEQ ID NO: 44123 - DNA, 35 bp, synthetic construct; identical to SEQ ID NO: 77
  misc_feature 1..35: note = Probe
  source 1..35: mol_type = other DNA

SEQ ID NO: 44124 - DNA, 44 bp, synthetic construct; identical to SEQ ID NO: 2268
  misc_feature 1..44: note = Probe
  source 1..44: mol_type = other DNA

SEQ ID NO: 44125 - DNA, 50 bp, synthetic construct; identical to SEQ ID NO: 2271
  misc_feature 1..50: note = Probe
  source 1..50: mol_type = other DNA

SEQ ID NO: 44126 - DNA, 16 bp, synthetic construct
  misc_feature 1..16: note = Probe
  source 1..16: mol_type = other DNA
aagcacccaacttaca

SEQ ID NO: 44127 - DNA, 18 bp, synthetic construct
  misc_feature 1..18: note = Probe
  source 1..18: mol_type = other DNA
aagcacccaacttacact

SEQ ID NO: 44128 - DNA, 19 bp, synthetic construct
  misc_feature 1..19: note = Probe
  source 1..19: mol_type = other DNA
aagcacccaacttacactt

SEQ ID NO: 44129 - DNA, 20 bp, synthetic construct
  misc_feature 1..20: note = Probe
  source 1..20: mol_type = other DNA
aagcacccaacttacactta

SEQ ID NO: 44130 - DNA, 21 bp, synthetic construct
  misc_feature 1..21: note = Probe
  source 1..21: mol_type = other DNA
aagcacccaacttacacttag

SEQ ID NO: 44131 - DNA, 23 bp, synthetic construct
  misc_feature 1..23: note = Probe
  source 1..23: mol_type = other DNA
aagcacccaacttacacttagga

SEQ ID NO: 44132 - DNA, 24 bp, synthetic construct
  misc_feature 1..24: note = Probe
  source 1..24: mol_type = other DNA
aagcacccaacttacacttaggag

SEQ ID NO: 44133 - DNA, 25 bp, synthetic construct
  misc_feature 1..25: note = Probe
  source 1..25: mol_type = other DNA
aagcacccaacttacacttaggaga

SEQ ID NO: 44134 - DNA, 26 bp, synthetic construct
  misc_feature 1..26: note = Probe
  source 1..26: mol_type = other DNA
aagcacccaacttacacttaggagat

SEQ ID NO: 44135 - DNA, 27 bp, synthetic construct
  misc_feature 1..27: note = Probe
  source 1..27: mol_type = other DNA
aagcacccaacttacacttaggagatt

SEQ ID NO: 44136 - DNA, 28 bp, synthetic construct
  misc_feature 1..28: note = Probe
  source 1..28: mol_type = other DNA
aagcacccaacttacacttaggagattt

SEQ ID NO: 44137 - DNA, 29 bp, synthetic construct
  misc_feature 1..29: note = Probe
  source 1..29: mol_type = other DNA
aagcacccaacttacacttaggagatttc

SEQ ID NO: 44138 - DNA, 30 bp, synthetic construct; identical to SEQ ID NO: 2277
  misc_feature 1..30: note = Probe
  source 1..30: mol_type = other DNA

SEQ ID NO: 44139 - DNA, 31 bp, synthetic construct; identical to SEQ ID NO: 15051
  misc_feature 1..31: note = Probe
  source 1..31: mol_type = other DNA

SEQ ID NO: 44140 - DNA, 32 bp, synthetic construct; identical to SEQ ID NO: 2278
  misc_feature 1..32: note = Probe
  source 1..32: mol_type = other DNA

SEQ ID NO: 44141 - DNA, 33 bp, synthetic construct; identical to SEQ ID NO: 2279
  misc_feature 1..33: note = Probe
  source 1..33: mol_type = other DNA

SEQ ID NO: 44142 - DNA, 34 bp, synthetic construct
  misc_feature 1..34: note = Probe
  source 1..34: mol_type = other DNA
aagcacccaacttacacttaggagatttcaactt

SEQ ID NO: 44143 - DNA, 35 bp, synthetic construct; identical to SEQ ID NO: 15054
  misc_feature 1..35: note = Probe
  source 1..35: mol_type = other DNA

SEQ ID NO: 44144 - DNA, 36 bp, synthetic construct; identical to SEQ ID NO: 15055
  misc_feature 1..36: note = Probe
  source 1..36: mol_type = other DNA

SEQ ID NO: 44145 - DNA, 38 bp, synthetic construct; identical to SEQ ID NO: 15056
  misc_feature 1..38: note = Probe
  source 1..38: mol_type = other DNA

SEQ ID NO: 44146 - DNA, 39 bp, synthetic construct; identical to SEQ ID NO: 15057
  misc_feature 1..39: note = Probe
  source 1..39: mol_type = other DNA

SEQ ID NO: 44147 - DNA, 40 bp, synthetic construct
  misc_feature 1..40: note = Probe
  source 1..40: mol_type = other DNA
aagcacccaacttacacttaggagatttcaacttaacttg

SEQ ID NO: 44148 - DNA, 42 bp, synthetic construct; identical to SEQ ID NO: 15058
  misc_feature 1..42: note = Probe
  source 1..42: mol_type = other DNA

SEQ ID NO: 44149 - DNA, 43 bp, synthetic construct
  misc_feature 1..43: note = Probe
  source 1..43: mol_type = other DNA
aagcacccaacttacacttaggagatttcaacttaacttgacc

SEQ ID NO: 44150 - DNA, 44 bp, synthetic construct; identical to SEQ ID NO: 2280
  misc_feature 1..44: note = Probe
  source 1..44: mol_type = other DNA

SEQ ID NO: 44151 - DNA, 45 bp, synthetic construct
  misc_feature 1..45: note = Probe
  source 1..45: mol_type = other DNA
aagcacccaacttacacttaggagatttcaacttaacttgaccgc

SEQ ID NO: 44152 - DNA, 46 bp, synthetic construct; identical to SEQ ID NO: 15060
  misc_feature 1..46: note = Probe
  source 1..46: mol_type = other DNA

SEQ ID NO: 44153 - DNA, 49 bp, synthetic construct; identical to SEQ ID NO: 2282
  misc_feature 1..49: note = Probe
  source 1..49: mol_type = other DNA

SEQ ID NO: 44154 - DNA, 50 bp, synthetic construct; identical to SEQ ID NO: 2283
  misc_feature 1..50: note = Probe
  source 1..50: mol_type = other DNA

SEQ ID NO: 44155 - DNA, 29 bp, synthetic construct
  misc_feature 1..29: note = Probe
  source 1..29: mol_type = other DNA
aagcagcttcaaacctgccggggcttctc

SEQ ID NO: 44156 - DNA, 39 bp, synthetic construct; identical to SEQ ID NO: 2288
  misc_feature 1..39: note = Probe
  source 1..39: mol_type = other DNA

SEQ ID NO: 44157 - DNA, 39 bp, synthetic construct; identical to SEQ ID NO: 2289
  misc_feature 1..39: note = Probe
  source 1..39: mol_type = other DNA

SEQ ID NO: 44158 - DNA, 50 bp, synthetic construct; identical to SEQ ID NO: 2291
  misc_feature 1..50: note = Probe
  source 1..50: mol_type = other DNA

SEQ ID NO: 44159 - DNA, 40 bp, synthetic construct; identical to SEQ ID NO: 2292
  misc_feature 1..40: note = Probe
  source 1..40: mol_type = other DNA

SEQ ID NO: 44160 - DNA, 40 bp, synthetic construct; identical to SEQ ID NO: 2293
  misc_feature 1..40: note = Probe
  source 1..40: mol_type = other DNA

SEQ ID NO: 44161 - DNA, 35 bp, synthetic construct; identical to SEQ ID NO: 15080
  misc_feature 1..35: note = Probe
  source 1..35: mol_type = other DNA

SEQ ID NO: 44162 - DNA, 36 bp, synthetic construct; identical to SEQ ID NO: 26551
  misc_feature 1..36: note = Probe
  source 1..36: mol_type = other DNA

SEQ ID NO: 44163 - DNA, 37 bp, synthetic construct; identical to SEQ ID NO: 15081
  misc_feature 1..37: note = Probe
  source 1..37: mol_type = other DNA

SEQ ID NO: 44164 - DNA, 40 bp, synthetic construct; identical to SEQ ID NO: 2295
  misc_feature 1..40: note = Probe
  source 1..40: mol_type = other DNA

SEQ ID NO: 44165 - DNA, 22 bp, synthetic construct
  misc_feature 1..22: note = Probe
  source 1..22: mol_type = other DNA
aagctatcgggcccataccccg

SEQ ID NO: 44166 - DNA, 23 bp, synthetic construct
  misc_feature 1..23: note = Probe
  source 1..23: mol_type = other DNA
aagctatcgggcccataccccga

SEQ ID NO: 44167 - DNA, 24 bp, synthetic construct
  misc_feature 1..24: note = Probe
  source 1..24: mol_type = other DNA
aagctatcgggcccataccccgaa

SEQ ID NO: 44168 - DNA, 25 bp, synthetic construct
  misc_feature 1..25: note = Probe
  source 1..25: mol_type = other DNA
aagctatcgggcccataccccgaaa

SEQ ID NO: 44169 - DNA, 26 bp, synthetic construct
  misc_feature 1..26: note = Probe
  source 1..26: mol_type = other DNA
aagctatcgggcccataccccgaaaa

SEQ ID NO: 44170 - DNA, 27 bp, synthetic construct
  misc_feature 1..27: note = Probe
  source 1..27: mol_type = other DNA
aagctatcgggcccataccccgaaaat

SEQ ID NO: 44171 - DNA, 28 bp, synthetic construct
  misc_feature 1..28: note = Probe
  source 1..28: mol_type = other DNA
aagctatcgggcccataccccgaaaatg

SEQ ID NO: 44172 - DNA, 29 bp, synthetic construct
  misc_feature 1..29: note = Probe
  source 1..29: mol_type = other DNA
aagctatcgggcccataccccgaaaatgt

SEQ ID NO: 44173 - DNA, 30 bp, synthetic construct; identical to SEQ ID NO: 2306
  misc_feature 1..30: note = Probe
  source 1..30: mol_type = other DNA

SEQ ID NO: 44174 - DNA, 31 bp, synthetic construct; identical to SEQ ID NO: 2307
  misc_feature 1..31: note = Probe
  source 1..31: mol_type = other DNA

SEQ ID NO: 44175 - DNA, 32 bp, synthetic construct; identical to SEQ ID NO: 2308
  misc_feature 1..32: note = Probe
  source 1..32: mol_type = other DNA

SEQ ID NO: 44176 - DNA, 34 bp, synthetic construct; identical to SEQ ID NO: 2310
  misc_feature 1..34: note = Probe
  source 1..34: mol_type = other DNA

SEQ ID NO: 44177 - DNA, 35 bp, synthetic construct; identical to SEQ ID NO: 2311
  misc_feature 1..35: note = Probe
  source 1..35: mol_type = other DNA

SEQ ID NO: 44178 - DNA, 49 bp, synthetic construct; identical to SEQ ID NO: 2314
  misc_feature 1..49: note = Probe
  source 1..49: mol_type = other DNA

SEQ ID NO: 44179 - DNA, 18 bp, synthetic construct
  misc_feature 1..18: note = Probe
  source 1..18: mol_type = other DNA
aagctcacaagaactgct

SEQ ID NO: 44180 - DNA, 23 bp, synthetic construct
  misc_feature 1..23: note = Probe
  source 1..23: mol_type = other DNA
aagctcacaagaactgctaactc

SEQ ID NO: 44181 - DNA, 24 bp, synthetic construct
  misc_feature 1..24: note = Probe
  source 1..24: mol_type = other DNA
aagctcacaagaactgctaactca

SEQ ID NO: 44182 - DNA, 26 bp, synthetic construct
  misc_feature 1..26: note = Probe
  source 1..26: mol_type = other DNA
aagctcacaagaactgctaactcatg

SEQ ID NO: 44183 - DNA, 37 bp, synthetic construct
  misc_feature 1..37: note = Probe
  source 1..37: mol_type = other DNA
aagctcacaagaactgctaactcatgcccccatgtct

SEQ ID NO: 44184 - DNA, 50 bp, synthetic construct; identical to SEQ ID NO: 84
  misc_feature 1..50: note = Probe
  source 1..50: mol_type = other DNA

SEQ ID NO: 44185 - DNA, 50 bp, synthetic construct
  misc_feature 1..50: note = Probe
  source 1..50: mol_type = other DNA
aaggcatcagcctccggagctggggattgtgggttcgagtcccatctggg

SEQ ID NO: 44186 - DNA, 26 bp, synthetic construct
  misc_feature 1..26: note = Probe
  source 1..26: mol_type = other DNA
aagggcttagcttaattaaagtggct

SEQ ID NO: 44187 - DNA, 29 bp, synthetic construct
  misc_feature 1..29: note = Probe
  source 1..29: mol_type = other DNA
aagggcttagcttaattaaagtggctgat

SEQ ID NO: 44188 - DNA, 36 bp, synthetic construct; identical to SEQ ID NO: 15125
  misc_feature 1..36: note = Probe
  source 1..36: mol_type = other DNA

SEQ ID NO: 44189 - DNA, 50 bp, synthetic construct; identical to SEQ ID NO: 37653
  misc_feature 1..50: note = Probe
  source 1..50: mol_type = other DNA

SEQ ID NO: 44190 - DNA, 26 bp, synthetic construct
  misc_feature 1..26: note = Probe
  source 1..26: mol_type = other DNA
aaggtcagctaaataagctatcgggc

SEQ ID NO: 44191 - DNA, 27 bp, synthetic construct
  misc_feature 1..27: note = Probe
  source 1..27: mol_type = other DNA
aaggtcagctaaataagctatcgggcc

SEQ ID NO: 44192 - DNA, 29 bp, synthetic construct
  misc_feature 1..29: note = Probe
  source 1..29: mol_type = other DNA
aaggtcagctaaataagctatcgggccca

SEQ ID NO: 44193 - DNA, 31 bp, synthetic construct; identical to SEQ ID NO: 2343
  misc_feature 1..31: note = Probe
  source 1..31: mol_type = other DNA

SEQ ID NO: 44194 - DNA, 32 bp, synthetic construct; identical to SEQ ID NO: 2344
  misc_feature 1..32: note = Probe
  source 1..32: mol_type = other DNA

SEQ ID NO: 44195 - DNA, 35 bp, synthetic construct; identical to SEQ ID NO: 15140
  misc_feature 1..35: note = Probe
  source 1..35: mol_type = other DNA

SEQ ID NO: 44196 - DNA, 43 bp, synthetic construct; identical to SEQ ID NO: 2352
  misc_feature 1..43: note = Probe
  source 1..43: mol_type = other DNA

SEQ ID NO: 44197 - DNA, 44 bp, synthetic construct; identical to SEQ ID NO: 2353
  misc_feature 1..44: note = Probe
  source 1..44: mol_type = other DNA

SEQ ID NO: 44198 - DNA, 45 bp, synthetic construct; identical to SEQ ID NO: 2354
  misc_feature 1..45: note = Probe
  source 1..45: mol_type = other DNA

SEQ ID NO: 44199 - DNA, 50 bp, synthetic construct; identical to SEQ ID NO: 2358
  misc_feature 1..50: note = Probe
  source 1..50: mol_type = other DNA

SEQ ID NO: 44200 - DNA, 31 bp, synthetic construct; identical to SEQ ID NO: 36120
  misc_feature 1..31: note = Probe
  source 1..31: mol_type = other DNA

SEQ ID NO: 44201 - DNA, 32 bp, synthetic construct
  misc_feature 1..32: note = Probe
  source 1..32: mol_type = other DNA
aaggtcctgagttcgaacctcagagggggcaa

SEQ ID NO: 44202 - DNA, 32 bp, synthetic construct
  misc_feature 1..32: note = Probe
  source 1..32: mol_type = other DNA
aaggtcctgagttcgaacctcagagggggcag

SEQ ID NO: 44203 - DNA, 32 bp, synthetic construct; identical to SEQ ID NO: 2359
  misc_feature 1..32: note = Probe
  source 1..32: mol_type = other DNA

SEQ ID NO: 44204 - DNA, 33 bp, synthetic construct; identical to SEQ ID NO: 15150
  misc_feature 1..33: note = Probe
  source 1..33: mol_type = other DNA

SEQ ID NO: 44205 - DNA, 34 bp, synthetic construct; identical to SEQ ID NO: 2360
  misc_feature 1..34: note = Probe
  source 1..34: mol_type = other DNA

SEQ ID NO: 44206 - DNA, 34 bp, synthetic construct; identical to SEQ ID NO: 2361
  misc_feature 1..34: note = Probe
  source 1..34: mol_type = other DNA

SEQ ID NO: 44207 - DNA, 34 bp, synthetic construct; identical to SEQ ID NO: 2362
  misc_feature 1..34: note = Probe
  source 1..34: mol_type = other DNA

SEQ ID NO: 44208 - DNA, 31 bp, synthetic construct
  misc_feature 1..31: note = Probe
  source 1..31: mol_type = other DNA
aaggtcgtgagttcgatcctcacacggggca

SEQ ID NO: 44209 - DNA, 34 bp, synthetic construct; identical to SEQ ID NO: 15156
  misc_feature 1..34: note = Probe
  source 1..34: mol_type = other DNA

SEQ ID NO: 44210 - DNA, 29 bp, synthetic construct
  misc_feature 1..29: note = Probe
  source 1..29: mol_type = other DNA
aaggttccgggttcgagtcccggcggagt

SEQ ID NO: 44211 - DNA, 31 bp, synthetic construct; identical to SEQ ID NO: 37674
  misc_feature 1..31: note = Probe
  source 1..31: mol_type = other DNA

SEQ ID NO: 44212 - DNA, 27 bp, synthetic construct
  misc_feature 1..27: note = Probe
  source 1..27: mol_type = other DNA
aaggttgcgtgttcaagtcacgtcggg

SEQ ID NO: 44213 - DNA, 29 bp, synthetic construct
  misc_feature 1..29: note = Probe
  source 1..29: mol_type = other DNA
aaggttggtggttcgatcccacccaggga

SEQ ID NO: 44214 - DNA, 23 bp, synthetic construct
  misc_feature 1..23: note = Probe
  source 1..23: mol_type = other DNA
aagtcatggaggccatggggttg

SEQ ID NO: 44215 - DNA, 20 bp, synthetic construct
  misc_feature 1..20: note = Probe
  source 1..20: mol_type = other DNA
aagtccctgttcgggcggca

SEQ ID NO: 44216 - DNA, 17 bp, synthetic construct
  misc_feature 1..17: note = Probe
  source 1..17: mol_type = other DNA
aagtgtactggaaagtg

SEQ ID NO: 44217 - DNA, 21 bp, synthetic construct
  misc_feature 1..21: note = Probe
  source 1..21: mol_type = other DNA
aagtgtactggaaagtgcact

SEQ ID NO: 44218 - DNA, 24 bp, synthetic construct
  misc_feature 1..24: note = Probe
  source 1..24: mol_type = other DNA
aagtgtactggaaagtgcacttgg

SEQ ID NO: 44219 - DNA, 25 bp, synthetic construct
  misc_feature 1..25: note = Probe
  source 1..25: mol_type = other DNA
aagtgtactggaaagtgcacttgga

SEQ ID NO: 44220 - DNA, 26 bp, synthetic construct
  misc_feature 1..26: note = Probe
  source 1..26: mol_type = other DNA
aagtgtactggaaagtgcacttggac

SEQ ID NO: 44221 - DNA, 27 bp, synthetic construct
  misc_feature 1..27: note = Probe
  source 1..27: mol_type = other DNA
aagtgtactggaaagtgcacttggacg

SEQ ID NO: 44222 - DNA, 28 bp, synthetic construct
  misc_feature 1..28: note = Probe
  source 1..28: mol_type = other DNA
aagtgtactggaaagtgcacttggacga

SEQ ID NO: 44223 - DNA, 29 bp, synthetic construct
  misc_feature 1..29: note = Probe
  source 1..29: mol_type = other DNA
aagtgtactggaaagtgcacttggacgaa

SEQ ID NO: 44224 - DNA, 30 bp, synthetic construct; identical to SEQ ID NO: 2379
  misc_feature 1..30: note = Probe
  source 1..30: mol_type = other DNA

SEQ ID NO: 44225 - DNA, 31 bp, synthetic construct; identical to SEQ ID NO: 2380
  misc_feature 1..31: note = Probe
  source 1..31: mol_type = other DNA

SEQ ID NO: 44226 - DNA, 32 bp, synthetic construct; identical to SEQ ID NO: 2381
  misc_feature 1..32: note = Probe
  source 1..32: mol_type = other DNA

SEQ ID NO: 44227 - DNA, 33 bp, synthetic construct; identical to SEQ ID NO: 2382
  misc_feature 1..33: note = Probe
  source 1..33: mol_type = other DNA

SEQ ID NO: 44228 - DNA, 34 bp, synthetic construct; identical to SEQ ID NO: 2383
  misc_feature 1..34: note = Probe
  source 1..34: mol_type = other DNA

SEQ ID NO: 44229 - DNA, 35 bp, synthetic construct; identical to SEQ ID NO: 2384
  misc_feature 1..35: note = Probe
  source 1..35: mol_type = other DNA

SEQ ID NO: 44230 - DNA, 36 bp, synthetic construct; identical to SEQ ID NO: 2385
  misc_feature 1..36: note = Probe
  source 1..36: mol_type = other DNA

SEQ ID NO: 44231 - DNA, 37 bp, synthetic construct; identical to SEQ ID NO: 2386
  misc_feature 1..37: note = Probe
  source 1..37: mol_type = other DNA

SEQ ID NO: 44232 - DNA, 39 bp, synthetic construct; identical to SEQ ID NO: 2387
  misc_feature 1..39: note = Probe
  source 1..39: mol_type = other DNA

SEQ ID NO: 44233 - DNA, 27 bp, synthetic construct
  misc_feature 1..27: note = Probe
  source 1..27: mol_type = other DNA
aagtgtttgtgggtttaagtcccattg

SEQ ID NO: 44234 - DNA, 28 bp, synthetic construct
  misc_feature 1..28: note = Probe
  source 1..28: mol_type = other DNA
aagtgtttgtgggtttaagtcccattgg

SEQ ID NO: 44235 - DNA, 33 bp, synthetic construct; identical to SEQ ID NO: 2392
  misc_feature 1..33: note = Probe
  source 1..33: mol_type = other DNA

SEQ ID NO: 44236 - DNA, 34 bp, synthetic construct; identical to SEQ ID NO: 2393
  misc_feature 1..34: note = Probe
  source 1..34: mol_type = other DNA

SEQ ID NO: 44237 - DNA, 35 bp, synthetic construct; identical to SEQ ID NO: 2394
  misc_feature 1..35: note = Probe
  source 1..35: mol_type = other DNA

SEQ ID NO: 44238 - DNA, 36 bp, synthetic construct; identical to SEQ ID NO: 15184
  misc_feature 1..36: note = Probe
  source 1..36: mol_type = other DNA

SEQ ID NO: 44239 - DNA, 38 bp, synthetic construct; identical to SEQ ID NO: 2395
  misc_feature 1..38: note = Probe
  source 1..38: mol_type = other DNA

SEQ ID NO: 44240 - DNA, 39 bp, synthetic construct; identical to SEQ ID NO: 2396
  misc_feature 1..39: note = Probe
  source 1..39: mol_type = other DNA

SEQ ID NO: 44241 - DNA, 41 bp, synthetic construct; identical to SEQ ID NO: 2398
  misc_feature 1..41: note = Probe
  source 1..41: mol_type = other DNA

SEQ ID NO: 44242 - DNA, 42 bp, synthetic construct; identical to SEQ ID NO: 2399
  misc_feature 1..42: note = Probe
  source 1..42: mol_type = other DNA

SEQ ID NO: 44243 - DNA, 29 bp, synthetic construct
  misc_feature 1..29: note = Probe
  source 1..29: mol_type = other DNA
aagttaaattataggctaaatcctatata

SEQ ID NO: 44244 - DNA, 31 bp, synthetic construct
  misc_feature 1..31: note = Probe
  source 1..31: mol_type = other DNA
aagttaaattataggctaaatcctatatatc

SEQ ID NO: 44245 - DNA, 50 bp, synthetic construct; identical to SEQ ID NO: 2411
  misc_feature 1..50: note = Probe
  source 1..50: mol_type = other DNA

SEQ ID NO: 44246 - DNA, 49 bp, synthetic construct; identical to SEQ ID NO: 2416
  misc_feature 1..49: note = Probe
  source 1..49: mol_type = other DNA

SEQ ID NO: 44247 - DNA, 50 bp, synthetic construct; identical to SEQ ID NO: 2417
  misc_feature 1..50: note = Probe
  source 1..50: mol_type = other DNA

SEQ ID NO: 44248 - DNA, 17 bp, synthetic construct
  misc_feature 1..17: note = Probe
  source 1..17: mol_type = other DNA
aataggagcttaaaccc

SEQ ID NO: 44249 - DNA, 19 bp, synthetic construct
  misc_feature 1..19: note = Probe
  source 1..19: mol_type = other DNA
aataggagcttaaaccccc

SEQ ID NO: 44250 - DNA, 30 bp, synthetic construct; identical to SEQ ID NO: 2424
  misc_feature 1..30: note = Probe
  source 1..30: mol_type = other DNA

SEQ ID NO: 44251 - DNA, 19 bp, synthetic construct
  misc_feature 1..19: note = Probe
  source 1..19: mol_type = other DNA
aatagtaccgttaacttcc

SEQ ID NO: 44252 - DNA, 37 bp, synthetic construct; identical to SEQ ID NO: 15211
  misc_feature 1..37: note = Probe
  source 1..37: mol_type = other DNA

SEQ ID NO: 44253 - DNA, 40 bp, synthetic construct
  misc_feature 1..40: note = Probe
  source 1..40: mol_type = other DNA
aatagtaccgttaacttccaattaactagttttgacaaca

SEQ ID NO: 44254 - DNA, 50 bp, synthetic construct; identical to SEQ ID NO: 2425
  misc_feature 1..50: note = Probe
  source 1..50: mol_type = other DNA

SEQ ID NO: 44255 - DNA, 25 bp, synthetic construct
  misc_feature 1..25: note = Probe
  source 1..25: mol_type = other DNA
aatcagagaaaaagtctttaactcc

SEQ ID NO: 44256 - DNA, 30 bp, synthetic construct; identical to SEQ ID NO: 15218
  misc_feature 1..30: note = Probe
  source 1..30: mol_type = other DNA

SEQ ID NO: 44257 - DNA, 19 bp, synthetic construct
  misc_feature 1..19: note = Probe
  source 1..19: mol_type = other DNA
aatccagcgatccgagttc

SEQ ID NO: 44258 - DNA, 21 bp, synthetic construct
  misc_feature 1..21: note = Probe
  source 1..21: mol_type = other DNA
aatccagcgatccgagttcaa

SEQ ID NO: 44259 - DNA, 23 bp, synthetic construct
  misc_feature 1..23: note = Probe
  source 1..23: mol_type = other DNA
aatccagcgatccgagttcaaat

SEQ ID NO: 44260 - DNA, 36 bp, synthetic construct; identical to SEQ ID NO: 93
  misc_feature 1..36: note = Probe
  source 1..36: mol_type = other DNA

SEQ ID NO: 44261 - DNA, 37 bp, synthetic construct; identical to SEQ ID NO: 2430
  misc_feature 1..37: note = Probe
  source 1..37: mol_type = other DNA

SEQ ID NO: 44262 - DNA, 38 bp, synthetic construct; identical to SEQ ID NO: 2431
  misc_feature 1..38: note = Probe
  source 1..38: mol_type = other DNA

SEQ ID NO: 44263 - DNA, 39 bp, synthetic construct; identical to SEQ ID NO: 2432
  misc_feature 1..39: note = Probe
  source 1..39: mol_type = other DNA

SEQ ID NO: 44264 - DNA, 38 bp, synthetic construct; identical to SEQ ID NO: 2435
  misc_feature 1..38: note = Probe
  source 1..38: mol_type = other DNA

SEQ ID NO: 44265 - DNA, 37 bp, synthetic construct; identical to SEQ ID NO: 2436
  misc_feature 1..37: note = Probe
  source 1..37: mol_type = other DNA

SEQ ID NO: 44266 - DNA, 38 bp, synthetic construct; identical to SEQ ID NO: 2437
  misc_feature 1..38: note = Probe
  source 1..38: mol_type = other DNA

SEQ ID NO: 44267 - DNA, 35 bp, synthetic construct; identical to SEQ ID NO: 94
  misc_feature 1..35: note = Probe
  source 1..35: mol_type = other DNA

SEQ ID NO: 44268 - DNA, 36 bp, synthetic construct; identical to SEQ ID NO: 95
  misc_feature 1..36: note = Probe
  source 1..36: mol_type = other DNA

SEQ ID NO: 44269 - DNA, 37 bp, synthetic construct; identical to SEQ ID NO: 96
  misc_feature 1..37: note = Probe
  source 1..37: mol_type = other DNA

SEQ ID NO: 44270 - DNA, 38 bp, synthetic construct; identical to SEQ ID NO: 2441
  misc_feature 1..38: note = Probe
  source 1..38: mol_type = other DNA

SEQ ID NO: 44271 - DNA, 39 bp, synthetic construct; identical to SEQ ID NO: 2442
  misc_feature 1..39: note = Probe
  source 1..39: mol_type = other DNA

SEQ ID NO: 44272 - DNA, 25 bp, synthetic construct
  misc_feature 1..25: note = Probe
  source 1..25: mol_type = other DNA
aatccattggggtttccccgcgcag

SEQ ID NO: 44273 - DNA, 43 bp, synthetic construct
  misc_feature 1..43: note = Probe
  source 1..43: mol_type = other DNA
aatccattggggtttccccgcgcaggttcgaatcctgccgact

SEQ ID NO: 44274 - DNA, 18 bp, synthetic construct
  misc_feature 1..18: note = Probe
  source 1..18: mol_type = other DNA
aatcccaccgctgccaca

SEQ ID NO: 44275 - DNA, 19 bp, synthetic construct
  misc_feature 1..19: note = Probe
  source 1..19: mol_type = other DNA
aatcccaccgctgccacac

SEQ ID NO: 44276 - DNA, 19 bp, synthetic construct
  misc_feature 1..19: note = Probe
  source 1..19: mol_type = other DNA
aatcccaccgctgccaggt

SEQ ID NO: 44277 - DNA, 21 bp, synthetic construct
  misc_feature 1..21: note = Probe
  source 1..21: mol_type = other DNA
aatcccaccgctgccaggttt

SEQ ID NO: 44278 - DNA, 16 bp, synthetic construct
  misc_feature 1..16: note = Probe
  source 1..16: mol_type = other DNA
aatcccactcctgaca

SEQ ID NO: 44279 - DNA, 16 bp, synthetic construct
  misc_feature 1..16: note = Probe
  source 1..16: mol_type = other DNA
aatcccacttctgaca

SEQ ID NO: 44280 - DNA, 19 bp, synthetic construct
  misc_feature 1..19: note = Probe
  source 1..19: mol_type = other DNA
aatcccagcggtgcctccg

SEQ ID NO: 44281 - DNA, 17 bp, synthetic construct
  misc_feature 1..17: note = Probe
  source 1..17: mol_type = other DNA
aatcccggacgagcccc

SEQ ID NO: 44282 - DNA, 16 bp, synthetic construct
  misc_feature 1..16: note = Probe
  source 1..16: mol_type = other DNA
aatccgagtcacggca

SEQ ID NO: 44283 - DNA, 18 bp, synthetic construct
  misc_feature 1..18: note = Probe
  source 1..18: mol_type = other DNA
aatccgggtgccccctca

SEQ ID NO: 44284 - DNA, 19 bp, synthetic construct
  misc_feature 1..19: note = Probe
  source 1..19: mol_type = other DNA
aatccgggtgccccctcaa

SEQ ID NO: 44285 - DNA, 19 bp, synthetic construct
  misc_feature 1..19: note = Probe
  source 1..19: mol_type = other DNA
aatcctatatatcttaatg

SEQ ID NO: 44286 - DNA, 19 bp, synthetic construct
  misc_feature 1..19: note = Probe
  source 1..19: mol_type = other DNA
aatcctgccgactacggca

SEQ ID NO: 44287 - DNA, 19 bp, synthetic construct
  misc_feature 1..19: note = Probe
  source 1..19: mol_type = other DNA
aatcctgccgactacgtca

SEQ ID NO: 44288 - DNA, 29 bp, synthetic construct
  misc_feature 1..29: note = Probe
  source 1..29: mol_type = other DNA
aatcgcataaaacttaaaactttacagtc

SEQ ID NO: 44289 - DNA, 32 bp, synthetic construct; identical to SEQ ID NO: 15259
  misc_feature 1..32: note = Probe
  source 1..32: mol_type = other DNA

SEQ ID NO: 44290 - DNA, 37 bp, synthetic construct; identical to SEQ ID NO: 2460
  misc_feature 1..37: note = Probe
  source 1..37: mol_type = other DNA

SEQ ID NO: 44291 - DNA, 38 bp, synthetic construct; identical to SEQ ID NO: 15261
  misc_feature 1..38: note = Probe
  source 1..38: mol_type = other DNA

SEQ ID NO: 44292 - DNA, 50 bp, synthetic construct; identical to SEQ ID NO: 101
  misc_feature 1..50: note = Probe
  source 1..50: mol_type = other DNA

SEQ ID NO: 44293 - DNA, 29 bp, synthetic construct
  misc_feature 1..29: note = Probe
  source 1..29: mol_type = other DNA
aatctaaagacaggggttaggcctctttt

SEQ ID NO: 44294 - DNA, 33 bp, synthetic construct; identical to SEQ ID NO: 102
  misc_feature 1..33: note = Probe
  source 1..33: mol_type = other DNA

SEQ ID NO: 44295 - DNA, 34 bp, synthetic construct; identical to SEQ ID NO: 103
  misc_feature 1..34: note = Probe
  source 1..34: mol_type = other DNA

SEQ ID NO: 44296 - DNA, 36 bp, synthetic construct; identical to SEQ ID NO: 2466
  misc_feature 1..36: note = Probe
  source 1..36: mol_type = other DNA

SEQ ID NO: 44297 - DNA, 37 bp, synthetic construct; identical to SEQ ID NO: 2467
  misc_feature 1..37: note = Probe
  source 1..37: mol_type = other DNA

SEQ ID NO: 44298 - DNA, 38 bp, synthetic construct; identical to SEQ ID NO: 2468
  misc_feature 1..38: note = Probe
  source 1..38: mol_type = other DNA

SEQ ID NO: 44299 - DNA, 26 bp, synthetic construct
  misc_feature 1..26: note = Probe
  source 1..26: mol_type = other DNA
aatctgacaacagaggcttacgaccc

SEQ ID NO: 44300 - DNA, 29 bp, synthetic construct
  misc_feature 1..29: note = Probe
  source 1..29: mol_type = other DNA
aatctgacaacagaggcttacgacccctt

SEQ ID NO: 44301 - DNA, 32 bp, synthetic construct; identical to SEQ ID NO: 108
  misc_feature 1..32: note = Probe
  source 1..32: mol_type = other DNA

SEQ ID NO: 44302 - DNA, 36 bp, synthetic construct; identical to SEQ ID NO: 111
  misc_feature 1..36: note = Probe
  source 1..36: mol_type = other DNA

SEQ ID NO: 44303 - DNA, 37 bp, synthetic construct; identical to SEQ ID NO: 2478
  misc_feature 1..37: note = Probe
  source 1..37: mol_type = other DNA

SEQ ID NO: 44304 - DNA, 38 bp, synthetic construct; identical to SEQ ID NO: 2479
  misc_feature 1..38: note = Probe
  source 1..38: mol_type = other DNA

SEQ ID NO: 44305 - DNA, 39 bp, synthetic construct; identical to SEQ ID NO: 2480
  misc_feature 1..39: note = Probe
  source 1..39: mol_type = other DNA

SEQ ID NO: 44306 - DNA, 50 bp, synthetic construct; identical to SEQ ID NO: 2483
  misc_feature 1..50: note = Probe
  source 1..50: mol_type = other DNA

SEQ ID NO: 44307 - DNA, 45 bp, synthetic construct; identical to SEQ ID NO: 2484
  misc_feature 1..45: note = Probe
  source 1..45: mol_type = other DNA

SEQ ID NO: 44308 - DNA, 17 bp, synthetic construct
  misc_feature 1..17: note = Probe
  source 1..17: mol_type = other DNA
aatgccccaactaaata

SEQ ID NO: 44309 - DNA, 19 bp, synthetic construct
  misc_feature 1..19: note = Probe
  source 1..19: mol_type = other DNA
aatgccccaactaaatact

SEQ ID NO: 44310 - DNA, 20 bp, synthetic construct
  misc_feature 1..20: note = Probe
  source 1..20: mol_type = other DNA
aatgccccaactaaatacta

SEQ ID NO: 44311 - DNA, 21 bp, synthetic construct
  misc_feature 1..21: note = Probe
  source 1..21: mol_type = other DNA
aatgccccaactaaatactac

SEQ ID NO: 44312 - DNA, 22 bp, synthetic construct
  misc_feature 1..22: note = Probe
  source 1..22: mol_type = other DNA
aatgccccaactaaatactacc

SEQ ID NO: 44313 - DNA, 23 bp, synthetic construct
  misc_feature 1..23: note = Probe
  source 1..23: mol_type = other DNA
aatgccccaactaaatactaccg

SEQ ID NO: 44314 - DNA, 24 bp, synthetic construct
  misc_feature 1..24: note = Probe
  source 1..24: mol_type = other DNA
aatgccccaactaaatactaccgt

SEQ ID NO: 44315 - DNA, 25 bp, synthetic construct
  misc_feature 1..25: note = Probe
  source 1..25: mol_type = other DNA
aatgccccaactaaatactaccgta

SEQ ID NO: 44316 - DNA, 26 bp, synthetic construct
  misc_feature 1..26: note = Probe
  source 1..26: mol_type = other DNA
aatgccccaactaaatactaccgtat

SEQ ID NO: 44317 - DNA, 27 bp, synthetic construct
  misc_feature 1..27: note = Probe
  source 1..27: mol_type = other DNA
aatgccccaactaaatactaccgtatg

SEQ ID NO: 44318 - DNA, 28 bp, synthetic construct
  misc_feature 1..28: note = Probe
  source 1..28: mol_type = other DNA
aatgccccaactaaatactaccgtatgg

SEQ ID NO: 44319 - DNA, 29 bp, synthetic construct
  misc_feature 1..29: note = Probe
  source 1..29: mol_type = other DNA
aatgccccaactaaatactaccgtatggc

SEQ ID NO: 44320 - DNA, 29 bp, synthetic construct
  misc_feature 1..29: note = Probe
  source 1..29: mol_type = other DNA
aatggtggagttaaagactttttctctga

SEQ ID NO: 44321 - DNA, 31 bp, synthetic construct; identical to SEQ ID NO: 2497
  misc_feature 1..31: note = Probe
  source 1..31: mol_type = other DNA

SEQ ID NO: 44322 - DNA, 32 bp, synthetic construct; identical to SEQ ID NO: 2498
  misc_feature 1..32: note = Probe
  source 1..32: mol_type = other DNA

SEQ ID NO: 44323 - DNA, 34 bp, synthetic construct; identical to SEQ ID NO: 2499
  misc_feature 1..34: note = Probe
  source 1..34: mol_type = other DNA

SEQ ID NO: 44324 - DNA, 26 bp, synthetic construct
  misc_feature 1..26: note = Probe
  source 1..26: mol_type = other DNA
aatgttggttatacccttcccgtact

SEQ ID NO: 44325 - DNA, 27 bp, synthetic construct
  misc_feature 1..27: note = Probe
  source 1..27: mol_type = other DNA
aatgttggttatacccttcccgtacta

SEQ ID NO: 44326 - DNA, 18 bp, synthetic construct
  misc_feature 1..18: note = Probe
  source 1..18: mol_type = other DNA
aattaactagttttgaca

SEQ ID NO: 44327 - DNA, 32 bp, synthetic construct
  misc_feature 1..32: note = Probe
  source 1..32: mol_type = other DNA
aattaactagttttgacaacattcaaaaaaga

SEQ ID NO: 44328 - DNA, 33 bp, synthetic construct; identical to SEQ ID NO: 15305
  misc_feature 1..33: note = Probe
  source 1..33: mol_type = other DNA

SEQ ID NO: 44329 - DNA, 38 bp, synthetic construct; identical to SEQ ID NO: 2503
  misc_feature 1..38: note = Probe
  source 1..38: mol_type = other DNA

SEQ ID NO: 44330 - DNA, 38 bp, synthetic construct; identical to SEQ ID NO: 15309
  misc_feature 1..38: note = Probe
  source 1..38: mol_type = other DNA

SEQ ID NO: 44331 - DNA, 50 bp, synthetic construct; identical to SEQ ID NO: 113
  misc_feature 1..50: note = Probe
  source 1..50: mol_type = other DNA

SEQ ID NO: 44332 - DNA, 20 bp, synthetic construct
  misc_feature 1..20: note = Probe
  source 1..20: mol_type = other DNA
aattcccggtcagggaacca

SEQ ID NO: 44333 - DNA, 32 bp, synthetic construct
  misc_feature 1..32: note = Probe
  source 1..32: mol_type = other DNA
aattcgaagaagcagcttcaaacctgccgggg

SEQ ID NO: 44334 - DNA, 36 bp, synthetic construct; identical to SEQ ID NO: 26921
  misc_feature 1..36: note = Probe
  source 1..36: mol_type = other DNA

SEQ ID NO: 44335 - DNA, 37 bp, synthetic construct; identical to SEQ ID NO: 2507
  misc_feature 1..37: note = Probe
  source 1..37: mol_type = other DNA

SEQ ID NO: 44336 - DNA, 38 bp, synthetic construct; identical to SEQ ID NO: 2508
  misc_feature 1..38: note = Probe
  source 1..38: mol_type = other DNA

SEQ ID NO: 44337 - DNA, 21 bp, synthetic construct
  misc_feature 1..21: note = Probe
  source 1..21: mol_type = other DNA
aattgcaaattcgaagaagca

SEQ ID NO: 44338 - DNA, 31 bp, synthetic construct; identical to SEQ ID NO: 2510
  misc_feature 1..31: note = Probe
  source 1..31: mol_type = other DNA

SEQ ID NO: 44339 - DNA, 32 bp, synthetic construct; identical to SEQ ID NO: 2511
  misc_feature 1..32: note = Probe
  source 1..32: mol_type = other DNA

SEQ ID NO: 44340 - DNA, 35 bp, synthetic construct
  misc_feature 1..35: note = Probe
  source 1..35: mol_type = other DNA
aattgcaaattcgaagaagcagcttcaaacctgcc

SEQ ID NO: 44341 - DNA, 38 bp, synthetic construct; identical to SEQ ID NO: 2514
  misc_feature 1..38: note = Probe
  source 1..38: mol_type = other DNA

SEQ ID NO: 44342 - DNA, 39 bp, synthetic construct; identical to SEQ ID NO: 2515
  misc_feature 1..39: note = Probe
  source 1..39: mol_type = other DNA

SEQ ID NO: 44343 - DNA, 40 bp, synthetic construct; identical to SEQ ID NO: 2516
  misc_feature 1..40: note = Probe
  source 1..40: mol_type = other DNA

SEQ ID NO: 44344 - DNA, 44 bp, synthetic construct; identical to SEQ ID NO: 2520
  misc_feature 1..44: note = Probe
  source 1..44: mol_type = other DNA

SEQ ID NO: 44345 - DNA, 45 bp, synthetic construct; identical to SEQ ID NO: 2521
  misc_feature 1..45: note = Probe
  source 1..45: mol_type = other DNA

SEQ ID NO: 44346 - DNA, 50 bp, synthetic construct; identical to SEQ ID NO: 2523
  misc_feature 1..50: note = Probe
  source 1..50: mol_type = other DNA

SEQ ID NO: 44347 - DNA, 22 bp, synthetic construct
  misc_feature 1..22: note = Probe
  source 1..22: mol_type = other DNA
aattttggtgcaactccaaata

SEQ ID NO: 44348 - DNA, 50 bp, synthetic construct; identical to SEQ ID NO: 2525
  misc_feature 1..50: note = Probe
  source 1..50: mol_type = other DNA

SEQ ID NO: 44349 - DNA, 27 bp, synthetic construct
  misc_feature 1..27: note = Probe
  source 1..27: mol_type = other DNA
acaaagcacccaacttacacttaggag

SEQ ID NO: 44350 - DNA, 28 bp, synthetic construct
  misc_feature 1..28: note = Probe
  source 1..28: mol_type = other DNA
acaaagcacccaacttacacttaggaga

SEQ ID NO: 44351 - DNA, 29 bp, synthetic construct
  misc_feature 1..29: note = Probe
  source 1..29: mol_type = other DNA
acaaagcacccaacttacacttaggagat

SEQ ID NO: 44352 - DNA, 33 bp, synthetic construct; identical to SEQ ID NO: 2538
  misc_feature 1..33: note = Probe
  source 1..33: mol_type = other DNA

SEQ ID NO: 44353 - DNA, 36 bp, synthetic construct; identical to SEQ ID NO: 15324
  misc_feature 1..36: note = Probe
  source 1..36: mol_type = other DNA

SEQ ID NO: 44354 - DNA, 16 bp, synthetic construct
  misc_feature 1..16: note = Probe
  source 1..16: mol_type = other DNA
acaacagaggcttacg

SEQ ID NO: 44355 - DNA, 17 bp, synthetic construct
  misc_feature 1..17: note = Probe
  source 1..17: mol_type = other DNA
acaacagaggcttacga

SEQ ID NO: 44356 - DNA, 18 bp, synthetic construct
  misc_feature 1..18: note = Probe
  source 1..18: mol_type = other DNA
acaacagaggcttacgac

SEQ ID NO: 44357 - DNA, 19 bp, synthetic construct
  misc_feature 1..19: note = Probe
  source 1..19: mol_type = other DNA
acaacagaggcttacgacc

SEQ ID NO: 44358 - DNA, 20 bp, synthetic construct
  misc_feature 1..20: note = Probe
  source 1..20: mol_type = other DNA
acaacagaggcttacgaccc

SEQ ID NO: 44359 - DNA, 21 bp, synthetic construct
  misc_feature 1..21: note = Probe
  source 1..21: mol_type = other DNA
acaacagaggcttacgacccc

SEQ ID NO: 44360 - DNA, 22 bp, synthetic construct
  misc_feature 1..22: note = Probe
  source 1..22: mol_type = other DNA
acaacagaggcttacgacccct

SEQ ID NO: 44361 - DNA, 23 bp, synthetic construct
  misc_feature 1..23: note = Probe
  source 1..23: mol_type = other DNA
acaacagaggcttacgacccctt

SEQ ID NO: 44362 - DNA, 24 bp, synthetic construct
  misc_feature 1..24: note = Probe
  source 1..24: mol_type = other DNA
acaacagaggcttacgacccctta

SEQ ID NO: 44363 - DNA, 25 bp, synthetic construct
  misc_feature 1..25: note = Probe
  source 1..25: mol_type = other DNA
acaacagaggcttacgaccccttat

SEQ ID NO: 44364 - DNA, 26 bp, synthetic construct
  misc_feature 1..26: note = Probe
  source 1..26: mol_type = other DNA
acaacagaggcttacgaccccttatt

SEQ ID NO: 44365 - DNA, 27 bp, synthetic construct
  misc_feature 1..27: note = Probe
  source 1..27: mol_type = other DNA
acaacagaggcttacgaccccttattt

SEQ ID NO: 44366 - DNA, 28 bp, synthetic construct
  misc_feature 1..28: note = Probe
  source 1..28: mol_type = other DNA
acaacagaggcttacgaccccttattta

SEQ ID NO: 44367 - DNA, 29 bp, synthetic construct
  misc_feature 1..29: note = Probe
  source 1..29: mol_type = other DNA
acaacagaggcttacgaccccttatttac

SEQ ID NO: 44368 - DNA, 31 bp, synthetic construct; identical to SEQ ID NO: 2563
  misc_feature 1..31: note = Probe
  source 1..31: mol_type = other DNA

SEQ ID NO: 44369 - DNA, 32 bp, synthetic construct; identical to SEQ ID NO: 2564
  misc_feature 1..32: note = Probe
  source 1..32: mol_type = other DNA

SEQ ID NO: 44370 - DNA, 33 bp, synthetic construct; identical to SEQ ID NO: 2565
  misc_feature 1..33: note = Probe
  source 1..33: mol_type = other DNA

SEQ ID NO: 44371 - DNA, 34 bp, synthetic construct; identical to SEQ ID NO: 2566
  misc_feature 1..34: note = Probe
  source 1..34: mol_type = other DNA

SEQ ID NO: 44372 - DNA, 35 bp, synthetic construct; identical to SEQ ID NO: 2567
  misc_feature 1..35: note = Probe
  source 1..35: mol_type = other DNA

SEQ ID NO: 44373 - DNA, 36 bp, synthetic construct; identical to SEQ ID NO: 2568
  misc_feature 1..36: note = Probe
  source 1..36: mol_type = other DNA

SEQ ID NO: 44374 - DNA, 37 bp, synthetic construct; identical to SEQ ID NO: 2569
  misc_feature 1..37: note = Probe
  source 1..37: mol_type = other DNA

SEQ ID NO: 44375 - DNA, 38 bp, synthetic construct; identical to SEQ ID NO: 2570
  misc_feature 1..38: note = Probe
  source 1..38: mol_type = other DNA

SEQ ID NO: 44376 - DNA, 19 bp, synthetic construct
  misc_feature 1..19: note = Probe
  source 1..19: mol_type = other DNA
acaacatggctttctcaac

SEQ ID NO: 44377 - DNA, 17 bp, synthetic construct
  misc_feature 1..17: note = Probe
  source 1..17: mol_type = other DNA
acaacattcaaaaaaga

SEQ ID NO: 44378 - DNA, 18 bp, synthetic construct
  misc_feature 1..18: note = Probe
  source 1..18: mol_type = other DNA
acaacattcaaaaaagag

SEQ ID NO: 44379 - DNA, 20 bp, synthetic construct
  misc_feature 1..20: note = Probe
  source 1..20: mol_type = other DNA
acaacattcaaaaaagagta

SEQ ID NO: 44380 - DNA, 21 bp, synthetic construct
  misc_feature 1..21: note = Probe
  source 1..21: mol_type = other DNA
acaacattcaaaaaagagtaa

SEQ ID NO: 44381 - DNA, 28 bp, synthetic construct
  misc_feature 1..28: note = Probe
  source 1..28: mol_type = other DNA
acaacgatggtttttcatatcattggtc

SEQ ID NO: 44382 - DNA, 29 bp, synthetic construct
  misc_feature 1..29: note = Probe
  source 1..29: mol_type = other DNA
acaacgatggtttttcatatcattggtcg

SEQ ID NO: 44383 - DNA, 31 bp, synthetic construct
  misc_feature 1..31: note = Probe
  source 1..31: mol_type = other DNA
acaacgatggtttttcatatcattggtcgtg

SEQ ID NO: 44384 - DNA, 35 bp, synthetic construct; identical to SEQ ID NO: 26962
  misc_feature 1..35: note = Probe
  source 1..35: mol_type = other DNA

SEQ ID NO: 44385 - DNA, 50 bp, synthetic construct; identical to SEQ ID NO: 118
  misc_feature 1..50: note = Probe
  source 1..50: mol_type = other DNA

SEQ ID NO: 44386 - DNA, 17 bp, synthetic construct
  misc_feature 1..17: note = Probe
  source 1..17: mol_type = other DNA
acaagaactgctaactc

SEQ ID NO: 44387 - DNA, 18 bp, synthetic construct
  misc_feature 1..18: note = Probe
  source 1..18: mol_type = other DNA
acaagaactgctaactca

SEQ ID NO: 44388 - DNA, 20 bp, synthetic construct
  misc_feature 1..20: note = Probe
  source 1..20: mol_type = other DNA
acaagaactgctaactcatg

SEQ ID NO: 44389 - DNA, 35 bp, synthetic construct; identical to SEQ ID NO: 12517
  misc_feature 1..35: note = Probe
  source 1..35: mol_type = other DNA

SEQ ID NO: 44390 - DNA, 44 bp, synthetic construct; identical to SEQ ID NO: 120
  misc_feature 1..44: note = Probe
  source 1..44: mol_type = other DNA

SEQ ID NO: 44391 - DNA, 46 bp, synthetic construct; identical to SEQ ID NO: 122
  misc_feature 1..46: note = Probe
  source 1..46: mol_type = other DNA

SEQ ID NO: 44392 - DNA, 49 bp, synthetic construct; identical to SEQ ID NO: 2587
  misc_feature 1..49: note = Probe
  source 1..49: mol_type = other DNA

SEQ ID NO: 44393 - DNA, 50 bp, synthetic construct; identical to SEQ ID NO: 2588
  misc_feature 1..50: note = Probe
  source 1..50: mol_type = other DNA

SEQ ID NO: 44394 - DNA, 16 bp, synthetic construct
  misc_feature 1..16: note = Probe
  source 1..16: mol_type = other DNA
acacaaagcacccaac

SEQ ID NO: 44395 - DNA, 17 bp, synthetic construct
  misc_feature 1..17: note = Probe
  source 1..17: mol_type = other DNA
acacaaagcacccaact

SEQ ID NO: 44396 - DNA, 25 bp, synthetic construct
  misc_feature 1..25: note = Probe
  source 1..25: mol_type = other DNA
acacaaagcacccaacttacactta

SEQ ID NO: 44397 - DNA, 26 bp, synthetic construct
  misc_feature 1..26: note = Probe
  source 1..26: mol_type = other DNA
acacaaagcacccaacttacacttag

SEQ ID NO: 44398 - DNA, 29 bp, synthetic construct
  misc_feature 1..29: note = Probe
  source 1..29: mol_type = other DNA
acacaaagcacccaacttacacttaggag

SEQ ID NO: 44399 - DNA, 31 bp, synthetic construct; identical to SEQ ID NO: 2597
  misc_feature 1..31: note = Probe
  source 1..31: mol_type = other DNA

SEQ ID NO: 44400 - DNA, 33 bp, synthetic construct
  misc_feature 1..33: note = Probe
  source 1..33: mol_type = other DNA
acacaaagcacccaacttacacttaggagattt

SEQ ID NO: 44401 - DNA, 35 bp, synthetic construct; identical to SEQ ID NO: 2598
  misc_feature 1..35: note = Probe
  source 1..35: mol_type = other DNA

SEQ ID NO: 44402 - DNA, 38 bp, synthetic construct
  misc_feature 1..38: note = Probe
  source 1..38: mol_type = other DNA
acacaaagcacccaacttacacttaggagatttcaact

SEQ ID NO: 44403 - DNA, 40 bp, synthetic construct
  misc_feature 1..40: note = Probe
  source 1..40: mol_type = other DNA
acacaaagcacccaacttacacttaggagatttcaactta

SEQ ID NO: 44404 - DNA, 41 bp, synthetic construct
  misc_feature 1..41: note = Probe
  source 1..41: mol_type = other DNA
acacaaagcacccaacttacacttaggagatttcaacttaa

SEQ ID NO: 44405 - DNA, 49 bp, synthetic construct; identical to SEQ ID NO: 123
  misc_feature 1..49: note = Probe
  source 1..49: mol_type = other DNA

SEQ ID NO: 44406 - DNA, 50 bp, synthetic construct; identical to SEQ ID NO: 2603
  misc_feature 1..50: note = Probe
  source 1..50: mol_type = other DNA

SEQ ID NO: 44407 - DNA, 17 bp, synthetic construct
  misc_feature 1..17: note = Probe
  source 1..17: mol_type = other DNA
acacccacccaagaaca

SEQ ID NO: 44408 - DNA, 19 bp, synthetic construct
  misc_feature 1..19: note = Probe
  source 1..19: mol_type = other DNA
acacccacccaagaacagg

SEQ ID NO: 44409 - DNA, 24 bp, synthetic construct
  misc_feature 1..24: note = Probe
  source 1..24: mol_type = other DNA
acacccacccaagaacagggtttg

SEQ ID NO: 44410 - DNA, 25 bp, synthetic construct
  misc_feature 1..25: note = Probe
  source 1..25: mol_type = other DNA
acacccacccaagaacagggtttgt

SEQ ID NO: 44411 - DNA, 26 bp, synthetic construct
  misc_feature 1..26: note = Probe
  source 1..26: mol_type = other DNA
acacccacccaagaacagggtttgtt

SEQ ID NO: 44412 - DNA, 27 bp, synthetic construct
  misc_feature 1..27: note = Probe
  source 1..27: mol_type = other DNA
acacccacccaagaacagggtttgtta

SEQ ID NO: 44413 - DNA, 28 bp, synthetic construct
  misc_feature 1..28: note = Probe
  source 1..28: mol_type = other DNA
acacccacccaagaacagggtttgttaa

SEQ ID NO: 44414 - DNA, 29 bp, synthetic construct
  misc_feature 1..29: note = Probe
  source 1..29: mol_type = other DNA
acacccacccaagaacagggtttgttaag

SEQ ID NO: 44415 - DNA, 30 bp, synthetic construct; identical to SEQ ID NO: 15394
  misc_feature 1..30: note = Probe
  source 1..30: mol_type = other DNA

SEQ ID NO: 44416 - DNA, 23 bp, synthetic construct
  misc_feature 1..23: note = Probe
  source 1..23: mol_type = other DNA
acacctcagaaggtctcactttt

SEQ ID NO: 44417 - DNA, 17 bp, synthetic construct
  misc_feature 1..17: note = Probe
  source 1..17: mol_type = other DNA
acacctctttacagtga

SEQ ID NO: 44418 - DNA, 19 bp, synthetic construct
  misc_feature 1..19: note = Probe
  source 1..19: mol_type = other DNA
acacctctttacagtgaaa

SEQ ID NO: 44419 - DNA, 20 bp, synthetic construct
  misc_feature 1..20: note = Probe
  source 1..20: mol_type = other DNA
acacctctttacagtgaaat

SEQ ID NO: 44420 - DNA, 36 bp, synthetic construct; identical to SEQ ID NO: 12522
  misc_feature 1..36: note = Probe
  source 1..36: mol_type = other DNA

SEQ ID NO: 44421 - DNA, 37 bp, synthetic construct; identical to SEQ ID NO: 15407
  misc_feature 1..37: note = Probe
  source 1..37: mol_type = other DNA

SEQ ID NO: 44422 - DNA, 38 bp, synthetic construct; identical to SEQ ID NO: 12523
  misc_feature 1..38: note = Probe
  source 1..38: mol_type = other DNA

SEQ ID NO: 44423 - DNA, 41 bp, synthetic construct; identical to SEQ ID NO: 15408
  misc_feature 1..41: note = Probe
  source 1..41: mol_type = other DNA

SEQ ID NO: 44424 - DNA, 42 bp, synthetic construct; identical to SEQ ID NO: 2613
  misc_feature 1..42: note = Probe
  source 1..42: mol_type = other DNA

SEQ ID NO: 44425 - DNA, 50 bp, synthetic construct
  misc_feature 1..50: note = Probe
  source 1..50: mol_type = other DNA
acacgcagaaggtcctgggttcgagccccagtggaaccacggcgtgattc

SEQ ID NO: 44426 - DNA, 42 bp, synthetic construct; identical to SEQ ID NO: 15410
  misc_feature 1..42: note = Probe
  source 1..42: mol_type = other DNA

SEQ ID NO: 44427 - DNA, 44 bp, synthetic construct
  misc_feature 1..44: note = Probe
  source 1..44: mol_type = other DNA
acacgcagaaggtcctgggttcgagccccagtggaaccatagcc

SEQ ID NO: 44428 - DNA, 45 bp, synthetic construct
  misc_feature 1..45: note = Probe
  source 1..45: mol_type = other DNA
acacgcagaaggtcctgggttcgagccccagtggaaccatagccg

SEQ ID NO: 44429 - DNA, 50 bp, synthetic construct; identical to SEQ ID NO: 15411
  misc_feature 1..50: note = Probe
  source 1..50: mol_type = other DNA

SEQ ID NO: 44430 - DNA, 16 bp, synthetic construct
  misc_feature 1..16: note = Probe
  source 1..16: mol_type = other DNA
acacgcgaaaggtccc

SEQ ID NO: 44431 - DNA, 36 bp, synthetic construct; identical to SEQ ID NO: 12531
  misc_feature 1..36: note = Probe
  source 1..36: mol_type = other DNA

SEQ ID NO: 44432 - DNA, 39 bp, synthetic construct
  misc_feature 1..39: note = Probe
  source 1..39: mol_type = other DNA
acacgcgaaaggtccccggttcgaaaccgggcggaaaca

SEQ ID NO: 44433 - DNA, 41 bp, synthetic construct
  misc_feature 1..41: note = Probe
  source 1..41: mol_type = other DNA
acacgcgaaaggtccccggttcgaaaccgggcggaaacacc

SEQ ID NO: 44434 - DNA, 42 bp, synthetic construct; identical to SEQ ID NO: 15415
  misc_feature 1..42: note = Probe
  source 1..42: mol_type = other DNA

SEQ ID NO: 44435 - DNA, 50 bp, synthetic construct
  misc_feature 1..50: note = Probe
  source 1..50: mol_type = other DNA
acacgcgaaaggtccccggttcgaaaccgggcggaaacacgttttttttt

SEQ ID NO: 44436 - DNA, 25 bp, synthetic construct
  misc_feature 1..25: note = Probe
  source 1..25: mol_type = other DNA
acacgcgaaaggtccccggttcgat

SEQ ID NO: 44437 - DNA, 41 bp, synthetic construct
  misc_feature 1..41: note = Probe
  source 1..41: mol_type = other DNA
acacgcgaaaggtccccggttcgatcccgggcggaaacagg

SEQ ID NO: 44438 - DNA, 42 bp, synthetic construct; identical to SEQ ID NO: 37794
  misc_feature 1..42: note = Probe
  source 1..42: mol_type = other DNA

SEQ ID NO: 44439 - DNA, 19 bp, synthetic construct
  misc_feature 1..19: note = Probe
  source 1..19: mol_type = other DNA
acacggggcacaataattt

SEQ ID NO: 44440 - DNA, 20 bp, synthetic construct
  misc_feature 1..20: note = Probe
  source 1..20: mol_type = other DNA
acactactataaccacccta

SEQ ID NO: 44441 - DNA, 44 bp, synthetic construct; identical to SEQ ID NO: 2618
  misc_feature 1..44: note = Probe
  source 1..44: mol_type = other DNA

SEQ ID NO: 44442 - DNA, 45 bp, synthetic construct; identical to SEQ ID NO: 2619
  misc_feature 1..45: note = Probe
  source 1..45: mol_type = other DNA

SEQ ID NO: 44443 - DNA, 46 bp, synthetic construct; identical to SEQ ID NO: 2620
  misc_feature 1..46: note = Probe
  source 1..46: mol_type = other DNA

SEQ ID NO: 44444 - DNA, 50 bp, synthetic construct; identical to SEQ ID NO: 2621
  misc_feature 1..50: note = Probe
  source 1..50: mol_type = other DNA

SEQ ID NO: 44445 - DNA, 18 bp, synthetic construct
  misc_feature 1..18: note = Probe
  source 1..18: mol_type = other DNA
acacttaggagatttcaa

SEQ ID NO: 44446 - DNA, 20 bp, synthetic construct
  misc_feature 1..20: note = Probe
  source 1..20: mol_type = other DNA
acacttaggagatttcaact

SEQ ID NO: 44447 - DNA, 22 bp, synthetic construct
  misc_feature 1..22: note = Probe
  source 1..22: mol_type = other DNA
acacttaggagatttcaactta

SEQ ID NO: 44448 - DNA, 25 bp, synthetic construct
  misc_feature 1..25: note = Probe
  source 1..25: mol_type = other DNA
acacttaggagatttcaacttaact

SEQ ID NO: 44449 - DNA, 27 bp, synthetic construct
  misc_feature 1..27: note = Probe
  source 1..27: mol_type = other DNA
acacttaggagatttcaacttaacttg

SEQ ID NO: 44450 - DNA, 28 bp, synthetic construct
  misc_feature 1..28: note = Probe
  source 1..28: mol_type = other DNA
acacttaggagatttcaacttaacttga

SEQ ID NO: 44451 - DNA, 29 bp, synthetic construct
  misc_feature 1..29: note = Probe
  source 1..29: mol_type = other DNA
acacttaggagatttcaacttaacttgac

SEQ ID NO: 44452 - DNA, 30 bp, synthetic construct; identical to SEQ ID NO: 8999
  misc_feature 1..30: note = Probe
  source 1..30: mol_type = other DNA

SEQ ID NO: 44453 - DNA, 31 bp, synthetic construct; identical to SEQ ID NO: 2625
  misc_feature 1..31: note = Probe
  source 1..31: mol_type = other DNA

SEQ ID NO: 44454 - DNA, 32 bp, synthetic construct; identical to SEQ ID NO: 2626
  misc_feature 1..32: note = Probe
  source 1..32: mol_type = other DNA

SEQ ID NO: 44455 - DNA, 33 bp, synthetic construct; identical to SEQ ID NO: 2627
  misc_feature 1..33: note = Probe
  source 1..33: mol_type = other DNA

SEQ ID NO: 44456 - DNA, 34 bp, synthetic construct; identical to SEQ ID NO: 2628
  misc_feature 1..34: note = Probe
  source 1..34: mol_type = other DNA

SEQ ID NO: 44457 - DNA, 35 bp, synthetic construct; identical to SEQ ID NO: 15431
  misc_feature 1..35: note = Probe
  source 1..35: mol_type = other DNA

SEQ ID NO: 44458 - DNA, 36 bp, synthetic construct; identical to SEQ ID NO: 27021
  misc_feature 1..36: note = Probe
  source 1..36: mol_type = other DNA

SEQ ID NO: 44459 - DNA, 37 bp, synthetic construct; identical to SEQ ID NO: 2629
  misc_feature 1..37: note = Probe
  source 1..37: mol_type = other DNA

SEQ ID NO: 44460 - DNA, 38 bp, synthetic construct; identical to SEQ ID NO: 2630
  misc_feature 1..38: note = Probe
  source 1..38: mol_type = other DNA

SEQ ID NO: 44461 - DNA, 39 bp, synthetic construct; identical to SEQ ID NO: 2631
  misc_feature 1..39: note = Probe
  source 1..39: mol_type = other DNA

SEQ ID NO: 44462 - DNA, 40 bp, synthetic construct; identical to SEQ ID NO: 2632
  misc_feature 1..40: note = Probe
  source 1..40: mol_type = other DNA

SEQ ID NO: 44463 - DNA, 41 bp, synthetic construct; identical to SEQ ID NO: 2633
  misc_feature 1..41: note = Probe
  source 1..41: mol_type = other DNA

SEQ ID NO: 44464 - DNA, 42 bp, synthetic construct; identical to SEQ ID NO: 2634
  misc_feature 1..42: note = Probe
  source 1..42: mol_type = other DNA

SEQ ID NO: 44465 - DNA, 17 bp, synthetic construct
  misc_feature 1..17: note = Probe
  source 1..17: mol_type = other DNA
acagaccaagagccttc

SEQ ID NO: 44466 - DNA, 30 bp, synthetic construct; identical to SEQ ID NO: 27031
  misc_feature 1..30: note = Probe
  source 1..30: mol_type = other DNA

SEQ ID NO: 44467 - DNA, 37 bp, synthetic construct; identical to SEQ ID NO: 12533
  misc_feature 1..37: note = Probe
  source 1..37: mol_type = other DNA

SEQ ID NO: 44468 - DNA, 50 bp, synthetic construct; identical to SEQ ID NO: 129
  misc_feature 1..50: note = Probe
  source 1..50: mol_type = other DNA

SEQ ID NO: 44469 - DNA, 18 bp, synthetic construct
  misc_feature 1..18: note = Probe
  source 1..18: mol_type = other DNA
acagaggcttacgacccc

SEQ ID NO: 44470 - DNA, 28 bp, synthetic construct
  misc_feature 1..28: note = Probe
  source 1..28: mol_type = other DNA
acagaggcttacgaccccttatttaccg

SEQ ID NO: 44471 - DNA, 30 bp, synthetic construct; identical to SEQ ID NO: 2640
  misc_feature 1..30: note = Probe
  source 1..30: mol_type = other DNA

SEQ ID NO: 44472 - DNA, 16 bp, synthetic construct
  misc_feature 1..16: note = Probe
  source 1..16: mol_type = other DNA
acagctatccattggt

SEQ ID NO: 44473 - DNA, 26 bp, synthetic construct
  misc_feature 1..26: note = Probe
  source 1..26: mol_type = other DNA
acagctatccattggtcttaggcccc

SEQ ID NO: 44474 - DNA, 27 bp, synthetic construct
  misc_feature 1..27: note = Probe
  source 1..27: mol_type = other DNA
acagctatccattggtcttaggcccca

SEQ ID NO: 44475 - DNA, 28 bp, synthetic construct
  misc_feature 1..28: note = Probe
  source 1..28: mol_type = other DNA
acagctatccattggtcttaggccccaa

SEQ ID NO: 44476 - DNA, 49 bp, synthetic construct; identical to SEQ ID NO: 2643
  misc_feature 1..49: note = Probe
  source 1..49: mol_type = other DNA

SEQ ID NO: 44477 - DNA, 50 bp, synthetic construct; identical to SEQ ID NO: 2644
  misc_feature 1..50: note = Probe
  source 1..50: mol_type = other DNA

SEQ ID NO: 44478 - DNA, 35 bp, synthetic construct; identical to SEQ ID NO: 15458
  misc_feature 1..35: note = Probe
  source 1..35: mol_type = other DNA

SEQ ID NO: 44479 - DNA, 32 bp, synthetic construct; identical to SEQ ID NO: 15463
  misc_feature 1..32: note = Probe
  source 1..32: mol_type = other DNA

SEQ ID NO: 44480 - DNA, 33 bp, synthetic construct; identical to SEQ ID NO: 2645
  misc_feature 1..33: note = Probe
  source 1..33: mol_type = other DNA

SEQ ID NO: 44481 - DNA, 34 bp, synthetic construct; identical to SEQ ID NO: 15465
  misc_feature 1..34: note = Probe
  source 1..34: mol_type = other DNA

SEQ ID NO: 44482 - DNA, 35 bp, synthetic construct; identical to SEQ ID NO: 2646
  misc_feature 1..35: note = Probe
  source 1..35: mol_type = other DNA

SEQ ID NO: 44483 - DNA, 38 bp, synthetic construct; identical to SEQ ID NO: 2648
  misc_feature 1..38: note = Probe
  source 1..38: mol_type = other DNA

SEQ ID NO: 44484 - DNA, 28 bp, synthetic construct
  misc_feature 1..28: note = Probe
  source 1..28: mol_type = other DNA
acaggggttaggcctctttttaccagct

SEQ ID NO: 44485 - DNA, 18 bp, synthetic construct
  misc_feature 1..18: note = Probe
  source 1..18: mol_type = other DNA
acagtcagaggttcaatt

SEQ ID NO: 44486 - DNA, 19 bp, synthetic construct
  misc_feature 1..19: note = Probe
  source 1..19: mol_type = other DNA
acagtcagaggttcaattc

SEQ ID NO: 44487 - DNA, 23 bp, synthetic construct
  misc_feature 1..23: note = Probe
  source 1..23: mol_type = other DNA
acagtcagaggttcaattcctct

SEQ ID NO: 44488 - DNA, 25 bp, synthetic construct
  misc_feature 1..25: note = Probe
  source 1..25: mol_type = other DNA
acagtcagaggttcaattcctcttc

SEQ ID NO: 44489 - DNA, 26 bp, synthetic construct
  misc_feature 1..26: note = Probe
  source 1..26: mol_type = other DNA
acagtcagaggttcaattcctcttct

SEQ ID NO: 44490 - DNA, 27 bp, synthetic construct
  misc_feature 1..27: note = Probe
  source 1..27: mol_type = other DNA
acagtcagaggttcaattcctcttctt

SEQ ID NO: 44491 - DNA, 28 bp, synthetic construct
  misc_feature 1..28: note = Probe
  source 1..28: mol_type = other DNA
acagtcagaggttcaattcctcttctta

SEQ ID NO: 44492 - DNA, 29 bp, synthetic construct
  misc_feature 1..29: note = Probe
  source 1..29: mol_type = other DNA
acagtcagaggttcaattcctcttcttaa

SEQ ID NO: 44493 - DNA, 30 bp, synthetic construct; identical to SEQ ID NO: 15478
  misc_feature 1..30: note = Probe
  source 1..30: mol_type = other DNA

SEQ ID NO: 44494 - DNA, 31 bp, synthetic construct; identical to SEQ ID NO: 2654
  misc_feature 1..31: note = Probe
  source 1..31: mol_type = other DNA

SEQ ID NO: 44495 - DNA, 33 bp, synthetic construct; identical to SEQ ID NO: 2655
  misc_feature 1..33: note = Probe
  source 1..33: mol_type = other DNA

SEQ ID NO: 44496 - DNA, 34 bp, synthetic construct; identical to SEQ ID NO: 2656
  misc_feature 1..34: note = Probe
  source 1..34: mol_type = other DNA

SEQ ID NO: 44497 - DNA, 20 bp, synthetic construct
  misc_feature 1..20: note = Probe
  source 1..20: mol_type = other DNA
acatacccatggccaacctc

SEQ ID NO: 44498 - DNA, 21 bp, synthetic construct
  misc_feature 1..21: note = Probe
  source 1..21: mol_type = other DNA
acatacccatggccaacctcc

SEQ ID NO: 44499 - DNA, 22 bp, synthetic construct
  misc_feature 1..22: note = Probe
  source 1..22: mol_type = other DNA
acatacccatggccaacctcct

SEQ ID NO: 44500 - DNA, 25 bp, synthetic construct
  misc_feature 1..25: note = Probe
  source 1..25: mol_type = other DNA
acatacccatggccaacctcctact

SEQ ID NO: 44501 - DNA, 26 bp, synthetic construct
  misc_feature 1..26: note = Probe
  source 1..26: mol_type = other DNA
acatacccatggccaacctcctactc

SEQ ID NO: 44502 - DNA, 27 bp, synthetic construct
  misc_feature 1..27: note = Probe
  source 1..27: mol_type = other DNA
acatacccatggccaacctcctactcc

SEQ ID NO: 44503 - DNA, 28 bp, synthetic construct
  misc_feature 1..28: note = Probe
  source 1..28: mol_type = other DNA
acatacccatggccaacctcctactcct

SEQ ID NO: 44504 - DNA, 29 bp, synthetic construct
  misc_feature 1..29: note = Probe
  source 1..29: mol_type = other DNA
acatacccatggccaacctcctactcctc

SEQ ID NO: 44505 - DNA, 30 bp, synthetic construct; identical to SEQ ID NO: 2668
  misc_feature 1..30: note = Probe
  source 1..30: mol_type = other DNA

SEQ ID NO: 44506 - DNA, 17 bp, synthetic construct
  misc_feature 1..17: note = Probe
  source 1..17: mol_type = other DNA
acatcaccccataaaca

SEQ ID NO: 44507 - DNA, 18 bp, synthetic construct
  misc_feature 1..18: note = Probe
  source 1..18: mol_type = other DNA
acatcaccccataaacaa

SEQ ID NO: 44508 - DNA, 19 bp, synthetic construct
  misc_feature 1..19: note = Probe
  source 1..19: mol_type = other DNA
acatcaccccataaacaaa

SEQ ID NO: 44509 - DNA, 20 bp, synthetic construct
  misc_feature 1..20: note = Probe
  source 1..20: mol_type = other DNA
acatcaccccataaacaaat

SEQ ID NO: 44510 - DNA, 45 bp, synthetic construct; identical to SEQ ID NO: 2683
  misc_feature 1..45: note = Probe
  source 1..45: mol_type = other DNA

SEQ ID NO: 44511 - DNA, 50 bp, synthetic construct; identical to SEQ ID NO: 2685
  misc_feature 1..50: note = Probe
  source 1..50: mol_type = other DNA

SEQ ID NO: 44512 - DNA, 28 bp, synthetic construct
  misc_feature 1..28: note = Probe
  source 1..28: mol_type = other DNA
accaaaacatcagattgtgaatctgaca

SEQ ID NO: 44513 - DNA, 30 bp, synthetic construct; identical to SEQ ID NO: 2694
  misc_feature 1..30: note = Probe
  source 1..30: mol_type = other DNA

SEQ ID NO: 44514 - DNA, 31 bp, synthetic construct; identical to SEQ ID NO: 2695
  misc_feature 1..31: note = Probe
  source 1..31: mol_type = other DNA

SEQ ID NO: 44515 - DNA, 32 bp, synthetic construct; identical to SEQ ID NO: 15519
  misc_feature 1..32: note = Probe
  source 1..32: mol_type = other DNA

SEQ ID NO: 44516 - DNA, 33 bp, synthetic construct; identical to SEQ ID NO: 15520
  misc_feature 1..33: note = Probe
  source 1..33: mol_type = other DNA

SEQ ID NO: 44517 - DNA, 34 bp, synthetic construct; identical to SEQ ID NO: 15521
  misc_feature 1..34: note = Probe
  source 1..34: mol_type = other DNA

SEQ ID NO: 44518 - DNA, 35 bp, synthetic construct; identical to SEQ ID NO: 2696
  misc_feature 1..35: note = Probe
  source 1..35: mol_type = other DNA

SEQ ID NO: 44519 - DNA, 36 bp, synthetic construct; identical to SEQ ID NO: 15522
  misc_feature 1..36: note = Probe
  source 1..36: mol_type = other DNA

SEQ ID NO: 44520 - DNA, 37 bp, synthetic construct; identical to SEQ ID NO: 2697
  misc_feature 1..37: note = Probe
  source 1..37: mol_type = other DNA

SEQ ID NO: 44521 - DNA, 45 bp, synthetic construct; identical to SEQ ID NO: 2700
  misc_feature 1..45: note = Probe
  source 1..45: mol_type = other DNA

SEQ ID NO: 44522 - DNA, 46 bp, synthetic construct; identical to SEQ ID NO: 136
  misc_feature 1..46: note = Probe
  source 1..46: mol_type = other DNA

SEQ ID NO: 44523 - DNA, 49 bp, synthetic construct; identical to SEQ ID NO: 137
  misc_feature 1..49: note = Probe
  source 1..49: mol_type = other DNA

SEQ ID NO: 44524 - DNA, 20 bp, synthetic construct
  misc_feature 1..20: note = Probe
  source 1..20: mol_type = other DNA
accaacacctctttacagtg

SEQ ID NO: 44525 - DNA, 21 bp, synthetic construct
  misc_feature 1..21: note = Probe
  source 1..21: mol_type = other DNA
accaacacctctttacagtga

SEQ ID NO: 44526 - DNA, 22 bp, synthetic construct
  misc_feature 1..22: note = Probe
  source 1..22: mol_type = other DNA
accaacacctctttacagtgaa

SEQ ID NO: 44527 - DNA, 23 bp, synthetic construct
  misc_feature 1..23: note = Probe
  source 1..23: mol_type = other DNA
accaacacctctttacagtgaaa

SEQ ID NO: 44528 - DNA, 24 bp, synthetic construct
  misc_feature 1..24: note = Probe
  source 1..24: mol_type = other DNA
accaacacctctttacagtgaaat

SEQ ID NO: 44529 - DNA, 18 bp, synthetic construct
  misc_feature 1..18: note = Probe
  source 1..18: mol_type = other DNA
accagaatggccgagtgg

SEQ ID NO: 44530 - DNA, 20 bp, synthetic construct
  misc_feature 1..20: note = Probe
  source 1..20: mol_type = other DNA
accagaatggccgagtggtt

SEQ ID NO: 44531 - DNA, 18 bp, synthetic construct
  misc_feature 1..18: note = Probe
  source 1..18: mol_type = other DNA
accagctttggggggttc

SEQ ID NO: 44532 - DNA, 31 bp, synthetic construct; identical to SEQ ID NO: 2713
  misc_feature 1..31: note = Probe
  source 1..31: mol_type = other DNA

SEQ ID NO: 44533 - DNA, 33 bp, synthetic construct; identical to SEQ ID NO: 2715
  misc_feature 1..33: note = Probe
  source 1..33: mol_type = other DNA

SEQ ID NO: 44534 - DNA, 34 bp, synthetic construct; identical to SEQ ID NO: 2716
  misc_feature 1..34: note = Probe
  source 1..34: mol_type = other DNA

SEQ ID NO: 44535 - DNA, 35 bp, synthetic construct; identical to SEQ ID NO: 2717
  misc_feature 1..35: note = Probe
  source 1..35: mol_type = other DNA

SEQ ID NO: 44536 - DNA, 36 bp, synthetic construct; identical to SEQ ID NO: 2718
  misc_feature 1..36: note = Probe
  source 1..36: mol_type = other DNA

SEQ ID NO: 44537 - DNA, 37 bp, synthetic construct; identical to SEQ ID NO: 2719
  misc_feature 1..37: note = Probe
  source 1..37: mol_type = other DNA

SEQ ID NO: 44538 - DNA, 38 bp, synthetic construct; identical to SEQ ID NO: 2720
  misc_feature 1..38: note = Probe
  source 1..38: mol_type = other DNA

SEQ ID NO: 44539 - DNA, 39 bp, synthetic construct; identical to SEQ ID NO: 2721
  misc_feature 1..39: note = Probe
  source 1..39: mol_type = other DNA

SEQ ID NO: 44540 - DNA, 18 bp, synthetic construct
  misc_feature 1..18: note = Probe
  source 1..18: mol_type = other DNA
accaggatggccgagtgg

SEQ ID NO: 44541 - DNA, 19 bp, synthetic construct
  misc_feature 1..19: note = Probe
  source 1..19: mol_type = other DNA
accaggatggccgagtggt

SEQ ID NO: 44542 - DNA, 20 bp, synthetic construct
  misc_feature 1..20: note = Probe
  source 1..20: mol_type = other DNA
accaggatggccgagtggtt

SEQ ID NO: 44543 - DNA, 21 bp, synthetic construct
  misc_feature 1..21: note = Probe
  source 1..21: mol_type = other DNA
accaggatggccgagtggtta

SEQ ID NO: 44544 - DNA, 22 bp, synthetic construct
  misc_feature 1..22: note = Probe
  source 1..22: mol_type = other DNA
accaggatggccgagtggttaa

SEQ ID NO: 44545 - DNA, 23 bp, synthetic construct
  misc_feature 1..23: note = Probe
  source 1..23: mol_type = other DNA
accaggatggccgagtggttaag

SEQ ID NO: 44546 - DNA, 24 bp, synthetic construct
  misc_feature 1..24: note = Probe
  source 1..24: mol_type = other DNA
accaggatggccgagtggttaagg

SEQ ID NO: 44547 - DNA, 36 bp, synthetic construct; identical to SEQ ID NO: 12541
  misc_feature 1..36: note = Probe
  source 1..36: mol_type = other DNA

SEQ ID NO: 44548 - DNA, 38 bp, synthetic construct; identical to SEQ ID NO: 2727
  misc_feature 1..38: note = Probe
  source 1..38: mol_type = other DNA

SEQ ID NO: 44549 - DNA, 38 bp, synthetic construct; identical to SEQ ID NO: 2728
  misc_feature 1..38: note = Probe
  source 1..38: mol_type = other DNA

SEQ ID NO: 44550 - DNA, 46 bp, synthetic construct; identical to SEQ ID NO: 2729
  misc_feature 1..46: note = Probe
  source 1..46: mol_type = other DNA

SEQ ID NO: 44551 - DNA, 27 bp, synthetic construct
  misc_feature 1..27: note = Probe
  source 1..27: mol_type = other DNA
accatgcacactactataaccacccta

SEQ ID NO: 44552 - DNA, 20 bp, synthetic construct
  misc_feature 1..20: note = Probe
  source 1..20: mol_type = other DNA
accatttcataactttgtca

SEQ ID NO: 44553 - DNA, 17 bp, synthetic construct
  misc_feature 1..17: note = Probe
  source 1..17: mol_type = other DNA
acccaacttacacttag

SEQ ID NO: 44554 - DNA, 18 bp, synthetic construct
  misc_feature 1..18: note = Probe
  source 1..18: mol_type = other DNA
acccaacttacacttagg

SEQ ID NO: 44555 - DNA, 20 bp, synthetic construct
  misc_feature 1..20: note = Probe
  source 1..20: mol_type = other DNA
acccaacttacacttaggag

SEQ ID NO: 44556 - DNA, 21 bp, synthetic construct
  misc_feature 1..21: note = Probe
  source 1..21: mol_type = other DNA
acccaacttacacttaggaga

SEQ ID NO: 44557 - DNA, 23 bp, synthetic construct
  misc_feature 1..23: note = Probe
  source 1..23: mol_type = other DNA
acccaacttacacttaggagatt

SEQ ID NO: 44558 - DNA, 26 bp, synthetic construct
  misc_feature 1..26: note = Probe
  source 1..26: mol_type = other DNA
acccaacttacacttaggagatttca

SEQ ID NO: 44559 - DNA, 29 bp, synthetic construct
  misc_feature 1..29: note = Probe
  source 1..29: mol_type = other DNA
acccaacttacacttaggagatttcaact

SEQ ID NO: 44560 - DNA, 31 bp, synthetic construct; identical to SEQ ID NO: 2740
  misc_feature 1..31: note = Probe
  source 1..31: mol_type = other DNA

SEQ ID NO: 44561 - DNA, 34 bp, synthetic construct; identical to SEQ ID NO: 15563
  misc_feature 1..34: note = Probe
  source 1..34: mol_type = other DNA

SEQ ID NO: 44562 - DNA, 39 bp, synthetic construct; identical to SEQ ID NO: 15564
  misc_feature 1..39: note = Probe
  source 1..39: mol_type = other DNA

SEQ ID NO: 44563 - DNA, 40 bp, synthetic construct; identical to SEQ ID NO: 2743
  misc_feature 1..40: note = Probe
  source 1..40: mol_type = other DNA

SEQ ID NO: 44564 - DNA, 41 bp, synthetic construct
  misc_feature 1..41: note = Probe
  source 1..41: mol_type = other DNA
acccaacttacacttaggagatttcaacttaacttgaccgc

SEQ ID NO: 44565 - DNA, 42 bp, synthetic construct; identical to SEQ ID NO: 2744
  misc_feature 1..42: note = Probe
  source 1..42: mol_type = other DNA

SEQ ID NO: 44566 - DNA, 44 bp, synthetic construct
  misc_feature 1..44: note = Probe
  source 1..44: mol_type = other DNA
acccaacttacacttaggagatttcaacttaacttgaccgctct

SEQ ID NO: 44567 - DNA, 46 bp, synthetic construct; identical to SEQ ID NO: 2747
  misc_feature 1..46: note = Probe
  source 1..46: mol_type = other DNA

SEQ ID NO: 44568 - DNA, 49 bp, synthetic construct; identical to SEQ ID NO: 2748
  misc_feature 1..49: note = Probe
  source 1..49: mol_type = other DNA

SEQ ID NO: 44569 - DNA, 50 bp, synthetic construct; identical to SEQ ID NO: 2749
  misc_feature 1..50: note = Probe
  source 1..50: mol_type = other DNA

SEQ ID NO: 44570 - DNA, 31 bp, synthetic construct; identical to SEQ ID NO: 2755
  misc_feature 1..31: note = Probe
  source 1..31: mol_type = other DNA

SEQ ID NO: 44571 - DNA, 25 bp, synthetic construct
  misc_feature 1..25: note = Probe
  source 1..25: mol_type = other DNA
acccacccaagaacagggtttgtta

SEQ ID NO: 44572 - DNA, 20 bp, synthetic construct
  misc_feature 1..20: note = Probe
  source 1..20: mol_type = other DNA
acccagaggtcgatggatcg

SEQ ID NO: 44573 - DNA, 21 bp, synthetic construct
  misc_feature 1..21: note = Probe
  source 1..21: mol_type = other DNA
acccagaggtcgatggatcga

SEQ ID NO: 44574 - DNA, 39 bp, synthetic construct; identical to SEQ ID NO: 2760
  misc_feature 1..39: note = Probe
  source 1..39: mol_type = other DNA

SEQ ID NO: 44575 - DNA, 38 bp, synthetic construct; identical to SEQ ID NO: 2761
  misc_feature 1..38: note = Probe
  source 1..38: mol_type = other DNA

SEQ ID NO: 44576 - DNA, 33 bp, synthetic construct; identical to SEQ ID NO: 2762
  misc_feature 1..33: note = Probe
  source 1..33: mol_type = other DNA

SEQ ID NO: 44577 - DNA, 33 bp, synthetic construct; identical to SEQ ID NO: 2763
  misc_feature 1..33: note = Probe
  source 1..33: mol_type = other DNA

SEQ ID NO: 44578 - DNA, 35 bp, synthetic construct; identical to SEQ ID NO: 149
  misc_feature 1..35: note = Probe
  source 1..35: mol_type = other DNA

SEQ ID NO: 44579 - DNA, 37 bp, synthetic construct; identical to SEQ ID NO: 151
  misc_feature 1..37: note = Probe
  source 1..37: mol_type = other DNA

SEQ ID NO: 44580 - DNA, 39 bp, synthetic construct; identical to SEQ ID NO: 2764
  misc_feature 1..39: note = Probe
  source 1..39: mol_type = other DNA

SEQ ID NO: 44581 - DNA, 35 bp, synthetic construct; identical to SEQ ID NO: 15599
  misc_feature 1..35: note = Probe
  source 1..35: mol_type = other DNA

SEQ ID NO: 44582 - DNA, 39 bp, synthetic construct; identical to SEQ ID NO: 2766
  misc_feature 1..39: note = Probe
  source 1..39: mol_type = other DNA

SEQ ID NO: 44583 - DNA, 30 bp, synthetic construct
  misc_feature 1..30: note = Probe
  source 1..30: mol_type = other DNA
acccagtggcctaatggataaggcatcagc

SEQ ID NO: 44584 - DNA, 24 bp, synthetic construct
  misc_feature 1..24: note = Probe
  source 1..24: mol_type = other DNA
accccgaaaatgttggttataccc

SEQ ID NO: 44585 - DNA, 28 bp, synthetic construct
  misc_feature 1..28: note = Probe
  source 1..28: mol_type = other DNA
accccgaaaatgttggttatacccttcc

SEQ ID NO: 44586 - DNA, 29 bp, synthetic construct
  misc_feature 1..29: note = Probe
  source 1..29: mol_type = other DNA
accccgaaaatgttggttatacccttccc

SEQ ID NO: 44587 - DNA, 30 bp, synthetic construct; identical to SEQ ID NO: 2769
  misc_feature 1..30: note = Probe
  source 1..30: mol_type = other DNA

SEQ ID NO: 44588 - DNA, 31 bp, synthetic construct; identical to SEQ ID NO: 2770
  misc_feature 1..31: note = Probe
  source 1..31: mol_type = other DNA

SEQ ID NO: 44589 - DNA, 36 bp, synthetic construct; identical to SEQ ID NO: 2771
  misc_feature 1..36: note = Probe
  source 1..36: mol_type = other DNA

SEQ ID NO: 44590 - DNA, 37 bp, synthetic construct; identical to SEQ ID NO: 2772
  misc_feature 1..37: note = Probe
  source 1..37: mol_type = other DNA

SEQ ID NO: 44591 - DNA, 38 bp, synthetic construct; identical to SEQ ID NO: 2773
  misc_feature 1..38: note = Probe
  source 1..38: mol_type = other DNA

SEQ ID NO: 44592 - DNA, 17 bp, synthetic construct
  misc_feature 1..17: note = Probe
  source 1..17: mol_type = other DNA
accccgacatcattacc

SEQ ID NO: 44593 - DNA, 18 bp, synthetic construct
  misc_feature 1..18: note = Probe
  source 1..18: mol_type = other DNA
accccgacatcattaccg

SEQ ID NO: 44594 - DNA, 22 bp, synthetic construct
  misc_feature 1..22: note = Probe
  source 1..22: mol_type = other DNA
accccgacatcattaccgggtt

SEQ ID NO: 44595 - DNA, 23 bp, synthetic construct
  misc_feature 1..23: note = Probe
  source 1..23: mol_type = other DNA
accccgacatcattaccgggttt

SEQ ID NO: 44596 - DNA, 26 bp, synthetic construct
  misc_feature 1..26: note = Probe
  source 1..26: mol_type = other DNA
accccgacatcattaccgggttttcc

SEQ ID NO: 44597 - DNA, 27 bp, synthetic construct
  misc_feature 1..27: note = Probe
  source 1..27: mol_type = other DNA
accccgacatcattaccgggttttcct

SEQ ID NO: 44598 - DNA, 28 bp, synthetic construct
  misc_feature 1..28: note = Probe
  source 1..28: mol_type = other DNA
accccgacatcattaccgggttttcctc

SEQ ID NO: 44599 - DNA, 27 bp, synthetic construct
  misc_feature 1..27: note = Probe
  source 1..27: mol_type = other DNA
acccgggttcgattcccggccaacgca

SEQ ID NO: 44600 - DNA, 30 bp, synthetic construct; identical to SEQ ID NO: 15633
  misc_feature 1..30: note = Probe
  source 1..30: mol_type = other DNA

SEQ ID NO: 44601 - DNA, 30 bp, synthetic construct; identical to SEQ ID NO: 15634
  misc_feature 1..30: note = Probe
  source 1..30: mol_type = other DNA

SEQ ID NO: 44602 - DNA, 18 bp, synthetic construct
  misc_feature 1..18: note = Probe
  source 1..18: mol_type = other DNA
accctgtggtctagtggt

SEQ ID NO: 44603 - DNA, 19 bp, synthetic construct
  misc_feature 1..19: note = Probe
  source 1..19: mol_type = other DNA
accctgtggtctagtggtt

SEQ ID NO: 44604 - DNA, 20 bp, synthetic construct
  misc_feature 1..20: note = Probe
  source 1..20: mol_type = other DNA
accctgtggtctagtggtta

SEQ ID NO: 44605 - DNA, 21 bp, synthetic construct
  misc_feature 1..21: note = Probe
  source 1..21: mol_type = other DNA
accctgtggtctagtggttag

SEQ ID NO: 44606 - DNA, 22 bp, synthetic construct
  misc_feature 1..22: note = Probe
  source 1..22: mol_type = other DNA
accctgtggtctagtggttagg

SEQ ID NO: 44607 - DNA, 23 bp, synthetic construct
  misc_feature 1..23: note = Probe
  source 1..23: mol_type = other DNA
accctgtggtctagtggttagga

SEQ ID NO: 44608 - DNA, 35 bp, synthetic construct
  misc_feature 1..35: note = Probe
  source 1..35: mol_type = other DNA
accgaaaggttggtggttcgagcccacccagggac

SEQ ID NO: 44609 - DNA, 39 bp, synthetic construct; identical to SEQ ID NO: 2787
  misc_feature 1..39: note = Probe
  source 1..39: mol_type = other DNA

SEQ ID NO: 44610 - DNA, 39 bp, synthetic construct
  misc_feature 1..39: note = Probe
  source 1..39: mol_type = other DNA
accgaaaggttggtggttcgagcccacccagggacgcta

SEQ ID NO: 44611 - DNA, 37 bp, synthetic construct
  misc_feature 1..37: note = Probe
  source 1..37: mol_type = other DNA
accgaaaggttggtggttcgatcccacccagggacgg

SEQ ID NO: 44612 - DNA, 27 bp, synthetic construct
  misc_feature 1..27: note = Probe
  source 1..27: mol_type = other DNA
accgagcgtccaagctctttccatttt

SEQ ID NO: 44613 - DNA, 37 bp, synthetic construct; identical to SEQ ID NO: 15653
  misc_feature 1..37: note = Probe
  source 1..37: mol_type = other DNA

SEQ ID NO: 44614 - DNA, 39 bp, synthetic construct; identical to SEQ ID NO: 2791
  misc_feature 1..39: note = Probe
  source 1..39: mol_type = other DNA

SEQ ID NO: 44615 - DNA, 36 bp, synthetic construct; identical to SEQ ID NO: 12559
  misc_feature 1..36: note = Probe
  source 1..36: mol_type = other DNA

SEQ ID NO: 44616 - DNA, 37 bp, synthetic construct; identical to SEQ ID NO: 2792
  misc_feature 1..37: note = Probe
  source 1..37: mol_type = other DNA

SEQ ID NO: 44617 - DNA, 37 bp, synthetic construct; identical to SEQ ID NO: 2793
  misc_feature 1..37: note = Probe
  source 1..37: mol_type = other DNA

SEQ ID NO: 44618 - DNA, 38 bp, synthetic construct; identical to SEQ ID NO: 15664
  misc_feature 1..38: note = Probe
  source 1..38: mol_type = other DNA

SEQ ID NO: 44619 - DNA, 39 bp, synthetic construct; identical to SEQ ID NO: 2794
  misc_feature 1..39: note = Probe
  source 1..39: mol_type = other DNA

SEQ ID NO: 44620 - DNA, 37 bp, synthetic construct; identical to SEQ ID NO: 2796
  misc_feature 1..37: note = Probe
  source 1..37: mol_type = other DNA

SEQ ID NO: 44621 - DNA, 39 bp, synthetic construct; identical to SEQ ID NO: 2797
  misc_feature 1..39: note = Probe
  source 1..39: mol_type = other DNA

SEQ ID NO: 44622 - DNA, 36 bp, synthetic construct; identical to SEQ ID NO: 15674
  misc_feature 1..36: note = Probe
  source 1..36: mol_type = other DNA

SEQ ID NO: 44623 - DNA, 25 bp, synthetic construct
  misc_feature 1..25: note = Probe
  source 1..25: mol_type = other DNA
accggagatgaaaacctttttccaa

SEQ ID NO: 44624 - DNA, 27 bp, synthetic construct
  misc_feature 1..27: note = Probe
  source 1..27: mol_type = other DNA
accggagatgaaaacctttttccaagg

SEQ ID NO: 44625 - DNA, 31 bp, synthetic construct; identical to SEQ ID NO: 2802
  misc_feature 1..31: note = Probe
  source 1..31: mol_type = other DNA

SEQ ID NO: 44626 - DNA, 32 bp, synthetic construct; identical to SEQ ID NO: 2803
  misc_feature 1..32: note = Probe
  source 1..32: mol_type = other DNA

SEQ ID NO: 44627 - DNA, 33 bp, synthetic construct; identical to SEQ ID NO: 2804
  misc_feature 1..33: note = Probe
  source 1..33: mol_type = other DNA

SEQ ID NO: 44628 - DNA, 17 bp, synthetic construct
  misc_feature 1..17: note = Probe
  source 1..17: mol_type = other DNA
accgggcggaaacacct

SEQ ID NO: 44629 - DNA, 19 bp, synthetic construct
  misc_feature 1..19: note = Probe
  source 1..19: mol_type = other DNA
accgggcggaaacacctcc

SEQ ID NO: 44630 - DNA, 28 bp, synthetic construct
  misc_feature 1..28: note = Probe
  source 1..28: mol_type = other DNA
accggggttcaattccccgacggggagg

SEQ ID NO: 44631 - DNA, 30 bp, synthetic construct; identical to SEQ ID NO: 2808
  misc_feature 1..30: note = Probe
  source 1..30: mol_type = other DNA

SEQ ID NO: 44632 - DNA, 23 bp, synthetic construct
  misc_feature 1..23: note = Probe
  source 1..23: mol_type = other DNA
accggggttcgattccccgacgg

SEQ ID NO: 44633 - DNA, 28 bp, synthetic construct
  misc_feature 1..28: note = Probe
  source 1..28: mol_type = other DNA
accggggttcgattccccgacggggaga

SEQ ID NO: 44634 - DNA, 28 bp, synthetic construct
  misc_feature 1..28: note = Probe
  source 1..28: mol_type = other DNA
accggggttcgattccccgacggggagg

SEQ ID NO: 44635 - DNA, 30 bp, synthetic construct; identical to SEQ ID NO: 2811
  misc_feature 1..30: note = Probe
  source 1..30: mol_type = other DNA

SEQ ID NO: 44636 - DNA, 31 bp, synthetic construct; identical to SEQ ID NO: 2814
  misc_feature 1..31: note = Probe
  source 1..31: mol_type = other DNA

SEQ ID NO: 44637 - DNA, 32 bp, synthetic construct
  misc_feature 1..32: note = Probe
  source 1..32: mol_type = other DNA
accgttaacttccaattaactagttttgacaa

SEQ ID NO: 44638 - DNA, 45 bp, synthetic construct
  misc_feature 1..45: note = Probe
  source 1..45: mol_type = other DNA
accgttaacttccaattaactagttttgacaacattcaaaaaaga

SEQ ID NO: 44639 - DNA, 50 bp, synthetic construct; identical to SEQ ID NO: 2815
  misc_feature 1..50: note = Probe
  source 1..50: mol_type = other DNA

SEQ ID NO: 44640 - DNA, 25 bp, synthetic construct
  misc_feature 1..25: note = Probe
  source 1..25: mol_type = other DNA
acctagccccaaacccactccacct

SEQ ID NO: 44641 - DNA, 16 bp, synthetic construct
  misc_feature 1..16: note = Probe
  source 1..16: mol_type = other DNA
acctattctcaaactt

SEQ ID NO: 44642 - DNA, 17 bp, synthetic construct
  misc_feature 1..17: note = Probe
  source 1..17: mol_type = other DNA
acctattctcaaacttt

SEQ ID NO: 44643 - DNA, 18 bp, synthetic construct
  misc_feature 1..18: note = Probe
  source 1..18: mol_type = other DNA
acctattctcaaacttta

SEQ ID NO: 44644 - DNA, 19 bp, synthetic construct
  misc_feature 1..19: note = Probe
  source 1..19: mol_type = other DNA
acctattctcaaactttaa

SEQ ID NO: 44645 - DNA, 20 bp, synthetic construct
  misc_feature 1..20: note = Probe
  source 1..20: mol_type = other DNA
acctattctcaaactttaaa

SEQ ID NO: 44646 - DNA, 21 bp, synthetic construct
  misc_feature 1..21: note = Probe
  source 1..21: mol_type = other DNA
acctattctcaaactttaaat

SEQ ID NO: 44647 - DNA, 22 bp, synthetic construct
  misc_feature 1..22: note = Probe
  source 1..22: mol_type = other DNA
acctattctcaaactttaaatg

SEQ ID NO: 44648 - DNA, 23 bp, synthetic construct
  misc_feature 1..23: note = Probe
  source 1..23: mol_type = other DNA
acctattctcaaactttaaatgg

SEQ ID NO: 44649 - DNA, 25 bp, synthetic construct
  misc_feature 1..25: note = Probe
  source 1..25: mol_type = other DNA
acctattctcaaactttaaatgggc

SEQ ID NO: 44650 - DNA, 26 bp, synthetic construct
  misc_feature 1..26: note = Probe
  source 1..26: mol_type = other DNA
acctattctcaaactttaaatgggca

SEQ ID NO: 44651 - DNA, 28 bp, synthetic construct
  misc_feature 1..28: note = Probe
  source 1..28: mol_type = other DNA
acctattctcaaactttaaatgggcaag

SEQ ID NO: 44652 - DNA, 31 bp, synthetic construct; identical to SEQ ID NO: 15733
  misc_feature 1..31: note = Probe
  source 1..31: mol_type = other DNA

SEQ ID NO: 44653 - DNA, 32 bp, synthetic construct; identical to SEQ ID NO: 2827
  misc_feature 1..32: note = Probe
  source 1..32: mol_type = other DNA

SEQ ID NO: 44654 - DNA, 33 bp, synthetic construct; identical to SEQ ID NO: 2828
  misc_feature 1..33: note = Probe
  source 1..33: mol_type = other DNA

SEQ ID NO: 44655 - DNA, 34 bp, synthetic construct; identical to SEQ ID NO: 15736
  misc_feature 1..34: note = Probe
  source 1..34: mol_type = other DNA

SEQ ID NO: 44656 - DNA, 35 bp, synthetic construct; identical to SEQ ID NO: 15737
  misc_feature 1..35: note = Probe
  source 1..35: mol_type = other DNA

SEQ ID NO: 44657 - DNA, 36 bp, synthetic construct; identical to SEQ ID NO: 2829
  misc_feature 1..36: note = Probe
  source 1..36: mol_type = other DNA

SEQ ID NO: 44658 - DNA, 37 bp, synthetic construct; identical to SEQ ID NO: 2830
  misc_feature 1..37: note = Probe
  source 1..37: mol_type = other DNA

SEQ ID NO: 44659 - DNA, 38 bp, synthetic construct; identical to SEQ ID NO: 15740
  misc_feature 1..38: note = Probe
  source 1..38: mol_type = other DNA

SEQ ID NO: 44660 - DNA, 20 bp, synthetic construct
  misc_feature 1..20: note = Probe
  source 1..20: mol_type = other DNA
acctcagaaggtctcacttt

SEQ ID NO: 44661 - DNA, 21 bp, synthetic construct
  misc_feature 1..21: note = Probe
  source 1..21: mol_type = other DNA
acctcagaaggtctcactttt

SEQ ID NO: 44662 - DNA, 22 bp, synthetic construct
  misc_feature 1..22: note = Probe
  source 1..22: mol_type = other DNA
acctcagaaggtctcacttttc

SEQ ID NO: 44663 - DNA, 19 bp, synthetic construct
  misc_feature 1..19: note = Probe
  source 1..19: mol_type = other DNA
acctcctcaaagcaataca

SEQ ID NO: 44664 - DNA, 22 bp, synthetic construct
  misc_feature 1..22: note = Probe
  source 1..22: mol_type = other DNA
acctcctcaaagcaatacactg

SEQ ID NO: 44665 - DNA, 27 bp, synthetic construct
  misc_feature 1..27: note = Probe
  source 1..27: mol_type = other DNA
acctcggttcgaatccgagtcacggca

SEQ ID NO: 44666 - DNA, 50 bp, synthetic construct; identical to SEQ ID NO: 15759
  misc_feature 1..50: note = Probe
  source 1..50: mol_type = other DNA

SEQ ID NO: 44667 - DNA, 28 bp, synthetic construct
  misc_feature 1..28: note = Probe
  source 1..28: mol_type = other DNA
accttttaagttaaagattaagagaacc

SEQ ID NO: 44668 - DNA, 29 bp, synthetic construct
  misc_feature 1..29: note = Probe
  source 1..29: mol_type = other DNA
accttttaagttaaagattaagagaacca

SEQ ID NO: 44669 - DNA, 34 bp, synthetic construct; identical to SEQ ID NO: 27258
  misc_feature 1..34: note = Probe
  source 1..34: mol_type = other DNA

SEQ ID NO: 44670 - DNA, 46 bp, synthetic construct; identical to SEQ ID NO: 2839
  misc_feature 1..46: note = Probe
  source 1..46: mol_type = other DNA

SEQ ID NO: 44671 - DNA, 50 bp, synthetic construct; identical to SEQ ID NO: 2840
  misc_feature 1..50: note = Probe
  source 1..50: mol_type = other DNA

SEQ ID NO: 44672 - DNA, 50 bp, synthetic construct; identical to SEQ ID NO: 2841
  misc_feature 1..50: note = Probe
  source 1..50: mol_type = other DNA

SEQ ID NO: 44673 - DNA, 18 bp, synthetic construct
  misc_feature 1..18: note = Probe
  source 1..18: mol_type = other DNA
acgaccccttatttaccg

SEQ ID NO: 44674 - DNA, 18 bp, synthetic construct
  misc_feature 1..18: note = Probe
  source 1..18: mol_type = other DNA
acgatggtttttcatatc

SEQ ID NO: 44675 - DNA, 26 bp, synthetic construct
  misc_feature 1..26: note = Probe
  source 1..26: mol_type = other DNA
acgatggtttttcatatcattggtcg

SEQ ID NO: 44676 - DNA, 27 bp, synthetic construct
  misc_feature 1..27: note = Probe
  source 1..27: mol_type = other DNA
acgatggtttttcatatcattggtcgt

SEQ ID NO: 44677 - DNA, 45 bp, synthetic construct
  misc_feature 1..45: note = Probe
  source 1..45: mol_type = other DNA
acgatggtttttcatatcattggtcgtggttgtagtccgtgcgag

SEQ ID NO: 44678 - DNA, 50 bp, synthetic construct; identical to SEQ ID NO: 2843
  misc_feature 1..50: note = Probe
  source 1..50: mol_type = other DNA

SEQ ID NO: 44679 - DNA, 18 bp, synthetic construct
  misc_feature 1..18: note = Probe
  source 1..18: mol_type = other DNA
acgcagaaggtcctgggt

SEQ ID NO: 44680 - DNA, 34 bp, synthetic construct; identical to SEQ ID NO: 12574
  misc_feature 1..34: note = Probe
  source 1..34: mol_type = other DNA

SEQ ID NO: 44681 - DNA, 39 bp, synthetic construct; identical to SEQ ID NO: 2845
  misc_feature 1..39: note = Probe
  source 1..39: mol_type = other DNA

SEQ ID NO: 44682 - DNA, 40 bp, synthetic construct; identical to SEQ ID NO: 2846
  misc_feature 1..40: note = Probe
  source 1..40: mol_type = other DNA

SEQ ID NO: 44683 - DNA, 50 bp, synthetic construct
  misc_feature 1..50: note = Probe
  source 1..50: mol_type = other DNA
acgcagaaggtcctgggttcgagccccagtggaaccacggcgtgattcat

SEQ ID NO: 44684 - DNA, 40 bp, synthetic construct; identical to SEQ ID NO: 2847
  misc_feature 1..40: note = Probe
  source 1..40: mol_type = other DNA

SEQ ID NO: 44685 - DNA, 34 bp, synthetic construct
  misc_feature 1..34: note = Probe
  source 1..34: mol_type = other DNA
acgccaaggtcgcgggttcgatccccgtacgggc

SEQ ID NO: 44686 - DNA, 36 bp, synthetic construct
  misc_feature 1..36: note = Probe
  source 1..36: mol_type = other DNA
acgccaaggtcgcgggttcgatccccgtacgggcca

SEQ ID NO: 44687 - DNA, 39 bp, synthetic construct; identical to SEQ ID NO: 2849
  misc_feature 1..39: note = Probe
  source 1..39: mol_type = other DNA

SEQ ID NO: 44688 - DNA, 39 bp, synthetic construct; identical to SEQ ID NO: 2850
  misc_feature 1..39: note = Probe
  source 1..39: mol_type = other DNA

SEQ ID NO: 44689 - DNA, 38 bp, synthetic construct
  misc_feature 1..38: note = Probe
  source 1..38: mol_type = other DNA
acgccaaggtcgcgggttcgatccccgtacgggccagg

SEQ ID NO: 44690 - DNA, 39 bp, synthetic construct; identical to SEQ ID NO: 2851
  misc_feature 1..39: note = Probe
  source 1..39: mol_type = other DNA

SEQ ID NO: 44691 - DNA, 39 bp, synthetic construct; identical to SEQ ID NO: 2852
  misc_feature 1..39: note = Probe
  source 1..39: mol_type = other DNA

SEQ ID NO: 44692 - DNA, 16 bp, synthetic construct
  misc_feature 1..16: note = Probe
  source 1..16: mol_type = other DNA
acgcgaaaggtccccg

SEQ ID NO: 44693 - DNA, 17 bp, synthetic construct
  misc_feature 1..17: note = Probe
  source 1..17: mol_type = other DNA
acgcgaaaggtccccgg

SEQ ID NO: 44694 - DNA, 33 bp, synthetic construct
  misc_feature 1..33: note = Probe
  source 1..33: mol_type = other DNA
acgcgaaaggtccccggttcgaaaccgggcgga

SEQ ID NO: 44695 - DNA, 35 bp, synthetic construct
  misc_feature 1..35: note = Probe
  source 1..35: mol_type = other DNA
acgcgaaaggtccccggttcgaaaccgggcggaaa

SEQ ID NO: 44696 - DNA, 37 bp, synthetic construct; identical to SEQ ID NO: 15792
  misc_feature 1..37: note = Probe
  source 1..37: mol_type = other DNA

SEQ ID NO: 44697 - DNA, 39 bp, synthetic construct; identical to SEQ ID NO: 173
  misc_feature 1..39: note = Probe
  source 1..39: mol_type = other DNA

SEQ ID NO: 44698 - DNA, 40 bp, synthetic construct; identical to SEQ ID NO: 2854
  misc_feature 1..40: note = Probe
  source 1..40: mol_type = other DNA

SEQ ID NO: 44699 - DNA, 39 bp, synthetic construct; identical to SEQ ID NO: 15797
  misc_feature 1..39: note = Probe
  source 1..39: mol_type = other DNA

SEQ ID NO: 44700 - DNA, 40 bp, synthetic construct; identical to SEQ ID NO: 2855
  misc_feature 1..40: note = Probe
  source 1..40: mol_type = other DNA

SEQ ID NO: 44701 - DNA, 19 bp, synthetic construct
  misc_feature 1..19: note = Probe
  source 1..19: mol_type = other DNA
acgcgggagaccggggttc

SEQ ID NO: 44702 - DNA, 37 bp, synthetic construct; identical to SEQ ID NO: 2859
  misc_feature 1..37: note = Probe
  source 1..37: mol_type = other DNA

SEQ ID NO: 44703 - DNA, 38 bp, synthetic construct; identical to SEQ ID NO: 2860
  misc_feature 1..38: note = Probe
  source 1..38: mol_type = other DNA

SEQ ID NO: 44704 - DNA, 39 bp, synthetic construct; identical to SEQ ID NO: 2861
  misc_feature 1..39: note = Probe
  source 1..39: mol_type = other DNA

SEQ ID NO: 44705 - DNA, 21 bp, synthetic construct
  misc_feature 1..21: note = Probe
  source 1..21: mol_type = other DNA
acgcgggagaccggggttcga

SEQ ID NO: 44706 - DNA, 22 bp, synthetic construct
  misc_feature 1..22: note = Probe
  source 1..22: mol_type = other DNA
acgcgggagaccggggttcgat

SEQ ID NO: 44707 - DNA, 23 bp, synthetic construct
  misc_feature 1..23: note = Probe
  source 1..23: mol_type = other DNA
acgcgggagaccggggttcgatt

SEQ ID NO: 44708 - DNA, 39 bp, synthetic construct; identical to SEQ ID NO: 2864
  misc_feature 1..39: note = Probe
  source 1..39: mol_type = other DNA

SEQ ID NO: 44709 - DNA, 29 bp, synthetic construct
  misc_feature 1..29: note = Probe
  source 1..29: mol_type = other DNA
acgcgggagaccggggttcgattccccga

SEQ ID NO: 44710 - DNA, 30 bp, synthetic construct; identical to SEQ ID NO: 182
  misc_feature 1..30: note = Probe
  source 1..30: mol_type = other DNA

SEQ ID NO: 44711 - DNA, 37 bp, synthetic construct; identical to SEQ ID NO: 2865
  misc_feature 1..37: note = Probe
  source 1..37: mol_type = other DNA

SEQ ID NO: 44712 - DNA, 38 bp, synthetic construct; identical to SEQ ID NO: 2866
  misc_feature 1..38: note = Probe
  source 1..38: mol_type = other DNA

SEQ ID NO: 44713 - DNA, 39 bp, synthetic construct; identical to SEQ ID NO: 2867
  misc_feature 1..39: note = Probe
  source 1..39: mol_type = other DNA

SEQ ID NO: 44714 - DNA, 38 bp, synthetic construct; identical to SEQ ID NO: 2869
  misc_feature 1..38: note = Probe
  source 1..38: mol_type = other DNA

SEQ ID NO: 44715 - DNA, 39 bp, synthetic construct; identical to SEQ ID NO: 2870
  misc_feature 1..39: note = Probe
  source 1..39: mol_type = other DNA

SEQ ID NO: 44716 - DNA, 39 bp, synthetic construct; identical to SEQ ID NO: 2871
  misc_feature 1..39: note = Probe
  source 1..39: mol_type = other DNA

SEQ ID NO: 44717 - DNA, 37 bp, synthetic construct; identical to SEQ ID NO: 2872
  misc_feature 1..37: note = Probe
  source 1..37: mol_type = other DNA

SEQ ID NO: 44718 - DNA, 38 bp, synthetic construct; identical to SEQ ID NO: 15833
  misc_feature 1..38: note = Probe
  source 1..38: mol_type = other DNA

SEQ ID NO: 44719 - DNA, 38 bp, synthetic construct; identical to SEQ ID NO: 2873
  misc_feature 1..38: note = Probe
  source 1..38: mol_type = other DNA

SEQ ID NO: 44720 - DNA, 39 bp, synthetic construct; identical to SEQ ID NO: 2874
  misc_feature 1..39: note = Probe
  source 1..39: mol_type = other DNA

SEQ ID NO: 44721 - DNA, 40 bp, synthetic construct; identical to SEQ ID NO: 15837
  misc_feature 1..40: note = Probe
  source 1..40: mol_type = other DNA

SEQ ID NO: 44722 - DNA, 47 bp, synthetic construct; identical to SEQ ID NO: 2875
  misc_feature 1..47: note = Probe
  source 1..47: mol_type = other DNA

SEQ ID NO: 44723 - DNA, 48 bp, synthetic construct; identical to SEQ ID NO: 15839
  misc_feature 1..48: note = Probe
  source 1..48: mol_type = other DNA

SEQ ID NO: 44724 - DNA, 39 bp, synthetic construct; identical to SEQ ID NO: 2877
  misc_feature 1..39: note = Probe
  source 1..39: mol_type = other DNA

SEQ ID NO: 44725 - DNA, 50 bp, synthetic construct; identical to SEQ ID NO: 37937
  misc_feature 1..50: note = Probe
  source 1..50: mol_type = other DNA

SEQ ID NO: 44726 - DNA, 35 bp, synthetic construct; identical to SEQ ID NO: 15850
  misc_feature 1..35: note = Probe
  source 1..35: mol_type = other DNA

SEQ ID NO: 44727 - DNA, 36 bp, synthetic construct; identical to SEQ ID NO: 2880
  misc_feature 1..36: note = Probe
  source 1..36: mol_type = other DNA

SEQ ID NO: 44728 - DNA, 39 bp, synthetic construct; identical to SEQ ID NO: 2881
  misc_feature 1..39: note = Probe
  source 1..39: mol_type = other DNA

SEQ ID NO: 44729 - DNA, 39 bp, synthetic construct; identical to SEQ ID NO: 2882
  misc_feature 1..39: note = Probe
  source 1..39: mol_type = other DNA

SEQ ID NO: 44730 - DNA, 38 bp, synthetic construct; identical to SEQ ID NO: 15858
  misc_feature 1..38: note = Probe
  source 1..38: mol_type = other DNA

SEQ ID NO: 44731 - DNA, 39 bp, synthetic construct; identical to SEQ ID NO: 2883
  misc_feature 1..39: note = Probe
  source 1..39: mol_type = other DNA

SEQ ID NO: 44732 - DNA, 27 bp, synthetic construct
  misc_feature 1..27: note = Probe
  source 1..27: mol_type = other DNA
acgcgtgggttcgaatcccaccctcgt

SEQ ID NO: 44733 - DNA, 22 bp, synthetic construct
  misc_feature 1..22: note = Probe
  source 1..22: mol_type = other DNA
acgcgtgggttcgaatcccatc

SEQ ID NO: 44734 - DNA, 28 bp, synthetic construct
  misc_feature 1..28: note = Probe
  source 1..28: mol_type = other DNA
acgcgtgggttcgaatcccatcctcgtc

SEQ ID NO: 44735 - DNA, 29 bp, synthetic construct
  misc_feature 1..29: note = Probe
  source 1..29: mol_type = other DNA
acgcgtgggttcgaatcccatcctcgtcg

SEQ ID NO: 44736 - DNA, 30 bp, synthetic construct
  misc_feature 1..30: note = Probe
  source 1..30: mol_type = other DNA
acgcgtgggttcgaatcccatcctcgtcgc

SEQ ID NO: 44737 - DNA, 27 bp, synthetic construct
  misc_feature 1..27: note = Probe
  source 1..27: mol_type = other DNA
acggagaattttggattctcagggatg

SEQ ID NO: 44738 - DNA, 16 bp, synthetic construct
  misc_feature 1..16: note = Probe
  source 1..16: mol_type = other DNA
acgggctcacatcacc

SEQ ID NO: 44739 - DNA, 17 bp, synthetic construct
  misc_feature 1..17: note = Probe
  source 1..17: mol_type = other DNA
acgggctcacatcaccc

SEQ ID NO: 44740 - DNA, 18 bp, synthetic construct
  misc_feature 1..18: note = Probe
  source 1..18: mol_type = other DNA
acgggctcacatcacccc

SEQ ID NO: 44741 - DNA, 21 bp, synthetic construct
  misc_feature 1..21: note = Probe
  source 1..21: mol_type = other DNA
acgggctcacatcaccccata

SEQ ID NO: 44742 - DNA, 22 bp, synthetic construct
  misc_feature 1..22: note = Probe
  source 1..22: mol_type = other DNA
acgggctcacatcaccccataa

SEQ ID NO: 44743 - DNA, 27 bp, synthetic construct
  misc_feature 1..27: note = Probe
  source 1..27: mol_type = other DNA
acgggctcacatcaccccataaacaaa

SEQ ID NO: 44744 - DNA, 28 bp, synthetic construct
  misc_feature 1..28: note = Probe
  source 1..28: mol_type = other DNA
acgggctcacatcaccccataaacaaat

SEQ ID NO: 44745 - DNA, 17 bp, synthetic construct
  misc_feature 1..17: note = Probe
  source 1..17: mol_type = other DNA
acggggcacaataattt

SEQ ID NO: 44746 - DNA, 50 bp, synthetic construct; identical to SEQ ID NO: 37963
  misc_feature 1..50: note = Probe
  source 1..50: mol_type = other DNA

SEQ ID NO: 44747 - DNA, 16 bp, synthetic construct
  misc_feature 1..16: note = Probe
  source 1..16: mol_type = other DNA
actaaaaaatcccttt

SEQ ID NO: 44748 - DNA, 17 bp, synthetic construct
  misc_feature 1..17: note = Probe
  source 1..17: mol_type = other DNA
actaaaaaatccctttt

SEQ ID NO: 44749 - DNA, 20 bp, synthetic construct
  misc_feature 1..20: note = Probe
  source 1..20: mol_type = other DNA
actaaatactaccgtatggc

SEQ ID NO: 44750 - DNA, 18 bp, synthetic construct
  misc_feature 1..18: note = Probe
  source 1..18: mol_type = other DNA
actaagtgtttgtgggtt

SEQ ID NO: 44751 - DNA, 19 bp, synthetic construct
  misc_feature 1..19: note = Probe
  source 1..19: mol_type = other DNA
actaagtgtttgtgggttt

SEQ ID NO: 44752 - DNA, 21 bp, synthetic construct
  misc_feature 1..21: note = Probe
  source 1..21: mol_type = other DNA
actaagtgtttgtgggtttaa

SEQ ID NO: 44753 - DNA, 37 bp, synthetic construct; identical to SEQ ID NO: 2895
  misc_feature 1..37: note = Probe
  source 1..37: mol_type = other DNA

SEQ ID NO: 44754 - DNA, 38 bp, synthetic construct; identical to SEQ ID NO: 2896
  misc_feature 1..38: note = Probe
  source 1..38: mol_type = other DNA

SEQ ID NO: 44755 - DNA, 39 bp, synthetic construct; identical to SEQ ID NO: 2897
  misc_feature 1..39: note = Probe
  source 1..39: mol_type = other DNA

SEQ ID NO: 44756 - DNA, 40 bp, synthetic construct; identical to SEQ ID NO: 2898
  misc_feature 1..40: note = Probe
  source 1..40: mol_type = other DNA

SEQ ID NO: 44757 - DNA, 41 bp, synthetic construct; identical to SEQ ID NO: 2899
  misc_feature 1..41: note = Probe
  source 1..41: mol_type = other DNA

SEQ ID NO: 44758 - DNA, 42 bp, synthetic construct; identical to SEQ ID NO: 2900
  misc_feature 1..42: note = Probe
  source 1..42: mol_type = other DNA

SEQ ID NO: 44759 - DNA, 44 bp, synthetic construct
  misc_feature 1..44: note = Probe
  source 1..44: mol_type = other DNA
actaagtgtttgtgggtttaagtcccattggtctagtaagggct

SEQ ID NO: 44760 - DNA, 18 bp, synthetic construct
  misc_feature 1..18: note = Probe
  source 1..18: mol_type = other DNA
actactataaccacccta

SEQ ID NO: 44761 - DNA, 16 bp, synthetic construct
  misc_feature 1..16: note = Probe
  source 1..16: mol_type = other DNA
actagttttgacaaca

SEQ ID NO: 44762 - DNA, 27 bp, synthetic construct
  misc_feature 1..27: note = Probe
  source 1..27: mol_type = other DNA
actagttttgacaacattcaaaaaaga

SEQ ID NO: 44763 - DNA, 28 bp, synthetic construct
  misc_feature 1..28: note = Probe
  source 1..28: mol_type = other DNA
actagttttgacaacattcaaaaaagag

SEQ ID NO: 44764 - DNA, 17 bp, synthetic construct
  misc_feature 1..17: note = Probe
  source 1..17: mol_type = other DNA
actcatgcccccatgtc

SEQ ID NO: 44765 - DNA, 18 bp, synthetic construct
  misc_feature 1..18: note = Probe
  source 1..18: mol_type = other DNA
actcatgcccccatgtct

SEQ ID NO: 44766 - DNA, 19 bp, synthetic construct
  misc_feature 1..19: note = Probe
  source 1..19: mol_type = other DNA
actcatgcccccatgtcta

SEQ ID NO: 44767 - DNA, 22 bp, synthetic construct
  misc_feature 1..22: note = Probe
  source 1..22: mol_type = other DNA
actcatgcccccatgtctaaca

SEQ ID NO: 44768 - DNA, 30 bp, synthetic construct; identical to SEQ ID NO: 2906
  misc_feature 1..30: note = Probe
  source 1..30: mol_type = other DNA

SEQ ID NO: 44769 - DNA, 31 bp, synthetic construct; identical to SEQ ID NO: 2907
  misc_feature 1..31: note = Probe
  source 1..31: mol_type = other DNA

SEQ ID NO: 44770 - DNA, 32 bp, synthetic construct; identical to SEQ ID NO: 2908
  misc_feature 1..32: note = Probe
  source 1..32: mol_type = other DNA

SEQ ID NO: 44771 - DNA, 33 bp, synthetic construct; identical to SEQ ID NO: 2909
  misc_feature 1..33: note = Probe
  source 1..33: mol_type = other DNA

SEQ ID NO: 44772 - DNA, 34 bp, synthetic construct; identical to SEQ ID NO: 2910
  misc_feature 1..34: note = Probe
  source 1..34: mol_type = other DNA

SEQ ID NO: 44773 - DNA, 35 bp, synthetic construct; identical to SEQ ID NO: 2911
  misc_feature 1..35: note = Probe
  source 1..35: mol_type = other DNA

SEQ ID NO: 44774 - DNA, 36 bp, synthetic construct; identical to SEQ ID NO: 2912
  misc_feature 1..36: note = Probe
  source 1..36: mol_type = other DNA

SEQ ID NO: 44775 - DNA, 37 bp, synthetic construct; identical to SEQ ID NO: 2913
  misc_feature 1..37: note = Probe
  source 1..37: mol_type = other DNA

SEQ ID NO: 44776 - DNA, 38 bp, synthetic construct; identical to SEQ ID NO: 2914
  misc_feature 1..38: note = Probe
  source 1..38: mol_type = other DNA

SEQ ID NO: 44777 - DNA, 39 bp, synthetic construct; identical to SEQ ID NO: 2915
  misc_feature 1..39: note = Probe
  source 1..39: mol_type = other DNA

SEQ ID NO: 44778 - DNA, 30 bp, synthetic construct; identical to SEQ ID NO: 15936
  misc_feature 1..30: note = Probe
  source 1..30: mol_type = other DNA

SEQ ID NO: 44779 - DNA, 32 bp, synthetic construct
  misc_feature 1..32: note = Probe
  source 1..32: mol_type = other DNA
actcattaaattatgataatcatatttaccaa

SEQ ID NO: 44780 - DNA, 33 bp, synthetic construct; identical to SEQ ID NO: 2916
  misc_feature 1..33: note = Probe
  source 1..33: mol_type = other DNA

SEQ ID NO: 44781 - DNA, 35 bp, synthetic construct; identical to SEQ ID NO: 2917
  misc_feature 1..35: note = Probe
  source 1..35: mol_type = other DNA

SEQ ID NO: 44782 - DNA, 16 bp, synthetic construct
  misc_feature 1..16: note = Probe
  source 1..16: mol_type = other DNA
actcccggtgtgggaa

SEQ ID NO: 44783 - DNA, 18 bp, synthetic construct
  misc_feature 1..18: note = Probe
  source 1..18: mol_type = other DNA
actcccggtgtgggaacg

SEQ ID NO: 44784 - DNA, 19 bp, synthetic construct
  misc_feature 1..19: note = Probe
  source 1..19: mol_type = other DNA
actcccggtgtgggaacgc

SEQ ID NO: 44785 - DNA, 21 bp, synthetic construct
  misc_feature 1..21: note = Probe
  source 1..21: mol_type = other DNA
actctgaatccagcgatccga

SEQ ID NO: 44786 - DNA, 42 bp, synthetic construct
  misc_feature 1..42: note = Probe
  source 1..42: mol_type = other DNA
actctgaatccagcgatccgagttcaaatctcggtggaacct

SEQ ID NO: 44787 - DNA, 45 bp, synthetic construct; identical to SEQ ID NO: 38014
  misc_feature 1..45: note = Probe
  source 1..45: mol_type = other DNA

SEQ ID NO: 44788 - DNA, 50 bp, synthetic construct
  misc_feature 1..50: note = Probe
  source 1..50: mol_type = other DNA
actctgaatccagcgatccgagttcaaatctcggtggaaccttgaagctt

SEQ ID NO: 44789 - DNA, 50 bp, synthetic construct; identical to SEQ ID NO: 2921
  misc_feature 1..50: note = Probe
  source 1..50: mol_type = other DNA

SEQ ID NO: 44790 - DNA, 32 bp, synthetic construct; identical to SEQ ID NO: 195
  misc_feature 1..32: note = Probe
  source 1..32: mol_type = other DNA

SEQ ID NO: 44791 - DNA, 33 bp, synthetic construct; identical to SEQ ID NO: 196
  misc_feature 1..33: note = Probe
  source 1..33: mol_type = other DNA

SEQ ID NO: 44792 - DNA, 34 bp, synthetic construct; identical to SEQ ID NO: 197
  misc_feature 1..34: note = Probe
  source 1..34: mol_type = other DNA

SEQ ID NO: 44793 - DNA, 42 bp, synthetic construct; identical to SEQ ID NO: 2937
  misc_feature 1..42: note = Probe
  source 1..42: mol_type = other DNA

SEQ ID NO: 44794 - DNA, 43 bp, synthetic construct; identical to SEQ ID NO: 2938
  misc_feature 1..43: note = Probe
  source 1..43: mol_type = other DNA

SEQ ID NO: 44795 - DNA, 44 bp, synthetic construct; identical to SEQ ID NO: 2939
  misc_feature 1..44: note = Probe
  source 1..44: mol_type = other DNA

SEQ ID NO: 44796 - DNA, 45 bp, synthetic construct; identical to SEQ ID NO: 2940
  misc_feature 1..45: note = Probe
  source 1..45: mol_type = other DNA

SEQ ID NO: 44797 - DNA, 50 bp, synthetic construct; identical to SEQ ID NO: 2941
  misc_feature 1..50: note = Probe
  source 1..50: mol_type = other DNA

SEQ ID NO: 44798 - DNA, 25 bp, synthetic construct
  misc_feature 1..25: note = Probe
  source 1..25: mol_type = other DNA
actgctaactcatgcccccatgtct

SEQ ID NO: 44799 - DNA, 29 bp, synthetic construct
  misc_feature 1..29: note = Probe
  source 1..29: mol_type = other DNA
actgctaactcatgcccccatgtctaaca

SEQ ID NO: 44800 - DNA, 41 bp, synthetic construct; identical to SEQ ID NO: 2951
  misc_feature 1..41: note = Probe
  source 1..41: mol_type = other DNA

SEQ ID NO: 44801 - DNA, 42 bp, synthetic construct; identical to SEQ ID NO: 2952
  misc_feature 1..42: note = Probe
  source 1..42: mol_type = other DNA

SEQ ID NO: 44802 - DNA, 43 bp, synthetic construct; identical to SEQ ID NO: 2953
  misc_feature 1..43: note = Probe
  source 1..43: mol_type = other DNA

SEQ ID NO: 44803 - DNA, 45 bp, synthetic construct; identical to SEQ ID NO: 2955
  misc_feature 1..45: note = Probe
  source 1..45: mol_type = other DNA

SEQ ID NO: 44804 - DNA, 46 bp, synthetic construct; identical to SEQ ID NO: 2956
  misc_feature 1..46: note = Probe
  source 1..46: mol_type = other DNA

SEQ ID NO: 44805 - DNA, 25 bp, synthetic construct
  misc_feature 1..25: note = Probe
  source 1..25: mol_type = other DNA
actggaaagtgcacttggacgaacc

SEQ ID NO: 44806 - DNA, 26 bp, synthetic construct
  misc_feature 1..26: note = Probe
  source 1..26: mol_type = other DNA
actggaaagtgcacttggacgaacca

SEQ ID NO: 44807 - DNA, 43 bp, synthetic construct; identical to SEQ ID NO: 2960
  misc_feature 1..43: note = Probe
  source 1..43: mol_type = other DNA

SEQ ID NO: 44808 - DNA, 37 bp, synthetic construct; identical to SEQ ID NO: 200
  misc_feature 1..37: note = Probe
  source 1..37: mol_type = other DNA

SEQ ID NO: 44809 - DNA, 38 bp, synthetic construct; identical to SEQ ID NO: 2962
  misc_feature 1..38: note = Probe
  source 1..38: mol_type = other DNA

SEQ ID NO: 44810 - DNA, 39 bp, synthetic construct; identical to SEQ ID NO: 2963
  misc_feature 1..39: note = Probe
  source 1..39: mol_type = other DNA

SEQ ID NO: 44811 - DNA, 40 bp, synthetic construct; identical to SEQ ID NO: 2964
  misc_feature 1..40: note = Probe
  source 1..40: mol_type = other DNA

SEQ ID NO: 44812 - DNA, 41 bp, synthetic construct; identical to SEQ ID NO: 2965
  misc_feature 1..41: note = Probe
  source 1..41: mol_type = other DNA

SEQ ID NO: 44813 - DNA, 42 bp, synthetic construct; identical to SEQ ID NO: 2966
  misc_feature 1..42: note = Probe
  source 1..42: mol_type = other DNA

SEQ ID NO: 44814 - DNA, 43 bp, synthetic construct; identical to SEQ ID NO: 2967
  misc_feature 1..43: note = Probe
  source 1..43: mol_type = other DNA

SEQ ID NO: 44815 - DNA, 45 bp, synthetic construct; identical to SEQ ID NO: 2969
  misc_feature 1..45: note = Probe
  source 1..45: mol_type = other DNA

SEQ ID NO: 44816 - DNA, 46 bp, synthetic construct; identical to SEQ ID NO: 2970
  misc_feature 1..46: note = Probe
  source 1..46: mol_type = other DNA

SEQ ID NO: 44817 - DNA, 16 bp, synthetic construct
  misc_feature 1..16: note = Probe
  source 1..16: mol_type = other DNA
acttaacttgaccgct

SEQ ID NO: 44818 - DNA, 18 bp, synthetic construct
  misc_feature 1..18: note = Probe
  source 1..18: mol_type = other DNA
acttaacttgaccgctct

SEQ ID NO: 44819 - DNA, 20 bp, synthetic construct
  misc_feature 1..20: note = Probe
  source 1..20: mol_type = other DNA
acttaacttgaccgctctga

SEQ ID NO: 44820 - DNA, 21 bp, synthetic construct
  misc_feature 1..21: note = Probe
  source 1..21: mol_type = other DNA
acttaacttgaccgctctgag

SEQ ID NO: 44821 - DNA, 22 bp, synthetic construct
  misc_feature 1..22: note = Probe
  source 1..22: mol_type = other DNA
acttaacttgaccgctctgagc

SEQ ID NO: 44822 - DNA, 23 bp, synthetic construct
  misc_feature 1..23: note = Probe
  source 1..23: mol_type = other DNA
acttaacttgaccgctctgagct

SEQ ID NO: 44823 - DNA, 16 bp, synthetic construct
  misc_feature 1..16: note = Probe
  source 1..16: mol_type = other DNA
acttacacttaggaga

SEQ ID NO: 44824 - DNA, 17 bp, synthetic construct
  misc_feature 1..17: note = Probe
  source 1..17: mol_type = other DNA
acttacacttaggagat

SEQ ID NO: 44825 - DNA, 18 bp, synthetic construct
  misc_feature 1..18: note = Probe
  source 1..18: mol_type = other DNA
acttacacttaggagatt

SEQ ID NO: 44826 - DNA, 21 bp, synthetic construct
  misc_feature 1..21: note = Probe
  source 1..21: mol_type = other DNA
acttacacttaggagatttca

SEQ ID NO: 44827 - DNA, 25 bp, synthetic construct
  misc_feature 1..25: note = Probe
  source 1..25: mol_type = other DNA
acttacacttaggagatttcaactt

SEQ ID NO: 44828 - DNA, 29 bp, synthetic construct
  misc_feature 1..29: note = Probe
  source 1..29: mol_type = other DNA
acttacacttaggagatttcaacttaact

SEQ ID NO: 44829 - DNA, 30 bp, synthetic construct; identical to SEQ ID NO: 27455
  misc_feature 1..30: note = Probe
  source 1..30: mol_type = other DNA

SEQ ID NO: 44830 - DNA, 31 bp, synthetic construct; identical to SEQ ID NO: 15998
  misc_feature 1..31: note = Probe
  source 1..31: mol_type = other DNA

SEQ ID NO: 44831 - DNA, 33 bp, synthetic construct; identical to SEQ ID NO: 2981
  misc_feature 1..33: note = Probe
  source 1..33: mol_type = other DNA

SEQ ID NO: 44832 - DNA, 34 bp, synthetic construct; identical to SEQ ID NO: 16000
  misc_feature 1..34: note = Probe
  source 1..34: mol_type = other DNA

SEQ ID NO: 44833 - DNA, 35 bp, synthetic construct; identical to SEQ ID NO: 2982
  misc_feature 1..35: note = Probe
  source 1..35: mol_type = other DNA

SEQ ID NO: 44834 - DNA, 36 bp, synthetic construct; identical to SEQ ID NO: 2983
  misc_feature 1..36: note = Probe
  source 1..36: mol_type = other DNA

SEQ ID NO: 44835 - DNA, 37 bp, synthetic construct; identical to SEQ ID NO: 2984
  misc_feature 1..37: note = Probe
  source 1..37: mol_type = other DNA

SEQ ID NO: 44836 - DNA, 38 bp, synthetic construct; identical to SEQ ID NO: 16004
  misc_feature 1..38: note = Probe
  source 1..38: mol_type = other DNA

SEQ ID NO: 44837 - DNA, 39 bp, synthetic construct; identical to SEQ ID NO: 2985
  misc_feature 1..39: note = Probe
  source 1..39: mol_type = other DNA

SEQ ID NO: 44838 - DNA, 40 bp, synthetic construct; identical to SEQ ID NO: 2986
  misc_feature 1..40: note = Probe
  source 1..40: mol_type = other DNA

SEQ ID NO: 44839 - DNA, 41 bp, synthetic construct; identical to SEQ ID NO: 2987
  misc_feature 1..41: note = Probe
  source 1..41: mol_type = other DNA

SEQ ID NO: 44840 - DNA, 42 bp, synthetic construct; identical to SEQ ID NO: 2988
  misc_feature 1..42: note = Probe
  source 1..42: mol_type = other DNA

SEQ ID NO: 44841 - DNA, 43 bp, synthetic construct; identical to SEQ ID NO: 2989
  misc_feature 1..43: note = Probe
  source 1..43: mol_type = other DNA

SEQ ID NO: 44842 - DNA, 44 bp, synthetic construct; identical to SEQ ID NO: 2990
  misc_feature 1..44: note = Probe
  source 1..44: mol_type = other DNA

SEQ ID NO: 44843 - DNA, 45 bp, synthetic construct; identical to SEQ ID NO: 2991
  misc_feature 1..45: note = Probe
  source 1..45: mol_type = other DNA

SEQ ID NO: 44844 - DNA, 50 bp, synthetic construct; identical to SEQ ID NO: 2992
  misc_feature 1..50: note = Probe
  source 1..50: mol_type = other DNA

SEQ ID NO: 44845 - DNA, 31 bp, synthetic construct
  misc_feature 1..31: note = Probe
  source 1..31: mol_type = other DNA
acttagcattaaccttttaagttaaagatta

SEQ ID NO: 44846 - DNA, 40 bp, synthetic construct; identical to SEQ ID NO: 12626
  misc_feature 1..40: note = Probe
  source 1..40: mol_type = other DNA

SEQ ID NO: 44847 - DNA, 23 bp, synthetic construct
  misc_feature 1..23: note = Probe
  source 1..23: mol_type = other DNA
acttaggagatttcaacttaact

SEQ ID NO: 44848 - DNA, 27 bp, synthetic construct
  misc_feature 1..27: note = Probe
  source 1..27: mol_type = other DNA
acttaggagatttcaacttaacttgac

SEQ ID NO: 44849 - DNA, 28 bp, synthetic construct
  misc_feature 1..28: note = Probe
  source 1..28: mol_type = other DNA
acttaggagatttcaacttaacttgacc

SEQ ID NO: 44850 - DNA, 29 bp, synthetic construct
  misc_feature 1..29: note = Probe
  source 1..29: mol_type = other DNA
acttaggagatttcaacttaacttgaccg

SEQ ID NO: 44851 - DNA, 30 bp, synthetic construct; identical to SEQ ID NO: 9072
  misc_feature 1..30: note = Probe
  source 1..30: mol_type = other DNA

SEQ ID NO: 44852 - DNA, 31 bp, synthetic construct; identical to SEQ ID NO: 2999
  misc_feature 1..31: note = Probe
  source 1..31: mol_type = other DNA

SEQ ID NO: 44853 - DNA, 33 bp, synthetic construct; identical to SEQ ID NO: 3001
  misc_feature 1..33: note = Probe
  source 1..33: mol_type = other DNA

SEQ ID NO: 44854 - DNA, 34 bp, synthetic construct
  misc_feature 1..34: note = Probe
  source 1..34: mol_type = other DNA
acttaggagatttcaacttaacttgaccgctctg

SEQ ID NO: 44855 - DNA, 35 bp, synthetic construct; identical to SEQ ID NO: 3002
  misc_feature 1..35: note = Probe
  source 1..35: mol_type = other DNA

SEQ ID NO: 44856 - DNA, 36 bp, synthetic construct; identical to SEQ ID NO: 3003
  misc_feature 1..36: note = Probe
  source 1..36: mol_type = other DNA

SEQ ID NO: 44857 - DNA, 37 bp, synthetic construct; identical to SEQ ID NO: 3004
  misc_feature 1..37: note = Probe
  source 1..37: mol_type = other DNA

SEQ ID NO: 44858 - DNA, 38 bp, synthetic construct; identical to SEQ ID NO: 3005
  misc_feature 1..38: note = Probe
  source 1..38: mol_type = other DNA

SEQ ID NO: 44859 - DNA, 24 bp, synthetic construct
  misc_feature 1..24: note = Probe
  source 1..24: mol_type = other DNA
acttccaattaactagttttgaca

SEQ ID NO: 44860 - DNA, 27 bp, synthetic construct
  misc_feature 1..27: note = Probe
  source 1..27: mol_type = other DNA
acttccaattaactagttttgacaaca

SEQ ID NO: 44861 - DNA, 42 bp, synthetic construct
  misc_feature 1..42: note = Probe
  source 1..42: mol_type = other DNA
acttccaattaactagttttgacaacattcaaaaaagagtaa

SEQ ID NO: 44862 - DNA, 43 bp, synthetic construct; identical to SEQ ID NO: 3009
  misc_feature 1..43: note = Probe
  source 1..43: mol_type = other DNA

SEQ ID NO: 44863 - DNA, 44 bp, synthetic construct; identical to SEQ ID NO: 3010
  misc_feature 1..44: note = Probe
  source 1..44: mol_type = other DNA

SEQ ID NO: 44864 - DNA, 50 bp, synthetic construct
  misc_feature 1..50: note = Probe
  source 1..50: mol_type = other DNA
acttccaattaactagttttgacaacattcaaaaaagagtaataaacttc

SEQ ID NO: 44865 - DNA, 19 bp, synthetic construct
  misc_feature 1..19: note = Probe
  source 1..19: mol_type = other DNA
actttacagtcagaggttc

SEQ ID NO: 44866 - DNA, 30 bp, synthetic construct; identical to SEQ ID NO: 202
  misc_feature 1..30: note = Probe
  source 1..30: mol_type = other DNA

SEQ ID NO: 44867 - DNA, 31 bp, synthetic construct; identical to SEQ ID NO: 3013
  misc_feature 1..31: note = Probe
  source 1..31: mol_type = other DNA

SEQ ID NO: 44868 - DNA, 32 bp, synthetic construct; identical to SEQ ID NO: 3014
  misc_feature 1..32: note = Probe
  source 1..32: mol_type = other DNA

SEQ ID NO: 44869 - DNA, 33 bp, synthetic construct; identical to SEQ ID NO: 3015
  misc_feature 1..33: note = Probe
  source 1..33: mol_type = other DNA

SEQ ID NO: 44870 - DNA, 34 bp, synthetic construct
  misc_feature 1..34: note = Probe
  source 1..34: mol_type = other DNA
actttacagtcagaggttcaattcctcttcttaa

SEQ ID NO: 44871 - DNA, 35 bp, synthetic construct; identical to SEQ ID NO: 3016
  misc_feature 1..35: note = Probe
  source 1..35: mol_type = other DNA

SEQ ID NO: 44872 - DNA, 36 bp, synthetic construct; identical to SEQ ID NO: 16031
  misc_feature 1..36: note = Probe
  source 1..36: mol_type = other DNA

SEQ ID NO: 44873 - DNA, 38 bp, synthetic construct; identical to SEQ ID NO: 3018
  misc_feature 1..38: note = Probe
  source 1..38: mol_type = other DNA

SEQ ID NO: 44874 - DNA, 39 bp, synthetic construct; identical to SEQ ID NO: 3019
  misc_feature 1..39: note = Probe
  source 1..39: mol_type = other DNA

SEQ ID NO: 44875 - DNA, 45 bp, synthetic construct; identical to SEQ ID NO: 38095
  misc_feature 1..45: note = Probe
  source 1..45: mol_type = other DNA

SEQ ID NO: 44876 - DNA, 33 bp, synthetic construct; identical to SEQ ID NO: 3022
  misc_feature 1..33: note = Probe
  source 1..33: mol_type = other DNA

SEQ ID NO: 44877 - DNA, 34 bp, synthetic construct; identical to SEQ ID NO: 3023
  misc_feature 1..34: note = Probe
  source 1..34: mol_type = other DNA

SEQ ID NO: 44878 - DNA, 40 bp, synthetic construct; identical to SEQ ID NO: 3026
  misc_feature 1..40: note = Probe
  source 1..40: mol_type = other DNA

SEQ ID NO: 44879 - DNA, 41 bp, synthetic construct; identical to SEQ ID NO: 3027
  misc_feature 1..41: note = Probe
  source 1..41: mol_type = other DNA

SEQ ID NO: 44880 - DNA, 42 bp, synthetic construct; identical to SEQ ID NO: 3028
  misc_feature 1..42: note = Probe
  source 1..42: mol_type = other DNA

SEQ ID NO: 44881 - DNA, 43 bp, synthetic construct; identical to SEQ ID NO: 3029
  misc_feature 1..43: note = Probe
  source 1..43: mol_type = other DNA

SEQ ID NO: 44882 - DNA, 44 bp, synthetic construct; identical to SEQ ID NO: 3030
  misc_feature 1..44: note = Probe
  source 1..44: mol_type = other DNA

SEQ ID NO: 44883 - DNA, 45 bp, synthetic construct; identical to SEQ ID NO: 206
  misc_feature 1..45: note = Probe
  source 1..45: mol_type = other DNA

SEQ ID NO: 44884 - DNA, 46 bp, synthetic construct; identical to SEQ ID NO: 3031
  misc_feature 1..46: note = Probe
  source 1..46: mol_type = other DNA

SEQ ID NO: 44885 - DNA, 47 bp, synthetic construct
  misc_feature 1..47: note = Probe
  source 1..47: mol_type = other DNA
actttgatagagtaaataataggagcttaaacccccttatttctagg

SEQ ID NO: 44886 - DNA, 48 bp, synthetic construct
  misc_feature 1..48: note = Probe
  source 1..48: mol_type = other DNA
actttgatagagtaaataataggagcttaaacccccttatttctagga

SEQ ID NO: 44887 - DNA, 49 bp, synthetic construct; identical to SEQ ID NO: 3032
  misc_feature 1..49: note = Probe
  source 1..49: mol_type = other DNA

SEQ ID NO: 44888 - DNA, 50 bp, synthetic construct; identical to SEQ ID NO: 3033
  misc_feature 1..50: note = Probe
  source 1..50: mol_type = other DNA

SEQ ID NO: 44889 - DNA, 28 bp, synthetic construct
  misc_feature 1..28: note = Probe
  source 1..28: mol_type = other DNA
acttttaaaggataacagctatccattg

SEQ ID NO: 44890 - DNA, 33 bp, synthetic construct; identical to SEQ ID NO: 3035
  misc_feature 1..33: note = Probe
  source 1..33: mol_type = other DNA

SEQ ID NO: 44891 - DNA, 34 bp, synthetic construct; identical to SEQ ID NO: 212
  misc_feature 1..34: note = Probe
  source 1..34: mol_type = other DNA

SEQ ID NO: 44892 - DNA, 40 bp, synthetic construct; identical to SEQ ID NO: 16056
  misc_feature 1..40: note = Probe
  source 1..40: mol_type = other DNA

SEQ ID NO: 44893 - DNA, 43 bp, synthetic construct; identical to SEQ ID NO: 3038
  misc_feature 1..43: note = Probe
  source 1..43: mol_type = other DNA

SEQ ID NO: 44894 - DNA, 44 bp, synthetic construct; identical to SEQ ID NO: 16059
  misc_feature 1..44: note = Probe
  source 1..44: mol_type = other DNA

SEQ ID NO: 44895 - DNA, 45 bp, synthetic construct
  misc_feature 1..45: note = Probe
  source 1..45: mol_type = other DNA
acttttaaaggataacagctatccattggtcttaggccccaaaaa

SEQ ID NO: 44896 - DNA, 50 bp, synthetic construct; identical to SEQ ID NO: 3039
  misc_feature 1..50: note = Probe
  source 1..50: mol_type = other DNA

SEQ ID NO: 44897 - DNA, 29 bp, synthetic construct
  misc_feature 1..29: note = Probe
  source 1..29: mol_type = other DNA
agaaagctcacaagaactgctaactcatg

SEQ ID NO: 44898 - DNA, 50 bp, synthetic construct; identical to SEQ ID NO: 216
  misc_feature 1..50: note = Probe
  source 1..50: mol_type = other DNA

SEQ ID NO: 44899 - DNA, 16 bp, synthetic construct
  misc_feature 1..16: note = Probe
  source 1..16: mol_type = other DNA
agaaaggccgaatttt

SEQ ID NO: 44900 - DNA, 17 bp, synthetic construct
  misc_feature 1..17: note = Probe
  source 1..17: mol_type = other DNA
agaaaggccgaatttta

SEQ ID NO: 44901 - DNA, 50 bp, synthetic construct; identical to SEQ ID NO: 217
  misc_feature 1..50: note = Probe
  source 1..50: mol_type = other DNA

SEQ ID NO: 44902 - DNA, 16 bp, synthetic construct
  misc_feature 1..16: note = Probe
  source 1..16: mol_type = other DNA
agaacagggtttgtta

SEQ ID NO: 44903 - DNA, 39 bp, synthetic construct; identical to SEQ ID NO: 3054
  misc_feature 1..39: note = Probe
  source 1..39: mol_type = other DNA

SEQ ID NO: 44904 - DNA, 24 bp, synthetic construct
  misc_feature 1..24: note = Probe
  source 1..24: mol_type = other DNA
agaaccaacacctctttacagtga

SEQ ID NO: 44905 - DNA, 25 bp, synthetic construct
  misc_feature 1..25: note = Probe
  source 1..25: mol_type = other DNA
agaaccaacacctctttacagtgaa

SEQ ID NO: 44906 - DNA, 26 bp, synthetic construct
  misc_feature 1..26: note = Probe
  source 1..26: mol_type = other DNA
agaaccaacacctctttacagtgaaa

SEQ ID NO: 44907 - DNA, 27 bp, synthetic construct
  misc_feature 1..27: note = Probe
  source 1..27: mol_type = other DNA
agaaccaacacctctttacagtgaaat

SEQ ID NO: 44908 - DNA, 17 bp, synthetic construct
  misc_feature 1..17: note = Probe
  source 1..17: mol_type = other DNA
agaactgctaactcatg

SEQ ID NO: 44909 - DNA, 23 bp, synthetic construct
  misc_feature 1..23: note = Probe
  source 1..23: mol_type = other DNA
agaactgctaactcatgccccca

SEQ ID NO: 44910 - DNA, 31 bp, synthetic construct; identical to SEQ ID NO: 16095
  misc_feature 1..31: note = Probe
  source 1..31: mol_type = other DNA

SEQ ID NO: 44911 - DNA, 35 bp, synthetic construct; identical to SEQ ID NO: 12635
  misc_feature 1..35: note = Probe
  source 1..35: mol_type = other DNA

SEQ ID NO: 44912 - DNA, 43 bp, synthetic construct; identical to SEQ ID NO: 221
  misc_feature 1..43: note = Probe
  source 1..43: mol_type = other DNA

SEQ ID NO: 44913 - DNA, 49 bp, synthetic construct; identical to SEQ ID NO: 3069
  misc_feature 1..49: note = Probe
  source 1..49: mol_type = other DNA

SEQ ID NO: 44914 - DNA, 50 bp, synthetic construct; identical to SEQ ID NO: 3070
  misc_feature 1..50: note = Probe
  source 1..50: mol_type = other DNA

SEQ ID NO: 44915 - DNA, 31 bp, synthetic construct; identical to SEQ ID NO: 225
  misc_feature 1..31: note = Probe
  source 1..31: mol_type = other DNA

SEQ ID NO: 44916 - DNA, 31 bp, synthetic construct; identical to SEQ ID NO: 226
  misc_feature 1..31: note = Probe
  source 1..31: mol_type = other DNA

SEQ ID NO: 44917 - DNA, 31 bp, synthetic construct; identical to SEQ ID NO: 230
  misc_feature 1..31: note = Probe
  source 1..31: mol_type = other DNA

SEQ ID NO: 44918 - DNA, 33 bp, synthetic construct; identical to SEQ ID NO: 231
  misc_feature 1..33: note = Probe
  source 1..33: mol_type = other DNA

SEQ ID NO: 44919 - DNA, 36 bp, synthetic construct; identical to SEQ ID NO: 3082
  misc_feature 1..36: note = Probe
  source 1..36: mol_type = other DNA

SEQ ID NO: 44920 - DNA, 31 bp, synthetic construct; identical to SEQ ID NO: 3084
  misc_feature 1..31: note = Probe
  source 1..31: mol_type = other DNA

SEQ ID NO: 44921 - DNA, 36 bp, synthetic construct; identical to SEQ ID NO: 3087
  misc_feature 1..36: note = Probe
  source 1..36: mol_type = other DNA

SEQ ID NO: 44922 - DNA, 17 bp, synthetic construct
  misc_feature 1..17: note = Probe
  source 1..17: mol_type = other DNA
agaagcagcttcaaacc

SEQ ID NO: 44923 - DNA, 25 bp, synthetic construct
  misc_feature 1..25: note = Probe
  source 1..25: mol_type = other DNA
agaagcagcttcaaacctgccgggg

SEQ ID NO: 44924 - DNA, 26 bp, synthetic construct
  misc_feature 1..26: note = Probe
  source 1..26: mol_type = other DNA
agaagcagcttcaaacctgccggggc

SEQ ID NO: 44925 - DNA, 28 bp, synthetic construct
  misc_feature 1..28: note = Probe
  source 1..28: mol_type = other DNA
agaagcagcttcaaacctgccggggctt

SEQ ID NO: 44926 - DNA, 29 bp, synthetic construct
  misc_feature 1..29: note = Probe
  source 1..29: mol_type = other DNA
agaagcagcttcaaacctgccggggcttc

SEQ ID NO: 44927 - DNA, 30 bp, synthetic construct; identical to SEQ ID NO: 3090
  misc_feature 1..30: note = Probe
  source 1..30: mol_type = other DNA

SEQ ID NO: 44928 - DNA, 31 bp, synthetic construct; identical to SEQ ID NO: 3091
  misc_feature 1..31: note = Probe
  source 1..31: mol_type = other DNA

SEQ ID NO: 44929 - DNA, 31 bp, synthetic construct; identical to SEQ ID NO: 12641
  misc_feature 1..31: note = Probe
  source 1..31: mol_type = other DNA

SEQ ID NO: 44930 - DNA, 34 bp, synthetic construct; identical to SEQ ID NO: 232
  misc_feature 1..34: note = Probe
  source 1..34: mol_type = other DNA

SEQ ID NO: 44931 - DNA, 35 bp, synthetic construct; identical to SEQ ID NO: 3095
  misc_feature 1..35: note = Probe
  source 1..35: mol_type = other DNA

SEQ ID NO: 44932 - DNA, 36 bp, synthetic construct; identical to SEQ ID NO: 3096
  misc_feature 1..36: note = Probe
  source 1..36: mol_type = other DNA

SEQ ID NO: 44933 - DNA, 28 bp, synthetic construct
  misc_feature 1..28: note = Probe
  source 1..28: mol_type = other DNA
agaatcttagctttgggtgctaatggtg

SEQ ID NO: 44934 - DNA, 29 bp, synthetic construct
  misc_feature 1..29: note = Probe
  source 1..29: mol_type = other DNA
agaatcttagctttgggtgctaatggtgg

SEQ ID NO: 44935 - DNA, 30 bp, synthetic construct; identical to SEQ ID NO: 16125
  misc_feature 1..30: note = Probe
  source 1..30: mol_type = other DNA

SEQ ID NO: 44936 - DNA, 48 bp, synthetic construct; identical to SEQ ID NO: 3099
  misc_feature 1..48: note = Probe
  source 1..48: mol_type = other DNA

SEQ ID NO: 44937 - DNA, 49 bp, synthetic construct; identical to SEQ ID NO: 234
  misc_feature 1..49: note = Probe
  source 1..49: mol_type = other DNA

SEQ ID NO: 44938 - DNA, 50 bp, synthetic construct
  misc_feature 1..50: note = Probe
  source 1..50: mol_type = other DNA
agaattctcgcctgccacgcgggaggcccgggttcgattcccggccaatg

SEQ ID NO: 44939 - DNA, 30 bp, synthetic construct; identical to SEQ ID NO: 16156
  misc_feature 1..30: note = Probe
  source 1..30: mol_type = other DNA

SEQ ID NO: 44940 - DNA, 28 bp, synthetic construct
  misc_feature 1..28: note = Probe
  source 1..28: mol_type = other DNA
agaccaagagccttcaaagccctcagta

SEQ ID NO: 44941 - DNA, 35 bp, synthetic construct; identical to SEQ ID NO: 237
  misc_feature 1..35: note = Probe
  source 1..35: mol_type = other DNA

SEQ ID NO: 44942 - DNA, 49 bp, synthetic construct; identical to SEQ ID NO: 3109
  misc_feature 1..49: note = Probe
  source 1..49: mol_type = other DNA

SEQ ID NO: 44943 - DNA, 29 bp, synthetic construct
  misc_feature 1..29: note = Probe
  source 1..29: mol_type = other DNA
agacccgaggtagggctttggctgtgggg

SEQ ID NO: 44944 - DNA, 22 bp, synthetic construct
  misc_feature 1..22: note = Probe
  source 1..22: mol_type = other DNA
agaccggggttcaattccccga

SEQ ID NO: 44945 - DNA, 24 bp, synthetic construct
  misc_feature 1..24: note = Probe
  source 1..24: mol_type = other DNA
agaccggggttcaattccccgacg

SEQ ID NO: 44946 - DNA, 27 bp, synthetic construct
  misc_feature 1..27: note = Probe
  source 1..27: mol_type = other DNA
agaccggggttcaattccccgacgggg

SEQ ID NO: 44947 - DNA, 30 bp, synthetic construct; identical to SEQ ID NO: 3111
  misc_feature 1..30: note = Probe
  source 1..30: mol_type = other DNA

SEQ ID NO: 44948 - DNA, 32 bp, synthetic construct; identical to SEQ ID NO: 3112
  misc_feature 1..32: note = Probe
  source 1..32: mol_type = other DNA

SEQ ID NO: 44949 - DNA, 22 bp, synthetic construct
  misc_feature 1..22: note = Probe
  source 1..22: mol_type = other DNA
agaccggggttcgattccccga

SEQ ID NO: 44950 - DNA, 26 bp, synthetic construct
  misc_feature 1..26: note = Probe
  source 1..26: mol_type = other DNA
agaccggggttcgattccccgacggg

SEQ ID NO: 44951 - DNA, 30 bp, synthetic construct; identical to SEQ ID NO: 3114
  misc_feature 1..30: note = Probe
  source 1..30: mol_type = other DNA

SEQ ID NO: 44952 - DNA, 32 bp, synthetic construct; identical to SEQ ID NO: 3116
  misc_feature 1..32: note = Probe
  source 1..32: mol_type = other DNA

SEQ ID NO: 44953 - DNA, 31 bp, synthetic construct; identical to SEQ ID NO: 3117
  misc_feature 1..31: note = Probe
  source 1..31: mol_type = other DNA

SEQ ID NO: 44954 - DNA, 32 bp, synthetic construct; identical to SEQ ID NO: 3118
  misc_feature 1..32: note = Probe
  source 1..32: mol_type = other DNA

SEQ ID NO: 44955 - DNA, 32 bp, synthetic construct; identical to SEQ ID NO: 3119
  misc_feature 1..32: note = Probe
  source 1..32: mol_type = other DNA

SEQ ID NO: 44956 - DNA, 30 bp, synthetic construct; identical to SEQ ID NO: 3120
  misc_feature 1..30: note = Probe
  source 1..30: mol_type = other DNA

SEQ ID NO: 44957 - DNA, 31 bp, synthetic construct; identical to SEQ ID NO: 3121
  misc_feature 1..31: note = Probe
  source 1..31: mol_type = other DNA

SEQ ID NO: 44958 - DNA, 32 bp, synthetic construct; identical to SEQ ID NO: 3122
  misc_feature 1..32: note = Probe
  source 1..32: mol_type = other DNA

SEQ ID NO: 44959 - DNA, 32 bp, synthetic construct; identical to SEQ ID NO: 3123
  misc_feature 1..32: note = Probe
  source 1..32: mol_type = other DNA

SEQ ID NO: 44960 - DNA, 18 bp, synthetic construct
  misc_feature 1..18: note = Probe
  source 1..18: mol_type = other DNA
agacgggctcacatcacc

SEQ ID NO: 44961 - DNA, 20 bp, synthetic construct
  misc_feature 1..20: note = Probe
  source 1..20: mol_type = other DNA
agacgggctcacatcacccc

SEQ ID NO: 44962 - DNA, 21 bp, synthetic construct
  misc_feature 1..21: note = Probe
  source 1..21: mol_type = other DNA
agacgggctcacatcacccca

SEQ ID NO: 44963 - DNA, 22 bp, synthetic construct
  misc_feature 1..22: note = Probe
  source 1..22: mol_type = other DNA
agacgggctcacatcaccccat

SEQ ID NO: 44964 - DNA, 23 bp, synthetic construct
  misc_feature 1..23: note = Probe
  source 1..23: mol_type = other DNA
agacgggctcacatcaccccata

SEQ ID NO: 44965 - DNA, 24 bp, synthetic construct
  misc_feature 1..24: note = Probe
  source 1..24: mol_type = other DNA
agacgggctcacatcaccccataa

SEQ ID NO: 44966 - DNA, 25 bp, synthetic construct
  misc_feature 1..25: note = Probe
  source 1..25: mol_type = other DNA
agacgggctcacatcaccccataaa

SEQ ID NO: 44967 - DNA, 27 bp, synthetic construct
  misc_feature 1..27: note = Probe
  source 1..27: mol_type = other DNA
agacgggctcacatcaccccataaaca

SEQ ID NO: 44968 - DNA, 29 bp, synthetic construct
  misc_feature 1..29: note = Probe
  source 1..29: mol_type = other DNA
agacgggctcacatcaccccataaacaaa

SEQ ID NO: 44969 - DNA, 30 bp, synthetic construct; identical to SEQ ID NO: 3135
  misc_feature 1..30: note = Probe
  source 1..30: mol_type = other DNA

SEQ ID NO: 44970 - DNA, 28 bp, synthetic construct
  misc_feature 1..28: note = Probe
  source 1..28: mol_type = other DNA
agagaaccaacacctctttacagtgaaa

SEQ ID NO: 44971 - DNA, 29 bp, synthetic construct
  misc_feature 1..29: note = Probe
  source 1..29: mol_type = other DNA
agagaaccaacacctctttacagtgaaat

SEQ ID NO: 44972 - DNA, 50 bp, synthetic construct
  misc_feature 1..50: note = Probe
  source 1..50: mol_type = other DNA
agagcatcagacttttaatctgagggtccagggttcaagtccctgttcgg

SEQ ID NO: 44973 - DNA, 25 bp, synthetic construct
  misc_feature 1..25: note = Probe
  source 1..25: mol_type = other DNA
agagcatgagactcttaatctcagg

SEQ ID NO: 44974 - DNA, 26 bp, synthetic construct
  misc_feature 1..26: note = Probe
  source 1..26: mol_type = other DNA
agagcatgagactcttaatctcaggg

SEQ ID NO: 44975 - DNA, 25 bp, synthetic construct
  misc_feature 1..25: note = Probe
  source 1..25: mol_type = other DNA
agagcatgggactcttaatcccagg

SEQ ID NO: 44976 - DNA, 26 bp, synthetic construct
  misc_feature 1..26: note = Probe
  source 1..26: mol_type = other DNA
agagcatgggactcttaatcccaggg

SEQ ID NO: 44977 - DNA, 29 bp, synthetic construct
  misc_feature 1..29: note = Probe
  source 1..29: mol_type = other DNA
agagcatgggactcttaatcccagggtcg

SEQ ID NO: 44978 - DNA, 32 bp, synthetic construct
  misc_feature 1..32: note = Probe
  source 1..32: mol_type = other DNA
agagcatgggactcttaatcccagggtcgtgg

SEQ ID NO: 44979 - DNA, 16 bp, synthetic construct
  misc_feature 1..16: note = Probe
  source 1..16: mol_type = other DNA
agagcatttgactgca

SEQ ID NO: 44980 - DNA, 20 bp, synthetic construct
  misc_feature 1..20: note = Probe
  source 1..20: mol_type = other DNA
agagcccggtaatcgcataa

SEQ ID NO: 44981 - DNA, 26 bp, synthetic construct
  misc_feature 1..26: note = Probe
  source 1..26: mol_type = other DNA
agagcccggtaatcgcataaaactta

SEQ ID NO: 44982 - DNA, 31 bp, synthetic construct; identical to SEQ ID NO: 248
  misc_feature 1..31: note = Probe
  source 1..31: mol_type = other DNA

SEQ ID NO: 44983 - DNA, 32 bp, synthetic construct; identical to SEQ ID NO: 3144
  misc_feature 1..32: note = Probe
  source 1..32: mol_type = other DNA

SEQ ID NO: 44984 - DNA, 36 bp, synthetic construct
  misc_feature 1..36: note = Probe
  source 1..36: mol_type = other DNA
agagcccggtaatcgcataaaacttaaaactttaca

SEQ ID NO: 44985 - DNA, 39 bp, synthetic construct
  misc_feature 1..39: note = Probe
  source 1..39: mol_type = other DNA
agagcccggtaatcgcataaaacttaaaactttacagtc

SEQ ID NO: 44986 - DNA, 50 bp, synthetic construct
  misc_feature 1..50: note = Probe
  source 1..50: mol_type = other DNA
agagcgtggtgctaataacgccaaggtcgcgggttcgatccccgtactgg

SEQ ID NO: 44987 - DNA, 38 bp, synthetic construct; identical to SEQ ID NO: 16231
  misc_feature 1..38: note = Probe
  source 1..38: mol_type = other DNA

SEQ ID NO: 44988 - DNA, 29 bp, synthetic construct
  misc_feature 1..29: note = Probe
  source 1..29: mol_type = other DNA
agaggtcccgggttcaaatcccggacgag

SEQ ID NO: 44989 - DNA, 30 bp, synthetic construct; identical to SEQ ID NO: 16238
  misc_feature 1..30: note = Probe
  source 1..30: mol_type = other DNA

SEQ ID NO: 44990 - DNA, 31 bp, synthetic construct; identical to SEQ ID NO: 16239
  misc_feature 1..31: note = Probe
  source 1..31: mol_type = other DNA

SEQ ID NO: 44991 - DNA, 32 bp, synthetic construct; identical to SEQ ID NO: 16240
  misc_feature 1..32: note = Probe
  source 1..32: mol_type = other DNA

SEQ ID NO: 44992 - DNA, 33 bp, synthetic construct; identical to SEQ ID NO: 16241
  misc_feature 1..33: note = Probe
  source 1..33: mol_type = other DNA

SEQ ID NO: 44993 - DNA, 34 bp, synthetic construct; identical to SEQ ID NO: 16242
  misc_feature 1..34: note = Probe
  source 1..34: mol_type = other DNA

SEQ ID NO: 44994 - DNA, 35 bp, synthetic construct; identical to SEQ ID NO: 16243
  misc_feature 1..35: note = Probe
  source 1..35: mol_type = other DNA

SEQ ID NO: 44995 - DNA, 35 bp, synthetic construct
  misc_feature 1..35: note = Probe
  source 1..35: mol_type = other DNA
agaggtcgatggatcgaaaccatcctctgctaggt

SEQ ID NO: 44996 - DNA, 18 bp, synthetic construct
  misc_feature 1..18: note = Probe
  source 1..18: mol_type = other DNA
agagtaaataataggagc

SEQ ID NO: 44997 - DNA, 25 bp, synthetic construct
  misc_feature 1..25: note = Probe
  source 1..25: mol_type = other DNA
agagtaaataataggagcttaaacc

SEQ ID NO: 44998 - DNA, 32 bp, synthetic construct; identical to SEQ ID NO: 253
  misc_feature 1..32: note = Probe
  source 1..32: mol_type = other DNA

SEQ ID NO: 44999 - DNA, 33 bp, synthetic construct; identical to SEQ ID NO: 3156
  misc_feature 1..33: note = Probe
  source 1..33: mol_type = other DNA

SEQ ID NO: 45000 - DNA, 34 bp, synthetic construct; identical to SEQ ID NO: 16253
  misc_feature 1..34: note = Probe
  source 1..34: mol_type = other DNA

SEQ ID NO: 45001 - DNA, 35 bp, synthetic construct; identical to SEQ ID NO: 254
  misc_feature 1..35: note = Probe
  source 1..35: mol_type = other DNA

SEQ ID NO: 45002 - DNA, 38 bp, synthetic construct; identical to SEQ ID NO: 3157
  misc_feature 1..38: note = Probe
  source 1..38: mol_type = other DNA

SEQ ID NO: 45003 - DNA, 39 bp, synthetic construct; identical to SEQ ID NO: 3158
  misc_feature 1..39: note = Probe
  source 1..39: mol_type = other DNA

SEQ ID NO: 45004 - DNA, 40 bp, synthetic construct; identical to SEQ ID NO: 3159
  misc_feature 1..40: note = Probe
  source 1..40: mol_type = other DNA

SEQ ID NO: 45005 - DNA, 46 bp, synthetic construct
  misc_feature 1..46: note = Probe
  source 1..46: mol_type = other DNA
agagtaaataataggagcttaaacccccttatttctaggactatga

SEQ ID NO: 45006 - DNA, 26 bp, synthetic construct
  misc_feature 1..26: note = Probe
  source 1..26: mol_type = other DNA
agagtggggttttgcagtccttagct

SEQ ID NO: 45007 - DNA, 30 bp, synthetic construct
  misc_feature 1..30: note = Probe
  source 1..30: mol_type = other DNA
agatcctgggttcgaatcccagcggggcct

SEQ ID NO: 45008 - DNA, 31 bp, synthetic construct
  misc_feature 1..31: note = Probe
  source 1..31: mol_type = other DNA
agatcctgggttcgaatcccagcggggcctg

SEQ ID NO: 45009 - DNA, 31 bp, synthetic construct
  misc_feature 1..31: note = Probe
  source 1..31: mol_type = other DNA
agatcctgggttcgaatcccagcggggcctt

SEQ ID NO: 45010 - DNA, 33 bp, synthetic construct
  misc_feature 1..33: note = Probe
  source 1..33: mol_type = other DNA
agatcctgggttcgaatcccagcggggccttac

SEQ ID NO: 45011 - DNA, 27 bp, synthetic construct
  misc_feature 1..27: note = Probe
  source 1..27: mol_type = other DNA
agatcctgggttcgaatcccagcggtg

SEQ ID NO: 45012 - DNA, 28 bp, synthetic construct
  misc_feature 1..28: note = Probe
  source 1..28: mol_type = other DNA
agatcctgggttcgaatcccagcggtgc

SEQ ID NO: 45013 - DNA, 30 bp, synthetic construct
  misc_feature 1..30: note = Probe
  source 1..30: mol_type = other DNA
agatcctgggttcgaatcccagcggtgcct

SEQ ID NO: 45014 - DNA, 31 bp, synthetic construct
  misc_feature 1..31: note = Probe
  source 1..31: mol_type = other DNA
agatcctgggttcgaatcccagcggtgcctc

SEQ ID NO: 45015 - DNA, 32 bp, synthetic construct
  misc_feature 1..32: note = Probe
  source 1..32: mol_type = other DNA
agatcctgggttcgaatcccagcggtgcctcc

SEQ ID NO: 45016 - DNA, 33 bp, synthetic construct; identical to SEQ ID NO: 16273
  misc_feature 1..33: note = Probe
  source 1..33: mol_type = other DNA

SEQ ID NO: 45017 - DNA, 27 bp, synthetic construct
  misc_feature 1..27: note = Probe
  source 1..27: mol_type = other DNA
agatgaaaacctttttccaaggacaaa

SEQ ID NO: 45018 - DNA, 28 bp, synthetic construct
  misc_feature 1..28: note = Probe
  source 1..28: mol_type = other DNA
agatgaaaacctttttccaaggacaaat

SEQ ID NO: 45019 - DNA, 31 bp, synthetic construct; identical to SEQ ID NO: 16280
  misc_feature 1..31: note = Probe
  source 1..31: mol_type = other DNA

SEQ ID NO: 45020 - DNA, 30 bp, synthetic construct; identical to SEQ ID NO: 9098
  misc_feature 1..30: note = Probe
  source 1..30: mol_type = other DNA

SEQ ID NO: 45021 - DNA, 31 bp, synthetic construct; identical to SEQ ID NO: 3175
  misc_feature 1..31: note = Probe
  source 1..31: mol_type = other DNA

SEQ ID NO: 45022 - DNA, 32 bp, synthetic construct; identical to SEQ ID NO: 3176
  misc_feature 1..32: note = Probe
  source 1..32: mol_type = other DNA

SEQ ID NO: 45023 - DNA, 33 bp, synthetic construct; identical to SEQ ID NO: 3177
  misc_feature 1..33: note = Probe
  source 1..33: mol_type = other DNA

SEQ ID NO: 45024 - DNA, 34 bp, synthetic construct; identical to SEQ ID NO: 3178
  misc_feature 1..34: note = Probe
  source 1..34: mol_type = other DNA

SEQ ID NO: 45025 - DNA, 35 bp, synthetic construct; identical to SEQ ID NO: 3179
  misc_feature 1..35: note = Probe
  source 1..35: mol_type = other DNA

SEQ ID NO: 45026 - DNA, 28 bp, synthetic construct
  misc_feature 1..28: note = Probe
  source 1..28: mol_type = other DNA
agattctaggttcgactcctggctggct

SEQ ID NO: 45027 - DNA, 33 bp, synthetic construct; identical to SEQ ID NO: 3184
  misc_feature 1..33: note = Probe
  source 1..33: mol_type = other DNA

SEQ ID NO: 45028 - DNA, 27 bp, synthetic construct
  misc_feature 1..27: note = Probe
  source 1..27: mol_type = other DNA
agattgagggttcgagtcccttcgtgg

SEQ ID NO: 45029 - DNA, 29 bp, synthetic construct
  misc_feature 1..29: note = Probe
  source 1..29: mol_type = other DNA
agattgagggttcgagtcccttcgtggtc

SEQ ID NO: 45030 - DNA, 30 bp, synthetic construct; identical to SEQ ID NO: 9106
  misc_feature 1..30: note = Probe
  source 1..30: mol_type = other DNA

SEQ ID NO: 45031 - DNA, 28 bp, synthetic construct
  misc_feature 1..28: note = Probe
  source 1..28: mol_type = other DNA
agattgcaggttcgagtcctgccgcggt

SEQ ID NO: 45032 - DNA, 33 bp, synthetic construct; identical to SEQ ID NO: 24968
  misc_feature 1..33: note = Probe
  source 1..33: mol_type = other DNA

SEQ ID NO: 45033 - DNA, 35 bp, synthetic construct; identical to SEQ ID NO: 3196
  misc_feature 1..35: note = Probe
  source 1..35: mol_type = other DNA

SEQ ID NO: 45034 - DNA, 36 bp, synthetic construct; identical to SEQ ID NO: 3197
  misc_feature 1..36: note = Probe
  source 1..36: mol_type = other DNA

SEQ ID NO: 45035 - DNA, 37 bp, synthetic construct; identical to SEQ ID NO: 266
  misc_feature 1..37: note = Probe
  source 1..37: mol_type = other DNA

SEQ ID NO: 45036 - DNA, 45 bp, synthetic construct; identical to SEQ ID NO: 27714
  misc_feature 1..45: note = Probe
  source 1..45: mol_type = other DNA

SEQ ID NO: 45037 - DNA, 46 bp, synthetic construct; identical to SEQ ID NO: 3203
  misc_feature 1..46: note = Probe
  source 1..46: mol_type = other DNA

SEQ ID NO: 45038 - DNA, 49 bp, synthetic construct; identical to SEQ ID NO: 3204
  misc_feature 1..49: note = Probe
  source 1..49: mol_type = other DNA

SEQ ID NO: 45039 - DNA, 50 bp, synthetic construct; identical to SEQ ID NO: 3205
  misc_feature 1..50: note = Probe
  source 1..50: mol_type = other DNA

SEQ ID NO: 45040 - DNA, 21 bp, synthetic construct
  misc_feature 1..21: note = Probe
  source 1..21: mol_type = other DNA
agatttcaacttaacttgacc

SEQ ID NO: 45041 - DNA, 22 bp, synthetic construct
  misc_feature 1..22: note = Probe
  source 1..22: mol_type = other DNA
agatttcaacttaacttgaccg

SEQ ID NO: 45042 - DNA, 23 bp, synthetic construct
  misc_feature 1..23: note = Probe
  source 1..23: mol_type = other DNA
agatttcaacttaacttgaccgc

SEQ ID NO: 45043 - DNA, 24 bp, synthetic construct
  misc_feature 1..24: note = Probe
  source 1..24: mol_type = other DNA
agatttcaacttaacttgaccgct

SEQ ID NO: 45044 - DNA, 25 bp, synthetic construct
  misc_feature 1..25: note = Probe
  source 1..25: mol_type = other DNA
agatttcaacttaacttgaccgctc

SEQ ID NO: 45045 - DNA, 26 bp, synthetic construct
  misc_feature 1..26: note = Probe
  source 1..26: mol_type = other DNA
agatttcaacttaacttgaccgctct

SEQ ID NO: 45046 - DNA, 27 bp, synthetic construct
  misc_feature 1..27: note = Probe
  source 1..27: mol_type = other DNA
agatttcaacttaacttgaccgctctg

SEQ ID NO: 45047 - DNA, 28 bp, synthetic construct
  misc_feature 1..28: note = Probe
  source 1..28: mol_type = other DNA
agatttcaacttaacttgaccgctctga

SEQ ID NO: 45048 - DNA, 29 bp, synthetic construct
  misc_feature 1..29: note = Probe
  source 1..29: mol_type = other DNA
agatttcaacttaacttgaccgctctgag

SEQ ID NO: 45049 - DNA, 30 bp, synthetic construct; identical to SEQ ID NO: 3214
  misc_feature 1..30: note = Probe
  source 1..30: mol_type = other DNA

SEQ ID NO: 45050 - DNA, 31 bp, synthetic construct; identical to SEQ ID NO: 3215
  misc_feature 1..31: note = Probe
  source 1..31: mol_type = other DNA

SEQ ID NO: 45051 - DNA, 29 bp, synthetic construct
  misc_feature 1..29: note = Probe
  source 1..29: mol_type = other DNA
agcaacctcggttcgaatccgagtcacgg

SEQ ID NO: 45052 - DNA, 31 bp, synthetic construct; identical to SEQ ID NO: 3216
  misc_feature 1..31: note = Probe
  source 1..31: mol_type = other DNA

SEQ ID NO: 45053 - DNA, 32 bp, synthetic construct
  misc_feature 1..32: note = Probe
  source 1..32: mol_type = other DNA
agcaacctcggttcgaatccgagtcacggcaa

SEQ ID NO: 45054 - DNA, 33 bp, synthetic construct; identical to SEQ ID NO: 3217
  misc_feature 1..33: note = Probe
  source 1..33: mol_type = other DNA

SEQ ID NO: 45055 - DNA, 32 bp, synthetic construct
  misc_feature 1..32: note = Probe
  source 1..32: mol_type = other DNA
agcaacctcggttcgaatccgagtcacggcag

SEQ ID NO: 45056 - DNA, 33 bp, synthetic construct; identical to SEQ ID NO: 3218
  misc_feature 1..33: note = Probe
  source 1..33: mol_type = other DNA

SEQ ID NO: 45057 - DNA, 34 bp, synthetic construct; identical to SEQ ID NO: 3219
  misc_feature 1..34: note = Probe
  source 1..34: mol_type = other DNA

SEQ ID NO: 45058 - DNA, 32 bp, synthetic construct
  misc_feature 1..32: note = Probe
  source 1..32: mol_type = other DNA
agcaacctcggttcgaatccgagtcacggcat

SEQ ID NO: 45059 - DNA, 33 bp, synthetic construct; identical to SEQ ID NO: 3220
  misc_feature 1..33: note = Probe
  source 1..33: mol_type = other DNA

SEQ ID NO: 45060 - DNA, 34 bp, synthetic construct; identical to SEQ ID NO: 3221
  misc_feature 1..34: note = Probe
  source 1..34: mol_type = other DNA

SEQ ID NO: 45061 - DNA, 50 bp, synthetic construct; identical to SEQ ID NO: 3229
  misc_feature 1..50: note = Probe
  source 1..50: mol_type = other DNA

SEQ ID NO: 45062 - DNA, 17 bp, synthetic construct
  misc_feature 1..17: note = Probe
  source 1..17: mol_type = other DNA
agcacccaacttacact

SEQ ID NO: 45063 - DNA, 18 bp, synthetic construct
  misc_feature 1..18: note = Probe
  source 1..18: mol_type = other DNA
agcacccaacttacactt

SEQ ID NO: 45064 - DNA, 19 bp, synthetic construct
  misc_feature 1..19: note = Probe
  source 1..19: mol_type = other DNA
agcacccaacttacactta

SEQ ID NO: 45065 - DNA, 20 bp, synthetic construct
  misc_feature 1..20: note = Probe
  source 1..20: mol_type = other DNA
agcacccaacttacacttag

SEQ ID NO: 45066 - DNA, 21 bp, synthetic construct
  misc_feature 1..21: note = Probe
  source 1..21: mol_type = other DNA
agcacccaacttacacttagg

SEQ ID NO: 45067 - DNA, 22 bp, synthetic construct
  misc_feature 1..22: note = Probe
  source 1..22: mol_type = other DNA
agcacccaacttacacttagga

SEQ ID NO: 45068 - DNA, 23 bp, synthetic construct
  misc_feature 1..23: note = Probe
  source 1..23: mol_type = other DNA
agcacccaacttacacttaggag

SEQ ID NO: 45069 - DNA, 24 bp, synthetic construct
  misc_feature 1..24: note = Probe
  source 1..24: mol_type = other DNA
agcacccaacttacacttaggaga

SEQ ID NO: 45070 - DNA, 25 bp, synthetic construct
  misc_feature 1..25: note = Probe
  source 1..25: mol_type = other DNA
agcacccaacttacacttaggagat

SEQ ID NO: 45071 - DNA, 26 bp, synthetic construct
  misc_feature 1..26: note = Probe
  source 1..26: mol_type = other DNA
agcacccaacttacacttaggagatt

SEQ ID NO: 45072 - DNA, 27 bp, synthetic construct
  misc_feature 1..27: note = Probe
  source 1..27: mol_type = other DNA
agcacccaacttacacttaggagattt

SEQ ID NO: 45073 - DNA, 28 bp, synthetic construct
  misc_feature 1..28: note = Probe
  source 1..28: mol_type = other DNA
agcacccaacttacacttaggagatttc

SEQ ID NO: 45074 - DNA, 29 bp, synthetic construct
  misc_feature 1..29: note = Probe
  source 1..29: mol_type = other DNA
agcacccaacttacacttaggagatttca

SEQ ID NO: 45075 - DNA, 30 bp, synthetic construct; identical to SEQ ID NO: 16336
  misc_feature 1..30: note = Probe
  source 1..30: mol_type = other DNA

SEQ ID NO: 45076 - DNA, 31 bp, synthetic construct; identical to SEQ ID NO: 3241
  misc_feature 1..31: note = Probe
  source 1..31: mol_type = other DNA

SEQ ID NO: 45077 - DNA, 32 bp, synthetic construct; identical to SEQ ID NO: 3242
  misc_feature 1..32: note = Probe
  source 1..32: mol_type = other DNA

SEQ ID NO: 45078 - DNA, 33 bp, synthetic construct; identical to SEQ ID NO: 3243
  misc_feature 1..33: note = Probe
  source 1..33: mol_type = other DNA

SEQ ID NO: 45079 - DNA, 34 bp, synthetic construct; identical to SEQ ID NO: 16340
  misc_feature 1..34: note = Probe
  source 1..34: mol_type = other DNA

SEQ ID NO: 45080 - DNA, 36 bp, synthetic construct; identical to SEQ ID NO: 3244
  misc_feature 1..36: note = Probe
  source 1..36: mol_type = other DNA

SEQ ID NO: 45081 - DNA, 37 bp, synthetic construct; identical to SEQ ID NO: 16343
  misc_feature 1..37: note = Probe
  source 1..37: mol_type = other DNA

SEQ ID NO: 45082 - DNA, 38 bp, synthetic construct; identical to SEQ ID NO: 16344
  misc_feature 1..38: note = Probe
  source 1..38: mol_type = other DNA

SEQ ID NO: 45083 - DNA, 39 bp, synthetic construct; identical to SEQ ID NO: 3245
  misc_feature 1..39: note = Probe
  source 1..39: mol_type = other DNA

SEQ ID NO: 45084 - DNA, 41 bp, synthetic construct; identical to SEQ ID NO: 16345
  misc_feature 1..41: note = Probe
  source 1..41: mol_type = other DNA

SEQ ID NO: 45085 - DNA, 42 bp, synthetic construct; identical to SEQ ID NO: 16346
  misc_feature 1..42: note = Probe
  source 1..42: mol_type = other DNA

SEQ ID NO: 45086 - DNA, 43 bp, synthetic construct; identical to SEQ ID NO: 3246
  misc_feature 1..43: note = Probe
  source 1..43: mol_type = other DNA

SEQ ID NO: 45087 - DNA, 44 bp, synthetic construct; identical to SEQ ID NO: 3247
  misc_feature 1..44: note = Probe
  source 1..44: mol_type = other DNA

SEQ ID NO: 45088 - DNA, 45 bp, synthetic construct; identical to SEQ ID NO: 3248
  misc_feature 1..45: note = Probe
  source 1..45: mol_type = other DNA

SEQ ID NO: 45089 - DNA, 46 bp, synthetic construct; identical to SEQ ID NO: 3249
  misc_feature 1..46: note = Probe
  source 1..46: mol_type = other DNA

SEQ ID NO: 45090 - DNA, 49 bp, synthetic construct; identical to SEQ ID NO: 3250
  misc_feature 1..49: note = Probe
  source 1..49: mol_type = other DNA

SEQ ID NO: 45091 - DNA, 50 bp, synthetic construct; identical to SEQ ID NO: 3251
  misc_feature 1..50: note = Probe
  source 1..50: mol_type = other DNA

SEQ ID NO: 45092 - DNA, 16 bp, synthetic construct
  misc_feature 1..16: note = Probe
  source 1..16: mol_type = other DNA
agcactctggactctg

SEQ ID NO: 45093 - DNA, 17 bp, synthetic construct
  misc_feature 1..17: note = Probe
  source 1..17: mol_type = other DNA
agcactctggactctga

SEQ ID NO: 45094 - DNA, 24 bp, synthetic construct
  misc_feature 1..24: note = Probe
  source 1..24: mol_type = other DNA
agcactctggactctgaatccagc

SEQ ID NO: 45095 - DNA, 25 bp, synthetic construct
  misc_feature 1..25: note = Probe
  source 1..25: mol_type = other DNA
agcactctggactctgaatccagcg

SEQ ID NO: 45096 - DNA, 28 bp, synthetic construct
  misc_feature 1..28: note = Probe
  source 1..28: mol_type = other DNA
agcactctggactctgaatccagcgatc

SEQ ID NO: 45097 - DNA, 33 bp, synthetic construct; identical to SEQ ID NO: 27739
  misc_feature 1..33: note = Probe
  source 1..33: mol_type = other DNA

SEQ ID NO: 45098 - DNA, 46 bp, synthetic construct
  misc_feature 1..46: note = Probe
  source 1..46: mol_type = other DNA
agcactctggactctgaatccagcgatccgagttcaaatctcggtg

SEQ ID NO: 45099 - DNA, 48 bp, synthetic construct
  misc_feature 1..48: note = Probe
  source 1..48: mol_type = other DNA
agcactctggactctgaatccagcgatccgagttcaaatctcggtgga

SEQ ID NO: 45100 - DNA, 49 bp, synthetic construct
  misc_feature 1..49: note = Probe
  source 1..49: mol_type = other DNA
agcactctggactctgaatccagcgatccgagttcaaatctcggtggaa

SEQ ID NO: 45101 - DNA, 50 bp, synthetic construct
  misc_feature 1..50: note = Probe
  source 1..50: mol_type = other DNA
agcactctggactctgaatccagcgatccgagttcaaatctcggtgggac

SEQ ID NO: 45102 - DNA, 50 bp, synthetic construct
  misc_feature 1..50: note = Probe
  source 1..50: mol_type = other DNA
agcactctggactttgaatccagcaatccgagttcgaatctcggtgggac

SEQ ID NO: 45103 - DNA, 32 bp, synthetic construct; identical to SEQ ID NO: 16357
  misc_feature 1..32: note = Probe
  source 1..32: mol_type = other DNA

SEQ ID NO: 45104 - DNA, 49 bp, synthetic construct
  misc_feature 1..49: note = Probe
  source 1..49: mol_type = other DNA
agcactctggactttgaatccagcgatccgagttcaaatctcggtggga

SEQ ID NO: 45105 - DNA, 18 bp, synthetic construct
  misc_feature 1..18: note = Probe
  source 1..18: mol_type = other DNA
agcagagtggcgcagcgg

SEQ ID NO: 45106 - DNA, 23 bp, synthetic construct
  misc_feature 1..23: note = Probe
  source 1..23: mol_type = other DNA
agcagagtggcgcagcggaagcg

SEQ ID NO: 45107 - DNA, 24 bp, synthetic construct
  misc_feature 1..24: note = Probe
  source 1..24: mol_type = other DNA
agcagagtggcgcagcggaagcgt

SEQ ID NO: 45108 - DNA, 30 bp, synthetic construct; identical to SEQ ID NO: 8539
  misc_feature 1..30: note = Probe
  source 1..30: mol_type = other DNA

SEQ ID NO: 45109 - DNA, 50 bp, synthetic construct; identical to SEQ ID NO: 3258
  misc_feature 1..50: note = Probe
  source 1..50: mol_type = other DNA

SEQ ID NO: 45110 - DNA, 28 bp, synthetic construct
  misc_feature 1..28: note = Probe
  source 1..28: mol_type = other DNA
agcagcttcaaacctgccggggcttctc

SEQ ID NO: 45111 - DNA, 39 bp, synthetic construct; identical to SEQ ID NO: 16375
  misc_feature 1..39: note = Probe
  source 1..39: mol_type = other DNA

SEQ ID NO: 45112 - DNA, 28 bp, synthetic construct
  misc_feature 1..28: note = Probe
  source 1..28: mol_type = other DNA
agcatagctgccttccaagcagttgacc

SEQ ID NO: 45113 - DNA, 30 bp, synthetic construct; identical to SEQ ID NO: 3263
  misc_feature 1..30: note = Probe
  source 1..30: mol_type = other DNA

SEQ ID NO: 45114 - DNA, 31 bp, synthetic construct; identical to SEQ ID NO: 12686
  misc_feature 1..31: note = Probe
  source 1..31: mol_type = other DNA

SEQ ID NO: 45115 - DNA, 50 bp, synthetic construct; identical to SEQ ID NO: 3264
  misc_feature 1..50: note = Probe
  source 1..50: mol_type = other DNA

SEQ ID NO: 45116 - DNA, 50 bp, synthetic construct
  misc_feature 1..50: note = Probe
  source 1..50: mol_type = other DNA
agcatgagactcttaatctcagggtcgtgggttcgagccccacgttgggc

SEQ ID NO: 45117 - DNA, 27 bp, synthetic construct
  misc_feature 1..27: note = Probe
  source 1..27: mol_type = other DNA
agcatgggactcttaatcccagggtcg

SEQ ID NO: 45118 - DNA, 29 bp, synthetic construct
  misc_feature 1..29: note = Probe
  source 1..29: mol_type = other DNA
agcatgggactcttaatcccagggtcgtg

SEQ ID NO: 45119 - DNA, 50 bp, synthetic construct
  misc_feature 1..50: note = Probe
  source 1..50: mol_type = other DNA
agcatgggactcttaatcccagggtcgtgggttcgagccccacgttgggc

SEQ ID NO: 45120 - DNA, 17 bp, synthetic construct
  misc_feature 1..17: note = Probe
  source 1..17: mol_type = other DNA
agcattaaccttttaag

SEQ ID NO: 45121 - DNA, 26 bp, synthetic construct
  misc_feature 1..26: note = Probe
  source 1..26: mol_type = other DNA
agcattaaccttttaagttaaagatt

SEQ ID NO: 45122 - DNA, 27 bp, synthetic construct
  misc_feature 1..27: note = Probe
  source 1..27: mol_type = other DNA
agcattaaccttttaagttaaagatta

SEQ ID NO: 45123 - DNA, 31 bp, synthetic construct; identical to SEQ ID NO: 16398
  misc_feature 1..31: note = Probe
  source 1..31: mol_type = other DNA

SEQ ID NO: 45124 - DNA, 32 bp, synthetic construct; identical to SEQ ID NO: 16399
  misc_feature 1..32: note = Probe
  source 1..32: mol_type = other DNA

SEQ ID NO: 45125 - DNA, 33 bp, synthetic construct; identical to SEQ ID NO: 12688
  misc_feature 1..33: note = Probe
  source 1..33: mol_type = other DNA

SEQ ID NO: 45126 - DNA, 34 bp, synthetic construct; identical to SEQ ID NO: 12689
  misc_feature 1..34: note = Probe
  source 1..34: mol_type = other DNA

SEQ ID NO: 45127 - DNA, 37 bp, synthetic construct; identical to SEQ ID NO: 282
  misc_feature 1..37: note = Probe
  source 1..37: mol_type = other DNA

SEQ ID NO: 45128 - DNA, 39 bp, synthetic construct; identical to SEQ ID NO: 283
  misc_feature 1..39: note = Probe
  source 1..39: mol_type = other DNA

SEQ ID NO: 45129 - DNA, 41 bp, synthetic construct; identical to SEQ ID NO: 3275
  misc_feature 1..41: note = Probe
  source 1..41: mol_type = other DNA

SEQ ID NO: 45130 - DNA, 42 bp, synthetic construct; identical to SEQ ID NO: 284
  misc_feature 1..42: note = Probe
  source 1..42: mol_type = other DNA

SEQ ID NO: 45131 - DNA, 44 bp, synthetic construct
  misc_feature 1..44: note = Probe
  source 1..44: mol_type = other DNA
agcattaaccttttaagttaaagattaagagaaccaacacctct

SEQ ID NO: 45132 - DNA, 50 bp, synthetic construct; identical to SEQ ID NO: 3281
  misc_feature 1..50: note = Probe
  source 1..50: mol_type = other DNA

SEQ ID NO: 45133 - DNA, 32 bp, synthetic construct
  misc_feature 1..32: note = Probe
  source 1..32: mol_type = other DNA
agcattggtggttcagtggtagaattctcgcc

SEQ ID NO: 45134 - DNA, 33 bp, synthetic construct; identical to SEQ ID NO: 3282
  misc_feature 1..33: note = Probe
  source 1..33: mol_type = other DNA

SEQ ID NO: 45135 - DNA, 36 bp, synthetic construct; identical to SEQ ID NO: 16409
  misc_feature 1..36: note = Probe
  source 1..36: mol_type = other DNA

SEQ ID NO: 45136 - DNA, 39 bp, synthetic construct; identical to SEQ ID NO: 3284
  misc_feature 1..39: note = Probe
  source 1..39: mol_type = other DNA

SEQ ID NO: 45137 - DNA, 35 bp, synthetic construct
  misc_feature 1..35: note = Probe
  source 1..35: mol_type = other DNA
agccagggattgtgggttcgagtcccacctggggt

SEQ ID NO: 45138 - DNA, 36 bp, synthetic construct; identical to SEQ ID NO: 16411
  misc_feature 1..36: note = Probe
  source 1..36: mol_type = other DNA

SEQ ID NO: 45139 - DNA, 39 bp, synthetic construct; identical to SEQ ID NO: 3285
  misc_feature 1..39: note = Probe
  source 1..39: mol_type = other DNA

SEQ ID NO: 45140 - DNA, 32 bp, synthetic construct
  misc_feature 1..32: note = Probe
  source 1..32: mol_type = other DNA
agccagggattgtgggttcgagtcccatctgg

SEQ ID NO: 45141 - DNA, 33 bp, synthetic construct; identical to SEQ ID NO: 16415
  misc_feature 1..33: note = Probe
  source 1..33: mol_type = other DNA

SEQ ID NO: 45142 - DNA, 34 bp, synthetic construct; identical to SEQ ID NO: 287
  misc_feature 1..34: note = Probe
  source 1..34: mol_type = other DNA

SEQ ID NO: 45143 - DNA, 37 bp, synthetic construct; identical to SEQ ID NO: 16417
  misc_feature 1..37: note = Probe
  source 1..37: mol_type = other DNA

SEQ ID NO: 45144 - DNA, 38 bp, synthetic construct; identical to SEQ ID NO: 16418
  misc_feature 1..38: note = Probe
  source 1..38: mol_type = other DNA

SEQ ID NO: 45145 - DNA, 39 bp, synthetic construct; identical to SEQ ID NO: 3287
  misc_feature 1..39: note = Probe
  source 1..39: mol_type = other DNA

SEQ ID NO: 45146 - DNA, 50 bp, synthetic construct; identical to SEQ ID NO: 3288
  misc_feature 1..50: note = Probe
  source 1..50: mol_type = other DNA

SEQ ID NO: 45147 - DNA, 16 bp, synthetic construct
  misc_feature 1..16: note = Probe
  source 1..16: mol_type = other DNA
agcccacccagggacg

SEQ ID NO: 45148 - DNA, 17 bp, synthetic construct
  misc_feature 1..17: note = Probe
  source 1..17: mol_type = other DNA
agcccacccagggacgc

SEQ ID NO: 45149 - DNA, 18 bp, synthetic construct
  misc_feature 1..18: note = Probe
  source 1..18: mol_type = other DNA
agcccacccagggacgcc

SEQ ID NO: 45150 - DNA, 17 bp, synthetic construct
  misc_feature 1..17: note = Probe
  source 1..17: mol_type = other DNA
agccccaaacccactcc

SEQ ID NO: 45151 - DNA, 20 bp, synthetic construct
  misc_feature 1..20: note = Probe
  source 1..20: mol_type = other DNA
agccccaaacccactccacc

SEQ ID NO: 45152 - DNA, 21 bp, synthetic construct
  misc_feature 1..21: note = Probe
  source 1..21: mol_type = other DNA
agccccaaacccactccacct

SEQ ID NO: 45153 - DNA, 16 bp, synthetic construct
  misc_feature 1..16: note = Probe
  source 1..16: mol_type = other DNA
agccccagtggaacca

SEQ ID NO: 45154 - DNA, 32 bp, synthetic construct; identical to SEQ ID NO: 16426
  misc_feature 1..32: note = Probe
  source 1..32: mol_type = other DNA

SEQ ID NO: 45155 - DNA, 33 bp, synthetic construct; identical to SEQ ID NO: 16427
  misc_feature 1..33: note = Probe
  source 1..33: mol_type = other DNA

SEQ ID NO: 45156 - DNA, 34 bp, synthetic construct; identical to SEQ ID NO: 16428
  misc_feature 1..34: note = Probe
  source 1..34: mol_type = other DNA

SEQ ID NO: 45157 - DNA, 37 bp, synthetic construct; identical to SEQ ID NO: 16430
  misc_feature 1..37: note = Probe
  source 1..37: mol_type = other DNA

SEQ ID NO: 45158 - DNA, 33 bp, synthetic construct; identical to SEQ ID NO: 3289
  misc_feature 1..33: note = Probe
  source 1..33: mol_type = other DNA

SEQ ID NO: 45159 - DNA, 34 bp, synthetic construct; identical to SEQ ID NO: 289
  misc_feature 1..34: note = Probe
  source 1..34: mol_type = other DNA

SEQ ID NO: 45160 - DNA, 28 bp, synthetic construct
  misc_feature 1..28: note = Probe
  source 1..28: mol_type = other DNA
agcccggtaatcgcataaaacttaaaac

SEQ ID NO: 45161 - DNA, 30 bp, synthetic construct; identical to SEQ ID NO: 16435
  misc_feature 1..30: note = Probe
  source 1..30: mol_type = other DNA

SEQ ID NO: 45162 - DNA, 35 bp, synthetic construct
  misc_feature 1..35: note = Probe
  source 1..35: mol_type = other DNA
agcccggtaatcgcataaaacttaaaactttacag

SEQ ID NO: 45163 - DNA, 36 bp, synthetic construct
  misc_feature 1..36: note = Probe
  source 1..36: mol_type = other DNA
agcccggtaatcgcataaaacttaaaactttacagt

SEQ ID NO: 45164 - DNA, 39 bp, synthetic construct
  misc_feature 1..39: note = Probe
  source 1..39: mol_type = other DNA
agcccggtaatcgcataaaacttaaaactttacagtcag

SEQ ID NO: 45165 - DNA, 42 bp, synthetic construct
  misc_feature 1..42: note = Probe
  source 1..42: mol_type = other DNA
agcccggtaatcgcataaaacttaaaactttacagtcagagg

SEQ ID NO: 45166 - DNA, 44 bp, synthetic construct; identical to SEQ ID NO: 3293
  misc_feature 1..44: note = Probe
  source 1..44: mol_type = other DNA

SEQ ID NO: 45167 - DNA, 45 bp, synthetic construct; identical to SEQ ID NO: 3294
  misc_feature 1..45: note = Probe
  source 1..45: mol_type = other DNA

SEQ ID NO: 45168 - DNA, 49 bp, synthetic construct; identical to SEQ ID NO: 3295
  misc_feature 1..49: note = Probe
  source 1..49: mol_type = other DNA

SEQ ID NO: 45169 - DNA, 50 bp, synthetic construct; identical to SEQ ID NO: 3296
  misc_feature 1..50: note = Probe
  source 1..50: mol_type = other DNA

SEQ ID NO: 45170 - DNA, 21 bp, synthetic construct
  misc_feature 1..21: note = Probe
  source 1..21: mol_type = other DNA
agccctcagtaagttgcaata

SEQ ID NO: 45171 - DNA, 23 bp, synthetic construct
  misc_feature 1..23: note = Probe
  source 1..23: mol_type = other DNA
agccctcagtaagttgcaatact

SEQ ID NO: 45172 - DNA, 28 bp, synthetic construct
  misc_feature 1..28: note = Probe
  source 1..28: mol_type = other DNA
agccctcagtaagttgcaatacttaatt

SEQ ID NO: 45173 - DNA, 31 bp, synthetic construct
  misc_feature 1..31: note = Probe
  source 1..31: mol_type = other DNA
agccctcagtaagttgcaatacttaatttct

SEQ ID NO: 45174 - DNA, 37 bp, synthetic construct; identical to SEQ ID NO: 27807
  misc_feature 1..37: note = Probe
  source 1..37: mol_type = other DNA

SEQ ID NO: 45175 - DNA, 16 bp, synthetic construct
  misc_feature 1..16: note = Probe
  source 1..16: mol_type = other DNA
agcctcacctggagca

SEQ ID NO: 45176 - DNA, 31 bp, synthetic construct; identical to SEQ ID NO: 295
  misc_feature 1..31: note = Probe
  source 1..31: mol_type = other DNA

SEQ ID NO: 45177 - DNA, 33 bp, synthetic construct; identical to SEQ ID NO: 3302
  misc_feature 1..33: note = Probe
  source 1..33: mol_type = other DNA

SEQ ID NO: 45178 - DNA, 34 bp, synthetic construct; identical to SEQ ID NO: 3303
  misc_feature 1..34: note = Probe
  source 1..34: mol_type = other DNA

SEQ ID NO: 45179 - DNA, 32 bp, synthetic construct; identical to SEQ ID NO: 299
  misc_feature 1..32: note = Probe
  source 1..32: mol_type = other DNA

SEQ ID NO: 45180 - DNA, 34 bp, synthetic construct; identical to SEQ ID NO: 3306
  misc_feature 1..34: note = Probe
  source 1..34: mol_type = other DNA

SEQ ID NO: 45181 - DNA, 19 bp, synthetic construct
  misc_feature 1..19: note = Probe
  source 1..19: mol_type = other DNA
agcgcaagtaggtctacaa

SEQ ID NO: 45182 - DNA, 50 bp, synthetic construct
  misc_feature 1..50: note = Probe
  source 1..50: mol_type = other DNA
agcgcattcggctgttaaccgaaaggttggtggttcgagcccacccaggg

SEQ ID NO: 45183 - DNA, 31 bp, synthetic construct; identical to SEQ ID NO: 16479
  misc_feature 1..31: note = Probe
  source 1..31: mol_type = other DNA

SEQ ID NO: 45184 - DNA, 34 bp, synthetic construct; identical to SEQ ID NO: 16482
  misc_feature 1..34: note = Probe
  source 1..34: mol_type = other DNA

SEQ ID NO: 45185 - DNA, 50 bp, synthetic construct
  misc_feature 1..50: note = Probe
  source 1..50: mol_type = other DNA
agcggaagcgtgctgggcccataacccagaggtcgatggatcgaaaccat

SEQ ID NO: 45186 - DNA, 50 bp, synthetic construct
  misc_feature 1..50: note = Probe
  source 1..50: mol_type = other DNA
agcgtgctgggcccataacccagaggtcgatggatcgaaaccatcctctg

SEQ ID NO: 45187 - DNA, 31 bp, synthetic construct; identical to SEQ ID NO: 3315
  misc_feature 1..31: note = Probe
  source 1..31: mol_type = other DNA

SEQ ID NO: 45188 - DNA, 25 bp, synthetic construct
  misc_feature 1..25: note = Probe
  source 1..25: mol_type = other DNA
agctaaataagctatcgggcccata

SEQ ID NO: 45189 - DNA, 26 bp, synthetic construct
  misc_feature 1..26: note = Probe
  source 1..26: mol_type = other DNA
agctaaataagctatcgggcccatac

SEQ ID NO: 45190 - DNA, 27 bp, synthetic construct
  misc_feature 1..27: note = Probe
  source 1..27: mol_type = other DNA
agctaaataagctatcgggcccatacc

SEQ ID NO: 45191 - DNA, 28 bp, synthetic construct
  misc_feature 1..28: note = Probe
  source 1..28: mol_type = other DNA
agctaaataagctatcgggcccataccc

SEQ ID NO: 45192 - DNA, 29 bp, synthetic construct
  misc_feature 1..29: note = Probe
  source 1..29: mol_type = other DNA
agctaaataagctatcgggcccatacccc

SEQ ID NO: 45193 - DNA, 20 bp, synthetic construct
  misc_feature 1..20: note = Probe
  source 1..20: mol_type = other DNA
agctatcgggcccatacccc

SEQ ID NO: 45194 - DNA, 21 bp, synthetic construct
  misc_feature 1..21: note = Probe
  source 1..21: mol_type = other DNA
agctatcgggcccataccccg

SEQ ID NO: 45195 - DNA, 22 bp, synthetic construct
  misc_feature 1..22: note = Probe
  source 1..22: mol_type = other DNA
agctatcgggcccataccccga

SEQ ID NO: 45196 - DNA, 23 bp, synthetic construct
  misc_feature 1..23: note = Probe
  source 1..23: mol_type = other DNA
agctatcgggcccataccccgaa

SEQ ID NO: 45197 - DNA, 24 bp, synthetic construct
  misc_feature 1..24: note = Probe
  source 1..24: mol_type = other DNA
agctatcgggcccataccccgaaa

SEQ ID NO: 45198 - DNA, 25 bp, synthetic construct
  misc_feature 1..25: note = Probe
  source 1..25: mol_type = other DNA
agctatcgggcccataccccgaaaa

SEQ ID NO: 45199 - DNA, 26 bp, synthetic construct
  misc_feature 1..26: note = Probe
  source 1..26: mol_type = other DNA
agctatcgggcccataccccgaaaat

SEQ ID NO: 45200 - DNA, 27 bp, synthetic construct
  misc_feature 1..27: note = Probe
  source 1..27: mol_type = other DNA
agctatcgggcccataccccgaaaatg

SEQ ID NO: 45201 - DNA, 28 bp, synthetic construct
  misc_feature 1..28: note = Probe
  source 1..28: mol_type = other DNA
agctatcgggcccataccccgaaaatgt

SEQ ID NO: 45202 - DNA, 29 bp, synthetic construct
  misc_feature 1..29: note = Probe
  source 1..29: mol_type = other DNA
agctatcgggcccataccccgaaaatgtt

SEQ ID NO: 45203 - DNA, 30 bp, synthetic construct; identical to SEQ ID NO: 3337
  misc_feature 1..30: note = Probe
  source 1..30: mol_type = other DNA

SEQ ID NO: 45204 - DNA, 31 bp, synthetic construct; identical to SEQ ID NO: 3338
  misc_feature 1..31: note = Probe
  source 1..31: mol_type = other DNA

SEQ ID NO: 45205 - DNA, 33 bp, synthetic construct; identical to SEQ ID NO: 3340
  misc_feature 1..33: note = Probe
  source 1..33: mol_type = other DNA

SEQ ID NO: 45206 - DNA, 34 bp, synthetic construct; identical to SEQ ID NO: 3341
  misc_feature 1..34: note = Probe
  source 1..34: mol_type = other DNA

SEQ ID NO: 45207 - DNA, 36 bp, synthetic construct; identical to SEQ ID NO: 27866
  misc_feature 1..36: note = Probe
  source 1..36: mol_type = other DNA

SEQ ID NO: 45208 - DNA, 40 bp, synthetic construct; identical to SEQ ID NO: 3342
  misc_feature 1..40: note = Probe
  source 1..40: mol_type = other DNA

SEQ ID NO: 45209 - DNA, 45 bp, synthetic construct; identical to SEQ ID NO: 3345
  misc_feature 1..45: note = Probe
  source 1..45: mol_type = other DNA

SEQ ID NO: 45210 - DNA, 48 bp, synthetic construct; identical to SEQ ID NO: 3347
  misc_feature 1..48: note = Probe
  source 1..48: mol_type = other DNA

SEQ ID NO: 45211 - DNA, 49 bp, synthetic construct; identical to SEQ ID NO: 3348
  misc_feature 1..49: note = Probe
  source 1..49: mol_type = other DNA

SEQ ID NO: 45212 - DNA, 50 bp, synthetic construct; identical to SEQ ID NO: 303
  misc_feature 1..50: note = Probe
  source 1..50: mol_type = other DNA

SEQ ID NO: 45213 - DNA, 25 bp, synthetic construct
  misc_feature 1..25: note = Probe
  source 1..25: mol_type = other DNA
agctcacaagaactgctaactcatg

SEQ ID NO: 45214 - DNA, 35 bp, synthetic construct
  misc_feature 1..35: note = Probe
  source 1..35: mol_type = other DNA
agctcacaagaactgctaactcatgcccccatgtc

SEQ ID NO: 45215 - DNA, 40 bp, synthetic construct; identical to SEQ ID NO: 27870
  misc_feature 1..40: note = Probe
  source 1..40: mol_type = other DNA

SEQ ID NO: 45216 - DNA, 25 bp, synthetic construct
  misc_feature 1..25: note = Probe
  source 1..25: mol_type = other DNA
agctcagtcggtagagcatcagact

SEQ ID NO: 45217 - DNA, 25 bp, synthetic construct
  misc_feature 1..25: note = Probe
  source 1..25: mol_type = other DNA
agctcagtcggtagagcatgagact

SEQ ID NO: 45218 - DNA, 25 bp, synthetic construct
  misc_feature 1..25: note = Probe
  source 1..25: mol_type = other DNA
agctcagtcggtagagcatgggact

SEQ ID NO: 45219 - DNA, 18 bp, synthetic construct
  misc_feature 1..18: note = Probe
  source 1..18: mol_type = other DNA
agctccgaggtgattttc

SEQ ID NO: 45220 - DNA, 21 bp, synthetic construct
  misc_feature 1..21: note = Probe
  source 1..21: mol_type = other DNA
agctccgaggtgattttcata

SEQ ID NO: 45221 - DNA, 29 bp, synthetic construct
  misc_feature 1..29: note = Probe
  source 1..29: mol_type = other DNA
agctccgaggtgattttcatattgaattg

SEQ ID NO: 45222 - DNA, 30 bp, synthetic construct; identical to SEQ ID NO: 314
  misc_feature 1..30: note = Probe
  source 1..30: mol_type = other DNA

SEQ ID NO: 45223 - DNA, 33 bp, synthetic construct; identical to SEQ ID NO: 3363
  misc_feature 1..33: note = Probe
  source 1..33: mol_type = other DNA

SEQ ID NO: 45224 - DNA, 35 bp, synthetic construct; identical to SEQ ID NO: 3364
  misc_feature 1..35: note = Probe
  source 1..35: mol_type = other DNA

SEQ ID NO: 45225 - DNA, 38 bp, synthetic construct; identical to SEQ ID NO: 3366
  misc_feature 1..38: note = Probe
  source 1..38: mol_type = other DNA

SEQ ID NO: 45226 - DNA, 39 bp, synthetic construct; identical to SEQ ID NO: 3367
  misc_feature 1..39: note = Probe
  source 1..39: mol_type = other DNA

SEQ ID NO: 45227 - DNA, 44 bp, synthetic construct; identical to SEQ ID NO: 3369
  misc_feature 1..44: note = Probe
  source 1..44: mol_type = other DNA

SEQ ID NO: 45228 - DNA, 45 bp, synthetic construct; identical to SEQ ID NO: 3370
  misc_feature 1..45: note = Probe
  source 1..45: mol_type = other DNA

SEQ ID NO: 45229 - DNA, 48 bp, synthetic construct; identical to SEQ ID NO: 3372
  misc_feature 1..48: note = Probe
  source 1..48: mol_type = other DNA

SEQ ID NO: 45230 - DNA, 49 bp, synthetic construct; identical to SEQ ID NO: 3373
  misc_feature 1..49: note = Probe
  source 1..49: mol_type = other DNA

SEQ ID NO: 45231 - DNA, 50 bp, synthetic construct; identical to SEQ ID NO: 3374
  misc_feature 1..50: note = Probe
  source 1..50: mol_type = other DNA

SEQ ID NO: 45232 - DNA, 32 bp, synthetic construct; identical to SEQ ID NO: 16570
  misc_feature 1..32: note = Probe
  source 1..32: mol_type = other DNA

SEQ ID NO: 45233 - DNA, 35 bp, synthetic construct
  misc_feature 1..35: note = Probe
  source 1..35: mol_type = other DNA
agctggggattgtgggttcgagtcccatctgggtc

SEQ ID NO: 45234 - DNA, 36 bp, synthetic construct; identical to SEQ ID NO: 16572
  misc_feature 1..36: note = Probe
  source 1..36: mol_type = other DNA

SEQ ID NO: 45235 - DNA, 39 bp, synthetic construct; identical to SEQ ID NO: 3375
  misc_feature 1..39: note = Probe
  source 1..39: mol_type = other DNA

SEQ ID NO: 45236 - DNA, 23 bp, synthetic construct
  misc_feature 1..23: note = Probe
  source 1..23: mol_type = other DNA
agctgttaactaagtgtttgtgg

SEQ ID NO: 45237 - DNA, 28 bp, synthetic construct
  misc_feature 1..28: note = Probe
  source 1..28: mol_type = other DNA
agctgttaactaagtgtttgtgggttta

SEQ ID NO: 45238 - DNA, 31 bp, synthetic construct
  misc_feature 1..31: note = Probe
  source 1..31: mol_type = other DNA
agctgttaactaagtgtttgtgggtttaagt

SEQ ID NO: 45239 - DNA, 39 bp, synthetic construct; identical to SEQ ID NO: 16575
  misc_feature 1..39: note = Probe
  source 1..39: mol_type = other DNA

SEQ ID NO: 45240 - DNA, 45 bp, synthetic construct
  misc_feature 1..45: note = Probe
  source 1..45: mol_type = other DNA
agctgttaactaagtgtttgtgggtttaagtcccattggtctagt

SEQ ID NO: 45241 - DNA, 46 bp, synthetic construct; identical to SEQ ID NO: 16577
  misc_feature 1..46: note = Probe
  source 1..46: mol_type = other DNA

SEQ ID NO: 45242 - DNA, 50 bp, synthetic construct
  misc_feature 1..50: note = Probe
  source 1..50: mol_type = other DNA
agctgttaactaagtgtttgtgggtttaagtcccattggtctagtaaggg

SEQ ID NO: 45243 - DNA, 24 bp, synthetic construct
  misc_feature 1..24: note = Probe
  source 1..24: mol_type = other DNA
agcttaaacccccttatttctagg

SEQ ID NO: 45244 - DNA, 25 bp, synthetic construct
  misc_feature 1..25: note = Probe
  source 1..25: mol_type = other DNA
agcttaaacccccttatttctagga

SEQ ID NO: 45245 - DNA, 25 bp, synthetic construct
  misc_feature 1..25: note = Probe
  source 1..25: mol_type = other DNA
agcttcaaacctgccggggcttctc

SEQ ID NO: 45246 - DNA, 16 bp, synthetic construct
  misc_feature 1..16: note = Probe
  source 1..16: mol_type = other DNA
agctttggggggttcg

SEQ ID NO: 45247 - DNA, 19 bp, synthetic construct
  misc_feature 1..19: note = Probe
  source 1..19: mol_type = other DNA
agctttggggggttcgatt

SEQ ID NO: 45248 - DNA, 26 bp, synthetic construct
  misc_feature 1..26: note = Probe
  source 1..26: mol_type = other DNA
agctttggggggttcgattccttcct

SEQ ID NO: 45249 - DNA, 27 bp, synthetic construct
  misc_feature 1..27: note = Probe
  source 1..27: mol_type = other DNA
agctttggggggttcgattccttcctt

SEQ ID NO: 45250 - DNA, 28 bp, synthetic construct
  misc_feature 1..28: note = Probe
  source 1..28: mol_type = other DNA
agctttggggggttcgattccttccttt

SEQ ID NO: 45251 - DNA, 32 bp, synthetic construct; identical to SEQ ID NO: 3388
  misc_feature 1..32: note = Probe
  source 1..32: mol_type = other DNA

SEQ ID NO: 45252 - DNA, 33 bp, synthetic construct; identical to SEQ ID NO: 3389
  misc_feature 1..33: note = Probe
  source 1..33: mol_type = other DNA

SEQ ID NO: 45253 - DNA, 34 bp, synthetic construct; identical to SEQ ID NO: 3390
  misc_feature 1..34: note = Probe
  source 1..34: mol_type = other DNA

SEQ ID NO: 45254 - DNA, 35 bp, synthetic construct; identical to SEQ ID NO: 3391
  misc_feature 1..35: note = Probe
  source 1..35: mol_type = other DNA

SEQ ID NO: 45255 - DNA, 26 bp, synthetic construct
  misc_feature 1..26: note = Probe
  source 1..26: mol_type = other DNA
agctttgggtgctaatggtggagtta

SEQ ID NO: 45256 - DNA, 35 bp, synthetic construct; identical to SEQ ID NO: 16616
  misc_feature 1..35: note = Probe
  source 1..35: mol_type = other DNA

SEQ ID NO: 45257 - DNA, 30 bp, synthetic construct; identical to SEQ ID NO: 16622
  misc_feature 1..30: note = Probe
  source 1..30: mol_type = other DNA

SEQ ID NO: 45258 - DNA, 31 bp, synthetic construct; identical to SEQ ID NO: 3397
  misc_feature 1..31: note = Probe
  source 1..31: mol_type = other DNA

SEQ ID NO: 45259 - DNA, 32 bp, synthetic construct; identical to SEQ ID NO: 3398
  misc_feature 1..32: note = Probe
  source 1..32: mol_type = other DNA

SEQ ID NO: 45260 - DNA, 19 bp, synthetic construct
  misc_feature 1..19: note = Probe
  source 1..19: mol_type = other DNA
aggagatttcaacttaact

SEQ ID NO: 45261 - DNA, 23 bp, synthetic construct
  misc_feature 1..23: note = Probe
  source 1..23: mol_type = other DNA
aggagatttcaacttaacttgac

SEQ ID NO: 45262 - DNA, 24 bp, synthetic construct
  misc_feature 1..24: note = Probe
  source 1..24: mol_type = other DNA
aggagatttcaacttaacttgacc

SEQ ID NO: 45263 - DNA, 25 bp, synthetic construct
  misc_feature 1..25: note = Probe
  source 1..25: mol_type = other DNA
aggagatttcaacttaacttgaccg

SEQ ID NO: 45264 - DNA, 26 bp, synthetic construct
  misc_feature 1..26: note = Probe
  source 1..26: mol_type = other DNA
aggagatttcaacttaacttgaccgc

SEQ ID NO: 45265 - DNA, 27 bp, synthetic construct
  misc_feature 1..27: note = Probe
  source 1..27: mol_type = other DNA
aggagatttcaacttaacttgaccgct

SEQ ID NO: 45266 - DNA, 28 bp, synthetic construct
  misc_feature 1..28: note = Probe
  source 1..28: mol_type = other DNA
aggagatttcaacttaacttgaccgctc

SEQ ID NO: 45267 - DNA, 29 bp, synthetic construct
  misc_feature 1..29: note = Probe
  source 1..29: mol_type = other DNA
aggagatttcaacttaacttgaccgctct

SEQ ID NO: 45268 - DNA, 31 bp, synthetic construct; identical to SEQ ID NO: 3411
  misc_feature 1..31: note = Probe
  source 1..31: mol_type = other DNA

SEQ ID NO: 45269 - DNA, 32 bp, synthetic construct; identical to SEQ ID NO: 3412
  misc_feature 1..32: note = Probe
  source 1..32: mol_type = other DNA

SEQ ID NO: 45270 - DNA, 33 bp, synthetic construct; identical to SEQ ID NO: 3413
  misc_feature 1..33: note = Probe
  source 1..33: mol_type = other DNA

SEQ ID NO: 45271 - DNA, 34 bp, synthetic construct; identical to SEQ ID NO: 3414
  misc_feature 1..34: note = Probe
  source 1..34: mol_type = other DNA

SEQ ID NO: 45272 - DNA, 17 bp, synthetic construct
  misc_feature 1..17: note = Probe
  source 1..17: mol_type = other DNA
aggagcttaaaccccct

SEQ ID NO: 45273 - DNA, 27 bp, synthetic construct
  misc_feature 1..27: note = Probe
  source 1..27: mol_type = other DNA
aggagcttaaacccccttatttctagg

SEQ ID NO: 45274 - DNA, 21 bp, synthetic construct
  misc_feature 1..21: note = Probe
  source 1..21: mol_type = other DNA
aggatggccgagcggtctaag

SEQ ID NO: 45275 - DNA, 21 bp, synthetic construct
  misc_feature 1..21: note = Probe
  source 1..21: mol_type = other DNA
aggatggccgagtggtctaag

SEQ ID NO: 45276 - DNA, 27 bp, synthetic construct
  misc_feature 1..27: note = Probe
  source 1..27: mol_type = other DNA
aggatggggtgtgataggtggcacgga

SEQ ID NO: 45277 - DNA, 29 bp, synthetic construct
  misc_feature 1..29: note = Probe
  source 1..29: mol_type = other DNA
aggattcctggttttcacccaggcggccc

SEQ ID NO: 45278 - DNA, 50 bp, synthetic construct; identical to SEQ ID NO: 3418
  misc_feature 1..50: note = Probe
  source 1..50: mol_type = other DNA

SEQ ID NO: 45279 - DNA, 50 bp, synthetic construct
  misc_feature 1..50: note = Probe
  source 1..50: mol_type = other DNA
aggattcctggttttcacccaggtggcccgggttcgactcccggtatggg

SEQ ID NO: 45280 - DNA, 28 bp, synthetic construct
  misc_feature 1..28: note = Probe
  source 1..28: mol_type = other DNA
aggattcggcgctctcaccgccgcggcc

SEQ ID NO: 45281 - DNA, 30 bp, synthetic construct; identical to SEQ ID NO: 16665
  misc_feature 1..30: note = Probe
  source 1..30: mol_type = other DNA

SEQ ID NO: 45282 - DNA, 50 bp, synthetic construct; identical to SEQ ID NO: 3419
  misc_feature 1..50: note = Probe
  source 1..50: mol_type = other DNA

SEQ ID NO: 45283 - DNA, 32 bp, synthetic construct
  misc_feature 1..32: note = Probe
  source 1..32: mol_type = other DNA
aggccccaaaaattttggtgcaactccaaata

SEQ ID NO: 45284 - DNA, 41 bp, synthetic construct
  misc_feature 1..41: note = Probe
  source 1..41: mol_type = other DNA
aggccccaaaaattttggtgcaactccaaataaaagtaata

SEQ ID NO: 45285 - DNA, 24 bp, synthetic construct
  misc_feature 1..24: note = Probe
  source 1..24: mol_type = other DNA
aggccccgggttcaatccccggca

SEQ ID NO: 45286 - DNA, 32 bp, synthetic construct
  misc_feature 1..32: note = Probe
  source 1..32: mol_type = other DNA
aggccccgggttcgatccccggcatctccatt

SEQ ID NO: 45287 - DNA, 33 bp, synthetic construct; identical to SEQ ID NO: 16671
  misc_feature 1..33: note = Probe
  source 1..33: mol_type = other DNA

SEQ ID NO: 45288 - DNA, 33 bp, synthetic construct
  misc_feature 1..33: note = Probe
  source 1..33: mol_type = other DNA
aggcctcgtggcgcaacggtagcgcgtctgact

SEQ ID NO: 45289 - DNA, 35 bp, synthetic construct; identical to SEQ ID NO: 38270
  misc_feature 1..35: note = Probe
  source 1..35: mol_type = other DNA

SEQ ID NO: 45290 - DNA, 36 bp, synthetic construct; identical to SEQ ID NO: 16675
  misc_feature 1..36: note = Probe
  source 1..36: mol_type = other DNA

SEQ ID NO: 45291 - DNA, 37 bp, synthetic construct; identical to SEQ ID NO: 16676
  misc_feature 1..37: note = Probe
  source 1..37: mol_type = other DNA

SEQ ID NO: 45292 - DNA, 40 bp, synthetic construct; identical to SEQ ID NO: 16678
  misc_feature 1..40: note = Probe
  source 1..40: mol_type = other DNA

SEQ ID NO: 45293 - DNA, 29 bp, synthetic construct
  misc_feature 1..29: note = Probe
  source 1..29: mol_type = other DNA
aggcggcccgggttcgactcccggtgtgg

SEQ ID NO: 45294 - DNA, 33 bp, synthetic construct; identical to SEQ ID NO: 327
  misc_feature 1..33: note = Probe
  source 1..33: mol_type = other DNA

SEQ ID NO: 45295 - DNA, 35 bp, synthetic construct; identical to SEQ ID NO: 3427
  misc_feature 1..35: note = Probe
  source 1..35: mol_type = other DNA

SEQ ID NO: 45296 - DNA, 44 bp, synthetic construct; identical to SEQ ID NO: 16682
  misc_feature 1..44: note = Probe
  source 1..44: mol_type = other DNA

SEQ ID NO: 45297 - DNA, 50 bp, synthetic construct; identical to SEQ ID NO: 38275
  misc_feature 1..50: note = Probe
  source 1..50: mol_type = other DNA

SEQ ID NO: 45298 - DNA, 25 bp, synthetic construct
  misc_feature 1..25: note = Probe
  source 1..25: mol_type = other DNA
aggctaaatcctatatatcttaatg

SEQ ID NO: 45299 - DNA, 28 bp, synthetic construct
  misc_feature 1..28: note = Probe
  source 1..28: mol_type = other DNA
aggctgcgtgttcgaatcacgtcggggt

SEQ ID NO: 45300 - DNA, 33 bp, synthetic construct
  misc_feature 1..33: note = Probe
  source 1..33: mol_type = other DNA
aggctgcgtgttcgaatcacgtcggggtcaaac

SEQ ID NO: 45301 - DNA, 23 bp, synthetic construct
  misc_feature 1..23: note = Probe
  source 1..23: mol_type = other DNA
aggcttacgaccccttatttacc

SEQ ID NO: 45302 - DNA, 24 bp, synthetic construct
  misc_feature 1..24: note = Probe
  source 1..24: mol_type = other DNA
aggcttacgaccccttatttaccg

SEQ ID NO: 45303 - DNA, 25 bp, synthetic construct
  misc_feature 1..25: note = Probe
  source 1..25: mol_type = other DNA
agggatgggttcgattctcatagtc

SEQ ID NO: 45304 - DNA, 26 bp, synthetic construct
  misc_feature 1..26: note = Probe
  source 1..26: mol_type = other DNA
agggatgggttcgattctcatagtcc

SEQ ID NO: 45305 - DNA, 30 bp, synthetic construct
  misc_feature 1..30: note = Probe
  source 1..30: mol_type = other DNA
agggatgggttcgattctcatagtcctaga

SEQ ID NO: 45306 - DNA, 32 bp, synthetic construct; identical to SEQ ID NO: 3433
  misc_feature 1..32: note = Probe
  source 1..32: mol_type = other DNA

SEQ ID NO: 45307 - DNA, 25 bp, synthetic construct
  misc_feature 1..25: note = Probe
  source 1..25: mol_type = other DNA
agggattgtgggttcgagtcccatc

SEQ ID NO: 45308 - DNA, 28 bp, synthetic construct
  misc_feature 1..28: note = Probe
  source 1..28: mol_type = other DNA
agggattgtgggttcgagtcccatctgg

SEQ ID NO: 45309 - DNA, 32 bp, synthetic construct; identical to SEQ ID NO: 3436
  misc_feature 1..32: note = Probe
  source 1..32: mol_type = other DNA

SEQ ID NO: 45310 - DNA, 33 bp, synthetic construct
  misc_feature 1..33: note = Probe
  source 1..33: mol_type = other DNA
agggggtatagctcagtggtagagcatttgact

SEQ ID NO: 45311 - DNA, 17 bp, synthetic construct
  misc_feature 1..17: note = Probe
  source 1..17: mol_type = other DNA
aggggtatgattctcgc

SEQ ID NO: 45312 - DNA, 18 bp, synthetic construct
  misc_feature 1..18: note = Probe
  source 1..18: mol_type = other DNA
aggggtatgattctcgct

SEQ ID NO: 45313 - DNA, 26 bp, synthetic construct
  misc_feature 1..26: note = Probe
  source 1..26: mol_type = other DNA
aggggttaggcctctttttaccagct

SEQ ID NO: 45314 - DNA, 30 bp, synthetic construct; identical to SEQ ID NO: 9178
  misc_feature 1..30: note = Probe
  source 1..30: mol_type = other DNA

SEQ ID NO: 45315 - DNA, 28 bp, synthetic construct
  misc_feature 1..28: note = Probe
  source 1..28: mol_type = other DNA
agggtcgtgggttcgagccccacgttgg

SEQ ID NO: 45316 - DNA, 29 bp, synthetic construct
  misc_feature 1..29: note = Probe
  source 1..29: mol_type = other DNA
agggtcgtgggttcgagccccacgttggg

SEQ ID NO: 45317 - DNA, 31 bp, synthetic construct; identical to SEQ ID NO: 333
  misc_feature 1..31: note = Probe
  source 1..31: mol_type = other DNA

SEQ ID NO: 45318 - DNA, 32 bp, synthetic construct
  misc_feature 1..32: note = Probe
  source 1..32: mol_type = other DNA
agggtcgtgggttcgagccccacgttgggcgc

SEQ ID NO: 45319 - DNA, 31 bp, synthetic construct
  misc_feature 1..31: note = Probe
  source 1..31: mol_type = other DNA
agggtgcttagctgttaactaagtgtttgtg

SEQ ID NO: 45320 - DNA, 22 bp, synthetic construct
  misc_feature 1..22: note = Probe
  source 1..22: mol_type = other DNA
aggtcagctaaataagctatcg

SEQ ID NO: 45321 - DNA, 24 bp, synthetic construct
  misc_feature 1..24: note = Probe
  source 1..24: mol_type = other DNA
aggtcagctaaataagctatcggg

SEQ ID NO: 45322 - DNA, 25 bp, synthetic construct
  misc_feature 1..25: note = Probe
  source 1..25: mol_type = other DNA
aggtcagctaaataagctatcgggc

SEQ ID NO: 45323 - DNA, 26 bp, synthetic construct
  misc_feature 1..26: note = Probe
  source 1..26: mol_type = other DNA
aggtcagctaaataagctatcgggcc

SEQ ID NO: 45324 - DNA, 28 bp, synthetic construct
  misc_feature 1..28: note = Probe
  source 1..28: mol_type = other DNA
aggtcagctaaataagctatcgggccca

SEQ ID NO: 45325 - DNA, 29 bp, synthetic construct
  misc_feature 1..29: note = Probe
  source 1..29: mol_type = other DNA
aggtcagctaaataagctatcgggcccat

SEQ ID NO: 45326 - DNA, 30 bp, synthetic construct; identical to SEQ ID NO: 3454
  misc_feature 1..30: note = Probe
  source 1..30: mol_type = other DNA

SEQ ID NO: 45327 - DNA, 31 bp, synthetic construct; identical to SEQ ID NO: 3455
  misc_feature 1..31: note = Probe
  source 1..31: mol_type = other DNA

SEQ ID NO: 45328 - DNA, 32 bp, synthetic construct; identical to SEQ ID NO: 3456
  misc_feature 1..32: note = Probe
  source 1..32: mol_type = other DNA

SEQ ID NO: 45329 - DNA, 33 bp, synthetic construct; identical to SEQ ID NO: 3457
  misc_feature 1..33: note = Probe
  source 1..33: mol_type = other DNA

SEQ ID NO: 45330 - DNA, 34 bp, synthetic construct; identical to SEQ ID NO: 3458
  misc_feature 1..34: note = Probe
  source 1..34: mol_type = other DNA

SEQ ID NO: 45331 - DNA, 37 bp, synthetic construct; identical to SEQ ID NO: 3461
  misc_feature 1..37: note = Probe
  source 1..37: mol_type = other DNA

SEQ ID NO: 45332 - DNA, 38 bp, synthetic construct; identical to SEQ ID NO: 3462
  misc_feature 1..38: note = Probe
  source 1..38: mol_type = other DNA

SEQ ID NO: 45333 - DNA, 39 bp, synthetic construct; identical to SEQ ID NO: 3463
  misc_feature 1..39: note = Probe
  source 1..39: mol_type = other DNA

SEQ ID NO: 45334 - DNA, 40 bp, synthetic construct; identical to SEQ ID NO: 3464
  misc_feature 1..40: note = Probe
  source 1..40: mol_type = other DNA

SEQ ID NO: 45335 - DNA, 41 bp, synthetic construct; identical to SEQ ID NO: 3465
  misc_feature 1..41: note = Probe
  source 1..41: mol_type = other DNA

SEQ ID NO: 45336 - DNA, 42 bp, synthetic construct; identical to SEQ ID NO: 3466
  misc_feature 1..42: note = Probe
  source 1..42: mol_type = other DNA

SEQ ID NO: 45337 - DNA, 43 bp, synthetic construct; identical to SEQ ID NO: 3467
  misc_feature 1..43: note = Probe
  source 1..43: mol_type = other DNA

SEQ ID NO: 45338 - DNA, 44 bp, synthetic construct; identical to SEQ ID NO: 3468
  misc_feature 1..44: note = Probe
  source 1..44: mol_type = other DNA

SEQ ID NO: 45339 - DNA, 45 bp, synthetic construct; identical to SEQ ID NO: 3469
  misc_feature 1..45: note = Probe
  source 1..45: mol_type = other DNA

SEQ ID NO: 45340 - DNA, 46 bp, synthetic construct; identical to SEQ ID NO: 3470
  misc_feature 1..46: note = Probe
  source 1..46: mol_type = other DNA

SEQ ID NO: 45341 - DNA, 49 bp, synthetic construct; identical to SEQ ID NO: 3473
  misc_feature 1..49: note = Probe
  source 1..49: mol_type = other DNA

SEQ ID NO: 45342 - DNA, 50 bp, synthetic construct; identical to SEQ ID NO: 3474
  misc_feature 1..50: note = Probe
  source 1..50: mol_type = other DNA

SEQ ID NO: 45343 - DNA, 33 bp, synthetic construct
  misc_feature 1..33: note = Probe
  source 1..33: mol_type = other DNA
aggtccccggttcgaaaccgggcggaaacacct

SEQ ID NO: 45344 - DNA, 31 bp, synthetic construct
  misc_feature 1..31: note = Probe
  source 1..31: mol_type = other DNA
aggtcccgggttcaaatcccggacgagcccc

SEQ ID NO: 45345 - DNA, 33 bp, synthetic construct; identical to SEQ ID NO: 16757
  misc_feature 1..33: note = Probe
  source 1..33: mol_type = other DNA

SEQ ID NO: 45346 - DNA, 33 bp, synthetic construct; identical to SEQ ID NO: 16758
  misc_feature 1..33: note = Probe
  source 1..33: mol_type = other DNA

SEQ ID NO: 45347 - DNA, 33 bp, synthetic construct; identical to SEQ ID NO: 3476
  misc_feature 1..33: note = Probe
  source 1..33: mol_type = other DNA

SEQ ID NO: 45348 - DNA, 31 bp, synthetic construct
  misc_feature 1..31: note = Probe
  source 1..31: mol_type = other DNA
aggtcctgagttcgaacctcagagggggcaa

SEQ ID NO: 45349 - DNA, 31 bp, synthetic construct
  misc_feature 1..31: note = Probe
  source 1..31: mol_type = other DNA
aggtcctgagttcgaacctcagagggggcag

SEQ ID NO: 45350 - DNA, 32 bp, synthetic construct
  misc_feature 1..32: note = Probe
  source 1..32: mol_type = other DNA
aggtcctgagttcgaacctcagagggggcagc

SEQ ID NO: 45351 - DNA, 33 bp, synthetic construct
  misc_feature 1..33: note = Probe
  source 1..33: mol_type = other DNA
aggtcctgagttcgaacctcagagggggcagct

SEQ ID NO: 45352 - DNA, 37 bp, synthetic construct; identical to SEQ ID NO: 16766
  misc_feature 1..37: note = Probe
  source 1..37: mol_type = other DNA

SEQ ID NO: 45353 - DNA, 38 bp, synthetic construct; identical to SEQ ID NO: 16767
  misc_feature 1..38: note = Probe
  source 1..38: mol_type = other DNA

SEQ ID NO: 45354 - DNA, 39 bp, synthetic construct; identical to SEQ ID NO: 16768
  misc_feature 1..39: note = Probe
  source 1..39: mol_type = other DNA

SEQ ID NO: 45355 - DNA, 40 bp, synthetic construct; identical to SEQ ID NO: 16769
  misc_feature 1..40: note = Probe
  source 1..40: mol_type = other DNA

SEQ ID NO: 45356 - DNA, 41 bp, synthetic construct; identical to SEQ ID NO: 16770
  misc_feature 1..41: note = Probe
  source 1..41: mol_type = other DNA

SEQ ID NO: 45357 - DNA, 32 bp, synthetic construct; identical to SEQ ID NO: 3477
  misc_feature 1..32: note = Probe
  source 1..32: mol_type = other DNA

SEQ ID NO: 45358 - DNA, 33 bp, synthetic construct; identical to SEQ ID NO: 3478
  misc_feature 1..33: note = Probe
  source 1..33: mol_type = other DNA

SEQ ID NO: 45359 - DNA, 33 bp, synthetic construct
  misc_feature 1..33: note = Probe
  source 1..33: mol_type = other DNA
aggtcctgggttcgagccccagtggaaccatag

SEQ ID NO: 45360 - DNA, 33 bp, synthetic construct; identical to SEQ ID NO: 3479
  misc_feature 1..33: note = Probe
  source 1..33: mol_type = other DNA

SEQ ID NO: 45361 - DNA, 31 bp, synthetic construct
  misc_feature 1..31: note = Probe
  source 1..31: mol_type = other DNA
aggtcgcgggttcgatccccgtacgggccac

SEQ ID NO: 45362 - DNA, 33 bp, synthetic construct; identical to SEQ ID NO: 3483
  misc_feature 1..33: note = Probe
  source 1..33: mol_type = other DNA

SEQ ID NO: 45363 - DNA, 33 bp, synthetic construct; identical to SEQ ID NO: 3485
  misc_feature 1..33: note = Probe
  source 1..33: mol_type = other DNA

SEQ ID NO: 45364 - DNA, 33 bp, synthetic construct; identical to SEQ ID NO: 16780
  misc_feature 1..33: note = Probe
  source 1..33: mol_type = other DNA

SEQ ID NO: 45365 - DNA, 30 bp, synthetic construct
  misc_feature 1..30: note = Probe
  source 1..30: mol_type = other DNA
aggtcgtgagttcgatcctcacacggggca

SEQ ID NO: 45366 - DNA, 33 bp, synthetic construct; identical to SEQ ID NO: 3486
  misc_feature 1..33: note = Probe
  source 1..33: mol_type = other DNA

SEQ ID NO: 45367 - DNA, 29 bp, synthetic construct
  misc_feature 1..29: note = Probe
  source 1..29: mol_type = other DNA
aggtgcctcgttagcgcagtaggtagcgc

SEQ ID NO: 45368 - DNA, 35 bp, synthetic construct; identical to SEQ ID NO: 16794
  misc_feature 1..35: note = Probe
  source 1..35: mol_type = other DNA

SEQ ID NO: 45369 - DNA, 36 bp, synthetic construct; identical to SEQ ID NO: 16795
  misc_feature 1..36: note = Probe
  source 1..36: mol_type = other DNA

SEQ ID NO: 45370 - DNA, 20 bp, synthetic construct
  misc_feature 1..20: note = Probe
  source 1..20: mol_type = other DNA
aggtggcacggagaattttg

SEQ ID NO: 45371 - DNA, 31 bp, synthetic construct; identical to SEQ ID NO: 12739
  misc_feature 1..31: note = Probe
  source 1..31: mol_type = other DNA

SEQ ID NO: 45372 - DNA, 32 bp, synthetic construct; identical to SEQ ID NO: 3488
  misc_feature 1..32: note = Probe
  source 1..32: mol_type = other DNA

SEQ ID NO: 45373 - DNA, 35 bp, synthetic construct; identical to SEQ ID NO: 3490
  misc_feature 1..35: note = Probe
  source 1..35: mol_type = other DNA

SEQ ID NO: 45374 - DNA, 27 bp, synthetic construct
  misc_feature 1..27: note = Probe
  source 1..27: mol_type = other DNA
aggttccgggttcgagtcccggcggag

SEQ ID NO: 45375 - DNA, 28 bp, synthetic construct
  misc_feature 1..28: note = Probe
  source 1..28: mol_type = other DNA
aggttccgggttcgagtcccggcggagt

SEQ ID NO: 45376 - DNA, 21 bp, synthetic construct
  misc_feature 1..21: note = Probe
  source 1..21: mol_type = other DNA
aggttcgaatcctgccgacta

SEQ ID NO: 45377 - DNA, 26 bp, synthetic construct
  misc_feature 1..26: note = Probe
  source 1..26: mol_type = other DNA
aggttcgaatcctgctcacagcgtca

SEQ ID NO: 45378 - DNA, 26 bp, synthetic construct
  misc_feature 1..26: note = Probe
  source 1..26: mol_type = other DNA
aggttcgaatcctgttcgtgacgggt

SEQ ID NO: 45379 - DNA, 33 bp, synthetic construct; identical to SEQ ID NO: 3495
  misc_feature 1..33: note = Probe
  source 1..33: mol_type = other DNA

SEQ ID NO: 45380 - DNA, 32 bp, synthetic construct
  misc_feature 1..32: note = Probe
  source 1..32: mol_type = other DNA
aggttggtggttcgagcccacccagggacgcc

SEQ ID NO: 45381 - DNA, 33 bp, synthetic construct; identical to SEQ ID NO: 3496
  misc_feature 1..33: note = Probe
  source 1..33: mol_type = other DNA

SEQ ID NO: 45382 - DNA, 28 bp, synthetic construct
  misc_feature 1..28: note = Probe
  source 1..28: mol_type = other DNA
aggttggtggttcgatcccacccaggga

SEQ ID NO: 45383 - DNA, 28 bp, synthetic construct
  misc_feature 1..28: note = Probe
  source 1..28: mol_type = other DNA
aggttgtgagttcgagcctcacctggag

SEQ ID NO: 45384 - DNA, 30 bp, synthetic construct
  misc_feature 1..30: note = Probe
  source 1..30: mol_type = other DNA
aggttgtgagttcgagcctcacctggagca

SEQ ID NO: 45385 - DNA, 32 bp, synthetic construct
  misc_feature 1..32: note = Probe
  source 1..32: mol_type = other DNA
aggttgtgagttcgagcctcacctggagcatt

SEQ ID NO: 45386 - DNA, 33 bp, synthetic construct; identical to SEQ ID NO: 16822
  misc_feature 1..33: note = Probe
  source 1..33: mol_type = other DNA

SEQ ID NO: 45387 - DNA, 27 bp, synthetic construct
  misc_feature 1..27: note = Probe
  source 1..27: mol_type = other DNA
aggtttggtcctagcctttctattagc

SEQ ID NO: 45388 - DNA, 43 bp, synthetic construct
  misc_feature 1..43: note = Probe
  source 1..43: mol_type = other DNA
agtaaacaggagatcctgggttcgaatcccagcggggccttac

SEQ ID NO: 45389 - DNA, 43 bp, synthetic construct
  misc_feature 1..43: note = Probe
  source 1..43: mol_type = other DNA
agtaaacaggagatcctgggttcgaatcccagcggtgcctccg

SEQ ID NO: 45390 - DNA, 25 bp, synthetic construct
  misc_feature 1..25: note = Probe
  source 1..25: mol_type = other DNA
agtaaataataggagcttaaacccc
